United States Patent Application Publication US 2014/0004565 A1 - sequence listing, part 124

SEQ ID NO: 3115009 - RNA, 19 nt, Artificial Sequence
  Description of Artificial Sequence: Synthetic oligonucleotide
cgccggcgucguucugcau

SEQ ID NO: 3115010 - RNA, 19 nt, Artificial Sequence
  Description of Artificial Sequence: Synthetic oligonucleotide
aaaaucuccacccugaauc

SEQ ID NO: 3115011 - RNA, 19 nt, Artificial Sequence
  Description of Artificial Sequence: Synthetic oligonucleotide
uuuaugacccuauggaagg

SEQ ID NO: 3115012 - RNA, 19 nt, Artificial Sequence
  Description of Artificial Sequence: Synthetic oligonucleotide
caugaaauccuuuaugacc

SEQ ID NO: 3115013 - RNA, 19 nt, Artificial Sequence
  Description of Artificial Sequence: Synthetic oligonucleotide
augaaauccuuuaugaccc

SEQ ID NO: 3115014 - RNA, 19 nt, Artificial Sequence
  Description of Artificial Sequence: Synthetic oligonucleotide
aaugcuagcaacuccagua

SEQ ID NO: 3115015 - RNA, 19 nt, Artificial Sequence
  Description of Artificial Sequence: Synthetic oligonucleotide
uccuuuaugacccuaugga

SEQ ID NO: 3115016 - RNA, 19 nt, Artificial Sequence
  Description of Artificial Sequence: Synthetic oligonucleotide
cuuuguauccuauuggaac

SEQ ID NO: 3115017 - RNA, 19 nt, Artificial Sequence
  Description of Artificial Sequence: Synthetic oligonucleotide
cuuuaugacccuauggaag

SEQ ID NO: 3115018 - RNA, 19 nt, Artificial Sequence
  Description of Artificial Sequence: Synthetic oligonucleotide
uuuguauccuauuggaaca

SEQ ID NO: 3115019 - RNA, 19 nt, Artificial Sequence
  Description of Artificial Sequence: Synthetic oligonucleotide
cuucaugcgaccaaccucc

SEQ ID NO: 3115020 - RNA, 19 nt, Artificial Sequence
  Description of Artificial Sequence: Synthetic oligonucleotide
aaugggccucgguaaaugc

SEQ ID NO: 3115021 - RNA, 19 nt, Artificial Sequence
  Description of Artificial Sequence: Synthetic oligonucleotide
gagaccaccggauugacug

SEQ ID NO: 3115022 - RNA, 19 nt, Artificial Sequence
  Description of Artificial Sequence: Synthetic oligonucleotide
uuccuuuguauccuauugg

SEQ ID NO: 3115023 - RNA, 19 nt, Artificial Sequence
  Description of Artificial Sequence: Synthetic oligonucleotide
uggaacaccaucuuuucug

SEQ ID NO: 3115024 - RNA, 19 nt, Artificial Sequence
  Description of Artificial Sequence: Synthetic oligonucleotide
uccuauuggaacaccaucu

SEQ ID NO: 3115025 - RNA, 19 nt, Artificial Sequence
  Description of Artificial Sequence: Synthetic oligonucleotide
uuuucugaacucuccagug

SEQ ID NO: 3115026 - RNA, 19 nt, Artificial Sequence
  Description of Artificial Sequence: Synthetic oligonucleotide
caugcgaccaaccuccugg

SEQ ID NO: 3115027 - RNA, 19 nt, Artificial Sequence
  Description of Artificial Sequence: Synthetic oligonucleotide
uauuggaacaccaucuuuu

SEQ ID NO: 3115028 - RNA, 19 nt, Artificial Sequence
  Description of Artificial Sequence: Synthetic oligonucleotide
aggugcuuccuuuguaucc

SEQ ID NO: 3115029 - RNA, 19 nt, Artificial Sequence
  Description of Artificial Sequence: Synthetic oligonucleotide
ugaaucaugaaauccuuua

SEQ ID NO: 3115030 - RNA, 19 nt, Artificial Sequence
  Description of Artificial Sequence: Synthetic oligonucleotide
uccaguaccaucuccauua

SEQ ID NO: 3115031 - RNA, 19 nt, Artificial Sequence
  Description of Artificial Sequence: Synthetic oligonucleotide
auuggaacaccaucuuuuc

SEQ ID NO: 3115032 - RNA, 19 nt, Artificial Sequence
  Description of Artificial Sequence: Synthetic oligonucleotide
aauugccugaaguucucug

SEQ ID NO: 3115033 - RNA, 19 nt, Artificial Sequence
  Description of Artificial Sequence: Synthetic oligonucleotide
cacgucugcaaacagcucg

SEQ ID NO: 3115034 - RNA, 19 nt, Artificial Sequence
  Description of Artificial Sequence: Synthetic oligonucleotide
auccuuuaugacccuaugg

SEQ ID NO: 3115035 - RNA, 19 nt, Artificial Sequence
  Description of Artificial Sequence: Synthetic oligonucleotide
ucuuuucugaacucuccag

SEQ ID NO: 3115036 - RNA, 19 nt, Artificial Sequence
  Description of Artificial Sequence: Synthetic oligonucleotide
uucugaacucuccagugca

SEQ ID NO: 3115037 - RNA, 19 nt, Artificial Sequence
  Description of Artificial Sequence: Synthetic oligonucleotide
auccuauuggaacaccauc

SEQ ID NO: 3115038 - RNA, 19 nt, Artificial Sequence
  Description of Artificial Sequence: Synthetic oligonucleotide
uccuuuguauccuauugga

SEQ ID NO: 3115039 - RNA, 19 nt, Artificial Sequence
  Description of Artificial Sequence: Synthetic oligonucleotide
gacaucaaagagaccaccg

SEQ ID NO: 3115040 - RNA, 19 nt, Artificial Sequence
  Description of Artificial Sequence: Synthetic oligonucleotide
uuucugaacucuccagugc

SEQ ID NO: 3115041 - RNA, 19 nt, Artificial Sequence
  Description of Artificial Sequence: Synthetic oligonucleotide
ucaugaaauccuuuaugac

SEQ ID NO: 3115042 - RNA, 19 nt, Artificial Sequence
  Description of Artificial Sequence: Synthetic oligonucleotide
aaggugcuuccuuuguauc

SEQ ID NO: 3115043 - RNA, 19 nt, Artificial Sequence
  Description of Artificial Sequence: Synthetic oligonucleotide
aauccuuuaugacccuaug

SEQ ID NO: 3115044 - RNA, 19 nt, Artificial Sequence
  Description of Artificial Sequence: Synthetic oligonucleotide
uccagugcagaauugccug

SEQ ID NO: 3115045 - RNA, 19 nt, Artificial Sequence
  Description of Artificial Sequence: Synthetic oligonucleotide
cucgguaaaugcuagcaac

SEQ ID NO: 3115046 - RNA, 19 nt, Artificial Sequence
  Description of Artificial Sequence: Synthetic oligonucleotide
augcuagcaacuccaguac

SEQ ID NO: 3115047 - RNA, 19 nt, Artificial Sequence
  Description of Artificial Sequence: Synthetic oligonucleotide
uucucugccgucuuaggca

SEQ ID NO: 3115048 - RNA, 19 nt, Artificial Sequence
  Description of Artificial Sequence: Synthetic oligonucleotide
acccugaaucaugaaaucc

SEQ ID NO: 3115049 - RNA, 19 nt, Artificial Sequence
  Description of Artificial Sequence: Synthetic oligonucleotide
aaacagcucgaucuucaug

SEQ ID NO: 3115050 - RNA, 19 nt, Artificial Sequence
  Description of Artificial Sequence: Synthetic oligonucleotide
cuuccuuuguauccuauug

SEQ ID NO: 3115051 - RNA, 19 nt, Artificial Sequence
  Description of Artificial Sequence: Synthetic oligonucleotide
uaaaugcuagcaacuccag

SEQ ID NO: 3115052 - RNA, 19 nt, Artificial Sequence
  Description of Artificial Sequence: Synthetic oligonucleotide
ucgguaaaugcuagcaacu

SEQ ID NO: 3115053 - RNA, 19 nt, Artificial Sequence
  Description of Artificial Sequence: Synthetic oligonucleotide
aaagagaccaccggauuga

SEQ ID NO: 3115054 - RNA, 19 nt, Artificial Sequence
  Description of Artificial Sequence: Synthetic oligonucleotide
aaaugcuagcaacuccagu

SEQ ID NO: 3115055 - RNA, 19 nt, Artificial Sequence
  Description of Artificial Sequence: Synthetic oligonucleotide
ucuucaugcgaccaaccuc

SEQ ID NO: 3115056 - RNA, 19 nt, Artificial Sequence
  Description of Artificial Sequence: Synthetic oligonucleotide
ucuccagugcagaauugcc

SEQ ID NO: 3115057 - RNA, 19 nt, Artificial Sequence
  Description of Artificial Sequence: Synthetic oligonucleotide
uugccugaaguucucugcc

SEQ ID NO: 3115058 - RNA, 19 nt, Artificial Sequence
  Description of Artificial Sequence: Synthetic oligonucleotide
caucuuuucugaacucucc

SEQ ID NO: 3115059 - RNA, 19 nt, Artificial Sequence
  Description of Artificial Sequence: Synthetic oligonucleotide
gcugacaucaaagagacca

SEQ ID NO: 3115060 - RNA, 19 nt, Artificial Sequence
  Description of Artificial Sequence: Synthetic oligonucleotide
guaaaugcuagcaacucca

SEQ ID NO: 3115061 - RNA, 19 nt, Artificial Sequence
  Description of Artificial Sequence: Synthetic oligonucleotide
caaagagaccaccggauug

SEQ ID NO: 3115062 - RNA, 19 nt, Artificial Sequence
  Description of Artificial Sequence: Synthetic oligonucleotide
agcucgaucuucaugcgac

SEQ ID NO: 3115063 - RNA, 19 nt, Artificial Sequence
  Description of Artificial Sequence: Synthetic oligonucleotide
ugcagaauugccugaaguu

SEQ ID NO: 3115064 - RNA, 19 nt, Artificial Sequence
  Description of Artificial Sequence: Synthetic oligonucleotide
accaucuccauuaacaaaa

SEQ ID NO: 3115065 - RNA, 19 nt, Artificial Sequence
  Description of Artificial Sequence: Synthetic oligonucleotide
ucugaacucuccagugcag

SEQ ID NO: 3115066 - RNA, 19 nt, Artificial Sequence
  Description of Artificial Sequence: Synthetic oligonucleotide
aaguucucugccgucuuag

SEQ ID NO: 3115067 - RNA, 19 nt, Artificial Sequence
  Description of Artificial Sequence: Synthetic oligonucleotide
gguaaaugcuagcaacucc

SEQ ID NO: 3115068 - RNA, 19 nt, Artificial Sequence
  Description of Artificial Sequence: Synthetic oligonucleotide
augacccuauggaaggugc

SEQ ID NO: 3115069 - RNA, 19 nt, Artificial Sequence
  Description of Artificial Sequence: Synthetic oligonucleotide
aacuccaguaccaucucca

SEQ ID NO: 3115070 - RNA, 19 nt, Artificial Sequence
  Description of Artificial Sequence: Synthetic oligonucleotide
aaaugggccucgguaaaug

SEQ ID NO: 3115071 - RNA, 19 nt, Artificial Sequence
  Description of Artificial Sequence: Synthetic oligonucleotide
uuaggcaccacgucugcaa

SEQ ID NO: 3115072 - RNA, 19 nt, Artificial Sequence
  Description of Artificial Sequence: Synthetic oligonucleotide
uauccuauuggaacaccau

SEQ ID NO: 3115073 - RNA, 19 nt, Artificial Sequence
  Description of Artificial Sequence: Synthetic oligonucleotide
ugacaucaaagagaccacc

SEQ ID NO: 3115074 - RNA, 19 nt, Artificial Sequence
  Description of Artificial Sequence: Synthetic oligonucleotide
ugcuagcaacuccaguacc

SEQ ID NO: 3115075 - RNA, 19 nt, Artificial Sequence
  Description of Artificial Sequence: Synthetic oligonucleotide
aucuucaugcgaccaaccu

SEQ ID NO: 3115076 - RNA, 19 nt, Artificial Sequence
  Description of Artificial Sequence: Synthetic oligonucleotide
ugccugaaguucucugccg

SEQ ID NO: 3115077 - RNA, 19 nt, Artificial Sequence
  Description of Artificial Sequence: Synthetic oligonucleotide
accuccuggccgccgaugc

SEQ ID NO: 3115078 - RNA, 19 nt, Artificial Sequence
  Description of Artificial Sequence: Synthetic oligonucleotide
ucaaagagaccaccggauu

SEQ ID NO: 3115079 - RNA, 19 nt, Artificial Sequence
  Description of Artificial Sequence: Synthetic oligonucleotide
uauggaaggugcuuccuuu

SEQ ID NO: 3115080 - RNA, 19 nt, Artificial Sequence
  Description of Artificial Sequence: Synthetic oligonucleotide
ugccgucuuaggcaccacg

SEQ ID NO: 3115081 - RNA, 19 nt, Artificial Sequence
  Description of Artificial Sequence: Synthetic oligonucleotide
uuggaacaccaucuuuucu

SEQ ID NO: 3115082 - RNA, 19 nt, Artificial Sequence
  Description of Artificial Sequence: Synthetic oligonucleotide
ucuuaggcaccacgucugc

SEQ ID NO: 3115083 - RNA, 19 nt, Artificial Sequence
  Description of Artificial Sequence: Synthetic oligonucleotide
augcgaccaaccuccuggc

SEQ ID NO: 3115084 - RNA, 19 nt, Artificial Sequence
  Description of Artificial Sequence: Synthetic oligonucleotide
aagagaccaccggauugac

SEQ ID NO: 3115085 - RNA, 19 nt, Artificial Sequence
  Description of Artificial Sequence: Synthetic oligonucleotide
aaauccuuuaugacccuau

SEQ ID NO: 3115086 - RNA, 19 nt, Artificial Sequence
  Description of Artificial Sequence: Synthetic oligonucleotide
acagcucgaucuucaugcg

SEQ ID NO: 3115087 - RNA, 19 nt, Artificial Sequence
  Description of Artificial Sequence: Synthetic oligonucleotide
caucaaagagaccaccgga

SEQ ID NO: 3115088 - RNA, 19 nt, Artificial Sequence
  Description of Artificial Sequence: Synthetic oligonucleotide
uguauccuauuggaacacc

SEQ ID NO: 3115089 - RNA, 19 nt, Artificial Sequence
  Description of Artificial Sequence: Synthetic oligonucleotide
ucucugccgucuuaggcac

SEQ ID NO: 3115090 - RNA, 19 nt, Artificial Sequence
  Description of Artificial Sequence: Synthetic oligonucleotide
uaugacccuauggaaggug

SEQ ID NO: 3115091 - RNA, 19 nt, Artificial Sequence
  Description of Artificial Sequence: Synthetic oligonucleotide
agugcagaauugccugaag

SEQ ID NO: 3115092 - RNA, 19 nt, Artificial Sequence
  Description of Artificial Sequence: Synthetic oligonucleotide
ugaacucuccagugcagaa

SEQ ID NO: 3115093 - RNA, 19 nt, Artificial Sequence
  Description of Artificial Sequence: Synthetic oligonucleotide
uaccaucuccauuaacaaa

SEQ ID NO: 3115094 - RNA, 19 nt, Artificial Sequence
  Description of Artificial Sequence: Synthetic oligonucleotide
accacgucugcaaacagcu

SEQ ID NO: 3115095 - RNA, 19 nt, Artificial Sequence
  Description of Artificial Sequence: Synthetic oligonucleotide
uggaaggugcuuccuuugu

SEQ ID NO: 3115096 - RNA, 19 nt, Artificial Sequence
  Description of Artificial Sequence: Synthetic oligonucleotide
auggaaggugcuuccuuug

SEQ ID NO: 3115097 - RNA, 19 nt, Artificial Sequence
  Description of Artificial Sequence: Synthetic oligonucleotide
caccacgucugcaaacagc

SEQ ID NO: 3115098 - RNA, 19 nt, Artificial Sequence
  Description of Artificial Sequence: Synthetic oligonucleotide
accaucuuuucugaacucu

SEQ ID NO: 3115099 - RNA, 19 nt, Artificial Sequence
  Description of Artificial Sequence: Synthetic oligonucleotide
gcgaccaaccuccuggccg

SEQ ID NO: 3115100 - RNA, 19 nt, Artificial Sequence
  Description of Artificial Sequence: Synthetic oligonucleotide
ucgaucuucaugcgaccaa

SEQ ID NO: 3115101 - RNA, 19 nt, Artificial Sequence
  Description of Artificial Sequence: Synthetic oligonucleotide
cucuccagugcagaauugc

SEQ ID NO: 3115102 - RNA, 19 nt, Artificial Sequence
  Description of Artificial Sequence: Synthetic oligonucleotide
gaaucaugaaauccuuuau

SEQ ID NO: 3115103 - RNA, 19 nt, Artificial Sequence
  Description of Artificial Sequence: Synthetic oligonucleotide
agaccaccggauugacugg

SEQ ID NO: 3115104 - RNA, 19 nt, Artificial Sequence
  Description of Artificial Sequence: Synthetic oligonucleotide
ugggccucgguaaaugcua

SEQ ID NO: 3115105 - RNA, 19 nt, Artificial Sequence
  Description of Artificial Sequence: Synthetic oligonucleotide
uuguauccuauuggaacac

SEQ ID NO: 3115106 - RNA, 19 nt, Artificial Sequence
  Description of Artificial Sequence: Synthetic oligonucleotide
acccuauggaaggugcuuc

SEQ ID NO: 3115107 - RNA, 19 nt, Artificial Sequence
  Description of Artificial Sequence: Synthetic oligonucleotide
ugaaauccuuuaugacccu

SEQ ID NO: 3115108 - RNA, 19 nt, Artificial Sequence
  Description of Artificial Sequence: Synthetic oligonucleotide
gaucuucaugcgaccaacc

SEQ ID NO: 3115109 - RNA, 19 nt, Artificial Sequence
  Description of Artificial Sequence: Synthetic oligonucleotide
agaauugccugaaguucuc

SEQ ID NO: 3115110 - RNA, 19 nt, Artificial Sequence
  Description of Artificial Sequence: Synthetic oligonucleotide
aggcaccacgucugcaaac

SEQ ID NO: 3115111 - RNA, 19 nt, Artificial Sequence
  Description of Artificial Sequence: Synthetic oligonucleotide
ugacccuauggaaggugcu

SEQ ID NO: 3115112 - RNA, 19 nt, Artificial Sequence
  Description of Artificial Sequence: Synthetic oligonucleotide
guauccuauuggaacacca

SEQ ID NO: 3115113 - RNA, 19 nt, Artificial Sequence
  Description of Artificial Sequence: Synthetic oligonucleotide
gucuuaggcaccacgucug

SEQ ID NO: 3115114 - RNA, 19 nt, Artificial Sequence
  Description of Artificial Sequence: Synthetic oligonucleotide
caucuccauuaacaaaauc

SEQ ID NO: 3115115 - RNA, 19 nt, Artificial Sequence
  Description of Artificial Sequence: Synthetic oligonucleotide
gaaggugcuuccuuuguau

SEQ ID NO: 3115116 - RNA, 19 nt, Artificial Sequence
  Description of Artificial Sequence: Synthetic oligonucleotide
ucugccgucuuaggcacca

SEQ ID NO: 3115117 - RNA, 19 nt, Artificial Sequence
  Description of Artificial Sequence: Synthetic oligonucleotide
ucaugcgaccaaccuccug

SEQ ID NO: 3115118 - RNA, 19 nt, Artificial Sequence
  Description of Artificial Sequence: Synthetic oligonucleotide
accggauugacuggacuug

SEQ ID NO: 3115119 - RNA, 19 nt, Artificial Sequence
  Description of Artificial Sequence: Synthetic oligonucleotide
cuuuucugaacucuccagu

SEQ ID NO: 3115120 - RNA, 19 nt, Artificial Sequence
  Description of Artificial Sequence: Synthetic oligonucleotide
cagaauugccugaaguucu

SEQ ID NO: 3115121 - RNA, 19 nt, Artificial Sequence
  Description of Artificial Sequence: Synthetic oligonucleotide
gccgaugcugacaucaaag

SEQ ID NO: 3115122 - RNA, 19 nt, Artificial Sequence
  Description of Artificial Sequence: Synthetic oligonucleotide
uuaugacccuauggaaggu

SEQ ID NO: 3115123 - RNA, 19 nt, Artificial Sequence
  Description of Artificial Sequence: Synthetic oligonucleotide
gcagaauugccugaaguuc

SEQ ID NO: 3115124 - RNA, 19 nt, Artificial Sequence
  Description of Artificial Sequence: Synthetic oligonucleotide
ggaacaccaucuuuucuga

SEQ ID NO: 3115125 - RNA, 19 nt, Artificial Sequence
  Description of Artificial Sequence: Synthetic oligonucleotide
uaggcaccacgucugcaaa

SEQ ID NO: 3115126 - RNA, 19 nt, Artificial Sequence
  Description of Artificial Sequence: Synthetic oligonucleotide
ugcgaccaaccuccuggcc

SEQ ID NO: 3115127 - RNA, 19 nt, Artificial Sequence
  Description of Artificial Sequence: Synthetic oligonucleotide
aaucuccacccugaaucau

SEQ ID NO: 3115128 - RNA, 19 nt, Artificial Sequence
  Description of Artificial Sequence: Synthetic oligonucleotide
uggccgccgaugcugacau

SEQ ID NO: 3115129 - RNA, 19 nt, Artificial Sequence
  Description of Artificial Sequence: Synthetic oligonucleotide
gugcagaauugccugaagu

SEQ ID NO: 3115130 - RNA, 19 nt, Artificial Sequence
  Description of Artificial Sequence: Synthetic oligonucleotide
gucugcaaacagcucgauc

SEQ ID NO: 3115131 - RNA, 19 nt, Artificial Sequence
  Description of Artificial Sequence: Synthetic oligonucleotide
cgaugcugacaucaaagag

SEQ ID NO: 3115132 - RNA, 19 nt, Artificial Sequence
  Description of Artificial Sequence: Synthetic oligonucleotide
ccaucuuuucugaacucuc

SEQ ID NO: 3115133 - RNA, 19 nt, Artificial Sequence
  Description of Artificial Sequence: Synthetic oligonucleotide
uucaugcgaccaaccuccu

SEQ ID NO: 3115134 - RNA, 19 nt, Artificial Sequence
  Description of Artificial Sequence: Synthetic oligonucleotide
gaacaccaucuuuucugaa

SEQ ID NO: 3115135 - RNA, 19 nt, Artificial Sequence
  Description of Artificial Sequence: Synthetic oligonucleotide
gaaauccuuuaugacccua

SEQ ID NO: 3115136 - RNA, 19 nt, Artificial Sequence
  Description of Artificial Sequence: Synthetic oligonucleotide
gcuagcaacuccaguacca

SEQ ID NO: 3115137 - RNA, 19 nt, Artificial Sequence
  Description of Artificial Sequence: Synthetic oligonucleotide
ccuuuaugacccuauggaa

SEQ ID NO: 3115138 - RNA, 19 nt, Artificial Sequence
  Description of Artificial Sequence: Synthetic oligonucleotide
augggccucgguaaaugcu

SEQ ID NO: 3115139 - RNA, 19 nt, Artificial Sequence
  Description of Artificial Sequence: Synthetic oligonucleotide
acgucugcaaacagcucga

SEQ ID NO: 3115140 - RNA, 19 nt, Artificial Sequence
  Description of Artificial Sequence: Synthetic oligonucleotide
cugaacucuccagugcaga

SEQ ID NO: 3115141 - RNA, 19 nt, Artificial Sequence
  Description of Artificial Sequence: Synthetic oligonucleotide
cucgaucuucaugcgacca

SEQ ID NO: 3115142 - RNA, 19 nt, Artificial Sequence
  Description of Artificial Sequence: Synthetic oligonucleotide
cuccagugcagaauugccu

SEQ ID NO: 3115143 - RNA, 19 nt, Artificial Sequence
  Description of Artificial Sequence: Synthetic oligonucleotide
aaccuccuggccgccgaug

SEQ ID NO: 3115144 - RNA, 19 nt, Artificial Sequence
  Description of Artificial Sequence: Synthetic oligonucleotide
cuccuggccgccgaugcug

SEQ ID NO: 3115145 - RNA, 19 nt, Artificial Sequence
  Description of Artificial Sequence: Synthetic oligonucleotide
accaccggauugacuggac

SEQ ID NO: 3115146 - RNA, 19 nt, Artificial Sequence
  Description of Artificial Sequence: Synthetic oligonucleotide
gaccaccggauugacugga

SEQ ID NO: 3115147 - RNA, 19 nt, Artificial Sequence
  Description of Artificial Sequence: Synthetic oligonucleotide
gcucgaucuucaugcgacc

SEQ ID NO: 3115148 - RNA, 19 nt, Artificial Sequence
  Description of Artificial Sequence: Synthetic oligonucleotide
acucuccagugcagaauug

SEQ ID NO: 3115149 - RNA, 19 nt, Artificial Sequence
  Description of Artificial Sequence: Synthetic oligonucleotide
gccucgguaaaugcuagca

SEQ ID NO: 3115150 - RNA, 19 nt, Artificial Sequence
  Description of Artificial Sequence: Synthetic oligonucleotide
cccugaaucaugaaauccu

SEQ ID NO: 3115151 - RNA, 19 nt, Artificial Sequence
  Description of Artificial Sequence: Synthetic oligonucleotide
ggcaccacgucugcaaaca

SEQ ID NO: 3115152 - RNA, 19 nt, Artificial Sequence
  Description of Artificial Sequence: Synthetic oligonucleotide
ccgaugcugacaucaaaga

SEQ ID NO: 3115153 - RNA, 19 nt, Artificial Sequence
  Description of Artificial Sequence: Synthetic oligonucleotide
agagaccaccggauugacu

SEQ ID NO: 3115154 - RNA, 19 nt, Artificial Sequence
  Description of Artificial Sequence: Synthetic oligonucleotide
accaaccuccuggccgccg

SEQ ID NO: 3115155 - RNA, 19 nt, Artificial Sequence
  Description of Artificial Sequence: Synthetic oligonucleotide
gaauugccugaaguucucu

SEQ ID NO: 3115156 - RNA, 19 nt, Artificial Sequence
  Description of Artificial Sequence: Synthetic oligonucleotide
cucugccgucuuaggcacc

SEQ ID NO: 3115157 - RNA, 19 nt, Artificial Sequence
  Description of Artificial Sequence: Synthetic oligonucleotide
ccuuuguauccuauuggaa

SEQ ID NO: 3115158 - RNA, 19 nt, Artificial Sequence
  Description of Artificial Sequence: Synthetic oligonucleotide
cagcucgaucuucaugcga

SEQ ID NO: 3115159 - RNA, 19 nt, Artificial Sequence
  Description of Artificial Sequence: Synthetic oligonucleotide
ggauugacuggacuugaau

SEQ ID NO: 3115160 - RNA, 19 nt, Artificial Sequence
  Description of Artificial Sequence: Synthetic oligonucleotide
gcaccacgucugcaaacag

SEQ ID NO: 3115161 - RNA, 19 nt, Artificial Sequence
  Description of Artificial Sequence: Synthetic oligonucleotide
ggaaggugcuuccuuugua

SEQ ID NO: 3115162 - RNA, 19 nt, Artificial Sequence
  Description of Artificial Sequence: Synthetic oligonucleotide
gccgccgaugcugacauca

SEQ ID NO: 3115163 - RNA, 19 nt, Artificial Sequence
  Description of Artificial Sequence: Synthetic oligonucleotide
cuuaggcaccacgucugca

SEQ ID NO: 3115164 - RNA, 19 nt, Artificial Sequence
  Description of Artificial Sequence: Synthetic oligonucleotide
cgaccaaccuccuggccgc

SEQ ID NO: 3115165 - RNA, 19 nt, Artificial Sequence
  Description of Artificial Sequence: Synthetic oligonucleotide
ggugcuuccuuuguauccu

SEQ ID NO: 3115166 - RNA, 19 nt, Artificial Sequence
  Description of Artificial Sequence: Synthetic oligonucleotide
ggccucgguaaaugcuagc

SEQ ID NO: 3115167 - RNA, 19 nt, Artificial Sequence
  Description of Artificial Sequence: Synthetic oligonucleotide
cuauggaaggugcuuccuu

SEQ ID NO: 3115168 - RNA, 19 nt, Artificial Sequence
  Description of Artificial Sequence: Synthetic oligonucleotide
caccggauugacuggacuu

SEQ ID NO: 3115169 - RNA, 19 nt, Artificial Sequence
  Description of Artificial Sequence: Synthetic oligonucleotide
cgaucuucaugcgaccaac

SEQ ID NO: 3115170 - RNA, 19 nt, Artificial Sequence
  Description of Artificial Sequence: Synthetic oligonucleotide
cagugcagaauugccugaa

SEQ ID NO: 3115171 - RNA, 19 nt, Artificial Sequence
  Description of Artificial Sequence: Synthetic oligonucleotide
gggccucgguaaaugcuag

SEQ ID NO: 3115172 - RNA, 19 nt, Artificial Sequence
  Description of Artificial Sequence: Synthetic oligonucleotide
caaacagcucgaucuucau

SEQ ID NO: 3115173 - RNA, 19 nt, Artificial Sequence
  Description of Artificial Sequence: Synthetic oligonucleotide
cuagcaacuccaguaccau

SEQ ID NO: 3115174 - RNA, 19 nt, Artificial Sequence
  Description of Artificial Sequence: Synthetic oligonucleotide
ccgucuuaggcaccacguc

SEQ ID NO: 3115175 - RNA, 19 nt, Artificial Sequence
  Description of Artificial Sequence: Synthetic oligonucleotide
gacccuauggaaggugcuu

SEQ ID NO: 3115176 - RNA, 19 nt, Artificial Sequence
  Description of Artificial Sequence: Synthetic oligonucleotide
cgguaaaugcuagcaacuc

SEQ ID NO: 3115177 - RNA, 19 nt, Artificial Sequence
  Description of Artificial Sequence: Synthetic oligonucleotide
gccugaaguucucugccgu

SEQ ID NO: 3115178 - RNA, 19 nt, Artificial Sequence
  Description of Artificial Sequence: Synthetic oligonucleotide
gaccaaccuccuggccgcc

SEQ ID NO: 3115179 - RNA, 19 nt, Artificial Sequence
  Description of Artificial Sequence: Synthetic oligonucleotide
ccagugcagaauugccuga

SEQ ID NO: 3115180 - RNA, 19 nt, Artificial Sequence
  Description of Artificial Sequence: Synthetic oligonucleotide
cuggccgccgaugcugaca

SEQ ID NO: 3115181 - RNA, 19 nt, Artificial Sequence
  Description of Artificial Sequence: Synthetic oligonucleotide
ccucgguaaaugcuagcaa

SEQ ID NO: 3115182 - RNA, 19 nt, Artificial Sequence
  Description of Artificial Sequence: Synthetic oligonucleotide
gugcuuccuuuguauccua

SEQ ID NO: 3115183 - RNA, 19 nt, Artificial Sequence
  Description of Artificial Sequence: Synthetic oligonucleotide
gcuuccuuuguauccuauu

SEQ ID NO: 3115184 - RNA, 19 nt, Artificial Sequence
  Description of Artificial Sequence: Synthetic oligonucleotide
cgucuuaggcaccacgucu

SEQ ID NO: 3115185 - RNA, 19 nt, Artificial Sequence
  Description of Artificial Sequence: Synthetic oligonucleotide
ccacgucugcaaacagcuc

SEQ ID NO: 3115186 - RNA, 19 nt, Artificial Sequence
  Description of Artificial Sequence: Synthetic oligonucleotide
cuccaguaccaucuccauu

SEQ ID NO: 3115187 - RNA, 19 nt, Artificial Sequence
  Description of Artificial Sequence: Synthetic oligonucleotide
gccgucuuaggcaccacgu

SEQ ID NO: 3115188 - RNA, 19 nt, Artificial Sequence
  Description of Artificial Sequence: Synthetic oligonucleotide
ccuauuggaacaccaucuu

SEQ ID NO: 3115189 - RNA, 19 nt, Artificial Sequence
  Description of Artificial Sequence: Synthetic oligonucleotide
ccggauugacuggacuuga

SEQ ID NO: 3115190 - RNA, 19 nt, Artificial Sequence
  Description of Artificial Sequence: Synthetic oligonucleotide
ccaaccuccuggccgccga

SEQ ID NO: 3115191 - RNA, 19 nt, Artificial Sequence
  Description of Artificial Sequence: Synthetic oligonucleotide
cugccgucuuaggcaccac

SEQ ID NO: 3115192 - RNA, 19 nt, Artificial Sequence
  Description of Artificial Sequence: Synthetic oligonucleotide
ccaucuccauuaacaaaau

SEQ ID NO: 3115193 - RNA, 19 nt, Artificial Sequence
  Description of Artificial Sequence: Synthetic oligonucleotide
ccaccggauugacuggacu

SEQ ID NO: 3115194 - RNA, 19 nt, Artificial Sequence
  Description of Artificial Sequence: Synthetic oligonucleotide
ccuauggaaggugcuuccu

SEQ ID NO: 3115195 - RNA, 19 nt, Artificial Sequence
  Description of Artificial Sequence: Synthetic oligonucleotide
cggauugacuggacuugaa

SEQ ID NO: 3115196 - RNA, 19 nt, Artificial Sequence
  Description of Artificial Sequence: Synthetic oligonucleotide
ccgccgaugcugacaucaa

SEQ ID NO: 3115197 - RNA, 19 nt, Artificial Sequence
  Description of Artificial Sequence: Synthetic oligonucleotide
cgccgaugcugacaucaaa

SEQ ID NO: 3115198 - RNA, 19 nt, Artificial Sequence
  Description of Artificial Sequence: Synthetic oligonucleotide
ggccgccgaugcugacauc

SEQ ID NO: 3115199 - RNA, 19 nt, Artificial Sequence
  Description of Artificial Sequence: Synthetic oligonucleotide
ccuccuggccgccgaugcu

SEQ ID NO: 3115200 - RNA, 19 nt, Artificial Sequence
  Description of Artificial Sequence: Synthetic oligonucleotide
uuaacaaugagaaagagag

SEQ ID NO: 3115201 - RNA, 19 nt, Artificial Sequence
  Description of Artificial Sequence: Synthetic oligonucleotide
aacuauaacagacaguauc

SEQ ID NO: 3115202 - RNA, 19 nt, Artificial Sequence
  Description of Artificial Sequence: Synthetic oligonucleotide
aaugguaacuauaacagac

SEQ ID NO: 3115203 - RNA, 19 nt, Artificial Sequence
  Description of Artificial Sequence: Synthetic oligonucleotide
uugugcuuuaccaaaaugg

SEQ ID NO: 3115204 - RNA, 19 nt, Artificial Sequence
  Description of Artificial Sequence: Synthetic oligonucleotide
aaaaugguaacuauaacag

SEQ ID NO: 3115205 - RNA, 19 nt, Artificial Sequence
  Description of Artificial Sequence: Synthetic oligonucleotide
uccaaaagaacuaaauuag

SEQ ID NO: 3115206 - RNA, 19 nt, Artificial Sequence
  Description of Artificial Sequence: Synthetic oligonucleotide
aaaagaacuaaauuagggu

SEQ ID NO: 3115207 - RNA, 19 nt, Artificial Sequence
  Description of Artificial Sequence: Synthetic oligonucleotide
gacaguaucagacauacug

SEQ ID NO: 3115208 - RNA, 19 nt, Artificial Sequence
  Description of Artificial Sequence: Synthetic oligonucleotide
aauggcauuaguccaaaag

SEQ ID NO: 3115209 - RNA, 19 nt, Artificial Sequence
  Description of Artificial Sequence: Synthetic oligonucleotide
uaaauuaggguauuugugc

SEQ ID NO: 3115210 - RNA, 19 nt, Artificial Sequence
  Description of Artificial Sequence: Synthetic oligonucleotide
aaagaacuaaauuagggua

SEQ ID NO: 3115211 - RNA, 19 nt, Artificial Sequence
  Description of Artificial Sequence: Synthetic oligonucleotide
auaacagacaguaucagac

SEQ ID NO: 3115212 - RNA, 19 nt, Artificial Sequence
  Description of Artificial Sequence: Synthetic oligonucleotide
agagauguguaucuguuac

SEQ ID NO: 3115213 - RNA, 19 nt, Artificial Sequence
  Description of Artificial Sequence: Synthetic oligonucleotide
ugccuuaacaaugagaaag

SEQ ID NO: 3115214 - RNA, 19 nt, Artificial Sequence
  Description of Artificial Sequence: Synthetic oligonucleotide
aacaaugagaaagagagau

SEQ ID NO: 3115215 - RNA, 19 nt, Artificial Sequence
  Description of Artificial Sequence: Synthetic oligonucleotide
gauagaugggucuuccugg

SEQ ID NO: 3115216 - RNA, 19 nt, Artificial Sequence
  Description of Artificial Sequence: Synthetic oligonucleotide
ugcuuuaccaaaaugguaa

SEQ ID NO: 3115217 - RNA, 19 nt, Artificial Sequence
  Description of Artificial Sequence: Synthetic oligonucleotide
auguguaucuguuacguag

SEQ ID NO: 3115218 - RNA, 19 nt, Artificial Sequence
  Description of Artificial Sequence: Synthetic oligonucleotide
cuggauaguuaccagaacg

SEQ ID NO: 3115219 - RNA, 19 nt, Artificial Sequence
  Description of Artificial Sequence: Synthetic oligonucleotide
caaaaugguaacuauaaca

SEQ ID NO: 3115220 - RNA, 19 nt, Artificial Sequence
  Description of Artificial Sequence: Synthetic oligonucleotide
aaauuaggguauuugugcu

SEQ ID NO: 3115221 - RNA, 19 nt, Artificial Sequence
  Description of Artificial Sequence: Synthetic oligonucleotide
uggguuaacgcagagauug

SEQ ID NO: 3115222 - RNA, 19 nt, Artificial Sequence
  Description of Artificial Sequence: Synthetic oligonucleotide
acuaaauuaggguauuugu

SEQ ID NO: 3115223 - RNA, 19 nt, Artificial Sequence
  Description of Artificial Sequence: Synthetic oligonucleotide
cuaaauuaggguauuugug

SEQ ID NO: 3115224 - RNA, 19 nt, Artificial Sequence
  Description of Artificial Sequence: Synthetic oligonucleotide
ugguaacuauaacagacag

SEQ ID NO: 3115225 - RNA, 19 nt, Artificial Sequence
  Description of Artificial Sequence: Synthetic oligonucleotide
cuguuacguagauagaugg

SEQ ID NO: 3115226 - RNA, 19 nt, Artificial Sequence
  Description of Artificial Sequence: Synthetic oligonucleotide
ucuuuguggguuaacgcag

SEQ ID NO: 3115227 - RNA, 19 nt, Artificial Sequence
  Description of Artificial Sequence: Synthetic oligonucleotide
ugugcuuuaccaaaauggu

SEQ ID NO: 3115228 - RNA, 19 nt, Artificial Sequence
  Description of Artificial Sequence: Synthetic oligonucleotide
uguuacguagauagauggg

SEQ ID NO: 3115229 - RNA, 19 nt, Artificial Sequence
  Description of Artificial Sequence: Synthetic oligonucleotide
auggcauuaguccaaaaga

SEQ ID NO: 3115230 - RNA, 19 nt, Artificial Sequence
  Description of Artificial Sequence: Synthetic oligonucleotide
guaacuauaacagacagua

SEQ ID NO: 3115231 - RNA, 19 nt, Artificial Sequence
  Description of Artificial Sequence: Synthetic oligonucleotide
aaaugguaacuauaacaga

SEQ ID NO: 3115232 - RNA, 19 nt, Artificial Sequence
  Description of Artificial Sequence: Synthetic oligonucleotide
aacuaaauuaggguauuug

SEQ ID NO: 3115233 - RNA, 19 nt, Artificial Sequence
  Description of Artificial Sequence: Synthetic oligonucleotide
uuaacgcagagauuguuga

SEQ ID NO: 3115234 - RNA, 19 nt, Artificial Sequence
  Description of Artificial Sequence: Synthetic oligonucleotide
ucuguuacguagauagaug

SEQ ID NO: 3115235 - RNA, 19 nt, Artificial Sequence
  Description of Artificial Sequence: Synthetic oligonucleotide
aguuaccagaacgugagac

SEQ ID NO: 3115236 - RNA, 19 nt, Artificial Sequence
  Description of Artificial Sequence: Synthetic oligonucleotide
agucacugcaagugggucc

SEQ ID NO: 3115237 - RNA, 19 nt, Artificial Sequence
  Description of Artificial Sequence: Synthetic oligonucleotide
gacguggucucuuuguggg

SEQ ID NO: 3115238 - RNA, 19 nt, Artificial Sequence
  Description of Artificial Sequence: Synthetic oligonucleotide
uuugugcuuuaccaaaaug

SEQ ID NO: 3115239 - RNA, 19 nt, Artificial Sequence
  Description of Artificial Sequence: Synthetic oligonucleotide
agauuguugagacaccugu

SEQ ID NO: 3115240 - RNA, 19 nt, Artificial Sequence
  Description of Artificial Sequence: Synthetic oligonucleotide
uauaacagacaguaucaga

SEQ ID NO: 3115241 - RNA, 19 nt, Artificial Sequence
  Description of Artificial Sequence: Synthetic oligonucleotide
guuaccagaacgugagacg

SEQ ID NO: 3115242 - RNA, 19 nt, Artificial Sequence
  Description of Artificial Sequence: Synthetic oligonucleotide
acaguaucagacauacugc

SEQ ID NO: 3115243 - RNA, 19 nt, Artificial Sequence
  Description of Artificial Sequence: Synthetic oligonucleotide
aacagacaguaucagacau

SEQ ID NO: 3115244 - RNA, 19 nt, Artificial Sequence
  Description of Artificial Sequence: Synthetic oligonucleotide
ucaucuuuugggcagucac

SEQ ID NO: 3115245 - RNA, 19 nt, Artificial Sequence
  Description of Artificial Sequence: Synthetic oligonucleotide
agaaagagagauguguauc

SEQ ID NO: 3115246 - RNA, 19 nt, Artificial Sequence
  Description of Artificial Sequence: Synthetic oligonucleotide
auuguugagacaccuguca

SEQ ID NO: 3115247 - RNA, 19 nt, Artificial Sequence
  Description of Artificial Sequence: Synthetic oligonucleotide
uuuaccaaaaugguaacua

SEQ ID NO: 3115248 - RNA, 19 nt, Artificial Sequence
  Description of Artificial Sequence: Synthetic oligonucleotide
uggauaguuaccagaacgu

SEQ ID NO: 3115249 - RNA, 19 nt, Artificial Sequence
  Description of Artificial Sequence: Synthetic oligonucleotide
agacauacugccuuaacaa

SEQ ID NO: 3115250 - RNA, 19 nt, Artificial Sequence
  Description of Artificial Sequence: Synthetic oligonucleotide
agauagaugggucuuccug

SEQ ID NO: 3115251 - RNA, 19 nt, Artificial Sequence
  Description of Artificial Sequence: Synthetic oligonucleotide
aggguauuugugcuuuacc

SEQ ID NO: 3115252 - RNA, 19 nt, Artificial Sequence
  Description of Artificial Sequence: Synthetic oligonucleotide
ccaacaauggcauuagucc

SEQ ID NO: 3115253 - RNA, 19 nt, Artificial Sequence
  Description of Artificial Sequence: Synthetic oligonucleotide
gaugggucuuccuggauag

SEQ ID NO: 3115254 - RNA, 19 nt, Artificial Sequence
  Description of Artificial Sequence: Synthetic oligonucleotide
aagagagauguguaucugu

SEQ ID NO: 3115255 - RNA, 19 nt, Artificial Sequence
  Description of Artificial Sequence: Synthetic oligonucleotide
guccaaaagaacuaaauua

SEQ ID NO: 3115256 - RNA, 19 nt, Artificial Sequence
  Description of Artificial Sequence: Synthetic oligonucleotide
auaguuaccagaacgugag

SEQ ID NO: 3115257 - RNA, 19 nt, Artificial Sequence
  Description of Artificial Sequence: Synthetic oligonucleotide
acugccuuaacaaugagaa

SEQ ID NO: 3115258 - RNA, 19 nt, Artificial Sequence
  Description of Artificial Sequence: Synthetic oligonucleotide
caguaucagacauacugcc

SEQ ID NO: 3115259 - RNA, 19 nt, Artificial Sequence
  Description of Artificial Sequence: Synthetic oligonucleotide
uggcauuaguccaaaagaa

SEQ ID NO: 3115260 - RNA, 19 nt, Artificial Sequence
  Description of Artificial Sequence: Synthetic oligonucleotide
uguguaucuguuacguaga

SEQ ID NO: 3115261 - RNA, 19 nt, Artificial Sequence
  Description of Artificial Sequence: Synthetic oligonucleotide
ugcuuguacggccauguug

SEQ ID NO: 3115262 - RNA, 19 nt, Artificial Sequence
  Description of Artificial Sequence: Synthetic oligonucleotide
acgcagagauuguugagac

SEQ ID NO: 3115263 - RNA, 19 nt, Artificial Sequence
  Description of Artificial Sequence: Synthetic oligonucleotide
acuauaacagacaguauca

SEQ ID NO: 3115264 - RNA, 19 nt, Artificial Sequence
  Description of Artificial Sequence: Synthetic oligonucleotide
ugagaaagagagaugugua

SEQ ID NO: 3115265 - RNA, 19 nt, Artificial Sequence
  Description of Artificial Sequence: Synthetic oligonucleotide
ucucuuuguggguuaacgc

SEQ ID NO: 3115266 - RNA, 19 nt, Artificial Sequence
  Description of Artificial Sequence: Synthetic oligonucleotide
gagauguguaucuguuacg

SEQ ID NO: 3115267 - RNA, 19 nt, Artificial Sequence
  Description of Artificial Sequence: Synthetic oligonucleotide
cuuaacaaugagaaagaga

SEQ ID NO: 3115268 - RNA, 19 nt, Artificial Sequence
  Description of Artificial Sequence: Synthetic oligonucleotide
augagaaagagagaugugu

SEQ ID NO: 3115269 - RNA, 19 nt, Artificial Sequence
  Description of Artificial Sequence: Synthetic oligonucleotide
uaguccaaaagaacuaaau

SEQ ID NO: 3115270 - RNA, 19 nt, Artificial Sequence
  Description of Artificial Sequence: Synthetic oligonucleotide
ucuuccuggauaguuacca

SEQ ID NO: 3115271 - RNA, 19 nt, Artificial Sequence
  Description of Artificial Sequence: Synthetic oligonucleotide
aagaacuaaauuaggguau

SEQ ID NO: 3115272 - RNA, 19 nt, Artificial Sequence
  Description of Artificial Sequence: Synthetic oligonucleotide
aguccaaaagaacuaaauu

SEQ ID NO: 3115273 - RNA, 19 nt, Artificial Sequence
  Description of Artificial Sequence: Synthetic oligonucleotide
acugcaaguggguccuugc

SEQ ID NO: 3115274 - RNA, 19 nt, Artificial Sequence
  Description of Artificial Sequence: Synthetic oligonucleotide
uguacggccauguugggua

SEQ ID NO: 3115275 - RNA, 19 nt, Artificial Sequence
  Description of Artificial Sequence: Synthetic oligonucleotide
gacaccugucaucuuuugg

SEQ ID NO: 3115276 - RNA, 19 nt, Artificial Sequence
  Description of Artificial Sequence: Synthetic oligonucleotide
uaacagacaguaucagaca

SEQ ID NO: 3115277 - RNA, 19 nt, Artificial Sequence
  Description of Artificial Sequence: Synthetic oligonucleotide
uuacguagauagauggguc

SEQ ID NO: 3115278 - RNA, 19 nt, Artificial Sequence
  Description of Artificial Sequence: Synthetic oligonucleotide
aacgcagagauuguugaga

SEQ ID NO: 3115279 - RNA, 19 nt, Artificial Sequence
  Description of Artificial Sequence: Synthetic oligonucleotide
uauuugugcuuuaccaaaa

SEQ ID NO: 3115280 - RNA, 19 nt, Artificial Sequence
  Description of Artificial Sequence: Synthetic oligonucleotide
gauaguuaccagaacguga

SEQ ID NO: 3115281 - RNA, 19 nt, Artificial Sequence
  Description of Artificial Sequence: Synthetic oligonucleotide
uccuggauaguuaccagaa

SEQ ID NO: 3115282 - RNA, 19 nt, Artificial Sequence
  Description of Artificial Sequence: Synthetic oligonucleotide
aaagagagauguguaucug

SEQ ID NO: 3115283 - RNA, 19 nt, Artificial Sequence
  Description of Artificial Sequence: Synthetic oligonucleotide
aguggguccuugcuuguac

SEQ ID NO: 3115284 - RNA, 19 nt, Artificial Sequence
  Description of Artificial Sequence: Synthetic oligonucleotide
uacugccuuaacaaugaga

SEQ ID NO: 3115285 - RNA, 19 nt, Artificial Sequence
  Description of Artificial Sequence: Synthetic oligonucleotide
uacguagauagaugggucu

SEQ ID NO: 3115286 - RNA, 19 nt, Artificial Sequence
  Description of Artificial Sequence: Synthetic oligonucleotide
cagacaguaucagacauac

SEQ ID NO: 3115287 - RNA, 19 nt, Artificial Sequence
  Description of Artificial Sequence: Synthetic oligonucleotide
uuaccagaacgugagacgu

SEQ ID NO: 3115288 - RNA, 19 nt, Artificial Sequence
  Description of Artificial Sequence: Synthetic oligonucleotide
uuaccaaaaugguaacuau

SEQ ID NO: 3115289 - RNA, 19 nt, Artificial Sequence
  Description of Artificial Sequence: Synthetic oligonucleotide
gaaagagagauguguaucu

SEQ ID NO: 3115290 - RNA, 19 nt, Artificial Sequence
  Description of Artificial Sequence: Synthetic oligonucleotide
uuaguccaaaagaacuaaa

SEQ ID NO: 3115291 - RNA, 19 nt, Artificial Sequence
  Description of Artificial Sequence: Synthetic oligonucleotide
gcuuguacggccauguugg

SEQ ID NO: 3115292 - RNA, 19 nt, Artificial Sequence
  Description of Artificial Sequence: Synthetic oligonucleotide
aauuaggguauuugugcuu

SEQ ID NO: 3115293 - RNA, 19 nt, Artificial Sequence
  Description of Artificial Sequence: Synthetic oligonucleotide
ugagacaccugucaucuuu

SEQ ID NO: 3115294 - RNA, 19 nt, Artificial Sequence
  Description of Artificial Sequence: Synthetic oligonucleotide
uaacaaugagaaagagaga

SEQ ID NO: 3115295 - RNA, 19 nt, Artificial Sequence
  Description of Artificial Sequence: Synthetic oligonucleotide
agauguguaucuguuacgu

SEQ ID NO: 3115296 - RNA, 19 nt, Artificial Sequence
  Description of Artificial Sequence: Synthetic oligonucleotide
uaccaaaaugguaacuaua

SEQ ID NO: 3115297 - RNA, 19 nt, Artificial Sequence
  Description of Artificial Sequence: Synthetic oligonucleotide
agacguggucucuuugugg

SEQ ID NO: 3115298 - RNA, 19 nt, Artificial Sequence
  Description of Artificial Sequence: Synthetic oligonucleotide
uuuguggguuaacgcagag

SEQ ID NO: 3115299 - RNA, 19 nt, Artificial Sequence
  Description of Artificial Sequence: Synthetic oligonucleotide
uuugggcagucacugcaag

SEQ ID NO: 3115300 - RNA, 19 nt, Artificial Sequence
  Description of Artificial Sequence: Synthetic oligonucleotide
gucucuuuguggguuaacg

SEQ ID NO: 3115301 - RNA, 19 nt, Artificial Sequence
  Description of Artificial Sequence: Synthetic oligonucleotide
cauacugccuuaacaauga

SEQ ID NO: 3115302 - RNA, 19 nt, Artificial Sequence
  Description of Artificial Sequence: Synthetic oligonucleotide
accagaacgugagacgugg

SEQ ID NO: 3115303 - RNA, 19 nt, Artificial Sequence
  Description of Artificial Sequence: Synthetic oligonucleotide
aaugagaaagagagaugug

SEQ ID NO: 3115304 - RNA, 19 nt, Artificial Sequence
  Description of Artificial Sequence: Synthetic oligonucleotide
acauacugccuuaacaaug

SEQ ID NO: 3115305 - RNA, 19 nt, Artificial Sequence
  Description of Artificial Sequence: Synthetic oligonucleotide
ugggcagucacugcaagug

SEQ ID NO: 3115306 - RNA, 19 nt, Artificial Sequence
  Description of Artificial Sequence: Synthetic oligonucleotide
guauuugugcuuuaccaaa

SEQ ID NO: 3115307 - RNA, 19 nt, Artificial Sequence
  Description of Artificial Sequence: Synthetic oligonucleotide
uuccuggauaguuaccaga

SEQ ID NO: 3115308 - RNA, 19 nt, Artificial Sequence
  Description of Artificial Sequence: Synthetic oligonucleotide
guuaacgcagagauuguug

SEQ ID NO: 3115309 - RNA, 19 nt, Artificial Sequence
  Description of Artificial Sequence: Synthetic oligonucleotide
ugagacguggucucuuugu

SEQ ID NO: 3115310 - RNA, 19 nt, Artificial Sequence
  Description of Artificial Sequence: Synthetic oligonucleotide
cucuuuguggguuaacgca

SEQ ID NO: 3115311 - RNA, 19 nt, Artificial Sequence
  Description of Artificial Sequence: Synthetic oligonucleotide
aucuuuugggcagucacug

SEQ ID NO: 3115312 - RNA, 19 nt, Artificial Sequence
  Description of Artificial Sequence: Synthetic oligonucleotide
uaacgcagagauuguugag

SEQ ID NO: 3115313 - RNA, 19 nt, Artificial Sequence
  Description of Artificial Sequence: Synthetic oligonucleotide
uguugagacaccugucauc

SEQ ID NO: 3115314 - RNA, 19 nt, Artificial Sequence
  Description of Artificial Sequence: Synthetic oligonucleotide
agaacgugagacguggucu

SEQ ID NO: 3115315 - RNA, 19 nt, Artificial Sequence
  Description of Artificial Sequence: Synthetic oligonucleotide
cuauaacagacaguaucag

SEQ ID NO: 3115316 - RNA, 19 nt, Artificial Sequence
  Description of Artificial Sequence: Synthetic oligonucleotide
aucuguuacguagauagau

SEQ ID NO: 3115317 - RNA, 19 nt, Artificial Sequence
  Description of Artificial Sequence: Synthetic oligonucleotide
auuaguccaaaagaacuaa

SEQ ID NO: 3115318 - RNA, 19 nt, Artificial Sequence
  Description of Artificial Sequence: Synthetic oligonucleotide
gcagagauuguugagacac

SEQ ID NO: 3115319 - RNA, 19 nt, Artificial Sequence
  Description of Artificial Sequence: Synthetic oligonucleotide
agagauuguugagacaccu

SEQ ID NO: 3115320 - RNA, 19 nt, Artificial Sequence
  Description of Artificial Sequence: Synthetic oligonucleotide
uggguccuugcuuguacgg

SEQ ID NO: 3115321 - RNA, 19 nt, Artificial Sequence
  Description of Artificial Sequence: Synthetic oligonucleotide
ucagacauacugccuuaac

SEQ ID NO: 3115322 - RNA, 19 nt, Artificial Sequence
  Description of Artificial Sequence: Synthetic oligonucleotide
caacaauggcauuagucca

SEQ ID NO: 3115323 - RNA, 19 nt, Artificial Sequence
  Description of Artificial Sequence: Synthetic oligonucleotide
uuguugagacaccugucau

SEQ ID NO: 3115324 - RNA, 19 nt, Artificial Sequence
  Description of Artificial Sequence: Synthetic oligonucleotide
gagacguggucucuuugug

SEQ ID NO: 3115325 - RNA, 19 nt, Artificial Sequence
  Description of Artificial Sequence: Synthetic oligonucleotide
uaucuguuacguagauaga

SEQ ID NO: 3115326 - RNA, 19 nt, Artificial Sequence
  Description of Artificial Sequence: Synthetic oligonucleotide
ggguauuugugcuuuacca

SEQ ID NO: 3115327 - RNA, 19 nt, Artificial Sequence
  Description of Artificial Sequence: Synthetic oligonucleotide
auagaugggucuuccugga

SEQ ID NO: 3115328 - RNA, 19 nt, Artificial Sequence
  Description of Artificial Sequence: Synthetic oligonucleotide
cagacauacugccuuaaca

SEQ ID NO: 3115329 - RNA, 19 nt, Artificial Sequence
  Description of Artificial Sequence: Synthetic oligonucleotide
caccugucaucuuuugggc

SEQ ID NO: 3115330 - RNA, 19 nt, Artificial Sequence
  Description of Artificial Sequence: Synthetic oligonucleotide
auuugugcuuuaccaaaau

SEQ ID NO: 3115331 - RNA, 19 nt, Artificial Sequence
  Description of Artificial Sequence: Synthetic oligonucleotide
caaugagaaagagagaugu

SEQ ID NO: 3115332 - RNA, 19 nt, Artificial Sequence
  Description of Artificial Sequence: Synthetic oligonucleotide
cuuuugggcagucacugca

SEQ ID NO: 3115333 - RNA, 19 nt, Artificial Sequence
  Description of Artificial Sequence: Synthetic oligonucleotide
aacaauggcauuaguccaa

SEQ ID NO: 3115334 - RNA, 19 nt, Artificial Sequence
  Description of Artificial Sequence: Synthetic oligonucleotide
ucuuuugggcagucacugc

SEQ ID NO: 3115335 - RNA, 19 nt, Artificial Sequence
  Description of Artificial Sequence: Synthetic oligonucleotide
uuuugggcagucacugcaa

SEQ ID NO: 3115336 - RNA, 19 nt, Artificial Sequence
  Description of Artificial Sequence: Synthetic oligonucleotide
cauuaguccaaaagaacua

SEQ ID NO: 3115337 - RNA, 19 nt, Artificial Sequence
  Description of Artificial Sequence: Synthetic oligonucleotide
uaacuauaacagacaguau

SEQ ID NO: 3115338 - RNA, 19 nt, Artificial Sequence
  Description of Artificial Sequence: Synthetic oligonucleotide
cuuccuggauaguuaccag

SEQ ID NO: 3115339 - RNA, 19 nt, Artificial Sequence
  Description of Artificial Sequence: Synthetic oligonucleotide
gaacgugagacguggucuc

SEQ ID NO: 3115340 - RNA, 19 nt, Artificial Sequence
  Description of Artificial Sequence: Synthetic oligonucleotide
auuaggguauuugugcuuu

SEQ ID NO: 3115341 - RNA, 19 nt, Artificial Sequence
  Description of Artificial Sequence: Synthetic oligonucleotide
acaaugagaaagagagaug

SEQ ID NO: 3115342 - RNA, 19 nt, Artificial Sequence
  Description of Artificial Sequence: Synthetic oligonucleotide
agaugggucuuccuggaua

SEQ ID NO: 3115343 - RNA, 19 nt, Artificial Sequence
  Description of Artificial Sequence: Synthetic oligonucleotide
augguaacuauaacagaca

SEQ ID NO: 3115344 - RNA, 19 nt, Artificial Sequence
  Description of Artificial Sequence: Synthetic oligonucleotide
ugcaaguggguccuugcuu

SEQ ID NO: 3115345 - RNA, 19 nt, Artificial Sequence
  Description of Artificial Sequence: Synthetic oligonucleotide
gcaaguggguccuugcuug

SEQ ID NO: 3115346 - RNA, 19 nt, Artificial Sequence
  Description of Artificial Sequence: Synthetic oligonucleotide
guuacguagauagaugggu

SEQ ID NO: 3115347 - RNA, 19 nt, Artificial Sequence
  Description of Artificial Sequence: Synthetic oligonucleotide
guggguccuugcuuguacg

SEQ ID NO: 3115348 - RNA, 19 nt, Artificial Sequence
  Description of Artificial Sequence: Synthetic oligonucleotide
gguauuugugcuuuaccaa

SEQ ID NO: 3115349 - RNA, 19 nt, Artificial Sequence
  Description of Artificial Sequence: Synthetic oligonucleotide
cagagauuguugagacacc

SEQ ID NO: 3115350 - RNA, 19 nt, Artificial Sequence
  Description of Artificial Sequence: Synthetic oligonucleotide
uaucagacauacugccuua

SEQ ID NO: 3115351 - RNA, 19 nt, Artificial Sequence
  Description of Artificial Sequence: Synthetic oligonucleotide
gauuguugagacaccuguc

SEQ ID NO: 3115352 - RNA, 19 nt, Artificial Sequence
  Description of Artificial Sequence: Synthetic oligonucleotide
guugagacaccugucaucu

SEQ ID NO: 3115353 - RNA, 19 nt, Artificial Sequence
  Description of Artificial Sequence: Synthetic oligonucleotide
auacugccuuaacaaugag

SEQ ID NO: 3115354 - RNA, 19 nt, Artificial Sequence
  Description of Artificial Sequence: Synthetic oligonucleotide
gagauuguugagacaccug

SEQ ID NO: 3115355 - RNA, 19 nt, Artificial Sequence
  Description of Artificial Sequence: Synthetic oligonucleotide
uaccagaacgugagacgug

SEQ ID NO: 3115356 - RNA, 19 nt, Artificial Sequence
  Description of Artificial Sequence: Synthetic oligonucleotide
aguaucagacauacugccu

SEQ ID NO: 3115357 - RNA, 19 nt, Artificial Sequence
  Description of Artificial Sequence: Synthetic oligonucleotide
gagaaagagagauguguau

SEQ ID NO: 3115358 - RNA, 19 nt, Artificial Sequence
  Description of Artificial Sequence: Synthetic oligonucleotide
cccaacaauggcauuaguc

SEQ ID NO: 3115359 - RNA, 19 nt, Artificial Sequence
  Description of Artificial Sequence: Synthetic oligonucleotide
gguccuugcuuguacggcc

SEQ ID NO: 3115360 - RNA, 19 nt, Artificial Sequence
  Description of Artificial Sequence: Synthetic oligonucleotide
cagaacgugagacgugguc

SEQ ID NO: 3115361 - RNA, 19 nt, Artificial Sequence
  Description of Artificial Sequence: Synthetic oligonucleotide
uaggguauuugugcuuuac

SEQ ID NO: 3115362 - RNA, 19 nt, Artificial Sequence
  Description of Artificial Sequence: Synthetic oligonucleotide
cuuguacggccauguuggg

SEQ ID NO: 3115363 - RNA, 19 nt, Artificial Sequence
  Description of Artificial Sequence: Synthetic oligonucleotide
agaacuaaauuaggguauu

SEQ ID NO: 3115364 - RNA, 19 nt, Artificial Sequence
  Description of Artificial Sequence: Synthetic oligonucleotide
uaguuaccagaacgugaga

SEQ ID NO: 3115365 - RNA, 19 nt, Artificial Sequence
  Description of Artificial Sequence: Synthetic oligonucleotide
uugggcagucacugcaagu

SEQ ID NO: 3115366 - RNA, 19 nt, Artificial Sequence
  Description of Artificial Sequence: Synthetic oligonucleotide
uguaucuguuacguagaua

SEQ ID NO: 3115367 - RNA, 19 nt, Artificial Sequence
  Description of Artificial Sequence: Synthetic oligonucleotide
guaucagacauacugccuu

SEQ ID NO: 3115368 - RNA, 19 nt, Artificial Sequence
  Description of Artificial Sequence: Synthetic oligonucleotide
ggauaguuaccagaacgug

SEQ ID NO: 3115369 - RNA, 19 nt, Artificial Sequence
  Description of Artificial Sequence: Synthetic oligonucleotide
agagagauguguaucuguu

SEQ ID NO: 3115370 - RNA, 19 nt, Artificial Sequence
  Description of Artificial Sequence: Synthetic oligonucleotide
ggcauuaguccaaaagaac

SEQ ID NO: 3115371 - RNA, 19 nt, Artificial Sequence
  Description of Artificial Sequence: Synthetic oligonucleotide
agacaccugucaucuuuug

SEQ ID NO: 3115372 - RNA, 19 nt, Artificial Sequence
  Description of Artificial Sequence: Synthetic oligonucleotide
uuguggguuaacgcagaga

SEQ ID NO: 3115373 - RNA, 19 nt, Artificial Sequence
  Description of Artificial Sequence: Synthetic oligonucleotide
gacauacugccuuaacaau

SEQ ID NO: 3115374 - RNA, 19 nt, Artificial Sequence
  Description of Artificial Sequence: Synthetic oligonucleotide
gagagauguguaucuguua

SEQ ID NO: 3115375 - RNA, 19 nt, Artificial Sequence
  Description of Artificial Sequence: Synthetic oligonucleotide
gauguguaucuguuacgua

SEQ ID NO: 3115376 - RNA, 19 nt, Artificial Sequence
  Description of Artificial Sequence: Synthetic oligonucleotide
ccaaaaugguaacuauaac

SEQ ID NO: 3115377 - RNA, 19 nt, Artificial Sequence
  Description of Artificial Sequence: Synthetic oligonucleotide
cuuuguggguuaacgcaga

SEQ ID NO: 3115378 - RNA, 19 nt, Artificial Sequence
  Description of Artificial Sequence: Synthetic oligonucleotide
gcauuaguccaaaagaacu

SEQ ID NO: 3115379 - RNA, 19 nt, Artificial Sequence
  Description of Artificial Sequence: Synthetic oligonucleotide
ggcagucacugcaaguggg

SEQ ID NO: 3115380 - RNA, 19 nt, Artificial Sequence
  Description of Artificial Sequence: Synthetic oligonucleotide
gcuuuaccaaaaugguaac

SEQ ID NO: 3115381 - RNA, 19 nt, Artificial Sequence
  Description of Artificial Sequence: Synthetic oligonucleotide
uuguacggccauguugggu

SEQ ID NO: 3115382 - RNA, 19 nt, Artificial Sequence
  Description of Artificial Sequence: Synthetic oligonucleotide
gugagacguggucucuuug

SEQ ID NO: 3115383 - RNA, 19 nt, Artificial Sequence
  Description of Artificial Sequence: Synthetic oligonucleotide
aacgugagacguggucucu

SEQ ID NO: 3115384 - RNA, 19 nt, Artificial Sequence
  Description of Artificial Sequence: Synthetic oligonucleotide
gggcagucacugcaagugg

SEQ ID NO: 3115385 - RNA, 19 nt, Artificial Sequence
  Description of Artificial Sequence: Synthetic oligonucleotide
ccuuaacaaugagaaagag

SEQ ID NO: 3115386 - RNA, 19 nt, Artificial Sequence
  Description of Artificial Sequence: Synthetic oligonucleotide
uuaggguauuugugcuuua

SEQ ID NO: 3115387 - RNA, 19 nt, Artificial Sequence
  Description of Artificial Sequence: Synthetic oligonucleotide
uagaugggucuuccuggau

SEQ ID NO: 3115388 - RNA, 19 nt, Artificial Sequence
  Description of Artificial Sequence: Synthetic oligonucleotide
acguagauagaugggucuu

SEQ ID NO: 3115389 - RNA, 19 nt, Artificial Sequence
  Description of Artificial Sequence: Synthetic oligonucleotide
gccuuaacaaugagaaaga

SEQ ID NO: 3115390 - RNA, 19 nt, Artificial Sequence
  Description of Artificial Sequence: Synthetic oligonucleotide
caucuuuugggcagucacu

SEQ ID NO: 3115391 - RNA, 19 nt, Artificial Sequence
  Description of Artificial Sequence: Synthetic oligonucleotide
aucagacauacugccuuaa

SEQ ID NO: 3115392 - RNA, 19 nt, Artificial Sequence
  Description of Artificial Sequence: Synthetic oligonucleotide
gugcuuuaccaaaauggua

SEQ ID NO: 3115393 - RNA, 19 nt, Artificial Sequence
  Description of Artificial Sequence: Synthetic oligonucleotide
gucuuccuggauaguuacc

SEQ ID NO: 3115394 - RNA, 19 nt, Artificial Sequence
  Description of Artificial Sequence: Synthetic oligonucleotide
cuugcuuguacggccaugu

SEQ ID NO: 3115395 - RNA, 19 nt, Artificial Sequence
  Description of Artificial Sequence: Synthetic oligonucleotide
acagacaguaucagacaua

SEQ ID NO: 3115396 - RNA, 19 nt, Artificial Sequence
  Description of Artificial Sequence: Synthetic oligonucleotide
cuuuaccaaaaugguaacu

SEQ ID NO: 3115397 - RNA, 19 nt, Artificial Sequence
  Description of Artificial Sequence: Synthetic oligonucleotide
cagucacugcaaguggguc

SEQ ID NO: 3115398 - RNA, 19 nt, Artificial Sequence
  Description of Artificial Sequence: Synthetic oligonucleotide
acguggucucuuugugggu

SEQ ID NO: 3115399 - RNA, 19 nt, Artificial Sequence
  Description of Artificial Sequence: Synthetic oligonucleotide
uccuugcuuguacggccau

SEQ ID NO: 3115400 - RNA, 19 nt, Artificial Sequence
  Description of Artificial Sequence: Synthetic oligonucleotide
ugucaucuuuugggcaguc

SEQ ID NO: 3115401 - RNA, 19 nt, Artificial Sequence
  Description of Artificial Sequence: Synthetic oligonucleotide
uugcuuguacggccauguu

SEQ ID NO: 3115402 - RNA, 19 nt, Artificial Sequence
  Description of Artificial Sequence: Synthetic oligonucleotide
cacugcaaguggguccuug

SEQ ID NO: 3115403 - RNA, 19 nt, Artificial Sequence
  Description of Artificial Sequence: Synthetic oligonucleotide
gucacugcaaguggguccu

SEQ ID NO: 3115404 - RNA, 19 nt, Artificial Sequence
  Description of Artificial Sequence: Synthetic oligonucleotide
ccuggauaguuaccagaac

SEQ ID NO: 3115405 - RNA, 19 nt, Artificial Sequence
  Description of Artificial Sequence: Synthetic oligonucleotide
aaguggguccuugcuugua

SEQ ID NO: 3115406 - RNA, 19 nt, Artificial Sequence
  Description of Artificial Sequence: Synthetic oligonucleotide
cugccuuaacaaugagaaa

SEQ ID NO: 3115407 - RNA, 19 nt, Artificial Sequence
  Description of Artificial Sequence: Synthetic oligonucleotide
gguaacuauaacagacagu

SEQ ID NO: 3115408 - RNA, 19 nt, Artificial Sequence
  Description of Artificial Sequence: Synthetic oligonucleotide
ggguccuugcuuguacggc

SEQ ID NO: 3115409 - RNA, 19 nt, Artificial Sequence
  Description of Artificial Sequence: Synthetic oligonucleotide
gucaucuuuugggcaguca

SEQ ID NO: 3115410 - RNA, 19 nt, Artificial Sequence
  Description of Artificial Sequence: Synthetic oligonucleotide
uggucucuuuguggguuaa

SEQ ID NO: 3115411 - RNA, 19 nt, Artificial Sequence
  Description of Artificial Sequence: Synthetic oligonucleotide
uugagacaccugucaucuu

SEQ ID NO: 3115412 - RNA, 19 nt, Artificial Sequence
  Description of Artificial Sequence: Synthetic oligonucleotide
gaacuaaauuaggguauuu

SEQ ID NO: 3115413 - RNA, 19 nt, Artificial Sequence
  Description of Artificial Sequence: Synthetic oligonucleotide
guguaucuguuacguagau

SEQ ID NO: 3115414 - RNA, 19 nt, Artificial Sequence
  Description of Artificial Sequence: Synthetic oligonucleotide
guccuugcuuguacggcca

SEQ ID NO: 3115415 - RNA, 19 nt, Artificial Sequence
  Description of Artificial Sequence: Synthetic oligonucleotide
agacaguaucagacauacu

SEQ ID NO: 3115416 - RNA, 19 nt, Artificial Sequence
  Description of Artificial Sequence: Synthetic oligonucleotide
caauggcauuaguccaaaa

SEQ ID NO: 3115417 - RNA, 19 nt, Artificial Sequence
  Description of Artificial Sequence: Synthetic oligonucleotide
cugcaaguggguccuugcu

SEQ ID NO: 3115418 - RNA, 19 nt, Artificial Sequence
  Description of Artificial Sequence: Synthetic oligonucleotide
acgugagacguggucucuu

SEQ ID NO: 3115419 - RNA, 19 nt, Artificial Sequence
  Description of Artificial Sequence: Synthetic oligonucleotide
cguagauagaugggucuuc

SEQ ID NO: 3115420 - RNA, 19 nt, Artificial Sequence
  Description of Artificial Sequence: Synthetic oligonucleotide
caaguggguccuugcuugu

SEQ ID NO: 3115421 - RNA, 19 nt, Artificial Sequence
  Description of Artificial Sequence: Synthetic oligonucleotide
gggucuuccuggauaguua

SEQ ID NO: 3115422 - RNA, 19 nt, Artificial Sequence
  Description of Artificial Sequence: Synthetic oligonucleotide
ggucucuuuguggguuaac

SEQ ID NO: 3115423 - RNA, 19 nt, Artificial Sequence
  Description of Artificial Sequence: Synthetic oligonucleotide
gguuaacgcagagauuguu

SEQ ID NO: 3115424 - RNA, 19 nt, Artificial Sequence
  Description of Artificial Sequence: Synthetic oligonucleotide
ccuugcuuguacggccaug

SEQ ID NO: 3115425 - RNA, 19 nt, Artificial Sequence
  Description of Artificial Sequence: Synthetic oligonucleotide
gcagucacugcaagugggu

SEQ ID NO: 3115426 - RNA, 19 nt, Artificial Sequence
  Description of Artificial Sequence: Synthetic oligonucleotide
ucacugcaaguggguccuu

SEQ ID NO: 3115427 - RNA, 19 nt, Artificial Sequence
  Description of Artificial Sequence: Synthetic oligonucleotide
cgcagagauuguugagaca

SEQ ID NO: 3115428 - RNA, 19 nt, Artificial Sequence
  Description of Artificial Sequence: Synthetic oligonucleotide
ggguuaacgcagagauugu

SEQ ID NO: 3115429 - RNA, 19 nt, Artificial Sequence
  Description of Artificial Sequence: Synthetic oligonucleotide
ccagaacgugagacguggu

SEQ ID NO: 3115430 - RNA, 19 nt, Artificial Sequence
  Description of Artificial Sequence: Synthetic oligonucleotide
cguggucucuuuguggguu

SEQ ID NO: 3115431 - RNA, 19 nt, Artificial Sequence
  Description of Artificial Sequence: Synthetic oligonucleotide
cgugagacguggucucuuu

SEQ ID NO: 3115432 - RNA, 19 nt, Artificial Sequence
  Description of Artificial Sequence: Synthetic oligonucleotide
ccccaacaauggcauuagu

SEQ ID NO: 3115433 - RNA, 19 nt, Artificial Sequence
  Description of Artificial Sequence: Synthetic oligonucleotide
acugucacagcugaggucc

SEQ ID NO: 3115434 - RNA, 19 nt, Artificial Sequence
  Description of Artificial Sequence: Synthetic oligonucleotide
uccuccgcgguccagaugg

SEQ ID NO: 3115435 - RNA, 19 nt, Artificial Sequence
  Description of Artificial Sequence: Synthetic oligonucleotide
ucuguguccucauagucgc

SEQ ID NO: 3115436 - RNA, 19 nt, Artificial Sequence
  Description of Artificial Sequence: Synthetic oligonucleotide
uccucauagucgcuguugg

SEQ ID NO: 3115437 - RNA, 19 nt, Artificial Sequence
  Description of Artificial Sequence: Synthetic oligonucleotide
gaugggacgcgcuugcugc

SEQ ID NO: 3115438 - RNA, 19 nt, Artificial Sequence
  Description of Artificial Sequence: Synthetic oligonucleotide
ucauagucgcuguuggccc

SEQ ID NO: 3115439 - RNA, 19 nt, Artificial Sequence
  Description of Artificial Sequence: Synthetic oligonucleotide
ucgggguuccucaucggcg

SEQ ID NO: 3115440 - RNA, 19 nt, Artificial Sequence
  Description of Artificial Sequence: Synthetic oligonucleotide
aucgggguuccucaucggc

SEQ ID NO: 3115441 - RNA, 19 nt, Artificial Sequence
  Description of Artificial Sequence: Synthetic oligonucleotide
cucauagucgcuguuggcc

SEQ ID NO: 3115442 - RNA, 19 nt, Artificial Sequence
  Description of Artificial Sequence: Synthetic oligonucleotide
uugaccucccgguaccagg

SEQ ID NO: 3115443 - RNA, 19 nt, Artificial Sequence
  Description of Artificial Sequence: Synthetic oligonucleotide
gucuguguccucauagucg

SEQ ID NO: 3115444 - RNA, 19 nt, Artificial Sequence
  Description of Artificial Sequence: Synthetic oligonucleotide
ucgccguccguguagacgc

SEQ ID NO: 3115445 - RNA, 19 nt, Artificial Sequence
  Description of Artificial Sequence: Synthetic oligonucleotide
ugagcccuccagcuggucc

SEQ ID NO: 3115446 - RNA, 19 nt, Artificial Sequence
  Description of Artificial Sequence: Synthetic oligonucleotide
cucaucggcguccuggggc

SEQ ID NO: 3115447 - RNA, 19 nt, Artificial Sequence
  Description of Artificial Sequence: Synthetic oligonucleotide
agagcugggaucgggguuc

SEQ ID NO: 3115448 - RNA, 19 nt, Artificial Sequence
  Description of Artificial Sequence: Synthetic oligonucleotide
uguguccucauagucgcug

SEQ ID NO: 3115449 - RNA, 19 nt, Artificial Sequence
  Description of Artificial Sequence: Synthetic oligonucleotide
guagacgccgucugugucc

SEQ ID NO: 3115450 - RNA, 19 nt, Artificial Sequence
  Description of Artificial Sequence: Synthetic oligonucleotide
acggcuuugaccucccggu

SEQ ID NO: 3115451 - RNA, 19 nt, Artificial Sequence
  Description of Artificial Sequence: Synthetic oligonucleotide
ggaucgggguuccucaucg

SEQ ID NO: 3115452 - RNA, 19 nt, Artificial Sequence
  Description of Artificial Sequence: Synthetic oligonucleotide
ucggaugagcccuccagcu

SEQ ID NO: 3115453 - RNA, 19 nt, Artificial Sequence
  Description of Artificial Sequence: Synthetic oligonucleotide
uccucaucggcguccuggg

SEQ ID NO: 3115454 - RNA, 19 nt, Artificial Sequence
  Description of Artificial Sequence: Synthetic oligonucleotide
gucgcuguuggcccgacug

SEQ ID NO: 3115455 - RNA, 19 nt, Artificial Sequence
  Description of Artificial Sequence: Synthetic oligonucleotide
uccguguagacgccgucug

SEQ ID NO: 3115456 - RNA, 19 nt, Artificial Sequence
  Description of Artificial Sequence: Synthetic oligonucleotide
ucaucggcguccuggggcc

SEQ ID NO: 3115457 - RNA, 19 nt, Artificial Sequence
  Description of Artificial Sequence: Synthetic oligonucleotide
cauagucgcuguuggcccg

SEQ ID NO: 3115458 - RNA, 19 nt, Artificial Sequence
  Description of Artificial Sequence: Synthetic oligonucleotide
guuggcccgacugucacag

SEQ ID NO: 3115459 - RNA, 19 nt, Artificial Sequence
  Description of Artificial Sequence: Synthetic oligonucleotide
ugaccucccgguaccagga

SEQ ID NO: 3115460 - RNA, 19 nt, Artificial Sequence
  Description of Artificial Sequence: Synthetic oligonucleotide
uggcccgacugucacagcu

SEQ ID NO: 3115461 - RNA, 19 nt, Artificial Sequence
  Description of Artificial Sequence: Synthetic oligonucleotide
uguagacgccgucuguguc

SEQ ID NO: 3115462 - RNA, 19 nt, Artificial Sequence
  Description of Artificial Sequence: Synthetic oligonucleotide
ggagcuggcguccaggcug

SEQ ID NO: 3115463 - RNA, 19 nt, Artificial Sequence
  Description of Artificial Sequence: Synthetic oligonucleotide
uccagcugguccuccgcgg

SEQ ID NO: 3115464 - RNA, 19 nt, Artificial Sequence
  Description of Artificial Sequence: Synthetic oligonucleotide
cucggaugagcccuccagc

SEQ ID NO: 3115465 - RNA, 19 nt, Artificial Sequence
  Description of Artificial Sequence: Synthetic oligonucleotide
cacggcuuugaccucccgg

SEQ ID NO: 3115466 - RNA, 19 nt, Artificial Sequence
  Description of Artificial Sequence: Synthetic oligonucleotide
uccgcgguccagaugggac

SEQ ID NO: 3115467 - RNA, 19 nt, Artificial Sequence
  Description of Artificial Sequence: Synthetic oligonucleotide
cuggcguccaggcugcggc

SEQ ID NO: 3115468 - RNA, 19 nt, Artificial Sequence
  Description of Artificial Sequence: Synthetic oligonucleotide
ucacagcugagguccccgg

SEQ ID NO: 3115469 - RNA, 19 nt, Artificial Sequence
  Description of Artificial Sequence: Synthetic oligonucleotide
gguagguccagguccucgg

SEQ ID NO: 3115470 - RNA, 19 nt, Artificial Sequence
  Description of Artificial Sequence: Synthetic oligonucleotide
agguccagguccucggaug

SEQ ID NO: 3115471 - RNA, 19 nt, Artificial Sequence
  Description of Artificial Sequence: Synthetic oligonucleotide
aggaccgggccagagcugg

SEQ ID NO: 3115472 - RNA, 19 nt, Artificial Sequence
  Description of Artificial Sequence: Synthetic oligonucleotide
cugagguccccggagcugg

SEQ ID NO: 3115473 - RNA, 19 nt, Artificial Sequence
  Description of Artificial Sequence: Synthetic oligonucleotide
uccagaugggacgcgcuug

SEQ ID NO: 3115474 - RNA, 19 nt, Artificial Sequence
  Description of Artificial Sequence: Synthetic oligonucleotide
gaucgggguuccucaucgg

SEQ ID NO: 3115475 - RNA, 19 nt, Artificial Sequence
  Description of Artificial Sequence: Synthetic oligonucleotide
uuugaccucccgguaccag

SEQ ID NO: 3115476 - RNA, 19 nt, Artificial Sequence
  Description of Artificial Sequence: Synthetic oligonucleotide
uccagguccucggaugagc

SEQ ID NO: 3115477 - RNA, 19 nt, Artificial Sequence
  Description of Artificial Sequence: Synthetic oligonucleotide
gacugucacagcugagguc

SEQ ID NO: 3115478 - RNA, 19 nt, Artificial Sequence
  Description of Artificial Sequence: Synthetic oligonucleotide
caggcugcggcccgguagg

SEQ ID NO: 3115479 - RNA, 19 nt, Artificial Sequence
  Description of Artificial Sequence: Synthetic oligonucleotide
cugcaccacggcuuugacc

SEQ ID NO: 3115480 - RNA, 19 nt, Artificial Sequence
  Description of Artificial Sequence: Synthetic oligonucleotide
cucgccguccguguagacg

SEQ ID NO: 3115481 - RNA, 19 nt, Artificial Sequence
  Description of Artificial Sequence: Synthetic oligonucleotide
gccgucuguguccucauag

SEQ ID NO: 3115482 - RNA, 19 nt, Artificial Sequence
  Description of Artificial Sequence: Synthetic oligonucleotide
gucacagcugagguccccg

SEQ ID NO: 3115483 - RNA, 19 nt, Artificial Sequence
  Description of Artificial Sequence: Synthetic oligonucleotide
agguccucggaugagcccu

SEQ ID NO: 3115484 - RNA, 19 nt, Artificial Sequence
  Description of Artificial Sequence: Synthetic oligonucleotide
ucgcuguuggcccgacugu

SEQ ID NO: 3115485 - RNA, 19 nt, Artificial Sequence
  Description of Artificial Sequence: Synthetic oligonucleotide
guccucauagucgcuguug

SEQ ID NO: 3115486 - RNA, 19 nt, Artificial Sequence
  Description of Artificial Sequence: Synthetic oligonucleotide
ugcugcaccacggcuuuga

SEQ ID NO: 3115487 - RNA, 19 nt, Artificial Sequence
  Description of Artificial Sequence: Synthetic oligonucleotide
gcuuugaccucccgguacc

SEQ ID NO: 3115488 - RNA, 19 nt, Artificial Sequence
  Description of Artificial Sequence: Synthetic oligonucleotide
agcugagguccccggagcu

SEQ ID NO: 3115489 - RNA, 19 nt, Artificial Sequence
  Description of Artificial Sequence: Synthetic oligonucleotide
cuguuggcccgacugucac

SEQ ID NO: 3115490 - RNA, 19 nt, Artificial Sequence
  Description of Artificial Sequence: Synthetic oligonucleotide
uguuggcccgacugucaca

SEQ ID NO: 3115491 - RNA, 19 nt, Artificial Sequence
  Description of Artificial Sequence: Synthetic oligonucleotide
gcccgguagguccaggucc

SEQ ID NO: 3115492 - RNA, 19 nt, Artificial Sequence
  Description of Artificial Sequence: Synthetic oligonucleotide
cugggaucgggguuccuca

SEQ ID NO: 3115493 - RNA, 19 nt, Artificial Sequence
  Description of Artificial Sequence: Synthetic oligonucleotide
ccgacugucacagcugagg

SEQ ID NO: 3115494 - RNA, 19 nt, Artificial Sequence
  Description of Artificial Sequence: Synthetic oligonucleotide
uagacgccgucuguguccu

SEQ ID NO: 3115495 - RNA, 19 nt, Artificial Sequence
  Description of Artificial Sequence: Synthetic oligonucleotide
cagguccucggaugagccc

SEQ ID NO: 3115496 - RNA, 19 nt, Artificial Sequence
  Description of Artificial Sequence: Synthetic oligonucleotide
accucccgguaccaggagu

SEQ ID NO: 3115497 - RNA, 19 nt, Artificial Sequence
  Description of Artificial Sequence: Synthetic oligonucleotide
gacgccgucuguguccuca

SEQ ID NO: 3115498 - RNA, 19 nt, Artificial Sequence
  Description of Artificial Sequence: Synthetic oligonucleotide
ugucacagcugaggucccc

SEQ ID NO: 3115499 - RNA, 19 nt, Artificial Sequence
  Description of Artificial Sequence: Synthetic oligonucleotide
caccacggcuuugaccucc

SEQ ID NO: 3115500 - RNA, 19 nt, Artificial Sequence
  Description of Artificial Sequence: Synthetic oligonucleotide
uccucggaugagcccucca

SEQ ID NO: 3115501 - RNA, 19 nt, Artificial Sequence
  Description of Artificial Sequence: Synthetic oligonucleotide
ccagguccucggaugagcc

SEQ ID NO: 3115502 - RNA, 19 nt, Artificial Sequence
  Description of Artificial Sequence: Synthetic oligonucleotide
uccgaggaccgggccagag

SEQ ID NO: 3115503 - RNA, 19 nt, Artificial Sequence
  Description of Artificial Sequence: Synthetic oligonucleotide
gaccucccgguaccaggag

SEQ ID NO: 3115504 - RNA, 19 nt, Artificial Sequence
  Description of Artificial Sequence: Synthetic oligonucleotide
ugguccuccgcgguccaga

SEQ ID NO: 3115505 - RNA, 19 nt, Artificial Sequence
  Description of Artificial Sequence: Synthetic oligonucleotide
ugagguccccggagcuggc

SEQ ID NO: 3115506 - RNA, 19 nt, Artificial Sequence
  Description of Artificial Sequence: Synthetic oligonucleotide
accacggcuuugaccuccc

SEQ ID NO: 3115507 - RNA, 19 nt, Artificial Sequence
  Description of Artificial Sequence: Synthetic oligonucleotide
ccagaugggacgcgcuugc

SEQ ID NO: 3115508 - RNA, 19 nt, Artificial Sequence
  Description of Artificial Sequence: Synthetic oligonucleotide
augggacgcgcuugcugcu

SEQ ID NO: 3115509 - RNA, 19 nt, Artificial Sequence
  Description of Artificial Sequence: Synthetic oligonucleotide
gagcuggcguccaggcugc

SEQ ID NO: 3115510 - RNA, 19 nt, Artificial Sequence
  Description of Artificial Sequence: Synthetic oligonucleotide
ccucggaugagcccuccag

SEQ ID NO: 3115511 - RNA, 19 nt, Artificial Sequence
  Description of Artificial Sequence: Synthetic oligonucleotide
uggcguccaggcugcggcc

SEQ ID NO: 3115512 - RNA, 19 nt, Artificial Sequence
  Description of Artificial Sequence: Synthetic oligonucleotide
gguccagguccucggauga

SEQ ID NO: 3115513 - RNA, 19 nt, Artificial Sequence
  Description of Artificial Sequence: Synthetic oligonucleotide
gagguccccggagcuggcg

SEQ ID NO: 3115514 - RNA, 19 nt, Artificial Sequence
  Description of Artificial Sequence: Synthetic oligonucleotide
ucccgguaccaggagucac

SEQ ID NO: 3115515 - RNA, 19 nt, Artificial Sequence
  Description of Artificial Sequence: Synthetic oligonucleotide
ugggaucgggguuccucau

SEQ ID NO: 3115516 - RNA, 19 nt, Artificial Sequence
  Description of Artificial Sequence: Synthetic oligonucleotide
ccucauagucgcuguuggc

SEQ ID NO: 3115517 - RNA, 19 nt, Artificial Sequence
  Description of Artificial Sequence: Synthetic oligonucleotide
ugggacgcgcuugcugcug

SEQ ID NO: 3115518 - RNA, 19 nt, Artificial Sequence
  Description of Artificial Sequence: Synthetic oligonucleotide
auagucgcuguuggcccga

SEQ ID NO: 3115519 - RNA, 19 nt, Artificial Sequence
  Description of Artificial Sequence: Synthetic oligonucleotide
ccucccgguaccaggaguc

SEQ ID NO: 3115520 - RNA, 19 nt, Artificial Sequence
  Description of Artificial Sequence: Synthetic oligonucleotide
ccgcgguccagaugggacg

SEQ ID NO: 3115521 - RNA, 19 nt, Artificial Sequence
  Description of Artificial Sequence: Synthetic oligonucleotide
aucggcguccuggggcccg

SEQ ID NO: 3115522 - RNA, 19 nt, Artificial Sequence
  Description of Artificial Sequence: Synthetic oligonucleotide
gacgcgcuugcugcugcug

SEQ ID NO: 3115523 - RNA, 19 nt, Artificial Sequence
  Description of Artificial Sequence: Synthetic oligonucleotide
guguagacgccgucugugu

SEQ ID NO: 3115524 - RNA, 19 nt, Artificial Sequence
  Description of Artificial Sequence: Synthetic oligonucleotide
gggcccgcugcccucgccg

SEQ ID NO: 3115525 - RNA, 19 nt, Artificial Sequence
  Description of Artificial Sequence: Synthetic oligonucleotide
gcuugcugcugcugcacca

SEQ ID NO: 3115526 - RNA, 19 nt, Artificial Sequence
  Description of Artificial Sequence: Synthetic oligonucleotide
uuggcccgacugucacagc

SEQ ID NO: 3115527 - RNA, 19 nt, Artificial Sequence
  Description of Artificial Sequence: Synthetic oligonucleotide
cacagcugagguccccgga

SEQ ID NO: 3115528 - RNA, 19 nt, Artificial Sequence
  Description of Artificial Sequence: Synthetic oligonucleotide
cgucuguguccucauaguc

SEQ ID NO: 3115529 - RNA, 19 nt, Artificial Sequence
  Description of Artificial Sequence: Synthetic oligonucleotide
agucgcuguuggcccgacu

SEQ ID NO: 3115530 - RNA, 19 nt, Artificial Sequence
  Description of Artificial Sequence: Synthetic oligonucleotide
gcuccgaggaccgggccag

SEQ ID NO: 3115531 - RNA, 19 nt, Artificial Sequence
  Description of Artificial Sequence: Synthetic oligonucleotide
gaggaccgggccagagcug

SEQ ID NO: 3115532 - RNA, 19 nt, Artificial Sequence
  Description of Artificial Sequence: Synthetic oligonucleotide
guccagguccucggaugag

SEQ ID NO: 3115533 - RNA, 19 nt, Artificial Sequence
  Description of Artificial Sequence: Synthetic oligonucleotide
augagcccuccagcugguc

SEQ ID NO: 3115534 - RNA, 19 nt, Artificial Sequence
  Description of Artificial Sequence: Synthetic oligonucleotide
ggguuccucaucggcgucc

SEQ ID NO: 3115535 - RNA, 19 nt, Artificial Sequence
  Description of Artificial Sequence: Synthetic oligonucleotide
gagcugggaucgggguucc

SEQ ID NO: 3115536 - RNA, 19 nt, Artificial Sequence
  Description of Artificial Sequence: Synthetic oligonucleotide
gggacgcgcuugcugcugc

SEQ ID NO: 3115537 - RNA, 19 nt, Artificial Sequence
  Description of Artificial Sequence: Synthetic oligonucleotide
cuuugaccucccgguacca

SEQ ID NO: 3115538 - RNA, 19 nt, Artificial Sequence
  Description of Artificial Sequence: Synthetic oligonucleotide
cuggggcccgcugcccucg

SEQ ID NO: 3115539 - RNA, 19 nt, Artificial Sequence
  Description of Artificial Sequence: Synthetic oligonucleotide
agcccuccagcugguccuc

SEQ ID NO: 3115540 - RNA, 19 nt, Artificial Sequence
  Description of Artificial Sequence: Synthetic oligonucleotide
cguguagacgccgucugug

SEQ ID NO: 3115541 - RNA, 19 nt, Artificial Sequence
  Description of Artificial Sequence: Synthetic oligonucleotide
gcguccuggggcccgcugc

SEQ ID NO: 3115542 - RNA, 19 nt, Artificial Sequence
  Description of Artificial Sequence: Synthetic oligonucleotide
guccccggagcuggcgucc

SEQ ID NO: 3115543 - RNA, 19 nt, Artificial Sequence
  Description of Artificial Sequence: Synthetic oligonucleotide
gcccgacugucacagcuga

SEQ ID NO: 3115544 - RNA, 19 nt, Artificial Sequence
  Description of Artificial Sequence: Synthetic oligonucleotide
gcugggaucgggguuccuc

SEQ ID NO: 3115545 - RNA, 19 nt, Artificial Sequence
  Description of Artificial Sequence: Synthetic oligonucleotide
gggaucgggguuccucauc

SEQ ID NO: 3115546 - RNA, 19 nt, Artificial Sequence
  Description of Artificial Sequence: Synthetic oligonucleotide
guccuccgcgguccagaug

SEQ ID NO: 3115547 - RNA, 19 nt, Artificial Sequence
  Description of Artificial Sequence: Synthetic oligonucleotide
ggcuccgaggaccgggcca

SEQ ID NO: 3115548 - RNA, 19 nt, Artificial Sequence
  Description of Artificial Sequence: Synthetic oligonucleotide
ugcccucgccguccgugua

SEQ ID NO: 3115549 - RNA, 19 nt, Artificial Sequence
  Description of Artificial Sequence: Synthetic oligonucleotide
guuccucaucggcguccug

SEQ ID NO: 3115550 - RNA, 19 nt, Artificial Sequence
  Description of Artificial Sequence: Synthetic oligonucleotide
gcugcccucgccguccgug

SEQ ID NO: 3115551 - RNA, 19 nt, Artificial Sequence
  Description of Artificial Sequence: Synthetic oligonucleotide
ccgaggaccgggccagagc

SEQ ID NO: 3115552 - RNA, 19 nt, Artificial Sequence
  Description of Artificial Sequence: Synthetic oligonucleotide
gcguccaggcugcggcccg

SEQ ID NO: 3115553 - RNA, 19 nt, Artificial Sequence
  Description of Artificial Sequence: Synthetic oligonucleotide
gcugagguccccggagcug

SEQ ID NO: 3115554 - RNA, 19 nt, Artificial Sequence
  Description of Artificial Sequence: Synthetic oligonucleotide
gcugcaccacggcuuugac

SEQ ID NO: 3115555 - RNA, 19 nt, Artificial Sequence
  Description of Artificial Sequence: Synthetic oligonucleotide
cccuccagcugguccuccg

SEQ ID NO: 3115556 - RNA, 19 nt, Artificial Sequence
  Description of Artificial Sequence: Synthetic oligonucleotide
agacgccgucuguguccuc

SEQ ID NO: 3115557 - RNA, 19 nt, Artificial Sequence
  Description of Artificial Sequence: Synthetic oligonucleotide
guccguguagacgccgucu

SEQ ID NO: 3115558 - RNA, 19 nt, Artificial Sequence
  Description of Artificial Sequence: Synthetic oligonucleotide
acgccgucuguguccucau

SEQ ID NO: 3115559 - RNA, 19 nt, Artificial Sequence
  Description of Artificial Sequence: Synthetic oligonucleotide
ccucaucggcguccugggg

SEQ ID NO: 3115560 - RNA, 19 nt, Artificial Sequence
  Description of Artificial Sequence: Synthetic oligonucleotide
gcuggcguccaggcugcgg

SEQ ID NO: 3115561 - RNA, 19 nt, Artificial Sequence
  Description of Artificial Sequence: Synthetic oligonucleotide
ggcccgacugucacagcug

SEQ ID NO: 3115562 - RNA, 19 nt, Artificial Sequence
  Description of Artificial Sequence: Synthetic oligonucleotide
gcuguuggcccgacuguca

SEQ ID NO: 3115563 - RNA, 19 nt, Artificial Sequence
  Description of Artificial Sequence: Synthetic oligonucleotide
ugcggcccgguagguccag

SEQ ID NO: 3115564 - RNA, 19 nt, Artificial Sequence
  Description of Artificial Sequence: Synthetic oligonucleotide
gccguccguguagacgccg

SEQ ID NO: 3115565 - RNA, 19 nt, Artificial Sequence
  Description of Artificial Sequence: Synthetic oligonucleotide
ggcccgguagguccagguc

SEQ ID NO: 3115566 - RNA, 19 nt, Artificial Sequence
  Description of Artificial Sequence: Synthetic oligonucleotide
gaugagcccuccagcuggu

SEQ ID NO: 3115567 - RNA, 19 nt, Artificial Sequence
  Description of Artificial Sequence: Synthetic oligonucleotide
uagucgcuguuggcccgac

SEQ ID NO: 3115568 - RNA, 19 nt, Artificial Sequence
  Description of Artificial Sequence: Synthetic oligonucleotide
guccucggaugagcccucc

SEQ ID NO: 3115569 - RNA, 19 nt, Artificial Sequence
  Description of Artificial Sequence: Synthetic oligonucleotide
uggggcccgcugcccucgc

SEQ ID NO: 3115570 - RNA, 19 nt, Artificial Sequence
  Description of Artificial Sequence: Synthetic oligonucleotide
uccccggagcuggcgucca

SEQ ID NO: 3115571 - RNA, 19 nt, Artificial Sequence
  Description of Artificial Sequence: Synthetic oligonucleotide
gguccccggagcuggcguc

SEQ ID NO: 3115572 - RNA, 19 nt, Artificial Sequence
  Description of Artificial Sequence: Synthetic oligonucleotide
caucggcguccuggggccc

SEQ ID NO: 3115573 - RNA, 19 nt, Artificial Sequence
  Description of Artificial Sequence: Synthetic oligonucleotide
guccagaugggacgcgcuu

SEQ ID NO: 3115574 - RNA, 19 nt, Artificial Sequence
  Description of Artificial Sequence: Synthetic oligonucleotide
cucccgguaccaggaguca

SEQ ID NO: 3115575 - RNA, 19 nt, Artificial Sequence
  Description of Artificial Sequence: Synthetic oligonucleotide
ucggcguccuggggcccgc

SEQ ID NO: 3115576 - RNA, 19 nt, Artificial Sequence
  Description of Artificial Sequence: Synthetic oligonucleotide
cccgacugucacagcugag

SEQ ID NO: 3115577 - RNA, 19 nt, Artificial Sequence
  Description of Artificial Sequence: Synthetic oligonucleotide
cccggagcuggcguccagg

SEQ ID NO: 3115578 - RNA, 19 nt, Artificial Sequence
  Description of Artificial Sequence: Synthetic oligonucleotide
cugguccuccgcgguccag

SEQ ID NO: 3115579 - RNA, 19 nt, Artificial Sequence
  Description of Artificial Sequence: Synthetic oligonucleotide
cgguagguccagguccucg

SEQ ID NO: 3115580 - RNA, 19 nt, Artificial Sequence
  Description of Artificial Sequence: Synthetic oligonucleotide
cagagcugggaucgggguu

SEQ ID NO: 3115581 - RNA, 19 nt, Artificial Sequence
  Description of Artificial Sequence: Synthetic oligonucleotide
gggguuccucaucggcguc

SEQ ID NO: 3115582 - RNA, 19 nt, Artificial Sequence
  Description of Artificial Sequence: Synthetic oligonucleotide
agcuggcguccaggcugcg

SEQ ID NO: 3115583 - RNA, 19 nt, Artificial Sequence
  Description of Artificial Sequence: Synthetic oligonucleotide
cgcuugcugcugcugcacc

SEQ ID NO: 3115584 - RNA, 19 nt, Artificial Sequence
  Description of Artificial Sequence: Synthetic oligonucleotide
cuccgcgguccagauggga

SEQ ID NO: 3115585 - RNA, 19 nt, Artificial Sequence
  Description of Artificial Sequence: Synthetic oligonucleotide
cguccuggggcccgcugcc

SEQ ID NO: 3115586 - RNA, 19 nt, Artificial Sequence
  Description of Artificial Sequence: Synthetic oligonucleotide
ccgggccagagcugggauc

SEQ ID NO: 3115587 - RNA, 19 nt, Artificial Sequence
  Description of Artificial Sequence: Synthetic oligonucleotide
cgcgguccagaugggacgc

SEQ ID NO: 3115588 - RNA, 19 nt, Artificial Sequence
  Description of Artificial Sequence: Synthetic oligonucleotide
ggaccgggccagagcuggg

SEQ ID NO: 3115589 - RNA, 19 nt, Artificial Sequence
  Description of Artificial Sequence: Synthetic oligonucleotide
cgaggaccgggccagagcu

SEQ ID NO: 3115590 - RNA, 19 nt, Artificial Sequence
  Description of Artificial Sequence: Synthetic oligonucleotide
ccuccgcgguccagauggg

SEQ ID NO: 3115591 - RNA, 19 nt, Artificial Sequence
  Description of Artificial Sequence: Synthetic oligonucleotide
cuguguccucauagucgcu

SEQ ID NO: 3115592 - RNA, 19 nt, Artificial Sequence
  Description of Artificial Sequence: Synthetic oligonucleotide
gcgcuugcugcugcugcac

SEQ ID NO: 3115593 - RNA, 19 nt, Artificial Sequence
  Description of Artificial Sequence: Synthetic oligonucleotide
ccacggcuuugaccucccg

SEQ ID NO: 3115594 - RNA, 19 nt, Artificial Sequence
  Description of Artificial Sequence: Synthetic oligonucleotide
gguuccucaucggcguccu

SEQ ID NO: 3115595 - RNA, 19 nt, Artificial Sequence
  Description of Artificial Sequence: Synthetic oligonucleotide
ccgucuguguccucauagu

SEQ ID NO: 3115596 - RNA, 19 nt, Artificial Sequence
  Description of Artificial Sequence: Synthetic oligonucleotide
aggcugcggcccgguaggu

SEQ ID NO: 3115597 - RNA, 19 nt, Artificial Sequence
  Description of Artificial Sequence: Synthetic oligonucleotide
gguccucggaugagcccuc

SEQ ID NO: 3115598 - RNA, 19 nt, Artificial Sequence
  Description of Artificial Sequence: Synthetic oligonucleotide
cgacugucacagcugaggu

SEQ ID NO: 3115599 - RNA, 19 nt, Artificial Sequence
  Description of Artificial Sequence: Synthetic oligonucleotide
agcugggaucgggguuccu

SEQ ID NO: 3115600 - RNA, 19 nt, Artificial Sequence
  Description of Artificial Sequence: Synthetic oligonucleotide
gcugguccuccgcggucca

SEQ ID NO: 3115601 - RNA, 19 nt, Artificial Sequence
  Description of Artificial Sequence: Synthetic oligonucleotide
cgcuguuggcccgacuguc

SEQ ID NO: 3115602 - RNA, 19 nt, Artificial Sequence
  Description of Artificial Sequence: Synthetic oligonucleotide
gguccagaugggacgcgcu

SEQ ID NO: 3115603 - RNA, 19 nt, Artificial Sequence
  Description of Artificial Sequence: Synthetic oligonucleotide
gcaccacggcuuugaccuc

SEQ ID NO: 3115604 - RNA, 19 nt, Artificial Sequence
  Description of Artificial Sequence: Synthetic oligonucleotide
ccuggggcccgcugcccuc

SEQ ID NO: 3115605 - RNA, 19 nt, Artificial Sequence
  Description of Artificial Sequence: Synthetic oligonucleotide
cccgguagguccagguccu

SEQ ID NO: 3115606 - RNA, 19 nt, Artificial Sequence
  Description of Artificial Sequence: Synthetic oligonucleotide
cguccguguagacgccguc

SEQ ID NO: 3115607 - RNA, 19 nt, Artificial Sequence
  Description of Artificial Sequence: Synthetic oligonucleotide
gguccuccgcgguccagau

SEQ ID NO: 3115608 - RNA, 19 nt, Artificial Sequence
  Description of Artificial Sequence: Synthetic oligonucleotide
ccucgccguccguguagac

SEQ ID NO: 3115609 - RNA, 19 nt, Artificial Sequence
  Description of Artificial Sequence: Synthetic oligonucleotide
gcggcccgguagguccagg

SEQ ID NO: 3115610 - RNA, 19 nt, Artificial Sequence
  Description of Artificial Sequence: Synthetic oligonucleotide
cgggguuccucaucggcgu

SEQ ID NO: 3115611 - RNA, 19 nt, Artificial Sequence
  Description of Artificial Sequence: Synthetic oligonucleotide
ggacgcgcuugcugcugcu

SEQ ID NO: 3115612 - RNA, 19 nt, Artificial Sequence
  Description of Artificial Sequence: Synthetic oligonucleotide
cgccguccguguagacgcc

SEQ ID NO: 3115613 - RNA, 19 nt, Artificial Sequence
  Description of Artificial Sequence: Synthetic oligonucleotide
cuccgaggaccgggccaga

SEQ ID NO: 3115614 - RNA, 19 nt, Artificial Sequence
  Description of Artificial Sequence: Synthetic oligonucleotide
ccguguagacgccgucugu

SEQ ID NO: 3115615 - RNA, 19 nt, Artificial Sequence
  Description of Artificial Sequence: Synthetic oligonucleotide
cccucgccguccguguaga

SEQ ID NO: 3115616 - RNA, 19 nt, Artificial Sequence
  Description of Artificial Sequence: Synthetic oligonucleotide
ggcccgcugcccucgccgu

SEQ ID NO: 3115617 - RNA, 19 nt, Artificial Sequence
  Description of Artificial Sequence: Synthetic oligonucleotide
ccguccguguagacgccgu

SEQ ID NO: 3115618 - RNA, 19 nt, Artificial Sequence
  Description of Artificial Sequence: Synthetic oligonucleotide
guccaggcugcggcccggu

SEQ ID NO: 3115619 - RNA, 19 nt, Artificial Sequence
  Description of Artificial Sequence: Synthetic oligonucleotide
ccgguagguccagguccuc

SEQ ID NO: 3115620 - RNA, 19 nt, Artificial Sequence
  Description of Artificial Sequence: Synthetic oligonucleotide
cggcuuugaccucccggua

SEQ ID NO: 3115621 - RNA, 19 nt, Artificial Sequence
  Description of Artificial Sequence: Synthetic oligonucleotide
cggcccgguagguccaggu

SEQ ID NO: 3115622 - RNA, 19 nt, Artificial Sequence
  Description of Artificial Sequence: Synthetic oligonucleotide
cgccgucuguguccucaua

SEQ ID NO: 3115623 - RNA, 19 nt, Artificial Sequence
  Description of Artificial Sequence: Synthetic oligonucleotide
cggcguccuggggcccgcu

SEQ ID NO: 3115624 - RNA, 19 nt, Artificial Sequence
  Description of Artificial Sequence: Synthetic oligonucleotide
aacauuuacuuccaacucc

SEQ ID NO: 3115625 - RNA, 19 nt, Artificial Sequence
  Description of Artificial Sequence: Synthetic oligonucleotide
aguuguuauauucagugcc

SEQ ID NO: 3115626 - RNA, 19 nt, Artificial Sequence
  Description of Artificial Sequence: Synthetic oligonucleotide
aagucaaguuguuauauuc

SEQ ID NO: 3115627 - RNA, 19 nt, Artificial Sequence
  Description of Artificial Sequence: Synthetic oligonucleotide
gucaaaucuagcuagcugg

SEQ ID NO: 3115628 - RNA, 19 nt, Artificial Sequence
  Description of Artificial Sequence: Synthetic oligonucleotide
aaguuguuauauucagugc

SEQ ID NO: 3115629 - RNA, 19 nt, Artificial Sequence
  Description of Artificial Sequence: Synthetic oligonucleotide
aaucuagcuagcuggacuc

SEQ ID NO: 3115630 - RNA, 19 nt, Artificial Sequence
  Description of Artificial Sequence: Synthetic oligonucleotide
uuuacuuccaacuccaauc

SEQ ID NO: 3115631 - RNA, 19 nt, Artificial Sequence
  Description of Artificial Sequence: Synthetic oligonucleotide
caaguuguuauauucagug

SEQ ID NO: 3115632 - RNA, 19 nt, Artificial Sequence
  Description of Artificial Sequence: Synthetic oligonucleotide
aauuccagcuccuccgggc

SEQ ID NO: 3115633 - RNA, 19 nt, Artificial Sequence
  Description of Artificial Sequence: Synthetic oligonucleotide
agaaauuccagcuccuccg

SEQ ID NO: 3115634 - RNA, 19 nt, Artificial Sequence
  Description of Artificial Sequence: Synthetic oligonucleotide
ugugccaugcaaaaggucu

SEQ ID NO: 3115635 - RNA, 19 nt, Artificial Sequence
  Description of Artificial Sequence: Synthetic oligonucleotide
aaaucuagcuagcuggacu

SEQ ID NO: 3115636 - RNA, 19 nt, Artificial Sequence
  Description of Artificial Sequence: Synthetic oligonucleotide
aaaaggucuggcuggaugu

SEQ ID NO: 3115637 - RNA, 19 nt, Artificial Sequence
  Description of Artificial Sequence: Synthetic oligonucleotide
uccaauggugcucugagga

SEQ ID NO: 3115638 - RNA, 19 nt, Artificial Sequence
  Description of Artificial Sequence: Synthetic oligonucleotide
uuacuuccaacuccaaucc

SEQ ID NO: 3115639 - RNA, 19 nt, Artificial Sequence
  Description of Artificial Sequence: Synthetic oligonucleotide
ugucaaaucuagcuagcug

SEQ ID NO: 3115640 - RNA, 19 nt, Artificial Sequence
  Description of Artificial Sequence: Synthetic oligonucleotide
caugcaaaaggucuggcug

SEQ ID NO: 3115641 - RNA, 19 nt, Artificial Sequence
  Description of Artificial Sequence: Synthetic oligonucleotide
ucaugcuuccccuuguacc

SEQ ID NO: 3115642 - RNA, 19 nt, Artificial Sequence
  Description of Artificial Sequence: Synthetic oligonucleotide
uuauauucagugccgucug

SEQ ID NO: 3115643 - RNA, 19 nt, Artificial Sequence
  Description of Artificial Sequence: Synthetic oligonucleotide
uuucuguggaggccgaucc

SEQ ID NO: 3115644 - RNA, 19 nt, Artificial Sequence
  Description of Artificial Sequence: Synthetic oligonucleotide
gucaaguuguuauauucag

SEQ ID NO: 3115645 - RNA, 19 nt, Artificial Sequence
  Description of Artificial Sequence: Synthetic oligonucleotide
augcaaaaggucuggcugg

SEQ ID NO: 3115646 - RNA, 19 nt, Artificial Sequence
  Description of Artificial Sequence: Synthetic oligonucleotide
guuguuauauucagugccg

SEQ ID NO: 3115647 - RNA, 19 nt, Artificial Sequence
  Description of Artificial Sequence: Synthetic oligonucleotide
ucugaggacuuucugugga

SEQ ID NO: 3115648 - RNA, 19 nt, Artificial Sequence
  Description of Artificial Sequence: Synthetic oligonucleotide
gaaauuccagcuccuccgg

SEQ ID NO: 3115649 - RNA, 19 nt, Artificial Sequence
  Description of Artificial Sequence: Synthetic oligonucleotide
ucaaguuguuauauucagu

SEQ ID NO: 3115650 - RNA, 19 nt, Artificial Sequence
  Description of Artificial Sequence: Synthetic oligonucleotide
ucaaaucuagcuagcugga

SEQ ID NO: 3115651 - RNA, 19 nt, Artificial Sequence
  Description of Artificial Sequence: Synthetic oligonucleotide
uauucagugccgucugucc

SEQ ID NO: 3115652 - RNA, 19 nt, Artificial Sequence
  Description of Artificial Sequence: Synthetic oligonucleotide
cuccagaaauuccagcucc

SEQ ID NO: 3115653 - RNA, 19 nt, Artificial Sequence
  Description of Artificial Sequence: Synthetic oligonucleotide
aaggucuggcuggaugucc

SEQ ID NO: 3115654 - RNA, 19 nt, Artificial Sequence
  Description of Artificial Sequence: Synthetic oligonucleotide
ucuguccacauccaauggu

SEQ ID NO: 3115655 - RNA, 19 nt, Artificial Sequence
  Description of Artificial Sequence: Synthetic oligonucleotide
ucagguaggcacacucucc

SEQ ID NO: 3115656 - RNA, 19 nt, Artificial Sequence
  Description of Artificial Sequence: Synthetic oligonucleotide
cagaaauuccagcuccucc

SEQ ID NO: 3115657 - RNA, 19 nt, Artificial Sequence
  Description of Artificial Sequence: Synthetic oligonucleotide
uguaccucuccagaaauuc

SEQ ID NO: 3115658 - RNA, 19 nt, Artificial Sequence
  Description of Artificial Sequence: Synthetic oligonucleotide
ugcucugaggacuuucugu

SEQ ID NO: 3115659 - RNA, 19 nt, Artificial Sequence
  Description of Artificial Sequence: Synthetic oligonucleotide
aggcacacucuccuucucc

SEQ ID NO: 3115660 - RNA, 19 nt, Artificial Sequence
  Description of Artificial Sequence: Synthetic oligonucleotide
cauccaauggugcucugag

SEQ ID NO: 3115661 - RNA, 19 nt, Artificial Sequence
  Description of Artificial Sequence: Synthetic oligonucleotide
uguccacauccaauggugc

SEQ ID NO: 3115662 - RNA, 19 nt, Artificial Sequence
  Description of Artificial Sequence: Synthetic oligonucleotide
ccuugugccaugcaaaagg

SEQ ID NO: 3115663 - RNA, 19 nt, Artificial Sequence
  Description of Artificial Sequence: Synthetic oligonucleotide
auuuacuuccaacuccaau

SEQ ID NO: 3115664 - RNA, 19 nt, Artificial Sequence
  Description of Artificial Sequence: Synthetic oligonucleotide
cuguccacauccaauggug

SEQ ID NO: 3115665 - RNA, 19 nt, Artificial Sequence
  Description of Artificial Sequence: Synthetic oligonucleotide
caaaaggucuggcuggaug

SEQ ID NO: 3115666 - RNA, 19 nt, Artificial Sequence
  Description of Artificial Sequence: Synthetic oligonucleotide
ggcugucaaaucuagcuag

SEQ ID NO: 3115667 - RNA, 19 nt, Artificial Sequence
  Description of Artificial Sequence: Synthetic oligonucleotide
gauccaguggucaugcuuc

SEQ ID NO: 3115668 - RNA, 19 nt, Artificial Sequence
  Description of Artificial Sequence: Synthetic oligonucleotide
gaggacuuucuguggaggc

SEQ ID NO: 3115669 - RNA, 19 nt, Artificial Sequence
  Description of Artificial Sequence: Synthetic oligonucleotide
aggacuuucuguggaggcc

SEQ ID NO: 3115670 - RNA, 19 nt, Artificial Sequence
  Description of Artificial Sequence: Synthetic oligonucleotide
cacacucuccuucuccucg

SEQ ID NO: 3115671 - RNA, 19 nt, Artificial Sequence
  Description of Artificial Sequence: Synthetic oligonucleotide
ucuccagaaauuccagcuc

SEQ ID NO: 3115672 - RNA, 19 nt, Artificial Sequence
  Description of Artificial Sequence: Synthetic oligonucleotide
auauucagugccgucuguc

SEQ ID NO: 3115673 - RNA, 19 nt, Artificial Sequence
  Description of Artificial Sequence: Synthetic oligonucleotide
uguuauauucagugccguc

SEQ ID NO: 3115674 - RNA, 19 nt, Artificial Sequence
  Description of Artificial Sequence: Synthetic oligonucleotide
acauuuacuuccaacucca

SEQ ID NO: 3115675 - RNA, 19 nt, Artificial Sequence
  Description of Artificial Sequence: Synthetic oligonucleotide
uagcuggacuccuugugcc

SEQ ID NO: 3115676 - RNA, 19 nt, Artificial Sequence
  Description of Artificial Sequence: Synthetic oligonucleotide
aaaggucuggcuggauguc

SEQ ID NO: 3115677 - RNA, 19 nt, Artificial Sequence
  Description of Artificial Sequence: Synthetic oligonucleotide
gugccgucuguccacaucc

SEQ ID NO: 3115678 - RNA, 19 nt, Artificial Sequence
  Description of Artificial Sequence: Synthetic oligonucleotide
uggaggccgauccaguggu

SEQ ID NO: 3115679 - RNA, 19 nt, Artificial Sequence
  Description of Artificial Sequence: Synthetic oligonucleotide
agucaaguuguuauauuca

SEQ ID NO: 3115680 - RNA, 19 nt, Artificial Sequence
  Description of Artificial Sequence: Synthetic oligonucleotide
auccaguggucaugcuucc

SEQ ID NO: 3115681 - RNA, 19 nt, Artificial Sequence
  Description of Artificial Sequence: Synthetic oligonucleotide
uauauucagugccgucugu

SEQ ID NO: 3115682 - RNA, 19 nt, Artificial Sequence
  Description of Artificial Sequence: Synthetic oligonucleotide
uccgggcugucaaaucuag

SEQ ID NO: 3115683 - RNA, 19 nt, Artificial Sequence
  Description of Artificial Sequence: Synthetic oligonucleotide
auccaauggugcucugagg

SEQ ID NO: 3115684 - RNA, 19 nt, Artificial Sequence
  Description of Artificial Sequence: Synthetic oligonucleotide
auucagugccgucugucca

SEQ ID NO: 3115685 - RNA, 19 nt, Artificial Sequence
  Description of Artificial Sequence: Synthetic oligonucleotide
cucugaggacuuucugugg

SEQ ID NO: 3115686 - RNA, 19 nt, Artificial Sequence
  Description of Artificial Sequence: Synthetic oligonucleotide
uuccccuuguaccucucca

SEQ ID NO: 3115687 - RNA, 19 nt, Artificial Sequence
  Description of Artificial Sequence: Synthetic oligonucleotide
ugccaugcaaaaggucugg

SEQ ID NO: 3115688 - RNA, 19 nt, Artificial Sequence
  Description of Artificial Sequence: Synthetic oligonucleotide
agugccgucuguccacauc

SEQ ID NO: 3115689 - RNA, 19 nt, Artificial Sequence
  Description of Artificial Sequence: Synthetic oligonucleotide
uccccuuguaccucuccag

SEQ ID NO: 3115690 - RNA, 19 nt, Artificial Sequence
  Description of Artificial Sequence: Synthetic oligonucleotide
guuauauucagugccgucu

SEQ ID NO: 3115691 - RNA, 19 nt, Artificial Sequence
  Description of Artificial Sequence: Synthetic oligonucleotide
uccagaaauuccagcuccu

SEQ ID NO: 3115692 - RNA, 19 nt, Artificial Sequence
  Description of Artificial Sequence: Synthetic oligonucleotide
uuguuauauucagugccgu

SEQ ID NO: 3115693 - RNA, 19 nt, Artificial Sequence
  Description of Artificial Sequence: Synthetic oligonucleotide
uagcuagcuggacuccuug

SEQ ID NO: 3115694 - RNA, 19 nt, Artificial Sequence
  Description of Artificial Sequence: Synthetic oligonucleotide
uucagugccgucuguccac

SEQ ID NO: 3115695 - RNA, 19 nt, Artificial Sequence
  Description of Artificial Sequence: Synthetic oligonucleotide
acacucuccuucuccucgg

SEQ ID NO: 3115696 - RNA, 19 nt, Artificial Sequence
  Description of Artificial Sequence: Synthetic oligonucleotide
uacuuccaacuccaaucca

SEQ ID NO: 3115697 - RNA, 19 nt, Artificial Sequence
  Description of Artificial Sequence: Synthetic oligonucleotide
cucagguaggcacacucuc

SEQ ID NO: 3115698 - RNA, 19 nt, Artificial Sequence
  Description of Artificial Sequence: Synthetic oligonucleotide
gcucugaggacuuucugug

SEQ ID NO: 3115699 - RNA, 19 nt, Artificial Sequence
  Description of Artificial Sequence: Synthetic oligonucleotide
aucuagcuagcuggacucc

SEQ ID NO: 3115700 - RNA, 19 nt, Artificial Sequence
  Description of Artificial Sequence: Synthetic oligonucleotide
ucuggcuggauguccaguu

SEQ ID NO: 3115701 - RNA, 19 nt, Artificial Sequence
  Description of Artificial Sequence: Synthetic oligonucleotide
cugaggacuuucuguggag

SEQ ID NO: 3115702 - RNA, 19 nt, Artificial Sequence
  Description of Artificial Sequence: Synthetic oligonucleotide
gacuccuugugccaugcaa

SEQ ID NO: 3115703 - RNA, 19 nt, Artificial Sequence
  Description of Artificial Sequence: Synthetic oligonucleotide
ggacuuucuguggaggccg

SEQ ID NO: 3115704 - RNA, 19 nt, Artificial Sequence
  Description of Artificial Sequence: Synthetic oligonucleotide
uugugccaugcaaaagguc

SEQ ID NO: 3115705 - RNA, 19 nt, Artificial Sequence
  Description of Artificial Sequence: Synthetic oligonucleotide
uccacauccaauggugcuc

SEQ ID NO: 3115706 - RNA, 19 nt, Artificial Sequence
  Description of Artificial Sequence: Synthetic oligonucleotide
ucuagcuagcuggacuccu

SEQ ID NO: 3115707 - RNA, 19 nt, Artificial Sequence
  Description of Artificial Sequence: Synthetic oligonucleotide
cucuccagaaauuccagcu

SEQ ID NO: 3115708 - RNA, 19 nt, Artificial Sequence
  Description of Artificial Sequence: Synthetic oligonucleotide
guggucaugcuuccccuug

SEQ ID NO: 3115709 - RNA, 19 nt, Artificial Sequence
  Description of Artificial Sequence: Synthetic oligonucleotide
guaccucuccagaaauucc

SEQ ID NO: 3115710 - RNA, 19 nt, Artificial Sequence
  Description of Artificial Sequence: Synthetic oligonucleotide
cuggauguccaguuuucca

SEQ ID NO: 3115711 - RNA, 19 nt, Artificial Sequence
  Description of Artificial Sequence: Synthetic oligonucleotide
uggcuggauguccaguuuu

SEQ ID NO: 3115712 - RNA, 19 nt, Artificial Sequence
  Description of Artificial Sequence: Synthetic oligonucleotide
ugcaaaaggucuggcugga

SEQ ID NO: 3115713 - RNA, 19 nt, Artificial Sequence
  Description of Artificial Sequence: Synthetic oligonucleotide
gucaugcuuccccuuguac

SEQ ID NO: 3115714 - RNA, 19 nt, Artificial Sequence
  Description of Artificial Sequence: Synthetic oligonucleotide
uuguaccucuccagaaauu

SEQ ID NO: 3115715 - RNA, 19 nt, Artificial Sequence
  Description of Artificial Sequence: Synthetic oligonucleotide
caaaucuagcuagcuggac

SEQ ID NO: 3115716 - RNA, 19 nt, Artificial Sequence
  Description of Artificial Sequence: Synthetic oligonucleotide
gguaggcacacucuccuuc

SEQ ID NO: 3115717 - RNA, 19 nt, Artificial Sequence
  Description of Artificial Sequence: Synthetic oligonucleotide
aauggugcucugaggacuu

SEQ ID NO: 3115718 - RNA, 19 nt, Artificial Sequence
  Description of Artificial Sequence: Synthetic oligonucleotide
caugcuuccccuuguaccu

SEQ ID NO: 3115719 - RNA, 19 nt, Artificial Sequence
  Description of Artificial Sequence: Synthetic oligonucleotide
uggacuccuugugccaugc

SEQ ID NO: 3115720 - RNA, 19 nt, Artificial Sequence
  Description of Artificial Sequence: Synthetic oligonucleotide
agcuagcuggacuccuugu

SEQ ID NO: 3115721 - RNA, 19 nt, Artificial Sequence
  Description of Artificial Sequence: Synthetic oligonucleotide
ccaguggucaugcuucccc

SEQ ID NO: 3115722 - RNA, 19 nt, Artificial Sequence
  Description of Artificial Sequence: Synthetic oligonucleotide
gaagucaaguuguuauauu

SEQ ID NO: 3115723 - RNA, 19 nt, Artificial Sequence
  Description of Artificial Sequence: Synthetic oligonucleotide
cuuucuguggaggccgauc

SEQ ID NO: 3115724 - RNA, 19 nt, Artificial Sequence
  Description of Artificial Sequence: Synthetic oligonucleotide
acuccuugugccaugcaaa

SEQ ID NO: 3115725 - RNA, 19 nt, Artificial Sequence
  Description of Artificial Sequence: Synthetic oligonucleotide
cuuccccuuguaccucucc

SEQ ID NO: 3115726 - RNA, 19 nt, Artificial Sequence
  Description of Artificial Sequence: Synthetic oligonucleotide
acauccaauggugcucuga

SEQ ID NO: 3115727 - RNA, 19 nt, Artificial Sequence
  Description of Artificial Sequence: Synthetic oligonucleotide
agcuggacuccuugugcca

SEQ ID NO: 3115728 - RNA, 19 nt, Artificial Sequence
  Description of Artificial Sequence: Synthetic oligonucleotide
accucuccagaaauuccag

SEQ ID NO: 3115729 - RNA, 19 nt, Artificial Sequence
  Description of Artificial Sequence: Synthetic oligonucleotide
cuugugccaugcaaaaggu

SEQ ID NO: 3115730 - RNA, 19 nt, Artificial Sequence
  Description of Artificial Sequence: Synthetic oligonucleotide
gugccaugcaaaaggucug

SEQ ID NO: 3115731 - RNA, 19 nt, Artificial Sequence
  Description of Artificial Sequence: Synthetic oligonucleotide
gugcucugaggacuuucug

SEQ ID NO: 3115732 - RNA, 19 nt, Artificial Sequence
  Description of Artificial Sequence: Synthetic oligonucleotide
ggggaagucaaguuguuau

SEQ ID NO: 3115733 - RNA, 19 nt, Artificial Sequence
  Description of Artificial Sequence: Synthetic oligonucleotide
cuuguaccucuccagaaau

SEQ ID NO: 3115734 - RNA, 19 nt, Artificial Sequence
  Description of Artificial Sequence: Synthetic oligonucleotide
acucagguaggcacacucu

SEQ ID NO: 3115735 - RNA, 19 nt, Artificial Sequence
  Description of Artificial Sequence: Synthetic oligonucleotide
gaggccgauccagugguca

SEQ ID NO: 3115736 - RNA, 19 nt, Artificial Sequence
  Description of Artificial Sequence: Synthetic oligonucleotide
cuccuugugccaugcaaaa

SEQ ID NO: 3115737 - RNA, 19 nt, Artificial Sequence
  Description of Artificial Sequence: Synthetic oligonucleotide
cgucuguccacauccaaug

SEQ ID NO: 3115738 - RNA, 19 nt, Artificial Sequence
  Description of Artificial Sequence: Synthetic oligonucleotide
ugccgucuguccacaucca

SEQ ID NO: 3115739 - RNA, 19 nt, Artificial Sequence
  Description of Artificial Sequence: Synthetic oligonucleotide
ucagugccgucuguccaca

SEQ ID NO: 3115740 - RNA, 19 nt, Artificial Sequence
  Description of Artificial Sequence: Synthetic oligonucleotide
ccucuccagaaauuccagc

SEQ ID NO: 3115741 - RNA, 19 nt, Artificial Sequence
  Description of Artificial Sequence: Synthetic oligonucleotide
uaggcacacucuccuucuc

SEQ ID NO: 3115742 - RNA, 19 nt, Artificial Sequence
  Description of Artificial Sequence: Synthetic oligonucleotide
uccaguggucaugcuuccc

SEQ ID NO: 3115743 - RNA, 19 nt, Artificial Sequence
  Description of Artificial Sequence: Synthetic oligonucleotide
guaggcacacucuccuucu

SEQ ID NO: 3115744 - RNA, 19 nt, Artificial Sequence
  Description of Artificial Sequence: Synthetic oligonucleotide
aguggucaugcuuccccuu

SEQ ID NO: 3115745 - RNA, 19 nt, Artificial Sequence
  Description of Artificial Sequence: Synthetic oligonucleotide
gcugucaaaucuagcuagc

SEQ ID NO: 3115746 - RNA, 19 nt, Artificial Sequence
  Description of Artificial Sequence: Synthetic oligonucleotide
auguccaguuuuccacuuu

SEQ ID NO: 3115747 - RNA, 19 nt, Artificial Sequence
  Description of Artificial Sequence: Synthetic oligonucleotide
uggugcucugaggacuuuc

SEQ ID NO: 3115748 - RNA, 19 nt, Artificial Sequence
  Description of Artificial Sequence: Synthetic oligonucleotide
uccuccgggcugucaaauc

SEQ ID NO: 3115749 - RNA, 19 nt, Artificial Sequence
  Description of Artificial Sequence: Synthetic oligonucleotide
augcuuccccuuguaccuc

SEQ ID NO: 3115750 - RNA, 19 nt, Artificial Sequence
  Description of Artificial Sequence: Synthetic oligonucleotide
cuggacuccuugugccaug

SEQ ID NO: 3115751 - RNA, 19 nt, Artificial Sequence
  Description of Artificial Sequence: Synthetic oligonucleotide
ccaauggugcucugaggac

SEQ ID NO: 3115752 - RNA, 19 nt, Artificial Sequence
  Description of Artificial Sequence: Synthetic oligonucleotide
guccacauccaauggugcu

SEQ ID NO: 3115753 - RNA, 19 nt, Artificial Sequence
  Description of Artificial Sequence: Synthetic oligonucleotide
gauguccaguuuuccacuu

SEQ ID NO: 3115754 - RNA, 19 nt, Artificial Sequence
  Description of Artificial Sequence: Synthetic oligonucleotide
cauuuacuuccaacuccaa

SEQ ID NO: 3115755 - RNA, 19 nt, Artificial Sequence
  Description of Artificial Sequence: Synthetic oligonucleotide
gggaagucaaguuguuaua

SEQ ID NO: 3115756 - RNA, 19 nt, Artificial Sequence
  Description of Artificial Sequence: Synthetic oligonucleotide
aggucuggcuggaugucca

SEQ ID NO: 3115757 - RNA, 19 nt, Artificial Sequence
  Description of Artificial Sequence: Synthetic oligonucleotide
gcuggauguccaguuuucc

SEQ ID NO: 3115758 - RNA, 19 nt, Artificial Sequence
  Description of Artificial Sequence: Synthetic oligonucleotide
caauggugcucugaggacu

SEQ ID NO: 3115759 - RNA, 19 nt, Artificial Sequence
  Description of Artificial Sequence: Synthetic oligonucleotide
aggccgauccaguggucau

SEQ ID NO: 3115760 - RNA, 19 nt, Artificial Sequence
  Description of Artificial Sequence: Synthetic oligonucleotide
ggaagucaaguuguuauau

SEQ ID NO: 3115761 - RNA, 19 nt, Artificial Sequence
  Description of Artificial Sequence: Synthetic oligonucleotide
cagguaggcacacucuccu

SEQ ID NO: 3115762 - RNA, 19 nt, Artificial Sequence
  Description of Artificial Sequence: Synthetic oligonucleotide
gccgauccaguggucaugc

SEQ ID NO: 3115763 - RNA, 19 nt, Artificial Sequence
  Description of Artificial Sequence: Synthetic oligonucleotide
ggauguccaguuuuccacu

SEQ ID NO: 3115764 - RNA, 19 nt, Artificial Sequence
  Description of Artificial Sequence: Synthetic oligonucleotide
agguaggcacacucuccuu

SEQ ID NO: 3115765 - RNA, 19 nt, Artificial Sequence
  Description of Artificial Sequence: Synthetic oligonucleotide
gggcugucaaaucuagcua

SEQ ID NO: 3115766 - RNA, 19 nt, Artificial Sequence
  Description of Artificial Sequence: Synthetic oligonucleotide
ggucuggcuggauguccag

SEQ ID NO: 3115767 - RNA, 19 nt, Artificial Sequence
  Description of Artificial Sequence: Synthetic oligonucleotide
gacuuucuguggaggccga

SEQ ID NO: 3115768 - RNA, 19 nt, Artificial Sequence
  Description of Artificial Sequence: Synthetic oligonucleotide
cacauccaauggugcucug

SEQ ID NO: 3115769 - RNA, 19 nt, Artificial Sequence
  Description of Artificial Sequence: Synthetic oligonucleotide
cugucaaaucuagcuagcu

SEQ ID NO: 3115770 - RNA, 19 nt, Artificial Sequence
  Description of Artificial Sequence: Synthetic oligonucleotide
ccuuguaccucuccagaaa

SEQ ID NO: 3115771 - RNA, 19 nt, Artificial Sequence
  Description of Artificial Sequence: Synthetic oligonucleotide
gccaugcaaaaggucuggc

SEQ ID NO: 3115772 - RNA, 19 nt, Artificial Sequence
  Description of Artificial Sequence: Synthetic oligonucleotide
cuccgggcugucaaaucua

SEQ ID NO: 3115773 - RNA, 19 nt, Artificial Sequence
  Description of Artificial Sequence: Synthetic oligonucleotide
ccagaaauuccagcuccuc

SEQ ID NO: 3115774 - RNA, 19 nt, Artificial Sequence
  Description of Artificial Sequence: Synthetic oligonucleotide
ggcuggauguccaguuuuc

SEQ ID NO: 3115775 - RNA, 19 nt, Artificial Sequence
  Description of Artificial Sequence: Synthetic oligonucleotide
caguggucaugcuuccccu

SEQ ID NO: 3115776 - RNA, 19 nt, Artificial Sequence
  Description of Artificial Sequence: Synthetic oligonucleotide
acuuucuguggaggccgau

SEQ ID NO: 3115777 - RNA, 19 nt, Artificial Sequence
  Description of Artificial Sequence: Synthetic oligonucleotide
ccgggcugucaaaucuagc

SEQ ID NO: 3115778 - RNA, 19 nt, Artificial Sequence
  Description of Artificial Sequence: Synthetic oligonucleotide
cgggcugucaaaucuagcu

SEQ ID NO: 3115779 - RNA, 19 nt, Artificial Sequence
  Description of Artificial Sequence: Synthetic oligonucleotide
ccaugcaaaaggucuggcu

SEQ ID NO: 3115780 - RNA, 19 nt, Artificial Sequence
  Description of Artificial Sequence: Synthetic oligonucleotide
ggccgauccaguggucaug

SEQ ID NO: 3115781 - RNA, 19 nt, Artificial Sequence
  Description of Artificial Sequence: Synthetic oligonucleotide
cuagcuagcuggacuccuu

SEQ ID NO: 3115782 - RNA, 19 nt, Artificial Sequence
  Description of Artificial Sequence: Synthetic oligonucleotide
ggucaugcuuccccuugua

SEQ ID NO: 3115783 - RNA, 19 nt, Artificial Sequence
  Description of Artificial Sequence: Synthetic oligonucleotide
cuguggaggccgauccagu

SEQ ID NO: 3115784 - RNA, 19 nt, Artificial Sequence
  Description of Artificial Sequence: Synthetic oligonucleotide
ggugcucugaggacuuucu

SEQ ID NO: 3115785 - RNA, 19 nt, Artificial Sequence
  Description of Artificial Sequence: Synthetic oligonucleotide
cccuuguaccucuccagaa

SEQ ID NO: 3115786 - RNA, 19 nt, Artificial Sequence
  Description of Artificial Sequence: Synthetic oligonucleotide
ccccuuguaccucuccaga

SEQ ID NO: 3115787 - RNA, 19 nt, Artificial Sequence
  Description of Artificial Sequence: Synthetic oligonucleotide
ccuccgggcugucaaaucu

SEQ ID NO: 3115788 - RNA, 19 nt, Artificial Sequence
  Description of Artificial Sequence: Synthetic oligonucleotide
gccgucuguccacauccaa

SEQ ID NO: 3115789 - RNA, 19 nt, Artificial Sequence
  Description of Artificial Sequence: Synthetic oligonucleotide
gucuggcuggauguccagu

SEQ ID NO: 3115790 - RNA, 19 nt, Artificial Sequence
  Description of Artificial Sequence: Synthetic oligonucleotide
ggacuccuugugccaugca

SEQ ID NO: 3115791 - RNA, 19 nt, Artificial Sequence
  Description of Artificial Sequence: Synthetic oligonucleotide
cuggcuggauguccaguuu

SEQ ID NO: 3115792 - RNA, 19 nt, Artificial Sequence
  Description of Artificial Sequence: Synthetic oligonucleotide
auggugcucugaggacuuu

SEQ ID NO: 3115793 - RNA, 19 nt, Artificial Sequence
  Description of Artificial Sequence: Synthetic oligonucleotide
ccgucuguccacauccaau

SEQ ID NO: 3115794 - RNA, 19 nt, Artificial Sequence
  Description of Artificial Sequence: Synthetic oligonucleotide
gcuccuccgggcugucaaa

SEQ ID NO: 3115795 - RNA, 19 nt, Artificial Sequence
  Description of Artificial Sequence: Synthetic oligonucleotide
ccacauccaauggugcucu

SEQ ID NO: 3115796 - RNA, 19 nt, Artificial Sequence
  Description of Artificial Sequence: Synthetic oligonucleotide
cuccuccgggcugucaaau

SEQ ID NO: 3115797 - RNA, 19 nt, Artificial Sequence
  Description of Artificial Sequence: Synthetic oligonucleotide
ggaggccgauccagugguc

SEQ ID NO: 3115798 - RNA, 19 nt, Artificial Sequence
  Description of Artificial Sequence: Synthetic oligonucleotide
cgauccaguggucaugcuu

SEQ ID NO: 3115799 - RNA, 19 nt, Artificial Sequence
  Description of Artificial Sequence: Synthetic oligonucleotide
gcaaaaggucuggcuggau

SEQ ID NO: 3115800 - RNA, 19 nt, Artificial Sequence
  Description of Artificial Sequence: Synthetic oligonucleotide
cagugccgucuguccacau

SEQ ID NO: 3115801 - RNA, 19 nt, Artificial Sequence
  Description of Artificial Sequence: Synthetic oligonucleotide
ccgauccaguggucaugcu

SEQ ID NO: 3115802 - RNA, 19 nt, Artificial Sequence
  Description of Artificial Sequence: Synthetic oligonucleotide
aauaaauuauuucugacgc

SEQ ID NO: 3115803 - RNA, 19 nt, Artificial Sequence
  Description of Artificial Sequence: Synthetic oligonucleotide
aaauaaauuauuucugacg

SEQ ID NO: 3115804 - RNA, 19 nt, Artificial Sequence
  Description of Artificial Sequence: Synthetic oligonucleotide
aaaauaaauuauuucugac

SEQ ID NO: 3115805 - RNA, 19 nt, Artificial Sequence
  Description of Artificial Sequence: Synthetic oligonucleotide
aauucuauauacaaaguac

SEQ ID NO: 3115806 - RNA, 19 nt, Artificial Sequence
  Description of Artificial Sequence: Synthetic oligonucleotide
aauuauuucugacgcauac

SEQ ID NO: 3115807 - RNA, 19 nt, Artificial Sequence
  Description of Artificial Sequence: Synthetic oligonucleotide
uuauauacgacguaccagg

SEQ ID NO: 3115808 - RNA, 19 nt, Artificial Sequence
  Description of Artificial Sequence: Synthetic oligonucleotide
aaucucugcauauucaaac

SEQ ID NO: 3115809 - RNA, 19 nt, Artificial Sequence
  Description of Artificial Sequence: Synthetic oligonucleotide
caaacuuagaauuucuugg

SEQ ID NO: 3115810 - RNA, 19 nt, Artificial Sequence
  Description of Artificial Sequence: Synthetic oligonucleotide
auuuaaaccuuuuaauuuc

SEQ ID NO: 3115811 - RNA, 19 nt, Artificial Sequence
  Description of Artificial Sequence: Synthetic oligonucleotide
auauacaaaguacagcaac

SEQ ID NO: 3115812 - RNA, 19 nt, Artificial Sequence
  Description of Artificial Sequence: Synthetic oligonucleotide
auacaguuuauauacgacg

SEQ ID NO: 3115813 - RNA, 19 nt, Artificial Sequence
  Description of Artificial Sequence: Synthetic oligonucleotide
cuauacauuucuuggaugg

SEQ ID NO: 3115814 - RNA, 19 nt, Artificial Sequence
  Description of Artificial Sequence: Synthetic oligonucleotide
ugcauauucaaacuuagaa

SEQ ID NO: 3115815 - RNA, 19 nt, Artificial Sequence
  Description of Artificial Sequence: Synthetic oligonucleotide
cuauauacaaaguacagca

SEQ ID NO: 3115816 - RNA, 19 nt, Artificial Sequence
  Description of Artificial Sequence: Synthetic oligonucleotide
aaauucuauauacaaagua

SEQ ID NO: 3115817 - RNA, 19 nt, Artificial Sequence
  Description of Artificial Sequence: Synthetic oligonucleotide
ucaaacuuagaauuucuug

SEQ ID NO: 3115818 - RNA, 19 nt, Artificial Sequence
  Description of Artificial Sequence: Synthetic oligonucleotide
uucuauauacaaaguacag

SEQ ID NO: 3115819 - RNA, 19 nt, Artificial Sequence
  Description of Artificial Sequence: Synthetic oligonucleotide
aauacaguuuauauacgac

SEQ ID NO: 3115820 - RNA, 19 nt, Artificial Sequence
  Description of Artificial Sequence: Synthetic oligonucleotide
uacaaaguacagcaacugg

SEQ ID NO: 3115821 - RNA, 19 nt, Artificial Sequence
  Description of Artificial Sequence: Synthetic oligonucleotide
acagcaacugguaagaaac

SEQ ID NO: 3115822 - RNA, 19 nt, Artificial Sequence
  Description of Artificial Sequence: Synthetic oligonucleotide
aaaccuuuuaauuucuuuu

SEQ ID NO: 3115823 - RNA, 19 nt, Artificial Sequence
  Description of Artificial Sequence: Synthetic oligonucleotide
aaacuuagaauuucuuggu

SEQ ID NO: 3115824 - RNA, 19 nt, Artificial Sequence
  Description of Artificial Sequence: Synthetic oligonucleotide
uauacaaaguacagcaacu

SEQ ID NO: 3115825 - RNA, 19 nt, Artificial Sequence
  Description of Artificial Sequence: Synthetic oligonucleotide
uaauacaguuuauauacga

SEQ ID NO: 3115826 - RNA, 19 nt, Artificial Sequence
  Description of Artificial Sequence: Synthetic oligonucleotide
uuuuaauacaguuuauaua

SEQ ID NO: 3115827 - RNA, 19 nt, Artificial Sequence
  Description of Artificial Sequence: Synthetic oligonucleotide
aaguacagcaacugguaag

SEQ ID NO: 3115828 - RNA, 19 nt, Artificial Sequence
  Description of Artificial Sequence: Synthetic oligonucleotide
uacaguuuauauacgacgu

SEQ ID NO: 3115829 - RNA, 19 nt, Artificial Sequence
  Description of Artificial Sequence: Synthetic oligonucleotide
ucugcauauucaaacuuag

SEQ ID NO: 3115830 - RNA, 19 nt, Artificial Sequence
  Description of Artificial Sequence: Synthetic oligonucleotide
agaggcaauauucaaucuc

SEQ ID NO: 3115831 - RNA, 19 nt, Artificial Sequence
  Description of Artificial Sequence: Synthetic oligonucleotide
acgcauacaauuuauaaaa

SEQ ID NO: 3115832 - RNA, 19 nt, Artificial Sequence
  Description of Artificial Sequence: Synthetic oligonucleotide
uuuauauacgacguaccag

SEQ ID NO: 3115833 - RNA, 19 nt, Artificial Sequence
  Description of Artificial Sequence: Synthetic oligonucleotide
ggugaugcaacauuggugc

SEQ ID NO: 3115834 - RNA, 19 nt, Artificial Sequence
  Description of Artificial Sequence: Synthetic oligonucleotide
agauuuaaaccuuuuaauu

SEQ ID NO: 3115835 - RNA, 19 nt, Artificial Sequence
  Description of Artificial Sequence: Synthetic oligonucleotide
agaagaccccgauaggggc

SEQ ID NO: 3115836 - RNA, 19 nt, Artificial Sequence
  Description of Artificial Sequence: Synthetic oligonucleotide
auuucugacgcauacaauu

SEQ ID NO: 3115837 - RNA, 19 nt, Artificial Sequence
  Description of Artificial Sequence: Synthetic oligonucleotide
uuuaaaccuuuuaauuucu

SEQ ID NO: 3115838 - RNA, 19 nt, Artificial Sequence
  Description of Artificial Sequence: Synthetic oligonucleotide
gaaaccccaguuuuaauac

SEQ ID NO: 3115839 - RNA, 19 nt, Artificial Sequence
  Description of Artificial Sequence: Synthetic oligonucleotide
uauacgacguaccagggua

SEQ ID NO: 3115840 - RNA, 19 nt, Artificial Sequence
  Description of Artificial Sequence: Synthetic oligonucleotide
uagaagaccccgauagggg

SEQ ID NO: 3115841 - RNA, 19 nt, Artificial Sequence
  Description of Artificial Sequence: Synthetic oligonucleotide
uauauacgacguaccaggg

SEQ ID NO: 3115842 - RNA, 19 nt, Artificial Sequence
  Description of Artificial Sequence: Synthetic oligonucleotide
cauuggugcagauuuaaac

SEQ ID NO: 3115843 - RNA, 19 nt, Artificial Sequence
  Description of Artificial Sequence: Synthetic oligonucleotide
accaauguguccuauacau

SEQ ID NO: 3115844 - RNA, 19 nt, Artificial Sequence
  Description of Artificial Sequence: Synthetic oligonucleotide
aguuuauauacgacguacc

SEQ ID NO: 3115845 - RNA, 19 nt, Artificial Sequence
  Description of Artificial Sequence: Synthetic oligonucleotide
uaaauuauuucugacgcau

SEQ ID NO: 3115846 - RNA, 19 nt, Artificial Sequence
  Description of Artificial Sequence: Synthetic oligonucleotide
aauauucaaucucugcaua

SEQ ID NO: 3115847 - RNA, 19 nt, Artificial Sequence
  Description of Artificial Sequence: Synthetic oligonucleotide
uuccuggugaccaaugugu

SEQ ID NO: 3115848 - RNA, 19 nt, Artificial Sequence
  Description of Artificial Sequence: Synthetic oligonucleotide
guagaagaccccgauaggg

SEQ ID NO: 3115849 - RNA, 19 nt, Artificial Sequence
  Description of Artificial Sequence: Synthetic oligonucleotide
agcaacugguaagaaaccc

SEQ ID NO: 3115850 - RNA, 19 nt, Artificial Sequence
  Description of Artificial Sequence: Synthetic oligonucleotide
ugaccaauguguccuauac

SEQ ID NO: 3115851 - RNA, 19 nt, Artificial Sequence
  Description of Artificial Sequence: Synthetic oligonucleotide
uuggugcagauuuaaaccu

SEQ ID NO: 3115852 - RNA, 19 nt, Artificial Sequence
  Description of Artificial Sequence: Synthetic oligonucleotide
aaaauucuauauacaaagu

SEQ ID NO: 3115853 - RNA, 19 nt, Artificial Sequence
  Description of Artificial Sequence: Synthetic oligonucleotide
ugacgcauacaauuuauaa

SEQ ID NO: 3115854 - RNA, 19 nt, Artificial Sequence
  Description of Artificial Sequence: Synthetic oligonucleotide
uucaaucucugcauauuca

SEQ ID NO: 3115855 - RNA, 19 nt, Artificial Sequence
  Description of Artificial Sequence: Synthetic oligonucleotide
auucuauauacaaaguaca

SEQ ID NO: 3115856 - RNA, 19 nt, Artificial Sequence
  Description of Artificial Sequence: Synthetic oligonucleotide
uauauacaaaguacagcaa

SEQ ID NO: 3115857 - RNA, 19 nt, Artificial Sequence
  Description of Artificial Sequence: Synthetic oligonucleotide
auacauuucuuggaugggg

SEQ ID NO: 3115858 - RNA, 19 nt, Artificial Sequence
  Description of Artificial Sequence: Synthetic oligonucleotide
ucaaucucugcauauucaa

SEQ ID NO: 3115859 - RNA, 19 nt, Artificial Sequence
  Description of Artificial Sequence: Synthetic oligonucleotide
aaaguacagcaacugguaa

SEQ ID NO: 3115860 - RNA, 19 nt, Artificial Sequence
  Description of Artificial Sequence: Synthetic oligonucleotide
uauucaaacuuagaauuuc

SEQ ID NO: 3115861 - RNA, 19 nt, Artificial Sequence
  Description of Artificial Sequence: Synthetic oligonucleotide
guuuauauacgacguacca

SEQ ID NO: 3115862 - RNA, 19 nt, Artificial Sequence
  Description of Artificial Sequence: Synthetic oligonucleotide
uauacauuucuuggauggg

SEQ ID NO: 3115863 - RNA, 19 nt, Artificial Sequence
  Description of Artificial Sequence: Synthetic oligonucleotide
uccuauacauuucuuggau

SEQ ID NO: 3115864 - RNA, 19 nt, Artificial Sequence
  Description of Artificial Sequence: Synthetic oligonucleotide
auaaauuauuucugacgca

SEQ ID NO: 3115865 - RNA, 19 nt, Artificial Sequence
  Description of Artificial Sequence: Synthetic oligonucleotide
ggguagaagaccccgauag

SEQ ID NO: 3115866 - RNA, 19 nt, Artificial Sequence
  Description of Artificial Sequence: Synthetic oligonucleotide
agaaaccccaguuuuaaua

SEQ ID NO: 3115867 - RNA, 19 nt, Artificial Sequence
  Description of Artificial Sequence: Synthetic oligonucleotide
cauauucaaacuuagaauu

SEQ ID NO: 3115868 - RNA, 19 nt, Artificial Sequence
  Description of Artificial Sequence: Synthetic oligonucleotide
gacgcauacaauuuauaaa

SEQ ID NO: 3115869 - RNA, 19 nt, Artificial Sequence
  Description of Artificial Sequence: Synthetic oligonucleotide
aaccccaguuuuaauacag

SEQ ID NO: 3115870 - RNA, 19 nt, Artificial Sequence
  Description of Artificial Sequence: Synthetic oligonucleotide
uaaaccuuuuaauuucuuu

SEQ ID NO: 3115871 - RNA, 19 nt, Artificial Sequence
  Description of Artificial Sequence: Synthetic oligonucleotide
acaaaguacagcaacuggu

SEQ ID NO: 3115872 - RNA, 19 nt, Artificial Sequence
  Description of Artificial Sequence: Synthetic oligonucleotide
ucugacgcauacaauuuau

SEQ ID NO: 3115873 - RNA, 19 nt, Artificial Sequence
  Description of Artificial Sequence: Synthetic oligonucleotide
caguuuauauacgacguac

SEQ ID NO: 3115874 - RNA, 19 nt, Artificial Sequence
  Description of Artificial Sequence: Synthetic oligonucleotide
acugguaagaaaccccagu

SEQ ID NO: 3115875 - RNA, 19 nt, Artificial Sequence
  Description of Artificial Sequence: Synthetic oligonucleotide
gcaauauucaaucucugca

SEQ ID NO: 3115876 - RNA, 19 nt, Artificial Sequence
  Description of Artificial Sequence: Synthetic oligonucleotide
aucucugcauauucaaacu

SEQ ID NO: 3115877 - RNA, 19 nt, Artificial Sequence
  Description of Artificial Sequence: Synthetic oligonucleotide
aguacagcaacugguaaga

SEQ ID NO: 3115878 - RNA, 19 nt, Artificial Sequence
  Description of Artificial Sequence: Synthetic oligonucleotide
ugaugcaacauuggugcag

SEQ ID NO: 3115879 - RNA, 19 nt, Artificial Sequence
  Description of Artificial Sequence: Synthetic oligonucleotide
auauucaaucucugcauau

SEQ ID NO: 3115880 - RNA, 19 nt, Artificial Sequence
  Description of Artificial Sequence: Synthetic oligonucleotide
uaagaaaccccaguuuuaa

SEQ ID NO: 3115881 - RNA, 19 nt, Artificial Sequence
  Description of Artificial Sequence: Synthetic oligonucleotide
aaaccccaguuuuaauaca

SEQ ID NO: 3115882 - RNA, 19 nt, Artificial Sequence
  Description of Artificial Sequence: Synthetic oligonucleotide
ugcagauuuaaaccuuuua

SEQ ID NO: 3115883 - RNA, 19 nt, Artificial Sequence
  Description of Artificial Sequence: Synthetic oligonucleotide
uucaaacuuagaauuucuu

SEQ ID NO: 3115884 - RNA, 19 nt, Artificial Sequence
  Description of Artificial Sequence: Synthetic oligonucleotide
uuucugacgcauacaauuu

SEQ ID NO: 3115885 - RNA, 19 nt, Artificial Sequence
  Description of Artificial Sequence: Synthetic oligonucleotide
aggggcagaggcaauauuc

SEQ ID NO: 3115886 - RNA, 19 nt, Artificial Sequence
  Description of Artificial Sequence: Synthetic oligonucleotide
aacauuggugcagauuuaa

SEQ ID NO: 3115887 - RNA, 19 nt, Artificial Sequence
  Description of Artificial Sequence: Synthetic oligonucleotide
aguuuuaauacaguuuaua

SEQ ID NO: 3115888 - RNA, 19 nt, Artificial Sequence
  Description of Artificial Sequence: Synthetic oligonucleotide
gacguaccaggguagaaga

SEQ ID NO: 3115889 - RNA, 19 nt, Artificial Sequence
  Description of Artificial Sequence: Synthetic oligonucleotide
ugguaagaaaccccaguuu

SEQ ID NO: 3115890 - RNA, 19 nt, Artificial Sequence
  Description of Artificial Sequence: Synthetic oligonucleotide
gcagauuuaaaccuuuuaa

SEQ ID NO: 3115891 - RNA, 19 nt, Artificial Sequence
  Description of Artificial Sequence: Synthetic oligonucleotide
ggcaauauucaaucucugc

SEQ ID NO: 3115892 - RNA, 19 nt, Artificial Sequence
  Description of Artificial Sequence: Synthetic oligonucleotide
uauuucugacgcauacaau

SEQ ID NO: 3115893 - RNA, 19 nt, Artificial Sequence
  Description of Artificial Sequence: Synthetic oligonucleotide
auauacgacguaccagggu

SEQ ID NO: 3115894 - RNA, 19 nt, Artificial Sequence
  Description of Artificial Sequence: Synthetic oligonucleotide
aggaguggguuccugguga

SEQ ID NO: 3115895 - RNA, 19 nt, Artificial Sequence
  Description of Artificial Sequence: Synthetic oligonucleotide
auucaaacuuagaauuucu

SEQ ID NO: 3115896 - RNA, 19 nt, Artificial Sequence
  Description of Artificial Sequence: Synthetic oligonucleotide
guaccaggguagaagaccc

SEQ ID NO: 3115897 - RNA, 19 nt, Artificial Sequence
  Description of Artificial Sequence: Synthetic oligonucleotide
caacugguaagaaacccca

SEQ ID NO: 3115898 - RNA, 19 nt, Artificial Sequence
  Description of Artificial Sequence: Synthetic oligonucleotide
gcagaggcaauauucaauc

SEQ ID NO: 3115899 - RNA, 19 nt, Artificial Sequence
  Description of Artificial Sequence: Synthetic oligonucleotide
uucugacgcauacaauuua

SEQ ID NO: 3115900 - RNA, 19 nt, Artificial Sequence
  Description of Artificial Sequence: Synthetic oligonucleotide
guuccuggugaccaaugug

SEQ ID NO: 3115901 - RNA, 19 nt, Artificial Sequence
  Description of Artificial Sequence: Synthetic oligonucleotide
aagaaaccccaguuuuaau

SEQ ID NO: 3115902 - RNA, 19 nt, Artificial Sequence
  Description of Artificial Sequence: Synthetic oligonucleotide
accaggguagaagaccccg

SEQ ID NO: 3115903 - RNA, 19 nt, Artificial Sequence
  Description of Artificial Sequence: Synthetic oligonucleotide
gaugcaacauuggugcaga

SEQ ID NO: 3115904 - RNA, 19 nt, Artificial Sequence
  Description of Artificial Sequence: Synthetic oligonucleotide
uauucaaucucugcauauu

SEQ ID NO: 3115905 - RNA, 19 nt, Artificial Sequence
  Description of Artificial Sequence: Synthetic oligonucleotide
gaggcaauauucaaucucu

SEQ ID NO: 3115906 - RNA, 19 nt, Artificial Sequence
  Description of Artificial Sequence: Synthetic oligonucleotide
aguggguuccuggugacca

SEQ ID NO: 3115907 - RNA, 19 nt, Artificial Sequence
  Description of Artificial Sequence: Synthetic oligonucleotide
caaaguacagcaacuggua

SEQ ID NO: 3115908 - RNA, 19 nt, Artificial Sequence
  Description of Artificial Sequence: Synthetic oligonucleotide
cagauuuaaaccuuuuaau

SEQ ID NO: 3115909 - RNA, 19 nt, Artificial Sequence
  Description of Artificial Sequence: Synthetic oligonucleotide
cagcaacugguaagaaacc

SEQ ID NO: 3115910 - RNA, 19 nt, Artificial Sequence
  Description of Artificial Sequence: Synthetic oligonucleotide
aacugguaagaaaccccag

SEQ ID NO: 3115911 - RNA, 19 nt, Artificial Sequence
  Description of Artificial Sequence: Synthetic oligonucleotide
gguagaagaccccgauagg

SEQ ID NO: 3115912 - RNA, 19 nt, Artificial Sequence
  Description of Artificial Sequence: Synthetic oligonucleotide
guccuauacauuucuugga

SEQ ID NO: 3115913 - RNA, 19 nt, Artificial Sequence
  Description of Artificial Sequence: Synthetic oligonucleotide
acaguuuauauacgacgua

SEQ ID NO: 3115914 - RNA, 19 nt, Artificial Sequence
  Description of Artificial Sequence: Synthetic oligonucleotide
auauucaaacuuagaauuu

SEQ ID NO: 3115915 - RNA, 19 nt, Artificial Sequence
  Description of Artificial Sequence: Synthetic oligonucleotide
aagaccccgauaggggcag

SEQ ID NO: 3115916 - RNA, 19 nt, Artificial Sequence
  Description of Artificial Sequence: Synthetic oligonucleotide
caauguguccuauacauuu

SEQ ID NO: 3115917 - RNA, 19 nt, Artificial Sequence
  Description of Artificial Sequence: Synthetic oligonucleotide
ccaguuuuaauacaguuua

SEQ ID NO: 3115918 - RNA, 19 nt, Artificial Sequence
  Description of Artificial Sequence: Synthetic oligonucleotide
aaauuauuucugacgcaua

SEQ ID NO: 3115919 - RNA, 19 nt, Artificial Sequence
  Description of Artificial Sequence: Synthetic oligonucleotide
gaccaauguguccuauaca

SEQ ID NO: 3115920 - RNA, 19 nt, Artificial Sequence
  Description of Artificial Sequence: Synthetic oligonucleotide
uccuggugaccaauguguc

SEQ ID NO: 3115921 - RNA, 19 nt, Artificial Sequence
  Description of Artificial Sequence: Synthetic oligonucleotide
uguguccuauacauuucuu

SEQ ID NO: 3115922 - RNA, 19 nt, Artificial Sequence
  Description of Artificial Sequence: Synthetic oligonucleotide
caauauucaaucucugcau

SEQ ID NO: 3115923 - RNA, 19 nt, Artificial Sequence
  Description of Artificial Sequence: Synthetic oligonucleotide
uggugcagauuuaaaccuu

SEQ ID NO: 3115924 - RNA, 19 nt, Artificial Sequence
  Description of Artificial Sequence: Synthetic oligonucleotide
gcaacauuggugcagauuu

SEQ ID NO: 3115925 - RNA, 19 nt, Artificial Sequence
  Description of Artificial Sequence: Synthetic oligonucleotide
gcauauucaaacuuagaau

SEQ ID NO: 3115926 - RNA, 19 nt, Artificial Sequence
  Description of Artificial Sequence: Synthetic oligonucleotide
gcaacugguaagaaacccc

SEQ ID NO: 3115927 - RNA, 19 nt, Artificial Sequence
  Description of Artificial Sequence: Synthetic oligonucleotide
ccuauacauuucuuggaug

SEQ ID NO: 3115928 - RNA, 19 nt, Artificial Sequence
  Description of Artificial Sequence: Synthetic oligonucleotide
uaccaggguagaagacccc

SEQ ID NO: 3115929 - RNA, 19 nt, Artificial Sequence
  Description of Artificial Sequence: Synthetic oligonucleotide
gguaagaaaccccaguuuu

SEQ ID NO: 3115930 - RNA, 19 nt, Artificial Sequence
  Description of Artificial Sequence: Synthetic oligonucleotide
caaucucugcauauucaaa

SEQ ID NO: 3115931 - RNA, 19 nt, Artificial Sequence
  Description of Artificial Sequence: Synthetic oligonucleotide
gggugaugcaacauuggug

SEQ ID NO: 3115932 - RNA, 19 nt, Artificial Sequence
  Description of Artificial Sequence: Synthetic oligonucleotide
ugcaacauuggugcagauu

SEQ ID NO: 3115933 - RNA, 19 nt, Artificial Sequence
  Description of Artificial Sequence: Synthetic oligonucleotide
auacgacguaccaggguag

SEQ ID NO: 3115934 - RNA, 19 nt, Artificial Sequence
  Description of Artificial Sequence: Synthetic oligonucleotide
cugcauauucaaacuuaga

SEQ ID NO: 3115935 - RNA, 19 nt, Artificial Sequence
  Description of Artificial Sequence: Synthetic oligonucleotide
acguaccaggguagaagac

SEQ ID NO: 3115936 - RNA, 19 nt, Artificial Sequence
  Description of Artificial Sequence: Synthetic oligonucleotide
gaagaccccgauaggggca

SEQ ID NO: 3115937 - RNA, 19 nt, Artificial Sequence
  Description of Artificial Sequence: Synthetic oligonucleotide
guaagaaaccccaguuuua

SEQ ID NO: 3115938 - RNA, 19 nt, Artificial Sequence
  Description of Artificial Sequence: Synthetic oligonucleotide
aggcaauauucaaucucug

SEQ ID NO: 3115939 - RNA, 19 nt, Artificial Sequence
  Description of Artificial Sequence: Synthetic oligonucleotide
caggaguggguuccuggug

SEQ ID NO: 3115940 - RNA, 19 nt, Artificial Sequence
  Description of Artificial Sequence: Synthetic oligonucleotide
gauaggggcagaggcaaua

SEQ ID NO: 3115941 - RNA, 19 nt, Artificial Sequence
  Description of Artificial Sequence: Synthetic oligonucleotide
ccuggugaccaaugugucc

SEQ ID NO: 3115942 - RNA, 19 nt, Artificial Sequence
  Description of Artificial Sequence: Synthetic oligonucleotide
aggguagaagaccccgaua

SEQ ID NO: 3115943 - RNA, 19 nt, Artificial Sequence
  Description of Artificial Sequence: Synthetic oligonucleotide
ccccgauaggggcagaggc

SEQ ID NO: 3115944 - RNA, 19 nt, Artificial Sequence
  Description of Artificial Sequence: Synthetic oligonucleotide
cguaccaggguagaagacc

SEQ ID NO: 3115945 - RNA, 19 nt, Artificial Sequence
  Description of Artificial Sequence: Synthetic oligonucleotide
auaggggcagaggcaauau

SEQ ID NO: 3115946 - RNA, 19 nt, Artificial Sequence
  Description of Artificial Sequence: Synthetic oligonucleotide
gugaugcaacauuggugca

SEQ ID NO: 3115947 - RNA, 19 nt, Artificial Sequence
  Description of Artificial Sequence: Synthetic oligonucleotide
cugguaagaaaccccaguu

SEQ ID NO: 3115948 - RNA, 19 nt, Artificial Sequence
  Description of Artificial Sequence: Synthetic oligonucleotide
cugacgcauacaauuuaua

SEQ ID NO: 3115949 - RNA, 19 nt, Artificial Sequence
  Description of Artificial Sequence: Synthetic oligonucleotide
accccgauaggggcagagg

SEQ ID NO: 3115950 - RNA, 19 nt, Artificial Sequence
  Description of Artificial Sequence: Synthetic oligonucleotide
gaccccgauaggggcagag

SEQ ID NO: 3115951 - RNA, 19 nt, Artificial Sequence
  Description of Artificial Sequence: Synthetic oligonucleotide
acauuggugcagauuuaaa

SEQ ID NO: 3115952 - RNA, 19 nt, Artificial Sequence
  Description of Artificial Sequence: Synthetic oligonucleotide
gaguggguuccuggugacc

SEQ ID NO: 3115953 - RNA, 19 nt, Artificial Sequence
  Description of Artificial Sequence: Synthetic oligonucleotide
gugaccaauguguccuaua

SEQ ID NO: 3115954 - RNA, 19 nt, Artificial Sequence
  Description of Artificial Sequence: Synthetic oligonucleotide
accccaguuuuaauacagu

SEQ ID NO: 3115955 - RNA, 19 nt, Artificial Sequence
  Description of Artificial Sequence: Synthetic oligonucleotide
ggggcagaggcaauauuca

SEQ ID NO: 3115956 - RNA, 19 nt, Artificial Sequence
  Description of Artificial Sequence: Synthetic oligonucleotide
uggguuccuggugaccaau

SEQ ID NO: 3115957 - RNA, 19 nt, Artificial Sequence
  Description of Artificial Sequence: Synthetic oligonucleotide
caacauuggugcagauuua

SEQ ID NO: 3115958 - RNA, 19 nt, Artificial Sequence
  Description of Artificial Sequence: Synthetic oligonucleotide
cagaggcaauauucaaucu

SEQ ID NO: 3115959 - RNA, 19 nt, Artificial Sequence
  Description of Artificial Sequence: Synthetic oligonucleotide
ggaguggguuccuggugac

SEQ ID NO: 3115960 - RNA, 19 nt, Artificial Sequence
  Description of Artificial Sequence: Synthetic oligonucleotide
ggggugaugcaacauuggu

SEQ ID NO: 3115961 - RNA, 19 nt, Artificial Sequence
  Description of Artificial Sequence: Synthetic oligonucleotide
caguuuuaauacaguuuau

SEQ ID NO: 3115962 - RNA, 19 nt, Artificial Sequence
  Description of Artificial Sequence: Synthetic oligonucleotide
augcaacauuggugcagau

SEQ ID NO: 3115963 - RNA, 19 nt, Artificial Sequence
  Description of Artificial Sequence: Synthetic oligonucleotide
cgacguaccaggguagaag

SEQ ID NO: 3115964 - RNA, 19 nt, Artificial Sequence
  Description of Artificial Sequence: Synthetic oligonucleotide
gggcagaggcaauauucaa

SEQ ID NO: 3115965 - RNA, 19 nt, Artificial Sequence
  Description of Artificial Sequence: Synthetic oligonucleotide
acgacguaccaggguagaa

SEQ ID NO: 3115966 - RNA, 19 nt, Artificial Sequence
  Description of Artificial Sequence: Synthetic oligonucleotide
gguuccuggugaccaaugu

SEQ ID NO: 3115967 - RNA, 19 nt, Artificial Sequence
  Description of Artificial Sequence: Synthetic oligonucleotide
ggcagaggcaauauucaau

SEQ ID NO: 3115968 - RNA, 19 nt, Artificial Sequence
  Description of Artificial Sequence: Synthetic oligonucleotide
ggguuccuggugaccaaug

SEQ ID NO: 3115969 - RNA, 19 nt, Artificial Sequence
  Description of Artificial Sequence: Synthetic oligonucleotide
caggguagaagaccccgau

SEQ ID NO: 3115970 - RNA, 19 nt, Artificial Sequence
  Description of Artificial Sequence: Synthetic oligonucleotide
cccgauaggggcagaggca

SEQ ID NO: 3115971 - RNA, 19 nt, Artificial Sequence
  Description of Artificial Sequence: Synthetic oligonucleotide
ggugcagauuuaaaccuuu

SEQ ID NO: 3115972 - RNA, 19 nt, Artificial Sequence
  Description of Artificial Sequence: Synthetic oligonucleotide
ccaggguagaagaccccga

SEQ ID NO: 3115973 - RNA, 19 nt, Artificial Sequence
  Description of Artificial Sequence: Synthetic oligonucleotide
ccgauaggggcagaggcaa

SEQ ID NO: 3115974 - RNA, 19 nt, Artificial Sequence
  Description of Artificial Sequence: Synthetic oligonucleotide
gugcagauuuaaaccuuuu

SEQ ID NO: 3115975 - RNA, 19 nt, Artificial Sequence
  Description of Artificial Sequence: Synthetic oligonucleotide
ccaauguguccuauacauu

SEQ ID NO: 3115976 - RNA, 19 nt, Artificial Sequence
  Description of Artificial Sequence: Synthetic oligonucleotide
agaccccgauaggggcaga

SEQ ID NO: 3115977 - RNA, 19 nt, Artificial Sequence
  Description of Artificial Sequence: Synthetic oligonucleotide
ggugaccaauguguccuau

SEQ ID NO: 3115978 - RNA, 19 nt, Artificial Sequence
  Description of Artificial Sequence: Synthetic oligonucleotide
cgauaggggcagaggcaau

SEQ ID NO: 3115979 - RNA, 19 nt, Artificial Sequence
  Description of Artificial Sequence: Synthetic oligonucleotide
uguaacuaggguaacaagg

SEQ ID NO: 3115980 - RNA, 19 nt, Artificial Sequence
  Description of Artificial Sequence: Synthetic oligonucleotide
aaagguggagcuuuuagcu

SEQ ID NO: 3115981 - RNA, 19 nt, Artificial Sequence
  Description of Artificial Sequence: Synthetic oligonucleotide
uuuggaguccccauggugc

SEQ ID NO: 3115982 - RNA, 19 nt, Artificial Sequence
  Description of Artificial Sequence: Synthetic oligonucleotide
ucauuuggaguccccaugg

SEQ ID NO: 3115983 - RNA, 19 nt, Artificial Sequence
  Description of Artificial Sequence: Synthetic oligonucleotide
gaaaacuccaucuucaucu

SEQ ID NO: 3115984 - RNA, 19 nt, Artificial Sequence
  Description of Artificial Sequence: Synthetic oligonucleotide
gguaacaaggggaagaugg

SEQ ID NO: 3115985 - RNA, 19 nt, Artificial Sequence
  Description of Artificial Sequence: Synthetic oligonucleotide
cuuugcuucuuccaggucc

SEQ ID NO: 3115986 - RNA, 19 nt, Artificial Sequence
  Description of Artificial Sequence: Synthetic oligonucleotide
aaugacaucuccaaauggu

SEQ ID NO: 3115987 - RNA, 19 nt, Artificial Sequence
  Description of Artificial Sequence: Synthetic oligonucleotide
uuuuagcuggcucuuguug

SEQ ID NO: 3115988 - RNA, 19 nt, Artificial Sequence
  Description of Artificial Sequence: Synthetic oligonucleotide
guaacuaggguaacaaggg

SEQ ID NO: 3115989 - RNA, 19 nt, Artificial Sequence
  Description of Artificial Sequence: Synthetic oligonucleotide
gaaagguggagcuuuuagc

SEQ ID NO: 3115990 - RNA, 19 nt, Artificial Sequence
  Description of Artificial Sequence: Synthetic oligonucleotide
uaacuaggguaacaagggg

SEQ ID NO: 3115991 - RNA, 19 nt, Artificial Sequence
  Description of Artificial Sequence: Synthetic oligonucleotide
aagucaaugacaucuccaa

SEQ ID NO: 3115992 - RNA, 19 nt, Artificial Sequence
  Description of Artificial Sequence: Synthetic oligonucleotide
uguucuugagggaaaacuc

SEQ ID NO: 3115993 - RNA, 19 nt, Artificial Sequence
  Description of Artificial Sequence: Synthetic oligonucleotide
uuguugugaauggaggugg

SEQ ID NO: 3115994 - RNA, 19 nt, Artificial Sequence
  Description of Artificial Sequence: Synthetic oligonucleotide
ucuccaaaugguguguugg

SEQ ID NO: 3115995 - RNA, 19 nt, Artificial Sequence
  Description of Artificial Sequence: Synthetic oligonucleotide
aaagucccaguguaacuag

SEQ ID NO: 3115996 - RNA, 19 nt, Artificial Sequence
  Description of Artificial Sequence: Synthetic oligonucleotide
agguggagcuuuuagcugg

SEQ ID NO: 3115997 - RNA, 19 nt, Artificial Sequence
  Description of Artificial Sequence: Synthetic oligonucleotide
cucuuguugugaauggagg

SEQ ID NO: 3115998 - RNA, 19 nt, Artificial Sequence
  Description of Artificial Sequence: Synthetic oligonucleotide
uuuagcuggcucuuguugu

SEQ ID NO: 3115999 - RNA, 19 nt, Artificial Sequence
  Description of Artificial Sequence: Synthetic oligonucleotide
cuccaacuguucuugaggg

SEQ ID NO: 3116000 - RNA, 19 nt, Artificial Sequence
  Description of Artificial Sequence: Synthetic oligonucleotide
gacaucuccaaauggugug

SEQ ID NO: 3116001 - RNA, 19 nt, Artificial Sequence
  Description of Artificial Sequence: Synthetic oligonucleotide
uugggguugaagauggccu

SEQ ID NO: 3116002 - RNA, 19 nt, Artificial Sequence
  Description of Artificial Sequence: Synthetic oligonucleotide
ucuuguugugaauggaggu

SEQ ID NO: 3116003 - RNA, 19 nt, Artificial Sequence
  Description of Artificial Sequence: Synthetic oligonucleotide
caaugacaucuccaaaugg

SEQ ID NO: 3116004 - RNA, 19 nt, Artificial Sequence
  Description of Artificial Sequence: Synthetic oligonucleotide
auggaggugguucuguuug

SEQ ID NO: 3116005 - RNA, 19 nt, Artificial Sequence
  Description of Artificial Sequence: Synthetic oligonucleotide
uaacaaggggaagaugggg

SEQ ID NO: 3116006 - RNA, 19 nt, Artificial Sequence
  Description of Artificial Sequence: Synthetic oligonucleotide
ugacaucuccaaauggugu

SEQ ID NO: 3116007 - RNA, 19 nt, Artificial Sequence
  Description of Artificial Sequence: Synthetic oligonucleotide
aacuaggguaacaagggga

SEQ ID NO: 3116008 - RNA, 19 nt, Artificial Sequence
  Description of Artificial Sequence: Synthetic oligonucleotide
ugugaauggaggugguucu

SEQ ID NO: 3116009 - RNA, 19 nt, Artificial Sequence
  Description of Artificial Sequence: Synthetic oligonucleotide
uccagguccaagucaauga

SEQ ID NO: 3116010 - RNA, 19 nt, Artificial Sequence
  Description of Artificial Sequence: Synthetic oligonucleotide
ggaagauggggaaaggugg

SEQ ID NO: 3116011 - RNA, 19 nt, Artificial Sequence
  Description of Artificial Sequence: Synthetic oligonucleotide
aaggggaagauggggaaag

SEQ ID NO: 3116012 - RNA, 19 nt, Artificial Sequence
  Description of Artificial Sequence: Synthetic oligonucleotide
uguguugggguugaagaug

SEQ ID NO: 3116013 - RNA, 19 nt, Artificial Sequence
  Description of Artificial Sequence: Synthetic oligonucleotide
auuuggaguccccauggug

SEQ ID NO: 3116014 - RNA, 19 nt, Artificial Sequence
  Description of Artificial Sequence: Synthetic oligonucleotide
agauggggaaagguggagc

SEQ ID NO: 3116015 - RNA, 19 nt, Artificial Sequence
  Description of Artificial Sequence: Synthetic oligonucleotide
uccaaaugguguguugggg

SEQ ID NO: 3116016 - RNA, 19 nt, Artificial Sequence
  Description of Artificial Sequence: Synthetic oligonucleotide
aucauuuggaguccccaug

SEQ ID NO: 3116017 - RNA, 19 nt, Artificial Sequence
  Description of Artificial Sequence: Synthetic oligonucleotide
uuuggacugcuccaacugu

SEQ ID NO: 3116018 - RNA, 19 nt, Artificial Sequence
  Description of Artificial Sequence: Synthetic oligonucleotide
uaggguaacaaggggaaga

SEQ ID NO: 3116019 - RNA, 19 nt, Artificial Sequence
  Description of Artificial Sequence: Synthetic oligonucleotide
cuuuggacugcuccaacug

SEQ ID NO: 3116020 - RNA, 19 nt, Artificial Sequence
  Description of Artificial Sequence: Synthetic oligonucleotide
guucuugagggaaaacucc

SEQ ID NO: 3116021 - RNA, 19 nt, Artificial Sequence
  Description of Artificial Sequence: Synthetic oligonucleotide
uugugaauggaggugguuc

SEQ ID NO: 3116022 - RNA, 19 nt, Artificial Sequence
  Description of Artificial Sequence: Synthetic oligonucleotide
uggcucuuguugugaaugg

SEQ ID NO: 3116023 - RNA, 19 nt, Artificial Sequence
  Description of Artificial Sequence: Synthetic oligonucleotide
guaacaaggggaagauggg

SEQ ID NO: 3116024 - RNA, 19 nt, Artificial Sequence
  Description of Artificial Sequence: Synthetic oligonucleotide
cuuguugugaauggaggug

SEQ ID NO: 3116025 - RNA, 19 nt, Artificial Sequence
  Description of Artificial Sequence: Synthetic oligonucleotide
guguugggguugaagaugg

SEQ ID NO: 3116026 - RNA, 19 nt, Artificial Sequence
  Description of Artificial Sequence: Synthetic oligonucleotide
aguguaacuaggguaacaa

SEQ ID NO: 3116027 - RNA, 19 nt, Artificial Sequence
  Description of Artificial Sequence: Synthetic oligonucleotide
uccaaagucccaguguaac

SEQ ID NO: 3116028 - RNA, 19 nt, Artificial Sequence
  Description of Artificial Sequence: Synthetic oligonucleotide
cuccaaaugguguguuggg

SEQ ID NO: 3116029 - RNA, 19 nt, Artificial Sequence
  Description of Artificial Sequence: Synthetic oligonucleotide
uuagcuggcucuuguugug

SEQ ID NO: 3116030 - RNA, 19 nt, Artificial Sequence
  Description of Artificial Sequence: Synthetic oligonucleotide
ggaaagguggagcuuuuag

SEQ ID NO: 3116031 - RNA, 19 nt, Artificial Sequence
  Description of Artificial Sequence: Synthetic oligonucleotide
ugaucauuuggagucccca

SEQ ID NO: 3116032 - RNA, 19 nt, Artificial Sequence
  Description of Artificial Sequence: Synthetic oligonucleotide
ugcuccaaagucccagugu

SEQ ID NO: 3116033 - RNA, 19 nt, Artificial Sequence
  Description of Artificial Sequence: Synthetic oligonucleotide
aauggaggugguucuguuu

SEQ ID NO: 3116034 - RNA, 19 nt, Artificial Sequence
  Description of Artificial Sequence: Synthetic oligonucleotide
ucccaguguaacuagggua

SEQ ID NO: 3116035 - RNA, 19 nt, Artificial Sequence
  Description of Artificial Sequence: Synthetic oligonucleotide
guguaacuaggguaacaag

SEQ ID NO: 3116036 - RNA, 19 nt, Artificial Sequence
  Description of Artificial Sequence: Synthetic oligonucleotide
gguguguugggguugaaga

SEQ ID NO: 3116037 - RNA, 19 nt, Artificial Sequence
  Description of Artificial Sequence: Synthetic oligonucleotide
aaaugguguguugggguug

SEQ ID NO: 3116038 - RNA, 19 nt, Artificial Sequence
  Description of Artificial Sequence: Synthetic oligonucleotide
cuucaucuucuuucuuugc

SEQ ID NO: 3116039 - RNA, 19 nt, Artificial Sequence
  Description of Artificial Sequence: Synthetic oligonucleotide
ggugguucuguuuggagac

SEQ ID NO: 3116040 - RNA, 19 nt, Artificial Sequence
  Description of Artificial Sequence: Synthetic oligonucleotide
ugggguugaagauggccug

SEQ ID NO: 3116041 - RNA, 19 nt, Artificial Sequence
  Description of Artificial Sequence: Synthetic oligonucleotide
gcuccaacuguucuugagg

SEQ ID NO: 3116042 - RNA, 19 nt, Artificial Sequence
  Description of Artificial Sequence: Synthetic oligonucleotide
aagauggggaaagguggag

SEQ ID NO: 3116043 - RNA, 19 nt, Artificial Sequence
  Description of Artificial Sequence: Synthetic oligonucleotide
caagucaaugacaucucca

SEQ ID NO: 3116044 - RNA, 19 nt, Artificial Sequence
  Description of Artificial Sequence: Synthetic oligonucleotide
uccaagucaaugacaucuc

SEQ ID NO: 3116045 - RNA, 19 nt, Artificial Sequence
  Description of Artificial Sequence: Synthetic oligonucleotide
augacaucuccaaauggug

SEQ ID NO: 3116046 - RNA, 19 nt, Artificial Sequence
  Description of Artificial Sequence: Synthetic oligonucleotide
gucaaugacaucuccaaau

SEQ ID NO: 3116047 - RNA, 19 nt, Artificial Sequence
  Description of Artificial Sequence: Synthetic oligonucleotide
agcuuuggacugcuccaac

SEQ ID NO: 3116048 - RNA, 19 nt, Artificial Sequence
  Description of Artificial Sequence: Synthetic oligonucleotide
uggaggugguucuguuugg

SEQ ID NO: 3116049 - RNA, 19 nt, Artificial Sequence
  Description of Artificial Sequence: Synthetic oligonucleotide
guugggguugaagauggcc

SEQ ID NO: 3116050 - RNA, 19 nt, Artificial Sequence
  Description of Artificial Sequence: Synthetic oligonucleotide
aaugguguguugggguuga

SEQ ID NO: 3116051 - RNA, 19 nt, Artificial Sequence
  Description of Artificial Sequence: Synthetic oligonucleotide
agucccaguguaacuaggg

SEQ ID NO: 3116052 - RNA, 19 nt, Artificial Sequence
  Description of Artificial Sequence: Synthetic oligonucleotide
aagucccaguguaacuagg

SEQ ID NO: 3116053 - RNA, 19 nt, Artificial Sequence
  Description of Artificial Sequence: Synthetic oligonucleotide
uggagcuuuuagcuggcuc

SEQ ID NO: 3116054 - RNA, 19 nt, Artificial Sequence
  Description of Artificial Sequence: Synthetic oligonucleotide
uuccagguccaagucaaug

SEQ ID NO: 3116055 - RNA, 19 nt, Artificial Sequence
  Description of Artificial Sequence: Synthetic oligonucleotide
agcacugccugaucauuug

SEQ ID NO: 3116056 - RNA, 19 nt, Artificial Sequence
  Description of Artificial Sequence: Synthetic oligonucleotide
guccaagucaaugacaucu

SEQ ID NO: 3116057 - RNA, 19 nt, Artificial Sequence
  Description of Artificial Sequence: Synthetic oligonucleotide
uguugugaauggagguggu

SEQ ID NO: 3116058 - RNA, 19 nt, Artificial Sequence
  Description of Artificial Sequence: Synthetic oligonucleotide
cuggcucuuguugugaaug

SEQ ID NO: 3116059 - RNA, 19 nt, Artificial Sequence
  Description of Artificial Sequence: Synthetic oligonucleotide
uggugcucugcuccaaagu

SEQ ID NO: 3116060 - RNA, 19 nt, Artificial Sequence
  Description of Artificial Sequence: Synthetic oligonucleotide
gauggggaaagguggagcu

SEQ ID NO: 3116061 - RNA, 19 nt, Artificial Sequence
  Description of Artificial Sequence: Synthetic oligonucleotide
acaaggggaagauggggaa

SEQ ID NO: 3116062 - RNA, 19 nt, Artificial Sequence
  Description of Artificial Sequence: Synthetic oligonucleotide
guucuguuuggagacugcc

SEQ ID NO: 3116063 - RNA, 19 nt, Artificial Sequence
  Description of Artificial Sequence: Synthetic oligonucleotide
ugaauggaggugguucugu

SEQ ID NO: 3116064 - RNA, 19 nt, Artificial Sequence
  Description of Artificial Sequence: Synthetic oligonucleotide
auggugcucugcuccaaag

SEQ ID NO: 3116065 - RNA, 19 nt, Artificial Sequence
  Description of Artificial Sequence: Synthetic oligonucleotide
agucaaugacaucuccaaa

SEQ ID NO: 3116066 - RNA, 19 nt, Artificial Sequence
  Description of Artificial Sequence: Synthetic oligonucleotide
uuggacugcuccaacuguu

SEQ ID NO: 3116067 - RNA, 19 nt, Artificial Sequence
  Description of Artificial Sequence: Synthetic oligonucleotide
acuaggguaacaaggggaa

SEQ ID NO: 3116068 - RNA, 19 nt, Artificial Sequence
  Description of Artificial Sequence: Synthetic oligonucleotide
uccaacuguucuugaggga

SEQ ID NO: 3116069 - RNA, 19 nt, Artificial Sequence
  Description of Artificial Sequence: Synthetic oligonucleotide
agguccaagucaaugacau

SEQ ID NO: 3116070 - RNA, 19 nt, Artificial Sequence
  Description of Artificial Sequence: Synthetic oligonucleotide
gauggccugcagcacugcc

SEQ ID NO: 3116071 - RNA, 19 nt, Artificial Sequence
  Description of Artificial Sequence: Synthetic oligonucleotide
uuggaguccccauggugcu

SEQ ID NO: 3116072 - RNA, 19 nt, Artificial Sequence
  Description of Artificial Sequence: Synthetic oligonucleotide
cugaucauuuggagucccc

SEQ ID NO: 3116073 - RNA, 19 nt, Artificial Sequence
  Description of Artificial Sequence: Synthetic oligonucleotide
uggacugcuccaacuguuc

SEQ ID NO: 3116074 - RNA, 19 nt, Artificial Sequence
  Description of Artificial Sequence: Synthetic oligonucleotide
gaagauggggaaaggugga

SEQ ID NO: 3116075 - RNA, 19 nt, Artificial Sequence
  Description of Artificial Sequence: Synthetic oligonucleotide
ugguguguugggguugaag

SEQ ID NO: 3116076 - RNA, 19 nt, Artificial Sequence
  Description of Artificial Sequence: Synthetic oligonucleotide
gaagauggccugcagcacu

SEQ ID NO: 3116077 - RNA, 19 nt, Artificial Sequence
  Description of Artificial Sequence: Synthetic oligonucleotide
ggugcucugcuccaaaguc

SEQ ID NO: 3116078 - RNA, 19 nt, Artificial Sequence
  Description of Artificial Sequence: Synthetic oligonucleotide
gggaagauggggaaaggug

SEQ ID NO: 3116079 - RNA, 19 nt, Artificial Sequence
  Description of Artificial Sequence: Synthetic oligonucleotide
cuucuuccagguccaaguc

SEQ ID NO: 3116080 - RNA, 19 nt, Artificial Sequence
  Description of Artificial Sequence: Synthetic oligonucleotide
ggaaaacuccaucuucauc

SEQ ID NO: 3116081 - RNA, 19 nt, Artificial Sequence
  Description of Artificial Sequence: Synthetic oligonucleotide
uggggaaagguggagcuuu

SEQ ID NO: 3116082 - RNA, 19 nt, Artificial Sequence
  Description of Artificial Sequence: Synthetic oligonucleotide
gcucuuguugugaauggag

SEQ ID NO: 3116083 - RNA, 19 nt, Artificial Sequence
  Description of Artificial Sequence: Synthetic oligonucleotide
uguugggguugaagauggc

SEQ ID NO: 3116084 - RNA, 19 nt, Artificial Sequence
  Description of Artificial Sequence: Synthetic oligonucleotide
ggagcuuuuagcuggcucu

SEQ ID NO: 3116085 - RNA, 19 nt, Artificial Sequence
  Description of Artificial Sequence: Synthetic oligonucleotide
ugcagcacugccugaucau

SEQ ID NO: 3116086 - RNA, 19 nt, Artificial Sequence
  Description of Artificial Sequence: Synthetic oligonucleotide
caaagucccaguguaacua

SEQ ID NO: 3116087 - RNA, 19 nt, Artificial Sequence
  Description of Artificial Sequence: Synthetic oligonucleotide
cuaggguaacaaggggaag

SEQ ID NO: 3116088 - RNA, 19 nt, Artificial Sequence
  Description of Artificial Sequence: Synthetic oligonucleotide
ccaagucaaugacaucucc

SEQ ID NO: 3116089 - RNA, 19 nt, Artificial Sequence
  Description of Artificial Sequence: Synthetic oligonucleotide
aggguaacaaggggaagau

SEQ ID NO: 3116090 - RNA, 19 nt, Artificial Sequence
  Description of Artificial Sequence: Synthetic oligonucleotide
gaucauuuggaguccccau

SEQ ID NO: 3116091 - RNA, 19 nt, Artificial Sequence
  Description of Artificial Sequence: Synthetic oligonucleotide
cacugccugaucauuugga

SEQ ID NO: 3116092 - RNA, 19 nt, Artificial Sequence
  Description of Artificial Sequence: Synthetic oligonucleotide
cugcuccaaagucccagug

SEQ ID NO: 3116093 - RNA, 19 nt, Artificial Sequence
  Description of Artificial Sequence: Synthetic oligonucleotide
cuguucuugagggaaaacu

SEQ ID NO: 3116094 - RNA, 19 nt, Artificial Sequence
  Description of Artificial Sequence: Synthetic oligonucleotide
aggggaagauggggaaagg

SEQ ID NO: 3116095 - RNA, 19 nt, Artificial Sequence
  Description of Artificial Sequence: Synthetic oligonucleotide
gcacugccugaucauuugg

SEQ ID NO: 3116096 - RNA, 19 nt, Artificial Sequence
  Description of Artificial Sequence: Synthetic oligonucleotide
agauggccugcagcacugc

SEQ ID NO: 3116097 - RNA, 19 nt, Artificial Sequence
  Description of Artificial Sequence: Synthetic oligonucleotide
ccagguccaagucaaugac

SEQ ID NO: 3116098 - RNA, 19 nt, Artificial Sequence
  Description of Artificial Sequence: Synthetic oligonucleotide
cccaguguaacuaggguaa

SEQ ID NO: 3116099 - RNA, 19 nt, Artificial Sequence
  Description of Artificial Sequence: Synthetic oligonucleotide
gugaauggaggugguucug

SEQ ID NO: 3116100 - RNA, 19 nt, Artificial Sequence
  Description of Artificial Sequence: Synthetic oligonucleotide
gcuccaaagucccagugua

SEQ ID NO: 3116101 - RNA, 19 nt, Artificial Sequence
  Description of Artificial Sequence: Synthetic oligonucleotide
aguccccauggugcucugc

SEQ ID NO: 3116102 - RNA, 19 nt, Artificial Sequence
  Description of Artificial Sequence: Synthetic oligonucleotide
uagcuggcucuuguuguga

SEQ ID NO: 3116103 - RNA, 19 nt, Artificial Sequence
  Description of Artificial Sequence: Synthetic oligonucleotide
agcuggcucuuguugugaa

SEQ ID NO: 3116104 - RNA, 19 nt, Artificial Sequence
  Description of Artificial Sequence: Synthetic oligonucleotide
agcuuuuagcuggcucuug

SEQ ID NO: 3116105 - RNA, 19 nt, Artificial Sequence
  Description of Artificial Sequence: Synthetic oligonucleotide
ccccauggugcucugcucc

SEQ ID NO: 3116106 - RNA, 19 nt, Artificial Sequence
  Description of Artificial Sequence: Synthetic oligonucleotide
auggccugcagcacugccu

SEQ ID NO: 3116107 - RNA, 19 nt, Artificial Sequence
  Description of Artificial Sequence: Synthetic oligonucleotide
caacuguucuugagggaaa

SEQ ID NO: 3116108 - RNA, 19 nt, Artificial Sequence
  Description of Artificial Sequence: Synthetic oligonucleotide
cugccugaucauuuggagu

SEQ ID NO: 3116109 - RNA, 19 nt, Artificial Sequence
  Description of Artificial Sequence: Synthetic oligonucleotide
caguguaacuaggguaaca

SEQ ID NO: 3116110 - RNA, 19 nt, Artificial Sequence
  Description of Artificial Sequence: Synthetic oligonucleotide
cuccagagcuuuggacugc

SEQ ID NO: 3116111 - RNA, 19 nt, Artificial Sequence
  Description of Artificial Sequence: Synthetic oligonucleotide
uccccauggugcucugcuc

SEQ ID NO: 3116112 - RNA, 19 nt, Artificial Sequence
  Description of Artificial Sequence: Synthetic oligonucleotide
gagcuuuggacugcuccaa

SEQ ID NO: 3116113 - RNA, 19 nt, Artificial Sequence
  Description of Artificial Sequence: Synthetic oligonucleotide
guguguugggguugaagau

SEQ ID NO: 3116114 - RNA, 19 nt, Artificial Sequence
  Description of Artificial Sequence: Synthetic oligonucleotide
caaaugguguguugggguu

SEQ ID NO: 3116115 - RNA, 19 nt, Artificial Sequence
  Description of Artificial Sequence: Synthetic oligonucleotide
gucccaguguaacuagggu

SEQ ID NO: 3116116 - RNA, 19 nt, Artificial Sequence
  Description of Artificial Sequence: Synthetic oligonucleotide
cuccaaagucccaguguaa

SEQ ID NO: 3116117 - RNA, 19 nt, Artificial Sequence
  Description of Artificial Sequence: Synthetic oligonucleotide
gaauggaggugguucuguu

SEQ ID NO: 3116118 - RNA, 19 nt, Artificial Sequence
  Description of Artificial Sequence: Synthetic oligonucleotide
ccaacuguucuugagggaa

SEQ ID NO: 3116119 - RNA, 19 nt, Artificial Sequence
  Description of Artificial Sequence: Synthetic oligonucleotide
ccugaucauuuggaguccc

SEQ ID NO: 3116120 - RNA, 19 nt, Artificial Sequence
  Description of Artificial Sequence: Synthetic oligonucleotide
guccccauggugcucugcu

SEQ ID NO: 3116121 - RNA, 19 nt, Artificial Sequence
  Description of Artificial Sequence: Synthetic oligonucleotide
gcuuuuagcuggcucuugu

SEQ ID NO: 3116122 - RNA, 19 nt, Artificial Sequence
  Description of Artificial Sequence: Synthetic oligonucleotide
cauggugcucugcuccaaa

SEQ ID NO: 3116123 - RNA, 19 nt, Artificial Sequence
  Description of Artificial Sequence: Synthetic oligonucleotide
ccaaaugguguguuggggu

SEQ ID NO: 3116124 - RNA, 19 nt, Artificial Sequence
  Description of Artificial Sequence: Synthetic oligonucleotide
gguccaagucaaugacauc

SEQ ID NO: 3116125 - RNA, 19 nt, Artificial Sequence
  Description of Artificial Sequence: Synthetic oligonucleotide
ggguaacaaggggaagaug

SEQ ID NO: 3116126 - RNA, 19 nt, Artificial Sequence
  Description of Artificial Sequence: Synthetic oligonucleotide
gguggagcuuuuagcuggc

SEQ ID NO: 3116127 - RNA, 19 nt, Artificial Sequence
  Description of Artificial Sequence: Synthetic oligonucleotide
gcuuuggacugcuccaacu

SEQ ID NO: 3116128 - RNA, 19 nt, Artificial Sequence
  Description of Artificial Sequence: Synthetic oligonucleotide
caaggggaagauggggaaa

SEQ ID NO: 3116129 - RNA, 19 nt, Artificial Sequence
  Description of Artificial Sequence: Synthetic oligonucleotide
auggggaaagguggagcuu

SEQ ID NO: 3116130 - RNA, 19 nt, Artificial Sequence
  Description of Artificial Sequence: Synthetic oligonucleotide
gaguccccauggugcucug

SEQ ID NO: 3116131 - RNA, 19 nt, Artificial Sequence
  Description of Artificial Sequence: Synthetic oligonucleotide
ggcucuuguugugaaugga

SEQ ID NO: 3116132 - RNA, 19 nt, Artificial Sequence
  Description of Artificial Sequence: Synthetic oligonucleotide
cauuuggaguccccauggu

SEQ ID NO: 3116133 - RNA, 19 nt, Artificial Sequence
  Description of Artificial Sequence: Synthetic oligonucleotide
ggaggugguucuguuugga

SEQ ID NO: 3116134 - RNA, 19 nt, Artificial Sequence
  Description of Artificial Sequence: Synthetic oligonucleotide
cugcuccaacuguucuuga

SEQ ID NO: 3116135 - RNA, 19 nt, Artificial Sequence
  Description of Artificial Sequence: Synthetic oligonucleotide
gggaaaacuccaucuucau

SEQ ID NO: 3116136 - RNA, 19 nt, Artificial Sequence
  Description of Artificial Sequence: Synthetic oligonucleotide
ggggaagauggggaaaggu

SEQ ID NO: 3116137 - RNA, 19 nt, Artificial Sequence
  Description of Artificial Sequence: Synthetic oligonucleotide
ccaguguaacuaggguaac

SEQ ID NO: 3116138 - RNA, 19 nt, Artificial Sequence
  Description of Artificial Sequence: Synthetic oligonucleotide
cagcacugccugaucauuu

SEQ ID NO: 3116139 - RNA, 19 nt, Artificial Sequence
  Description of Artificial Sequence: Synthetic oligonucleotide
guugugaauggaggugguu

SEQ ID NO: 3116140 - RNA, 19 nt, Artificial Sequence
  Description of Artificial Sequence: Synthetic oligonucleotide
ggaguccccauggugcucu

SEQ ID NO: 3116141 - RNA, 19 nt, Artificial Sequence
  Description of Artificial Sequence: Synthetic oligonucleotide
gugguucuguuuggagacu

SEQ ID NO: 3116142 - RNA, 19 nt, Artificial Sequence
  Description of Artificial Sequence: Synthetic oligonucleotide
gggaaagguggagcuuuua

SEQ ID NO: 3116143 - RNA, 19 nt, Artificial Sequence
  Description of Artificial Sequence: Synthetic oligonucleotide
augguguguugggguugaa

SEQ ID NO: 3116144 - RNA, 19 nt, Artificial Sequence
  Description of Artificial Sequence: Synthetic oligonucleotide
gcuggcucuuguugugaau

SEQ ID NO: 3116145 - RNA, 19 nt, Artificial Sequence
  Description of Artificial Sequence: Synthetic oligonucleotide
guggagcuuuuagcuggcu

SEQ ID NO: 3116146 - RNA, 19 nt, Artificial Sequence
  Description of Artificial Sequence: Synthetic oligonucleotide
gcagcacugccugaucauu

SEQ ID NO: 3116147 - RNA, 19 nt, Artificial Sequence
  Description of Artificial Sequence: Synthetic oligonucleotide
gcucugcuccaaaguccca

SEQ ID NO: 3116148 - RNA, 19 nt, Artificial Sequence
  Description of Artificial Sequence: Synthetic oligonucleotide
ccauggugcucugcuccaa

SEQ ID NO: 3116149 - RNA, 19 nt, Artificial Sequence
  Description of Artificial Sequence: Synthetic oligonucleotide
ggggaaagguggagcuuuu

SEQ ID NO: 3116150 - RNA, 19 nt, Artificial Sequence
  Description of Artificial Sequence: Synthetic oligonucleotide
aguuccaucaucuacaaac

SEQ ID NO: 3116151 - RNA, 19 nt, Artificial Sequence
  Description of Artificial Sequence: Synthetic oligonucleotide
uuuuauguaacagucaugg

SEQ ID NO: 3116152 - RNA, 19 nt, Artificial Sequence
  Description of Artificial Sequence: Synthetic oligonucleotide
acauuuaauuaccacagcc

SEQ ID NO: 3116153 - RNA, 19 nt, Artificial Sequence
  Description of Artificial Sequence: Synthetic oligonucleotide
aacauugcagacuaaaucu

SEQ ID NO: 3116154 - RNA, 19 nt, Artificial Sequence
  Description of Artificial Sequence: Synthetic oligonucleotide
ucuaccaauauguacacag

SEQ ID NO: 3116155 - RNA, 19 nt, Artificial Sequence
  Description of Artificial Sequence: Synthetic oligonucleotide
aauaaaacauugcagacua

SEQ ID NO: 3116156 - RNA, 19 nt, Artificial Sequence
  Description of Artificial Sequence: Synthetic oligonucleotide
ugaaguguguuucaguucc

SEQ ID NO: 3116157 - RNA, 19 nt, Artificial Sequence
  Description of Artificial Sequence: Synthetic oligonucleotide
agugaacacauuuaauuac

SEQ ID NO: 3116158 - RNA, 19 nt, Artificial Sequence
  Description of Artificial Sequence: Synthetic oligonucleotide
uccaucaucuacaaacucg

SEQ ID NO: 3116159 - RNA, 19 nt, Artificial Sequence
  Description of Artificial Sequence: Synthetic oligonucleotide
uccucuucagcucagaacc

SEQ ID NO: 3116160 - RNA, 19 nt, Artificial Sequence
  Description of Artificial Sequence: Synthetic oligonucleotide
aucaucuacaaacucgccc

SEQ ID NO: 3116161 - RNA, 19 nt, Artificial Sequence
  Description of Artificial Sequence: Synthetic oligonucleotide
aaucuaccaauauguacac

SEQ ID NO: 3116162 - RNA, 19 nt, Artificial Sequence
  Description of Artificial Sequence: Synthetic oligonucleotide
cuguuauccacaaugagug

SEQ ID NO: 3116163 - RNA, 19 nt, Artificial Sequence
  Description of Artificial Sequence: Synthetic oligonucleotide
uuauguaacagucaugguu

SEQ ID NO: 3116164 - RNA, 19 nt, Artificial Sequence
  Description of Artificial Sequence: Synthetic oligonucleotide
acuaaaucuaccaauaugu

SEQ ID NO: 3116165 - RNA, 19 nt, Artificial Sequence
  Description of Artificial Sequence: Synthetic oligonucleotide
uaaaucuaccaauauguac

SEQ ID NO: 3116166 - RNA, 19 nt, Artificial Sequence
  Description of Artificial Sequence: Synthetic oligonucleotide
uucaguuccaucaucuaca

SEQ ID NO: 3116167 - RNA, 19 nt, Artificial Sequence
  Description of Artificial Sequence: Synthetic oligonucleotide
aaauaaaacauugcagacu

SEQ ID NO: 3116168 - RNA, 19 nt, Artificial Sequence
  Description of Artificial Sequence: Synthetic oligonucleotide
uaccacagccauuagaaag

SEQ ID NO: 3116169 - RNA, 19 nt, Artificial Sequence
  Description of Artificial Sequence: Synthetic oligonucleotide
gacuaaaucuaccaauaug

SEQ ID NO: 3116170 - RNA, 19 nt, Artificial Sequence
  Description of Artificial Sequence: Synthetic oligonucleotide
uuaauuaccacagccauua

SEQ ID NO: 3116171 - RNA, 19 nt, Artificial Sequence
  Description of Artificial Sequence: Synthetic oligonucleotide
aaucccuucucuucucuuc

SEQ ID NO: 3116172 - RNA, 19 nt, Artificial Sequence
  Description of Artificial Sequence: Synthetic oligonucleotide
auauguacacagugaacac

SEQ ID NO: 3116173 - RNA, 19 nt, Artificial Sequence
  Description of Artificial Sequence: Synthetic oligonucleotide
uaccaauauguacacagug

SEQ ID NO: 3116174 - RNA, 19 nt, Artificial Sequence
  Description of Artificial Sequence: Synthetic oligonucleotide
aaugaguguguggauaauc

SEQ ID NO: 3116175 - RNA, 19 nt, Artificial Sequence
  Description of Artificial Sequence: Synthetic oligonucleotide
cuaaccagcagucacugag

SEQ ID NO: 3116176 - RNA, 19 nt, Artificial Sequence
  Description of Artificial Sequence: Synthetic oligonucleotide
aauuaccacagccauuaga

SEQ ID NO: 3116177 - RNA, 19 nt, Artificial Sequence
  Description of Artificial Sequence: Synthetic oligonucleotide
ucagaacccacuaaccagc

SEQ ID NO: 3116178 - RNA, 19 nt, Artificial Sequence
  Description of Artificial Sequence: Synthetic oligonucleotide
auuuaauuaccacagccau

SEQ ID NO: 3116179 - RNA, 19 nt, Artificial Sequence
  Description of Artificial Sequence: Synthetic oligonucleotide
acagugaacacauuuaauu

SEQ ID NO: 3116180 - RNA, 19 nt, Artificial Sequence
  Description of Artificial Sequence: Synthetic oligonucleotide
auuagaaaguccugauguc

SEQ ID NO: 3116181 - RNA, 19 nt, Artificial Sequence
  Description of Artificial Sequence: Synthetic oligonucleotide
uuucaguuccaucaucuac

SEQ ID NO: 3116182 - RNA, 19 nt, Artificial Sequence
  Description of Artificial Sequence: Synthetic oligonucleotide
agaaaguccugaugucucc

SEQ ID NO: 3116183 - RNA, 19 nt, Artificial Sequence
  Description of Artificial Sequence: Synthetic oligonucleotide
augaguguguggauaaucc

SEQ ID NO: 3116184 - RNA, 19 nt, Artificial Sequence
  Description of Artificial Sequence: Synthetic oligonucleotide
acagcuuuuauguaacagu

SEQ ID NO: 3116185 - RNA, 19 nt, Artificial Sequence
  Description of Artificial Sequence: Synthetic oligonucleotide
aaccagcagucacugaggg

SEQ ID NO: 3116186 - RNA, 19 nt, Artificial Sequence
  Description of Artificial Sequence: Synthetic oligonucleotide
ugaacacauuuaauuacca

SEQ ID NO: 3116187 - RNA, 19 nt, Artificial Sequence
  Description of Artificial Sequence: Synthetic oligonucleotide
auugcagacuaaaucuacc

SEQ ID NO: 3116188 - RNA, 19 nt, Artificial Sequence
  Description of Artificial Sequence: Synthetic oligonucleotide
uuauccacaaugagugugu

SEQ ID NO: 3116189 - RNA, 19 nt, Artificial Sequence
  Description of Artificial Sequence: Synthetic oligonucleotide
uguggauaaucccuucucu

SEQ ID NO: 3116190 - RNA, 19 nt, Artificial Sequence
  Description of Artificial Sequence: Synthetic oligonucleotide
aaaguccugaugucuccuc

SEQ ID NO: 3116191 - RNA, 19 nt, Artificial Sequence
  Description of Artificial Sequence: Synthetic oligonucleotide
cauuuaauuaccacagcca

SEQ ID NO: 3116192 - RNA, 19 nt, Artificial Sequence
  Description of Artificial Sequence: Synthetic oligonucleotide
uuagaaaguccugaugucu

SEQ ID NO: 3116193 - RNA, 19 nt, Artificial Sequence
  Description of Artificial Sequence: Synthetic oligonucleotide
ucugggaucucccuguuau

SEQ ID NO: 3116194 - RNA, 19 nt, Artificial Sequence
  Description of Artificial Sequence: Synthetic oligonucleotide
acagucaugguucccaaca

SEQ ID NO: 3116195 - RNA, 19 nt, Artificial Sequence
  Description of Artificial Sequence: Synthetic oligonucleotide
guguguuucaguuccauca

SEQ ID NO: 3116196 - RNA, 19 nt, Artificial Sequence
  Description of Artificial Sequence: Synthetic oligonucleotide
cucagaacccacuaaccag

SEQ ID NO: 3116197 - RNA, 19 nt, Artificial Sequence
  Description of Artificial Sequence: Synthetic oligonucleotide
cucccuguuauccacaaug

SEQ ID NO: 3116198 - RNA, 19 nt, Artificial Sequence
  Description of Artificial Sequence: Synthetic oligonucleotide
auuaccacagccauuagaa

SEQ ID NO: 3116199 - RNA, 19 nt, Artificial Sequence
  Description of Artificial Sequence: Synthetic oligonucleotide
aacagucaugguucccaac

SEQ ID NO: 3116200 - RNA, 19 nt, Artificial Sequence
  Description of Artificial Sequence: Synthetic oligonucleotide
ugaugucuccucuucagcu

SEQ ID NO: 3116201 - RNA, 19 nt, Artificial Sequence
  Description of Artificial Sequence: Synthetic oligonucleotide
auguaacagucaugguucc

SEQ ID NO: 3116202 - RNA, 19 nt, Artificial Sequence
  Description of Artificial Sequence: Synthetic oligonucleotide
acugaaguguguuucaguu

SEQ ID NO: 3116203 - RNA, 19 nt, Artificial Sequence
  Description of Artificial Sequence: Synthetic oligonucleotide
cagcuuuuauguaacaguc

SEQ ID NO: 3116204 - RNA, 19 nt, Artificial Sequence
  Description of Artificial Sequence: Synthetic oligonucleotide
ugguucccaacacugaagu

SEQ ID NO: 3116205 - RNA, 19 nt, Artificial Sequence
  Description of Artificial Sequence: Synthetic oligonucleotide
uucccaacacugaagugug

SEQ ID NO: 3116206 - RNA, 19 nt, Artificial Sequence
  Description of Artificial Sequence: Synthetic oligonucleotide
ugaguguguggauaauccc

SEQ ID NO: 3116207 - RNA, 19 nt, Artificial Sequence
  Description of Artificial Sequence: Synthetic oligonucleotide
gacagcuuuuauguaacag

SEQ ID NO: 3116208 - RNA, 19 nt, Artificial Sequence
  Description of Artificial Sequence: Synthetic oligonucleotide
cauuagaaaguccugaugu

SEQ ID NO: 3116209 - RNA, 19 nt, Artificial Sequence
  Description of Artificial Sequence: Synthetic oligonucleotide
acagccauuagaaaguccu

SEQ ID NO: 3116210 - RNA, 19 nt, Artificial Sequence
  Description of Artificial Sequence: Synthetic oligonucleotide
uagaaaguccugaugucuc

SEQ ID NO: 3116211 - RNA, 19 nt, Artificial Sequence
  Description of Artificial Sequence: Synthetic oligonucleotide
guuauccacaaugagugug

SEQ ID NO: 3116212 - RNA, 19 nt, Artificial Sequence
  Description of Artificial Sequence: Synthetic oligonucleotide
uggauaaucccuucucuuc

SEQ ID NO: 3116213 - RNA, 19 nt, Artificial Sequence
  Description of Artificial Sequence: Synthetic oligonucleotide
aaaacauugcagacuaaau

SEQ ID NO: 3116214 - RNA, 19 nt, Artificial Sequence
  Description of Artificial Sequence: Synthetic oligonucleotide
uauguacacagugaacaca

SEQ ID NO: 3116215 - RNA, 19 nt, Artificial Sequence
  Description of Artificial Sequence: Synthetic oligonucleotide
cauugcagacuaaaucuac

SEQ ID NO: 3116216 - RNA, 19 nt, Artificial Sequence
  Description of Artificial Sequence: Synthetic oligonucleotide
uguguggauaaucccuucu

SEQ ID NO: 3116217 - RNA, 19 nt, Artificial Sequence
  Description of Artificial Sequence: Synthetic oligonucleotide
cuuuuauguaacagucaug

SEQ ID NO: 3116218 - RNA, 19 nt, Artificial Sequence
  Description of Artificial Sequence: Synthetic oligonucleotide
uuuaauuaccacagccauu

SEQ ID NO: 3116219 - RNA, 19 nt, Artificial Sequence
  Description of Artificial Sequence: Synthetic oligonucleotide
ugcagacuaaaucuaccaa

SEQ ID NO: 3116220 - RNA, 19 nt, Artificial Sequence
  Description of Artificial Sequence: Synthetic oligonucleotide
caauauguacacagugaac

SEQ ID NO: 3116221 - RNA, 19 nt, Artificial Sequence
  Description of Artificial Sequence: Synthetic oligonucleotide
acaaugaguguguggauaa

SEQ ID NO: 3116222 - RNA, 19 nt, Artificial Sequence
  Description of Artificial Sequence: Synthetic oligonucleotide
aacccacuaaccagcaguc

SEQ ID NO: 3116223 - RNA, 19 nt, Artificial Sequence
  Description of Artificial Sequence: Synthetic oligonucleotide
ugggaucucccuguuaucc

SEQ ID NO: 3116224 - RNA, 19 nt, Artificial Sequence
  Description of Artificial Sequence: Synthetic oligonucleotide
cugacagcuuuuauguaac

SEQ ID NO: 3116225 - RNA, 19 nt, Artificial Sequence
  Description of Artificial Sequence: Synthetic oligonucleotide
ucccuguuauccacaauga

SEQ ID NO: 3116226 - RNA, 19 nt, Artificial Sequence
  Description of Artificial Sequence: Synthetic oligonucleotide
acacagugaacacauuuaa

SEQ ID NO: 3116227 - RNA, 19 nt, Artificial Sequence
  Description of Artificial Sequence: Synthetic oligonucleotide
uguguuucaguuccaucau

SEQ ID NO: 3116228 - RNA, 19 nt, Artificial Sequence
  Description of Artificial Sequence: Synthetic oligonucleotide
uuuauguaacagucauggu

SEQ ID NO: 3116229 - RNA, 19 nt, Artificial Sequence
  Description of Artificial Sequence: Synthetic oligonucleotide
aaguccugaugucuccucu

SEQ ID NO: 3116230 - RNA, 19 nt, Artificial Sequence
  Description of Artificial Sequence: Synthetic oligonucleotide
agcucagaacccacuaacc

SEQ ID NO: 3116231 - RNA, 19 nt, Artificial Sequence
  Description of Artificial Sequence: Synthetic oligonucleotide
ucaugguucccaacacuga

SEQ ID NO: 3116232 - RNA, 19 nt, Artificial Sequence
  Description of Artificial Sequence: Synthetic oligonucleotide
cacauuuaauuaccacagc

SEQ ID NO: 3116233 - RNA, 19 nt, Artificial Sequence
  Description of Artificial Sequence: Synthetic oligonucleotide
ccaucaucuacaaacucgc

SEQ ID NO: 3116234 - RNA, 19 nt, Artificial Sequence
  Description of Artificial Sequence: Synthetic oligonucleotide
acugagggagcucugggau

SEQ ID NO: 3116235 - RNA, 19 nt, Artificial Sequence
  Description of Artificial Sequence: Synthetic oligonucleotide
agacuaaaucuaccaauau

SEQ ID NO: 3116236 - RNA, 19 nt, Artificial Sequence
  Description of Artificial Sequence: Synthetic oligonucleotide
gaacccacuaaccagcagu

SEQ ID NO: 3116237 - RNA, 19 nt, Artificial Sequence
  Description of Artificial Sequence: Synthetic oligonucleotide
accaauauguacacaguga

SEQ ID NO: 3116238 - RNA, 19 nt, Artificial Sequence
  Description of Artificial Sequence: Synthetic oligonucleotide
gcugcugacagcuuuuaug

SEQ ID NO: 3116239 - RNA, 19 nt, Artificial Sequence
  Description of Artificial Sequence: Synthetic oligonucleotide
gauaaucccuucucuucuc

SEQ ID NO: 3116240 - RNA, 19 nt, Artificial Sequence
  Description of Artificial Sequence: Synthetic oligonucleotide
uucucuucucuucccgcug

SEQ ID NO: 3116241 - RNA, 19 nt, Artificial Sequence
  Description of Artificial Sequence: Synthetic oligonucleotide
auaaucccuucucuucucu

SEQ ID NO: 3116242 - RNA, 19 nt, Artificial Sequence
  Description of Artificial Sequence: Synthetic oligonucleotide
uucagcucagaacccacua

SEQ ID NO: 3116243 - RNA, 19 nt, Artificial Sequence
  Description of Artificial Sequence: Synthetic oligonucleotide
ucagcucagaacccacuaa

SEQ ID NO: 3116244 - RNA, 19 nt, Artificial Sequence
  Description of Artificial Sequence: Synthetic oligonucleotide
uaauuaccacagccauuag

SEQ ID NO: 3116245 - RNA, 19 nt, Artificial Sequence
  Description of Artificial Sequence: Synthetic oligonucleotide
agucaugguucccaacacu

SEQ ID NO: 3116246 - RNA, 19 nt, Artificial Sequence
  Description of Artificial Sequence: Synthetic oligonucleotide
guaacagucaugguuccca

SEQ ID NO: 3116247 - RNA, 19 nt, Artificial Sequence
  Description of Artificial Sequence: Synthetic oligonucleotide
uguuauccacaaugagugu

SEQ ID NO: 3116248 - RNA, 19 nt, Artificial Sequence
  Description of Artificial Sequence: Synthetic oligonucleotide
cagcucagaacccacuaac

SEQ ID NO: 3116249 - RNA, 19 nt, Artificial Sequence
  Description of Artificial Sequence: Synthetic oligonucleotide
cuccucuucagcucagaac

SEQ ID NO: 3116250 - RNA, 19 nt, Artificial Sequence
  Description of Artificial Sequence: Synthetic oligonucleotide
cagugaacacauuuaauua

SEQ ID NO: 3116251 - RNA, 19 nt, Artificial Sequence
  Description of Artificial Sequence: Synthetic oligonucleotide
ugagggagcucugggaucu

SEQ ID NO: 3116252 - RNA, 19 nt, Artificial Sequence
  Description of Artificial Sequence: Synthetic oligonucleotide
uccugaugucuccucuuca

SEQ ID NO: 3116253 - RNA, 19 nt, Artificial Sequence
  Description of Artificial Sequence: Synthetic oligonucleotide
caucaucuacaaacucgcc

SEQ ID NO: 3116254 - RNA, 19 nt, Artificial Sequence
  Description of Artificial Sequence: Synthetic oligonucleotide
cagacuaaaucuaccaaua

SEQ ID NO: 3116255 - RNA, 19 nt, Artificial Sequence
  Description of Artificial Sequence: Synthetic oligonucleotide
cugaaguguguuucaguuc

SEQ ID NO: 3116256 - RNA, 19 nt, Artificial Sequence
  Description of Artificial Sequence: Synthetic oligonucleotide
agccauuagaaaguccuga

SEQ ID NO: 3116257 - RNA, 19 nt, Artificial Sequence
  Description of Artificial Sequence: Synthetic oligonucleotide
accacagccauuagaaagu

SEQ ID NO: 3116258 - RNA, 19 nt, Artificial Sequence
  Description of Artificial Sequence: Synthetic oligonucleotide
uguaacagucaugguuccc

SEQ ID NO: 3116259 - RNA, 19 nt, Artificial Sequence
  Description of Artificial Sequence: Synthetic oligonucleotide
agcucugggaucucccugu

SEQ ID NO: 3116260 - RNA, 19 nt, Artificial Sequence
  Description of Artificial Sequence: Synthetic oligonucleotide
uuaccacagccauuagaaa

SEQ ID NO: 3116261 - RNA, 19 nt, Artificial Sequence
  Description of Artificial Sequence: Synthetic oligonucleotide
ugacagcuuuuauguaaca

SEQ ID NO: 3116262 - RNA, 19 nt, Artificial Sequence
  Description of Artificial Sequence: Synthetic oligonucleotide
guguggauaaucccuucuc

SEQ ID NO: 3116263 - RNA, 19 nt, Artificial Sequence
  Description of Artificial Sequence: Synthetic oligonucleotide
guucccaacacugaagugu

SEQ ID NO: 3116264 - RNA, 19 nt, Artificial Sequence
  Description of Artificial Sequence: Synthetic oligonucleotide
cacagccauuagaaagucc

SEQ ID NO: 3116265 - RNA, 19 nt, Artificial Sequence
  Description of Artificial Sequence: Synthetic oligonucleotide
agaacccacuaaccagcag

SEQ ID NO: 3116266 - RNA, 19 nt, Artificial Sequence
  Description of Artificial Sequence: Synthetic oligonucleotide
cugcugacagcuuuuaugu

SEQ ID NO: 3116267 - RNA, 19 nt, Artificial Sequence
  Description of Artificial Sequence: Synthetic oligonucleotide
gucacugagggagcucugg

SEQ ID NO: 3116268 - RNA, 19 nt, Artificial Sequence
  Description of Artificial Sequence: Synthetic oligonucleotide
uaacagucaugguucccaa

SEQ ID NO: 3116269 - RNA, 19 nt, Artificial Sequence
  Description of Artificial Sequence: Synthetic oligonucleotide
uucucuucccgcugcugac

SEQ ID NO: 3116270 - RNA, 19 nt, Artificial Sequence
  Description of Artificial Sequence: Synthetic oligonucleotide
uauccacaaugagugugug

SEQ ID NO: 3116271 - RNA, 19 nt, Artificial Sequence
  Description of Artificial Sequence: Synthetic oligonucleotide
gcugacagcuuuuauguaa

SEQ ID NO: 3116272 - RNA, 19 nt, Artificial Sequence
  Description of Artificial Sequence: Synthetic oligonucleotide
aaguguguuucaguuccau

SEQ ID NO: 3116273 - RNA, 19 nt, Artificial Sequence
  Description of Artificial Sequence: Synthetic oligonucleotide
agcuuuuauguaacaguca

SEQ ID NO: 3116274 - RNA, 19 nt, Artificial Sequence
  Description of Artificial Sequence: Synthetic oligonucleotide
gagcucugggaucucccug

SEQ ID NO: 3116275 - RNA, 19 nt, Artificial Sequence
  Description of Artificial Sequence: Synthetic oligonucleotide
cagucaugguucccaacac

SEQ ID NO: 3116276 - RNA, 19 nt, Artificial Sequence
  Description of Artificial Sequence: Synthetic oligonucleotide
augguucccaacacugaag

SEQ ID NO: 3116277 - RNA, 19 nt, Artificial Sequence
  Description of Artificial Sequence: Synthetic oligonucleotide
cacuaaccagcagucacug

SEQ ID NO: 3116278 - RNA, 19 nt, Artificial Sequence
  Description of Artificial Sequence: Synthetic oligonucleotide
gaguguguggauaaucccu

SEQ ID NO: 3116279 - RNA, 19 nt, Artificial Sequence
  Description of Artificial Sequence: Synthetic oligonucleotide
caugguucccaacacugaa

SEQ ID NO: 3116280 - RNA, 19 nt, Artificial Sequence
  Description of Artificial Sequence: Synthetic oligonucleotide
gcucagaacccacuaacca

SEQ ID NO: 3116281 - RNA, 19 nt, Artificial Sequence
  Description of Artificial Sequence: Synthetic oligonucleotide
gcuuuuauguaacagucau

SEQ ID NO: 3116282 - RNA, 19 nt, Artificial Sequence
  Description of Artificial Sequence: Synthetic oligonucleotide
guacacagugaacacauuu

SEQ ID NO: 3116283 - RNA, 19 nt, Artificial Sequence
  Description of Artificial Sequence: Synthetic oligonucleotide
agggagcucugggaucucc

SEQ ID NO: 3116284 - RNA, 19 nt, Artificial Sequence
  Description of Artificial Sequence: Synthetic oligonucleotide
ccaauauguacacagugaa

SEQ ID NO: 3116285 - RNA, 19 nt, Artificial Sequence
  Description of Artificial Sequence: Synthetic oligonucleotide
cucuucccgcugcugacag

SEQ ID NO: 3116286 - RNA, 19 nt, Artificial Sequence
  Description of Artificial Sequence: Synthetic oligonucleotide
cagccauuagaaaguccug

SEQ ID NO: 3116287 - RNA, 19 nt, Artificial Sequence
  Description of Artificial Sequence: Synthetic oligonucleotide
ccauuagaaaguccugaug

SEQ ID NO: 3116288 - RNA, 19 nt, Artificial Sequence
  Description of Artificial Sequence: Synthetic oligonucleotide
uaaucccuucucuucucuu

SEQ ID NO: 3116289 - RNA, 19 nt, Artificial Sequence
  Description of Artificial Sequence: Synthetic oligonucleotide
cccacuaaccagcagucac

SEQ ID NO: 3116290 - RNA, 19 nt, Artificial Sequence
  Description of Artificial Sequence: Synthetic oligonucleotide
uguacacagugaacacauu

SEQ ID NO: 3116291 - RNA, 19 nt, Artificial Sequence
  Description of Artificial Sequence: Synthetic oligonucleotide
acuaaccagcagucacuga

SEQ ID NO: 3116292 - RNA, 19 nt, Artificial Sequence
  Description of Artificial Sequence: Synthetic oligonucleotide
guguuucaguuccaucauc

SEQ ID NO: 3116293 - RNA, 19 nt, Artificial Sequence
  Description of Artificial Sequence: Synthetic oligonucleotide
ggaucucccuguuauccac

SEQ ID NO: 3116294 - RNA, 19 nt, Artificial Sequence
  Description of Artificial Sequence: Synthetic oligonucleotide
aguguguggauaaucccuu

SEQ ID NO: 3116295 - RNA, 19 nt, Artificial Sequence
  Description of Artificial Sequence: Synthetic oligonucleotide
acauugcagacuaaaucua

SEQ ID NO: 3116296 - RNA, 19 nt, Artificial Sequence
  Description of Artificial Sequence: Synthetic oligonucleotide
ccuguuauccacaaugagu

SEQ ID NO: 3116297 - RNA, 19 nt, Artificial Sequence
  Description of Artificial Sequence: Synthetic oligonucleotide
cugagggagcucugggauc

SEQ ID NO: 3116298 - RNA, 19 nt, Artificial Sequence
  Description of Artificial Sequence: Synthetic oligonucleotide
ucucuucccgcugcugaca

SEQ ID NO: 3116299 - RNA, 19 nt, Artificial Sequence
  Description of Artificial Sequence: Synthetic oligonucleotide
ggauaaucccuucucuucu

SEQ ID NO: 3116300 - RNA, 19 nt, Artificial Sequence
  Description of Artificial Sequence: Synthetic oligonucleotide
guuucaguuccaucaucua

SEQ ID NO: 3116301 - RNA, 19 nt, Artificial Sequence
  Description of Artificial Sequence: Synthetic oligonucleotide
ugcugacagcuuuuaugua

SEQ ID NO: 3116302 - RNA, 19 nt, Artificial Sequence
  Description of Artificial Sequence: Synthetic oligonucleotide
aguccugaugucuccucuu

SEQ ID NO: 3116303 - RNA, 19 nt, Artificial Sequence
  Description of Artificial Sequence: Synthetic oligonucleotide
accagcagucacugaggga

SEQ ID NO: 3116304 - RNA, 19 nt, Artificial Sequence
  Description of Artificial Sequence: Synthetic oligonucleotide
gcagacuaaaucuaccaau

SEQ ID NO: 3116305 - RNA, 19 nt, Artificial Sequence
  Description of Artificial Sequence: Synthetic oligonucleotide
cuaccaauauguacacagu

SEQ ID NO: 3116306 - RNA, 19 nt, Artificial Sequence
  Description of Artificial Sequence: Synthetic oligonucleotide
cagcagucacugagggagc

SEQ ID NO: 3116307 - RNA, 19 nt, Artificial Sequence
  Description of Artificial Sequence: Synthetic oligonucleotide
gguucccaacacugaagug

SEQ ID NO: 3116308 - RNA, 19 nt, Artificial Sequence
  Description of Artificial Sequence: Synthetic oligonucleotide
cacaaugaguguguggaua

SEQ ID NO: 3116309 - RNA, 19 nt, Artificial Sequence
  Description of Artificial Sequence: Synthetic oligonucleotide
ucccgcugcugacagcuuu

SEQ ID NO: 3116310 - RNA, 19 nt, Artificial Sequence
  Description of Artificial Sequence: Synthetic oligonucleotide
cacugagggagcucuggga

SEQ ID NO: 3116311 - RNA, 19 nt, Artificial Sequence
  Description of Artificial Sequence: Synthetic oligonucleotide
ucccaacacugaagugugu

SEQ ID NO: 3116312 - RNA, 19 nt, Artificial Sequence
  Description of Artificial Sequence: Synthetic oligonucleotide
guguguggauaaucccuuc

SEQ ID NO: 3116313 - RNA, 19 nt, Artificial Sequence
  Description of Artificial Sequence: Synthetic oligonucleotide
gaucucccuguuauccaca

SEQ ID NO: 3116314 - RNA, 19 nt, Artificial Sequence
  Description of Artificial Sequence: Synthetic oligonucleotide
aucuaccaauauguacaca

SEQ ID NO: 3116315 - RNA, 19 nt, Artificial Sequence
  Description of Artificial Sequence: Synthetic oligonucleotide
ucucccuguuauccacaau

SEQ ID NO: 3116316 - RNA, 19 nt, Artificial Sequence
  Description of Artificial Sequence: Synthetic oligonucleotide
agcagucacugagggagcu

SEQ ID NO: 3116317 - RNA, 19 nt, Artificial Sequence
  Description of Artificial Sequence: Synthetic oligonucleotide
cccuguuauccacaaugag

SEQ ID NO: 3116318 - RNA, 19 nt, Artificial Sequence
  Description of Artificial Sequence: Synthetic oligonucleotide
cagaacccacuaaccagca

SEQ ID NO: 3116319 - RNA, 19 nt, Artificial Sequence
  Description of Artificial Sequence: Synthetic oligonucleotide
gaaaguccugaugucuccu

SEQ ID NO: 3116320 - RNA, 19 nt, Artificial Sequence
  Description of Artificial Sequence: Synthetic oligonucleotide
guggauaaucccuucucuu

SEQ ID NO: 3116321 - RNA, 19 nt, Artificial Sequence
  Description of Artificial Sequence: Synthetic oligonucleotide
gaaguguguuucaguucca

SEQ ID NO: 3116322 - RNA, 19 nt, Artificial Sequence
  Description of Artificial Sequence: Synthetic oligonucleotide
cugggaucucccuguuauc

SEQ ID NO: 3116323 - RNA, 19 nt, Artificial Sequence
  Description of Artificial Sequence: Synthetic oligonucleotide
auaaaacauugcagacuaa

SEQ ID NO: 3116324 - RNA, 19 nt, Artificial Sequence
  Description of Artificial Sequence: Synthetic oligonucleotide
cacagugaacacauuuaau

SEQ ID NO: 3116325 - RNA, 19 nt, Artificial Sequence
  Description of Artificial Sequence: Synthetic oligonucleotide
gggaucucccuguuaucca

SEQ ID NO: 3116326 - RNA, 19 nt, Artificial Sequence
  Description of Artificial Sequence: Synthetic oligonucleotide
ccucuucagcucagaaccc

SEQ ID NO: 3116327 - RNA, 19 nt, Artificial Sequence
  Description of Artificial Sequence: Synthetic oligonucleotide
cuucccgcugcugacagcu

SEQ ID NO: 3116328 - RNA, 19 nt, Artificial Sequence
  Description of Artificial Sequence: Synthetic oligonucleotide
acccacuaaccagcaguca

SEQ ID NO: 3116329 - RNA, 19 nt, Artificial Sequence
  Description of Artificial Sequence: Synthetic oligonucleotide
gccauuagaaaguccugau

SEQ ID NO: 3116330 - RNA, 19 nt, Artificial Sequence
  Description of Artificial Sequence: Synthetic oligonucleotide
cagucacugagggagcucu

SEQ ID NO: 3116331 - RNA, 19 nt, Artificial Sequence
  Description of Artificial Sequence: Synthetic oligonucleotide
ccacagccauuagaaaguc

SEQ ID NO: 3116332 - RNA, 19 nt, Artificial Sequence
  Description of Artificial Sequence: Synthetic oligonucleotide
uucccgcugcugacagcuu

SEQ ID NO: 3116333 - RNA, 19 nt, Artificial Sequence
  Description of Artificial Sequence: Synthetic oligonucleotide
ccacuaaccagcagucacu

SEQ ID NO: 3116334 - RNA, 19 nt, Artificial Sequence
  Description of Artificial Sequence: Synthetic oligonucleotide
cucugggaucucccuguua

SEQ ID NO: 3116335 - RNA, 19 nt, Artificial Sequence
  Description of Artificial Sequence: Synthetic oligonucleotide
cucuucucuucccgcugcu

SEQ ID NO: 3116336 - RNA, 19 nt, Artificial Sequence
  Description of Artificial Sequence: Synthetic oligonucleotide
gagggagcucugggaucuc

SEQ ID NO: 3116337 - RNA, 19 nt, Artificial Sequence
  Description of Artificial Sequence: Synthetic oligonucleotide
caaugaguguguggauaau

SEQ ID NO: 3116338 - RNA, 19 nt, Artificial Sequence
  Description of Artificial Sequence: Synthetic oligonucleotide
gcagucacugagggagcuc

SEQ ID NO: 3116339 - RNA, 19 nt, Artificial Sequence
  Description of Artificial Sequence: Synthetic oligonucleotide
ccaacacugaaguguguuu

SEQ ID NO: 3116340 - RNA, 19 nt, Artificial Sequence
  Description of Artificial Sequence: Synthetic oligonucleotide
ccacaaugaguguguggau

SEQ ID NO: 3116341 - RNA, 19 nt, Artificial Sequence
  Description of Artificial Sequence: Synthetic oligonucleotide
gcucugggaucucccuguu

SEQ ID NO: 3116342 - RNA, 19 nt, Artificial Sequence
  Description of Artificial Sequence: Synthetic oligonucleotide
cccgcugcugacagcuuuu

SEQ ID NO: 3116343 - RNA, 19 nt, Artificial Sequence
  Description of Artificial Sequence: Synthetic oligonucleotide
ccgcugcugacagcuuuua

SEQ ID NO: 3116344 - RNA, 19 nt, Artificial Sequence
  Description of Artificial Sequence: Synthetic oligonucleotide
aaacaggugcaucuguugc

SEQ ID NO: 3116345 - RNA, 19 nt, Artificial Sequence
  Description of Artificial Sequence: Synthetic oligonucleotide
aauuguggacgucaaacag

SEQ ID NO: 3116346 - RNA, 19 nt, Artificial Sequence
  Description of Artificial Sequence: Synthetic oligonucleotide
auaauuguggacgucaaac

SEQ ID NO: 3116347 - RNA, 19 nt, Artificial Sequence
  Description of Artificial Sequence: Synthetic oligonucleotide
aacauaauccggauaauug

SEQ ID NO: 3116348 - RNA, 19 nt, Artificial Sequence
  Description of Artificial Sequence: Synthetic oligonucleotide
ugacguagagugcaaagag

SEQ ID NO: 3116349 - RNA, 19 nt, Artificial Sequence
  Description of Artificial Sequence: Synthetic oligonucleotide
aauccggauaauuguggac

SEQ ID NO: 3116350 - RNA, 19 nt, Artificial Sequence
  Description of Artificial Sequence: Synthetic oligonucleotide
guggacgucaaacaggugc

SEQ ID NO: 3116351 - RNA, 19 nt, Artificial Sequence
  Description of Artificial Sequence: Synthetic oligonucleotide
acauaauccggauaauugu

SEQ ID NO: 3116352 - RNA, 19 nt, Artificial Sequence
  Description of Artificial Sequence: Synthetic oligonucleotide
ugcaaagaggugccggucg

SEQ ID NO: 3116353 - RNA, 19 nt, Artificial Sequence
  Description of Artificial Sequence: Synthetic oligonucleotide
uggaccugagucaggaagg

SEQ ID NO: 3116354 - RNA, 19 nt, Artificial Sequence
  Description of Artificial Sequence: Synthetic oligonucleotide
uaauuguggacgucaaaca

SEQ ID NO: 3116355 - RNA, 19 nt, Artificial Sequence
  Description of Artificial Sequence: Synthetic oligonucleotide
uccagccgaaacauaaucc

SEQ ID NO: 3116356 - RNA, 19 nt, Artificial Sequence
  Description of Artificial Sequence: Synthetic oligonucleotide
cauaauccggauaauugug

SEQ ID NO: 3116357 - RNA, 19 nt, Artificial Sequence
  Description of Artificial Sequence: Synthetic oligonucleotide
auccggauaauuguggacg

SEQ ID NO: 3116358 - RNA, 19 nt, Artificial Sequence
  Description of Artificial Sequence: Synthetic oligonucleotide
uuguggacgucaaacaggu

SEQ ID NO: 3116359 - RNA, 19 nt, Artificial Sequence
  Description of Artificial Sequence: Synthetic oligonucleotide
guagagugcaaagaggugc

SEQ ID NO: 3116360 - RNA, 19 nt, Artificial Sequence
  Description of Artificial Sequence: Synthetic oligonucleotide
auguggaggaaucgggacg

SEQ ID NO: 3116361 - RNA, 19 nt, Artificial Sequence
  Description of Artificial Sequence: Synthetic oligonucleotide
uagagugcaaagaggugcc

SEQ ID NO: 3116362 - RNA, 19 nt, Artificial Sequence
  Description of Artificial Sequence: Synthetic oligonucleotide
auaauccggauaauugugg

SEQ ID NO: 3116363 - RNA, 19 nt, Artificial Sequence
  Description of Artificial Sequence: Synthetic oligonucleotide
uccacggccacccggaaca

SEQ ID NO: 3116364 - RNA, 19 nt, Artificial Sequence
  Description of Artificial Sequence: Synthetic oligonucleotide
aggugcaucuguugcaccg

SEQ ID NO: 3116365 - RNA, 19 nt, Artificial Sequence
  Description of Artificial Sequence: Synthetic oligonucleotide
auuguggacgucaaacagg

SEQ ID NO: 3116366 - RNA, 19 nt, Artificial Sequence
  Description of Artificial Sequence: Synthetic oligonucleotide
aacaggugcaucuguugca

SEQ ID NO: 3116367 - RNA, 19 nt, Artificial Sequence
  Description of Artificial Sequence: Synthetic oligonucleotide
ugcaccgggaucuggcugg

SEQ ID NO: 3116368 - RNA, 19 nt, Artificial Sequence
  Description of Artificial Sequence: Synthetic oligonucleotide
accugagucaggaagggcg

SEQ ID NO: 3116369 - RNA, 19 nt, Artificial Sequence
  Description of Artificial Sequence: Synthetic oligonucleotide
uaauccggauaauugugga

SEQ ID NO: 3116370 - RNA, 19 nt, Artificial Sequence
  Description of Artificial Sequence: Synthetic oligonucleotide
uccaccuccagccgaaaca

SEQ ID NO: 3116371 - RNA, 19 nt, Artificial Sequence
  Description of Artificial Sequence: Synthetic oligonucleotide
uggacgucaaacaggugca

SEQ ID NO: 3116372 - RNA, 19 nt, Artificial Sequence
  Description of Artificial Sequence: Synthetic oligonucleotide
gacguagagugcaaagagg

SEQ ID NO: 3116373 - RNA, 19 nt, Artificial Sequence
  Description of Artificial Sequence: Synthetic oligonucleotide
aaacauaauccggauaauu

SEQ ID NO: 3116374 - RNA, 19 nt, Artificial Sequence
  Description of Artificial Sequence: Synthetic oligonucleotide
uguugcaccgggaucuggc

SEQ ID NO: 3116375 - RNA, 19 nt, Artificial Sequence
  Description of Artificial Sequence: Synthetic oligonucleotide
acgucaaacaggugcaucu

SEQ ID NO: 3116376 - RNA, 19 nt, Artificial Sequence
  Description of Artificial Sequence: Synthetic oligonucleotide
cuggaccugagucaggaag

SEQ ID NO: 3116377 - RNA, 19 nt, Artificial Sequence
  Description of Artificial Sequence: Synthetic oligonucleotide
accgggaucuggcuggugg

SEQ ID NO: 3116378 - RNA, 19 nt, Artificial Sequence
  Description of Artificial Sequence: Synthetic oligonucleotide
cuucagcagagccuggugc

SEQ ID NO: 3116379 - RNA, 19 nt, Artificial Sequence
  Description of Artificial Sequence: Synthetic oligonucleotide
uggacaguggccacugcug

SEQ ID NO: 3116380 - RNA, 19 nt, Artificial Sequence
  Description of Artificial Sequence: Synthetic oligonucleotide
auccccugcccacucaucg

SEQ ID NO: 3116381 - RNA, 19 nt, Artificial Sequence
  Description of Artificial Sequence: Synthetic oligonucleotide
gagucaggaagggcgaugg

SEQ ID NO: 3116382 - RNA, 19 nt, Artificial Sequence
  Description of Artificial Sequence: Synthetic oligonucleotide
gaggaaucgggacgugacg

SEQ ID NO: 3116383 - RNA, 19 nt, Artificial Sequence
  Description of Artificial Sequence: Synthetic oligonucleotide
caaacaggugcaucuguug

SEQ ID NO: 3116384 - RNA, 19 nt, Artificial Sequence
  Description of Artificial Sequence: Synthetic oligonucleotide
cagccgaaacauaauccgg

SEQ ID NO: 3116385 - RNA, 19 nt, Artificial Sequence
  Description of Artificial Sequence: Synthetic oligonucleotide
ucaaacaggugcaucuguu

SEQ ID NO: 3116386 - RNA, 19 nt, Artificial Sequence
  Description of Artificial Sequence: Synthetic oligonucleotide
cauguggaggaaucgggac

SEQ ID NO: 3116387 - RNA, 19 nt, Artificial Sequence
  Description of Artificial Sequence: Synthetic oligonucleotide
aucuguugcaccgggaucu

SEQ ID NO: 3116388 - RNA, 19 nt, Artificial Sequence
  Description of Artificial Sequence: Synthetic oligonucleotide
acguagagugcaaagaggu

SEQ ID NO: 3116389 - RNA, 19 nt, Artificial Sequence
  Description of Artificial Sequence: Synthetic oligonucleotide
acaggugcaucuguugcac

SEQ ID NO: 3116390 - RNA, 19 nt, Artificial Sequence
  Description of Artificial Sequence: Synthetic oligonucleotide
ccagccgaaacauaauccg

SEQ ID NO: 3116391 - RNA, 19 nt, Artificial Sequence
  Description of Artificial Sequence: Synthetic oligonucleotide
agugcaaagaggugccggu

SEQ ID NO: 3116392 - RNA, 19 nt, Artificial Sequence
  Description of Artificial Sequence: Synthetic oligonucleotide
ugcgacuggaccugaguca

SEQ ID NO: 3116393 - RNA, 19 nt, Artificial Sequence
  Description of Artificial Sequence: Synthetic oligonucleotide
acucaucgcugccuucagc

SEQ ID NO: 3116394 - RNA, 19 nt, Artificial Sequence
  Description of Artificial Sequence: Synthetic oligonucleotide
gagugcaaagaggugccgg

SEQ ID NO: 3116395 - RNA, 19 nt, Artificial Sequence
  Description of Artificial Sequence: Synthetic oligonucleotide
agggcgauggcauguggag

SEQ ID NO: 3116396 - RNA, 19 nt, Artificial Sequence
  Description of Artificial Sequence: Synthetic oligonucleotide
aacagggcaaggcacuguu

SEQ ID NO: 3116397 - RNA, 19 nt, Artificial Sequence
  Description of Artificial Sequence: Synthetic oligonucleotide
uguggaggaaucgggacgu

SEQ ID NO: 3116398 - RNA, 19 nt, Artificial Sequence
  Description of Artificial Sequence: Synthetic oligonucleotide
uggcauguggaggaaucgg

SEQ ID NO: 3116399 - RNA, 19 nt, Artificial Sequence
  Description of Artificial Sequence: Synthetic oligonucleotide
gaaucgggacgugacguag

SEQ ID NO: 3116400 - RNA, 19 nt, Artificial Sequence
  Description of Artificial Sequence: Synthetic oligonucleotide
cuuguccacggccacccgg

SEQ ID NO: 3116401 - RNA, 19 nt, Artificial Sequence
  Description of Artificial Sequence: Synthetic oligonucleotide
uccggauaauuguggacgu

SEQ ID NO: 3116402 - RNA, 19 nt, Artificial Sequence
  Description of Artificial Sequence: Synthetic oligonucleotide
gaagggcgauggcaugugg

SEQ ID NO: 3116403 - RNA, 19 nt, Artificial Sequence
  Description of Artificial Sequence: Synthetic oligonucleotide
uuguccacggccacccgga

SEQ ID NO: 3116404 - RNA, 19 nt, Artificial Sequence
  Description of Artificial Sequence: Synthetic oligonucleotide
gauggcauguggaggaauc

SEQ ID NO: 3116405 - RNA, 19 nt, Artificial Sequence
  Description of Artificial Sequence: Synthetic oligonucleotide
aucgggacgugacguagag

SEQ ID NO: 3116406 - RNA, 19 nt, Artificial Sequence
  Description of Artificial Sequence: Synthetic oligonucleotide
ucaucgcugccuucagcag

SEQ ID NO: 3116407 - RNA, 19 nt, Artificial Sequence
  Description of Artificial Sequence: Synthetic oligonucleotide
agucaggaagggcgauggc

SEQ ID NO: 3116408 - RNA, 19 nt, Artificial Sequence
  Description of Artificial Sequence: Synthetic oligonucleotide
gauaauuguggacgucaaa

SEQ ID NO: 3116409 - RNA, 19 nt, Artificial Sequence
  Description of Artificial Sequence: Synthetic oligonucleotide
auggcauguggaggaaucg

SEQ ID NO: 3116410 - RNA, 19 nt, Artificial Sequence
  Description of Artificial Sequence: Synthetic oligonucleotide
cuccagccgaaacauaauc

SEQ ID NO: 3116411 - RNA, 19 nt, Artificial Sequence
  Description of Artificial Sequence: Synthetic oligonucleotide
aggaaucgggacgugacgu

SEQ ID NO: 3116412 - RNA, 19 nt, Artificial Sequence
  Description of Artificial Sequence: Synthetic oligonucleotide
acccggaacagggcaaggc

SEQ ID NO: 3116413 - RNA, 19 nt, Artificial Sequence
  Description of Artificial Sequence: Synthetic oligonucleotide
uugcaccgggaucuggcug

SEQ ID NO: 3116414 - RNA, 19 nt, Artificial Sequence
  Description of Artificial Sequence: Synthetic oligonucleotide
cuggugcuuguccacggcc

SEQ ID NO: 3116415 - RNA, 19 nt, Artificial Sequence
  Description of Artificial Sequence: Synthetic oligonucleotide
acggccacccggaacaggg

SEQ ID NO: 3116416 - RNA, 19 nt, Artificial Sequence
  Description of Artificial Sequence: Synthetic oligonucleotide
agccgaaacauaauccgga

SEQ ID NO: 3116417 - RNA, 19 nt, Artificial Sequence
  Description of Artificial Sequence: Synthetic oligonucleotide
cugcgacuggaccugaguc

SEQ ID NO: 3116418 - RNA, 19 nt, Artificial Sequence
  Description of Artificial Sequence: Synthetic oligonucleotide
ugagucaggaagggcgaug

SEQ ID NO: 3116419 - RNA, 19 nt, Artificial Sequence
  Description of Artificial Sequence: Synthetic oligonucleotide
cgaaacauaauccggauaa

SEQ ID NO: 3116420 - RNA, 19 nt, Artificial Sequence
  Description of Artificial Sequence: Synthetic oligonucleotide
cagagccuggugcuugucc

SEQ ID NO: 3116421 - RNA, 19 nt, Artificial Sequence
  Description of Artificial Sequence: Synthetic oligonucleotide
aagggcgauggcaugugga

SEQ ID NO: 3116422 - RNA, 19 nt, Artificial Sequence
  Description of Artificial Sequence: Synthetic oligonucleotide
cgggacgugacguagagug

SEQ ID NO: 3116423 - RNA, 19 nt, Artificial Sequence
  Description of Artificial Sequence: Synthetic oligonucleotide
ggcauguggaggaaucggg

SEQ ID NO: 3116424 - RNA, 19 nt, Artificial Sequence
  Description of Artificial Sequence: Synthetic oligonucleotide
gugacguagagugcaaaga

SEQ ID NO: 3116425 - RNA, 19 nt, Artificial Sequence
  Description of Artificial Sequence: Synthetic oligonucleotide
ugcaucuguugcaccggga

SEQ ID NO: 3116426 - RNA, 19 nt, Artificial Sequence
  Description of Artificial Sequence: Synthetic oligonucleotide
ugccggucgauccccugcc

SEQ ID NO: 3116427 - RNA, 19 nt, Artificial Sequence
  Description of Artificial Sequence: Synthetic oligonucleotide
ggaucuggcugguggacag

SEQ ID NO: 3116428 - RNA, 19 nt, Artificial Sequence
  Description of Artificial Sequence: Synthetic oligonucleotide
aaauccaccuccagccgaa

SEQ ID NO: 3116429 - RNA, 19 nt, Artificial Sequence
  Description of Artificial Sequence: Synthetic oligonucleotide
aucgcugccuucagcagag

SEQ ID NO: 3116430 - RNA, 19 nt, Artificial Sequence
  Description of Artificial Sequence: Synthetic oligonucleotide
gacuggaccugagucagga

SEQ ID NO: 3116431 - RNA, 19 nt, Artificial Sequence
  Description of Artificial Sequence: Synthetic oligonucleotide
guggccacugcugcgacug

SEQ ID NO: 3116432 - RNA, 19 nt, Artificial Sequence
  Description of Artificial Sequence: Synthetic oligonucleotide
uggaggaaucgggacguga

SEQ ID NO: 3116433 - RNA, 19 nt, Artificial Sequence
  Description of Artificial Sequence: Synthetic oligonucleotide
caaauccaccuccagccga

SEQ ID NO: 3116434 - RNA, 19 nt, Artificial Sequence
  Description of Artificial Sequence: Synthetic oligonucleotide
uguggacgucaaacaggug

SEQ ID NO: 3116435 - RNA, 19 nt, Artificial Sequence
  Description of Artificial Sequence: Synthetic oligonucleotide
caucuguugcaccgggauc

SEQ ID NO: 3116436 - RNA, 19 nt, Artificial Sequence
  Description of Artificial Sequence: Synthetic oligonucleotide
ggcgauggcauguggagga

SEQ ID NO: 3116437 - RNA, 19 nt, Artificial Sequence
  Description of Artificial Sequence: Synthetic oligonucleotide
gacgucaaacaggugcauc

SEQ ID NO: 3116438 - RNA, 19 nt, Artificial Sequence
  Description of Artificial Sequence: Synthetic oligonucleotide
aaucgggacgugacguaga

SEQ ID NO: 3116439 - RNA, 19 nt, Artificial Sequence
  Description of Artificial Sequence: Synthetic oligonucleotide
aucuggcugguggacagug

SEQ ID NO: 3116440 - RNA, 19 nt, Artificial Sequence
  Description of Artificial Sequence: Synthetic oligonucleotide
ugguggacaguggccacug

SEQ ID NO: 3116441 - RNA, 19 nt, Artificial Sequence
  Description of Artificial Sequence: Synthetic oligonucleotide
gcccaaauccaccuccagc

SEQ ID NO: 3116442 - RNA, 19 nt, Artificial Sequence
  Description of Artificial Sequence: Synthetic oligonucleotide
agggcaaggcacuguuggu

SEQ ID NO: 3116443 - RNA, 19 nt, Artificial Sequence
  Description of Artificial Sequence: Synthetic oligonucleotide
aggaagggcgauggcaugu

SEQ ID NO: 3116444 - RNA, 19 nt, Artificial Sequence
  Description of Artificial Sequence: Synthetic oligonucleotide
uccccugcccacucaucgc

SEQ ID NO: 3116445 - RNA, 19 nt, Artificial Sequence
  Description of Artificial Sequence: Synthetic oligonucleotide
caucgcugccuucagcaga

SEQ ID NO: 3116446 - RNA, 19 nt, Artificial Sequence
  Description of Artificial Sequence: Synthetic oligonucleotide
caggugcaucuguugcacc

SEQ ID NO: 3116447 - RNA, 19 nt, Artificial Sequence
  Description of Artificial Sequence: Synthetic oligonucleotide
ugcugcgacuggaccugag

SEQ ID NO: 3116448 - RNA, 19 nt, Artificial Sequence
  Description of Artificial Sequence: Synthetic oligonucleotide
ggugcaucuguugcaccgg

SEQ ID NO: 3116449 - RNA, 19 nt, Artificial Sequence
  Description of Artificial Sequence: Synthetic oligonucleotide
gaccugagucaggaagggc

SEQ ID NO: 3116450 - RNA, 19 nt, Artificial Sequence
  Description of Artificial Sequence: Synthetic oligonucleotide
ggaggaaucgggacgugac

SEQ ID NO: 3116451 - RNA, 19 nt, Artificial Sequence
  Description of Artificial Sequence: Synthetic oligonucleotide
ggaccugagucaggaaggg

SEQ ID NO: 3116452 - RNA, 19 nt, Artificial Sequence
  Description of Artificial Sequence: Synthetic oligonucleotide
ucuguugcaccgggaucug

SEQ ID NO: 3116453 - RNA, 19 nt, Artificial Sequence
  Description of Artificial Sequence: Synthetic oligonucleotide
gugccggucgauccccugc

SEQ ID NO: 3116454 - RNA, 19 nt, Artificial Sequence
  Description of Artificial Sequence: Synthetic oligonucleotide
ucgauccccugcccacuca

SEQ ID NO: 3116455 - RNA, 19 nt, Artificial Sequence
  Description of Artificial Sequence: Synthetic oligonucleotide
gucaaacaggugcaucugu

SEQ ID NO: 3116456 - RNA, 19 nt, Artificial Sequence
  Description of Artificial Sequence: Synthetic oligonucleotide
caggaagggcgauggcaug

SEQ ID NO: 3116457 - RNA, 19 nt, Artificial Sequence
  Description of Artificial Sequence: Synthetic oligonucleotide
cgugacguagagugcaaag

SEQ ID NO: 3116458 - RNA, 19 nt, Artificial Sequence
  Description of Artificial Sequence: Synthetic oligonucleotide
gaggugccggucgaucccc

SEQ ID NO: 3116459 - RNA, 19 nt, Artificial Sequence
  Description of Artificial Sequence: Synthetic oligonucleotide
gcgacuggaccugagucag

SEQ ID NO: 3116460 - RNA, 19 nt, Artificial Sequence
  Description of Artificial Sequence: Synthetic oligonucleotide
cacucaucgcugccuucag

SEQ ID NO: 3116461 - RNA, 19 nt, Artificial Sequence
  Description of Artificial Sequence: Synthetic oligonucleotide
ggacgugacguagagugca

SEQ ID NO: 3116462 - RNA, 19 nt, Artificial Sequence
  Description of Artificial Sequence: Synthetic oligonucleotide
gaaacauaauccggauaau

SEQ ID NO: 3116463 - RNA, 19 nt, Artificial Sequence
  Description of Artificial Sequence: Synthetic oligonucleotide
ugcccacucaucgcugccu

SEQ ID NO: 3116464 - RNA, 19 nt, Artificial Sequence
  Description of Artificial Sequence: Synthetic oligonucleotide
ccggaacagggcaaggcac

SEQ ID NO: 3116465 - RNA, 19 nt, Artificial Sequence
  Description of Artificial Sequence: Synthetic oligonucleotide
aguggccacugcugcgacu

SEQ ID NO: 3116466 - RNA, 19 nt, Artificial Sequence
  Description of Artificial Sequence: Synthetic oligonucleotide
cugcccacucaucgcugcc

SEQ ID NO: 3116467 - RNA, 19 nt, Artificial Sequence
  Description of Artificial Sequence: Synthetic oligonucleotide
cuguugcaccgggaucugg

SEQ ID NO: 3116468 - RNA, 19 nt, Artificial Sequence
  Description of Artificial Sequence: Synthetic oligonucleotide
acuggaccugagucaggaa

SEQ ID NO: 3116469 - RNA, 19 nt, Artificial Sequence
  Description of Artificial Sequence: Synthetic oligonucleotide
gggcgauggcauguggagg

SEQ ID NO: 3116470 - RNA, 19 nt, Artificial Sequence
  Description of Artificial Sequence: Synthetic oligonucleotide
ggugcuuguccacggccac

SEQ ID NO: 3116471 - RNA, 19 nt, Artificial Sequence
  Description of Artificial Sequence: Synthetic oligonucleotide
ggaacagggcaaggcacug

SEQ ID NO: 3116472 - RNA, 19 nt, Artificial Sequence
  Description of Artificial Sequence: Synthetic oligonucleotide
gccuggugcuuguccacgg

SEQ ID NO: 3116473 - RNA, 19 nt, Artificial Sequence
  Description of Artificial Sequence: Synthetic oligonucleotide
acagggcaaggcacuguug

SEQ ID NO: 3116474 - RNA, 19 nt, Artificial Sequence
  Description of Artificial Sequence: Synthetic oligonucleotide
cguagagugcaaagaggug

SEQ ID NO: 3116475 - RNA, 19 nt, Artificial Sequence
  Description of Artificial Sequence: Synthetic oligonucleotide
uguccacggccacccggaa

SEQ ID NO: 3116476 - RNA, 19 nt, Artificial Sequence
  Description of Artificial Sequence: Synthetic oligonucleotide
gcaaagaggugccggucga

SEQ ID NO: 3116477 - RNA, 19 nt, Artificial Sequence
  Description of Artificial Sequence: Synthetic oligonucleotide
ucagcagagccuggugcuu

SEQ ID NO: 3116478 - RNA, 19 nt, Artificial Sequence
  Description of Artificial Sequence: Synthetic oligonucleotide
ggauaauuguggacgucaa

SEQ ID NO: 3116479 - RNA, 19 nt, Artificial Sequence
  Description of Artificial Sequence: Synthetic oligonucleotide
gugcaaagaggugccgguc

SEQ ID NO: 3116480 - RNA, 19 nt, Artificial Sequence
  Description of Artificial Sequence: Synthetic oligonucleotide
ggcugguggacaguggcca

SEQ ID NO: 3116481 - RNA, 19 nt, Artificial Sequence
  Description of Artificial Sequence: Synthetic oligonucleotide
guugcaccgggaucuggcu

SEQ ID NO: 3116482 - RNA, 19 nt, Artificial Sequence
  Description of Artificial Sequence: Synthetic oligonucleotide
gucgauccccugcccacuc

SEQ ID NO: 3116483 - RNA, 19 nt, Artificial Sequence
  Description of Artificial Sequence: Synthetic oligonucleotide
aauccaccuccagccgaaa

SEQ ID NO: 3116484 - RNA, 19 nt, Artificial Sequence
  Description of Artificial Sequence: Synthetic oligonucleotide
ccugcccacucaucgcugc

SEQ ID NO: 3116485 - RNA, 19 nt, Artificial Sequence
  Description of Artificial Sequence: Synthetic oligonucleotide
guccacggccacccggaac

SEQ ID NO: 3116486 - RNA, 19 nt, Artificial Sequence
  Description of Artificial Sequence: Synthetic oligonucleotide
gcauguggaggaaucggga

SEQ ID NO: 3116487 - RNA, 19 nt, Artificial Sequence
  Description of Artificial Sequence: Synthetic oligonucleotide
ucgggacgugacguagagu

SEQ ID NO: 3116488 - RNA, 19 nt, Artificial Sequence
  Description of Artificial Sequence: Synthetic oligonucleotide
gggcaaggcacuguugguc

SEQ ID NO: 3116489 - RNA, 19 nt, Artificial Sequence
  Description of Artificial Sequence: Synthetic oligonucleotide
gugcuuguccacggccacc

SEQ ID NO: 3116490 - RNA, 19 nt, Artificial Sequence
  Description of Artificial Sequence: Synthetic oligonucleotide
ggaagggcgauggcaugug

SEQ ID NO: 3116491 - RNA, 19 nt, Artificial Sequence
  Description of Artificial Sequence: Synthetic oligonucleotide
ccuucagcagagccuggug

SEQ ID NO: 3116492 - RNA, 19 nt, Artificial Sequence
  Description of Artificial Sequence: Synthetic oligonucleotide
ccugagucaggaagggcga

SEQ ID NO: 3116493 - RNA, 19 nt, Artificial Sequence
  Description of Artificial Sequence: Synthetic oligonucleotide
gacgugacguagagugcaa

SEQ ID NO: 3116494 - RNA, 19 nt, Artificial Sequence
  Description of Artificial Sequence: Synthetic oligonucleotide
acgugacguagagugcaaa

SEQ ID NO: 3116495 - RNA, 19 nt, Artificial Sequence
  Description of Artificial Sequence: Synthetic oligonucleotide
ggccacccggaacagggca

SEQ ID NO: 3116496 - RNA, 19 nt, Artificial Sequence
  Description of Artificial Sequence: Synthetic oligonucleotide
gggacgugacguagagugc

SEQ ID NO: 3116497 - RNA, 19 nt, Artificial Sequence
  Description of Artificial Sequence: Synthetic oligonucleotide
ggaaucgggacgugacgua

SEQ ID NO: 3116498 - RNA, 19 nt, Artificial Sequence
  Description of Artificial Sequence: Synthetic oligonucleotide
cacggccacccggaacagg

SEQ ID NO: 3116499 - RNA, 19 nt, Artificial Sequence
  Description of Artificial Sequence: Synthetic oligonucleotide
gcaucuguugcaccgggau

SEQ ID NO: 3116500 - RNA, 19 nt, Artificial Sequence
  Description of Artificial Sequence: Synthetic oligonucleotide
cggauaauuguggacguca

SEQ ID NO: 3116501 - RNA, 19 nt, Artificial Sequence
  Description of Artificial Sequence: Synthetic oligonucleotide
ccuggugcuuguccacggc

SEQ ID NO: 3116502 - RNA, 19 nt, Artificial Sequence
  Description of Artificial Sequence: Synthetic oligonucleotide
gaacagggcaaggcacugu

SEQ ID NO: 3116503 - RNA, 19 nt, Artificial Sequence
  Description of Artificial Sequence: Synthetic oligonucleotide
cccggaacagggcaaggca

SEQ ID NO: 3116504 - RNA, 19 nt, Artificial Sequence
  Description of Artificial Sequence: Synthetic oligonucleotide
gguggacaguggccacugc

SEQ ID NO: 3116505 - RNA, 19 nt, Artificial Sequence
  Description of Artificial Sequence: Synthetic oligonucleotide
gcuuguccacggccacccg

SEQ ID NO: 3116506 - RNA, 19 nt, Artificial Sequence
  Description of Artificial Sequence: Synthetic oligonucleotide
gggaucuggcugguggaca

SEQ ID NO: 3116507 - RNA, 19 nt, Artificial Sequence
  Description of Artificial Sequence: Synthetic oligonucleotide
ggugccggucgauccccug

SEQ ID NO: 3116508 - RNA, 19 nt, Artificial Sequence
  Description of Artificial Sequence: Synthetic oligonucleotide
guggaggaaucgggacgug

SEQ ID NO: 3116509 - RNA, 19 nt, Artificial Sequence
  Description of Artificial Sequence: Synthetic oligonucleotide
gccgaaacauaauccggau

SEQ ID NO: 3116510 - RNA, 19 nt, Artificial Sequence
  Description of Artificial Sequence: Synthetic oligonucleotide
gccacugcugcgacuggac

SEQ ID NO: 3116511 - RNA, 19 nt, Artificial Sequence
  Description of Artificial Sequence: Synthetic oligonucleotide
cgucaaacaggugcaucug

SEQ ID NO: 3116512 - RNA, 19 nt, Artificial Sequence
  Description of Artificial Sequence: Synthetic oligonucleotide
ccacucaucgcugccuuca

SEQ ID NO: 3116513 - RNA, 19 nt, Artificial Sequence
  Description of Artificial Sequence: Synthetic oligonucleotide
ccgaaacauaauccggaua

SEQ ID NO: 3116514 - RNA, 19 nt, Artificial Sequence
  Description of Artificial Sequence: Synthetic oligonucleotide
ucgcugccuucagcagagc

SEQ ID NO: 3116515 - RNA, 19 nt, Artificial Sequence
  Description of Artificial Sequence: Synthetic oligonucleotide
gcugcgacuggaccugagu

SEQ ID NO: 3116516 - RNA, 19 nt, Artificial Sequence
  Description of Artificial Sequence: Synthetic oligonucleotide
ccacccggaacagggcaag

SEQ ID NO: 3116517 - RNA, 19 nt, Artificial Sequence
  Description of Artificial Sequence: Synthetic oligonucleotide
gaucuggcugguggacagu

SEQ ID NO: 3116518 - RNA, 19 nt, Artificial Sequence
  Description of Artificial Sequence: Synthetic oligonucleotide
cggucgauccccugcccac

SEQ ID NO: 3116519 - RNA, 19 nt, Artificial Sequence
  Description of Artificial Sequence: Synthetic oligonucleotide
gccggucgauccccugccc

SEQ ID NO: 3116520 - RNA, 19 nt, Artificial Sequence
  Description of Artificial Sequence: Synthetic oligonucleotide
cccugcccacucaucgcug

SEQ ID NO: 3116521 - RNA, 19 nt, Artificial Sequence
  Description of Artificial Sequence: Synthetic oligonucleotide
ccggauaauuguggacguc

SEQ ID NO: 3116522 - RNA, 19 nt, Artificial Sequence
  Description of Artificial Sequence: Synthetic oligonucleotide
caccuccagccgaaacaua

SEQ ID NO: 3116523 - RNA, 19 nt, Artificial Sequence
  Description of Artificial Sequence: Synthetic oligonucleotide
ggccacugcugcgacugga

SEQ ID NO: 3116524 - RNA, 19 nt, Artificial Sequence
  Description of Artificial Sequence: Synthetic oligonucleotide
ccgggaucuggcuggugga

SEQ ID NO: 3116525 - RNA, 19 nt, Artificial Sequence
  Description of Artificial Sequence: Synthetic oligonucleotide
cgacuggaccugagucagg

SEQ ID NO: 3116526 - RNA, 19 nt, Artificial Sequence
  Description of Artificial Sequence: Synthetic oligonucleotide
cugguggacaguggccacu

SEQ ID NO: 3116527 - RNA, 19 nt, Artificial Sequence
  Description of Artificial Sequence: Synthetic oligonucleotide
cccacucaucgcugccuuc

SEQ ID NO: 3116528 - RNA, 19 nt, Artificial Sequence
  Description of Artificial Sequence: Synthetic oligonucleotide
ccggucgauccccugccca

SEQ ID NO: 3116529 - RNA, 19 nt, Artificial Sequence
  Description of Artificial Sequence: Synthetic oligonucleotide
aggugccggucgauccccu

SEQ ID NO: 3116530 - RNA, 19 nt, Artificial Sequence
  Description of Artificial Sequence: Synthetic oligonucleotide
caaagaggugccggucgau

SEQ ID NO: 3116531 - RNA, 19 nt, Artificial Sequence
  Description of Artificial Sequence: Synthetic oligonucleotide
caccgggaucuggcuggug

SEQ ID NO: 3116532 - RNA, 19 nt, Artificial Sequence
  Description of Artificial Sequence: Synthetic oligonucleotide
cugagucaggaagggcgau

SEQ ID NO: 3116533 - RNA, 19 nt, Artificial Sequence
  Description of Artificial Sequence: Synthetic oligonucleotide
gccacccggaacagggcaa

SEQ ID NO: 3116534 - RNA, 19 nt, Artificial Sequence
  Description of Artificial Sequence: Synthetic oligonucleotide
cggaacagggcaaggcacu

SEQ ID NO: 3116535 - RNA, 19 nt, Artificial Sequence
  Description of Artificial Sequence: Synthetic oligonucleotide
cgggaucuggcugguggac

SEQ ID NO: 3116536 - RNA, 19 nt, Artificial Sequence
  Description of Artificial Sequence: Synthetic oligonucleotide
cugcugcgacuggaccuga

SEQ ID NO: 3116537 - RNA, 19 nt, Artificial Sequence
  Description of Artificial Sequence: Synthetic oligonucleotide
ggucgauccccugcccacu

SEQ ID NO: 3116538 - RNA, 19 nt, Artificial Sequence
  Description of Artificial Sequence: Synthetic oligonucleotide
cggccacccggaacagggc

SEQ ID NO: 3116539 - RNA, 19 nt, Artificial Sequence
  Description of Artificial Sequence: Synthetic oligonucleotide
ccaccuccagccgaaacau

SEQ ID NO: 3116540 - RNA, 19 nt, Artificial Sequence
  Description of Artificial Sequence: Synthetic oligonucleotide
ccuccagccgaaacauaau

SEQ ID NO: 3116541 - RNA, 19 nt, Artificial Sequence
  Description of Artificial Sequence: Synthetic oligonucleotide
ggacgucaaacaggugcau

SEQ ID NO: 3116542 - RNA, 19 nt, Artificial Sequence
  Description of Artificial Sequence: Synthetic oligonucleotide
gcgauggcauguggaggaa

SEQ ID NO: 3116543 - RNA, 19 nt, Artificial Sequence
  Description of Artificial Sequence: Synthetic oligonucleotide
ccccugcccacucaucgcu

SEQ ID NO: 3116544 - RNA, 19 nt, Artificial Sequence
  Description of Artificial Sequence: Synthetic oligonucleotide
gcccacucaucgcugccuu

SEQ ID NO: 3116545 - RNA, 19 nt, Artificial Sequence
  Description of Artificial Sequence: Synthetic oligonucleotide
gcaccgggaucuggcuggu

SEQ ID NO: 3116546 - RNA, 19 nt, Artificial Sequence
  Description of Artificial Sequence: Synthetic oligonucleotide
cgauggcauguggaggaau

SEQ ID NO: 3116547 - RNA, 19 nt, Artificial Sequence
  Description of Artificial Sequence: Synthetic oligonucleotide
aagaccacgacgcaguugg

SEQ ID NO: 3116548 - RNA, 19 nt, Artificial Sequence
  Description of Artificial Sequence: Synthetic oligonucleotide
gaagagaagacauaguuac

SEQ ID NO: 3116549 - RNA, 19 nt, Artificial Sequence
  Description of Artificial Sequence: Synthetic oligonucleotide
aacauguaaccaucgaagg

SEQ ID NO: 3116550 - RNA, 19 nt, Artificial Sequence
  Description of Artificial Sequence: Synthetic oligonucleotide
ucaauuaccagccccuggg

SEQ ID NO: 3116551 - RNA, 19 nt, Artificial Sequence
  Description of Artificial Sequence: Synthetic oligonucleotide
aauuaccagccccugggcc

SEQ ID NO: 3116552 - RNA, 19 nt, Artificial Sequence
  Description of Artificial Sequence: Synthetic oligonucleotide
agaagacauaguuacagag

SEQ ID NO: 3116553 - RNA, 19 nt, Artificial Sequence
  Description of Artificial Sequence: Synthetic oligonucleotide
acaugagugaccaugggcc

SEQ ID NO: 3116554 - RNA, 19 nt, Artificial Sequence
  Description of Artificial Sequence: Synthetic oligonucleotide
uugugugccagguuuacgg

SEQ ID NO: 3116555 - RNA, 19 nt, Artificial Sequence
  Description of Artificial Sequence: Synthetic oligonucleotide
gaacauguaaccaucgaag

SEQ ID NO: 3116556 - RNA, 19 nt, Artificial Sequence
  Description of Artificial Sequence: Synthetic oligonucleotide
auuaccagccccugggccc

SEQ ID NO: 3116557 - RNA, 19 nt, Artificial Sequence
  Description of Artificial Sequence: Synthetic oligonucleotide
cuuauaguggaagucaccc

SEQ ID NO: 3116558 - RNA, 19 nt, Artificial Sequence
  Description of Artificial Sequence: Synthetic oligonucleotide
agagaagacauaguuacag

SEQ ID NO: 3116559 - RNA, 19 nt, Artificial Sequence
  Description of Artificial Sequence: Synthetic oligonucleotide
augugcugcacacucuucc

SEQ ID NO: 3116560 - RNA, 19 nt, Artificial Sequence
  Description of Artificial Sequence: Synthetic oligonucleotide
accaucgaaggucuuauag

SEQ ID NO: 3116561 - RNA, 19 nt, Artificial Sequence
  Description of Artificial Sequence: Synthetic oligonucleotide
aguacagagccauuggaca

SEQ ID NO: 3116562 - RNA, 19 nt, Artificial Sequence
  Description of Artificial Sequence: Synthetic oligonucleotide
caucgaaggucuuauagug

SEQ ID NO: 3116563 - RNA, 19 nt, Artificial Sequence
  Description of Artificial Sequence: Synthetic oligonucleotide
aacccucaagaccacgacg

SEQ ID NO: 3116564 - RNA, 19 nt, Artificial Sequence
  Description of Artificial Sequence: Synthetic oligonucleotide
uuggacagcucaauuacca

SEQ ID NO: 3116565 - RNA, 19 nt, Artificial Sequence
  Description of Artificial Sequence: Synthetic oligonucleotide
aaacggaacauguaaccau

SEQ ID NO: 3116566 - RNA, 19 nt, Artificial Sequence
  Description of Artificial Sequence: Synthetic oligonucleotide
agagccauuggacagcuca

SEQ ID NO: 3116567 - RNA, 19 nt, Artificial Sequence
  Description of Artificial Sequence: Synthetic oligonucleotide
uggaagucaccccaugugc

SEQ ID NO: 3116568 - RNA, 19 nt, Artificial Sequence
  Description of Artificial Sequence: Synthetic oligonucleotide
ugaagagaagacauaguua

SEQ ID NO: 3116569 - RNA, 19 nt, Artificial Sequence
  Description of Artificial Sequence: Synthetic oligonucleotide
ucgaaggucuuauagugga

SEQ ID NO: 3116570 - RNA, 19 nt, Artificial Sequence
  Description of Artificial Sequence: Synthetic oligonucleotide
uguccgucgaccaguacag

SEQ ID NO: 3116571 - RNA, 19 nt, Artificial Sequence
  Description of Artificial Sequence: Synthetic oligonucleotide
gacauaguuacagaggcca

SEQ ID NO: 3116572 - RNA, 19 nt, Artificial Sequence
  Description of Artificial Sequence: Synthetic oligonucleotide
cauuggacagcucaauuac

SEQ ID NO: 3116573 - RNA, 19 nt, Artificial Sequence
  Description of Artificial Sequence: Synthetic oligonucleotide
aaggucuuauaguggaagu

SEQ ID NO: 3116574 - RNA, 19 nt, Artificial Sequence
  Description of Artificial Sequence: Synthetic oligonucleotide
aacggaacauguaaccauc

SEQ ID NO: 3116575 - RNA, 19 nt, Artificial Sequence
  Description of Artificial Sequence: Synthetic oligonucleotide
ucuuauaguggaagucacc

SEQ ID NO: 3116576 - RNA, 19 nt, Artificial Sequence
  Description of Artificial Sequence: Synthetic oligonucleotide
gaaggucuuauaguggaag

SEQ ID NO: 3116577 - RNA, 19 nt, Artificial Sequence
  Description of Artificial Sequence: Synthetic oligonucleotide
aguuacagaggccagggaa

SEQ ID NO: 3116578 - RNA, 19 nt, Artificial Sequence
  Description of Artificial Sequence: Synthetic oligonucleotide
gacagcucaauuaccagcc

SEQ ID NO: 3116579 - RNA, 19 nt, Artificial Sequence
  Description of Artificial Sequence: Synthetic oligonucleotide
cauguaaccaucgaagguc

SEQ ID NO: 3116580 - RNA, 19 nt, Artificial Sequence
  Description of Artificial Sequence: Synthetic oligonucleotide
ugaccaugggccuggaacc

SEQ ID NO: 3116581 - RNA, 19 nt, Artificial Sequence
  Description of Artificial Sequence: Synthetic oligonucleotide
acccucaagaccacgacgc

SEQ ID NO: 3116582 - RNA, 19 nt, Artificial Sequence
  Description of Artificial Sequence: Synthetic oligonucleotide
uuauaguggaagucacccc

SEQ ID NO: 3116583 - RNA, 19 nt, Artificial Sequence
  Description of Artificial Sequence: Synthetic oligonucleotide
acacucuuccguugugugc

SEQ ID NO: 3116584 - RNA, 19 nt, Artificial Sequence
  Description of Artificial Sequence: Synthetic oligonucleotide
ugugcugcacacucuuccg

SEQ ID NO: 3116585 - RNA, 19 nt, Artificial Sequence
  Description of Artificial Sequence: Synthetic oligonucleotide
gugugaagagaagacauag

SEQ ID NO: 3116586 - RNA, 19 nt, Artificial Sequence
  Description of Artificial Sequence: Synthetic oligonucleotide
aaguccucguagguggccc

SEQ ID NO: 3116587 - RNA, 19 nt, Artificial Sequence
  Description of Artificial Sequence: Synthetic oligonucleotide
aagucaccccaugugcugc

SEQ ID NO: 3116588 - RNA, 19 nt, Artificial Sequence
  Description of Artificial Sequence: Synthetic oligonucleotide
acagaggccagggaaacgg

SEQ ID NO: 3116589 - RNA, 19 nt, Artificial Sequence
  Description of Artificial Sequence: Synthetic oligonucleotide
ugugaagagaagacauagu

SEQ ID NO: 3116590 - RNA, 19 nt, Artificial Sequence
  Description of Artificial Sequence: Synthetic oligonucleotide
cacagugugaagagaagac

SEQ ID NO: 3116591 - RNA, 19 nt, Artificial Sequence
  Description of Artificial Sequence: Synthetic oligonucleotide
acauguaaccaucgaaggu

SEQ ID NO: 3116592 - RNA, 19 nt, Artificial Sequence
  Description of Artificial Sequence: Synthetic oligonucleotide
agggaaacggaacauguaa

SEQ ID NO: 3116593 - RNA, 19 nt, Artificial Sequence
  Description of Artificial Sequence: Synthetic oligonucleotide
accaguacagagccauugg

SEQ ID NO: 3116594 - RNA, 19 nt, Artificial Sequence
  Description of Artificial Sequence: Synthetic oligonucleotide
guacagagccauuggacag

SEQ ID NO: 3116595 - RNA, 19 nt, Artificial Sequence
  Description of Artificial Sequence: Synthetic oligonucleotide
cacaugagugaccaugggc

SEQ ID NO: 3116596 - RNA, 19 nt, Artificial Sequence
  Description of Artificial Sequence: Synthetic oligonucleotide
ggaaacggaacauguaacc

SEQ ID NO: 3116597 - RNA, 19 nt, Artificial Sequence
  Description of Artificial Sequence: Synthetic oligonucleotide
gugaccaugggccuggaac

SEQ ID NO: 3116598 - RNA, 19 nt, Artificial Sequence
  Description of Artificial Sequence: Synthetic oligonucleotide
uccgucgaccaguacagag

SEQ ID NO: 3116599 - RNA, 19 nt, Artificial Sequence
  Description of Artificial Sequence: Synthetic oligonucleotide
uguugaaguccucguaggu

SEQ ID NO: 3116600 - RNA, 19 nt, Artificial Sequence
  Description of Artificial Sequence: Synthetic oligonucleotide
auuggacagcucaauuacc

SEQ ID NO: 3116601 - RNA, 19 nt, Artificial Sequence
  Description of Artificial Sequence: Synthetic oligonucleotide
gaccacaugagugaccaug

SEQ ID NO: 3116602 - RNA, 19 nt, Artificial Sequence
  Description of Artificial Sequence: Synthetic oligonucleotide
uccguugugugccagguuu

SEQ ID NO: 3116603 - RNA, 19 nt, Artificial Sequence
  Description of Artificial Sequence: Synthetic oligonucleotide
cauaguuacagaggccagg

SEQ ID NO: 3116604 - RNA, 19 nt, Artificial Sequence
  Description of Artificial Sequence: Synthetic oligonucleotide
caguacagagccauuggac

SEQ ID NO: 3116605 - RNA, 19 nt, Artificial Sequence
  Description of Artificial Sequence: Synthetic oligonucleotide
acagcucaauuaccagccc

SEQ ID NO: 3116606 - RNA, 19 nt, Artificial Sequence
  Description of Artificial Sequence: Synthetic oligonucleotide
gaaacggaacauguaacca

SEQ ID NO: 3116607 - RNA, 19 nt, Artificial Sequence
  Description of Artificial Sequence: Synthetic oligonucleotide
uggacagcucaauuaccag

SEQ ID NO: 3116608 - RNA, 19 nt, Artificial Sequence
  Description of Artificial Sequence: Synthetic oligonucleotide
gaagucaccccaugugcug

SEQ ID NO: 3116609 - RNA, 19 nt, Artificial Sequence
  Description of Artificial Sequence: Synthetic oligonucleotide
uagguggccccacagugug

SEQ ID NO: 3116610 - RNA, 19 nt, Artificial Sequence
  Description of Artificial Sequence: Synthetic oligonucleotide
aggucuuauaguggaaguc

SEQ ID NO: 3116611 - RNA, 19 nt, Artificial Sequence
  Description of Artificial Sequence: Synthetic oligonucleotide
accacgacgcaguuggaug

SEQ ID NO: 3116612 - RNA, 19 nt, Artificial Sequence
  Description of Artificial Sequence: Synthetic oligonucleotide
cacucuuccguugugugcc

SEQ ID NO: 3116613 - RNA, 19 nt, Artificial Sequence
  Description of Artificial Sequence: Synthetic oligonucleotide
aguggaagucaccccaugu

SEQ ID NO: 3116614 - RNA, 19 nt, Artificial Sequence
  Description of Artificial Sequence: Synthetic oligonucleotide
ugagugaccaugggccugg

SEQ ID NO: 3116615 - RNA, 19 nt, Artificial Sequence
  Description of Artificial Sequence: Synthetic oligonucleotide
cucaauuaccagccccugg

SEQ ID NO: 3116616 - RNA, 19 nt, Artificial Sequence
  Description of Artificial Sequence: Synthetic oligonucleotide
ugugugccagguuuacggc

SEQ ID NO: 3116617 - RNA, 19 nt, Artificial Sequence
  Description of Artificial Sequence: Synthetic oligonucleotide
guggaagucaccccaugug

SEQ ID NO: 3116618 - RNA, 19 nt, Artificial Sequence
  Description of Artificial Sequence: Synthetic oligonucleotide
ucuuccguugugugccagg

SEQ ID NO: 3116619 - RNA, 19 nt, Artificial Sequence
  Description of Artificial Sequence: Synthetic oligonucleotide
guugaaguccucguaggug

SEQ ID NO: 3116620 - RNA, 19 nt, Artificial Sequence
  Description of Artificial Sequence: Synthetic oligonucleotide
accacaugagugaccaugg

SEQ ID NO: 3116621 - RNA, 19 nt, Artificial Sequence
  Description of Artificial Sequence: Synthetic oligonucleotide
aguuggauguugaaguccu

SEQ ID NO: 3116622 - RNA, 19 nt, Artificial Sequence
  Description of Artificial Sequence: Synthetic oligonucleotide
aucgaaggucuuauagugg

SEQ ID NO: 3116623 - RNA, 19 nt, Artificial Sequence
  Description of Artificial Sequence: Synthetic oligonucleotide
acagugugaagagaagaca

SEQ ID NO: 3116624 - RNA, 19 nt, Artificial Sequence
  Description of Artificial Sequence: Synthetic oligonucleotide
aggaccacaugagugacca

SEQ ID NO: 3116625 - RNA, 19 nt, Artificial Sequence
  Description of Artificial Sequence: Synthetic oligonucleotide
cagcucaauuaccagcccc

SEQ ID NO: 3116626 - RNA, 19 nt, Artificial Sequence
  Description of Artificial Sequence: Synthetic oligonucleotide
gaccaguacagagccauug

SEQ ID NO: 3116627 - RNA, 19 nt, Artificial Sequence
  Description of Artificial Sequence: Synthetic oligonucleotide
gugaagagaagacauaguu

SEQ ID NO: 3116628 - RNA, 19 nt, Artificial Sequence
  Description of Artificial Sequence: Synthetic oligonucleotide
ucgaccaguacagagccau

SEQ ID NO: 3116629 - RNA, 19 nt, Artificial Sequence
  Description of Artificial Sequence: Synthetic oligonucleotide
aguccucguagguggcccc

SEQ ID NO: 3116630 - RNA, 19 nt, Artificial Sequence
  Description of Artificial Sequence: Synthetic oligonucleotide
ugaaguccucguagguggc

SEQ ID NO: 3116631 - RNA, 19 nt, Artificial Sequence
  Description of Artificial Sequence: Synthetic oligonucleotide
cugaggaccacaugaguga

SEQ ID NO: 3116632 - RNA, 19 nt, Artificial Sequence
  Description of Artificial Sequence: Synthetic oligonucleotide
caguuggauguugaagucc

SEQ ID NO: 3116633 - RNA, 19 nt, Artificial Sequence
  Description of Artificial Sequence: Synthetic oligonucleotide
uacagagccauuggacagc

SEQ ID NO: 3116634 - RNA, 19 nt, Artificial Sequence
  Description of Artificial Sequence: Synthetic oligonucleotide
aagagaagacauaguuaca

SEQ ID NO: 3116635 - RNA, 19 nt, Artificial Sequence
  Description of Artificial Sequence: Synthetic oligonucleotide
gaacccucaagaccacgac

SEQ ID NO: 3116636 - RNA, 19 nt, Artificial Sequence
  Description of Artificial Sequence: Synthetic oligonucleotide
uuacagaggccagggaaac

SEQ ID NO: 3116637 - RNA, 19 nt, Artificial Sequence
  Description of Artificial Sequence: Synthetic oligonucleotide
ggaacauguaaccaucgaa

SEQ ID NO: 3116638 - RNA, 19 nt, Artificial Sequence
  Description of Artificial Sequence: Synthetic oligonucleotide
uaaccaucgaaggucuuau

SEQ ID NO: 3116639 - RNA, 19 nt, Artificial Sequence
  Description of Artificial Sequence: Synthetic oligonucleotide
ccugaggaccacaugagug

SEQ ID NO: 3116640 - RNA, 19 nt, Artificial Sequence
  Description of Artificial Sequence: Synthetic oligonucleotide
agccccugggcccugagga

SEQ ID NO: 3116641 - RNA, 19 nt, Artificial Sequence
  Description of Artificial Sequence: Synthetic oligonucleotide
ccuggaacccucaagacca

SEQ ID NO: 3116642 - RNA, 19 nt, Artificial Sequence
  Description of Artificial Sequence: Synthetic oligonucleotide
cacacucuuccguugugug

SEQ ID NO: 3116643 - RNA, 19 nt, Artificial Sequence
  Description of Artificial Sequence: Synthetic oligonucleotide
caauuaccagccccugggc

SEQ ID NO: 3116644 - RNA, 19 nt, Artificial Sequence
  Description of Artificial Sequence: Synthetic oligonucleotide
cuguccgucgaccaguaca

SEQ ID NO: 3116645 - RNA, 19 nt, Artificial Sequence
  Description of Artificial Sequence: Synthetic oligonucleotide
uacagaggccagggaaacg

SEQ ID NO: 3116646 - RNA, 19 nt, Artificial Sequence
  Description of Artificial Sequence: Synthetic oligonucleotide
ggucuuauaguggaaguca

SEQ ID NO: 3116647 - RNA, 19 nt, Artificial Sequence
  Description of Artificial Sequence: Synthetic oligonucleotide
gucuuauaguggaagucac

SEQ ID NO: 3116648 - RNA, 19 nt, Artificial Sequence
  Description of Artificial Sequence: Synthetic oligonucleotide
acgcaguuggauguugaag

SEQ ID NO: 3116649 - RNA, 19 nt, Artificial Sequence
  Description of Artificial Sequence: Synthetic oligonucleotide
uaguuacagaggccaggga

SEQ ID NO: 3116650 - RNA, 19 nt, Artificial Sequence
  Description of Artificial Sequence: Synthetic oligonucleotide
ugcacacucuuccguugug

SEQ ID NO: 3116651 - RNA, 19 nt, Artificial Sequence
  Description of Artificial Sequence: Synthetic oligonucleotide
ugaggaccacaugagugac

SEQ ID NO: 3116652 - RNA, 19 nt, Artificial Sequence
  Description of Artificial Sequence: Synthetic oligonucleotide
guugugugccagguuuacg

SEQ ID NO: 3116653 - RNA, 19 nt, Artificial Sequence
  Description of Artificial Sequence: Synthetic oligonucleotide
ucguagguggccccacagu

SEQ ID NO: 3116654 - RNA, 19 nt, Artificial Sequence
  Description of Artificial Sequence: Synthetic oligonucleotide
agcucaauuaccagccccu

SEQ ID NO: 3116655 - RNA, 19 nt, Artificial Sequence
  Description of Artificial Sequence: Synthetic oligonucleotide
auguaaccaucgaaggucu

SEQ ID NO: 3116656 - RNA, 19 nt, Artificial Sequence
  Description of Artificial Sequence: Synthetic oligonucleotide
uggccccacagugugaaga

SEQ ID NO: 3116657 - RNA, 19 nt, Artificial Sequence
  Description of Artificial Sequence: Synthetic oligonucleotide
uggaacccucaagaccacg

SEQ ID NO: 3116658 - RNA, 19 nt, Artificial Sequence
  Description of Artificial Sequence: Synthetic oligonucleotide
acauaguuacagaggccag

SEQ ID NO: 3116659 - RNA, 19 nt, Artificial Sequence
  Description of Artificial Sequence: Synthetic oligonucleotide
caccccaugugcugcacac

SEQ ID NO: 3116660 - RNA, 19 nt, Artificial Sequence
  Description of Artificial Sequence: Synthetic oligonucleotide
cucguagguggccccacag

SEQ ID NO: 3116661 - RNA, 19 nt, Artificial Sequence
  Description of Artificial Sequence: Synthetic oligonucleotide
gaggccagggaaacggaac

SEQ ID NO: 3116662 - RNA, 19 nt, Artificial Sequence
  Description of Artificial Sequence: Synthetic oligonucleotide
ggcccugaggaccacauga

SEQ ID NO: 3116663 - RNA, 19 nt, Artificial Sequence
  Description of Artificial Sequence: Synthetic oligonucleotide
gccuggaacccucaagacc

SEQ ID NO: 3116664 - RNA, 19 nt, Artificial Sequence
  Description of Artificial Sequence: Synthetic oligonucleotide
cagugugaagagaagacau

SEQ ID NO: 3116665 - RNA, 19 nt, Artificial Sequence
  Description of Artificial Sequence: Synthetic oligonucleotide
ugcugcacacucuuccguu

SEQ ID NO: 3116666 - RNA, 19 nt, Artificial Sequence
  Description of Artificial Sequence: Synthetic oligonucleotide
ucaccccaugugcugcaca

SEQ ID NO: 3116667 - RNA, 19 nt, Artificial Sequence
  Description of Artificial Sequence: Synthetic oligonucleotide
gaaguccucguagguggcc

SEQ ID NO: 3116668 - RNA, 19 nt, Artificial Sequence
  Description of Artificial Sequence: Synthetic oligonucleotide
cucaagaccacgacgcagu

SEQ ID NO: 3116669 - RNA, 19 nt, Artificial Sequence
  Description of Artificial Sequence: Synthetic oligonucleotide
accgcuguccgucgaccag

SEQ ID NO: 3116670 - RNA, 19 nt, Artificial Sequence
  Description of Artificial Sequence: Synthetic oligonucleotide
ucaagaccacgacgcaguu

SEQ ID NO: 3116671 - RNA, 19 nt, Artificial Sequence
  Description of Artificial Sequence: Synthetic oligonucleotide
aaccaucgaaggucuuaua

SEQ ID NO: 3116672 - RNA, 19 nt, Artificial Sequence
  Description of Artificial Sequence: Synthetic oligonucleotide
gggaaacggaacauguaac

SEQ ID NO: 3116673 - RNA, 19 nt, Artificial Sequence
  Description of Artificial Sequence: Synthetic oligonucleotide
gggccuggaacccucaaga

SEQ ID NO: 3116674 - RNA, 19 nt, Artificial Sequence
  Description of Artificial Sequence: Synthetic oligonucleotide
augagugaccaugggccug

SEQ ID NO: 3116675 - RNA, 19 nt, Artificial Sequence
  Description of Artificial Sequence: Synthetic oligonucleotide
caugugcugcacacucuuc

SEQ ID NO: 3116676 - RNA, 19 nt, Artificial Sequence
  Description of Artificial Sequence: Synthetic oligonucleotide
gacgcaguuggauguugaa

SEQ ID NO: 3116677 - RNA, 19 nt, Artificial Sequence
  Description of Artificial Sequence: Synthetic oligonucleotide
agugugaagagaagacaua

SEQ ID NO: 3116678 - RNA, 19 nt, Artificial Sequence
  Description of Artificial Sequence: Synthetic oligonucleotide
guaaccaucgaaggucuua

SEQ ID NO: 3116679 - RNA, 19 nt, Artificial Sequence
  Description of Artificial Sequence: Synthetic oligonucleotide
ccgucgaccaguacagagc

SEQ ID NO: 3116680 - RNA, 19 nt, Artificial Sequence
  Description of Artificial Sequence: Synthetic oligonucleotide
ugggcccugaggaccacau

SEQ ID NO: 3116681 - RNA, 19 nt, Artificial Sequence
  Description of Artificial Sequence: Synthetic oligonucleotide
gaggaccacaugagugacc

SEQ ID NO: 3116682 - RNA, 19 nt, Artificial Sequence
  Description of Artificial Sequence: Synthetic oligonucleotide
uguaaccaucgaaggucuu

SEQ ID NO: 3116683 - RNA, 19 nt, Artificial Sequence
  Description of Artificial Sequence: Synthetic oligonucleotide
ucaccgcuguccgucgacc

SEQ ID NO: 3116684 - RNA, 19 nt, Artificial Sequence
  Description of Artificial Sequence: Synthetic oligonucleotide
cgucgaccaguacagagcc

SEQ ID NO: 3116685 - RNA, 19 nt, Artificial Sequence
  Description of Artificial Sequence: Synthetic oligonucleotide
gcaguuggauguugaaguc

SEQ ID NO: 3116686 - RNA, 19 nt, Artificial Sequence
  Description of Artificial Sequence: Synthetic oligonucleotide
ggccccacagugugaagag

SEQ ID NO: 3116687 - RNA, 19 nt, Artificial Sequence
  Description of Artificial Sequence: Synthetic oligonucleotide
agucaccccaugugcugca

SEQ ID NO: 3116688 - RNA, 19 nt, Artificial Sequence
  Description of Artificial Sequence: Synthetic oligonucleotide
uuaccagccccugggcccu

SEQ ID NO: 3116689 - RNA, 19 nt, Artificial Sequence
  Description of Artificial Sequence: Synthetic oligonucleotide
caagaccacgacgcaguug

SEQ ID NO: 3116690 - RNA, 19 nt, Artificial Sequence
  Description of Artificial Sequence: Synthetic oligonucleotide
gcugcacacucuuccguug

SEQ ID NO: 3116691 - RNA, 19 nt, Artificial Sequence
  Description of Artificial Sequence: Synthetic oligonucleotide
cguagguggccccacagug

SEQ ID NO: 3116692 - RNA, 19 nt, Artificial Sequence
  Description of Artificial Sequence: Synthetic oligonucleotide
auaguggaagucaccccau

SEQ ID NO: 3116693 - RNA, 19 nt, Artificial Sequence
  Description of Artificial Sequence: Synthetic oligonucleotide
cucaccgcuguccgucgac

SEQ ID NO: 3116694 - RNA, 19 nt, Artificial Sequence
  Description of Artificial Sequence: Synthetic oligonucleotide
ggaacccucaagaccacga

SEQ ID NO: 3116695 - RNA, 19 nt, Artificial Sequence
  Description of Artificial Sequence: Synthetic oligonucleotide
cuggaacccucaagaccac

SEQ ID NO: 3116696 - RNA, 19 nt, Artificial Sequence
  Description of Artificial Sequence: Synthetic oligonucleotide
ggauguugaaguccucgua

SEQ ID NO: 3116697 - RNA, 19 nt, Artificial Sequence
  Description of Artificial Sequence: Synthetic oligonucleotide
acucuuccguugugugcca

SEQ ID NO: 3116698 - RNA, 19 nt, Artificial Sequence
  Description of Artificial Sequence: Synthetic oligonucleotide
caugagugaccaugggccu

SEQ ID NO: 3116699 - RNA, 19 nt, Artificial Sequence
  Description of Artificial Sequence: Synthetic oligonucleotide
ccauuggacagcucaauua

SEQ ID NO: 3116700 - RNA, 19 nt, Artificial Sequence
  Description of Artificial Sequence: Synthetic oligonucleotide
cccacagugugaagagaag

SEQ ID NO: 3116701 - RNA, 19 nt, Artificial Sequence
  Description of Artificial Sequence: Synthetic oligonucleotide
acgacgcaguuggauguug

SEQ ID NO: 3116702 - RNA, 19 nt, Artificial Sequence
  Description of Artificial Sequence: Synthetic oligonucleotide
agccauuggacagcucaau

SEQ ID NO: 3116703 - RNA, 19 nt, Artificial Sequence
  Description of Artificial Sequence: Synthetic oligonucleotide
cagggaaacggaacaugua

SEQ ID NO: 3116704 - RNA, 19 nt, Artificial Sequence
  Description of Artificial Sequence: Synthetic oligonucleotide
uuccguugugugccagguu

SEQ ID NO: 3116705 - RNA, 19 nt, Artificial Sequence
  Description of Artificial Sequence: Synthetic oligonucleotide
ccacaugagugaccauggg

SEQ ID NO: 3116706 - RNA, 19 nt, Artificial Sequence
  Description of Artificial Sequence: Synthetic oligonucleotide
gccagggaaacggaacaug

SEQ ID NO: 3116707 - RNA, 19 nt, Artificial Sequence
  Description of Artificial Sequence: Synthetic oligonucleotide
ggccuggaacccucaagac

SEQ ID NO: 3116708 - RNA, 19 nt, Artificial Sequence
  Description of Artificial Sequence: Synthetic oligonucleotide
ccaguacagagccauugga

SEQ ID NO: 3116709 - RNA, 19 nt, Artificial Sequence
  Description of Artificial Sequence: Synthetic oligonucleotide
agugaccaugggccuggaa

SEQ ID NO: 3116710 - RNA, 19 nt, Artificial Sequence
  Description of Artificial Sequence: Synthetic oligonucleotide
ccccaugugcugcacacuc

SEQ ID NO: 3116711 - RNA, 19 nt, Artificial Sequence
  Description of Artificial Sequence: Synthetic oligonucleotide
cagccccugggcccugagg

SEQ ID NO: 3116712 - RNA, 19 nt, Artificial Sequence
  Description of Artificial Sequence: Synthetic oligonucleotide
cgcaguuggauguugaagu

SEQ ID NO: 3116713 - RNA, 19 nt, Artificial Sequence
  Description of Artificial Sequence: Synthetic oligonucleotide
cucuuccguugugugccag

SEQ ID NO: 3116714 - RNA, 19 nt, Artificial Sequence
  Description of Artificial Sequence: Synthetic oligonucleotide
accaugggccuggaacccu

SEQ ID NO: 3116715 - RNA, 19 nt, Artificial Sequence
  Description of Artificial Sequence: Synthetic oligonucleotide
ccacagugugaagagaaga

SEQ ID NO: 3116716 - RNA, 19 nt, Artificial Sequence
  Description of Artificial Sequence: Synthetic oligonucleotide
guuggauguugaaguccuc

SEQ ID NO: 3116717 - RNA, 19 nt, Artificial Sequence
  Description of Artificial Sequence: Synthetic oligonucleotide
ccaucgaaggucuuauagu

SEQ ID NO: 3116718 - RNA, 19 nt, Artificial Sequence
  Description of Artificial Sequence: Synthetic oligonucleotide
ccccacagugugaagagaa

SEQ ID NO: 3116719 - RNA, 19 nt, Artificial Sequence
  Description of Artificial Sequence: Synthetic oligonucleotide
gcucaauuaccagccccug

SEQ ID NO: 3116720 - RNA, 19 nt, Artificial Sequence
  Description of Artificial Sequence: Synthetic oligonucleotide
gcccugaggaccacaugag

SEQ ID NO: 3116721 - RNA, 19 nt, Artificial Sequence
  Description of Artificial Sequence: Synthetic oligonucleotide
uccucguagguggccccac

SEQ ID NO: 3116722 - RNA, 19 nt, Artificial Sequence
  Description of Artificial Sequence: Synthetic oligonucleotide
ccagggaaacggaacaugu

SEQ ID NO: 3116723 - RNA, 19 nt, Artificial Sequence
  Description of Artificial Sequence: Synthetic oligonucleotide
augggccuggaacccucaa

SEQ ID NO: 3116724 - RNA, 19 nt, Artificial Sequence
  Description of Artificial Sequence: Synthetic oligonucleotide
ggaagucaccccaugugcu

SEQ ID NO: 3116725 - RNA, 19 nt, Artificial Sequence
  Description of Artificial Sequence: Synthetic oligonucleotide
guggccccacagugugaag

SEQ ID NO: 3116726 - RNA, 19 nt, Artificial Sequence
  Description of Artificial Sequence: Synthetic oligonucleotide
caugggccuggaacccuca

SEQ ID NO: 3116727 - RNA, 19 nt, Artificial Sequence
  Description of Artificial Sequence: Synthetic oligonucleotide
caccgcuguccgucgacca

SEQ ID NO: 3116728 - RNA, 19 nt, Artificial Sequence
  Description of Artificial Sequence: Synthetic oligonucleotide
guagguggccccacagugu

SEQ ID NO: 3116729 - RNA, 19 nt, Artificial Sequence
  Description of Artificial Sequence: Synthetic oligonucleotide
accccaugugcugcacacu

SEQ ID NO: 3116730 - RNA, 19 nt, Artificial Sequence
  Description of Artificial Sequence: Synthetic oligonucleotide
cuuccguugugugccaggu

SEQ ID NO: 3116731 - RNA, 19 nt, Artificial Sequence
  Description of Artificial Sequence: Synthetic oligonucleotide
gaccacgacgcaguuggau

SEQ ID NO: 3116732 - RNA, 19 nt, Artificial Sequence
  Description of Artificial Sequence: Synthetic oligonucleotide
gguggccccacagugugaa

SEQ ID NO: 3116733 - RNA, 19 nt, Artificial Sequence
  Description of Artificial Sequence: Synthetic oligonucleotide
cugcacacucuuccguugu

SEQ ID NO: 3116734 - RNA, 19 nt, Artificial Sequence
  Description of Artificial Sequence: Synthetic oligonucleotide
cagagccauuggacagcuc

SEQ ID NO: 3116735 - RNA, 19 nt, Artificial Sequence
  Description of Artificial Sequence: Synthetic oligonucleotide
gucaccccaugugcugcac

SEQ ID NO: 3116736 - RNA, 19 nt, Artificial Sequence
  Description of Artificial Sequence: Synthetic oligonucleotide
ccaugggccuggaacccuc

SEQ ID NO: 3116737 - RNA, 19 nt, Artificial Sequence
  Description of Artificial Sequence: Synthetic oligonucleotide
gucgaccaguacagagcca

SEQ ID NO: 3116738 - RNA, 19 nt, Artificial Sequence
  Description of Artificial Sequence: Synthetic oligonucleotide
gccauuggacagcucaauu

SEQ ID NO: 3116739 - RNA, 19 nt, Artificial Sequence
  Description of Artificial Sequence: Synthetic oligonucleotide
gggcccugaggaccacaug

SEQ ID NO: 3116740 - RNA, 19 nt, Artificial Sequence
  Description of Artificial Sequence: Synthetic oligonucleotide
cggaacauguaaccaucga

SEQ ID NO: 3116741 - RNA, 19 nt, Artificial Sequence
  Description of Artificial Sequence: Synthetic oligonucleotide
cguugugugccagguuuac

SEQ ID NO: 3116742 - RNA, 19 nt, Artificial Sequence
  Description of Artificial Sequence: Synthetic oligonucleotide
ccacgacgcaguuggaugu

SEQ ID NO: 3116743 - RNA, 19 nt, Artificial Sequence
  Description of Artificial Sequence: Synthetic oligonucleotide
agaccacgacgcaguugga

SEQ ID NO: 3116744 - RNA, 19 nt, Artificial Sequence
  Description of Artificial Sequence: Synthetic oligonucleotide
agguggccccacaguguga

SEQ ID NO: 3116745 - RNA, 19 nt, Artificial Sequence
  Description of Artificial Sequence: Synthetic oligonucleotide
guccgucgaccaguacaga

SEQ ID NO: 3116746 - RNA, 19 nt, Artificial Sequence
  Description of Artificial Sequence: Synthetic oligonucleotide
gcuguccgucgaccaguac

SEQ ID NO: 3116747 - RNA, 19 nt, Artificial Sequence
  Description of Artificial Sequence: Synthetic oligonucleotide
gccccugggcccugaggac

SEQ ID NO: 3116748 - RNA, 19 nt, Artificial Sequence
  Description of Artificial Sequence: Synthetic oligonucleotide
gcacacucuuccguugugu

SEQ ID NO: 3116749 - RNA, 19 nt, Artificial Sequence
  Description of Artificial Sequence: Synthetic oligonucleotide
gagugaccaugggccugga

SEQ ID NO: 3116750 - RNA, 19 nt, Artificial Sequence
  Description of Artificial Sequence: Synthetic oligonucleotide
cgaaggucuuauaguggaa

SEQ ID NO: 3116751 - RNA, 19 nt, Artificial Sequence
  Description of Artificial Sequence: Synthetic oligonucleotide
cccucaagaccacgacgca

SEQ ID NO: 3116752 - RNA, 19 nt, Artificial Sequence
  Description of Artificial Sequence: Synthetic oligonucleotide
cgacgcaguuggauguuga

SEQ ID NO: 3116753 - RNA, 19 nt, Artificial Sequence
  Description of Artificial Sequence: Synthetic oligonucleotide
cugggcccugaggaccaca

SEQ ID NO: 3116754 - RNA, 19 nt, Artificial Sequence
  Description of Artificial Sequence: Synthetic oligonucleotide
ccaugugcugcacacucuu

SEQ ID NO: 3116755 - RNA, 19 nt, Artificial Sequence
  Description of Artificial Sequence: Synthetic oligonucleotide
ccguugugugccagguuua

SEQ ID NO: 3116756 - RNA, 19 nt, Artificial Sequence
  Description of Artificial Sequence: Synthetic oligonucleotide
gccccacagugugaagaga

SEQ ID NO: 3116757 - RNA, 19 nt, Artificial Sequence
  Description of Artificial Sequence: Synthetic oligonucleotide
cccugaggaccacaugagu

SEQ ID NO: 3116758 - RNA, 19 nt, Artificial Sequence
  Description of Artificial Sequence: Synthetic oligonucleotide
ccucguagguggccccaca

SEQ ID NO: 3116759 - RNA, 19 nt, Artificial Sequence
  Description of Artificial Sequence: Synthetic oligonucleotide
cccaugugcugcacacucu

SEQ ID NO: 3116760 - RNA, 19 nt, Artificial Sequence
  Description of Artificial Sequence: Synthetic oligonucleotide
ggccagggaaacggaacau

SEQ ID NO: 3116761 - RNA, 19 nt, Artificial Sequence
  Description of Artificial Sequence: Synthetic oligonucleotide
cacgacgcaguuggauguu

SEQ ID NO: 3116762 - RNA, 19 nt, Artificial Sequence
  Description of Artificial Sequence: Synthetic oligonucleotide
ggaccacaugagugaccau

SEQ ID NO: 3116763 - RNA, 19 nt, Artificial Sequence
  Description of Artificial Sequence: Synthetic oligonucleotide
ccgcuguccgucgaccagu

SEQ ID NO: 3116764 - RNA, 19 nt, Artificial Sequence
  Description of Artificial Sequence: Synthetic oligonucleotide
cgcuguccgucgaccagua

SEQ ID NO: 3116765 - RNA, 19 nt, Artificial Sequence
  Description of Artificial Sequence: Synthetic oligonucleotide
cgaccaguacagagccauu

SEQ ID NO: 3116766 - RNA, 19 nt, Artificial Sequence
  Description of Artificial Sequence: Synthetic oligonucleotide
aagaucaaaccuuuuaucc

SEQ ID NO: 3116767 - RNA, 19 nt, Artificial Sequence
  Description of Artificial Sequence: Synthetic oligonucleotide
aaauagaaaauguauuuac

SEQ ID NO: 3116768 - RNA, 19 nt, Artificial Sequence
  Description of Artificial Sequence: Synthetic oligonucleotide
aaaauguauuuacagguag

SEQ ID NO: 3116769 - RNA, 19 nt, Artificial Sequence
  Description of Artificial Sequence: Synthetic oligonucleotide
aaagaucaaaccuuuuauc

SEQ ID NO: 3116770 - RNA, 19 nt, Artificial Sequence
  Description of Artificial Sequence: Synthetic oligonucleotide
uuuacagguaguuacauga

SEQ ID NO: 3116771 - RNA, 19 nt, Artificial Sequence
  Description of Artificial Sequence: Synthetic oligonucleotide
auagaaaauguauuuacag

SEQ ID NO: 3116772 - RNA, 19 nt, Artificial Sequence
  Description of Artificial Sequence: Synthetic oligonucleotide
ugcuacacgaaucaaagag

SEQ ID NO: 3116773 - RNA, 19 nt, Artificial Sequence
  Description of Artificial Sequence: Synthetic oligonucleotide
uguauuuacagguaguuac

SEQ ID NO: 3116774 - RNA, 19 nt, Artificial Sequence
  Description of Artificial Sequence: Synthetic oligonucleotide
agaaaauguauuuacaggu

SEQ ID NO: 3116775 - RNA, 19 nt, Artificial Sequence
  Description of Artificial Sequence: Synthetic oligonucleotide
uagaaaauguauuuacagg

SEQ ID NO: 3116776 - RNA, 19 nt, Artificial Sequence
  Description of Artificial Sequence: Synthetic oligonucleotide
uuugcuacacgaaucaaag

SEQ ID NO: 3116777 - RNA, 19 nt, Artificial Sequence
  Description of Artificial Sequence: Synthetic oligonucleotide
aguuacaugacuaugauca

SEQ ID NO: 3116778 - RNA, 19 nt, Artificial Sequence
  Description of Artificial Sequence: Synthetic oligonucleotide
agaucaaaccuuuuauccc

SEQ ID NO: 3116779 - RNA, 19 nt, Artificial Sequence
  Description of Artificial Sequence: Synthetic oligonucleotide
aaagcacaaagacaccugg

SEQ ID NO: 3116780 - RNA, 19 nt, Artificial Sequence
  Description of Artificial Sequence: Synthetic oligonucleotide
ugcuauaauacaugcacgg

SEQ ID NO: 3116781 - RNA, 19 nt, Artificial Sequence
  Description of Artificial Sequence: Synthetic oligonucleotide
aaaagaucaaaccuuuuau

SEQ ID NO: 3116782 - RNA, 19 nt, Artificial Sequence
  Description of Artificial Sequence: Synthetic oligonucleotide
augacuaugaucagaaagc

SEQ ID NO: 3116783 - RNA, 19 nt, Artificial Sequence
  Description of Artificial Sequence: Synthetic oligonucleotide
uaaaauagaaaauguauuu

SEQ ID NO: 3116784 - RNA, 19 nt, Artificial Sequence
  Description of Artificial Sequence: Synthetic oligonucleotide
augaucagaaagcacaaag

SEQ ID NO: 3116785 - RNA, 19 nt, Artificial Sequence
  Description of Artificial Sequence: Synthetic oligonucleotide
caugacuaugaucagaaag

SEQ ID NO: 3116786 - RNA, 19 nt, Artificial Sequence
  Description of Artificial Sequence: Synthetic oligonucleotide
gaucagaaagcacaaagac

SEQ ID NO: 3116787 - RNA, 19 nt, Artificial Sequence
  Description of Artificial Sequence: Synthetic oligonucleotide
uauaauacaugcacgguuc

SEQ ID NO: 3116788 - RNA, 19 nt, Artificial Sequence
  Description of Artificial Sequence: Synthetic oligonucleotide
cuacacgaaucaaagaggg

SEQ ID NO: 3116789 - RNA, 19 nt, Artificial Sequence
  Description of Artificial Sequence: Synthetic oligonucleotide
uaauuugcuacacgaauca

SEQ ID NO: 3116790 - RNA, 19 nt, Artificial Sequence
  Description of Artificial Sequence: Synthetic oligonucleotide
aauacaugcacgguucaag

SEQ ID NO: 3116791 - RNA, 19 nt, Artificial Sequence
  Description of Artificial Sequence: Synthetic oligonucleotide
ugaucagaaagcacaaaga

SEQ ID NO: 3116792 - RNA, 19 nt, Artificial Sequence
  Description of Artificial Sequence: Synthetic oligonucleotide
uuuaucccuaauuugcuac

SEQ ID NO: 3116793 - RNA, 19 nt, Artificial Sequence
  Description of Artificial Sequence: Synthetic oligonucleotide
acuaugaucagaaagcaca

SEQ ID NO: 3116794 - RNA, 19 nt, Artificial Sequence
  Description of Artificial Sequence: Synthetic oligonucleotide
acaugcacgguucaagagg

SEQ ID NO: 3116795 - RNA, 19 nt, Artificial Sequence
  Description of Artificial Sequence: Synthetic oligonucleotide
aauagaaaauguauuuaca

SEQ ID NO: 3116796 - RNA, 19 nt, Artificial Sequence
  Description of Artificial Sequence: Synthetic oligonucleotide
uacaugacuaugaucagaa

SEQ ID NO: 3116797 - RNA, 19 nt, Artificial Sequence
  Description of Artificial Sequence: Synthetic oligonucleotide
aaaccuuuuaucccuaauu

SEQ ID NO: 3116798 - RNA, 19 nt, Artificial Sequence
  Description of Artificial Sequence: Synthetic oligonucleotide
acacgaaucaaagagggag

SEQ ID NO: 3116799 - RNA, 19 nt, Artificial Sequence
  Description of Artificial Sequence: Synthetic oligonucleotide
acaguuuacaacugcagga

SEQ ID NO: 3116800 - RNA, 19 nt, Artificial Sequence
  Description of Artificial Sequence: Synthetic oligonucleotide
aaaauagaaaauguauuua

SEQ ID NO: 3116801 - RNA, 19 nt, Artificial Sequence
  Description of Artificial Sequence: Synthetic oligonucleotide
aaccuuuuaucccuaauuu

SEQ ID NO: 3116802 - RNA, 19 nt, Artificial Sequence
  Description of Artificial Sequence: Synthetic oligonucleotide
cuaauuugcuacacgaauc

SEQ ID NO: 3116803 - RNA, 19 nt, Artificial Sequence
  Description of Artificial Sequence: Synthetic oligonucleotide
aaucaaagagggaggaguc

SEQ ID NO: 3116804 - RNA, 19 nt, Artificial Sequence
  Description of Artificial Sequence: Synthetic oligonucleotide
cacaguuuacaacugcagg

SEQ ID NO: 3116805 - RNA, 19 nt, Artificial Sequence
  Description of Artificial Sequence: Synthetic oligonucleotide
ucccuaauuugcuacacga

SEQ ID NO: 3116806 - RNA, 19 nt, Artificial Sequence
  Description of Artificial Sequence: Synthetic oligonucleotide
ccuuuuaucccuaauuugc

SEQ ID NO: 3116807 - RNA, 19 nt, Artificial Sequence
  Description of Artificial Sequence: Synthetic oligonucleotide
aaagacaccuggcugcuau

SEQ ID NO: 3116808 - RNA, 19 nt, Artificial Sequence
  Description of Artificial Sequence: Synthetic oligonucleotide
aauguauuuacagguaguu

SEQ ID NO: 3116809 - RNA, 19 nt, Artificial Sequence
  Description of Artificial Sequence: Synthetic oligonucleotide
caugcacgguucaagaggc

SEQ ID NO: 3116810 - RNA, 19 nt, Artificial Sequence
  Description of Artificial Sequence: Synthetic oligonucleotide
acugcaagaagccuguaaa

SEQ ID NO: 3116811 - RNA, 19 nt, Artificial Sequence
  Description of Artificial Sequence: Synthetic oligonucleotide
aacugcaggagacuccuga

SEQ ID NO: 3116812 - RNA, 19 nt, Artificial Sequence
  Description of Artificial Sequence: Synthetic oligonucleotide
cugcuauaauacaugcacg

SEQ ID NO: 3116813 - RNA, 19 nt, Artificial Sequence
  Description of Artificial Sequence: Synthetic oligonucleotide
auugguucgguguggccac

SEQ ID NO: 3116814 - RNA, 19 nt, Artificial Sequence
  Description of Artificial Sequence: Synthetic oligonucleotide
cacgaaucaaagagggagg

SEQ ID NO: 3116815 - RNA, 19 nt, Artificial Sequence
  Description of Artificial Sequence: Synthetic oligonucleotide
agcacaaagacaccuggcu

SEQ ID NO: 3116816 - RNA, 19 nt, Artificial Sequence
  Description of Artificial Sequence: Synthetic oligonucleotide
accuuuuaucccuaauuug

SEQ ID NO: 3116817 - RNA, 19 nt, Artificial Sequence
  Description of Artificial Sequence: Synthetic oligonucleotide
aaauguauuuacagguagu

SEQ ID NO: 3116818 - RNA, 19 nt, Artificial Sequence
  Description of Artificial Sequence: Synthetic oligonucleotide
aaaacugcaagaagccugu

SEQ ID NO: 3116819 - RNA, 19 nt, Artificial Sequence
  Description of Artificial Sequence: Synthetic oligonucleotide
auuuacagguaguuacaug

SEQ ID NO: 3116820 - RNA, 19 nt, Artificial Sequence
  Description of Artificial Sequence: Synthetic oligonucleotide
uacagguaguuacaugacu

SEQ ID NO: 3116821 - RNA, 19 nt, Artificial Sequence
  Description of Artificial Sequence: Synthetic oligonucleotide
aagcacaaagacaccuggc

SEQ ID NO: 3116822 - RNA, 19 nt, Artificial Sequence
  Description of Artificial Sequence: Synthetic oligonucleotide
agaaagcacaaagacaccu

SEQ ID NO: 3116823 - RNA, 19 nt, Artificial Sequence
  Description of Artificial Sequence: Synthetic oligonucleotide
ugacuaugaucagaaagca

SEQ ID NO: 3116824 - RNA, 19 nt, Artificial Sequence
  Description of Artificial Sequence: Synthetic oligonucleotide
uacaugcacgguucaagag

SEQ ID NO: 3116825 - RNA, 19 nt, Artificial Sequence
  Description of Artificial Sequence: Synthetic oligonucleotide
aucaaagagggaggagucc

SEQ ID NO: 3116826 - RNA, 19 nt, Artificial Sequence
  Description of Artificial Sequence: Synthetic oligonucleotide
uuacagguaguuacaugac

SEQ ID NO: 3116827 - RNA, 19 nt, Artificial Sequence
  Description of Artificial Sequence: Synthetic oligonucleotide
uuaucccuaauuugcuaca

SEQ ID NO: 3116828 - RNA, 19 nt, Artificial Sequence
  Description of Artificial Sequence: Synthetic oligonucleotide
auacaugcacgguucaaga

SEQ ID NO: 3116829 - RNA, 19 nt, Artificial Sequence
  Description of Artificial Sequence: Synthetic oligonucleotide
gaucaaaccuuuuaucccu

SEQ ID NO: 3116830 - RNA, 19 nt, Artificial Sequence
  Description of Artificial Sequence: Synthetic oligonucleotide
uacaacugcaggagacucc

SEQ ID NO: 3116831 - RNA, 19 nt, Artificial Sequence
  Description of Artificial Sequence: Synthetic oligonucleotide
uggcugcuauaauacaugc

SEQ ID NO: 3116832 - RNA, 19 nt, Artificial Sequence
  Description of Artificial Sequence: Synthetic oligonucleotide
ugcacgguucaagaggcgg

SEQ ID NO: 3116833 - RNA, 19 nt, Artificial Sequence
  Description of Artificial Sequence: Synthetic oligonucleotide
uuacaugacuaugaucaga

SEQ ID NO: 3116834 - RNA, 19 nt, Artificial Sequence
  Description of Artificial Sequence: Synthetic oligonucleotide
aucccuaauuugcuacacg

SEQ ID NO: 3116835 - RNA, 19 nt, Artificial Sequence
  Description of Artificial Sequence: Synthetic oligonucleotide
uuuacaacugcaggagacu

SEQ ID NO: 3116836 - RNA, 19 nt, Artificial Sequence
  Description of Artificial Sequence: Synthetic oligonucleotide
uuuuaucccuaauuugcua

SEQ ID NO: 3116837 - RNA, 19 nt, Artificial Sequence
  Description of Artificial Sequence: Synthetic oligonucleotide
guuuacaacugcaggagac

SEQ ID NO: 3116838 - RNA, 19 nt, Artificial Sequence
  Description of Artificial Sequence: Synthetic oligonucleotide
guuacaugacuaugaucag

SEQ ID NO: 3116839 - RNA, 19 nt, Artificial Sequence
  Description of Artificial Sequence: Synthetic oligonucleotide
ucguggguccauugguucg

SEQ ID NO: 3116840 - RNA, 19 nt, Artificial Sequence
  Description of Artificial Sequence: Synthetic oligonucleotide
caguuuacaacugcaggag

SEQ ID NO: 3116841 - RNA, 19 nt, Artificial Sequence
  Description of Artificial Sequence: Synthetic oligonucleotide
gaaucaaagagggaggagu

SEQ ID NO: 3116842 - RNA, 19 nt, Artificial Sequence
  Description of Artificial Sequence: Synthetic oligonucleotide
auaauacaugcacgguuca

SEQ ID NO: 3116843 - RNA, 19 nt, Artificial Sequence
  Description of Artificial Sequence: Synthetic oligonucleotide
uguggccacaguuuacaac

SEQ ID NO: 3116844 - RNA, 19 nt, Artificial Sequence
  Description of Artificial Sequence: Synthetic oligonucleotide
aguuuacaacugcaggaga

SEQ ID NO: 3116845 - RNA, 19 nt, Artificial Sequence
  Description of Artificial Sequence: Synthetic oligonucleotide
uauuuacagguaguuacau

SEQ ID NO: 3116846 - RNA, 19 nt, Artificial Sequence
  Description of Artificial Sequence: Synthetic oligonucleotide
uaguuacaugacuaugauc

SEQ ID NO: 3116847 - RNA, 19 nt, Artificial Sequence
  Description of Artificial Sequence: Synthetic oligonucleotide
uacacgaaucaaagaggga

SEQ ID NO: 3116848 - RNA, 19 nt, Artificial Sequence
  Description of Artificial Sequence: Synthetic oligonucleotide
agacuccugagggagacag

SEQ ID NO: 3116849 - RNA, 19 nt, Artificial Sequence
  Description of Artificial Sequence: Synthetic oligonucleotide
aagagggaggaguccccag

SEQ ID NO: 3116850 - RNA, 19 nt, Artificial Sequence
  Description of Artificial Sequence: Synthetic oligonucleotide
caccuggcugcuauaauac

SEQ ID NO: 3116851 - RNA, 19 nt, Artificial Sequence
  Description of Artificial Sequence: Synthetic oligonucleotide
gcuacacgaaucaaagagg

SEQ ID NO: 3116852 - RNA, 19 nt, Artificial Sequence
  Description of Artificial Sequence: Synthetic oligonucleotide
gaaaauguauuuacaggua

SEQ ID NO: 3116853 - RNA, 19 nt, Artificial Sequence
  Description of Artificial Sequence: Synthetic oligonucleotide
guggccacaguuuacaacu

SEQ ID NO: 3116854 - RNA, 19 nt, Artificial Sequence
  Description of Artificial Sequence: Synthetic oligonucleotide
gagggaggaguccccagag

SEQ ID NO: 3116855 - RNA, 19 nt, Artificial Sequence
  Description of Artificial Sequence: Synthetic oligonucleotide
gguaguuacaugacuauga

SEQ ID NO: 3116856 - RNA, 19 nt, Artificial Sequence
  Description of Artificial Sequence: Synthetic oligonucleotide
agggaggaguccccagagc

SEQ ID NO: 3116857 - RNA, 19 nt, Artificial Sequence
  Description of Artificial Sequence: Synthetic oligonucleotide
uucaagaggcgguuccuaa

SEQ ID NO: 3116858 - RNA, 19 nt, Artificial Sequence
  Description of Artificial Sequence: Synthetic oligonucleotide
uuacaacugcaggagacuc

SEQ ID NO: 3116859 - RNA, 19 nt, Artificial Sequence
  Description of Artificial Sequence: Synthetic oligonucleotide
acuccugagggagacagca

SEQ ID NO: 3116860 - RNA, 19 nt, Artificial Sequence
  Description of Artificial Sequence: Synthetic oligonucleotide
auuugcuacacgaaucaaa

SEQ ID NO: 3116861 - RNA, 19 nt, Artificial Sequence
  Description of Artificial Sequence: Synthetic oligonucleotide
acaacugcaggagacuccu

SEQ ID NO: 3116862 - RNA, 19 nt, Artificial Sequence
  Description of Artificial Sequence: Synthetic oligonucleotide
gagcucguggguccauugg

SEQ ID NO: 3116863 - RNA, 19 nt, Artificial Sequence
  Description of Artificial Sequence: Synthetic oligonucleotide
uugcuacacgaaucaaaga

SEQ ID NO: 3116864 - RNA, 19 nt, Artificial Sequence
  Description of Artificial Sequence: Synthetic oligonucleotide
uucgguguggccacaguuu

SEQ ID NO: 3116865 - RNA, 19 nt, Artificial Sequence
  Description of Artificial Sequence: Synthetic oligonucleotide
caaagagggaggagucccc

SEQ ID NO: 3116866 - RNA, 19 nt, Artificial Sequence
  Description of Artificial Sequence: Synthetic oligonucleotide
aaagagggaggagucccca

SEQ ID NO: 3116867 - RNA, 19 nt, Artificial Sequence
  Description of Artificial Sequence: Synthetic oligonucleotide
aauuugcuacacgaaucaa

SEQ ID NO: 3116868 - RNA, 19 nt, Artificial Sequence
  Description of Artificial Sequence: Synthetic oligonucleotide
ucaagaggcgguuccuaaa

SEQ ID NO: 3116869 - RNA, 19 nt, Artificial Sequence
  Description of Artificial Sequence: Synthetic oligonucleotide
caggagacuccugagggag

SEQ ID NO: 3116870 - RNA, 19 nt, Artificial Sequence
  Description of Artificial Sequence: Synthetic oligonucleotide
guauuuacagguaguuaca

SEQ ID NO: 3116871 - RNA, 19 nt, Artificial Sequence
  Description of Artificial Sequence: Synthetic oligonucleotide
acagguaguuacaugacua

SEQ ID NO: 3116872 - RNA, 19 nt, Artificial Sequence
  Description of Artificial Sequence: Synthetic oligonucleotide
agguaguuacaugacuaug

SEQ ID NO: 3116873 - RNA, 19 nt, Artificial Sequence
  Description of Artificial Sequence: Synthetic oligonucleotide
uaucccuaauuugcuacac

SEQ ID NO: 3116874 - RNA, 19 nt, Artificial Sequence
  Description of Artificial Sequence: Synthetic oligonucleotide
gaguccccagagcucgugg

SEQ ID NO: 3116875 - RNA, 19 nt, Artificial Sequence
  Description of Artificial Sequence: Synthetic oligonucleotide
acgaaucaaagagggagga

SEQ ID NO: 3116876 - RNA, 19 nt, Artificial Sequence
  Description of Artificial Sequence: Synthetic oligonucleotide
uaugaucagaaagcacaaa

SEQ ID NO: 3116877 - RNA, 19 nt, Artificial Sequence
  Description of Artificial Sequence: Synthetic oligonucleotide
agagggaggaguccccaga

SEQ ID NO: 3116878 - RNA, 19 nt, Artificial Sequence
  Description of Artificial Sequence: Synthetic oligonucleotide
ucgguguggccacaguuua

SEQ ID NO: 3116879 - RNA, 19 nt, Artificial Sequence
  Description of Artificial Sequence: Synthetic oligonucleotide
ucaaaccuuuuaucccuaa

SEQ ID NO: 3116880 - RNA, 19 nt, Artificial Sequence
  Description of Artificial Sequence: Synthetic oligonucleotide
agcucguggguccauuggu

SEQ ID NO: 3116881 - RNA, 19 nt, Artificial Sequence
  Description of Artificial Sequence: Synthetic oligonucleotide
cauugguucgguguggcca

SEQ ID NO: 3116882 - RNA, 19 nt, Artificial Sequence
  Description of Artificial Sequence: Synthetic oligonucleotide
uccauugguucgguguggc

SEQ ID NO: 3116883 - RNA, 19 nt, Artificial Sequence
  Description of Artificial Sequence: Synthetic oligonucleotide
uaauacaugcacgguucaa

SEQ ID NO: 3116884 - RNA, 19 nt, Artificial Sequence
  Description of Artificial Sequence: Synthetic oligonucleotide
cuuuuaucccuaauuugcu

SEQ ID NO: 3116885 - RNA, 19 nt, Artificial Sequence
  Description of Artificial Sequence: Synthetic oligonucleotide
agagcucguggguccauug

SEQ ID NO: 3116886 - RNA, 19 nt, Artificial Sequence
  Description of Artificial Sequence: Synthetic oligonucleotide
gcacaaagacaccuggcug

SEQ ID NO: 3116887 - RNA, 19 nt, Artificial Sequence
  Description of Artificial Sequence: Synthetic oligonucleotide
cuauaauacaugcacgguu

SEQ ID NO: 3116888 - RNA, 19 nt, Artificial Sequence
  Description of Artificial Sequence: Synthetic oligonucleotide
cucguggguccauugguuc

SEQ ID NO: 3116889 - RNA, 19 nt, Artificial Sequence
  Description of Artificial Sequence: Synthetic oligonucleotide
gguccauugguucggugug

SEQ ID NO: 3116890 - RNA, 19 nt, Artificial Sequence
  Description of Artificial Sequence: Synthetic oligonucleotide
uggccacaguuuacaacug

SEQ ID NO: 3116891 - RNA, 19 nt, Artificial Sequence
  Description of Artificial Sequence: Synthetic oligonucleotide
auguauuuacagguaguua

SEQ ID NO: 3116892 - RNA, 19 nt, Artificial Sequence
  Description of Artificial Sequence: Synthetic oligonucleotide
guaguuacaugacuaugau

SEQ ID NO: 3116893 - RNA, 19 nt, Artificial Sequence
  Description of Artificial Sequence: Synthetic oligonucleotide
acaaagacaccuggcugcu

SEQ ID NO: 3116894 - RNA, 19 nt, Artificial Sequence
  Description of Artificial Sequence: Synthetic oligonucleotide
ccacaguuuacaacugcag

SEQ ID NO: 3116895 - RNA, 19 nt, Artificial Sequence
  Description of Artificial Sequence: Synthetic oligonucleotide
accuggcugcuauaauaca

SEQ ID NO: 3116896 - RNA, 19 nt, Artificial Sequence
  Description of Artificial Sequence: Synthetic oligonucleotide
caagaggcgguuccuaaaa

SEQ ID NO: 3116897 - RNA, 19 nt, Artificial Sequence
  Description of Artificial Sequence: Synthetic oligonucleotide
acaugacuaugaucagaaa

SEQ ID NO: 3116898 - RNA, 19 nt, Artificial Sequence
  Description of Artificial Sequence: Synthetic oligonucleotide
cugcaagaagccuguaaaa

SEQ ID NO: 3116899 - RNA, 19 nt, Artificial Sequence
  Description of Artificial Sequence: Synthetic oligonucleotide
cuccugagggagacagcag

SEQ ID NO: 3116900 - RNA, 19 nt, Artificial Sequence
  Description of Artificial Sequence: Synthetic oligonucleotide
guccauugguucggugugg

SEQ ID NO: 3116901 - RNA, 19 nt, Artificial Sequence
  Description of Artificial Sequence: Synthetic oligonucleotide
aagacaccuggcugcuaua

SEQ ID NO: 3116902 - RNA, 19 nt, Artificial Sequence
  Description of Artificial Sequence: Synthetic oligonucleotide
ggccacaguuuacaacugc

SEQ ID NO: 3116903 - RNA, 19 nt, Artificial Sequence
  Description of Artificial Sequence: Synthetic oligonucleotide
acgguucaagaggcgguuc

SEQ ID NO: 3116904 - RNA, 19 nt, Artificial Sequence
  Description of Artificial Sequence: Synthetic oligonucleotide
agacaccuggcugcuauaa

SEQ ID NO: 3116905 - RNA, 19 nt, Artificial Sequence
  Description of Artificial Sequence: Synthetic oligonucleotide
gguguggccacaguuuaca

SEQ ID NO: 3116906 - RNA, 19 nt, Artificial Sequence
  Description of Artificial Sequence: Synthetic oligonucleotide
uggguccauugguucggug

SEQ ID NO: 3116907 - RNA, 19 nt, Artificial Sequence
  Description of Artificial Sequence: Synthetic oligonucleotide
ugguucgguguggccacag

SEQ ID NO: 3116908 - RNA, 19 nt, Artificial Sequence
  Description of Artificial Sequence: Synthetic oligonucleotide
ggagacuccugagggagac

SEQ ID NO: 3116909 - RNA, 19 nt, Artificial Sequence
  Description of Artificial Sequence: Synthetic oligonucleotide
ccuaauuugcuacacgaau

SEQ ID NO: 3116910 - RNA, 19 nt, Artificial Sequence
  Description of Artificial Sequence: Synthetic oligonucleotide
gccacaguuuacaacugca

SEQ ID NO: 3116911 - RNA, 19 nt, Artificial Sequence
  Description of Artificial Sequence: Synthetic oligonucleotide
gacuccugagggagacagc

SEQ ID NO: 3116912 - RNA, 19 nt, Artificial Sequence
  Description of Artificial Sequence: Synthetic oligonucleotide
ggguccauugguucggugu

SEQ ID NO: 3116913 - RNA, 19 nt, Artificial Sequence
  Description of Artificial Sequence: Synthetic oligonucleotide
cagguaguuacaugacuau

SEQ ID NO: 3116914 - RNA, 19 nt, Artificial Sequence
  Description of Artificial Sequence: Synthetic oligonucleotide
aucaaaccuuuuaucccua

SEQ ID NO: 3116915 - RNA, 19 nt, Artificial Sequence
  Description of Artificial Sequence: Synthetic oligonucleotide
augcacgguucaagaggcg

SEQ ID NO: 3116916 - RNA, 19 nt, Artificial Sequence
  Description of Artificial Sequence: Synthetic oligonucleotide
guucgguguggccacaguu

SEQ ID NO: 3116917 - RNA, 19 nt, Artificial Sequence
  Description of Artificial Sequence: Synthetic oligonucleotide
aaacugcaagaagccugua

SEQ ID NO: 3116918 - RNA, 19 nt, Artificial Sequence
  Description of Artificial Sequence: Synthetic oligonucleotide
caacugcaggagacuccug

SEQ ID NO: 3116919 - RNA, 19 nt, Artificial Sequence
  Description of Artificial Sequence: Synthetic oligonucleotide
caaaccuuuuaucccuaau

SEQ ID NO: 3116920 - RNA, 19 nt, Artificial Sequence
  Description of Artificial Sequence: Synthetic oligonucleotide
gcuauaauacaugcacggu

SEQ ID NO: 3116921 - RNA, 19 nt, Artificial Sequence
  Description of Artificial Sequence: Synthetic oligonucleotide
cgguucaagaggcgguucc

SEQ ID NO: 3116922 - RNA, 19 nt, Artificial Sequence
  Description of Artificial Sequence: Synthetic oligonucleotide
guucaagaggcgguuccua

SEQ ID NO: 3116923 - RNA, 19 nt, Artificial Sequence
  Description of Artificial Sequence: Synthetic oligonucleotide
ggcugcuauaauacaugca

SEQ ID NO: 3116924 - RNA, 19 nt, Artificial Sequence
  Description of Artificial Sequence: Synthetic oligonucleotide
gcaggagacuccugaggga

SEQ ID NO: 3116925 - RNA, 19 nt, Artificial Sequence
  Description of Artificial Sequence: Synthetic oligonucleotide
gacaccuggcugcuauaau

SEQ ID NO: 3116926 - RNA, 19 nt, Artificial Sequence
  Description of Artificial Sequence: Synthetic oligonucleotide
ccauugguucgguguggcc

SEQ ID NO: 3116927 - RNA, 19 nt, Artificial Sequence
  Description of Artificial Sequence: Synthetic oligonucleotide
aggagacuccugagggaga

SEQ ID NO: 3116928 - RNA, 19 nt, Artificial Sequence
  Description of Artificial Sequence: Synthetic oligonucleotide
cccuaauuugcuacacgaa

SEQ ID NO: 3116929 - RNA, 19 nt, Artificial Sequence
  Description of Artificial Sequence: Synthetic oligonucleotide
uugguucgguguggccaca

SEQ ID NO: 3116930 - RNA, 19 nt, Artificial Sequence
  Description of Artificial Sequence: Synthetic oligonucleotide
gagacuccugagggagaca

SEQ ID NO: 3116931 - RNA, 19 nt, Artificial Sequence
  Description of Artificial Sequence: Synthetic oligonucleotide
cgaaucaaagagggaggag

SEQ ID NO: 3116932 - RNA, 19 nt, Artificial Sequence
  Description of Artificial Sequence: Synthetic oligonucleotide
cguggguccauugguucgg

SEQ ID NO: 3116933 - RNA, 19 nt, Artificial Sequence
  Description of Artificial Sequence: Synthetic oligonucleotide
ggaguccccagagcucgug

SEQ ID NO: 3116934 - RNA, 19 nt, Artificial Sequence
  Description of Artificial Sequence: Synthetic oligonucleotide
gguucaagaggcgguuccu

SEQ ID NO: 3116935 - RNA, 19 nt, Artificial Sequence
  Description of Artificial Sequence: Synthetic oligonucleotide
gguucgguguggccacagu

SEQ ID NO: 3116936 - RNA, 19 nt, Artificial Sequence
  Description of Artificial Sequence: Synthetic oligonucleotide
cgguguggccacaguuuac

SEQ ID NO: 3116937 - RNA, 19 nt, Artificial Sequence
  Description of Artificial Sequence: Synthetic oligonucleotide
caaagacaccuggcugcua

SEQ ID NO: 3116938 - RNA, 19 nt, Artificial Sequence
  Description of Artificial Sequence: Synthetic oligonucleotide
gcacgguucaagaggcggu

SEQ ID NO: 3116939 - RNA, 19 nt, Artificial Sequence
  Description of Artificial Sequence: Synthetic oligonucleotide
cacgguucaagaggcgguu

SEQ ID NO: 3116940 - RNA, 19 nt, Artificial Sequence
  Description of Artificial Sequence: Synthetic oligonucleotide
guggguccauugguucggu

SEQ ID NO: 3116941 - RNA, 19 nt, Artificial Sequence
  Description of Artificial Sequence: Synthetic oligonucleotide
gcucguggguccauugguu

SEQ ID NO: 3116942 - RNA, 19 nt, Artificial Sequence
  Description of Artificial Sequence: Synthetic oligonucleotide
cagagcucguggguccauu

SEQ ID NO: 3116943 - RNA, 19 nt, Artificial Sequence
  Description of Artificial Sequence: Synthetic oligonucleotide
cccagagcucgugggucca

SEQ ID NO: 3116944 - RNA, 19 nt, Artificial Sequence
  Description of Artificial Sequence: Synthetic oligonucleotide
ccagagcucguggguccau

SEQ ID NO: 3116945 - RNA, 19 nt, Artificial Sequence
  Description of Artificial Sequence: Synthetic oligonucleotide
uuacggaugguugugagcc

SEQ ID NO: 3116946 - RNA, 19 nt, Artificial Sequence
  Description of Artificial Sequence: Synthetic oligonucleotide
auuacggaugguugugagc

SEQ ID NO: 3116947 - RNA, 19 nt, Artificial Sequence
  Description of Artificial Sequence: Synthetic oligonucleotide
ugcgccuaaccucugagcc

SEQ ID NO: 3116948 - RNA, 19 nt, Artificial Sequence
  Description of Artificial Sequence: Synthetic oligonucleotide
caugcaacauucugcuucc

SEQ ID NO: 3116949 - RNA, 19 nt, Artificial Sequence
  Description of Artificial Sequence: Synthetic oligonucleotide
augcaugcaacauucugcu

SEQ ID NO: 3116950 - RNA, 19 nt, Artificial Sequence
  Description of Artificial Sequence: Synthetic oligonucleotide
cauuacggaugguugugag

SEQ ID NO: 3116951 - RNA, 19 nt, Artificial Sequence
  Description of Artificial Sequence: Synthetic oligonucleotide
gcaugcaacauucugcuuc

SEQ ID NO: 3116952 - RNA, 19 nt, Artificial Sequence
  Description of Artificial Sequence: Synthetic oligonucleotide
ugcaacauucugcuuccau

SEQ ID NO: 3116953 - RNA, 19 nt, Artificial Sequence
  Description of Artificial Sequence: Synthetic oligonucleotide
ucauuacggaugguuguga

SEQ ID NO: 3116954 - RNA, 19 nt, Artificial Sequence
  Description of Artificial Sequence: Synthetic oligonucleotide
agccggugcgccuaaccuc

SEQ ID NO: 3116955 - RNA, 19 nt, Artificial Sequence
  Description of Artificial Sequence: Synthetic oligonucleotide
cucauuacggaugguugug

SEQ ID NO: 3116956 - RNA, 19 nt, Artificial Sequence
  Description of Artificial Sequence: Synthetic oligonucleotide
ggcgccaggucucauuacg

SEQ ID NO: 3116957 - RNA, 19 nt, Artificial Sequence
  Description of Artificial Sequence: Synthetic oligonucleotide
aagagcagccggugcgccu

SEQ ID NO: 3116958 - RNA, 19 nt, Artificial Sequence
  Description of Artificial Sequence: Synthetic oligonucleotide
gccaccgugugguugcugg

SEQ ID NO: 3116959 - RNA, 19 nt, Artificial Sequence
  Description of Artificial Sequence: Synthetic oligonucleotide
gaagagcagccggugcgcc

SEQ ID NO: 3116960 - RNA, 19 nt, Artificial Sequence
  Description of Artificial Sequence: Synthetic oligonucleotide
ggugcgccuaaccucugag

SEQ ID NO: 3116961 - RNA, 19 nt, Artificial Sequence
  Description of Artificial Sequence: Synthetic oligonucleotide
gugcgccuaaccucugagc

SEQ ID NO: 3116962 - RNA, 19 nt, Artificial Sequence
  Description of Artificial Sequence: Synthetic oligonucleotide
agggcgccaggucucauua

SEQ ID NO: 3116963 - RNA, 19 nt, Artificial Sequence
  Description of Artificial Sequence: Synthetic oligonucleotide
accgugugguugcugggaa

SEQ ID NO: 3116964 - RNA, 19 nt, Artificial Sequence
  Description of Artificial Sequence: Synthetic oligonucleotide
aagagggcgccaggucuca

SEQ ID NO: 3116965 - RNA, 19 nt, Artificial Sequence
  Description of Artificial Sequence: Synthetic oligonucleotide
ugcaugcaacauucugcuu

SEQ ID NO: 3116966 - RNA, 19 nt, Artificial Sequence
  Description of Artificial Sequence: Synthetic oligonucleotide
ggaagagcagccggugcgc

SEQ ID NO: 3116967 - RNA, 19 nt, Artificial Sequence
  Description of Artificial Sequence: Synthetic oligonucleotide
agagcagccggugcgccua

SEQ ID NO: 3116968 - RNA, 19 nt, Artificial Sequence
  Description of Artificial Sequence: Synthetic oligonucleotide
gcgccaggucucauuacgg

SEQ ID NO: 3116969 - RNA, 19 nt, Artificial Sequence
  Description of Artificial Sequence: Synthetic oligonucleotide
gcagccggugcgccuaacc

SEQ ID NO: 3116970 - RNA, 19 nt, Artificial Sequence
  Description of Artificial Sequence: Synthetic oligonucleotide
ccaccgugugguugcuggg

SEQ ID NO: 3116971 - RNA, 19 nt, Artificial Sequence
  Description of Artificial Sequence: Synthetic oligonucleotide
caccgugugguugcuggga

SEQ ID NO: 3116972 - RNA, 19 nt, Artificial Sequence
  Description of Artificial Sequence: Synthetic oligonucleotide
agcagccggugcgccuaac

SEQ ID NO: 3116973 - RNA, 19 nt, Artificial Sequence
  Description of Artificial Sequence: Synthetic oligonucleotide
cagccggugcgccuaaccu

SEQ ID NO: 3116974 - RNA, 19 nt, Artificial Sequence
  Description of Artificial Sequence: Synthetic oligonucleotide
gagggcgccaggucucauu

SEQ ID NO: 3116975 - RNA, 19 nt, Artificial Sequence
  Description of Artificial Sequence: Synthetic oligonucleotide
gggcgccaggucucauuac

SEQ ID NO: 3116976 - RNA, 19 nt, Artificial Sequence
  Description of Artificial Sequence: Synthetic oligonucleotide
gccggugcgccuaaccucu

SEQ ID NO: 3116977 - RNA, 19 nt, Artificial Sequence
  Description of Artificial Sequence: Synthetic oligonucleotide
gagcagccggugcgccuaa

SEQ ID NO: 3116978 - RNA, 19 nt, Artificial Sequence
  Description of Artificial Sequence: Synthetic oligonucleotide
cgccaggucucauuacgga

SEQ ID NO: 3116979 - RNA, 19 nt, Artificial Sequence
  Description of Artificial Sequence: Synthetic oligonucleotide
agagggcgccaggucucau

SEQ ID NO: 3116980 - RNA, 19 nt, Artificial Sequence
  Description of Artificial Sequence: Synthetic oligonucleotide
gagccaccgugugguugcu

SEQ ID NO: 3116981 - RNA, 19 nt, Artificial Sequence
  Description of Artificial Sequence: Synthetic oligonucleotide
ccggugcgccuaaccucug

SEQ ID NO: 3116982 - RNA, 19 nt, Artificial Sequence
  Description of Artificial Sequence: Synthetic oligonucleotide
cgugugguugcugggaauu

SEQ ID NO: 3116983 - RNA, 19 nt, Artificial Sequence
  Description of Artificial Sequence: Synthetic oligonucleotide
cgccuaaccucugagccau

SEQ ID NO: 3116984 - RNA, 19 nt, Artificial Sequence
  Description of Artificial Sequence: Synthetic oligonucleotide
cggugcgccuaaccucuga

SEQ ID NO: 3116985 - RNA, 19 nt, Artificial Sequence
  Description of Artificial Sequence: Synthetic oligonucleotide
ccgugugguugcugggaau

SEQ ID NO: 3116986 - RNA, 19 nt, Artificial Sequence
  Description of Artificial Sequence: Synthetic oligonucleotide
uaucuuguagucuaggucg

SEQ ID NO: 3116987 - RNA, 19 nt, Artificial Sequence
  Description of Artificial Sequence: Synthetic oligonucleotide
aaaucaacuguguucuucc

SEQ ID NO: 3116988 - RNA, 19 nt, Artificial Sequence
  Description of Artificial Sequence: Synthetic oligonucleotide
ugaacguaaguccugaagc

SEQ ID NO: 3116989 - RNA, 19 nt, Artificial Sequence
  Description of Artificial Sequence: Synthetic oligonucleotide
aacuguaauaucuuguagu

SEQ ID NO: 3116990 - RNA, 19 nt, Artificial Sequence
  Description of Artificial Sequence: Synthetic oligonucleotide
acuguaauaucuuguaguc

SEQ ID NO: 3116991 - RNA, 19 nt, Artificial Sequence
  Description of Artificial Sequence: Synthetic oligonucleotide
uaucagauggucaggacag

SEQ ID NO: 3116992 - RNA, 19 nt, Artificial Sequence
  Description of Artificial Sequence: Synthetic oligonucleotide
uguaauaucuuguagucua

SEQ ID NO: 3116993 - RNA, 19 nt, Artificial Sequence
  Description of Artificial Sequence: Synthetic oligonucleotide
acuguguucuuccuguagc

SEQ ID NO: 3116994 - RNA, 19 nt, Artificial Sequence
  Description of Artificial Sequence: Synthetic oligonucleotide
aauaucuuguagucuaggu

SEQ ID NO: 3116995 - RNA, 19 nt, Artificial Sequence
  Description of Artificial Sequence: Synthetic oligonucleotide
auaacaagcucaucugugg

SEQ ID NO: 3116996 - RNA, 19 nt, Artificial Sequence
  Description of Artificial Sequence: Synthetic oligonucleotide
auaucuuguagucuagguc

SEQ ID NO: 3116997 - RNA, 19 nt, Artificial Sequence
  Description of Artificial Sequence: Synthetic oligonucleotide
acuggugcugagcagaugg

SEQ ID NO: 3116998 - RNA, 19 nt, Artificial Sequence
  Description of Artificial Sequence: Synthetic oligonucleotide
uuaucagauggucaggaca

SEQ ID NO: 3116999 - RNA, 19 nt, Artificial Sequence
  Description of Artificial Sequence: Synthetic oligonucleotide
ugaauaacaagcucaucug

SEQ ID NO: 3117000 - RNA, 19 nt, Artificial Sequence
  Description of Artificial Sequence: Synthetic oligonucleotide
aacaagcucaucugugggg

SEQ ID NO: 3117001 - RNA, 19 nt, Artificial Sequence
  Description of Artificial Sequence: Synthetic oligonucleotide
uagucuaggucguagagug

SEQ ID NO: 3117002 - RNA, 19 nt, Artificial Sequence
  Description of Artificial Sequence: Synthetic oligonucleotide
uuccuuccuuaucagaugg

SEQ ID NO: 3117003 - RNA, 19 nt, Artificial Sequence
  Description of Artificial Sequence: Synthetic oligonucleotide
ugugggguaggacugagca

SEQ ID NO: 3117004 - RNA, 19 nt, Artificial Sequence
  Description of Artificial Sequence: Synthetic oligonucleotide
uuccuuaucagauggucag

SEQ ID NO: 3117005 - RNA, 19 nt, Artificial Sequence
  Description of Artificial Sequence: Synthetic oligonucleotide
guaggacugagcaugaacg

SEQ ID NO: 3117006 - RNA, 19 nt, Artificial Sequence
  Description of Artificial Sequence: Synthetic oligonucleotide
uaacaagcucaucuguggg

SEQ ID NO: 3117007 - RNA, 19 nt, Artificial Sequence
  Description of Artificial Sequence: Synthetic oligonucleotide
aauaacaagcucaucugug

SEQ ID NO: 3117008 - RNA, 19 nt, Artificial Sequence
  Description of Artificial Sequence: Synthetic oligonucleotide
gauggccugaauaacaagc

SEQ ID NO: 3117009 - RNA, 19 nt, Artificial Sequence
  Description of Artificial Sequence: Synthetic oligonucleotide
ucaucugugggguaggacu

SEQ ID NO: 3117010 - RNA, 19 nt, Artificial Sequence
  Description of Artificial Sequence: Synthetic oligonucleotide
ucaacuguguucuuccugu

SEQ ID NO: 3117011 - RNA, 19 nt, Artificial Sequence
  Description of Artificial Sequence: Synthetic oligonucleotide
ugcaacuguaauaucuugu

SEQ ID NO: 3117012 - RNA, 19 nt, Artificial Sequence
  Description of Artificial Sequence: Synthetic oligonucleotide
augaacguaaguccugaag

SEQ ID NO: 3117013 - RNA, 19 nt, Artificial Sequence
  Description of Artificial Sequence: Synthetic oligonucleotide
aacuguguucuuccuguag

SEQ ID NO: 3117014 - RNA, 19 nt, Artificial Sequence
  Description of Artificial Sequence: Synthetic oligonucleotide
uaauaucuuguagucuagg

SEQ ID NO: 3117015 - RNA, 19 nt, Artificial Sequence
  Description of Artificial Sequence: Synthetic oligonucleotide
ugagcagauggccugaaua

SEQ ID NO: 3117016 - RNA, 19 nt, Artificial Sequence
  Description of Artificial Sequence: Synthetic oligonucleotide
ucuuccuguagcugcaagc

SEQ ID NO: 3117017 - RNA, 19 nt, Artificial Sequence
  Description of Artificial Sequence: Synthetic oligonucleotide
ugggguaggacugagcaug

SEQ ID NO: 3117018 - RNA, 19 nt, Artificial Sequence
  Description of Artificial Sequence: Synthetic oligonucleotide
agcugcaagccaucagugc

SEQ ID NO: 3117019 - RNA, 19 nt, Artificial Sequence
  Description of Artificial Sequence: Synthetic oligonucleotide
cugagcaugaacguaaguc

SEQ ID NO: 3117020 - RNA, 19 nt, Artificial Sequence
  Description of Artificial Sequence: Synthetic oligonucleotide
cugaauaacaagcucaucu

SEQ ID NO: 3117021 - RNA, 19 nt, Artificial Sequence
  Description of Artificial Sequence: Synthetic oligonucleotide
uguagcugcaagccaucag

SEQ ID NO: 3117022 - RNA, 19 nt, Artificial Sequence
  Description of Artificial Sequence: Synthetic oligonucleotide
ucuaggucguagaguggcg

SEQ ID NO: 3117023 - RNA, 19 nt, Artificial Sequence
  Description of Artificial Sequence: Synthetic oligonucleotide
aacguaaguccugaagcug

SEQ ID NO: 3117024 - RNA, 19 nt, Artificial Sequence
  Description of Artificial Sequence: Synthetic oligonucleotide
guguucuuccuguagcugc

SEQ ID NO: 3117025 - RNA, 19 nt, Artificial Sequence
  Description of Artificial Sequence: Synthetic oligonucleotide
gucuccugaacccacagca

SEQ ID NO: 3117026 - RNA, 19 nt, Artificial Sequence
  Description of Artificial Sequence: Synthetic oligonucleotide
caacuguaauaucuuguag

SEQ ID NO: 3117027 - RNA, 19 nt, Artificial Sequence
  Description of Artificial Sequence: Synthetic oligonucleotide
cuuccuguagcugcaagcc

SEQ ID NO: 3117028 - RNA, 19 nt, Artificial Sequence
  Description of Artificial Sequence: Synthetic oligonucleotide
caagccaucagugcaacug

SEQ ID NO: 3117029 - RNA, 19 nt, Artificial Sequence
  Description of Artificial Sequence: Synthetic oligonucleotide
agucuccugaacccacagc

SEQ ID NO: 3117030 - RNA, 19 nt, Artificial Sequence
  Description of Artificial Sequence: Synthetic oligonucleotide
aaucaacuguguucuuccu

SEQ ID NO: 3117031 - RNA, 19 nt, Artificial Sequence
  Description of Artificial Sequence: Synthetic oligonucleotide
aucaacuguguucuuccug

SEQ ID NO: 3117032 - RNA, 19 nt, Artificial Sequence
  Description of Artificial Sequence: Synthetic oligonucleotide
agaguggcgagucuccuga

SEQ ID NO: 3117033 - RNA, 19 nt, Artificial Sequence
  Description of Artificial Sequence: Synthetic oligonucleotide
ucuccugaacccacagcag

SEQ ID NO: 3117034 - RNA, 19 nt, Artificial Sequence
  Description of Artificial Sequence: Synthetic oligonucleotide
acguaaguccugaagcugg

SEQ ID NO: 3117035 - RNA, 19 nt, Artificial Sequence
  Description of Artificial Sequence: Synthetic oligonucleotide
uccuguagcugcaagccau

SEQ ID NO: 3117036 - RNA, 19 nt, Artificial Sequence
  Description of Artificial Sequence: Synthetic oligonucleotide
guggcgagucuccugaacc

SEQ ID NO: 3117037 - RNA, 19 nt, Artificial Sequence
  Description of Artificial Sequence: Synthetic oligonucleotide
aguggcgagucuccugaac

SEQ ID NO: 3117038 - RNA, 19 nt, Artificial Sequence
  Description of Artificial Sequence: Synthetic oligonucleotide
aagcucaucugugggguag

SEQ ID NO: 3117039 - RNA, 19 nt, Artificial Sequence
  Description of Artificial Sequence: Synthetic oligonucleotide
cuuguagucuaggucguag

SEQ ID NO: 3117040 - RNA, 19 nt, Artificial Sequence
  Description of Artificial Sequence: Synthetic oligonucleotide
gaauaacaagcucaucugu

SEQ ID NO: 3117041 - RNA, 19 nt, Artificial Sequence
  Description of Artificial Sequence: Synthetic oligonucleotide
uuguagucuaggucguaga

SEQ ID NO: 3117042 - RNA, 19 nt, Artificial Sequence
  Description of Artificial Sequence: Synthetic oligonucleotide
agcagauggccugaauaac

SEQ ID NO: 3117043 - RNA, 19 nt, Artificial Sequence
  Description of Artificial Sequence: Synthetic oligonucleotide
cuuaucagauggucaggac

SEQ ID NO: 3117044 - RNA, 19 nt, Artificial Sequence
  Description of Artificial Sequence: Synthetic oligonucleotide
uccugaacccacagcaggu

SEQ ID NO: 3117045 - RNA, 19 nt, Artificial Sequence
  Description of Artificial Sequence: Synthetic oligonucleotide
gagcagauggccugaauaa

SEQ ID NO: 3117046 - RNA, 19 nt, Artificial Sequence
  Description of Artificial Sequence: Synthetic oligonucleotide
ugaacccacagcaggucac

SEQ ID NO: 3117047 - RNA, 19 nt, Artificial Sequence
  Description of Artificial Sequence: Synthetic oligonucleotide
uaggacugagcaugaacgu

SEQ ID NO: 3117048 - RNA, 19 nt, Artificial Sequence
  Description of Artificial Sequence: Synthetic oligonucleotide
agauggccugaauaacaag

SEQ ID NO: 3117049 - RNA, 19 nt, Artificial Sequence
  Description of Artificial Sequence: Synthetic oligonucleotide
gucuaggucguagaguggc

SEQ ID NO: 3117050 - RNA, 19 nt, Artificial Sequence
  Description of Artificial Sequence: Synthetic oligonucleotide
cuuccuuccuuaucagaug

SEQ ID NO: 3117051 - RNA, 19 nt, Artificial Sequence
  Description of Artificial Sequence: Synthetic oligonucleotide
cuuccuuaucagaugguca

SEQ ID NO: 3117052 - RNA, 19 nt, Artificial Sequence
  Description of Artificial Sequence: Synthetic oligonucleotide
uaggucguagaguggcgag

SEQ ID NO: 3117053 - RNA, 19 nt, Artificial Sequence
  Description of Artificial Sequence: Synthetic oligonucleotide
guaauaucuuguagucuag

SEQ ID NO: 3117054 - RNA, 19 nt, Artificial Sequence
  Description of Artificial Sequence: Synthetic oligonucleotide
ucagauggucaggacagga

SEQ ID NO: 3117055 - RNA, 19 nt, Artificial Sequence
  Description of Artificial Sequence: Synthetic oligonucleotide
acagcaggucacaagccac

SEQ ID NO: 3117056 - RNA, 19 nt, Artificial Sequence
  Description of Artificial Sequence: Synthetic oligonucleotide
caucugugggguaggacug

SEQ ID NO: 3117057 - RNA, 19 nt, Artificial Sequence
  Description of Artificial Sequence: Synthetic oligonucleotide
uccuuaucagauggucagg

SEQ ID NO: 3117058 - RNA, 19 nt, Artificial Sequence
  Description of Artificial Sequence: Synthetic oligonucleotide
gaacguaaguccugaagcu

SEQ ID NO: 3117059 - RNA, 19 nt, Artificial Sequence
  Description of Artificial Sequence: Synthetic oligonucleotide
uguguucuuccuguagcug

SEQ ID NO: 3117060 - RNA, 19 nt, Artificial Sequence
  Description of Artificial Sequence: Synthetic oligonucleotide
acaagcucaucuguggggu

SEQ ID NO: 3117061 - RNA, 19 nt, Artificial Sequence
  Description of Artificial Sequence: Synthetic oligonucleotide
uggcgagucuccugaaccc

SEQ ID NO: 3117062 - RNA, 19 nt, Artificial Sequence
  Description of Artificial Sequence: Synthetic oligonucleotide
uuccuguagcugcaagcca

SEQ ID NO: 3117063 - RNA, 19 nt, Artificial Sequence
  Description of Artificial Sequence: Synthetic oligonucleotide
gugcaacuguaauaucuug

SEQ ID NO: 3117064 - RNA, 19 nt, Artificial Sequence
  Description of Artificial Sequence: Synthetic oligonucleotide
uggccugaauaacaagcuc

SEQ ID NO: 3117065 - RNA, 19 nt, Artificial Sequence
  Description of Artificial Sequence: Synthetic oligonucleotide
guagcugcaagccaucagu

SEQ ID NO: 3117066 - RNA, 19 nt, Artificial Sequence
  Description of Artificial Sequence: Synthetic oligonucleotide
auggucaggacaggacugg

SEQ ID NO: 3117067 - RNA, 19 nt, Artificial Sequence
  Description of Artificial Sequence: Synthetic oligonucleotide
gguaggacugagcaugaac

SEQ ID NO: 3117068 - RNA, 19 nt, Artificial Sequence
  Description of Artificial Sequence: Synthetic oligonucleotide
cagugcaacuguaauaucu

SEQ ID NO: 3117069 - RNA, 19 nt, Artificial Sequence
  Description of Artificial Sequence: Synthetic oligonucleotide
gggcaaaucaacuguguuc

SEQ ID NO: 3117070 - RNA, 19 nt, Artificial Sequence
  Description of Artificial Sequence: Synthetic oligonucleotide
uagaguggcgagucuccug

SEQ ID NO: 3117071 - RNA, 19 nt, Artificial Sequence
  Description of Artificial Sequence: Synthetic oligonucleotide
auggccugaauaacaagcu

SEQ ID NO: 3117072 - RNA, 19 nt, Artificial Sequence
  Description of Artificial Sequence: Synthetic oligonucleotide
aggacuggugcugagcaga

SEQ ID NO: 3117073 - RNA, 19 nt, Artificial Sequence
  Description of Artificial Sequence: Synthetic oligonucleotide
gacugagcaugaacguaag

SEQ ID NO: 3117074 - RNA, 19 nt, Artificial Sequence
  Description of Artificial Sequence: Synthetic oligonucleotide
acugagcaugaacguaagu

SEQ ID NO: 3117075 - RNA, 19 nt, Artificial Sequence
  Description of Artificial Sequence: Synthetic oligonucleotide
acccacagcaggucacaag

SEQ ID NO: 3117076 - RNA, 19 nt, Artificial Sequence
  Description of Artificial Sequence: Synthetic oligonucleotide
guaaguccugaagcugggg

SEQ ID NO: 3117077 - RNA, 19 nt, Artificial Sequence
  Description of Artificial Sequence: Synthetic oligonucleotide
agugcaacuguaauaucuu

SEQ ID NO: 3117078 - RNA, 19 nt, Artificial Sequence
  Description of Artificial Sequence: Synthetic oligonucleotide
caucagugcaacuguaaua

SEQ ID NO: 3117079 - RNA, 19 nt, Artificial Sequence
  Description of Artificial Sequence: Synthetic oligonucleotide
ucagugcaacuguaauauc

SEQ ID NO: 3117080 - RNA, 19 nt, Artificial Sequence
  Description of Artificial Sequence: Synthetic oligonucleotide
ucguagaguggcgagucuc

SEQ ID NO: 3117081 - RNA, 19 nt, Artificial Sequence
  Description of Artificial Sequence: Synthetic oligonucleotide
ggcaaaucaacuguguucu

SEQ ID NO: 3117082 - RNA, 19 nt, Artificial Sequence
  Description of Artificial Sequence: Synthetic oligonucleotide
gcaacuguaauaucuugua

SEQ ID NO: 3117083 - RNA, 19 nt, Artificial Sequence
  Description of Artificial Sequence: Synthetic oligonucleotide
cacagcaggucacaagcca

SEQ ID NO: 3117084 - RNA, 19 nt, Artificial Sequence
  Description of Artificial Sequence: Synthetic oligonucleotide
ggccugaauaacaagcuca

SEQ ID NO: 3117085 - RNA, 19 nt, Artificial Sequence
  Description of Artificial Sequence: Synthetic oligonucleotide
cagauggccugaauaacaa

SEQ ID NO: 3117086 - RNA, 19 nt, Artificial Sequence
  Description of Artificial Sequence: Synthetic oligonucleotide
agcaugaacguaaguccug

SEQ ID NO: 3117087 - RNA, 19 nt, Artificial Sequence
  Description of Artificial Sequence: Synthetic oligonucleotide
aucagauggucaggacagg

SEQ ID NO: 3117088 - RNA, 19 nt, Artificial Sequence
  Description of Artificial Sequence: Synthetic oligonucleotide
ugcaagccaucagugcaac

SEQ ID NO: 3117089 - RNA, 19 nt, Artificial Sequence
  Description of Artificial Sequence: Synthetic oligonucleotide
agcucaucugugggguagg

SEQ ID NO: 3117090 - RNA, 19 nt, Artificial Sequence
  Description of Artificial Sequence: Synthetic oligonucleotide
agucuaggucguagagugg

SEQ ID NO: 3117091 - RNA, 19 nt, Artificial Sequence
  Description of Artificial Sequence: Synthetic oligonucleotide
gagcaugaacguaaguccu

SEQ ID NO: 3117092 - RNA, 19 nt, Artificial Sequence
  Description of Artificial Sequence: Synthetic oligonucleotide
cugaacccacagcagguca

SEQ ID NO: 3117093 - RNA, 19 nt, Artificial Sequence
  Description of Artificial Sequence: Synthetic oligonucleotide
caggacaggacuggugcug

SEQ ID NO: 3117094 - RNA, 19 nt, Artificial Sequence
  Description of Artificial Sequence: Synthetic oligonucleotide
cugugggguaggacugagc

SEQ ID NO: 3117095 - RNA, 19 nt, Artificial Sequence
  Description of Artificial Sequence: Synthetic oligonucleotide
aucuuguagucuaggucgu

SEQ ID NO: 3117096 - RNA, 19 nt, Artificial Sequence
  Description of Artificial Sequence: Synthetic oligonucleotide
aggacugagcaugaacgua

SEQ ID NO: 3117097 - RNA, 19 nt, Artificial Sequence
  Description of Artificial Sequence: Synthetic oligonucleotide
gcagauggccugaauaaca

SEQ ID NO: 3117098 - RNA, 19 nt, Artificial Sequence
  Description of Artificial Sequence: Synthetic oligonucleotide
cucaucugugggguaggac

SEQ ID NO: 3117099 - RNA, 19 nt, Artificial Sequence
  Description of Artificial Sequence: Synthetic oligonucleotide
ugcugagcagauggccuga

SEQ ID NO: 3117100 - RNA, 19 nt, Artificial Sequence
  Description of Artificial Sequence: Synthetic oligonucleotide
aggacaggacuggugcuga

SEQ ID NO: 3117101 - RNA, 19 nt, Artificial Sequence
  Description of Artificial Sequence: Synthetic oligonucleotide
ggacugagcaugaacguaa

SEQ ID NO: 3117102 - RNA, 19 nt, Artificial Sequence
  Description of Artificial Sequence: Synthetic oligonucleotide
gaacccacagcaggucaca

SEQ ID NO: 3117103 - RNA, 19 nt, Artificial Sequence
  Description of Artificial Sequence: Synthetic oligonucleotide
cuaggucguagaguggcga

SEQ ID NO: 3117104 - RNA, 19 nt, Artificial Sequence
  Description of Artificial Sequence: Synthetic oligonucleotide
cugcaagccaucagugcaa

SEQ ID NO: 3117105 - RNA, 19 nt, Artificial Sequence
  Description of Artificial Sequence: Synthetic oligonucleotide
cguagaguggcgagucucc

SEQ ID NO: 3117106 - RNA, 19 nt, Artificial Sequence
  Description of Artificial Sequence: Synthetic oligonucleotide
ccuuccuuaucagaugguc

SEQ ID NO: 3117107 - RNA, 19 nt, Artificial Sequence
  Description of Artificial Sequence: Synthetic oligonucleotide
cuguguucuuccuguagcu

SEQ ID NO: 3117108 - RNA, 19 nt, Artificial Sequence
  Description of Artificial Sequence: Synthetic oligonucleotide
aggucguagaguggcgagu

SEQ ID NO: 3117109 - RNA, 19 nt, Artificial Sequence
  Description of Artificial Sequence: Synthetic oligonucleotide
uggucaggacaggacuggu

SEQ ID NO: 3117110 - RNA, 19 nt, Artificial Sequence
  Description of Artificial Sequence: Synthetic oligonucleotide
ucuuguagucuaggucgua

SEQ ID NO: 3117111 - RNA, 19 nt, Artificial Sequence
  Description of Artificial Sequence: Synthetic oligonucleotide
aacccacagcaggucacaa

SEQ ID NO: 3117112 - RNA, 19 nt, Artificial Sequence
  Description of Artificial Sequence: Synthetic oligonucleotide
cguaaguccugaagcuggg

SEQ ID NO: 3117113 - RNA, 19 nt, Artificial Sequence
  Description of Artificial Sequence: Synthetic oligonucleotide
ccacagcaggucacaagcc

SEQ ID NO: 3117114 - RNA, 19 nt, Artificial Sequence
  Description of Artificial Sequence: Synthetic oligonucleotide
cuguaauaucuuguagucu

SEQ ID NO: 3117115 - RNA, 19 nt, Artificial Sequence
  Description of Artificial Sequence: Synthetic oligonucleotide
caugaacguaaguccugaa

SEQ ID NO: 3117116 - RNA, 19 nt, Artificial Sequence
  Description of Artificial Sequence: Synthetic oligonucleotide
ggucguagaguggcgaguc

SEQ ID NO: 3117117 - RNA, 19 nt, Artificial Sequence
  Description of Artificial Sequence: Synthetic oligonucleotide
gcaugaacguaaguccuga

SEQ ID NO: 3117118 - RNA, 19 nt, Artificial Sequence
  Description of Artificial Sequence: Synthetic oligonucleotide
gacuggugcugagcagaug

SEQ ID NO: 3117119 - RNA, 19 nt, Artificial Sequence
  Description of Artificial Sequence: Synthetic oligonucleotide
ccuuaucagauggucagga

SEQ ID NO: 3117120 - RNA, 19 nt, Artificial Sequence
  Description of Artificial Sequence: Synthetic oligonucleotide
cuguagcugcaagccauca

SEQ ID NO: 3117121 - RNA, 19 nt, Artificial Sequence
  Description of Artificial Sequence: Synthetic oligonucleotide
ggacaggacuggugcugag

SEQ ID NO: 3117122 - RNA, 19 nt, Artificial Sequence
  Description of Artificial Sequence: Synthetic oligonucleotide
ccuguagcugcaagccauc

SEQ ID NO: 3117123 - RNA, 19 nt, Artificial Sequence
  Description of Artificial Sequence: Synthetic oligonucleotide
caacuguguucuuccugua

SEQ ID NO: 3117124 - RNA, 19 nt, Artificial Sequence
  Description of Artificial Sequence: Synthetic oligonucleotide
gaguggcgagucuccugaa

SEQ ID NO: 3117125 - RNA, 19 nt, Artificial Sequence
  Description of Artificial Sequence: Synthetic oligonucleotide
ccugaauaacaagcucauc

SEQ ID NO: 3117126 - RNA, 19 nt, Artificial Sequence
  Description of Artificial Sequence: Synthetic oligonucleotide
caagcucaucuguggggua

SEQ ID NO: 3117127 - RNA, 19 nt, Artificial Sequence
  Description of Artificial Sequence: Synthetic oligonucleotide
guagaguggcgagucuccu

SEQ ID NO: 3117128 - RNA, 19 nt, Artificial Sequence
  Description of Artificial Sequence: Synthetic oligonucleotide
ggcgagucuccugaaccca

SEQ ID NO: 3117129 - RNA, 19 nt, Artificial Sequence
  Description of Artificial Sequence: Synthetic oligonucleotide
ggggcaaaucaacuguguu

SEQ ID NO: 3117130 - RNA, 19 nt, Artificial Sequence
  Description of Artificial Sequence: Synthetic oligonucleotide
gucguagaguggcgagucu

SEQ ID NO: 3117131 - RNA, 19 nt, Artificial Sequence
  Description of Artificial Sequence: Synthetic oligonucleotide
ccugaacccacagcagguc

SEQ ID NO: 3117132 - RNA, 19 nt, Artificial Sequence
  Description of Artificial Sequence: Synthetic oligonucleotide
gccaucagugcaacuguaa

SEQ ID NO: 3117133 - RNA, 19 nt, Artificial Sequence
  Description of Artificial Sequence: Synthetic oligonucleotide
gugggguaggacugagcau

SEQ ID NO: 3117134 - RNA, 19 nt, Artificial Sequence
  Description of Artificial Sequence: Synthetic oligonucleotide
gcgagucuccugaacccac

SEQ ID NO: 3117135 - RNA, 19 nt, Artificial Sequence
  Description of Artificial Sequence: Synthetic oligonucleotide
ccaucagugcaacuguaau

SEQ ID NO: 3117136 - RNA, 19 nt, Artificial Sequence
  Description of Artificial Sequence: Synthetic oligonucleotide
gccugaauaacaagcucau

SEQ ID NO: 3117137 - RNA, 19 nt, Artificial Sequence
  Description of Artificial Sequence: Synthetic oligonucleotide
gggguaggacugagcauga

SEQ ID NO: 3117138 - RNA, 19 nt, Artificial Sequence
  Description of Artificial Sequence: Synthetic oligonucleotide
cugagcagauggccugaau

SEQ ID NO: 3117139 - RNA, 19 nt, Artificial Sequence
  Description of Artificial Sequence: Synthetic oligonucleotide
gcucaucugugggguagga

SEQ ID NO: 3117140 - RNA, 19 nt, Artificial Sequence
  Description of Artificial Sequence: Synthetic oligonucleotide
gcaagccaucagugcaacu

SEQ ID NO: 3117141 - RNA, 19 nt, Artificial Sequence
  Description of Artificial Sequence: Synthetic oligonucleotide
gcaaaucaacuguguucuu

SEQ ID NO: 3117142 - RNA, 19 nt, Artificial Sequence
  Description of Artificial Sequence: Synthetic oligonucleotide
gcugagcagauggccugaa

SEQ ID NO: 3117143 - RNA, 19 nt, Artificial Sequence
  Description of Artificial Sequence: Synthetic oligonucleotide
ggguaggacugagcaugaa

SEQ ID NO: 3117144 - RNA, 19 nt, Artificial Sequence
  Description of Artificial Sequence: Synthetic oligonucleotide
ggacuggugcugagcagau

SEQ ID NO: 3117145 - RNA, 19 nt, Artificial Sequence
  Description of Artificial Sequence: Synthetic oligonucleotide
aauaagacuagcuucucgc

SEQ ID NO: 3117146 - RNA, 19 nt, Artificial Sequence
  Description of Artificial Sequence: Synthetic oligonucleotide
aaaaucauaauucucuugu

SEQ ID NO: 3117147 - RNA, 19 nt, Artificial Sequence
  Description of Artificial Sequence: Synthetic oligonucleotide
caucauuuaaguuuggugg

SEQ ID NO: 3117148 - RNA, 19 nt, Artificial Sequence
  Description of Artificial Sequence: Synthetic oligonucleotide
uauaguaggacgaaaagcu

SEQ ID NO: 3117149 - RNA, 19 nt, Artificial Sequence
  Description of Artificial Sequence: Synthetic oligonucleotide
uucaaaaucauaauucucu

SEQ ID NO: 3117150 - RNA, 19 nt, Artificial Sequence
  Description of Artificial Sequence: Synthetic oligonucleotide
uuugcuucauuuauuuugg

SEQ ID NO: 3117151 - RNA, 19 nt, Artificial Sequence
  Description of Artificial Sequence: Synthetic oligonucleotide
uaaaauaagacuagcuucu

SEQ ID NO: 3117152 - RNA, 19 nt, Artificial Sequence
  Description of Artificial Sequence: Synthetic oligonucleotide
uuacaaaccuaaaauaaga

SEQ ID NO: 3117153 - RNA, 19 nt, Artificial Sequence
  Description of Artificial Sequence: Synthetic oligonucleotide
cuaaaauaagacuagcuuc

SEQ ID NO: 3117154 - RNA, 19 nt, Artificial Sequence
  Description of Artificial Sequence: Synthetic oligonucleotide
uuuauaguaggacgaaaag

SEQ ID NO: 3117155 - RNA, 19 nt, Artificial Sequence
  Description of Artificial Sequence: Synthetic oligonucleotide
aaauaagacuagcuucucg

SEQ ID NO: 3117156 - RNA, 19 nt, Artificial Sequence
  Description of Artificial Sequence: Synthetic oligonucleotide
agcagaugggcuuacaaac

SEQ ID NO: 3117157 - RNA, 19 nt, Artificial Sequence
  Description of Artificial Sequence: Synthetic oligonucleotide
aaucauaauucucuugugu

SEQ ID NO: 3117158 - RNA, 19 nt, Artificial Sequence
  Description of Artificial Sequence: Synthetic oligonucleotide
uuuuggaugcuaaguaagg

SEQ ID NO: 3117159 - RNA, 19 nt, Artificial Sequence
  Description of Artificial Sequence: Synthetic oligonucleotide
cucaaauccuccuuuauag

SEQ ID NO: 3117160 - RNA, 19 nt, Artificial Sequence
  Description of Artificial Sequence: Synthetic oligonucleotide
cuuacaaaccuaaaauaag

SEQ ID NO: 3117161 - RNA, 19 nt, Artificial Sequence
  Description of Artificial Sequence: Synthetic oligonucleotide
ucagcaucauuuaaguuug

SEQ ID NO: 3117162 - RNA, 19 nt, Artificial Sequence
  Description of Artificial Sequence: Synthetic oligonucleotide
ugguucaaaaucauaauuc

SEQ ID NO: 3117163 - RNA, 19 nt, Artificial Sequence
  Description of Artificial Sequence: Synthetic oligonucleotide
augcuaaguaaggagaucc

SEQ ID NO: 3117164 - RNA, 19 nt, Artificial Sequence
  Description of Artificial Sequence: Synthetic oligonucleotide
cuaaucuuggccuugccag

SEQ ID NO: 3117165 - RNA, 19 nt, Artificial Sequence
  Description of Artificial Sequence: Synthetic oligonucleotide
uucagcaucauuuaaguuu

SEQ ID NO: 3117166 - RNA, 19 nt, Artificial Sequence
  Description of Artificial Sequence: Synthetic oligonucleotide
ucuggaugguucaaaauca

SEQ ID NO: 3117167 - RNA, 19 nt, Artificial Sequence
  Description of Artificial Sequence: Synthetic oligonucleotide
ugugcuguucuaaucuugg

SEQ ID NO: 3117168 - RNA, 19 nt, Artificial Sequence
  Description of Artificial Sequence: Synthetic oligonucleotide
uuauaguaggacgaaaagc

SEQ ID NO: 3117169 - RNA, 19 nt, Artificial Sequence
  Description of Artificial Sequence: Synthetic oligonucleotide
aauccuccuuuauaguagg

SEQ ID NO: 3117170 - RNA, 19 nt, Artificial Sequence
  Description of Artificial Sequence: Synthetic oligonucleotide
aucauaauucucuugugug

SEQ ID NO: 3117171 - RNA, 19 nt, Artificial Sequence
  Description of Artificial Sequence: Synthetic oligonucleotide
agugaagucccuuucagca

SEQ ID NO: 3117172 - RNA, 19 nt, Artificial Sequence
  Description of Artificial Sequence: Synthetic oligonucleotide
auaagacuagcuucucgcc

SEQ ID NO: 3117173 - RNA, 19 nt, Artificial Sequence
  Description of Artificial Sequence: Synthetic oligonucleotide
uuuauuuuggaugcuaagu

SEQ ID NO: 3117174 - RNA, 19 nt, Artificial Sequence
  Description of Artificial Sequence: Synthetic oligonucleotide
uaaguaaggagauccaccu

SEQ ID NO: 3117175 - RNA, 19 nt, Artificial Sequence
  Description of Artificial Sequence: Synthetic oligonucleotide
uuauuuuggaugcuaagua

SEQ ID NO: 3117176 - RNA, 19 nt, Artificial Sequence
  Description of Artificial Sequence: Synthetic oligonucleotide
auucuagcaaguccuuugc

SEQ ID NO: 3117177 - RNA, 19 nt, Artificial Sequence
  Description of Artificial Sequence: Synthetic oligonucleotide
aaccuaaaauaagacuagc

SEQ ID NO: 3117178 - RNA, 19 nt, Artificial Sequence
  Description of Artificial Sequence: Synthetic oligonucleotide
uacaaaccuaaaauaagac

SEQ ID NO: 3117179 - RNA, 19 nt, Artificial Sequence
  Description of Artificial Sequence: Synthetic oligonucleotide
cuaaguaaggagauccacc

SEQ ID NO: 3117180 - RNA, 19 nt, Artificial Sequence
  Description of Artificial Sequence: Synthetic oligonucleotide
uuggaugcuaaguaaggag

SEQ ID NO: 3117181 - RNA, 19 nt, Artificial Sequence
  Description of Artificial Sequence: Synthetic oligonucleotide
acaaaccuaaaauaagacu

SEQ ID NO: 3117182 - RNA, 19 nt, Artificial Sequence
  Description of Artificial Sequence: Synthetic oligonucleotide
ucauaauucucuugugugc

SEQ ID NO: 3117183 - RNA, 19 nt, Artificial Sequence
  Description of Artificial Sequence: Synthetic oligonucleotide
caaaccuaaaauaagacua

SEQ ID NO: 3117184 - RNA, 19 nt, Artificial Sequence
  Description of Artificial Sequence: Synthetic oligonucleotide
aaaucauaauucucuugug

SEQ ID NO: 3117185 - RNA, 19 nt, Artificial Sequence
  Description of Artificial Sequence: Synthetic oligonucleotide
uuuugaggagugaaguccc

SEQ ID NO: 3117186 - RNA, 19 nt, Artificial Sequence
  Description of Artificial Sequence: Synthetic oligonucleotide
ugcuguucuaaucuuggcc

SEQ ID NO: 3117187 - RNA, 19 nt, Artificial Sequence
  Description of Artificial Sequence: Synthetic oligonucleotide
gauucuagcaaguccuuug

SEQ ID NO: 3117188 - RNA, 19 nt, Artificial Sequence
  Description of Artificial Sequence: Synthetic oligonucleotide
aaaccuaaaauaagacuag

SEQ ID NO: 3117189 - RNA, 19 nt, Artificial Sequence
  Description of Artificial Sequence: Synthetic oligonucleotide
auuuauuuuggaugcuaag

SEQ ID NO: 3117190 - RNA, 19 nt, Artificial Sequence
  Description of Artificial Sequence: Synthetic oligonucleotide
aaauccuccuuuauaguag

SEQ ID NO: 3117191 - RNA, 19 nt, Artificial Sequence
  Description of Artificial Sequence: Synthetic oligonucleotide
uugugugcuguucuaaucu

SEQ ID NO: 3117192 - RNA, 19 nt, Artificial Sequence
  Description of Artificial Sequence: Synthetic oligonucleotide
ucuaaucuuggccuugcca

SEQ ID NO: 3117193 - RNA, 19 nt, Artificial Sequence
  Description of Artificial Sequence: Synthetic oligonucleotide
uauuuuggaugcuaaguaa

SEQ ID NO: 3117194 - RNA, 19 nt, Artificial Sequence
  Description of Artificial Sequence: Synthetic oligonucleotide
aaaauaagacuagcuucuc

SEQ ID NO: 3117195 - RNA, 19 nt, Artificial Sequence
  Description of Artificial Sequence: Synthetic oligonucleotide
aucauuuaaguuuggugga

SEQ ID NO: 3117196 - RNA, 19 nt, Artificial Sequence
  Description of Artificial Sequence: Synthetic oligonucleotide
auuuuggaugcuaaguaag

SEQ ID NO: 3117197 - RNA, 19 nt, Artificial Sequence
  Description of Artificial Sequence: Synthetic oligonucleotide
caaaaucauaauucucuug

SEQ ID NO: 3117198 - RNA, 19 nt, Artificial Sequence
  Description of Artificial Sequence: Synthetic oligonucleotide
aguaaggagauccaccuuu

SEQ ID NO: 3117199 - RNA, 19 nt, Artificial Sequence
  Description of Artificial Sequence: Synthetic oligonucleotide
ugggcuuacaaaccuaaaa

SEQ ID NO: 3117200 - RNA, 19 nt, Artificial Sequence
  Description of Artificial Sequence: Synthetic oligonucleotide
uaagacuagcuucucgccu

SEQ ID NO: 3117201 - RNA, 19 nt, Artificial Sequence
  Description of Artificial Sequence: Synthetic oligonucleotide
gucuggaugguucaaaauc

SEQ ID NO: 3117202 - RNA, 19 nt, Artificial Sequence
  Description of Artificial Sequence: Synthetic oligonucleotide
uaaguuugguggacgauuc

SEQ ID NO: 3117203 - RNA, 19 nt, Artificial Sequence
  Description of Artificial Sequence: Synthetic oligonucleotide
acuagcuucucgccuacuc

SEQ ID NO: 3117204 - RNA, 19 nt, Artificial Sequence
  Description of Artificial Sequence: Synthetic oligonucleotide
cuagcaaguccuuugcuuc

SEQ ID NO: 3117205 - RNA, 19 nt, Artificial Sequence
  Description of Artificial Sequence: Synthetic oligonucleotide
auuuaaguuugguggacga

SEQ ID NO: 3117206 - RNA, 19 nt, Artificial Sequence
  Description of Artificial Sequence: Synthetic oligonucleotide
cuuuauaguaggacgaaaa

SEQ ID NO: 3117207 - RNA, 19 nt, Artificial Sequence
  Description of Artificial Sequence: Synthetic oligonucleotide
augguucaaaaucauaauu

SEQ ID NO: 3117208 - RNA, 19 nt, Artificial Sequence
  Description of Artificial Sequence: Synthetic oligonucleotide
uuuggaugcuaaguaagga

SEQ ID NO: 3117209 - RNA, 19 nt, Artificial Sequence
  Description of Artificial Sequence: Synthetic oligonucleotide
uuugcucaaauccuccuuu

SEQ ID NO: 3117210 - RNA, 19 nt, Artificial Sequence
  Description of Artificial Sequence: Synthetic oligonucleotide
uucucuugugugcuguucu

SEQ ID NO: 3117211 - RNA, 19 nt, Artificial Sequence
  Description of Artificial Sequence: Synthetic oligonucleotide
uugguggacgauucuagca

SEQ ID NO: 3117212 - RNA, 19 nt, Artificial Sequence
  Description of Artificial Sequence: Synthetic oligonucleotide
ugaagucccuuucagcauc

SEQ ID NO: 3117213 - RNA, 19 nt, Artificial Sequence
  Description of Artificial Sequence: Synthetic oligonucleotide
cauuuaaguuugguggacg

SEQ ID NO: 3117214 - RNA, 19 nt, Artificial Sequence
  Description of Artificial Sequence: Synthetic oligonucleotide
aguccuuugcuucauuuau

SEQ ID NO: 3117215 - RNA, 19 nt, Artificial Sequence
  Description of Artificial Sequence: Synthetic oligonucleotide
ucuagcaaguccuuugcuu

SEQ ID NO: 3117216 - RNA, 19 nt, Artificial Sequence
  Description of Artificial Sequence: Synthetic oligonucleotide
ugguggacgauucuagcaa

SEQ ID NO: 3117217 - RNA, 19 nt, Artificial Sequence
  Description of Artificial Sequence: Synthetic oligonucleotide
aagacuagcuucucgccua

SEQ ID NO: 3117218 - RNA, 19 nt, Artificial Sequence
  Description of Artificial Sequence: Synthetic oligonucleotide
ucaaauccuccuuuauagu

SEQ ID NO: 3117219 - RNA, 19 nt, Artificial Sequence
  Description of Artificial Sequence: Synthetic oligonucleotide
uuaaguuugguggacgauu

SEQ ID NO: 3117220 - RNA, 19 nt, Artificial Sequence
  Description of Artificial Sequence: Synthetic oligonucleotide
ccuccuuuauaguaggacg

SEQ ID NO: 3117221 - RNA, 19 nt, Artificial Sequence
  Description of Artificial Sequence: Synthetic oligonucleotide
uaaucuuggccuugccagc

SEQ ID NO: 3117222 - RNA, 19 nt, Artificial Sequence
  Description of Artificial Sequence: Synthetic oligonucleotide
gcaucauuuaaguuuggug

SEQ ID NO: 3117223 - RNA, 19 nt, Artificial Sequence
  Description of Artificial Sequence: Synthetic oligonucleotide
gagugaagucccuuucagc

SEQ ID NO: 3117224 - RNA, 19 nt, Artificial Sequence
  Description of Artificial Sequence: Synthetic oligonucleotide
uuuugcucaaauccuccuu

SEQ ID NO: 3117225 - RNA, 19 nt, Artificial Sequence
  Description of Artificial Sequence: Synthetic oligonucleotide
auaauucucuugugugcug

SEQ ID NO: 3117226 - RNA, 19 nt, Artificial Sequence
  Description of Artificial Sequence: Synthetic oligonucleotide
guuugguggacgauucuag

SEQ ID NO: 3117227 - RNA, 19 nt, Artificial Sequence
  Description of Artificial Sequence: Synthetic oligonucleotide
ucauuuauuuuggaugcua

SEQ ID NO: 3117228 - RNA, 19 nt, Artificial Sequence
  Description of Artificial Sequence: Synthetic oligonucleotide
cuugugugcuguucuaauc

SEQ ID NO: 3117229 - RNA, 19 nt, Artificial Sequence
  Description of Artificial Sequence: Synthetic oligonucleotide
accuuugucuggaugguuc

SEQ ID NO: 3117230 - RNA, 19 nt, Artificial Sequence
  Description of Artificial Sequence: Synthetic oligonucleotide
ccuuucagcaucauuuaag

SEQ ID NO: 3117231 - RNA, 19 nt, Artificial Sequence
  Description of Artificial Sequence: Synthetic oligonucleotide
ucauuuaaguuugguggac

SEQ ID NO: 3117232 - RNA, 19 nt, Artificial Sequence
  Description of Artificial Sequence: Synthetic oligonucleotide
accuaaaauaagacuagcu

SEQ ID NO: 3117233 - RNA, 19 nt, Artificial Sequence
  Description of Artificial Sequence: Synthetic oligonucleotide
uccuccuuuauaguaggac

SEQ ID NO: 3117234 - RNA, 19 nt, Artificial Sequence
  Description of Artificial Sequence: Synthetic oligonucleotide
uugucuggaugguucaaaa

SEQ ID NO: 3117235 - RNA, 19 nt, Artificial Sequence
  Description of Artificial Sequence: Synthetic oligonucleotide
aaucuuggccuugccagca

SEQ ID NO: 3117236 - RNA, 19 nt, Artificial Sequence
  Description of Artificial Sequence: Synthetic oligonucleotide
uucuagcaaguccuuugcu

SEQ ID NO: 3117237 - RNA, 19 nt, Artificial Sequence
  Description of Artificial Sequence: Synthetic oligonucleotide
gacgauucuagcaaguccu

SEQ ID NO: 3117238 - RNA, 19 nt, Artificial Sequence
  Description of Artificial Sequence: Synthetic oligonucleotide
ucuugugugcuguucuaau

SEQ ID NO: 3117239 - RNA, 19 nt, Artificial Sequence
  Description of Artificial Sequence: Synthetic oligonucleotide
caaauccuccuuuauagua

SEQ ID NO: 3117240 - RNA, 19 nt, Artificial Sequence
  Description of Artificial Sequence: Synthetic oligonucleotide
cauuuauuuuggaugcuaa

SEQ ID NO: 3117241 - RNA, 19 nt, Artificial Sequence
  Description of Artificial Sequence: Synthetic oligonucleotide
uguucuaaucuuggccuug

SEQ ID NO: 3117242 - RNA, 19 nt, Artificial Sequence
  Description of Artificial Sequence: Synthetic oligonucleotide
aaguuugguggacgauucu

SEQ ID NO: 3117243 - RNA, 19 nt, Artificial Sequence
  Description of Artificial Sequence: Synthetic oligonucleotide
ggaugguucaaaaucauaa

SEQ ID NO: 3117244 - RNA, 19 nt, Artificial Sequence
  Description of Artificial Sequence: Synthetic oligonucleotide
gagauccaccuuugucugg

SEQ ID NO: 3117245 - RNA, 19 nt, Artificial Sequence
  Description of Artificial Sequence: Synthetic oligonucleotide
gguucaaaaucauaauucu

SEQ ID NO: 3117246 - RNA, 19 nt, Artificial Sequence
  Description of Artificial Sequence: Synthetic oligonucleotide
uggaugguucaaaaucaua

SEQ ID NO: 3117247 - RNA, 19 nt, Artificial Sequence
  Description of Artificial Sequence: Synthetic oligonucleotide
agacuagcuucucgccuac

SEQ ID NO: 3117248 - RNA, 19 nt, Artificial Sequence
  Description of Artificial Sequence: Synthetic oligonucleotide
uucuaaucuuggccuugcc

SEQ ID NO: 3117249 - RNA, 19 nt, Artificial Sequence
  Description of Artificial Sequence: Synthetic oligonucleotide
uaaggagauccaccuuugu

SEQ ID NO: 3117250 - RNA, 19 nt, Artificial Sequence
  Description of Artificial Sequence: Synthetic oligonucleotide
aggagugaagucccuuuca

SEQ ID NO: 3117251 - RNA, 19 nt, Artificial Sequence
  Description of Artificial Sequence: Synthetic oligonucleotide
gaugguucaaaaucauaau

SEQ ID NO: 3117252 - RNA, 19 nt, Artificial Sequence
  Description of Artificial Sequence: Synthetic oligonucleotide
ggagugaagucccuuucag

SEQ ID NO: 3117253 - RNA, 19 nt, Artificial Sequence
  Description of Artificial Sequence: Synthetic oligonucleotide
ggacgauucuagcaagucc

SEQ ID NO: 3117254 - RNA, 19 nt, Artificial Sequence
  Description of Artificial Sequence: Synthetic oligonucleotide
auucucuugugugcuguuc

SEQ ID NO: 3117255 - RNA, 19 nt, Artificial Sequence
  Description of Artificial Sequence: Synthetic oligonucleotide
uuugaggagugaagucccu

SEQ ID NO: 3117256 - RNA, 19 nt, Artificial Sequence
  Description of Artificial Sequence: Synthetic oligonucleotide
gcuuacaaaccuaaaauaa

SEQ ID NO: 3117257 - RNA, 19 nt, Artificial Sequence
  Description of Artificial Sequence: Synthetic oligonucleotide
ugaggagugaagucccuuu

SEQ ID NO: 3117258 - RNA, 19 nt, Artificial Sequence
  Description of Artificial Sequence: Synthetic oligonucleotide
uuugucuggaugguucaaa

SEQ ID NO: 3117259 - RNA, 19 nt, Artificial Sequence
  Description of Artificial Sequence: Synthetic oligonucleotide
ugucuggaugguucaaaau

SEQ ID NO: 3117260 - RNA, 19 nt, Artificial Sequence
  Description of Artificial Sequence: Synthetic oligonucleotide
ugcucaaauccuccuuuau

SEQ ID NO: 3117261 - RNA, 19 nt, Artificial Sequence
  Description of Artificial Sequence: Synthetic oligonucleotide
uuuaaguuugguggacgau

SEQ ID NO: 3117262 - RNA, 19 nt, Artificial Sequence
  Description of Artificial Sequence: Synthetic oligonucleotide
aaguaaggagauccaccuu

SEQ ID NO: 3117263 - RNA, 19 nt, Artificial Sequence
  Description of Artificial Sequence: Synthetic oligonucleotide
uagcuucucgccuacucau

SEQ ID NO: 3117264 - RNA, 19 nt, Artificial Sequence
  Description of Artificial Sequence: Synthetic oligonucleotide
gaugcuaaguaaggagauc

SEQ ID NO: 3117265 - RNA, 19 nt, Artificial Sequence
  Description of Artificial Sequence: Synthetic oligonucleotide
aauucucuugugugcuguu

SEQ ID NO: 3117266 - RNA, 19 nt, Artificial Sequence
  Description of Artificial Sequence: Synthetic oligonucleotide
gaggagugaagucccuuuc

SEQ ID NO: 3117267 - RNA, 19 nt, Artificial Sequence
  Description of Artificial Sequence: Synthetic oligonucleotide
uucauuuauuuuggaugcu

SEQ ID NO: 3117268 - RNA, 19 nt, Artificial Sequence
  Description of Artificial Sequence: Synthetic oligonucleotide
ucuuggccuugccagcaga

SEQ ID NO: 3117269 - RNA, 19 nt, Artificial Sequence
  Description of Artificial Sequence: Synthetic oligonucleotide
gaugggcuuacaaaccuaa

SEQ ID NO: 3117270 - RNA, 19 nt, Artificial Sequence
  Description of Artificial Sequence: Synthetic oligonucleotide
agcaucauuuaaguuuggu

SEQ ID NO: 3117271 - RNA, 19 nt, Artificial Sequence
  Description of Artificial Sequence: Synthetic oligonucleotide
ugugugcuguucuaaucuu

SEQ ID NO: 3117272 - RNA, 19 nt, Artificial Sequence
  Description of Artificial Sequence: Synthetic oligonucleotide
guaaggagauccaccuuug

SEQ ID NO: 3117273 - RNA, 19 nt, Artificial Sequence
  Description of Artificial Sequence: Synthetic oligonucleotide
uccuuuauaguaggacgaa

SEQ ID NO: 3117274 - RNA, 19 nt, Artificial Sequence
  Description of Artificial Sequence: Synthetic oligonucleotide
gguggacgauucuagcaag

SEQ ID NO: 3117275 - RNA, 19 nt, Artificial Sequence
  Description of Artificial Sequence: Synthetic oligonucleotide
ggcuuacaaaccuaaaaua

SEQ ID NO: 3117276 - RNA, 19 nt, Artificial Sequence
  Description of Artificial Sequence: Synthetic oligonucleotide
agauccaccuuugucugga

SEQ ID NO: 3117277 - RNA, 19 nt, Artificial Sequence
  Description of Artificial Sequence: Synthetic oligonucleotide
cuagcuucucgccuacuca

SEQ ID NO: 3117278 - RNA, 19 nt, Artificial Sequence
  Description of Artificial Sequence: Synthetic oligonucleotide
auccaccuuugucuggaug

SEQ ID NO: 3117279 - RNA, 19 nt, Artificial Sequence
  Description of Artificial Sequence: Synthetic oligonucleotide
guucuaaucuuggccuugc

SEQ ID NO: 3117280 - RNA, 19 nt, Artificial Sequence
  Description of Artificial Sequence: Synthetic oligonucleotide
uggacgauucuagcaaguc

SEQ ID NO: 3117281 - RNA, 19 nt, Artificial Sequence
  Description of Artificial Sequence: Synthetic oligonucleotide
ucccuuucagcaucauuua

SEQ ID NO: 3117282 - RNA, 19 nt, Artificial Sequence
  Description of Artificial Sequence: Synthetic oligonucleotide
gcuguucuaaucuuggccu

SEQ ID NO: 3117283 - RNA, 19 nt, Artificial Sequence
  Description of Artificial Sequence: Synthetic oligonucleotide
aguuugguggacgauucua

SEQ ID NO: 3117284 - RNA, 19 nt, Artificial Sequence
  Description of Artificial Sequence: Synthetic oligonucleotide
gugcuguucuaaucuuggc

SEQ ID NO: 3117285 - RNA, 19 nt, Artificial Sequence
  Description of Artificial Sequence: Synthetic oligonucleotide
uugcucaaauccuccuuua

SEQ ID NO: 3117286 - RNA, 19 nt, Artificial Sequence
  Description of Artificial Sequence: Synthetic oligonucleotide
cauaauucucuugugugcu

SEQ ID NO: 3117287 - RNA, 19 nt, Artificial Sequence
  Description of Artificial Sequence: Synthetic oligonucleotide
ucucuugugugcuguucua

SEQ ID NO: 3117288 - RNA, 19 nt, Artificial Sequence
  Description of Artificial Sequence: Synthetic oligonucleotide
gugugcuguucuaaucuug

SEQ ID NO: 3117289 - RNA, 19 nt, Artificial Sequence
  Description of Artificial Sequence: Synthetic oligonucleotide
gcuaaguaaggagauccac

SEQ ID NO: 3117290 - RNA, 19 nt, Artificial Sequence
  Description of Artificial Sequence: Synthetic oligonucleotide
aucuuggccuugccagcag

SEQ ID NO: 3117291 - RNA, 19 nt, Artificial Sequence
  Description of Artificial Sequence: Synthetic oligonucleotide
gggcuuacaaaccuaaaau

SEQ ID NO: 3117292 - RNA, 19 nt, Artificial Sequence
  Description of Artificial Sequence: Synthetic oligonucleotide
uuggccuugccagcagaug

SEQ ID NO: 3117293 - RNA, 19 nt, Artificial Sequence
  Description of Artificial Sequence: Synthetic oligonucleotide
cagcagaugggcuuacaaa

SEQ ID NO: 3117294 - RNA, 19 nt, Artificial Sequence
  Description of Artificial Sequence: Synthetic oligonucleotide
cagcaucauuuaaguuugg

SEQ ID NO: 3117295 - RNA, 19 nt, Artificial Sequence
  Description of Artificial Sequence: Synthetic oligonucleotide
gcagaugggcuuacaaacc

SEQ ID NO: 3117296 - RNA, 19 nt, Artificial Sequence
  Description of Artificial Sequence: Synthetic oligonucleotide
agucccuuucagcaucauu

SEQ ID NO: 3117297 - RNA, 19 nt, Artificial Sequence
  Description of Artificial Sequence: Synthetic oligonucleotide
ccuaaaauaagacuagcuu

SEQ ID NO: 3117298 - RNA, 19 nt, Artificial Sequence
  Description of Artificial Sequence: Synthetic oligonucleotide
gaagucccuuucagcauca

SEQ ID NO: 3117299 - RNA, 19 nt, Artificial Sequence
  Description of Artificial Sequence: Synthetic oligonucleotide
uugaggagugaagucccuu

SEQ ID NO: 3117300 - RNA, 19 nt, Artificial Sequence
  Description of Artificial Sequence: Synthetic oligonucleotide
cagaugggcuuacaaaccu

SEQ ID NO: 3117301 - RNA, 19 nt, Artificial Sequence
  Description of Artificial Sequence: Synthetic oligonucleotide
gcucaaauccuccuuuaua

SEQ ID NO: 3117302 - RNA, 19 nt, Artificial Sequence
  Description of Artificial Sequence: Synthetic oligonucleotide
cuugccagcagaugggcuu

SEQ ID NO: 3117303 - RNA, 19 nt, Artificial Sequence
  Description of Artificial Sequence: Synthetic oligonucleotide
uugccagcagaugggcuua

SEQ ID NO: 3117304 - RNA, 19 nt, Artificial Sequence
  Description of Artificial Sequence: Synthetic oligonucleotide
caaguccuuugcuucauuu

SEQ ID NO: 3117305 - RNA, 19 nt, Artificial Sequence
  Description of Artificial Sequence: Synthetic oligonucleotide
agaugggcuuacaaaccua

SEQ ID NO: 3117306 - RNA, 19 nt, Artificial Sequence
  Description of Artificial Sequence: Synthetic oligonucleotide
gugaagucccuuucagcau

SEQ ID NO: 3117307 - RNA, 19 nt, Artificial Sequence
  Description of Artificial Sequence: Synthetic oligonucleotide
cuggaugguucaaaaucau

SEQ ID NO: 3117308 - RNA, 19 nt, Artificial Sequence
  Description of Artificial Sequence: Synthetic oligonucleotide
cucuugugugcuguucuaa

SEQ ID NO: 3117309 - RNA, 19 nt, Artificial Sequence
  Description of Artificial Sequence: Synthetic oligonucleotide
ccuuugucuggaugguuca

SEQ ID NO: 3117310 - RNA, 19 nt, Artificial Sequence
  Description of Artificial Sequence: Synthetic oligonucleotide
auccuccuuuauaguagga

SEQ ID NO: 3117311 - RNA, 19 nt, Artificial Sequence
  Description of Artificial Sequence: Synthetic oligonucleotide
aagucccuuucagcaucau

SEQ ID NO: 3117312 - RNA, 19 nt, Artificial Sequence
  Description of Artificial Sequence: Synthetic oligonucleotide
acgauucuagcaaguccuu

SEQ ID NO: 3117313 - RNA, 19 nt, Artificial Sequence
  Description of Artificial Sequence: Synthetic oligonucleotide
ggaugcuaaguaaggagau

SEQ ID NO: 3117314 - RNA, 19 nt, Artificial Sequence
  Description of Artificial Sequence: Synthetic oligonucleotide
cuuggccuugccagcagau

SEQ ID NO: 3117315 - RNA, 19 nt, Artificial Sequence
  Description of Artificial Sequence: Synthetic oligonucleotide
ccagcagaugggcuuacaa

SEQ ID NO: 3117316 - RNA, 19 nt, Artificial Sequence
  Description of Artificial Sequence: Synthetic oligonucleotide
guggacgauucuagcaagu

SEQ ID NO: 3117317 - RNA, 19 nt, Artificial Sequence
  Description of Artificial Sequence: Synthetic oligonucleotide
gccuugccagcagaugggc

SEQ ID NO: 3117318 - RNA, 19 nt, Artificial Sequence
  Description of Artificial Sequence: Synthetic oligonucleotide
cuguucuaaucuuggccuu

SEQ ID NO: 3117319 - RNA, 19 nt, Artificial Sequence
  Description of Artificial Sequence: Synthetic oligonucleotide
ugccagcagaugggcuuac

SEQ ID NO: 3117320 - RNA, 19 nt, Artificial Sequence
  Description of Artificial Sequence: Synthetic oligonucleotide
agcuucucgccuacucauu

SEQ ID NO: 3117321 - RNA, 19 nt, Artificial Sequence
  Description of Artificial Sequence: Synthetic oligonucleotide
ccuuuauaguaggacgaaa

SEQ ID NO: 3117322 - RNA, 19 nt, Artificial Sequence
  Description of Artificial Sequence: Synthetic oligonucleotide
cuucucgccuacucauuuu

SEQ ID NO: 3117323 - RNA, 19 nt, Artificial Sequence
  Description of Artificial Sequence: Synthetic oligonucleotide
gauccaccuuugucuggau

SEQ ID NO: 3117324 - RNA, 19 nt, Artificial Sequence
  Description of Artificial Sequence: Synthetic oligonucleotide
gcuucucgccuacucauuu

SEQ ID NO: 3117325 - RNA, 19 nt, Artificial Sequence
  Description of Artificial Sequence: Synthetic oligonucleotide
cccuuucagcaucauuuaa

SEQ ID NO: 3117326 - RNA, 19 nt, Artificial Sequence
  Description of Artificial Sequence: Synthetic oligonucleotide
gacuagcuucucgccuacu

SEQ ID NO: 3117327 - RNA, 19 nt, Artificial Sequence
  Description of Artificial Sequence: Synthetic oligonucleotide
ccuugccagcagaugggcu

SEQ ID NO: 3117328 - RNA, 19 nt, Artificial Sequence
  Description of Artificial Sequence: Synthetic oligonucleotide
gccagcagaugggcuuaca

SEQ ID NO: 3117329 - RNA, 19 nt, Artificial Sequence
  Description of Artificial Sequence: Synthetic oligonucleotide
gcaaguccuuugcuucauu

SEQ ID NO: 3117330 - RNA, 19 nt, Artificial Sequence
  Description of Artificial Sequence: Synthetic oligonucleotide
caccuuugucuggaugguu

SEQ ID NO: 3117331 - RNA, 19 nt, Artificial Sequence
  Description of Artificial Sequence: Synthetic oligonucleotide
ccaccuuugucuggauggu

SEQ ID NO: 3117332 - RNA, 19 nt, Artificial Sequence
  Description of Artificial Sequence: Synthetic oligonucleotide
cgauucuagcaaguccuuu

SEQ ID NO: 3117333 - RNA, 19 nt, Artificial Sequence
  Description of Artificial Sequence: Synthetic oligonucleotide
aauuacaaugcacacaagu

SEQ ID NO: 3117334 - RNA, 19 nt, Artificial Sequence
  Description of Artificial Sequence: Synthetic oligonucleotide
aagagaaacauaucucugg

SEQ ID NO: 3117335 - RNA, 19 nt, Artificial Sequence
  Description of Artificial Sequence: Synthetic oligonucleotide
aaaaucuguauccuucuuc

SEQ ID NO: 3117336 - RNA, 19 nt, Artificial Sequence
  Description of Artificial Sequence: Synthetic oligonucleotide
aaagcaauggcuccauuuc

SEQ ID NO: 3117337 - RNA, 19 nt, Artificial Sequence
  Description of Artificial Sequence: Synthetic oligonucleotide
ugugcaagaauuacaaugc

SEQ ID NO: 3117338 - RNA, 19 nt, Artificial Sequence
  Description of Artificial Sequence: Synthetic oligonucleotide
ugaaaauccgcacaggaga

SEQ ID NO: 3117339 - RNA, 19 nt, Artificial Sequence
  Description of Artificial Sequence: Synthetic oligonucleotide
agaaacauaucucuggcag

SEQ ID NO: 3117340 - RNA, 19 nt, Artificial Sequence
  Description of Artificial Sequence: Synthetic oligonucleotide
ucucaagagaaacauaucu

SEQ ID NO: 3117341 - RNA, 19 nt, Artificial Sequence
  Description of Artificial Sequence: Synthetic oligonucleotide
uuacaaugcacacaagugc

SEQ ID NO: 3117342 - RNA, 19 nt, Artificial Sequence
  Description of Artificial Sequence: Synthetic oligonucleotide
agagaaacauaucucuggc

SEQ ID NO: 3117343 - RNA, 19 nt, Artificial Sequence
  Description of Artificial Sequence: Synthetic oligonucleotide
aggauuauuuuguuggugg

SEQ ID NO: 3117344 - RNA, 19 nt, Artificial Sequence
  Description of Artificial Sequence: Synthetic oligonucleotide
aaaucuguauccuucuucu

SEQ ID NO: 3117345 - RNA, 19 nt, Artificial Sequence
  Description of Artificial Sequence: Synthetic oligonucleotide
uuuguugguggaauguugg

SEQ ID NO: 3117346 - RNA, 19 nt, Artificial Sequence
  Description of Artificial Sequence: Synthetic oligonucleotide
ggaaggauuauuuuguugg

SEQ ID NO: 3117347 - RNA, 19 nt, Artificial Sequence
  Description of Artificial Sequence: Synthetic oligonucleotide
agaauuacaaugcacacaa

SEQ ID NO: 3117348 - RNA, 19 nt, Artificial Sequence
  Description of Artificial Sequence: Synthetic oligonucleotide
augugcaagaauuacaaug

SEQ ID NO: 3117349 - RNA, 19 nt, Artificial Sequence
  Description of Artificial Sequence: Synthetic oligonucleotide
ucaagagaaacauaucucu

SEQ ID NO: 3117350 - RNA, 19 nt, Artificial Sequence
  Description of Artificial Sequence: Synthetic oligonucleotide
aacaaaaucuguauccuuc

SEQ ID NO: 3117351 - RNA, 19 nt, Artificial Sequence
  Description of Artificial Sequence: Synthetic oligonucleotide
aagcaauggcuccauuucc

SEQ ID NO: 3117352 - RNA, 19 nt, Artificial Sequence
  Description of Artificial Sequence: Synthetic oligonucleotide
aauguuggugaaaauccgc

SEQ ID NO: 3117353 - RNA, 19 nt, Artificial Sequence
  Description of Artificial Sequence: Synthetic oligonucleotide
uuugcagagaaagcaaugg

SEQ ID NO: 3117354 - RNA, 19 nt, Artificial Sequence
  Description of Artificial Sequence: Synthetic oligonucleotide
uacaauggguccaggaagg

SEQ ID NO: 3117355 - RNA, 19 nt, Artificial Sequence
  Description of Artificial Sequence: Synthetic oligonucleotide
acauaucucuggcagaggg

SEQ ID NO: 3117356 - RNA, 19 nt, Artificial Sequence
  Description of Artificial Sequence: Synthetic oligonucleotide
aaacauaucucuggcagag

SEQ ID NO: 3117357 - RNA, 19 nt, Artificial Sequence
  Description of Artificial Sequence: Synthetic oligonucleotide
uuggugaaaauccgcacag

SEQ ID NO: 3117358 - RNA, 19 nt, Artificial Sequence
  Description of Artificial Sequence: Synthetic oligonucleotide
gauugcaggugcuacaaug

SEQ ID NO: 3117359 - RNA, 19 nt, Artificial Sequence
  Description of Artificial Sequence: Synthetic oligonucleotide
uccuucuucuguaggaagg

SEQ ID NO: 3117360 - RNA, 19 nt, Artificial Sequence
  Description of Artificial Sequence: Synthetic oligonucleotide
uguauccuucuucuguagg

SEQ ID NO: 3117361 - RNA, 19 nt, Artificial Sequence
  Description of Artificial Sequence: Synthetic oligonucleotide
uuuugcagagaaagcaaug

SEQ ID NO: 3117362 - RNA, 19 nt, Artificial Sequence
  Description of Artificial Sequence: Synthetic oligonucleotide
ucuucuguaggaaggauua

SEQ ID NO: 3117363 - RNA, 19 nt, Artificial Sequence
  Description of Artificial Sequence: Synthetic oligonucleotide
ugcaagaauuacaaugcac

SEQ ID NO: 3117364 - RNA, 19 nt, Artificial Sequence
  Description of Artificial Sequence: Synthetic oligonucleotide
aagaauuacaaugcacaca

SEQ ID NO: 3117365 - RNA, 19 nt, Artificial Sequence
  Description of Artificial Sequence: Synthetic oligonucleotide
agggaacaaaaucuguauc

SEQ ID NO: 3117366 - RNA, 19 nt, Artificial Sequence
  Description of Artificial Sequence: Synthetic oligonucleotide
uuuucgaccugucuuucca

SEQ ID NO: 3117367 - RNA, 19 nt, Artificial Sequence
  Description of Artificial Sequence: Synthetic oligonucleotide
cuacaauggguccaggaag

SEQ ID NO: 3117368 - RNA, 19 nt, Artificial Sequence
  Description of Artificial Sequence: Synthetic oligonucleotide
gggaacaaaaucuguaucc

SEQ ID NO: 3117369 - RNA, 19 nt, Artificial Sequence
  Description of Artificial Sequence: Synthetic oligonucleotide
gaauguuggugaaaauccg

SEQ ID NO: 3117370 - RNA, 19 nt, Artificial Sequence
  Description of Artificial Sequence: Synthetic oligonucleotide
ucuguaggaaggauuauuu

SEQ ID NO: 3117371 - RNA, 19 nt, Artificial Sequence
  Description of Artificial Sequence: Synthetic oligonucleotide
caagaauuacaaugcacac

SEQ ID NO: 3117372 - RNA, 19 nt, Artificial Sequence
  Description of Artificial Sequence: Synthetic oligonucleotide
uuauuuuguugguggaaug

SEQ ID NO: 3117373 - RNA, 19 nt, Artificial Sequence
  Description of Artificial Sequence: Synthetic oligonucleotide
cucaagagaaacauaucuc

SEQ ID NO: 3117374 - RNA, 19 nt, Artificial Sequence
  Description of Artificial Sequence: Synthetic oligonucleotide
uggaugugcaagaauuaca

SEQ ID NO: 3117375 - RNA, 19 nt, Artificial Sequence
  Description of Artificial Sequence: Synthetic oligonucleotide
acaggagacuguuuucgac

SEQ ID NO: 3117376 - RNA, 19 nt, Artificial Sequence
  Description of Artificial Sequence: Synthetic oligonucleotide
uuuccugccauccuuggau

SEQ ID NO: 3117377 - RNA, 19 nt, Artificial Sequence
  Description of Artificial Sequence: Synthetic oligonucleotide
auucucaagagaaacauau

SEQ ID NO: 3117378 - RNA, 19 nt, Artificial Sequence
  Description of Artificial Sequence: Synthetic oligonucleotide
ggaauguuggugaaaaucc

SEQ ID NO: 3117379 - RNA, 19 nt, Artificial Sequence
  Description of Artificial Sequence: Synthetic oligonucleotide
aaauccgcacaggagacug

SEQ ID NO: 3117380 - RNA, 19 nt, Artificial Sequence
  Description of Artificial Sequence: Synthetic oligonucleotide
uggaauguuggugaaaauc

SEQ ID NO: 3117381 - RNA, 19 nt, Artificial Sequence
  Description of Artificial Sequence: Synthetic oligonucleotide
ugauucucaagagaaacau

SEQ ID NO: 3117382 - RNA, 19 nt, Artificial Sequence
  Description of Artificial Sequence: Synthetic oligonucleotide
acuguuuucgaccugucuu

SEQ ID NO: 3117383 - RNA, 19 nt, Artificial Sequence
  Description of Artificial Sequence: Synthetic oligonucleotide
acaaaaucuguauccuucu

SEQ ID NO: 3117384 - RNA, 19 nt, Artificial Sequence
  Description of Artificial Sequence: Synthetic oligonucleotide
caagagaaacauaucucug

SEQ ID NO: 3117385 - RNA, 19 nt, Artificial Sequence
  Description of Artificial Sequence: Synthetic oligonucleotide
uugcaggugcuacaauggg

SEQ ID NO: 3117386 - RNA, 19 nt, Artificial Sequence
  Description of Artificial Sequence: Synthetic oligonucleotide
guugguggaauguugguga

SEQ ID NO: 3117387 - RNA, 19 nt, Artificial Sequence
  Description of Artificial Sequence: Synthetic oligonucleotide
agugcugauucucaagaga

SEQ ID NO: 3117388 - RNA, 19 nt, Artificial Sequence
  Description of Artificial Sequence: Synthetic oligonucleotide
caggagacuguuuucgacc

SEQ ID NO: 3117389 - RNA, 19 nt, Artificial Sequence
  Description of Artificial Sequence: Synthetic oligonucleotide
auugcaggugcuacaaugg

SEQ ID NO: 3117390 - RNA, 19 nt, Artificial Sequence
  Description of Artificial Sequence: Synthetic oligonucleotide
ugcacacaagugcugauuc

SEQ ID NO: 3117391 - RNA, 19 nt, Artificial Sequence
  Description of Artificial Sequence: Synthetic oligonucleotide
aggaaggauuauuuuguug

SEQ ID NO: 3117392 - RNA, 19 nt, Artificial Sequence
  Description of Artificial Sequence: Synthetic oligonucleotide
acaagugcugauucucaag

SEQ ID NO: 3117393 - RNA, 19 nt, Artificial Sequence
  Description of Artificial Sequence: Synthetic oligonucleotide
aaucuguauccuucuucug

SEQ ID NO: 3117394 - RNA, 19 nt, Artificial Sequence
  Description of Artificial Sequence: Synthetic oligonucleotide
auuauuuuguugguggaau

SEQ ID NO: 3117395 - RNA, 19 nt, Artificial Sequence
  Description of Artificial Sequence: Synthetic oligonucleotide
uguugguggaauguuggug

SEQ ID NO: 3117396 - RNA, 19 nt, Artificial Sequence
  Description of Artificial Sequence: Synthetic oligonucleotide
uggcagagggaacaaaauc

SEQ ID NO: 3117397 - RNA, 19 nt, Artificial Sequence
  Description of Artificial Sequence: Synthetic oligonucleotide
guugcacagcgauugcagg

SEQ ID NO: 3117398 - RNA, 19 nt, Artificial Sequence
  Description of Artificial Sequence: Synthetic oligonucleotide
guuggugaaaauccgcaca

SEQ ID NO: 3117399 - RNA, 19 nt, Artificial Sequence
  Description of Artificial Sequence: Synthetic oligonucleotide
gaaacauaucucuggcaga

SEQ ID NO: 3117400 - RNA, 19 nt, Artificial Sequence
  Description of Artificial Sequence: Synthetic oligonucleotide
ucuguauccuucuucugua

SEQ ID NO: 3117401 - RNA, 19 nt, Artificial Sequence
  Description of Artificial Sequence: Synthetic oligonucleotide
aauggguccaggaaggcuu

SEQ ID NO: 3117402 - RNA, 19 nt, Artificial Sequence
  Description of Artificial Sequence: Synthetic oligonucleotide
uuggaugugcaagaauuac

SEQ ID NO: 3117403 - RNA, 19 nt, Artificial Sequence
  Description of Artificial Sequence: Synthetic oligonucleotide
gaaaauccgcacaggagac

SEQ ID NO: 3117404 - RNA, 19 nt, Artificial Sequence
  Description of Artificial Sequence: Synthetic oligonucleotide
uucuucuguaggaaggauu

SEQ ID NO: 3117405 - RNA, 19 nt, Artificial Sequence
  Description of Artificial Sequence: Synthetic oligonucleotide
ugcaggugcuacaaugggu

SEQ ID NO: 3117406 - RNA, 19 nt, Artificial Sequence
  Description of Artificial Sequence: Synthetic oligonucleotide
uccaggaaggcuucacaca

SEQ ID NO: 3117407 - RNA, 19 nt, Artificial Sequence
  Description of Artificial Sequence: Synthetic oligonucleotide
uucucaagagaaacauauc

SEQ ID NO: 3117408 - RNA, 19 nt, Artificial Sequence
  Description of Artificial Sequence: Synthetic oligonucleotide
gcaagaauuacaaugcaca

SEQ ID NO: 3117409 - RNA, 19 nt, Artificial Sequence
  Description of Artificial Sequence: Synthetic oligonucleotide
gugaaaauccgcacaggag

SEQ ID NO: 3117410 - RNA, 19 nt, Artificial Sequence
  Description of Artificial Sequence: Synthetic oligonucleotide
aggagacuguuuucgaccu

SEQ ID NO: 3117411 - RNA, 19 nt, Artificial Sequence
  Description of Artificial Sequence: Synthetic oligonucleotide
aacauaucucuggcagagg

SEQ ID NO: 3117412 - RNA, 19 nt, Artificial Sequence
  Description of Artificial Sequence: Synthetic oligonucleotide
ugcuacaauggguccagga

SEQ ID NO: 3117413 - RNA, 19 nt, Artificial Sequence
  Description of Artificial Sequence: Synthetic oligonucleotide
gagaaacauaucucuggca

SEQ ID NO: 3117414 - RNA, 19 nt, Artificial Sequence
  Description of Artificial Sequence: Synthetic oligonucleotide
auccuucuucuguaggaag

SEQ ID NO: 3117415 - RNA, 19 nt, Artificial Sequence
  Description of Artificial Sequence: Synthetic oligonucleotide
guauccuucuucuguagga

SEQ ID NO: 3117416 - RNA, 19 nt, Artificial Sequence
  Description of Artificial Sequence: Synthetic oligonucleotide
aaugcacacaagugcugau

SEQ ID NO: 3117417 - RNA, 19 nt, Artificial Sequence
  Description of Artificial Sequence: Synthetic oligonucleotide
uccauuuccugccauccuu

SEQ ID NO: 3117418 - RNA, 19 nt, Artificial Sequence
  Description of Artificial Sequence: Synthetic oligonucleotide
uucgaccugucuuuccaug

SEQ ID NO: 3117419 - RNA, 19 nt, Artificial Sequence
  Description of Artificial Sequence: Synthetic oligonucleotide
aguugcacagcgauugcag

SEQ ID NO: 3117420 - RNA, 19 nt, Artificial Sequence
  Description of Artificial Sequence: Synthetic oligonucleotide
ggugaaaauccgcacagga

SEQ ID NO: 3117421 - RNA, 19 nt, Artificial Sequence
  Description of Artificial Sequence: Synthetic oligonucleotide
auaucucuggcagagggaa

SEQ ID NO: 3117422 - RNA, 19 nt, Artificial Sequence
  Description of Artificial Sequence: Synthetic oligonucleotide
gaaggcuucacacacuuuu

SEQ ID NO: 3117423 - RNA, 19 nt, Artificial Sequence
  Description of Artificial Sequence: Synthetic oligonucleotide
cauuuccugccauccuugg

SEQ ID NO: 3117424 - RNA, 19 nt, Artificial Sequence
  Description of Artificial Sequence: Synthetic oligonucleotide
cugauucucaagagaaaca

SEQ ID NO: 3117425 - RNA, 19 nt, Artificial Sequence
  Description of Artificial Sequence: Synthetic oligonucleotide
ugcacagcgauugcaggug

SEQ ID NO: 3117426 - RNA, 19 nt, Artificial Sequence
  Description of Artificial Sequence: Synthetic oligonucleotide
ucgaccugucuuuccaugu

SEQ ID NO: 3117427 - RNA, 19 nt, Artificial Sequence
  Description of Artificial Sequence: Synthetic oligonucleotide
uggugaaaauccgcacagg

SEQ ID NO: 3117428 - RNA, 19 nt, Artificial Sequence
  Description of Artificial Sequence: Synthetic oligonucleotide
guccaggaaggcuucacac

SEQ ID NO: 3117429 - RNA, 19 nt, Artificial Sequence
  Description of Artificial Sequence: Synthetic oligonucleotide
ugcugauucucaagagaaa

SEQ ID NO: 3117430 - RNA, 19 nt, Artificial Sequence
  Description of Artificial Sequence: Synthetic oligonucleotide
aaaauccgcacaggagacu

SEQ ID NO: 3117431 - RNA, 19 nt, Artificial Sequence
  Description of Artificial Sequence: Synthetic oligonucleotide
auguuggugaaaauccgca

SEQ ID NO: 3117432 - RNA, 19 nt, Artificial Sequence
  Description of Artificial Sequence: Synthetic oligonucleotide
gcugauucucaagagaaac

SEQ ID NO: 3117433 - RNA, 19 nt, Artificial Sequence
  Description of Artificial Sequence: Synthetic oligonucleotide
uauccuucuucuguaggaa

SEQ ID NO: 3117434 - RNA, 19 nt, Artificial Sequence
  Description of Artificial Sequence: Synthetic oligonucleotide
guuuucgaccugucuuucc

SEQ ID NO: 3117435 - RNA, 19 nt, Artificial Sequence
  Description of Artificial Sequence: Synthetic oligonucleotide
gaaagcaauggcuccauuu

SEQ ID NO: 3117436 - RNA, 19 nt, Artificial Sequence
  Description of Artificial Sequence: Synthetic oligonucleotide
uucuguaggaaggauuauu

SEQ ID NO: 3117437 - RNA, 19 nt, Artificial Sequence
  Description of Artificial Sequence: Synthetic oligonucleotide
gggaguugcacagcgauug

SEQ ID NO: 3117438 - RNA, 19 nt, Artificial Sequence
  Description of Artificial Sequence: Synthetic oligonucleotide
aucucuggcagagggaaca

SEQ ID NO: 3117439 - RNA, 19 nt, Artificial Sequence
  Description of Artificial Sequence: Synthetic oligonucleotide
aggaaggcuucacacacuu

SEQ ID NO: 3117440 - RNA, 19 nt, Artificial Sequence
  Description of Artificial Sequence: Synthetic oligonucleotide
cuguauccuucuucuguag

SEQ ID NO: 3117441 - RNA, 19 nt, Artificial Sequence
  Description of Artificial Sequence: Synthetic oligonucleotide
uuccugccauccuuggaug

SEQ ID NO: 3117442 - RNA, 19 nt, Artificial Sequence
  Description of Artificial Sequence: Synthetic oligonucleotide
gagggaacaaaaucuguau

SEQ ID NO: 3117443 - RNA, 19 nt, Artificial Sequence
  Description of Artificial Sequence: Synthetic oligonucleotide
cauccuuggaugugcaaga

SEQ ID NO: 3117444 - RNA, 19 nt, Artificial Sequence
  Description of Artificial Sequence: Synthetic oligonucleotide
gaaggauuauuuuguuggu

SEQ ID NO: 3117445 - RNA, 19 nt, Artificial Sequence
  Description of Artificial Sequence: Synthetic oligonucleotide
agagggaacaaaaucugua

SEQ ID NO: 3117446 - RNA, 19 nt, Artificial Sequence
  Description of Artificial Sequence: Synthetic oligonucleotide
gaauuacaaugcacacaag

SEQ ID NO: 3117447 - RNA, 19 nt, Artificial Sequence
  Description of Artificial Sequence: Synthetic oligonucleotide
agcgauugcaggugcuaca

SEQ ID NO: 3117448 - RNA, 19 nt, Artificial Sequence
  Description of Artificial Sequence: Synthetic oligonucleotide
auuuccugccauccuugga

SEQ ID NO: 3117449 - RNA, 19 nt, Artificial Sequence
  Description of Artificial Sequence: Synthetic oligonucleotide
uaggaaggauuauuuuguu

SEQ ID NO: 3117450 - RNA, 19 nt, Artificial Sequence
  Description of Artificial Sequence: Synthetic oligonucleotide
gugcugauucucaagagaa

SEQ ID NO: 3117451 - RNA, 19 nt, Artificial Sequence
  Description of Artificial Sequence: Synthetic oligonucleotide
gcacaggagacuguuuucg

SEQ ID NO: 3117452 - RNA, 19 nt, Artificial Sequence
  Description of Artificial Sequence: Synthetic oligonucleotide
uccuuggaugugcaagaau

SEQ ID NO: 3117453 - RNA, 19 nt, Artificial Sequence
  Description of Artificial Sequence: Synthetic oligonucleotide
auuuuguugguggaauguu

SEQ ID NO: 3117454 - RNA, 19 nt, Artificial Sequence
  Description of Artificial Sequence: Synthetic oligonucleotide
ggaugugcaagaauuacaa

SEQ ID NO: 3117455 - RNA, 19 nt, Artificial Sequence
  Description of Artificial Sequence: Synthetic oligonucleotide
uaucucuggcagagggaac

SEQ ID NO: 3117456 - RNA, 19 nt, Artificial Sequence
  Description of Artificial Sequence: Synthetic oligonucleotide
caggugcuacaaugggucc

SEQ ID NO: 3117457 - RNA, 19 nt, Artificial Sequence
  Description of Artificial Sequence: Synthetic oligonucleotide
gugcaagaauuacaaugca

SEQ ID NO: 3117458 - RNA, 19 nt, Artificial Sequence
  Description of Artificial Sequence: Synthetic oligonucleotide
agcaauggcuccauuuccu

SEQ ID NO: 3117459 - RNA, 19 nt, Artificial Sequence
  Description of Artificial Sequence: Synthetic oligonucleotide
ggauuauuuuguuggugga

SEQ ID NO: 3117460 - RNA, 19 nt, Artificial Sequence
  Description of Artificial Sequence: Synthetic oligonucleotide
cuuggaugugcaagaauua

SEQ ID NO: 3117461 - RNA, 19 nt, Artificial Sequence
  Description of Artificial Sequence: Synthetic oligonucleotide
cauaucucuggcagaggga

SEQ ID NO: 3117462 - RNA, 19 nt, Artificial Sequence
  Description of Artificial Sequence: Synthetic oligonucleotide
uugguggaauguuggugaa

SEQ ID NO: 3117463 - RNA, 19 nt, Artificial Sequence
  Description of Artificial Sequence: Synthetic oligonucleotide
uuucgaccugucuuuccau

SEQ ID NO: 3117464 - RNA, 19 nt, Artificial Sequence
  Description of Artificial Sequence: Synthetic oligonucleotide
uguuuucgaccugucuuuc

SEQ ID NO: 3117465 - RNA, 19 nt, Artificial Sequence
  Description of Artificial Sequence: Synthetic oligonucleotide
gguggaauguuggugaaaa

SEQ ID NO: 3117466 - RNA, 19 nt, Artificial Sequence
  Description of Artificial Sequence: Synthetic oligonucleotide
gcuacaauggguccaggaa

SEQ ID NO: 3117467 - RNA, 19 nt, Artificial Sequence
  Description of Artificial Sequence: Synthetic oligonucleotide
gcagagggaacaaaaucug

SEQ ID NO: 3117468 - RNA, 19 nt, Artificial Sequence
  Description of Artificial Sequence: Synthetic oligonucleotide
uccugccauccuuggaugu

SEQ ID NO: 3117469 - RNA, 19 nt, Artificial Sequence
  Description of Artificial Sequence: Synthetic oligonucleotide
gauucucaagagaaacaua

SEQ ID NO: 3117470 - RNA, 19 nt, Artificial Sequence
  Description of Artificial Sequence: Synthetic oligonucleotide
caaugcacacaagugcuga

SEQ ID NO: 3117471 - RNA, 19 nt, Artificial Sequence
  Description of Artificial Sequence: Synthetic oligonucleotide
cugccauccuuggaugugc

SEQ ID NO: 3117472 - RNA, 19 nt, Artificial Sequence
  Description of Artificial Sequence: Synthetic oligonucleotide
ugccauccuuggaugugca

SEQ ID NO: 3117473 - RNA, 19 nt, Artificial Sequence
  Description of Artificial Sequence: Synthetic oligonucleotide
acacaagugcugauucuca

SEQ ID NO: 3117474 - RNA, 19 nt, Artificial Sequence
  Description of Artificial Sequence: Synthetic oligonucleotide
gagacuguuuucgaccugu

SEQ ID NO: 3117475 - RNA, 19 nt, Artificial Sequence
  Description of Artificial Sequence: Synthetic oligonucleotide
ggugcuacaauggguccag

SEQ ID NO: 3117476 - RNA, 19 nt, Artificial Sequence
  Description of Artificial Sequence: Synthetic oligonucleotide
gcaggugcuacaauggguc

SEQ ID NO: 3117477 - RNA, 19 nt, Artificial Sequence
  Description of Artificial Sequence: Synthetic oligonucleotide
gaguugcacagcgauugca

SEQ ID NO: 3117478 - RNA, 19 nt, Artificial Sequence
  Description of Artificial Sequence: Synthetic oligonucleotide
ccauccuuggaugugcaag

SEQ ID NO: 3117479 - RNA, 19 nt, Artificial Sequence
  Description of Artificial Sequence: Synthetic oligonucleotide
gaugugcaagaauuacaau

SEQ ID NO: 3117480 - RNA, 19 nt, Artificial Sequence
  Description of Artificial Sequence: Synthetic oligonucleotide
gcaauggcuccauuuccug

SEQ ID NO: 3117481 - RNA, 19 nt, Artificial Sequence
  Description of Artificial Sequence: Synthetic oligonucleotide
aggugcuacaaugggucca

SEQ ID NO: 3117482 - RNA, 19 nt, Artificial Sequence
  Description of Artificial Sequence: Synthetic oligonucleotide
gacuguuuucgaccugucu

SEQ ID NO: 3117483 - RNA, 19 nt, Artificial Sequence
  Description of Artificial Sequence: Synthetic oligonucleotide
ugggaguugcacagcgauu

SEQ ID NO: 3117484 - RNA, 19 nt, Artificial Sequence
  Description of Artificial Sequence: Synthetic oligonucleotide
auggcuccauuuccugcca

SEQ ID NO: 3117485 - RNA, 19 nt, Artificial Sequence
  Description of Artificial Sequence: Synthetic oligonucleotide
cacaagugcugauucucaa

SEQ ID NO: 3117486 - RNA, 19 nt, Artificial Sequence
  Description of Artificial Sequence: Synthetic oligonucleotide
cacaggagacuguuuucga

SEQ ID NO: 3117487 - RNA, 19 nt, Artificial Sequence
  Description of Artificial Sequence: Synthetic oligonucleotide
gcuccauuuccugccaucc

SEQ ID NO: 3117488 - RNA, 19 nt, Artificial Sequence
  Description of Artificial Sequence: Synthetic oligonucleotide
agacuguuuucgaccuguc

SEQ ID NO: 3117489 - RNA, 19 nt, Artificial Sequence
  Description of Artificial Sequence: Synthetic oligonucleotide
ccauuuccugccauccuug

SEQ ID NO: 3117490 - RNA, 19 nt, Artificial Sequence
  Description of Artificial Sequence: Synthetic oligonucleotide
auggguccaggaaggcuuc

SEQ ID NO: 3117491 - RNA, 19 nt, Artificial Sequence
  Description of Artificial Sequence: Synthetic oligonucleotide
aauccgcacaggagacugu

SEQ ID NO: 3117492 - RNA, 19 nt, Artificial Sequence
  Description of Artificial Sequence: Synthetic oligonucleotide
cagcgauugcaggugcuac

SEQ ID NO: 3117493 - RNA, 19 nt, Artificial Sequence
  Description of Artificial Sequence: Synthetic oligonucleotide
ggaguugcacagcgauugc

SEQ ID NO: 3117494 - RNA, 19 nt, Artificial Sequence
  Description of Artificial Sequence: Synthetic oligonucleotide
ugguggaauguuggugaaa

SEQ ID NO: 3117495 - RNA, 19 nt, Artificial Sequence
  Description of Artificial Sequence: Synthetic oligonucleotide
augcacacaagugcugauu

SEQ ID NO: 3117496 - RNA, 19 nt, Artificial Sequence
  Description of Artificial Sequence: Synthetic oligonucleotide
cagagggaacaaaaucugu

SEQ ID NO: 3117497 - RNA, 19 nt, Artificial Sequence
  Description of Artificial Sequence: Synthetic oligonucleotide
ucucuggcagagggaacaa

SEQ ID NO: 3117498 - RNA, 19 nt, Artificial Sequence
  Description of Artificial Sequence: Synthetic oligonucleotide
cuguuuucgaccugucuuu

SEQ ID NO: 3117499 - RNA, 19 nt, Artificial Sequence
  Description of Artificial Sequence: Synthetic oligonucleotide
ccuuggaugugcaagaauu

SEQ ID NO: 3117500 - RNA, 19 nt, Artificial Sequence
  Description of Artificial Sequence: Synthetic oligonucleotide
uccgcacaggagacuguuu

SEQ ID NO: 3117501 - RNA, 19 nt, Artificial Sequence
  Description of Artificial Sequence: Synthetic oligonucleotide
acagcgauugcaggugcua

SEQ ID NO: 3117502 - RNA, 19 nt, Artificial Sequence
  Description of Artificial Sequence: Synthetic oligonucleotide
cugggaguugcacagcgau

SEQ ID NO: 3117503 - RNA, 19 nt, Artificial Sequence
  Description of Artificial Sequence: Synthetic oligonucleotide
auccuuggaugugcaagaa

SEQ ID NO: 3117504 - RNA, 19 nt, Artificial Sequence
  Description of Artificial Sequence: Synthetic oligonucleotide
uggcuccauuuccugccau

SEQ ID NO: 3117505 - RNA, 19 nt, Artificial Sequence
  Description of Artificial Sequence: Synthetic oligonucleotide
gcacagcgauugcaggugc

SEQ ID NO: 3117506 - RNA, 19 nt, Artificial Sequence
  Description of Artificial Sequence: Synthetic oligonucleotide
ggagacuguuuucgaccug

SEQ ID NO: 3117507 - RNA, 19 nt, Artificial Sequence
  Description of Artificial Sequence: Synthetic oligonucleotide
gaccugucuuuccauguuu

SEQ ID NO: 3117508 - RNA, 19 nt, Artificial Sequence
  Description of Artificial Sequence: Synthetic oligonucleotide
cuguaggaaggauuauuuu

SEQ ID NO: 3117509 - RNA, 19 nt, Artificial Sequence
  Description of Artificial Sequence: Synthetic oligonucleotide
auccgcacaggagacuguu

SEQ ID NO: 3117510 - RNA, 19 nt, Artificial Sequence
  Description of Artificial Sequence: Synthetic oligonucleotide
cuggcagagggaacaaaau

SEQ ID NO: 3117511 - RNA, 19 nt, Artificial Sequence
  Description of Artificial Sequence: Synthetic oligonucleotide
ggcuccauuuccugccauc

SEQ ID NO: 3117512 - RNA, 19 nt, Artificial Sequence
  Description of Artificial Sequence: Synthetic oligonucleotide
gugcuacaauggguccagg

SEQ ID NO: 3117513 - RNA, 19 nt, Artificial Sequence
  Description of Artificial Sequence: Synthetic oligonucleotide
caaaaucuguauccuucuu

SEQ ID NO: 3117514 - RNA, 19 nt, Artificial Sequence
  Description of Artificial Sequence: Synthetic oligonucleotide
uggguccaggaaggcuuca

SEQ ID NO: 3117515 - RNA, 19 nt, Artificial Sequence
  Description of Artificial Sequence: Synthetic oligonucleotide
guggaauguuggugaaaau

SEQ ID NO: 3117516 - RNA, 19 nt, Artificial Sequence
  Description of Artificial Sequence: Synthetic oligonucleotide
caauggguccaggaaggcu

SEQ ID NO: 3117517 - RNA, 19 nt, Artificial Sequence
  Description of Artificial Sequence: Synthetic oligonucleotide
gcgauugcaggugcuacaa

SEQ ID NO: 3117518 - RNA, 19 nt, Artificial Sequence
  Description of Artificial Sequence: Synthetic oligonucleotide
ccugccauccuuggaugug

SEQ ID NO: 3117519 - RNA, 19 nt, Artificial Sequence
  Description of Artificial Sequence: Synthetic oligonucleotide
caggaaggcuucacacacu

SEQ ID NO: 3117520 - RNA, 19 nt, Artificial Sequence
  Description of Artificial Sequence: Synthetic oligonucleotide
cuccauuuccugccauccu

SEQ ID NO: 3117521 - RNA, 19 nt, Artificial Sequence
  Description of Artificial Sequence: Synthetic oligonucleotide
gcacacaagugcugauucu

SEQ ID NO: 3117522 - RNA, 19 nt, Artificial Sequence
  Description of Artificial Sequence: Synthetic oligonucleotide
cgcacaggagacuguuuuc

SEQ ID NO: 3117523 - RNA, 19 nt, Artificial Sequence
  Description of Artificial Sequence: Synthetic oligonucleotide
cacagcgauugcaggugcu

SEQ ID NO: 3117524 - RNA, 19 nt, Artificial Sequence
  Description of Artificial Sequence: Synthetic oligonucleotide
cuucuucuguaggaaggau

SEQ ID NO: 3117525 - RNA, 19 nt, Artificial Sequence
  Description of Artificial Sequence: Synthetic oligonucleotide
cucuggcagagggaacaaa

SEQ ID NO: 3117526 - RNA, 19 nt, Artificial Sequence
  Description of Artificial Sequence: Synthetic oligonucleotide
cuucuguaggaaggauuau

SEQ ID NO: 3117527 - RNA, 19 nt, Artificial Sequence
  Description of Artificial Sequence: Synthetic oligonucleotide
gccauccuuggaugugcaa

SEQ ID NO: 3117528 - RNA, 19 nt, Artificial Sequence
  Description of Artificial Sequence: Synthetic oligonucleotide
ccgcacaggagacuguuuu

SEQ ID NO: 3117529 - RNA, 19 nt, Artificial Sequence
  Description of Artificial Sequence: Synthetic oligonucleotide
ggaaggcuucacacacuuu

SEQ ID NO: 3117530 - RNA, 19 nt, Artificial Sequence
  Description of Artificial Sequence: Synthetic oligonucleotide
cgaccugucuuuccauguu

SEQ ID NO: 3117531 - RNA, 19 nt, Artificial Sequence
  Description of Artificial Sequence: Synthetic oligonucleotide
uuaagugguggcaagagcc

SEQ ID NO: 3117532 - RNA, 19 nt, Artificial Sequence
  Description of Artificial Sequence: Synthetic oligonucleotide
ucaccaauucuucaaaccg

SEQ ID NO: 3117533 - RNA, 19 nt, Artificial Sequence
  Description of Artificial Sequence: Synthetic oligonucleotide
aauucuucaaaccggucca

SEQ ID NO: 3117534 - RNA, 19 nt, Artificial Sequence
  Description of Artificial Sequence: Synthetic oligonucleotide
uucaaaccgguccagcucg

SEQ ID NO: 3117535 - RNA, 19 nt, Artificial Sequence
  Description of Artificial Sequence: Synthetic oligonucleotide
auuucagccaguaucauuc

SEQ ID NO: 3117536 - RNA, 19 nt, Artificial Sequence
  Description of Artificial Sequence: Synthetic oligonucleotide
uguccaagagccuccaugg

SEQ ID NO: 3117537 - RNA, 19 nt, Artificial Sequence
  Description of Artificial Sequence: Synthetic oligonucleotide
auuaagugguggcaagagc

SEQ ID NO: 3117538 - RNA, 19 nt, Artificial Sequence
  Description of Artificial Sequence: Synthetic oligonucleotide
auuuccuguaguuucuggg

SEQ ID NO: 3117539 - RNA, 19 nt, Artificial Sequence
  Description of Artificial Sequence: Synthetic oligonucleotide
aagaauucuuuccuguccu

SEQ ID NO: 3117540 - RNA, 19 nt, Artificial Sequence
  Description of Artificial Sequence: Synthetic oligonucleotide
caauucuucaaaccggucc

SEQ ID NO: 3117541 - RNA, 19 nt, Artificial Sequence
  Description of Artificial Sequence: Synthetic oligonucleotide
uuuccguuccucuaugucc

SEQ ID NO: 3117542 - RNA, 19 nt, Artificial Sequence
  Description of Artificial Sequence: Synthetic oligonucleotide
gucaauuuccuccauuucc

SEQ ID NO: 3117543 - RNA, 19 nt, Artificial Sequence
  Description of Artificial Sequence: Synthetic oligonucleotide
uuucugggagauuucagcc

SEQ ID NO: 3117544 - RNA, 19 nt, Artificial Sequence
  Description of Artificial Sequence: Synthetic oligonucleotide
uucaccaauucuucaaacc

SEQ ID NO: 3117545 - RNA, 19 nt, Artificial Sequence
  Description of Artificial Sequence: Synthetic oligonucleotide
ucugggagauuucagccag

SEQ ID NO: 3117546 - RNA, 19 nt, Artificial Sequence
  Description of Artificial Sequence: Synthetic oligonucleotide
aagcuucucacuccuacug

SEQ ID NO: 3117547 - RNA, 19 nt, Artificial Sequence
  Description of Artificial Sequence: Synthetic oligonucleotide
guaucauuccucuguauug

SEQ ID NO: 3117548 - RNA, 19 nt, Artificial Sequence
  Description of Artificial Sequence: Synthetic oligonucleotide
caagaauucuuuccugucc

SEQ ID NO: 3117549 - RNA, 19 nt, Artificial Sequence
  Description of Artificial Sequence: Synthetic oligonucleotide
aauucuuuccuguccugga

SEQ ID NO: 3117550 - RNA, 19 nt, Artificial Sequence
  Description of Artificial Sequence: Synthetic oligonucleotide
guuucugggagauuucagc

SEQ ID NO: 3117551 - RNA, 19 nt, Artificial Sequence
  Description of Artificial Sequence: Synthetic oligonucleotide
uccauggcagccaagaauu

SEQ ID NO: 3117552 - RNA, 19 nt, Artificial Sequence
  Description of Artificial Sequence: Synthetic oligonucleotide
uguaguuucugggagauuu

SEQ ID NO: 3117553 - RNA, 19 nt, Artificial Sequence
  Description of Artificial Sequence: Synthetic oligonucleotide
uuuccuguaguuucuggga

SEQ ID NO: 3117554 - RNA, 19 nt, Artificial Sequence
  Description of Artificial Sequence: Synthetic oligonucleotide
ggagauuucagccaguauc

SEQ ID NO: 3117555 - RNA, 19 nt, Artificial Sequence
  Description of Artificial Sequence: Synthetic oligonucleotide
uccuggauuuccuucacca

SEQ ID NO: 3117556 - RNA, 19 nt, Artificial Sequence
  Description of Artificial Sequence: Synthetic oligonucleotide
uguauugcuugcccugucc

SEQ ID NO: 3117557 - RNA, 19 nt, Artificial Sequence
  Description of Artificial Sequence: Synthetic oligonucleotide
gaauucuuuccuguccugg

SEQ ID NO: 3117558 - RNA, 19 nt, Artificial Sequence
  Description of Artificial Sequence: Synthetic oligonucleotide
uuccuguaguuucugggag

SEQ ID NO: 3117559 - RNA, 19 nt, Artificial Sequence
  Description of Artificial Sequence: Synthetic oligonucleotide
agcuggguccucuugcagc

SEQ ID NO: 3117560 - RNA, 19 nt, Artificial Sequence
  Description of Artificial Sequence: Synthetic oligonucleotide
caccaauucuucaaaccgg

SEQ ID NO: 3117561 - RNA, 19 nt, Artificial Sequence
  Description of Artificial Sequence: Synthetic oligonucleotide
gauuaagugguggcaagag

SEQ ID NO: 3117562 - RNA, 19 nt, Artificial Sequence
  Description of Artificial Sequence: Synthetic oligonucleotide
agcuucucacuccuacugc

SEQ ID NO: 3117563 - RNA, 19 nt, Artificial Sequence
  Description of Artificial Sequence: Synthetic oligonucleotide
uccaagagccuccauggca

SEQ ID NO: 3117564 - RNA, 19 nt, Artificial Sequence
  Description of Artificial Sequence: Synthetic oligonucleotide
cauuccucuguauugcuug

SEQ ID NO: 3117565 - RNA, 19 nt, Artificial Sequence
  Description of Artificial Sequence: Synthetic oligonucleotide
uaucauuccucuguauugc

SEQ ID NO: 3117566 - RNA, 19 nt, Artificial Sequence
  Description of Artificial Sequence: Synthetic oligonucleotide
aguaucauuccucuguauu

SEQ ID NO: 3117567 - RNA, 19 nt, Artificial Sequence
  Description of Artificial Sequence: Synthetic oligonucleotide
aaccgguccagcucgggag

SEQ ID NO: 3117568 - RNA, 19 nt, Artificial Sequence
  Description of Artificial Sequence: Synthetic oligonucleotide
uuuccuucaccaauucuuc

SEQ ID NO: 3117569 - RNA, 19 nt, Artificial Sequence
  Description of Artificial Sequence: Synthetic oligonucleotide
cuuccuaagcuucucacuc

SEQ ID NO: 3117570 - RNA, 19 nt, Artificial Sequence
  Description of Artificial Sequence: Synthetic oligonucleotide
caugaggagcccuuuuccg

SEQ ID NO: 3117571 - RNA, 19 nt, Artificial Sequence
  Description of Artificial Sequence: Synthetic oligonucleotide
ucuucaaaccgguccagcu

SEQ ID NO: 3117572 - RNA, 19 nt, Artificial Sequence
  Description of Artificial Sequence: Synthetic oligonucleotide
cuaagcuucucacuccuac

SEQ ID NO: 3117573 - RNA, 19 nt, Artificial Sequence
  Description of Artificial Sequence: Synthetic oligonucleotide
ucagccaguaucauuccuc

SEQ ID NO: 3117574 - RNA, 19 nt, Artificial Sequence
  Description of Artificial Sequence: Synthetic oligonucleotide
uggauuaagugguggcaag

SEQ ID NO: 3117575 - RNA, 19 nt, Artificial Sequence
  Description of Artificial Sequence: Synthetic oligonucleotide
aagagccuuccuaagcuuc

SEQ ID NO: 3117576 - RNA, 19 nt, Artificial Sequence
  Description of Artificial Sequence: Synthetic oligonucleotide
uccucuguauugcuugccc

SEQ ID NO: 3117577 - RNA, 19 nt, Artificial Sequence
  Description of Artificial Sequence: Synthetic oligonucleotide
gagauuucagccaguauca

SEQ ID NO: 3117578 - RNA, 19 nt, Artificial Sequence
  Description of Artificial Sequence: Synthetic oligonucleotide
uuccguuccucuauguccu

SEQ ID NO: 3117579 - RNA, 19 nt, Artificial Sequence
  Description of Artificial Sequence: Synthetic oligonucleotide
uccucuugcagcccaugag

SEQ ID NO: 3117580 - RNA, 19 nt, Artificial Sequence
  Description of Artificial Sequence: Synthetic oligonucleotide
uuuuccguuccucuauguc

SEQ ID NO: 3117581 - RNA, 19 nt, Artificial Sequence
  Description of Artificial Sequence: Synthetic oligonucleotide
cuugcagcccaugaggagc

SEQ ID NO: 3117582 - RNA, 19 nt, Artificial Sequence
  Description of Artificial Sequence: Synthetic oligonucleotide
ccuacugcggucaauuucc

SEQ ID NO: 3117583 - RNA, 19 nt, Artificial Sequence
  Description of Artificial Sequence: Synthetic oligonucleotide
uuuccuguccuggauuucc

SEQ ID NO: 3117584 - RNA, 19 nt, Artificial Sequence
  Description of Artificial Sequence: Synthetic oligonucleotide
uucugggagauuucagcca

SEQ ID NO: 3117585 - RNA, 19 nt, Artificial Sequence
  Description of Artificial Sequence: Synthetic oligonucleotide
uccuaagcuucucacuccu

SEQ ID NO: 3117586 - RNA, 19 nt, Artificial Sequence
  Description of Artificial Sequence: Synthetic oligonucleotide
cuucaccaauucuucaaac

SEQ ID NO: 3117587 - RNA, 19 nt, Artificial Sequence
  Description of Artificial Sequence: Synthetic oligonucleotide
uccuucaccaauucuucaa

SEQ ID NO: 3117588 - RNA, 19 nt, Artificial Sequence
  Description of Artificial Sequence: Synthetic oligonucleotide
uccuacugcggucaauuuc

SEQ ID NO: 3117589 - RNA, 19 nt, Artificial Sequence
  Description of Artificial Sequence: Synthetic oligonucleotide
uggauuuccuucaccaauu

SEQ ID NO: 3117590 - RNA, 19 nt, Artificial Sequence
  Description of Artificial Sequence: Synthetic oligonucleotide
uuccuaagcuucucacucc

SEQ ID NO: 3117591 - RNA, 19 nt, Artificial Sequence
  Description of Artificial Sequence: Synthetic oligonucleotide
cuucucacuccuacugcgg

SEQ ID NO: 3117592 - RNA, 19 nt, Artificial Sequence
  Description of Artificial Sequence: Synthetic oligonucleotide
ucuugcagcccaugaggag

SEQ ID NO: 3117593 - RNA, 19 nt, Artificial Sequence
  Description of Artificial Sequence: Synthetic oligonucleotide
auuuccuccauuuccugua

SEQ ID NO: 3117594 - RNA, 19 nt, Artificial Sequence
  Description of Artificial Sequence: Synthetic oligonucleotide
gcagccaagaauucuuucc

SEQ ID NO: 3117595 - RNA, 19 nt, Artificial Sequence
  Description of Artificial Sequence: Synthetic oligonucleotide
cucuguauugcuugcccug

SEQ ID NO: 3117596 - RNA, 19 nt, Artificial Sequence
  Description of Artificial Sequence: Synthetic oligonucleotide
uuggauuaagugguggcaa

SEQ ID NO: 3117597 - RNA, 19 nt, Artificial Sequence
  Description of Artificial Sequence: Synthetic oligonucleotide
aaaccgguccagcucggga

SEQ ID NO: 3117598 - RNA, 19 nt, Artificial Sequence
  Description of Artificial Sequence: Synthetic oligonucleotide
auugcuugcccuguccaag

SEQ ID NO: 3117599 - RNA, 19 nt, Artificial Sequence
  Description of Artificial Sequence: Synthetic oligonucleotide
uucucacuccuacugcggu

SEQ ID NO: 3117600 - RNA, 19 nt, Artificial Sequence
  Description of Artificial Sequence: Synthetic oligonucleotide
uuucagccaguaucauucc

SEQ ID NO: 3117601 - RNA, 19 nt, Artificial Sequence
  Description of Artificial Sequence: Synthetic oligonucleotide
augaggagcccuuuuccgu

SEQ ID NO: 3117602 - RNA, 19 nt, Artificial Sequence
  Description of Artificial Sequence: Synthetic oligonucleotide
agaauucuuuccuguccug

SEQ ID NO: 3117603 - RNA, 19 nt, Artificial Sequence
  Description of Artificial Sequence: Synthetic oligonucleotide
uugcagcccaugaggagcc

SEQ ID NO: 3117604 - RNA, 19 nt, Artificial Sequence
  Description of Artificial Sequence: Synthetic oligonucleotide
gcuucucacuccuacugcg

SEQ ID NO: 3117605 - RNA, 19 nt, Artificial Sequence
  Description of Artificial Sequence: Synthetic oligonucleotide
ucuuuccuguccuggauuu

SEQ ID NO: 3117606 - RNA, 19 nt, Artificial Sequence
  Description of Artificial Sequence: Synthetic oligonucleotide
uucagccaguaucauuccu

SEQ ID NO: 3117607 - RNA, 19 nt, Artificial Sequence
  Description of Artificial Sequence: Synthetic oligonucleotide
uccuguaguuucugggaga

SEQ ID NO: 3117608 - RNA, 19 nt, Artificial Sequence
  Description of Artificial Sequence: Synthetic oligonucleotide
agccaagaauucuuuccug

SEQ ID NO: 3117609 - RNA, 19 nt, Artificial Sequence
  Description of Artificial Sequence: Synthetic oligonucleotide
cuucaaaccgguccagcuc

SEQ ID NO: 3117610 - RNA, 19 nt, Artificial Sequence
  Description of Artificial Sequence: Synthetic oligonucleotide
accgguccagcucgggagc

SEQ ID NO: 3117611 - RNA, 19 nt, Artificial Sequence
  Description of Artificial Sequence: Synthetic oligonucleotide
uuccuucaccaauucuuca

SEQ ID NO: 3117612 - RNA, 19 nt, Artificial Sequence
  Description of Artificial Sequence: Synthetic oligonucleotide
ucaaaccgguccagcucgg

SEQ ID NO: 3117613 - RNA, 19 nt, Artificial Sequence
  Description of Artificial Sequence: Synthetic oligonucleotide
uucuuuccuguccuggauu

SEQ ID NO: 3117614 - RNA, 19 nt, Artificial Sequence
  Description of Artificial Sequence: Synthetic oligonucleotide
ucuguauugcuugcccugu

SEQ ID NO: 3117615 - RNA, 19 nt, Artificial Sequence
  Description of Artificial Sequence: Synthetic oligonucleotide
aucauuccucuguauugcu

SEQ ID NO: 3117616 - RNA, 19 nt, Artificial Sequence
  Description of Artificial Sequence: Synthetic oligonucleotide
uauugcuugcccuguccaa

SEQ ID NO: 3117617 - RNA, 19 nt, Artificial Sequence
  Description of Artificial Sequence: Synthetic oligonucleotide
accaauucuucaaaccggu

SEQ ID NO: 3117618 - RNA, 19 nt, Artificial Sequence
  Description of Artificial Sequence: Synthetic oligonucleotide
auucuuuccuguccuggau

SEQ ID NO: 3117619 - RNA, 19 nt, Artificial Sequence
  Description of Artificial Sequence: Synthetic oligonucleotide
uccuccauuuccuguaguu

SEQ ID NO: 3117620 - RNA, 19 nt, Artificial Sequence
  Description of Artificial Sequence: Synthetic oligonucleotide
uucuucaaaccgguccagc

SEQ ID NO: 3117621 - RNA, 19 nt, Artificial Sequence
  Description of Artificial Sequence: Synthetic oligonucleotide
guauugcuugcccugucca

SEQ ID NO: 3117622 - RNA, 19 nt, Artificial Sequence
  Description of Artificial Sequence: Synthetic oligonucleotide
guggcaagagccuuccuaa

SEQ ID NO: 3117623 - RNA, 19 nt, Artificial Sequence
  Description of Artificial Sequence: Synthetic oligonucleotide
ccucuugcagcccaugagg

SEQ ID NO: 3117624 - RNA, 19 nt, Artificial Sequence
  Description of Artificial Sequence: Synthetic oligonucleotide
uggcaagagccuuccuaag

SEQ ID NO: 3117625 - RNA, 19 nt, Artificial Sequence
  Description of Artificial Sequence: Synthetic oligonucleotide
ucauuccucuguauugcuu

SEQ ID NO: 3117626 - RNA, 19 nt, Artificial Sequence
  Description of Artificial Sequence: Synthetic oligonucleotide
ugcuugcccuguccaagag

SEQ ID NO: 3117627 - RNA, 19 nt, Artificial Sequence
  Description of Artificial Sequence: Synthetic oligonucleotide
cuuggauuaagugguggca

SEQ ID NO: 3117628 - RNA, 19 nt, Artificial Sequence
  Description of Artificial Sequence: Synthetic oligonucleotide
ggcaagagccuuccuaagc

SEQ ID NO: 3117629 - RNA, 19 nt, Artificial Sequence
  Description of Artificial Sequence: Synthetic oligonucleotide
agcccuuuuccguuccucu

SEQ ID NO: 3117630 - RNA, 19 nt, Artificial Sequence
  Description of Artificial Sequence: Synthetic oligonucleotide
uggguccucuugcagccca

SEQ ID NO: 3117631 - RNA, 19 nt, Artificial Sequence
  Description of Artificial Sequence: Synthetic oligonucleotide
agugguggcaagagccuuc

SEQ ID NO: 3117632 - RNA, 19 nt, Artificial Sequence
  Description of Artificial Sequence: Synthetic oligonucleotide
gauuuccuucaccaauucu

SEQ ID NO: 3117633 - RNA, 19 nt, Artificial Sequence
  Description of Artificial Sequence: Synthetic oligonucleotide
cagcucgggagcugggucc

SEQ ID NO: 3117634 - RNA, 19 nt, Artificial Sequence
  Description of Artificial Sequence: Synthetic oligonucleotide
auucuucaaaccgguccag

SEQ ID NO: 3117635 - RNA, 19 nt, Artificial Sequence
  Description of Artificial Sequence: Synthetic oligonucleotide
cucuugcagcccaugagga

SEQ ID NO: 3117636 - RNA, 19 nt, Artificial Sequence
  Description of Artificial Sequence: Synthetic oligonucleotide
uuccuguccuggauuuccu

SEQ ID NO: 3117637 - RNA, 19 nt, Artificial Sequence
  Description of Artificial Sequence: Synthetic oligonucleotide
ucucacuccuacugcgguc

SEQ ID NO: 3117638 - RNA, 19 nt, Artificial Sequence
  Description of Artificial Sequence: Synthetic oligonucleotide
uuccucuguauugcuugcc

SEQ ID NO: 3117639 - RNA, 19 nt, Artificial Sequence
  Description of Artificial Sequence: Synthetic oligonucleotide
acuccuacugcggucaauu

SEQ ID NO: 3117640 - RNA, 19 nt, Artificial Sequence
  Description of Artificial Sequence: Synthetic oligonucleotide
agccuuccuaagcuucuca

SEQ ID NO: 3117641 - RNA, 19 nt, Artificial Sequence
  Description of Artificial Sequence: Synthetic oligonucleotide
ccaugaggagcccuuuucc

SEQ ID NO: 3117642 - RNA, 19 nt, Artificial Sequence
  Description of Artificial Sequence: Synthetic oligonucleotide
gauuucagccaguaucauu

SEQ ID NO: 3117643 - RNA, 19 nt, Artificial Sequence
  Description of Artificial Sequence: Synthetic oligonucleotide
gcuggguccucuugcagcc

SEQ ID NO: 3117644 - RNA, 19 nt, Artificial Sequence
  Description of Artificial Sequence: Synthetic oligonucleotide
ugggagauuucagccagua

SEQ ID NO: 3117645 - RNA, 19 nt, Artificial Sequence
  Description of Artificial Sequence: Synthetic oligonucleotide
ugcccuguccaagagccuc

SEQ ID NO: 3117646 - RNA, 19 nt, Artificial Sequence
  Description of Artificial Sequence: Synthetic oligonucleotide
ccaagaauucuuuccuguc

SEQ ID NO: 3117647 - RNA, 19 nt, Artificial Sequence
  Description of Artificial Sequence: Synthetic oligonucleotide
caagagccuccauggcagc

SEQ ID NO: 3117648 - RNA, 19 nt, Artificial Sequence
  Description of Artificial Sequence: Synthetic oligonucleotide
guccuggauuuccuucacc

SEQ ID NO: 3117649 - RNA, 19 nt, Artificial Sequence
  Description of Artificial Sequence: Synthetic oligonucleotide
uggcagccaagaauucuuu

SEQ ID NO: 3117650 - RNA, 19 nt, Artificial Sequence
  Description of Artificial Sequence: Synthetic oligonucleotide
ggucaauuuccuccauuuc

SEQ ID NO: 3117651 - RNA, 19 nt, Artificial Sequence
  Description of Artificial Sequence: Synthetic oligonucleotide
gggagcuggguccucuugc

SEQ ID NO: 3117652 - RNA, 19 nt, Artificial Sequence
  Description of Artificial Sequence: Synthetic oligonucleotide
cucacuccuacugcgguca

SEQ ID NO: 3117653 - RNA, 19 nt, Artificial Sequence
  Description of Artificial Sequence: Synthetic oligonucleotide
gccaguaucauuccucugu

SEQ ID NO: 3117654 - RNA, 19 nt, Artificial Sequence
  Description of Artificial Sequence: Synthetic oligonucleotide
agagccuuccuaagcuucu

SEQ ID NO: 3117655 - RNA, 19 nt, Artificial Sequence
  Description of Artificial Sequence: Synthetic oligonucleotide
auggcagccaagaauucuu

SEQ ID NO: 3117656 - RNA, 19 nt, Artificial Sequence
  Description of Artificial Sequence: Synthetic oligonucleotide
agagccuccauggcagcca

SEQ ID NO: 3117657 - RNA, 19 nt, Artificial Sequence
  Description of Artificial Sequence: Synthetic oligonucleotide
uacugcggucaauuuccuc

SEQ ID NO: 3117658 - RNA, 19 nt, Artificial Sequence
  Description of Artificial Sequence: Synthetic oligonucleotide
cuggauuuccuucaccaau

SEQ ID NO: 3117659 - RNA, 19 nt, Artificial Sequence
  Description of Artificial Sequence: Synthetic oligonucleotide
gguggcaagagccuuccua

SEQ ID NO: 3117660 - RNA, 19 nt, Artificial Sequence
  Description of Artificial Sequence: Synthetic oligonucleotide
guaguuucugggagauuuc

SEQ ID NO: 3117661 - RNA, 19 nt, Artificial Sequence
  Description of Artificial Sequence: Synthetic oligonucleotide
cagccaagaauucuuuccu

SEQ ID NO: 3117662 - RNA, 19 nt, Artificial Sequence
  Description of Artificial Sequence: Synthetic oligonucleotide
cugcggucaauuuccucca

SEQ ID NO: 3117663 - RNA, 19 nt, Artificial Sequence
  Description of Artificial Sequence: Synthetic oligonucleotide
guccucuugcagcccauga

SEQ ID NO: 3117664 - RNA, 19 nt, Artificial Sequence
  Description of Artificial Sequence: Synthetic oligonucleotide
cuguauugcuugcccuguc

SEQ ID NO: 3117665 - RNA, 19 nt, Artificial Sequence
  Description of Artificial Sequence: Synthetic oligonucleotide
agauuucagccaguaucau

SEQ ID NO: 3117666 - RNA, 19 nt, Artificial Sequence
  Description of Artificial Sequence: Synthetic oligonucleotide
gccuuccuaagcuucucac

SEQ ID NO: 3117667 - RNA, 19 nt, Artificial Sequence
  Description of Artificial Sequence: Synthetic oligonucleotide
ccuguccuggauuuccuuc

SEQ ID NO: 3117668 - RNA, 19 nt, Artificial Sequence
  Description of Artificial Sequence: Synthetic oligonucleotide
caaaccgguccagcucggg

SEQ ID NO: 3117669 - RNA, 19 nt, Artificial Sequence
  Description of Artificial Sequence: Synthetic oligonucleotide
ggauuaagugguggcaaga

SEQ ID NO: 3117670 - RNA, 19 nt, Artificial Sequence
  Description of Artificial Sequence: Synthetic oligonucleotide
gcuugcccuguccaagagc

SEQ ID NO: 3117671 - RNA, 19 nt, Artificial Sequence
  Description of Artificial Sequence: Synthetic oligonucleotide
uccuguccuggauuuccuu

SEQ ID NO: 3117672 - RNA, 19 nt, Artificial Sequence
  Description of Artificial Sequence: Synthetic oligonucleotide
gccaagaauucuuuccugu

SEQ ID NO: 3117673 - RNA, 19 nt, Artificial Sequence
  Description of Artificial Sequence: Synthetic oligonucleotide
gguccagcucgggagcugg

SEQ ID NO: 3117674 - RNA, 19 nt, Artificial Sequence
  Description of Artificial Sequence: Synthetic oligonucleotide
uccagcucgggagcugggu

SEQ ID NO: 3117675 - RNA, 19 nt, Artificial Sequence
  Description of Artificial Sequence: Synthetic oligonucleotide
uugcccuguccaagagccu

SEQ ID NO: 3117676 - RNA, 19 nt, Artificial Sequence
  Description of Artificial Sequence: Synthetic oligonucleotide
ggcagccaagaauucuuuc

SEQ ID NO: 3117677 - RNA, 19 nt, Artificial Sequence
  Description of Artificial Sequence: Synthetic oligonucleotide
ugcggucaauuuccuccau

SEQ ID NO: 3117678 - RNA, 19 nt, Artificial Sequence
  Description of Artificial Sequence: Synthetic oligonucleotide
cagccaguaucauuccucu

SEQ ID NO: 3117679 - RNA, 19 nt, Artificial Sequence
  Description of Artificial Sequence: Synthetic oligonucleotide
cuccauggcagccaagaau

SEQ ID NO: 3117680 - RNA, 19 nt, Artificial Sequence
  Description of Artificial Sequence: Synthetic oligonucleotide
ggagcuggguccucuugca

SEQ ID NO: 3117681 - RNA, 19 nt, Artificial Sequence
  Description of Artificial Sequence: Synthetic oligonucleotide
gagcccuuuuccguuccuc

SEQ ID NO: 3117682 - RNA, 19 nt, Artificial Sequence
  Description of Artificial Sequence: Synthetic oligonucleotide
cuuuccuguccuggauuuc

SEQ ID NO: 3117683 - RNA, 19 nt, Artificial Sequence
  Description of Artificial Sequence: Synthetic oligonucleotide
ucacuccuacugcggucaa

SEQ ID NO: 3117684 - RNA, 19 nt, Artificial Sequence
  Description of Artificial Sequence: Synthetic oligonucleotide
cuuuuccguuccucuaugu

SEQ ID NO: 3117685 - RNA, 19 nt, Artificial Sequence
  Description of Artificial Sequence: Synthetic oligonucleotide
ccaauucuucaaaccgguc

SEQ ID NO: 3117686 - RNA, 19 nt, Artificial Sequence
  Description of Artificial Sequence: Synthetic oligonucleotide
ccuuuuccguuccucuaug

SEQ ID NO: 3117687 - RNA, 19 nt, Artificial Sequence
  Description of Artificial Sequence: Synthetic oligonucleotide
cccaugaggagcccuuuuc

SEQ ID NO: 3117688 - RNA, 19 nt, Artificial Sequence
  Description of Artificial Sequence: Synthetic oligonucleotide
cauggcagccaagaauucu

SEQ ID NO: 3117689 - RNA, 19 nt, Artificial Sequence
  Description of Artificial Sequence: Synthetic oligonucleotide
gagccuccauggcagccaa

SEQ ID NO: 3117690 - RNA, 19 nt, Artificial Sequence
  Description of Artificial Sequence: Synthetic oligonucleotide
gagccuuccuaagcuucuc

SEQ ID NO: 3117691 - RNA, 19 nt, Artificial Sequence
  Description of Artificial Sequence: Synthetic oligonucleotide
ccuucaccaauucuucaaa

SEQ ID NO: 3117692 - RNA, 19 nt, Artificial Sequence
  Description of Artificial Sequence: Synthetic oligonucleotide
agcucgggagcuggguccu

SEQ ID NO: 3117693 - RNA, 19 nt, Artificial Sequence
  Description of Artificial Sequence: Synthetic oligonucleotide
ugcagcccaugaggagccc

SEQ ID NO: 3117694 - RNA, 19 nt, Artificial Sequence
  Description of Artificial Sequence: Synthetic oligonucleotide
guccagcucgggagcuggg

SEQ ID NO: 3117695 - RNA, 19 nt, Artificial Sequence
  Description of Artificial Sequence: Synthetic oligonucleotide
ucgggagcuggguccucuu

SEQ ID NO: 3117696 - RNA, 19 nt, Artificial Sequence
  Description of Artificial Sequence: Synthetic oligonucleotide
ccauggcagccaagaauuc

SEQ ID NO: 3117697 - RNA, 19 nt, Artificial Sequence
  Description of Artificial Sequence: Synthetic oligonucleotide
ccaguaucauuccucugua

SEQ ID NO: 3117698 - RNA, 19 nt, Artificial Sequence
  Description of Artificial Sequence: Synthetic oligonucleotide
ccagcucgggagcuggguc

SEQ ID NO: 3117699 - RNA, 19 nt, Artificial Sequence
  Description of Artificial Sequence: Synthetic oligonucleotide
ccuggauuuccuucaccaa

SEQ ID NO: 3117700 - RNA, 19 nt, Artificial Sequence
  Description of Artificial Sequence: Synthetic oligonucleotide
caguaucauuccucuguau

SEQ ID NO: 3117701 - RNA, 19 nt, Artificial Sequence
  Description of Artificial Sequence: Synthetic oligonucleotide
ccuuccuaagcuucucacu

SEQ ID NO: 3117702 - RNA, 19 nt, Artificial Sequence
  Description of Artificial Sequence: Synthetic oligonucleotide
cuacugcggucaauuuccu

SEQ ID NO: 3117703 - RNA, 19 nt, Artificial Sequence
  Description of Artificial Sequence: Synthetic oligonucleotide
gguccucuugcagcccaug

SEQ ID NO: 3117704 - RNA, 19 nt, Artificial Sequence
  Description of Artificial Sequence: Synthetic oligonucleotide
gcccuguccaagagccucc

SEQ ID NO: 3117705 - RNA, 19 nt, Artificial Sequence
  Description of Artificial Sequence: Synthetic oligonucleotide
agcccaugaggagcccuuu

SEQ ID NO: 3117706 - RNA, 19 nt, Artificial Sequence
  Description of Artificial Sequence: Synthetic oligonucleotide
gcccuuuuccguuccucua

SEQ ID NO: 3117707 - RNA, 19 nt, Artificial Sequence
  Description of Artificial Sequence: Synthetic oligonucleotide
ccucuguauugcuugcccu

SEQ ID NO: 3117708 - RNA, 19 nt, Artificial Sequence
  Description of Artificial Sequence: Synthetic oligonucleotide
cugggagauuucagccagu

SEQ ID NO: 3117709 - RNA, 19 nt, Artificial Sequence
  Description of Artificial Sequence: Synthetic oligonucleotide
gggagauuucagccaguau

SEQ ID NO: 3117710 - RNA, 19 nt, Artificial Sequence
  Description of Artificial Sequence: Synthetic oligonucleotide
agccuccauggcagccaag

SEQ ID NO: 3117711 - RNA, 19 nt, Artificial Sequence
  Description of Artificial Sequence: Synthetic oligonucleotide
cuccuacugcggucaauuu

SEQ ID NO: 3117712 - RNA, 19 nt, Artificial Sequence
  Description of Artificial Sequence: Synthetic oligonucleotide
cggucaauuuccuccauuu

SEQ ID NO: 3117713 - RNA, 19 nt, Artificial Sequence
  Description of Artificial Sequence: Synthetic oligonucleotide
cagcccaugaggagcccuu

SEQ ID NO: 3117714 - RNA, 19 nt, Artificial Sequence
  Description of Artificial Sequence: Synthetic oligonucleotide
ccuccauggcagccaagaa

SEQ ID NO: 3117715 - RNA, 19 nt, Artificial Sequence
  Description of Artificial Sequence: Synthetic oligonucleotide
ccuaagcuucucacuccua

SEQ ID NO: 3117716 - RNA, 19 nt, Artificial Sequence
  Description of Artificial Sequence: Synthetic oligonucleotide
cucgggagcuggguccucu

SEQ ID NO: 3117717 - RNA, 19 nt, Artificial Sequence
  Description of Artificial Sequence: Synthetic oligonucleotide
cccuuuuccguuccucuau

SEQ ID NO: 3117718 - RNA, 19 nt, Artificial Sequence
  Description of Artificial Sequence: Synthetic oligonucleotide
gcggucaauuuccuccauu

SEQ ID NO: 3117719 - RNA, 19 nt, Artificial Sequence
  Description of Artificial Sequence: Synthetic oligonucleotide
cgggagcuggguccucuug

SEQ ID NO: 3117720 - RNA, 19 nt, Artificial Sequence
  Description of Artificial Sequence: Synthetic oligonucleotide
ggagcccuuuuccguuccu

SEQ ID NO: 3117721 - RNA, 19 nt, Artificial Sequence
  Description of Artificial Sequence: Synthetic oligonucleotide
gcagcccaugaggagcccu

SEQ ID NO: 3117722 - RNA, 19 nt, Artificial Sequence
  Description of Artificial Sequence: Synthetic oligonucleotide
cuguaguuucugggagauu

SEQ ID NO: 3117723 - RNA, 19 nt, Artificial Sequence
  Description of Artificial Sequence: Synthetic oligonucleotide
cacuccuacugcggucaau

SEQ ID NO: 3117724 - RNA, 19 nt, Artificial Sequence
  Description of Artificial Sequence: Synthetic oligonucleotide
cccuguccaagagccucca

SEQ ID NO: 3117725 - RNA, 19 nt, Artificial Sequence
  Description of Artificial Sequence: Synthetic oligonucleotide
gcccaugaggagcccuuuu

SEQ ID NO: 3117726 - RNA, 19 nt, Artificial Sequence
  Description of Artificial Sequence: Synthetic oligonucleotide
ccucuauguccuucccauu

SEQ ID NO: 3117727 - RNA, 19 nt, Artificial Sequence
  Description of Artificial Sequence: Synthetic oligonucleotide
cgguccagcucgggagcug

SEQ ID NO: 3117728 - RNA, 19 nt, Artificial Sequence
  Description of Artificial Sequence: Synthetic oligonucleotide
ggguccucuugcagcccau

SEQ ID NO: 3117729 - RNA, 19 nt, Artificial Sequence
  Description of Artificial Sequence: Synthetic oligonucleotide
ccgguccagcucgggagcu

SEQ ID NO: 3117730 - RNA, 19 nt, Artificial Sequence
  Description of Artificial Sequence: Synthetic oligonucleotide
aauuaaauaaacuagguuc

SEQ ID NO: 3117731 - RNA, 19 nt, Artificial Sequence
  Description of Artificial Sequence: Synthetic oligonucleotide
uauuauaucuccauauacg

SEQ ID NO: 3117732 - RNA, 19 nt, Artificial Sequence
  Description of Artificial Sequence: Synthetic oligonucleotide
ucuugaaccaaauaaaccc

SEQ ID NO: 3117733 - RNA, 19 nt, Artificial Sequence
  Description of Artificial Sequence: Synthetic oligonucleotide
uuugguauaauuacaagug

SEQ ID NO: 3117734 - RNA, 19 nt, Artificial Sequence
  Description of Artificial Sequence: Synthetic oligonucleotide
aauguuucuguccacauug

SEQ ID NO: 3117735 - RNA, 19 nt, Artificial Sequence
  Description of Artificial Sequence: Synthetic oligonucleotide
cacaaagaaauuaacagcg

SEQ ID NO: 3117736 - RNA, 19 nt, Artificial Sequence
  Description of Artificial Sequence: Synthetic oligonucleotide
uauacgaaagagcugagag

SEQ ID NO: 3117737 - RNA, 19 nt, Artificial Sequence
  Description of Artificial Sequence: Synthetic oligonucleotide
uuaucaauaauuaaauaaa

SEQ ID NO: 3117738 - RNA, 19 nt, Artificial Sequence
  Description of Artificial Sequence: Synthetic oligonucleotide
auuaaauaaacuagguucc

SEQ ID NO: 3117739 - RNA, 19 nt, Artificial Sequence
  Description of Artificial Sequence: Synthetic oligonucleotide
uuaacagcgaacaaacucc

SEQ ID NO: 3117740 - RNA, 19 nt, Artificial Sequence
  Description of Artificial Sequence: Synthetic oligonucleotide
auaauuacaagugaguauc

SEQ ID NO: 3117741 - RNA, 19 nt, Artificial Sequence
  Description of Artificial Sequence: Synthetic oligonucleotide
aguaucuugaaccaaauaa

SEQ ID NO: 3117742 - RNA, 19 nt, Artificial Sequence
  Description of Artificial Sequence: Synthetic oligonucleotide
aauaaacuagguuccaaug

SEQ ID NO: 3117743 - RNA, 19 nt, Artificial Sequence
  Description of Artificial Sequence: Synthetic oligonucleotide
caagugaguaucuugaacc

SEQ ID NO: 3117744 - RNA, 19 nt, Artificial Sequence
  Description of Artificial Sequence: Synthetic oligonucleotide
aaccaaauaaacccuguag

SEQ ID NO: 3117745 - RNA, 19 nt, Artificial Sequence
  Description of Artificial Sequence: Synthetic oligonucleotide
uuuugguauaauuacaagu

SEQ ID NO: 3117746 - RNA, 19 nt, Artificial Sequence
  Description of Artificial Sequence: Synthetic oligonucleotide
aaagaaauuaacagcgaac

SEQ ID NO: 3117747 - RNA, 19 nt, Artificial Sequence
  Description of Artificial Sequence: Synthetic oligonucleotide
uuuucaaauguuaucagaa

SEQ ID NO: 3117748 - RNA, 19 nt, Artificial Sequence
  Description of Artificial Sequence: Synthetic oligonucleotide
uucaaauguuaucagaaca

SEQ ID NO: 3117749 - RNA, 19 nt, Artificial Sequence
  Description of Artificial Sequence: Synthetic oligonucleotide
aagaaauuaacagcgaaca

SEQ ID NO: 3117750 - RNA, 19 nt, Artificial Sequence
  Description of Artificial Sequence: Synthetic oligonucleotide
cuuaucaauaauuaaauaa

SEQ ID NO: 3117751 - RNA, 19 nt, Artificial Sequence
  Description of Artificial Sequence: Synthetic oligonucleotide
ugguauaauuacaagugag

SEQ ID NO: 3117752 - RNA, 19 nt, Artificial Sequence
  Description of Artificial Sequence: Synthetic oligonucleotide
auuauaucuccauauacga

SEQ ID NO: 3117753 - RNA, 19 nt, Artificial Sequence
  Description of Artificial Sequence: Synthetic oligonucleotide
uauaucuccauauacgaaa

SEQ ID NO: 3117754 - RNA, 19 nt, Artificial Sequence
  Description of Artificial Sequence: Synthetic oligonucleotide
gauaucaucaccuuaucaa

SEQ ID NO: 3117755 - RNA, 19 nt, Artificial Sequence
  Description of Artificial Sequence: Synthetic oligonucleotide
uucuuuucaaauguuauca

SEQ ID NO: 3117756 - RNA, 19 nt, Artificial Sequence
  Description of Artificial Sequence: Synthetic oligonucleotide
uuacaagugaguaucuuga

SEQ ID NO: 3117757 - RNA, 19 nt, Artificial Sequence
  Description of Artificial Sequence: Synthetic oligonucleotide
uacgaaagagcugagaggc

SEQ ID NO: 3117758 - RNA, 19 nt, Artificial Sequence
  Description of Artificial Sequence: Synthetic oligonucleotide
uaucuugaaccaaauaaac

SEQ ID NO: 3117759 - RNA, 19 nt, Artificial Sequence
  Description of Artificial Sequence: Synthetic oligonucleotide
aaauaaacuagguuccaau

SEQ ID NO: 3117760 - RNA, 19 nt, Artificial Sequence
  Description of Artificial Sequence: Synthetic oligonucleotide
auuacaagugaguaucuug

SEQ ID NO: 3117761 - RNA, 19 nt, Artificial Sequence
  Description of Artificial Sequence: Synthetic oligonucleotide
uaauuaaauaaacuagguu

SEQ ID NO: 3117762 - RNA, 19 nt, Artificial Sequence
  Description of Artificial Sequence: Synthetic oligonucleotide
acaagugaguaucuugaac

SEQ ID NO: 3117763 - RNA, 19 nt, Artificial Sequence
  Description of Artificial Sequence: Synthetic oligonucleotide
auguuaucagaacagauau

SEQ ID NO: 3117764 - RNA, 19 nt, Artificial Sequence
  Description of Artificial Sequence: Synthetic oligonucleotide
guuaucagaacagauauca

SEQ ID NO: 3117765 - RNA, 19 nt, Artificial Sequence
  Description of Artificial Sequence: Synthetic oligonucleotide
agagcugagaggcuccugc

SEQ ID NO: 3117766 - RNA, 19 nt, Artificial Sequence
  Description of Artificial Sequence: Synthetic oligonucleotide
ucuccauauacgaaagagc

SEQ ID NO: 3117767 - RNA, 19 nt, Artificial Sequence
  Description of Artificial Sequence: Synthetic oligonucleotide
uauaauuacaagugaguau

SEQ ID NO: 3117768 - RNA, 19 nt, Artificial Sequence
  Description of Artificial Sequence: Synthetic oligonucleotide
auaaacuagguuccaaugu

SEQ ID NO: 3117769 - RNA, 19 nt, Artificial Sequence
  Description of Artificial Sequence: Synthetic oligonucleotide
aucuugaaccaaauaaacc

SEQ ID NO: 3117770 - RNA, 19 nt, Artificial Sequence
  Description of Artificial Sequence: Synthetic oligonucleotide
uaucagaacagauaucauc

SEQ ID NO: 3117771 - RNA, 19 nt, Artificial Sequence
  Description of Artificial Sequence: Synthetic oligonucleotide
aucaggaacucuugauucc

SEQ ID NO: 3117772 - RNA, 19 nt, Artificial Sequence
  Description of Artificial Sequence: Synthetic oligonucleotide
uuguauuauaucuccauau

SEQ ID NO: 3117773 - RNA, 19 nt, Artificial Sequence
  Description of Artificial Sequence: Synthetic oligonucleotide
guucuuguauuauaucucc

SEQ ID NO: 3117774 - RNA, 19 nt, Artificial Sequence
  Description of Artificial Sequence: Synthetic oligonucleotide
auacgaaagagcugagagg

SEQ ID NO: 3117775 - RNA, 19 nt, Artificial Sequence
  Description of Artificial Sequence: Synthetic oligonucleotide
gauuguucaggugaucagg

SEQ ID NO: 3117776 - RNA, 19 nt, Artificial Sequence
  Description of Artificial Sequence: Synthetic oligonucleotide
ucuuuucaaauguuaucag

SEQ ID NO: 3117777 - RNA, 19 nt, Artificial Sequence
  Description of Artificial Sequence: Synthetic oligonucleotide
uuagcuuuugaguucuugu

SEQ ID NO: 3117778 - RNA, 19 nt, Artificial Sequence
  Description of Artificial Sequence: Synthetic oligonucleotide
uguauuauaucuccauaua

SEQ ID NO: 3117779 - RNA, 19 nt, Artificial Sequence
  Description of Artificial Sequence: Synthetic oligonucleotide
gaacucuugauuccuuuag

SEQ ID NO: 3117780 - RNA, 19 nt, Artificial Sequence
  Description of Artificial Sequence: Synthetic oligonucleotide
gaucaggaacucuugauuc

SEQ ID NO: 3117781 - RNA, 19 nt, Artificial Sequence
  Description of Artificial Sequence: Synthetic oligonucleotide
ucuugauuccuuuagcuuu

SEQ ID NO: 3117782 - RNA, 19 nt, Artificial Sequence
  Description of Artificial Sequence: Synthetic oligonucleotide
aucagaacagauaucauca

SEQ ID NO: 3117783 - RNA, 19 nt, Artificial Sequence
  Description of Artificial Sequence: Synthetic oligonucleotide
uugaguucuuguauuauau

SEQ ID NO: 3117784 - RNA, 19 nt, Artificial Sequence
  Description of Artificial Sequence: Synthetic oligonucleotide
uuucaaauguuaucagaac

SEQ ID NO: 3117785 - RNA, 19 nt, Artificial Sequence
  Description of Artificial Sequence: Synthetic oligonucleotide
aagugaguaucuugaacca

SEQ ID NO: 3117786 - RNA, 19 nt, Artificial Sequence
  Description of Artificial Sequence: Synthetic oligonucleotide
uugaaccaaauaaacccug

SEQ ID NO: 3117787 - RNA, 19 nt, Artificial Sequence
  Description of Artificial Sequence: Synthetic oligonucleotide
aauguuaucagaacagaua

SEQ ID NO: 3117788 - RNA, 19 nt, Artificial Sequence
  Description of Artificial Sequence: Synthetic oligonucleotide
auaauuaaauaaacuaggu

SEQ ID NO: 3117789 - RNA, 19 nt, Artificial Sequence
  Description of Artificial Sequence: Synthetic oligonucleotide
uaaacuagguuccaauguu

SEQ ID NO: 3117790 - RNA, 19 nt, Artificial Sequence
  Description of Artificial Sequence: Synthetic oligonucleotide
aucuccauauacgaaagag

SEQ ID NO: 3117791 - RNA, 19 nt, Artificial Sequence
  Description of Artificial Sequence: Synthetic oligonucleotide
agaacagauaucaucaccu

SEQ ID NO: 3117792 - RNA, 19 nt, Artificial Sequence
  Description of Artificial Sequence: Synthetic oligonucleotide
ucuuguauuauaucuccau

SEQ ID NO: 3117793 - RNA, 19 nt, Artificial Sequence
  Description of Artificial Sequence: Synthetic oligonucleotide
uuucuguccacauuggauu

SEQ ID NO: 3117794 - RNA, 19 nt, Artificial Sequence
  Description of Artificial Sequence: Synthetic oligonucleotide
aacuagguuccaauguuuc

SEQ ID NO: 3117795 - RNA, 19 nt, Artificial Sequence
  Description of Artificial Sequence: Synthetic oligonucleotide
aguucuuguauuauaucuc

SEQ ID NO: 3117796 - RNA, 19 nt, Artificial Sequence
  Description of Artificial Sequence: Synthetic oligonucleotide
cauuggauuguucagguga

SEQ ID NO: 3117797 - RNA, 19 nt, Artificial Sequence
  Description of Artificial Sequence: Synthetic oligonucleotide
uuauaucuccauauacgaa

SEQ ID NO: 3117798 - RNA, 19 nt, Artificial Sequence
  Description of Artificial Sequence: Synthetic oligonucleotide
acucuugauuccuuuagcu

SEQ ID NO: 3117799 - RNA, 19 nt, Artificial Sequence
  Description of Artificial Sequence: Synthetic oligonucleotide
auaucaucaccuuaucaau

SEQ ID NO: 3117800 - RNA, 19 nt, Artificial Sequence
  Description of Artificial Sequence: Synthetic oligonucleotide
gaguucuuguauuauaucu

SEQ ID NO: 3117801 - RNA, 19 nt, Artificial Sequence
  Description of Artificial Sequence: Synthetic oligonucleotide
agauaucaucaccuuauca

SEQ ID NO: 3117802 - RNA, 19 nt, Artificial Sequence
  Description of Artificial Sequence: Synthetic oligonucleotide
uuccuuuagcuuuugaguu

SEQ ID NO: 3117803 - RNA, 19 nt, Artificial Sequence
  Description of Artificial Sequence: Synthetic oligonucleotide
ugaaccaaauaaacccugu

SEQ ID NO: 3117804 - RNA, 19 nt, Artificial Sequence
  Description of Artificial Sequence: Synthetic oligonucleotide
aacagauaucaucaccuua

SEQ ID NO: 3117805 - RNA, 19 nt, Artificial Sequence
  Description of Artificial Sequence: Synthetic oligonucleotide
cagaacagauaucaucacc

SEQ ID NO: 3117806 - RNA, 19 nt, Artificial Sequence
  Description of Artificial Sequence: Synthetic oligonucleotide
aaauguuaucagaacagau

SEQ ID NO: 3117807 - RNA, 19 nt, Artificial Sequence
  Description of Artificial Sequence: Synthetic oligonucleotide
ugaucaggaacucuugauu

SEQ ID NO: 3117808 - RNA, 19 nt, Artificial Sequence
  Description of Artificial Sequence: Synthetic oligonucleotide
uccauauacgaaagagcug

SEQ ID NO: 3117809 - RNA, 19 nt, Artificial Sequence
  Description of Artificial Sequence: Synthetic oligonucleotide
uuugaguucuuguauuaua

SEQ ID NO: 3117810 - RNA, 19 nt, Artificial Sequence
  Description of Artificial Sequence: Synthetic oligonucleotide
uggauuguucaggugauca

SEQ ID NO: 3117811 - RNA, 19 nt, Artificial Sequence
  Description of Artificial Sequence: Synthetic oligonucleotide
uuaaauaaacuagguucca

SEQ ID NO: 3117812 - RNA, 19 nt, Artificial Sequence
  Description of Artificial Sequence: Synthetic oligonucleotide
acagcgaacaaacuccuaa

SEQ ID NO: 3117813 - RNA, 19 nt, Artificial Sequence
  Description of Artificial Sequence: Synthetic oligonucleotide
cuuuucaaauguuaucaga

SEQ ID NO: 3117814 - RNA, 19 nt, Artificial Sequence
  Description of Artificial Sequence: Synthetic oligonucleotide
aucaucaccuuaucaauaa

SEQ ID NO: 3117815 - RNA, 19 nt, Artificial Sequence
  Description of Artificial Sequence: Synthetic oligonucleotide
caccuuaucaauaauuaaa

SEQ ID NO: 3117816 - RNA, 19 nt, Artificial Sequence
  Description of Artificial Sequence: Synthetic oligonucleotide
guuccaauguuucugucca

SEQ ID NO: 3117817 - RNA, 19 nt, Artificial Sequence
  Description of Artificial Sequence: Synthetic oligonucleotide
uucuuguauuauaucucca

SEQ ID NO: 3117818 - RNA, 19 nt, Artificial Sequence
  Description of Artificial Sequence: Synthetic oligonucleotide
uuuagcuuuugaguucuug

SEQ ID NO: 3117819 - RNA, 19 nt, Artificial Sequence
  Description of Artificial Sequence: Synthetic oligonucleotide
uaucaucaccuuaucaaua

SEQ ID NO: 3117820 - RNA, 19 nt, Artificial Sequence
  Description of Artificial Sequence: Synthetic oligonucleotide
ucaccuuaucaauaauuaa

SEQ ID NO: 3117821 - RNA, 19 nt, Artificial Sequence
  Description of Artificial Sequence: Synthetic oligonucleotide
uguuucuguccacauugga

SEQ ID NO: 3117822 - RNA, 19 nt, Artificial Sequence
  Description of Artificial Sequence: Synthetic oligonucleotide
cuagguuccaauguuucug

SEQ ID NO: 3117823 - RNA, 19 nt, Artificial Sequence
  Description of Artificial Sequence: Synthetic oligonucleotide
uucuguccacauuggauug

SEQ ID NO: 3117824 - RNA, 19 nt, Artificial Sequence
  Description of Artificial Sequence: Synthetic oligonucleotide
acagauaucaucaccuuau

SEQ ID NO: 3117825 - RNA, 19 nt, Artificial Sequence
  Description of Artificial Sequence: Synthetic oligonucleotide
uaacagcgaacaaacuccu

SEQ ID NO: 3117826 - RNA, 19 nt, Artificial Sequence
  Description of Artificial Sequence: Synthetic oligonucleotide
cuccauauacgaaagagcu

SEQ ID NO: 3117827 - RNA, 19 nt, Artificial Sequence
  Description of Artificial Sequence: Synthetic oligonucleotide
agaaauuaacagcgaacaa

SEQ ID NO: 3117828 - RNA, 19 nt, Artificial Sequence
  Description of Artificial Sequence: Synthetic oligonucleotide
uguuaucagaacagauauc

SEQ ID NO: 3117829 - RNA, 19 nt, Artificial Sequence
  Description of Artificial Sequence: Synthetic oligonucleotide
uaaauaaacuagguuccaa

SEQ ID NO: 3117830 - RNA, 19 nt, Artificial Sequence
  Description of Artificial Sequence: Synthetic oligonucleotide
agcuuuugaguucuuguau

SEQ ID NO: 3117831 - RNA, 19 nt, Artificial Sequence
  Description of Artificial Sequence: Synthetic oligonucleotide
guauaauuacaagugagua

SEQ ID NO: 3117832 - RNA, 19 nt, Artificial Sequence
  Description of Artificial Sequence: Synthetic oligonucleotide
auaucuccauauacgaaag

SEQ ID NO: 3117833 - RNA, 19 nt, Artificial Sequence
  Description of Artificial Sequence: Synthetic oligonucleotide
accuuaucaauaauuaaau

SEQ ID NO: 3117834 - RNA, 19 nt, Artificial Sequence
  Description of Artificial Sequence: Synthetic oligonucleotide
guaucuugaaccaaauaaa

SEQ ID NO: 3117835 - RNA, 19 nt, Artificial Sequence
  Description of Artificial Sequence: Synthetic oligonucleotide
ucagaacagauaucaucac

SEQ ID NO: 3117836 - RNA, 19 nt, Artificial Sequence
  Description of Artificial Sequence: Synthetic oligonucleotide
caaagaaauuaacagcgaa

SEQ ID NO: 3117837 - RNA, 19 nt, Artificial Sequence
  Description of Artificial Sequence: Synthetic oligonucleotide
ugaguaucuugaaccaaau

SEQ ID NO: 3117838 - RNA, 19 nt, Artificial Sequence
  Description of Artificial Sequence: Synthetic oligonucleotide
uuaucagaacagauaucau

SEQ ID NO: 3117839 - RNA, 19 nt, Artificial Sequence
  Description of Artificial Sequence: Synthetic oligonucleotide
uagguuccaauguuucugu

SEQ ID NO: 3117840 - RNA, 19 nt, Artificial Sequence
  Description of Artificial Sequence: Synthetic oligonucleotide
aauuaacagcgaacaaacu

SEQ ID NO: 3117841 - RNA, 19 nt, Artificial Sequence
  Description of Artificial Sequence: Synthetic oligonucleotide
acuagguuccaauguuucu

SEQ ID NO: 3117842 - RNA, 19 nt, Artificial Sequence
  Description of Artificial Sequence: Synthetic oligonucleotide
gguuccaauguuucugucc

SEQ ID NO: 3117843 - RNA, 19 nt, Artificial Sequence
  Description of Artificial Sequence: Synthetic oligonucleotide
uaucuccauauacgaaaga

SEQ ID NO: 3117844 - RNA, 19 nt, Artificial Sequence
  Description of Artificial Sequence: Synthetic oligonucleotide
uccaauguuucuguccaca

SEQ ID NO: 3117845 - RNA, 19 nt, Artificial Sequence
  Description of Artificial Sequence: Synthetic oligonucleotide
gagaggcuccugcugaccc

SEQ ID NO: 3117846 - RNA, 19 nt, Artificial Sequence
  Description of Artificial Sequence: Synthetic oligonucleotide
aauuacaagugaguaucuu

SEQ ID NO: 3117847 - RNA, 19 nt, Artificial Sequence
  Description of Artificial Sequence: Synthetic oligonucleotide
uagcuuuugaguucuugua

SEQ ID NO: 3117848 - RNA, 19 nt, Artificial Sequence
  Description of Artificial Sequence: Synthetic oligonucleotide
caaauaaacccuguagcca

SEQ ID NO: 3117849 - RNA, 19 nt, Artificial Sequence
  Description of Artificial Sequence: Synthetic oligonucleotide
agaggcuccugcugacccc

SEQ ID NO: 3117850 - RNA, 19 nt, Artificial Sequence
  Description of Artificial Sequence: Synthetic oligonucleotide
uccuuuagcuuuugaguuc

SEQ ID NO: 3117851 - RNA, 19 nt, Artificial Sequence
  Description of Artificial Sequence: Synthetic oligonucleotide
aucaccuuaucaauaauua

SEQ ID NO: 3117852 - RNA, 19 nt, Artificial Sequence
  Description of Artificial Sequence: Synthetic oligonucleotide
ucaggaacucuugauuccu

SEQ ID NO: 3117853 - RNA, 19 nt, Artificial Sequence
  Description of Artificial Sequence: Synthetic oligonucleotide
gaaagagcugagaggcucc

SEQ ID NO: 3117854 - RNA, 19 nt, Artificial Sequence
  Description of Artificial Sequence: Synthetic oligonucleotide
cauauacgaaagagcugag

SEQ ID NO: 3117855 - RNA, 19 nt, Artificial Sequence
  Description of Artificial Sequence: Synthetic oligonucleotide
uacaagugaguaucuugaa

SEQ ID NO: 3117856 - RNA, 19 nt, Artificial Sequence
  Description of Artificial Sequence: Synthetic oligonucleotide
uuuugaguucuuguauuau

SEQ ID NO: 3117857 - RNA, 19 nt, Artificial Sequence
  Description of Artificial Sequence: Synthetic oligonucleotide
auuguucaggugaucagga

SEQ ID NO: 3117858 - RNA, 19 nt, Artificial Sequence
  Description of Artificial Sequence: Synthetic oligonucleotide
ugauuccuuuagcuuuuga

SEQ ID NO: 3117859 - RNA, 19 nt, Artificial Sequence
  Description of Artificial Sequence: Synthetic oligonucleotide
cuugaaccaaauaaacccu

SEQ ID NO: 3117860 - RNA, 19 nt, Artificial Sequence
  Description of Artificial Sequence: Synthetic oligonucleotide
ucaucaccuuaucaauaau

SEQ ID NO: 3117861 - RNA, 19 nt, Artificial Sequence
  Description of Artificial Sequence: Synthetic oligonucleotide
acaaagaaauuaacagcga

SEQ ID NO: 3117862 - RNA, 19 nt, Artificial Sequence
  Description of Artificial Sequence: Synthetic oligonucleotide
cuuguauuauaucuccaua

SEQ ID NO: 3117863 - RNA, 19 nt, Artificial Sequence
  Description of Artificial Sequence: Synthetic oligonucleotide
caaauguuaucagaacaga

SEQ ID NO: 3117864 - RNA, 19 nt, Artificial Sequence
  Description of Artificial Sequence: Synthetic oligonucleotide
acauuggauuguucaggug

SEQ ID NO: 3117865 - RNA, 19 nt, Artificial Sequence
  Description of Artificial Sequence: Synthetic oligonucleotide
auauacgaaagagcugaga

SEQ ID NO: 3117866 - RNA, 19 nt, Artificial Sequence
  Description of Artificial Sequence: Synthetic oligonucleotide
aaacuagguuccaauguuu

SEQ ID NO: 3117867 - RNA, 19 nt, Artificial Sequence
  Description of Artificial Sequence: Synthetic oligonucleotide
ugaccccacaaagaaauua

SEQ ID NO: 3117868 - RNA, 19 nt, Artificial Sequence
  Description of Artificial Sequence: Synthetic oligonucleotide
agcgaacaaacuccuaauu

SEQ ID NO: 3117869 - RNA, 19 nt, Artificial Sequence
  Description of Artificial Sequence: Synthetic oligonucleotide
agguuccaauguuucuguc

SEQ ID NO: 3117870 - RNA, 19 nt, Artificial Sequence
  Description of Artificial Sequence: Synthetic oligonucleotide
ggauuguucaggugaucag

SEQ ID NO: 3117871 - RNA, 19 nt, Artificial Sequence
  Description of Artificial Sequence: Synthetic oligonucleotide
ccauauacgaaagagcuga

SEQ ID NO: 3117872 - RNA, 19 nt, Artificial Sequence
  Description of Artificial Sequence: Synthetic oligonucleotide
accccacaaagaaauuaac

SEQ ID NO: 3117873 - RNA, 19 nt, Artificial Sequence
  Description of Artificial Sequence: Synthetic oligonucleotide
cuuuugaguucuuguauua

SEQ ID NO: 3117874 - RNA, 19 nt, Artificial Sequence
  Description of Artificial Sequence: Synthetic oligonucleotide
aaagagcugagaggcuccu

SEQ ID NO: 3117875 - RNA, 19 nt, Artificial Sequence
  Description of Artificial Sequence: Synthetic oligonucleotide
agcugagaggcuccugcug

SEQ ID NO: 3117876 - RNA, 19 nt, Artificial Sequence
  Description of Artificial Sequence: Synthetic oligonucleotide
gaccccacaaagaaauuaa

SEQ ID NO: 3117877 - RNA, 19 nt, Artificial Sequence
  Description of Artificial Sequence: Synthetic oligonucleotide
uuguucaggugaucaggaa

SEQ ID NO: 3117878 - RNA, 19 nt, Artificial Sequence
  Description of Artificial Sequence: Synthetic oligonucleotide
ugcugaccccacaaagaaa

SEQ ID NO: 3117879 - RNA, 19 nt, Artificial Sequence
  Description of Artificial Sequence: Synthetic oligonucleotide
ucaggugaucaggaacucu

SEQ ID NO: 3117880 - RNA, 19 nt, Artificial Sequence
  Description of Artificial Sequence: Synthetic oligonucleotide
gugaguaucuugaaccaaa

SEQ ID NO: 3117881 - RNA, 19 nt, Artificial Sequence
  Description of Artificial Sequence: Synthetic oligonucleotide
guucaggugaucaggaacu

SEQ ID NO: 3117882 - RNA, 19 nt, Artificial Sequence
  Description of Artificial Sequence: Synthetic oligonucleotide
cagauaucaucaccuuauc

SEQ ID NO: 3117883 - RNA, 19 nt, Artificial Sequence
  Description of Artificial Sequence: Synthetic oligonucleotide
gaguaucuugaaccaaaua

SEQ ID NO: 3117884 - RNA, 19 nt, Artificial Sequence
  Description of Artificial Sequence: Synthetic oligonucleotide
aggaacucuugauuccuuu

SEQ ID NO: 3117885 - RNA, 19 nt, Artificial Sequence
  Description of Artificial Sequence: Synthetic oligonucleotide
auuggauuguucaggugau

SEQ ID NO: 3117886 - RNA, 19 nt, Artificial Sequence
  Description of Artificial Sequence: Synthetic oligonucleotide
gguauaauuacaagugagu

SEQ ID NO: 3117887 - RNA, 19 nt, Artificial Sequence
  Description of Artificial Sequence: Synthetic oligonucleotide
ccacauuggauuguucagg

SEQ ID NO: 3117888 - RNA, 19 nt, Artificial Sequence
  Description of Artificial Sequence: Synthetic oligonucleotide
agugaguaucuugaaccaa

SEQ ID NO: 3117889 - RNA, 19 nt, Artificial Sequence
  Description of Artificial Sequence: Synthetic oligonucleotide
uguccacauuggauuguuc

SEQ ID NO: 3117890 - RNA, 19 nt, Artificial Sequence
  Description of Artificial Sequence: Synthetic oligonucleotide
ucuguccacauuggauugu

SEQ ID NO: 3117891 - RNA, 19 nt, Artificial Sequence
  Description of Artificial Sequence: Synthetic oligonucleotide
ugagaggcuccugcugacc

SEQ ID NO: 3117892 - RNA, 19 nt, Artificial Sequence
  Description of Artificial Sequence: Synthetic oligonucleotide
cugcugaccccacaaagaa

SEQ ID NO: 3117893 - RNA, 19 nt, Artificial Sequence
  Description of Artificial Sequence: Synthetic oligonucleotide
uuccaauguuucuguccac

SEQ ID NO: 3117894 - RNA, 19 nt, Artificial Sequence
  Description of Artificial Sequence: Synthetic oligonucleotide
cacauuggauuguucaggu

SEQ ID NO: 3117895 - RNA, 19 nt, Artificial Sequence
  Description of Artificial Sequence: Synthetic oligonucleotide
caucaccuuaucaauaauu

SEQ ID NO: 3117896 - RNA, 19 nt, Artificial Sequence
  Description of Artificial Sequence: Synthetic oligonucleotide
uugauuccuuuagcuuuug

SEQ ID NO: 3117897 - RNA, 19 nt, Artificial Sequence
  Description of Artificial Sequence: Synthetic oligonucleotide
cugagaggcuccugcugac

SEQ ID NO: 3117898 - RNA, 19 nt, Artificial Sequence
  Description of Artificial Sequence: Synthetic oligonucleotide
uucaggugaucaggaacuc

SEQ ID NO: 3117899 - RNA, 19 nt, Artificial Sequence
  Description of Artificial Sequence: Synthetic oligonucleotide
guuucuguccacauuggau

SEQ ID NO: 3117900 - RNA, 19 nt, Artificial Sequence
  Description of Artificial Sequence: Synthetic oligonucleotide
ccccacaaagaaauuaaca

SEQ ID NO: 3117901 - RNA, 19 nt, Artificial Sequence
  Description of Artificial Sequence: Synthetic oligonucleotide
gaacagauaucaucaccuu

SEQ ID NO: 3117902 - RNA, 19 nt, Artificial Sequence
  Description of Artificial Sequence: Synthetic oligonucleotide
gugaucaggaacucuugau

SEQ ID NO: 3117903 - RNA, 19 nt, Artificial Sequence
  Description of Artificial Sequence: Synthetic oligonucleotide
aggugaucaggaacucuug

SEQ ID NO: 3117904 - RNA, 19 nt, Artificial Sequence
  Description of Artificial Sequence: Synthetic oligonucleotide
uuggauuguucaggugauc

SEQ ID NO: 3117905 - RNA, 19 nt, Artificial Sequence
  Description of Artificial Sequence: Synthetic oligonucleotide
ggaacucuugauuccuuua

SEQ ID NO: 3117906 - RNA, 19 nt, Artificial Sequence
  Description of Artificial Sequence: Synthetic oligonucleotide
ccuuaucaauaauuaaaua

SEQ ID NO: 3117907 - RNA, 19 nt, Artificial Sequence
  Description of Artificial Sequence: Synthetic oligonucleotide
cuugauuccuuuagcuuuu

SEQ ID NO: 3117908 - RNA, 19 nt, Artificial Sequence
  Description of Artificial Sequence: Synthetic oligonucleotide
gaggcuccugcugacccca

SEQ ID NO: 3117909 - RNA, 19 nt, Artificial Sequence
  Description of Artificial Sequence: Synthetic oligonucleotide
aacagcgaacaaacuccua

SEQ ID NO: 3117910 - RNA, 19 nt, Artificial Sequence
  Description of Artificial Sequence: Synthetic oligonucleotide
gcugaccccacaaagaaau

SEQ ID NO: 3117911 - RNA, 19 nt, Artificial Sequence
  Description of Artificial Sequence: Synthetic oligonucleotide
gcgaacaaacuccuaauuu

SEQ ID NO: 3117912 - RNA, 19 nt, Artificial Sequence
  Description of Artificial Sequence: Synthetic oligonucleotide
gcuuuugaguucuuguauu

SEQ ID NO: 3117913 - RNA, 19 nt, Artificial Sequence
  Description of Artificial Sequence: Synthetic oligonucleotide
acgaaagagcugagaggcu

SEQ ID NO: 3117914 - RNA, 19 nt, Artificial Sequence
  Description of Artificial Sequence: Synthetic oligonucleotide
cgaaagagcugagaggcuc

SEQ ID NO: 3117915 - RNA, 19 nt, Artificial Sequence
  Description of Artificial Sequence: Synthetic oligonucleotide
gagcugagaggcuccugcu

SEQ ID NO: 3117916 - RNA, 19 nt, Artificial Sequence
  Description of Artificial Sequence: Synthetic oligonucleotide
cagcgaacaaacuccuaau

SEQ ID NO: 3117917 - RNA, 19 nt, Artificial Sequence
  Description of Artificial Sequence: Synthetic oligonucleotide
cgaacaaacuccuaauuuu

SEQ ID NO: 3117918 - RNA, 19 nt, Artificial Sequence
  Description of Artificial Sequence: Synthetic oligonucleotide
caauguuucuguccacauu

SEQ ID NO: 3117919 - RNA, 19 nt, Artificial Sequence
  Description of Artificial Sequence: Synthetic oligonucleotide
gcuccugcugaccccacaa

SEQ ID NO: 3117920 - RNA, 19 nt, Artificial Sequence
  Description of Artificial Sequence: Synthetic oligonucleotide
cuccugcugaccccacaaa

SEQ ID NO: 3117921 - RNA, 19 nt, Artificial Sequence
  Description of Artificial Sequence: Synthetic oligonucleotide
ccuuuagcuuuugaguucu

SEQ ID NO: 3117922 - RNA, 19 nt, Artificial Sequence
  Description of Artificial Sequence: Synthetic oligonucleotide
aggcuccugcugaccccac

SEQ ID NO: 3117923 - RNA, 19 nt, Artificial Sequence
  Description of Artificial Sequence: Synthetic oligonucleotide
caggaacucuugauuccuu

SEQ ID NO: 3117924 - RNA, 19 nt, Artificial Sequence
  Description of Artificial Sequence: Synthetic oligonucleotide
ggcuccugcugaccccaca

SEQ ID NO: 3117925 - RNA, 19 nt, Artificial Sequence
  Description of Artificial Sequence: Synthetic oligonucleotide
cugaccccacaaagaaauu

SEQ ID NO: 3117926 - RNA, 19 nt, Artificial Sequence
  Description of Artificial Sequence: Synthetic oligonucleotide
cuguccacauuggauuguu

SEQ ID NO: 3117927 - RNA, 19 nt, Artificial Sequence
  Description of Artificial Sequence: Synthetic oligonucleotide
cuuuagcuuuugaguucuu

SEQ ID NO: 3117928 - RNA, 19 nt, Artificial Sequence
  Description of Artificial Sequence: Synthetic oligonucleotide
uguacaaauagaauaagcg

SEQ ID NO: 3117929 - RNA, 19 nt, Artificial Sequence
  Description of Artificial Sequence: Synthetic oligonucleotide
aauaucuagaaguagaccu

SEQ ID NO: 3117930 - RNA, 19 nt, Artificial Sequence
  Description of Artificial Sequence: Synthetic oligonucleotide
uagaaguagaccuaaaugu

SEQ ID NO: 3117931 - RNA, 19 nt, Artificial Sequence
  Description of Artificial Sequence: Synthetic oligonucleotide
aaccaaaucaugugauacc

SEQ ID NO: 3117932 - RNA, 19 nt, Artificial Sequence
  Description of Artificial Sequence: Synthetic oligonucleotide
auuguuaugauuuccugag

SEQ ID NO: 3117933 - RNA, 19 nt, Artificial Sequence
  Description of Artificial Sequence: Synthetic oligonucleotide
aagugauucuuucuuguac

SEQ ID NO: 3117934 - RNA, 19 nt, Artificial Sequence
  Description of Artificial Sequence: Synthetic oligonucleotide
aacaguaagugauucuuuc

SEQ ID NO: 3117935 - RNA, 19 nt, Artificial Sequence
  Description of Artificial Sequence: Synthetic oligonucleotide
uucacgucgacuuuaacag

SEQ ID NO: 3117936 - RNA, 19 nt, Artificial Sequence
  Description of Artificial Sequence: Synthetic oligonucleotide
aagauguugaaauacugga

SEQ ID NO: 3117937 - RNA, 19 nt, Artificial Sequence
  Description of Artificial Sequence: Synthetic oligonucleotide
uuaacuucauggauuauug

SEQ ID NO: 3117938 - RNA, 19 nt, Artificial Sequence
  Description of Artificial Sequence: Synthetic oligonucleotide
gauguugaaauacuggaug

SEQ ID NO: 3117939 - RNA, 19 nt, Artificial Sequence
  Description of Artificial Sequence: Synthetic oligonucleotide
uggauuauuguuaugauuu

SEQ ID NO: 3117940 - RNA, 19 nt, Artificial Sequence
  Description of Artificial Sequence: Synthetic oligonucleotide
auagaauaagcguuuguuc

SEQ ID NO: 3117941 - RNA, 19 nt, Artificial Sequence
  Description of Artificial Sequence: Synthetic oligonucleotide
uuuucugccaacagcaacc

SEQ ID NO: 3117942 - RNA, 19 nt, Artificial Sequence
  Description of Artificial Sequence: Synthetic oligonucleotide
aaugugucuauguuguuca

SEQ ID NO: 3117943 - RNA, 19 nt, Artificial Sequence
  Description of Artificial Sequence: Synthetic oligonucleotide
ucuucuguagguuuguuug

SEQ ID NO: 3117944 - RNA, 19 nt, Artificial Sequence
  Description of Artificial Sequence: Synthetic oligonucleotide
aaauacuggaugaaaauug

SEQ ID NO: 3117945 - RNA, 19 nt, Artificial Sequence
  Description of Artificial Sequence: Synthetic oligonucleotide
ucuuguacaaauagaauaa

SEQ ID NO: 3117946 - RNA, 19 nt, Artificial Sequence
  Description of Artificial Sequence: Synthetic oligonucleotide
uucuuucuuguacaaauag

SEQ ID NO: 3117947 - RNA, 19 nt, Artificial Sequence
  Description of Artificial Sequence: Synthetic oligonucleotide
gaguaaauucuucuguagg

SEQ ID NO: 3117948 - RNA, 19 nt, Artificial Sequence
  Description of Artificial Sequence: Synthetic oligonucleotide
uguucuucuagguuugggg

SEQ ID NO: 3117949 - RNA, 19 nt, Artificial Sequence
  Description of Artificial Sequence: Synthetic oligonucleotide
uacaaauagaauaagcguu

SEQ ID NO: 3117950 - RNA, 19 nt, Artificial Sequence
  Description of Artificial Sequence: Synthetic oligonucleotide
aaucaugugauaccugucu

SEQ ID NO: 3117951 - RNA, 19 nt, Artificial Sequence
  Description of Artificial Sequence: Synthetic oligonucleotide
uucuuguacaaauagaaua

SEQ ID NO: 3117952 - RNA, 19 nt, Artificial Sequence
  Description of Artificial Sequence: Synthetic oligonucleotide
ucugaggugagucaagaug

SEQ ID NO: 3117953 - RNA, 19 nt, Artificial Sequence
  Description of Artificial Sequence: Synthetic oligonucleotide
uacuggaugaaaauuguca

SEQ ID NO: 3117954 - RNA, 19 nt, Artificial Sequence
  Description of Artificial Sequence: Synthetic oligonucleotide
uagaauaagcguuuguucu

SEQ ID NO: 3117955 - RNA, 19 nt, Artificial Sequence
  Description of Artificial Sequence: Synthetic oligonucleotide
ucgacuuuaacaguaagug

SEQ ID NO: 3117956 - RNA, 19 nt, Artificial Sequence
  Description of Artificial Sequence: Synthetic oligonucleotide
ugagucaagauguugaaau

SEQ ID NO: 3117957 - RNA, 19 nt, Artificial Sequence
  Description of Artificial Sequence: Synthetic oligonucleotide
caagauguugaaauacugg

SEQ ID NO: 3117958 - RNA, 19 nt, Artificial Sequence
  Description of Artificial Sequence: Synthetic oligonucleotide
gucuauguuguucacgucg

SEQ ID NO: 3117959 - RNA, 19 nt, Artificial Sequence
  Description of Artificial Sequence: Synthetic oligonucleotide
ucauggauuauuguuauga

SEQ ID NO: 3117960 - RNA, 19 nt, Artificial Sequence
  Description of Artificial Sequence: Synthetic oligonucleotide
cuagaaguagaccuaaaug

SEQ ID NO: 3117961 - RNA, 19 nt, Artificial Sequence
  Description of Artificial Sequence: Synthetic oligonucleotide
uauuguuaugauuuccuga

SEQ ID NO: 3117962 - RNA, 19 nt, Artificial Sequence
  Description of Artificial Sequence: Synthetic oligonucleotide
aguaaauucuucuguaggu

SEQ ID NO: 3117963 - RNA, 19 nt, Artificial Sequence
  Description of Artificial Sequence: Synthetic oligonucleotide
aagcguuuguucuucuagg

SEQ ID NO: 3117964 - RNA, 19 nt, Artificial Sequence
  Description of Artificial Sequence: Synthetic oligonucleotide
aauagaauaagcguuuguu

SEQ ID NO: 3117965 - RNA, 19 nt, Artificial Sequence
  Description of Artificial Sequence: Synthetic oligonucleotide
uugaaauacuggaugaaaa

SEQ ID NO: 3117966 - RNA, 19 nt, Artificial Sequence
  Description of Artificial Sequence: Synthetic oligonucleotide
ugaguaaauucuucuguag

SEQ ID NO: 3117967 - RNA, 19 nt, Artificial Sequence
  Description of Artificial Sequence: Synthetic oligonucleotide
aacuucauggauuauuguu

SEQ ID NO: 3117968 - RNA, 19 nt, Artificial Sequence
  Description of Artificial Sequence: Synthetic oligonucleotide
guuuguuugauucugaggu

SEQ ID NO: 3117969 - RNA, 19 nt, Artificial Sequence
  Description of Artificial Sequence: Synthetic oligonucleotide
ugugauaccugucucucug

SEQ ID NO: 3117970 - RNA, 19 nt, Artificial Sequence
  Description of Artificial Sequence: Synthetic oligonucleotide
uguuaugauuuccugagua

SEQ ID NO: 3117971 - RNA, 19 nt, Artificial Sequence
  Description of Artificial Sequence: Synthetic oligonucleotide
ucuuucuuguacaaauaga

SEQ ID NO: 3117972 - RNA, 19 nt, Artificial Sequence
  Description of Artificial Sequence: Synthetic oligonucleotide
agaauaucuagaaguagac

SEQ ID NO: 3117973 - RNA, 19 nt, Artificial Sequence
  Description of Artificial Sequence: Synthetic oligonucleotide
aaauagaauaagcguuugu

SEQ ID NO: 3117974 - RNA, 19 nt, Artificial Sequence
  Description of Artificial Sequence: Synthetic oligonucleotide
ucugccaacagcaaccaaa

SEQ ID NO: 3117975 - RNA, 19 nt, Artificial Sequence
  Description of Artificial Sequence: Synthetic oligonucleotide
uuauuguuaugauuuccug

SEQ ID NO: 3117976 - RNA, 19 nt, Artificial Sequence
  Description of Artificial Sequence: Synthetic oligonucleotide
cuuucuuguacaaauagaa

SEQ ID NO: 3117977 - RNA, 19 nt, Artificial Sequence
  Description of Artificial Sequence: Synthetic oligonucleotide
ugaaauacuggaugaaaau

SEQ ID NO: 3117978 - RNA, 19 nt, Artificial Sequence
  Description of Artificial Sequence: Synthetic oligonucleotide
agugauucuuucuuguaca

SEQ ID NO: 3117979 - RNA, 19 nt, Artificial Sequence
  Description of Artificial Sequence: Synthetic oligonucleotide
ucuagaaguagaccuaaau

SEQ ID NO: 3117980 - RNA, 19 nt, Artificial Sequence
  Description of Artificial Sequence: Synthetic oligonucleotide
aaguagaccuaaauguguc

SEQ ID NO: 3117981 - RNA, 19 nt, Artificial Sequence
  Description of Artificial Sequence: Synthetic oligonucleotide
gauuauuguuaugauuucc

SEQ ID NO: 3117982 - RNA, 19 nt, Artificial Sequence
  Description of Artificial Sequence: Synthetic oligonucleotide
aguaagugauucuuucuug

SEQ ID NO: 3117983 - RNA, 19 nt, Artificial Sequence
  Description of Artificial Sequence: Synthetic oligonucleotide
uuuaacaguaagugauucu

SEQ ID NO: 3117984 - RNA, 19 nt, Artificial Sequence
  Description of Artificial Sequence: Synthetic oligonucleotide
aacagcaaccaaaucaugu

SEQ ID NO: 3117985 - RNA, 19 nt, Artificial Sequence
  Description of Artificial Sequence: Synthetic oligonucleotide
acagcaaccaaaucaugug

SEQ ID NO: 3117986 - RNA, 19 nt, Artificial Sequence
  Description of Artificial Sequence: Synthetic oligonucleotide
ucuauguuguucacgucga

SEQ ID NO: 3117987 - RNA, 19 nt, Artificial Sequence
  Description of Artificial Sequence: Synthetic oligonucleotide
uuugauucugaggugaguc

SEQ ID NO: 3117988 - RNA, 19 nt, Artificial Sequence
  Description of Artificial Sequence: Synthetic oligonucleotide
cucucugcagaauaucuag

SEQ ID NO: 3117989 - RNA, 19 nt, Artificial Sequence
  Description of Artificial Sequence: Synthetic oligonucleotide
uuaacaguaagugauucuu

SEQ ID NO: 3117990 - RNA, 19 nt, Artificial Sequence
  Description of Artificial Sequence: Synthetic oligonucleotide
auguugaaauacuggauga

SEQ ID NO: 3117991 - RNA, 19 nt, Artificial Sequence
  Description of Artificial Sequence: Synthetic oligonucleotide
uaugauuuccugaguaaau

SEQ ID NO: 3117992 - RNA, 19 nt, Artificial Sequence
  Description of Artificial Sequence: Synthetic oligonucleotide
cagaauaucuagaaguaga

SEQ ID NO: 3117993 - RNA, 19 nt, Artificial Sequence
  Description of Artificial Sequence: Synthetic oligonucleotide
acuggaugaaaauugucau

SEQ ID NO: 3117994 - RNA, 19 nt, Artificial Sequence
  Description of Artificial Sequence: Synthetic oligonucleotide
uuucuuguacaaauagaau

SEQ ID NO: 3117995 - RNA, 19 nt, Artificial Sequence
  Description of Artificial Sequence: Synthetic oligonucleotide
gaauaucuagaaguagacc

SEQ ID NO: 3117996 - RNA, 19 nt, Artificial Sequence
  Description of Artificial Sequence: Synthetic oligonucleotide
aucaugugauaccugucuc

SEQ ID NO: 3117997 - RNA, 19 nt, Artificial Sequence
  Description of Artificial Sequence: Synthetic oligonucleotide
uggaugaaaauugucauuu

SEQ ID NO: 3117998 - RNA, 19 nt, Artificial Sequence
  Description of Artificial Sequence: Synthetic oligonucleotide
auuauuguuaugauuuccu

SEQ ID NO: 3117999 - RNA, 19 nt, Artificial Sequence
  Description of Artificial Sequence: Synthetic oligonucleotide
cuguagguuuguuugauuc

SEQ ID NO: 3118000 - RNA, 19 nt, Artificial Sequence
  Description of Artificial Sequence: Synthetic oligonucleotide
ugcagaauaucuagaagua

SEQ ID NO: 3118001 - RNA, 19 nt, Artificial Sequence
  Description of Artificial Sequence: Synthetic oligonucleotide
ugauuuccugaguaaauuc

SEQ ID NO: 3118002 - RNA, 19 nt, Artificial Sequence
  Description of Artificial Sequence: Synthetic oligonucleotide
ugugucuauguuguucacg

SEQ ID NO: 3118003 - RNA, 19 nt, Artificial Sequence
  Description of Artificial Sequence: Synthetic oligonucleotide
guucacgucgacuuuaaca

SEQ ID NO: 3118004 - RNA, 19 nt, Artificial Sequence
  Description of Artificial Sequence: Synthetic oligonucleotide
uguuugauucugaggugag

SEQ ID NO: 3118005 - RNA, 19 nt, Artificial Sequence
  Description of Artificial Sequence: Synthetic oligonucleotide
aaauucuucuguagguuug

SEQ ID NO: 3118006 - RNA, 19 nt, Artificial Sequence
  Description of Artificial Sequence: Synthetic oligonucleotide
uaaauucuucuguagguuu

SEQ ID NO: 3118007 - RNA, 19 nt, Artificial Sequence
  Description of Artificial Sequence: Synthetic oligonucleotide
uguagguuuguuugauucu

SEQ ID NO: 3118008 - RNA, 19 nt, Artificial Sequence
  Description of Artificial Sequence: Synthetic oligonucleotide
uccugaguaaauucuucug

SEQ ID NO: 3118009 - RNA, 19 nt, Artificial Sequence
  Description of Artificial Sequence: Synthetic oligonucleotide
auaccugucucucugcaga

SEQ ID NO: 3118010 - RNA, 19 nt, Artificial Sequence
  Description of Artificial Sequence: Synthetic oligonucleotide
agaaguagaccuaaaugug

SEQ ID NO: 3118011 - RNA, 19 nt, Artificial Sequence
  Description of Artificial Sequence: Synthetic oligonucleotide
aaaucaugugauaccuguc

SEQ ID NO: 3118012 - RNA, 19 nt, Artificial Sequence
  Description of Artificial Sequence: Synthetic oligonucleotide
uuguuugauucugagguga

SEQ ID NO: 3118013 - RNA, 19 nt, Artificial Sequence
  Description of Artificial Sequence: Synthetic oligonucleotide
cuaaaugugucuauguugu

SEQ ID NO: 3118014 - RNA, 19 nt, Artificial Sequence
  Description of Artificial Sequence: Synthetic oligonucleotide
uuaugauuuccugaguaaa

SEQ ID NO: 3118015 - RNA, 19 nt, Artificial Sequence
  Description of Artificial Sequence: Synthetic oligonucleotide
caaccaaaucaugugauac

SEQ ID NO: 3118016 - RNA, 19 nt, Artificial Sequence
  Description of Artificial Sequence: Synthetic oligonucleotide
guacaaauagaauaagcgu

SEQ ID NO: 3118017 - RNA, 19 nt, Artificial Sequence
  Description of Artificial Sequence: Synthetic oligonucleotide
uuccugaguaaauucuucu

SEQ ID NO: 3118018 - RNA, 19 nt, Artificial Sequence
  Description of Artificial Sequence: Synthetic oligonucleotide
ucaugugauaccugucucu

SEQ ID NO: 3118019 - RNA, 19 nt, Artificial Sequence
  Description of Artificial Sequence: Synthetic oligonucleotide
aauaagcguuuguucuucu

SEQ ID NO: 3118020 - RNA, 19 nt, Artificial Sequence
  Description of Artificial Sequence: Synthetic oligonucleotide
acaguaagugauucuuucu

SEQ ID NO: 3118021 - RNA, 19 nt, Artificial Sequence
  Description of Artificial Sequence: Synthetic oligonucleotide
cuuguacaaauagaauaag

SEQ ID NO: 3118022 - RNA, 19 nt, Artificial Sequence
  Description of Artificial Sequence: Synthetic oligonucleotide
agguuuguuugauucugag

SEQ ID NO: 3118023 - RNA, 19 nt, Artificial Sequence
  Description of Artificial Sequence: Synthetic oligonucleotide
gccaacagcaaccaaauca

SEQ ID NO: 3118024 - RNA, 19 nt, Artificial Sequence
  Description of Artificial Sequence: Synthetic oligonucleotide
accaaaucaugugauaccu

SEQ ID NO: 3118025 - RNA, 19 nt, Artificial Sequence
  Description of Artificial Sequence: Synthetic oligonucleotide
uugauucugaggugaguca

SEQ ID NO: 3118026 - RNA, 19 nt, Artificial Sequence
  Description of Artificial Sequence: Synthetic oligonucleotide
auguuguucacgucgacuu

SEQ ID NO: 3118027 - RNA, 19 nt, Artificial Sequence
  Description of Artificial Sequence: Synthetic oligonucleotide
gauaccugucucucugcag

SEQ ID NO: 3118028 - RNA, 19 nt, Artificial Sequence
  Description of Artificial Sequence: Synthetic oligonucleotide
gacuuuaacaguaagugau

SEQ ID NO: 3118029 - RNA, 19 nt, Artificial Sequence
  Description of Artificial Sequence: Synthetic oligonucleotide
ugauaccugucucucugca

SEQ ID NO: 3118030 - RNA, 19 nt, Artificial Sequence
  Description of Artificial Sequence: Synthetic oligonucleotide
ccuaaaugugucuauguug

SEQ ID NO: 3118031 - RNA, 19 nt, Artificial Sequence
  Description of Artificial Sequence: Synthetic oligonucleotide
cuuuaacaguaagugauuc

SEQ ID NO: 3118032 - RNA, 19 nt, Artificial Sequence
  Description of Artificial Sequence: Synthetic oligonucleotide
ucucugcagaauaucuaga

SEQ ID NO: 3118033 - RNA, 19 nt, Artificial Sequence
  Description of Artificial Sequence: Synthetic oligonucleotide
uauguuguucacgucgacu

SEQ ID NO: 3118034 - RNA, 19 nt, Artificial Sequence
  Description of Artificial Sequence: Synthetic oligonucleotide
guagguuuguuugauucug

SEQ ID NO: 3118035 - RNA, 19 nt, Artificial Sequence
  Description of Artificial Sequence: Synthetic oligonucleotide
cugcagaauaucuagaagu

SEQ ID NO: 3118036 - RNA, 19 nt, Artificial Sequence
  Description of Artificial Sequence: Synthetic oligonucleotide
aguagaccuaaaugugucu

SEQ ID NO: 3118037 - RNA, 19 nt, Artificial Sequence
  Description of Artificial Sequence: Synthetic oligonucleotide
aauucuucuguagguuugu

SEQ ID NO: 3118038 - RNA, 19 nt, Artificial Sequence
  Description of Artificial Sequence: Synthetic oligonucleotide
uuguucuucuagguuuggg

SEQ ID NO: 3118039 - RNA, 19 nt, Artificial Sequence
  Description of Artificial Sequence: Synthetic oligonucleotide
guuaugauuuccugaguaa

SEQ ID NO: 3118040 - RNA, 19 nt, Artificial Sequence
  Description of Artificial Sequence: Synthetic oligonucleotide
uaacuucauggauuauugu

SEQ ID NO: 3118041 - RNA, 19 nt, Artificial Sequence
  Description of Artificial Sequence: Synthetic oligonucleotide
uagguuuguuugauucuga

SEQ ID NO: 3118042 - RNA, 19 nt, Artificial Sequence
  Description of Artificial Sequence: Synthetic oligonucleotide
agaauaagcguuuguucuu

SEQ ID NO: 3118043 - RNA, 19 nt, Artificial Sequence
  Description of Artificial Sequence: Synthetic oligonucleotide
uaucuagaaguagaccuaa

SEQ ID NO: 3118044 - RNA, 19 nt, Artificial Sequence
  Description of Artificial Sequence: Synthetic oligonucleotide
agcguuuguucuucuaggu

SEQ ID NO: 3118045 - RNA, 19 nt, Artificial Sequence
  Description of Artificial Sequence: Synthetic oligonucleotide
uuguuaugauuuccugagu

SEQ ID NO: 3118046 - RNA, 19 nt, Artificial Sequence
  Description of Artificial Sequence: Synthetic oligonucleotide
uaagugauucuuucuugua

SEQ ID NO: 3118047 - RNA, 19 nt, Artificial Sequence
  Description of Artificial Sequence: Synthetic oligonucleotide
acaaauagaauaagcguuu

SEQ ID NO: 3118048 - RNA, 19 nt, Artificial Sequence
  Description of Artificial Sequence: Synthetic oligonucleotide
uaacaguaagugauucuuu

SEQ ID NO: 3118049 - RNA, 19 nt, Artificial Sequence
  Description of Artificial Sequence: Synthetic oligonucleotide
caaaucaugugauaccugu

SEQ ID NO: 3118050 - RNA, 19 nt, Artificial Sequence
  Description of Artificial Sequence: Synthetic oligonucleotide
uguugaaauacuggaugaa

SEQ ID NO: 3118051 - RNA, 19 nt, Artificial Sequence
  Description of Artificial Sequence: Synthetic oligonucleotide
ucucucugcagaauaucua

SEQ ID NO: 3118052 - RNA, 19 nt, Artificial Sequence
  Description of Artificial Sequence: Synthetic oligonucleotide
ugauucugaggugagucaa

SEQ ID NO: 3118053 - RNA, 19 nt, Artificial Sequence
  Description of Artificial Sequence: Synthetic oligonucleotide
auacuggaugaaaauuguc

SEQ ID NO: 3118054 - RNA, 19 nt, Artificial Sequence
  Description of Artificial Sequence: Synthetic oligonucleotide
acuucauggauuauuguua

SEQ ID NO: 3118055 - RNA, 19 nt, Artificial Sequence
  Description of Artificial Sequence: Synthetic oligonucleotide
gaauaagcguuuguucuuc

SEQ ID NO: 3118056 - RNA, 19 nt, Artificial Sequence
  Description of Artificial Sequence: Synthetic oligonucleotide
accuaaaugugucuauguu

SEQ ID NO: 3118057 - RNA, 19 nt, Artificial Sequence
  Description of Artificial Sequence: Synthetic oligonucleotide
uuuguucuucuagguuugg

SEQ ID NO: 3118058 - RNA, 19 nt, Artificial Sequence
  Description of Artificial Sequence: Synthetic oligonucleotide
caaauagaauaagcguuug

SEQ ID NO: 3118059 - RNA, 19 nt, Artificial Sequence
  Description of Artificial Sequence: Synthetic oligonucleotide
uucauggauuauuguuaug

SEQ ID NO: 3118060 - RNA, 19 nt, Artificial Sequence
  Description of Artificial Sequence: Synthetic oligonucleotide
cugaggugagucaagaugu

SEQ ID NO: 3118061 - RNA, 19 nt, Artificial Sequence
  Description of Artificial Sequence: Synthetic oligonucleotide
augugucuauguuguucac

SEQ ID NO: 3118062 - RNA, 19 nt, Artificial Sequence
  Description of Artificial Sequence: Synthetic oligonucleotide
guuuguucuucuagguuug

SEQ ID NO: 3118063 - RNA, 19 nt, Artificial Sequence
  Description of Artificial Sequence: Synthetic oligonucleotide
uagaccuaaaugugucuau

SEQ ID NO: 3118064 - RNA, 19 nt, Artificial Sequence
  Description of Artificial Sequence: Synthetic oligonucleotide
aggugagucaagauguuga

SEQ ID NO: 3118065 - RNA, 19 nt, Artificial Sequence
  Description of Artificial Sequence: Synthetic oligonucleotide
gauucugaggugagucaag

SEQ ID NO: 3118066 - RNA, 19 nt, Artificial Sequence
  Description of Artificial Sequence: Synthetic oligonucleotide
agaccuaaaugugucuaug

SEQ ID NO: 3118067 - RNA, 19 nt, Artificial Sequence
  Description of Artificial Sequence: Synthetic oligonucleotide
uucuucuguagguuuguuu

SEQ ID NO: 3118068 - RNA, 19 nt, Artificial Sequence
  Description of Artificial Sequence: Synthetic oligonucleotide
guaagugauucuuucuugu

SEQ ID NO: 3118069 - RNA, 19 nt, Artificial Sequence
  Description of Artificial Sequence: Synthetic oligonucleotide
gugucuauguuguucacgu

SEQ ID NO: 3118070 - RNA, 19 nt, Artificial Sequence
  Description of Artificial Sequence: Synthetic oligonucleotide
caugugauaccugucucuc

SEQ ID NO: 3118071 - RNA, 19 nt, Artificial Sequence
  Description of Artificial Sequence: Synthetic oligonucleotide
gaaguagaccuaaaugugu

SEQ ID NO: 3118072 - RNA, 19 nt, Artificial Sequence
  Description of Artificial Sequence: Synthetic oligonucleotide
gaaauacuggaugaaaauu

SEQ ID NO: 3118073 - RNA, 19 nt, Artificial Sequence
  Description of Artificial Sequence: Synthetic oligonucleotide
augauuuccugaguaaauu

SEQ ID NO: 3118074 - RNA, 19 nt, Artificial Sequence
  Description of Artificial Sequence: Synthetic oligonucleotide
cugaguaaauucuucugua

SEQ ID NO: 3118075 - RNA, 19 nt, Artificial Sequence
  Description of Artificial Sequence: Synthetic oligonucleotide
agauguugaaauacuggau

SEQ ID NO: 3118076 - RNA, 19 nt, Artificial Sequence
  Description of Artificial Sequence: Synthetic oligonucleotide
gaggugagucaagauguug

SEQ ID NO: 3118077 - RNA, 19 nt, Artificial Sequence
  Description of Artificial Sequence: Synthetic oligonucleotide
auucugaggugagucaaga

SEQ ID NO: 3118078 - RNA, 19 nt, Artificial Sequence
  Description of Artificial Sequence: Synthetic oligonucleotide
gagucaagauguugaaaua

SEQ ID NO: 3118079 - RNA, 19 nt, Artificial Sequence
  Description of Artificial Sequence: Synthetic oligonucleotide
uuguucacgucgacuuuaa

SEQ ID NO: 3118080 - RNA, 19 nt, Artificial Sequence
  Description of Artificial Sequence: Synthetic oligonucleotide
gcagaauaucuagaaguag

SEQ ID NO: 3118081 - RNA, 19 nt, Artificial Sequence
  Description of Artificial Sequence: Synthetic oligonucleotide
gaccuaaaugugucuaugu

SEQ ID NO: 3118082 - RNA, 19 nt, Artificial Sequence
  Description of Artificial Sequence: Synthetic oligonucleotide
ucacgucgacuuuaacagu

SEQ ID NO: 3118083 - RNA, 19 nt, Artificial Sequence
  Description of Artificial Sequence: Synthetic oligonucleotide
auaucuagaaguagaccua

SEQ ID NO: 3118084 - RNA, 19 nt, Artificial Sequence
  Description of Artificial Sequence: Synthetic oligonucleotide
ggauuauuguuaugauuuc

SEQ ID NO: 3118085 - RNA, 19 nt, Artificial Sequence
  Description of Artificial Sequence: Synthetic oligonucleotide
ucuguagguuuguuugauu

SEQ ID NO: 3118086 - RNA, 19 nt, Artificial Sequence
  Description of Artificial Sequence: Synthetic oligonucleotide
cagcaaccaaaucauguga

SEQ ID NO: 3118087 - RNA, 19 nt, Artificial Sequence
  Description of Artificial Sequence: Synthetic oligonucleotide
uguucacgucgacuuuaac

SEQ ID NO: 3118088 - RNA, 19 nt, Artificial Sequence
  Description of Artificial Sequence: Synthetic oligonucleotide
agcaaccaaaucaugugau

SEQ ID NO: 3118089 - RNA, 19 nt, Artificial Sequence
  Description of Artificial Sequence: Synthetic oligonucleotide
augugauaccugucucucu

SEQ ID NO: 3118090 - RNA, 19 nt, Artificial Sequence
  Description of Artificial Sequence: Synthetic oligonucleotide
ugucucucugcagaauauc

SEQ ID NO: 3118091 - RNA, 19 nt, Artificial Sequence
  Description of Artificial Sequence: Synthetic oligonucleotide
uucugaggugagucaagau

SEQ ID NO: 3118092 - RNA, 19 nt, Artificial Sequence
  Description of Artificial Sequence: Synthetic oligonucleotide
auaagcguuuguucuucua

SEQ ID NO: 3118093 - RNA, 19 nt, Artificial Sequence
  Description of Artificial Sequence: Synthetic oligonucleotide
cacgucgacuuuaacagua

SEQ ID NO: 3118094 - RNA, 19 nt, Artificial Sequence
  Description of Artificial Sequence: Synthetic oligonucleotide
gugauucuuucuuguacaa

SEQ ID NO: 3118095 - RNA, 19 nt, Artificial Sequence
  Description of Artificial Sequence: Synthetic oligonucleotide
ugucuauguuguucacguc

SEQ ID NO: 3118096 - RNA, 19 nt, Artificial Sequence
  Description of Artificial Sequence: Synthetic oligonucleotide
cuauguuguucacgucgac

SEQ ID NO: 3118097 - RNA, 19 nt, Artificial Sequence
  Description of Artificial Sequence: Synthetic oligonucleotide
ugaggugagucaagauguu

SEQ ID NO: 3118098 - RNA, 19 nt, Artificial Sequence
  Description of Artificial Sequence: Synthetic oligonucleotide
acuuuaacaguaagugauu

SEQ ID NO: 3118099 - RNA, 19 nt, Artificial Sequence
  Description of Artificial Sequence: Synthetic oligonucleotide
guagaccuaaaugugucua

SEQ ID NO: 3118100 - RNA, 19 nt, Artificial Sequence
  Description of Artificial Sequence: Synthetic oligonucleotide
gucaagauguugaaauacu

SEQ ID NO: 3118101 - RNA, 19 nt, Artificial Sequence
  Description of Artificial Sequence: Synthetic oligonucleotide
cuucauggauuauuguuau

SEQ ID NO: 3118102 - RNA, 19 nt, Artificial Sequence
  Description of Artificial Sequence: Synthetic oligonucleotide
auucuuucuuguacaaaua

SEQ ID NO: 3118103 - RNA, 19 nt, Artificial Sequence
  Description of Artificial Sequence: Synthetic oligonucleotide
uaccugucucucugcagaa

SEQ ID NO: 3118104 - RNA, 19 nt, Artificial Sequence
  Description of Artificial Sequence: Synthetic oligonucleotide
ugccaacagcaaccaaauc

SEQ ID NO: 3118105 - RNA, 19 nt, Artificial Sequence
  Description of Artificial Sequence: Synthetic oligonucleotide
gucgacuuuaacaguaagu

SEQ ID NO: 3118106 - RNA, 19 nt, Artificial Sequence
  Description of Artificial Sequence: Synthetic oligonucleotide
guuguucacgucgacuuua

SEQ ID NO: 3118107 - RNA, 19 nt, Artificial Sequence
  Description of Artificial Sequence: Synthetic oligonucleotide
ggugagucaagauguugaa

SEQ ID NO: 3118108 - RNA, 19 nt, Artificial Sequence
  Description of Artificial Sequence: Synthetic oligonucleotide
cauggauuauuguuaugau

SEQ ID NO: 3118109 - RNA, 19 nt, Artificial Sequence
  Description of Artificial Sequence: Synthetic oligonucleotide
ccaaaucaugugauaccug

SEQ ID NO: 3118110 - RNA, 19 nt, Artificial Sequence
  Description of Artificial Sequence: Synthetic oligonucleotide
caguaagugauucuuucuu

SEQ ID NO: 3118111 - RNA, 19 nt, Artificial Sequence
  Description of Artificial Sequence: Synthetic oligonucleotide
gucucucugcagaauaucu

SEQ ID NO: 3118112 - RNA, 19 nt, Artificial Sequence
  Description of Artificial Sequence: Synthetic oligonucleotide
gugagucaagauguugaaa

SEQ ID NO: 3118113 - RNA, 19 nt, Artificial Sequence
  Description of Artificial Sequence: Synthetic oligonucleotide
ccugaguaaauucuucugu

SEQ ID NO: 3118114 - RNA, 19 nt, Artificial Sequence
  Description of Artificial Sequence: Synthetic oligonucleotide
cuggaugaaaauugucauu

SEQ ID NO: 3118115 - RNA, 19 nt, Artificial Sequence
  Description of Artificial Sequence: Synthetic oligonucleotide
gcaaccaaaucaugugaua

SEQ ID NO: 3118116 - RNA, 19 nt, Artificial Sequence
  Description of Artificial Sequence: Synthetic oligonucleotide
aucuagaaguagaccuaaa

SEQ ID NO: 3118117 - RNA, 19 nt, Artificial Sequence
  Description of Artificial Sequence: Synthetic oligonucleotide
cgacuuuaacaguaaguga

SEQ ID NO: 3118118 - RNA, 19 nt, Artificial Sequence
  Description of Artificial Sequence: Synthetic oligonucleotide
guuugauucugaggugagu

SEQ ID NO: 3118119 - RNA, 19 nt, Artificial Sequence
  Description of Artificial Sequence: Synthetic oligonucleotide
acgucgacuuuaacaguaa

SEQ ID NO: 3118120 - RNA, 19 nt, Artificial Sequence
  Description of Artificial Sequence: Synthetic oligonucleotide
cgucgacuuuaacaguaag

SEQ ID NO: 3118121 - RNA, 19 nt, Artificial Sequence
  Description of Artificial Sequence: Synthetic oligonucleotide
cugucucucugcagaauau

SEQ ID NO: 3118122 - RNA, 19 nt, Artificial Sequence
  Description of Artificial Sequence: Synthetic oligonucleotide
ccugucucucugcagaaua

SEQ ID NO: 3118123 - RNA, 19 nt, Artificial Sequence
  Description of Artificial Sequence: Synthetic oligonucleotide
cguuuguucuucuagguuu

SEQ ID NO: 3118124 - RNA, 19 nt, Artificial Sequence
  Description of Artificial Sequence: Synthetic oligonucleotide
accugucucucugcagaau

SEQ ID NO: 3118125 - RNA, 19 nt, Artificial Sequence
  Description of Artificial Sequence: Synthetic oligonucleotide
gcguuuguucuucuagguu

SEQ ID NO: 3118126 - RNA, 19 nt, Artificial Sequence
  Description of Artificial Sequence: Synthetic oligonucleotide
auuuguaauagccagaaac

SEQ ID NO: 3118127 - RNA, 19 nt, Artificial Sequence
  Description of Artificial Sequence: Synthetic oligonucleotide
aagaaaccauucuagagcg

SEQ ID NO: 3118128 - RNA, 19 nt, Artificial Sequence
  Description of Artificial Sequence: Synthetic oligonucleotide
gaagaaaccauucuagagc

SEQ ID NO: 3118129 - RNA, 19 nt, Artificial Sequence
  Description of Artificial Sequence: Synthetic oligonucleotide
agcauuauuuguaauagcc

SEQ ID NO: 3118130 - RNA, 19 nt, Artificial Sequence
  Description of Artificial Sequence: Synthetic oligonucleotide
cauuauuuguaauagccag

SEQ ID NO: 3118131 - RNA, 19 nt, Artificial Sequence
  Description of Artificial Sequence: Synthetic oligonucleotide
ugggguacuacucagcaag

SEQ ID NO: 3118132 - RNA, 19 nt, Artificial Sequence
  Description of Artificial Sequence: Synthetic oligonucleotide
agaagaaaccauucuagag

SEQ ID NO: 3118133 - RNA, 19 nt, Artificial Sequence
  Description of Artificial Sequence: Synthetic oligonucleotide
ugucucaccagucaaccag

SEQ ID NO: 3118134 - RNA, 19 nt, Artificial Sequence
  Description of Artificial Sequence: Synthetic oligonucleotide
aacccaaucaacaaagugu

SEQ ID NO: 3118135 - RNA, 19 nt, Artificial Sequence
  Description of Artificial Sequence: Synthetic oligonucleotide
aaugggguacuacucagca

SEQ ID NO: 3118136 - RNA, 19 nt, Artificial Sequence
  Description of Artificial Sequence: Synthetic oligonucleotide
ucaccagucaaccagggaa

SEQ ID NO: 3118137 - RNA, 19 nt, Artificial Sequence
  Description of Artificial Sequence: Synthetic oligonucleotide
uaacccaaucaacaaagug

SEQ ID NO: 3118138 - RNA, 19 nt, Artificial Sequence
  Description of Artificial Sequence: Synthetic oligonucleotide
gaaaccauucuagagcgag

SEQ ID NO: 3118139 - RNA, 19 nt, Artificial Sequence
  Description of Artificial Sequence: Synthetic oligonucleotide
uucuuagcagcauuauuug

SEQ ID NO: 3118140 - RNA, 19 nt, Artificial Sequence
  Description of Artificial Sequence: Synthetic oligonucleotide
uuauuuguaauagccagaa

SEQ ID NO: 3118141 - RNA, 19 nt, Artificial Sequence
  Description of Artificial Sequence: Synthetic oligonucleotide
aacaaagugugugugugug

SEQ ID NO: 3118142 - RNA, 19 nt, Artificial Sequence
  Description of Artificial Sequence: Synthetic oligonucleotide
ucuagagcgagguaaccca

SEQ ID NO: 3118143 - RNA, 19 nt, Artificial Sequence
  Description of Artificial Sequence: Synthetic oligonucleotide
ucaacaaagugugugugug

SEQ ID NO: 3118144 - RNA, 19 nt, Artificial Sequence
  Description of Artificial Sequence: Synthetic oligonucleotide
aaucaacaaagugugugug

SEQ ID NO: 3118145 - RNA, 19 nt, Artificial Sequence
  Description of Artificial Sequence: Synthetic oligonucleotide
uagaagaaaccauucuaga

SEQ ID NO: 3118146 - RNA, 19 nt, Artificial Sequence
  Description of Artificial Sequence: Synthetic oligonucleotide
acaaugggguacuacucag

SEQ ID NO: 3118147 - RNA, 19 nt, Artificial Sequence
  Description of Artificial Sequence: Synthetic oligonucleotide
gguaacccaaucaacaaag

SEQ ID NO: 3118148 - RNA, 19 nt, Artificial Sequence
  Description of Artificial Sequence: Synthetic oligonucleotide
ugugucucaccagucaacc

SEQ ID NO: 3118149 - RNA, 19 nt, Artificial Sequence
  Description of Artificial Sequence: Synthetic oligonucleotide
aaccauucuagagcgaggu

SEQ ID NO: 3118150 - RNA, 19 nt, Artificial Sequence
  Description of Artificial Sequence: Synthetic oligonucleotide
agcagcauuauuuguaaua

SEQ ID NO: 3118151 - RNA, 19 nt, Artificial Sequence
  Description of Artificial Sequence: Synthetic oligonucleotide
uucuagagcgagguaaccc

SEQ ID NO: 3118152 - RNA, 19 nt, Artificial Sequence
  Description of Artificial Sequence: Synthetic oligonucleotide
aagugugugugugugugug

SEQ ID NO: 3118153 - RNA, 19 nt, Artificial Sequence
  Description of Artificial Sequence: Synthetic oligonucleotide
ugugugucucaccagucaa

SEQ ID NO: 3118154 - RNA, 19 nt, Artificial Sequence
  Description of Artificial Sequence: Synthetic oligonucleotide
ucuuagcagcauuauuugu

SEQ ID NO: 3118155 - RNA, 19 nt, Artificial Sequence
  Description of Artificial Sequence: Synthetic oligonucleotide
aucaacaaagugugugugu

SEQ ID NO: 3118156 - RNA, 19 nt, Artificial Sequence
  Description of Artificial Sequence: Synthetic oligonucleotide
acccaaucaacaaagugug

SEQ ID NO: 3118157 - RNA, 19 nt, Artificial Sequence
  Description of Artificial Sequence: Synthetic oligonucleotide
cauucuagagcgagguaac

SEQ ID NO: 3118158 - RNA, 19 nt, Artificial Sequence
  Description of Artificial Sequence: Synthetic oligonucleotide
ucucaccagucaaccaggg

SEQ ID NO: 3118159 - RNA, 19 nt, Artificial Sequence
  Description of Artificial Sequence: Synthetic oligonucleotide
aaaccauucuagagcgagg

SEQ ID NO: 3118160 - RNA, 19 nt, Artificial Sequence
  Description of Artificial Sequence: Synthetic oligonucleotide
aaagugugugugugugugu

SEQ ID NO: 3118161 - RNA, 19 nt, Artificial Sequence
  Description of Artificial Sequence: Synthetic oligonucleotide
cuuagcagcauuauuugua

SEQ ID NO: 3118162 - RNA, 19 nt, Artificial Sequence
  Description of Artificial Sequence: Synthetic oligonucleotide
auucuagagcgagguaacc

SEQ ID NO: 3118163 - RNA, 19 nt, Artificial Sequence
  Description of Artificial Sequence: Synthetic oligonucleotide
caaagugugugugugugug

SEQ ID NO: 3118164 - RNA, 19 nt, Artificial Sequence
  Description of Artificial Sequence: Synthetic oligonucleotide
gcagcauuauuuguaauag

SEQ ID NO: 3118165 - RNA, 19 nt, Artificial Sequence
  Description of Artificial Sequence: Synthetic oligonucleotide
uguucuuagcagcauuauu

SEQ ID NO: 3118166 - RNA, 19 nt, Artificial Sequence
  Description of Artificial Sequence: Synthetic oligonucleotide
auuauuuguaauagccaga

SEQ ID NO: 3118167 - RNA, 19 nt, Artificial Sequence
  Description of Artificial Sequence: Synthetic oligonucleotide
cagcauuauuuguaauagc

SEQ ID NO: 3118168 - RNA, 19 nt, Artificial Sequence
  Description of Artificial Sequence: Synthetic oligonucleotide
gagguaacccaaucaacaa

SEQ ID NO: 3118169 - RNA, 19 nt, Artificial Sequence
  Description of Artificial Sequence: Synthetic oligonucleotide
uauuuguaauagccagaaa

SEQ ID NO: 3118170 - RNA, 19 nt, Artificial Sequence
  Description of Artificial Sequence: Synthetic oligonucleotide
uagauggcccucaaccgaa

SEQ ID NO: 3118171 - RNA, 19 nt, Artificial Sequence
  Description of Artificial Sequence: Synthetic oligonucleotide
cauuuacacaaugggguac

SEQ ID NO: 3118172 - RNA, 19 nt, Artificial Sequence
  Description of Artificial Sequence: Synthetic oligonucleotide
caaugggguacuacucagc

SEQ ID NO: 3118173 - RNA, 19 nt, Artificial Sequence
  Description of Artificial Sequence: Synthetic oligonucleotide
gugugugugugucucacca

SEQ ID NO: 3118174 - RNA, 19 nt, Artificial Sequence
  Description of Artificial Sequence: Synthetic oligonucleotide
ugugugugucucaccaguc

SEQ ID NO: 3118175 - RNA, 19 nt, Artificial Sequence
  Description of Artificial Sequence: Synthetic oligonucleotide
ccaaucaacaaagugugug

SEQ ID NO: 3118176 - RNA, 19 nt, Artificial Sequence
  Description of Artificial Sequence: Synthetic oligonucleotide
acaaagugugugugugugu

SEQ ID NO: 3118177 - RNA, 19 nt, Artificial Sequence
  Description of Artificial Sequence: Synthetic oligonucleotide
ugugugugugugucucacc

SEQ ID NO: 3118178 - RNA, 19 nt, Artificial Sequence
  Description of Artificial Sequence: Synthetic oligonucleotide
ccuagauggcccucaaccg

SEQ ID NO: 3118179 - RNA, 19 nt, Artificial Sequence
  Description of Artificial Sequence: Synthetic oligonucleotide
guucuuagcagcauuauuu

SEQ ID NO: 3118180 - RNA, 19 nt, Artificial Sequence
  Description of Artificial Sequence: Synthetic oligonucleotide
cacaaugggguacuacuca

SEQ ID NO: 3118181 - RNA, 19 nt, Artificial Sequence
  Description of Artificial Sequence: Synthetic oligonucleotide
gucucaccagucaaccagg

SEQ ID NO: 3118182 - RNA, 19 nt, Artificial Sequence
  Description of Artificial Sequence: Synthetic oligonucleotide
cuagauggcccucaaccga

SEQ ID NO: 3118183 - RNA, 19 nt, Artificial Sequence
  Description of Artificial Sequence: Synthetic oligonucleotide
ugugugugugugugugucu

SEQ ID NO: 3118184 - RNA, 19 nt, Artificial Sequence
  Description of Artificial Sequence: Synthetic oligonucleotide
ugugugugugugugucuca

SEQ ID NO: 3118185 - RNA, 19 nt, Artificial Sequence
  Description of Artificial Sequence: Synthetic oligonucleotide
ugugugugugugugugugu

SEQ ID NO: 3118186 - RNA, 19 nt, Artificial Sequence
  Description of Artificial Sequence: Synthetic oligonucleotide
caaucaacaaagugugugu

SEQ ID NO: 3118187 - RNA, 19 nt, Artificial Sequence
  Description of Artificial Sequence: Synthetic oligonucleotide
gugugugugugugugugug

SEQ ID NO: 3118188 - RNA, 19 nt, Artificial Sequence
  Description of Artificial Sequence: Synthetic oligonucleotide
gguacuacucagcaagaaa

SEQ ID NO: 3118189 - RNA, 19 nt, Artificial Sequence
  Description of Artificial Sequence: Synthetic oligonucleotide
agugugugugugugugugu

SEQ ID NO: 3118190 - RNA, 19 nt, Artificial Sequence
  Description of Artificial Sequence: Synthetic oligonucleotide
auggcccucaaccgaagaa

SEQ ID NO: 3118191 - RNA, 19 nt, Artificial Sequence
  Description of Artificial Sequence: Synthetic oligonucleotide
gcauuauuuguaauagcca

SEQ ID NO: 3118192 - RNA, 19 nt, Artificial Sequence
  Description of Artificial Sequence: Synthetic oligonucleotide
gugugugucucaccaguca

SEQ ID NO: 3118193 - RNA, 19 nt, Artificial Sequence
  Description of Artificial Sequence: Synthetic oligonucleotide
uggcccucaaccgaagaau

SEQ ID NO: 3118194 - RNA, 19 nt, Artificial Sequence
  Description of Artificial Sequence: Synthetic oligonucleotide
uagagcgagguaacccaau

SEQ ID NO: 3118195 - RNA, 19 nt, Artificial Sequence
  Description of Artificial Sequence: Synthetic oligonucleotide
gauggcccucaaccgaaga

SEQ ID NO: 3118196 - RNA, 19 nt, Artificial Sequence
  Description of Artificial Sequence: Synthetic oligonucleotide
uagcagcauuauuuguaau

SEQ ID NO: 3118197 - RNA, 19 nt, Artificial Sequence
  Description of Artificial Sequence: Synthetic oligonucleotide
guguguguguguguguguc

SEQ ID NO: 3118198 - RNA, 19 nt, Artificial Sequence
  Description of Artificial Sequence: Synthetic oligonucleotide
cgagguaacccaaucaaca

SEQ ID NO: 3118199 - RNA, 19 nt, Artificial Sequence
  Description of Artificial Sequence: Synthetic oligonucleotide
auguucuuagcagcauuau

SEQ ID NO: 3118200 - RNA, 19 nt, Artificial Sequence
  Description of Artificial Sequence: Synthetic oligonucleotide
augggguacuacucagcaa

SEQ ID NO: 3118201 - RNA, 19 nt, Artificial Sequence
  Description of Artificial Sequence: Synthetic oligonucleotide
gugugugugugugugucuc

SEQ ID NO: 3118202 - RNA, 19 nt, Artificial Sequence
  Description of Artificial Sequence: Synthetic oligonucleotide
gugugugugucucaccagu

SEQ ID NO: 3118203 - RNA, 19 nt, Artificial Sequence
  Description of Artificial Sequence: Synthetic oligonucleotide
gugugugugugugucucac

SEQ ID NO: 3118204 - RNA, 19 nt, Artificial Sequence
  Description of Artificial Sequence: Synthetic oligonucleotide
cuagagcgagguaacccaa

SEQ ID NO: 3118205 - RNA, 19 nt, Artificial Sequence
  Description of Artificial Sequence: Synthetic oligonucleotide
gugugucucaccagucaac

SEQ ID NO: 3118206 - RNA, 19 nt, Artificial Sequence
  Description of Artificial Sequence: Synthetic oligonucleotide
gugucucaccagucaacca

SEQ ID NO: 3118207 - RNA, 19 nt, Artificial Sequence
  Description of Artificial Sequence: Synthetic oligonucleotide
accauucuagagcgaggua

SEQ ID NO: 3118208 - RNA, 19 nt, Artificial Sequence
  Description of Artificial Sequence: Synthetic oligonucleotide
ccauucuagagcgagguaa

SEQ ID NO: 3118209 - RNA, 19 nt, Artificial Sequence
  Description of Artificial Sequence: Synthetic oligonucleotide
agaaaccauucuagagcga

SEQ ID NO: 3118210 - RNA, 19 nt, Artificial Sequence
  Description of Artificial Sequence: Synthetic oligonucleotide
ggcccucaaccgaagaaug

SEQ ID NO: 3118211 - RNA, 19 nt, Artificial Sequence
  Description of Artificial Sequence: Synthetic oligonucleotide
cucaccagucaaccaggga

SEQ ID NO: 3118212 - RNA, 19 nt, Artificial Sequence
  Description of Artificial Sequence: Synthetic oligonucleotide
caacaaagugugugugugu

SEQ ID NO: 3118213 - RNA, 19 nt, Artificial Sequence
  Description of Artificial Sequence: Synthetic oligonucleotide
guaacccaaucaacaaagu

SEQ ID NO: 3118214 - RNA, 19 nt, Artificial Sequence
  Description of Artificial Sequence: Synthetic oligonucleotide
accagucaaccagggaaua

SEQ ID NO: 3118215 - RNA, 19 nt, Artificial Sequence
  Description of Artificial Sequence: Synthetic oligonucleotide
ggguacuacucagcaagaa

SEQ ID NO: 3118216 - RNA, 19 nt, Artificial Sequence
  Description of Artificial Sequence: Synthetic oligonucleotide
gggguacuacucagcaaga

SEQ ID NO: 3118217 - RNA, 19 nt, Artificial Sequence
  Description of Artificial Sequence: Synthetic oligonucleotide
cccaaucaacaaagugugu

SEQ ID NO: 3118218 - RNA, 19 nt, Artificial Sequence
  Description of Artificial Sequence: Synthetic oligonucleotide
aaagaaaagugccagccac

SEQ ID NO: 3118219 - RNA, 19 nt, Artificial Sequence
  Description of Artificial Sequence: Synthetic oligonucleotide
caaagaagcaucuuggggc

SEQ ID NO: 3118220 - RNA, 19 nt, Artificial Sequence
  Description of Artificial Sequence: Synthetic oligonucleotide
aaaagugccagccacucug

SEQ ID NO: 3118221 - RNA, 19 nt, Artificial Sequence
  Description of Artificial Sequence: Synthetic oligonucleotide
  modified_base (6)..(6): a, c, u, g, unknown or other
aaaacnuacuucuggugag

SEQ ID NO: 3118222 - RNA, 19 nt, Artificial Sequence
  Description of Artificial Sequence: Synthetic oligonucleotide
acaacaagggcacuucagc

SEQ ID NO: 3118223 - RNA, 19 nt, Artificial Sequence
  Description of Artificial Sequence: Synthetic oligonucleotide
aacaagggcacuucagcac

SEQ ID NO: 3118224 - RNA, 19 nt, Artificial Sequence
  Description of Artificial Sequence: Synthetic oligonucleotide
agugcuucacuguugacuc

SEQ ID NO: 3118225 - RNA, 19 nt, Artificial Sequence
  Description of Artificial Sequence: Synthetic oligonucleotide
ucaaagaaaagugccagcc

SEQ ID NO: 3118226 - RNA, 19 nt, Artificial Sequence
  Description of Artificial Sequence: Synthetic oligonucleotide
uuuucugugccucugcugu

SEQ ID NO: 3118227 - RNA, 19 nt, Artificial Sequence
  Description of Artificial Sequence: Synthetic oligonucleotide
ggugauaagaggcagguag

SEQ ID NO: 3118228 - RNA, 19 nt, Artificial Sequence
  Description of Artificial Sequence: Synthetic oligonucleotide
uucacuguugacuccaaag

SEQ ID NO: 3118229 - RNA, 19 nt, Artificial Sequence
  Description of Artificial Sequence: Synthetic oligonucleotide
aaagaagcaucuuggggca

SEQ ID NO: 3118230 - RNA, 19 nt, Artificial Sequence
  Description of Artificial Sequence: Synthetic oligonucleotide
auaagaggcagguagugcu

SEQ ID NO: 3118231 - RNA, 19 nt, Artificial Sequence
  Description of Artificial Sequence: Synthetic oligonucleotide
ucacuguugacuccaaaga

SEQ ID NO: 3118232 - RNA, 19 nt, Artificial Sequence
  Description of Artificial Sequence: Synthetic oligonucleotide
ucucaaagaaaagugccag

SEQ ID NO: 3118233 - RNA, 19 nt, Artificial Sequence
  Description of Artificial Sequence: Synthetic oligonucleotide
cuccaaagaagcaucuugg

SEQ ID NO: 3118234 - RNA, 19 nt, Artificial Sequence
  Description of Artificial Sequence: Synthetic oligonucleotide
acuccaaagaagcaucuug

SEQ ID NO: 3118235 - RNA, 19 nt, Artificial Sequence
  Description of Artificial Sequence: Synthetic oligonucleotide
aagaucagggugauaagag

SEQ ID NO: 3118236 - RNA, 19 nt, Artificial Sequence
  Description of Artificial Sequence: Synthetic oligonucleotide
uccaaagaagcaucuuggg

SEQ ID NO: 3118237 - RNA, 19 nt, Artificial Sequence
  Description of Artificial Sequence: Synthetic oligonucleotide
agaucagggugauaagagg

SEQ ID NO: 3118238 - RNA, 19 nt, Artificial Sequence
  Description of Artificial Sequence: Synthetic oligonucleotide
caugccagcacucugccag

SEQ ID NO: 3118239 - RNA, 19 nt, Artificial Sequence
  Description of Artificial Sequence: Synthetic oligonucleotide
gaucagggugauaagaggc

SEQ ID NO: 3118240 - RNA, 19 nt, Artificial Sequence
  Description of Artificial Sequence: Synthetic oligonucleotide
uacaacaagggcacuucag

SEQ ID NO: 3118241 - RNA, 19 nt, Artificial Sequence
  Description of Artificial Sequence: Synthetic oligonucleotide
aguaccugcaaccgaucac

SEQ ID NO: 3118242 - RNA, 19 nt, Artificial Sequence
  Description of Artificial Sequence: Synthetic oligonucleotide
agugccagccacucugacc

SEQ ID NO: 3118243 - RNA, 19 nt, Artificial Sequence
  Description of Artificial Sequence: Synthetic oligonucleotide
aauacccuucgcuuuucug

SEQ ID NO: 3118244 - RNA, 19 nt, Artificial Sequence
  Description of Artificial Sequence: Synthetic oligonucleotide
gauuggcaagaucagggug

SEQ ID NO: 3118245 - RNA, 19 nt, Artificial Sequence
  Description of Artificial Sequence: Synthetic oligonucleotide
auacccuucgcuuuucugu

SEQ ID NO: 3118246 - RNA, 19 nt, Artificial Sequence
  Description of Artificial Sequence: Synthetic oligonucleotide
ucacaugccagcacucugc

SEQ ID NO: 3118247 - RNA, 19 nt, Artificial Sequence
  Description of Artificial Sequence: Synthetic oligonucleotide
ccugcaaccgaucacaugc

SEQ ID NO: 3118248 - RNA, 19 nt, Artificial Sequence
  Description of Artificial Sequence: Synthetic oligonucleotide
cacagcaguaccugcaacc

SEQ ID NO: 3118249 - RNA, 19 nt, Artificial Sequence
  Description of Artificial Sequence: Synthetic oligonucleotide
cuuggggcagccuggagcc

SEQ ID NO: 3118250 - RNA, 19 nt, Artificial Sequence
  Description of Artificial Sequence: Synthetic oligonucleotide
agcccacccacaaauaccc

SEQ ID NO: 3118251 - RNA, 19 nt, Artificial Sequence
  Description of Artificial Sequence: Synthetic oligonucleotide
ugcccgauacaacaagggc

SEQ ID NO: 3118252 - RNA, 19 nt, Artificial Sequence
  Description of Artificial Sequence: Synthetic oligonucleotide
acuguugacuccaaagaag

SEQ ID NO: 3118253 - RNA, 19 nt, Artificial Sequence
  Description of Artificial Sequence: Synthetic oligonucleotide
ucugcuguuggcacacagc

SEQ ID NO: 3118254 - RNA, 19 nt, Artificial Sequence
  Description of Artificial Sequence: Synthetic oligonucleotide
cucaaagaaaagugccagc

SEQ ID NO: 3118255 - RNA, 19 nt, Artificial Sequence
  Description of Artificial Sequence: Synthetic oligonucleotide
gauaagaggcagguagugc

SEQ ID NO: 3118256 - RNA, 19 nt, Artificial Sequence
  Description of Artificial Sequence: Synthetic oligonucleotide
caaccgaucacaugccagc

SEQ ID NO: 3118257 - RNA, 19 nt, Artificial Sequence
  Description of Artificial Sequence: Synthetic oligonucleotide
ugauaagaggcagguagug

SEQ ID NO: 3118258 - RNA, 19 nt, Artificial Sequence
  Description of Artificial Sequence: Synthetic oligonucleotide
uguugacuccaaagaagca

SEQ ID NO: 3118259 - RNA, 19 nt, Artificial Sequence
  Description of Artificial Sequence: Synthetic oligonucleotide
acagcaguaccugcaaccg

SEQ ID NO: 3118260 - RNA, 19 nt, Artificial Sequence
  Description of Artificial Sequence: Synthetic oligonucleotide
acaagggcacuucagcaca

SEQ ID NO: 3118261 - RNA, 19 nt, Artificial Sequence
  Description of Artificial Sequence: Synthetic oligonucleotide
auuggcaagaucaggguga

SEQ ID NO: 3118262 - RNA, 19 nt, Artificial Sequence
  Description of Artificial Sequence: Synthetic oligonucleotide
gugccagccacucugacca

SEQ ID NO: 3118263 - RNA, 19 nt, Artificial Sequence
  Description of Artificial Sequence: Synthetic oligonucleotide
agaagcaucuuggggcagc

SEQ ID NO: 3118264 - RNA, 19 nt, Artificial Sequence
  Description of Artificial Sequence: Synthetic oligonucleotide
gggauuggcaagaucaggg

SEQ ID NO: 3118265 - RNA, 19 nt, Artificial Sequence
  Description of Artificial Sequence: Synthetic oligonucleotide
ucagggugauaagaggcag

SEQ ID NO: 3118266 - RNA, 19 nt, Artificial Sequence
  Description of Artificial Sequence: Synthetic oligonucleotide
gauacaacaagggcacuuc

SEQ ID NO: 3118267 - RNA, 19 nt, Artificial Sequence
  Description of Artificial Sequence: Synthetic oligonucleotide
agggcacuucagcacagac

SEQ ID NO: 3118268 - RNA, 19 nt, Artificial Sequence
  Description of Artificial Sequence: Synthetic oligonucleotide
cugcccgauacaacaaggg

SEQ ID NO: 3118269 - RNA, 19 nt, Artificial Sequence
  Description of Artificial Sequence: Synthetic oligonucleotide
uacccuucgcuuuucugug

SEQ ID NO: 3118270 - RNA, 19 nt, Artificial Sequence
  Description of Artificial Sequence: Synthetic oligonucleotide
aaauacccuucgcuuuucu

SEQ ID NO: 3118271 - RNA, 19 nt, Artificial Sequence
  Description of Artificial Sequence: Synthetic oligonucleotide
ucugugccucugcuguugg

SEQ ID NO: 3118272 - RNA, 19 nt, Artificial Sequence
  Description of Artificial Sequence: Synthetic oligonucleotide
cacucugccaggcacugcc

SEQ ID NO: 3118273 - RNA, 19 nt, Artificial Sequence
  Description of Artificial Sequence: Synthetic oligonucleotide
ugacuccaaagaagcaucu

SEQ ID NO: 3118274 - RNA, 19 nt, Artificial Sequence
  Description of Artificial Sequence: Synthetic oligonucleotide
acccacaaauacccuucgc

SEQ ID NO: 3118275 - RNA, 19 nt, Artificial Sequence
  Description of Artificial Sequence: Synthetic oligonucleotide
uuggcacacagcaguaccu

SEQ ID NO: 3118276 - RNA, 19 nt, Artificial Sequence
  Description of Artificial Sequence: Synthetic oligonucleotide
acaaauacccuucgcuuuu

SEQ ID NO: 3118277 - RNA, 19 nt, Artificial Sequence
  Description of Artificial Sequence: Synthetic oligonucleotide
aucacaugccagcacucug

SEQ ID NO: 3118278 - RNA, 19 nt, Artificial Sequence
  Description of Artificial Sequence: Synthetic oligonucleotide
aagaaaagugccagccacu

SEQ ID NO: 3118279 - RNA, 19 nt, Artificial Sequence
  Description of Artificial Sequence: Synthetic oligonucleotide
accgaucacaugccagcac

SEQ ID NO: 3118280 - RNA, 19 nt, Artificial Sequence
  Description of Artificial Sequence: Synthetic oligonucleotide
ucugaccaggggauuggca

SEQ ID NO: 3118281 - RNA, 19 nt, Artificial Sequence
  Description of Artificial Sequence: Synthetic oligonucleotide
ugcaaccgaucacaugcca

SEQ ID NO: 3118282 - RNA, 19 nt, Artificial Sequence
  Description of Artificial Sequence: Synthetic oligonucleotide
auacaacaagggcacuuca

SEQ ID NO: 3118283 - RNA, 19 nt, Artificial Sequence
  Description of Artificial Sequence: Synthetic oligonucleotide
cagggugauaagaggcagg

SEQ ID NO: 3118284 - RNA, 19 nt, Artificial Sequence
  Description of Artificial Sequence: Synthetic oligonucleotide
acugcccgauacaacaagg

SEQ ID NO: 3118285 - RNA, 19 nt, Artificial Sequence
  Description of Artificial Sequence: Synthetic oligonucleotide
agccacucugaccagggga

SEQ ID NO: 3118286 - RNA, 19 nt, Artificial Sequence
  Description of Artificial Sequence: Synthetic oligonucleotide
caacaagggcacuucagca

SEQ ID NO: 3118287 - RNA, 19 nt, Artificial Sequence
  Description of Artificial Sequence: Synthetic oligonucleotide
ggcaagaucagggugauaa

SEQ ID NO: 3118288 - RNA, 19 nt, Artificial Sequence
  Description of Artificial Sequence: Synthetic oligonucleotide
acccuucgcuuuucugugc

SEQ ID NO: 3118289 - RNA, 19 nt, Artificial Sequence
  Description of Artificial Sequence: Synthetic oligonucleotide
caaagaaaagugccagcca

SEQ ID NO: 3118290 - RNA, 19 nt, Artificial Sequence
  Description of Artificial Sequence: Synthetic oligonucleotide
agggugauaagaggcaggu

SEQ ID NO: 3118291 - RNA, 19 nt, Artificial Sequence
  Description of Artificial Sequence: Synthetic oligonucleotide
caagaucagggugauaaga

SEQ ID NO: 3118292 - RNA, 19 nt, Artificial Sequence
  Description of Artificial Sequence: Synthetic oligonucleotide
gagcccacccacaaauacc

SEQ ID NO: 3118293 - RNA, 19 nt, Artificial Sequence
  Description of Artificial Sequence: Synthetic oligonucleotide
guaccugcaaccgaucaca

SEQ ID NO: 3118294 - RNA, 19 nt, Artificial Sequence
  Description of Artificial Sequence: Synthetic oligonucleotide
ggcacugcccgauacaaca

SEQ ID NO: 3118295 - RNA, 19 nt, Artificial Sequence
  Description of Artificial Sequence: Synthetic oligonucleotide
gguagugcuucacuguuga

SEQ ID NO: 3118296 - RNA, 19 nt, Artificial Sequence
  Description of Artificial Sequence: Synthetic oligonucleotide
ggcagguagugcuucacug

SEQ ID NO: 3118297 - RNA, 19 nt, Artificial Sequence
  Description of Artificial Sequence: Synthetic oligonucleotide
uucgcuuuucugugccucu

SEQ ID NO: 3118298 - RNA, 19 nt, Artificial Sequence
  Description of Artificial Sequence: Synthetic oligonucleotide
gucucaaagaaaagugcca

SEQ ID NO: 3118299 - RNA, 19 nt, Artificial Sequence
  Description of Artificial Sequence: Synthetic oligonucleotide
cccgauacaacaagggcac

SEQ ID NO: 3118300 - RNA, 19 nt, Artificial Sequence
  Description of Artificial Sequence: Synthetic oligonucleotide
aaccgaucacaugccagca

SEQ ID NO: 3118301 - RNA, 19 nt, Artificial Sequence
  Description of Artificial Sequence: Synthetic oligonucleotide
uaagaggcagguagugcuu

SEQ ID NO: 3118302 - RNA, 19 nt, Artificial Sequence
  Description of Artificial Sequence: Synthetic oligonucleotide
cugaccaggggauuggcaa

SEQ ID NO: 3118303 - RNA, 19 nt, Artificial Sequence
  Description of Artificial Sequence: Synthetic oligonucleotide
cacaugccagcacucugcc

SEQ ID NO: 3118304 - RNA, 19 nt, Artificial Sequence
  Description of Artificial Sequence: Synthetic oligonucleotide
uucugugccucugcuguug

SEQ ID NO: 3118305 - RNA, 19 nt, Artificial Sequence
  Description of Artificial Sequence: Synthetic oligonucleotide
cucugccaggcacugcccg

SEQ ID NO: 3118306 - RNA, 19 nt, Artificial Sequence
  Description of Artificial Sequence: Synthetic oligonucleotide
cugcaaccgaucacaugcc

SEQ ID NO: 3118307 - RNA, 19 nt, Artificial Sequence
  Description of Artificial Sequence: Synthetic oligonucleotide
cacccacaaauacccuucg

SEQ ID NO: 3118308 - RNA, 19 nt, Artificial Sequence
  Description of Artificial Sequence: Synthetic oligonucleotide
cacuguugacuccaaagaa

SEQ ID NO: 3118309 - RNA, 19 nt, Artificial Sequence
  Description of Artificial Sequence: Synthetic oligonucleotide
cacugcccgauacaacaag

SEQ ID NO: 3118310 - RNA, 19 nt, Artificial Sequence
  Description of Artificial Sequence: Synthetic oligonucleotide
gaagcaucuuggggcagcc

SEQ ID NO: 3118311 - RNA, 19 nt, Artificial Sequence
  Description of Artificial Sequence: Synthetic oligonucleotide
aagaagcaucuuggggcag

SEQ ID NO: 3118312 - RNA, 19 nt, Artificial Sequence
  Description of Artificial Sequence: Synthetic oligonucleotide
aucagggugauaagaggca

SEQ ID NO: 3118313 - RNA, 19 nt, Artificial Sequence
  Description of Artificial Sequence: Synthetic oligonucleotide
uggcacacagcaguaccug

SEQ ID NO: 3118314 - RNA, 19 nt, Artificial Sequence
  Description of Artificial Sequence: Synthetic oligonucleotide
agcaguaccugcaaccgau

SEQ ID NO: 3118315 - RNA, 19 nt, Artificial Sequence
  Description of Artificial Sequence: Synthetic oligonucleotide
aaagugccagccacucuga

SEQ ID NO: 3118316 - RNA, 19 nt, Artificial Sequence
  Description of Artificial Sequence: Synthetic oligonucleotide
ucugccaggcacugcccga

SEQ ID NO: 3118317 - RNA, 19 nt, Artificial Sequence
  Description of Artificial Sequence: Synthetic oligonucleotide
uguuggcacacagcaguac

SEQ ID NO: 3118318 - RNA, 19 nt, Artificial Sequence
  Description of Artificial Sequence: Synthetic oligonucleotide
ggagcccacccacaaauac

SEQ ID NO: 3118319 - RNA, 19 nt, Artificial Sequence
  Description of Artificial Sequence: Synthetic oligonucleotide
caagggcacuucagcacag

SEQ ID NO: 3118320 - RNA, 19 nt, Artificial Sequence
  Description of Artificial Sequence: Synthetic oligonucleotide
augccagcacucugccagg

SEQ ID NO: 3118321 - RNA, 19 nt, Artificial Sequence
  Description of Artificial Sequence: Synthetic oligonucleotide
accugcaaccgaucacaug

SEQ ID NO: 3118322 - RNA, 19 nt, Artificial Sequence
  Description of Artificial Sequence: Synthetic oligonucleotide
guugacuccaaagaagcau

SEQ ID NO: 3118323 - RNA, 19 nt, Artificial Sequence
  Description of Artificial Sequence: Synthetic oligonucleotide
aggcagguagugcuucacu

SEQ ID NO: 3118324 - RNA, 19 nt, Artificial Sequence
  Description of Artificial Sequence: Synthetic oligonucleotide
gcaagaucagggugauaag

SEQ ID NO: 3118325 - RNA, 19 nt, Artificial Sequence
  Description of Artificial Sequence: Synthetic oligonucleotide
aggggauuggcaagaucag

SEQ ID NO: 3118326 - RNA, 19 nt, Artificial Sequence
  Description of Artificial Sequence: Synthetic oligonucleotide
gcuguuggcacacagcagu

SEQ ID NO: 3118327 - RNA, 19 nt, Artificial Sequence
  Description of Artificial Sequence: Synthetic oligonucleotide
cacucugaccaggggauug

SEQ ID NO: 3118328 - RNA, 19 nt, Artificial Sequence
  Description of Artificial Sequence: Synthetic oligonucleotide
uaccugcaaccgaucacau

SEQ ID NO: 3118329 - RNA, 19 nt, Artificial Sequence
  Description of Artificial Sequence: Synthetic oligonucleotide
gcccgauacaacaagggca

SEQ ID NO: 3118330 - RNA, 19 nt, Artificial Sequence
  Description of Artificial Sequence: Synthetic oligonucleotide
ucgcuuuucugugccucug

SEQ ID NO: 3118331 - RNA, 19 nt, Artificial Sequence
  Description of Artificial Sequence: Synthetic oligonucleotide
caguaccugcaaccgauca

SEQ ID NO: 3118332 - RNA, 19 nt, Artificial Sequence
  Description of Artificial Sequence: Synthetic oligonucleotide
gcaaccgaucacaugccag

SEQ ID NO: 3118333 - RNA, 19 nt, Artificial Sequence
  Description of Artificial Sequence: Synthetic oligonucleotide
acucugccaggcacugccc

SEQ ID NO: 3118334 - RNA, 19 nt, Artificial Sequence
  Description of Artificial Sequence: Synthetic oligonucleotide
ggcacacagcaguaccugc

SEQ ID NO: 3118335 - RNA, 19 nt, Artificial Sequence
  Description of Artificial Sequence: Synthetic oligonucleotide
cacuucagcacagaccaaa

SEQ ID NO: 3118336 - RNA, 19 nt, Artificial Sequence
  Description of Artificial Sequence: Synthetic oligonucleotide
uuggcaagaucagggugau

SEQ ID NO: 3118337 - RNA, 19 nt, Artificial Sequence
  Description of Artificial Sequence: Synthetic oligonucleotide
gugccucugcuguuggcac

SEQ ID NO: 3118338 - RNA, 19 nt, Artificial Sequence
  Description of Artificial Sequence: Synthetic oligonucleotide
aucuuggggcagccuggag

SEQ ID NO: 3118339 - RNA, 19 nt, Artificial Sequence
  Description of Artificial Sequence: Synthetic oligonucleotide
uggagcccacccacaaaua

SEQ ID NO: 3118340 - RNA, 19 nt, Artificial Sequence
  Description of Artificial Sequence: Synthetic oligonucleotide
agcacucugccaggcacug

SEQ ID NO: 3118341 - RNA, 19 nt, Artificial Sequence
  Description of Artificial Sequence: Synthetic oligonucleotide
aagggcacuucagcacaga

SEQ ID NO: 3118342 - RNA, 19 nt, Artificial Sequence
  Description of Artificial Sequence: Synthetic oligonucleotide
ccagccacucugaccaggg

SEQ ID NO: 3118343 - RNA, 19 nt, Artificial Sequence
  Description of Artificial Sequence: Synthetic oligonucleotide
agguagugcuucacuguug

SEQ ID NO: 3118344 - RNA, 19 nt, Artificial Sequence
  Description of Artificial Sequence: Synthetic oligonucleotide
gugcuucacuguugacucc

SEQ ID NO: 3118345 - RNA, 19 nt, Artificial Sequence
  Description of Artificial Sequence: Synthetic oligonucleotide
guagugcuucacuguugac

SEQ ID NO: 3118346 - RNA, 19 nt, Artificial Sequence
  Description of Artificial Sequence: Synthetic oligonucleotide
cacaaauacccuucgcuuu

SEQ ID NO: 3118347 - RNA, 19 nt, Artificial Sequence
  Description of Artificial Sequence: Synthetic oligonucleotide
acaugccagcacucugcca

SEQ ID NO: 3118348 - RNA, 19 nt, Artificial Sequence
  Description of Artificial Sequence: Synthetic oligonucleotide
uggggcagccuggagccca

SEQ ID NO: 3118349 - RNA, 19 nt, Artificial Sequence
  Description of Artificial Sequence: Synthetic oligonucleotide
gaccaggggauuggcaaga

SEQ ID NO: 3118350 - RNA, 19 nt, Artificial Sequence
  Description of Artificial Sequence: Synthetic oligonucleotide
uuucugugccucugcuguu

SEQ ID NO: 3118351 - RNA, 19 nt, Artificial Sequence
  Description of Artificial Sequence: Synthetic oligonucleotide
gggcacuucagcacagacc

SEQ ID NO: 3118352 - RNA, 19 nt, Artificial Sequence
  Description of Artificial Sequence: Synthetic oligonucleotide
caaauacccuucgcuuuuc

SEQ ID NO: 3118353 - RNA, 19 nt, Artificial Sequence
  Description of Artificial Sequence: Synthetic oligonucleotide
gaggcagguagugcuucac

SEQ ID NO: 3118354 - RNA, 19 nt, Artificial Sequence
  Description of Artificial Sequence: Synthetic oligonucleotide
gaucacaugccagcacucu

SEQ ID NO: 3118355 - RNA, 19 nt, Artificial Sequence
  Description of Artificial Sequence: Synthetic oligonucleotide
ccagcacucugccaggcac

SEQ ID NO: 3118356 - RNA, 19 nt, Artificial Sequence
  Description of Artificial Sequence: Synthetic oligonucleotide
aggcacugcccgauacaac

SEQ ID NO: 3118357 - RNA, 19 nt, Artificial Sequence
  Description of Artificial Sequence: Synthetic oligonucleotide
cucugaccaggggauuggc

SEQ ID NO: 3118358 - RNA, 19 nt, Artificial Sequence
  Description of Artificial Sequence: Synthetic oligonucleotide
cugugccucugcuguuggc

SEQ ID NO: 3118359 - RNA, 19 nt, Artificial Sequence
  Description of Artificial Sequence: Synthetic oligonucleotide
cagccacucugaccagggg

SEQ ID NO: 3118360 - RNA, 19 nt, Artificial Sequence
  Description of Artificial Sequence: Synthetic oligonucleotide
cacacagcaguaccugcaa

SEQ ID NO: 3118361 - RNA, 19 nt, Artificial Sequence
  Description of Artificial Sequence: Synthetic oligonucleotide
gugauaagaggcagguagu

SEQ ID NO: 3118362 - RNA, 19 nt, Artificial Sequence
  Description of Artificial Sequence: Synthetic oligonucleotide
cuggagcccacccacaaau

SEQ ID NO: 3118363 - RNA, 19 nt, Artificial Sequence
  Description of Artificial Sequence: Synthetic oligonucleotide
ugccagcacucugccaggc

SEQ ID NO: 3118364 - RNA, 19 nt, Artificial Sequence
  Description of Artificial Sequence: Synthetic oligonucleotide
aagcaucuuggggcagccu

SEQ ID NO: 3118365 - RNA, 19 nt, Artificial Sequence
  Description of Artificial Sequence: Synthetic oligonucleotide
cccuucgcuuuucugugcc

SEQ ID NO: 3118366 - RNA, 19 nt, Artificial Sequence
  Description of Artificial Sequence: Synthetic oligonucleotide
ggauuggcaagaucagggu

SEQ ID NO: 3118367 - RNA, 19 nt, Artificial Sequence
  Description of Artificial Sequence: Synthetic oligonucleotide
cuucacuguugacuccaaa

SEQ ID NO: 3118368 - RNA, 19 nt, Artificial Sequence
  Description of Artificial Sequence: Synthetic oligonucleotide
cccacaaauacccuucgcu

SEQ ID NO: 3118369 - RNA, 19 nt, Artificial Sequence
  Description of Artificial Sequence: Synthetic oligonucleotide
caggcacugcccgauacaa

SEQ ID NO: 3118370 - RNA, 19 nt, Artificial Sequence
  Description of Artificial Sequence: Synthetic oligonucleotide
gcagguagugcuucacugu

SEQ ID NO: 3118371 - RNA, 19 nt, Artificial Sequence
  Description of Artificial Sequence: Synthetic oligonucleotide
cagcaguaccugcaaccga

SEQ ID NO: 3118372 - RNA, 19 nt, Artificial Sequence
  Description of Artificial Sequence: Synthetic oligonucleotide
gcacacagcaguaccugca

SEQ ID NO: 3118373 - RNA, 19 nt, Artificial Sequence
  Description of Artificial Sequence: Synthetic oligonucleotide
gccaggcacugcccgauac

SEQ ID NO: 3118374 - RNA, 19 nt, Artificial Sequence
  Description of Artificial Sequence: Synthetic oligonucleotide
gccagccacucugaccagg

SEQ ID NO: 3118375 - RNA, 19 nt, Artificial Sequence
  Description of Artificial Sequence: Synthetic oligonucleotide
cagguagugcuucacuguu

SEQ ID NO: 3118376 - RNA, 19 nt, Artificial Sequence
  Description of Artificial Sequence: Synthetic oligonucleotide
gcuuuucugugccucugcu

SEQ ID NO: 3118377 - RNA, 19 nt, Artificial Sequence
  Description of Artificial Sequence: Synthetic oligonucleotide
uuggggcagccuggagccc

SEQ ID NO: 3118378 - RNA, 19 nt, Artificial Sequence
  Description of Artificial Sequence: Synthetic oligonucleotide
ugccaggcacugcccgaua

SEQ ID NO: 3118379 - RNA, 19 nt, Artificial Sequence
  Description of Artificial Sequence: Synthetic oligonucleotide
ccacaaauacccuucgcuu

SEQ ID NO: 3118380 - RNA, 19 nt, Artificial Sequence
  Description of Artificial Sequence: Synthetic oligonucleotide
accaggggauuggcaagau

SEQ ID NO: 3118381 - RNA, 19 nt, Artificial Sequence
  Description of Artificial Sequence: Synthetic oligonucleotide
gccucugcuguuggcacac

SEQ ID NO: 3118382 - RNA, 19 nt, Artificial Sequence
  Description of Artificial Sequence: Synthetic oligonucleotide
cgaucacaugccagcacuc

SEQ ID NO: 3118383 - RNA, 19 nt, Artificial Sequence
  Description of Artificial Sequence: Synthetic oligonucleotide
ccgaucacaugccagcacu

SEQ ID NO: 3118384 - RNA, 19 nt, Artificial Sequence
  Description of Artificial Sequence: Synthetic oligonucleotide
ccaggggauuggcaagauc

SEQ ID NO: 3118385 - RNA, 19 nt, Artificial Sequence
  Description of Artificial Sequence: Synthetic oligonucleotide
cagcacucugccaggcacu

SEQ ID NO: 3118386 - RNA, 19 nt, Artificial Sequence
  Description of Artificial Sequence: Synthetic oligonucleotide
gccuggagcccacccacaa

SEQ ID NO: 3118387 - RNA, 19 nt, Artificial Sequence
  Description of Artificial Sequence: Synthetic oligonucleotide
gcaguaccugcaaccgauc

SEQ ID NO: 3118388 - RNA, 19 nt, Artificial Sequence
  Description of Artificial Sequence: Synthetic oligonucleotide
uggcaagaucagggugaua

SEQ ID NO: 3118389 - RNA, 19 nt, Artificial Sequence
  Description of Artificial Sequence: Synthetic oligonucleotide
gccacucugaccaggggau

SEQ ID NO: 3118390 - RNA, 19 nt, Artificial Sequence
  Description of Artificial Sequence: Synthetic oligonucleotide
gcacugcccgauacaacaa

SEQ ID NO: 3118391 - RNA, 19 nt, Artificial Sequence
  Description of Artificial Sequence: Synthetic oligonucleotide
gggugauaagaggcaggua

SEQ ID NO: 3118392 - RNA, 19 nt, Artificial Sequence
  Description of Artificial Sequence: Synthetic oligonucleotide
gcacucugccaggcacugc

SEQ ID NO: 3118393 - RNA, 19 nt, Artificial Sequence
  Description of Artificial Sequence: Synthetic oligonucleotide
gcuucacuguugacuccaa

SEQ ID NO: 3118394 - RNA, 19 nt, Artificial Sequence
  Description of Artificial Sequence: Synthetic oligonucleotide
cugccaggcacugcccgau

SEQ ID NO: 3118395 - RNA, 19 nt, Artificial Sequence
  Description of Artificial Sequence: Synthetic oligonucleotide
ggggcagccuggagcccac

SEQ ID NO: 3118396 - RNA, 19 nt, Artificial Sequence
  Description of Artificial Sequence: Synthetic oligonucleotide
ccuucgcuuuucugugccu

SEQ ID NO: 3118397 - RNA, 19 nt, Artificial Sequence
  Description of Artificial Sequence: Synthetic oligonucleotide
cgauacaacaagggcacuu

SEQ ID NO: 3118398 - RNA, 19 nt, Artificial Sequence
  Description of Artificial Sequence: Synthetic oligonucleotide
gcacuucagcacagaccaa

SEQ ID NO: 3118399 - RNA, 19 nt, Artificial Sequence
  Description of Artificial Sequence: Synthetic oligonucleotide
ccgauacaacaagggcacu

SEQ ID NO: 3118400 - RNA, 19 nt, Artificial Sequence
  Description of Artificial Sequence: Synthetic oligonucleotide
ccucugcuguuggcacaca

SEQ ID NO: 3118401 - RNA, 19 nt, Artificial Sequence
  Description of Artificial Sequence: Synthetic oligonucleotide
ccacucugaccaggggauu

SEQ ID NO: 3118402 - RNA, 19 nt, Artificial Sequence
  Description of Artificial Sequence: Synthetic oligonucleotide
uauauauauauauagagag

SEQ ID NO: 3118403 - RNA, 19 nt, Artificial Sequence
  Description of Artificial Sequence: Synthetic oligonucleotide
uauauauauauauauauag

SEQ ID NO: 3118404 - RNA, 19 nt, Artificial Sequence
  Description of Artificial Sequence: Synthetic oligonucleotide
uauauauauauauauagag

SEQ ID NO: 3118405 - RNA, 19 nt, Artificial Sequence
  Description of Artificial Sequence: Synthetic oligonucleotide
uauauauauauauauaugu

SEQ ID NO: 3118406 - RNA, 19 nt, Artificial Sequence
  Description of Artificial Sequence: Synthetic oligonucleotide
uauauauauauagagagag

SEQ ID NO: 3118407 - RNA, 19 nt, Artificial Sequence
  Description of Artificial Sequence: Synthetic oligonucleotide
uauauauagagagagagag

SEQ ID NO: 3118408 - RNA, 19 nt, Artificial Sequence
  Description of Artificial Sequence: Synthetic oligonucleotide
uauauauauauauauauau

SEQ ID NO: 3118409 - RNA, 19 nt, Artificial Sequence
  Description of Artificial Sequence: Synthetic oligonucleotide
uauauagagagagagagag

SEQ ID NO: 3118410 - RNA, 19 nt, Artificial Sequence
  Description of Artificial Sequence: Synthetic oligonucleotide
uauauauauauauaugugu

SEQ ID NO: 3118411 - RNA, 19 nt, Artificial Sequence
  Description of Artificial Sequence: Synthetic oligonucleotide
uguauauauauauauauau

SEQ ID NO: 3118412 - RNA, 19 nt, Artificial Sequence
  Description of Artificial Sequence: Synthetic oligonucleotide
ucuauauauauauauauau

SEQ ID NO: 3118413 - RNA, 19 nt, Artificial Sequence
  Description of Artificial Sequence: Synthetic oligonucleotide
uauauauguauauauauau

SEQ ID NO: 3118414 - RNA, 19 nt, Artificial Sequence
  Description of Artificial Sequence: Synthetic oligonucleotide
uauauauauauguauauau

SEQ ID NO: 3118415 - RNA, 19 nt, Artificial Sequence
  Description of Artificial Sequence: Synthetic oligonucleotide
uauauguauauauauauau

SEQ ID NO: 3118416 - RNA, 19 nt, Artificial Sequence
  Description of Artificial Sequence: Synthetic oligonucleotide
uauguauauauauauauau

SEQ ID NO: 3118417 - RNA, 19 nt, Artificial Sequence
  Description of Artificial Sequence: Synthetic oligonucleotide
uauagagagagagagagag

SEQ ID NO: 3118418 - RNA, 19 nt, Artificial Sequence
  Description of Artificial Sequence: Synthetic oligonucleotide
uauauauauguauauauau

SEQ ID NO: 3118419 - RNA, 19 nt, Artificial Sequence
  Description of Artificial Sequence: Synthetic oligonucleotide
uauauauauauauauguau

SEQ ID NO: 3118420 - RNA, 19 nt, Artificial Sequence
  Description of Artificial Sequence: Synthetic oligonucleotide
uguguauauauauauauau

SEQ ID NO: 3118421 - RNA, 19 nt, Artificial Sequence
  Description of Artificial Sequence: Synthetic oligonucleotide
uguguguauauauauauau

SEQ ID NO: 3118422 - RNA, 19 nt, Artificial Sequence
  Description of Artificial Sequence: Synthetic oligonucleotide
uauauauauauauguauau

SEQ ID NO: 3118423 - RNA, 19 nt, Artificial Sequence
  Description of Artificial Sequence: Synthetic oligonucleotide
ucucuauauauauauauau

SEQ ID NO: 3118424 - RNA, 19 nt, Artificial Sequence
  Description of Artificial Sequence: Synthetic oligonucleotide
uagagagagagagagagag

SEQ ID NO: 3118425 - RNA, 19 nt, Artificial Sequence
  Description of Artificial Sequence: Synthetic oligonucleotide
uauauauauauaugugugu

SEQ ID NO: 3118426 - RNA, 19 nt, Artificial Sequence
  Description of Artificial Sequence: Synthetic oligonucleotide
auauauauauauaugugug

SEQ ID NO: 3118427 - RNA, 19 nt, Artificial Sequence
  Description of Artificial Sequence: Synthetic oligonucleotide
auauauauauaugugugug

SEQ ID NO: 3118428 - RNA, 19 nt, Artificial Sequence
  Description of Artificial Sequence: Synthetic oligonucleotide
gagagagagagagagagag

SEQ ID NO: 3118429 - RNA, 19 nt, Artificial Sequence
  Description of Artificial Sequence: Synthetic oligonucleotide
ucucucuauauauauauau

SEQ ID NO: 3118430 - RNA, 19 nt, Artificial Sequence
  Description of Artificial Sequence: Synthetic oligonucleotide
auauauauauauauaugug

SEQ ID NO: 3118431 - RNA, 19 nt, Artificial Sequence
  Description of Artificial Sequence: Synthetic oligonucleotide
auauauauauauauauaug

SEQ ID NO: 3118432 - RNA, 19 nt, Artificial Sequence
  Description of Artificial Sequence: Synthetic oligonucleotide
gagagagagagagaggagg

SEQ ID NO: 3118433 - RNA, 19 nt, Artificial Sequence
  Description of Artificial Sequence: Synthetic oligonucleotide
guauauauauauauauaug

SEQ ID NO: 3118434 - RNA, 19 nt, Artificial Sequence
  Description of Artificial Sequence: Synthetic oligonucleotide
auauauaugugugugugug

SEQ ID NO: 3118435 - RNA, 19 nt, Artificial Sequence
  Description of Artificial Sequence: Synthetic oligonucleotide
auauauauauauauagaga

SEQ ID NO: 3118436 - RNA, 19 nt, Artificial Sequence
  Description of Artificial Sequence: Synthetic oligonucleotide
aggagagagagagagagag

SEQ ID NO: 3118437 - RNA, 19 nt, Artificial Sequence
  Description of Artificial Sequence: Synthetic oligonucleotide
auauauauauauauauaga

SEQ ID NO: 3118438 - RNA, 19 nt, Artificial Sequence
  Description of Artificial Sequence: Synthetic oligonucleotide
gagagagagagagagagga

SEQ ID NO: 3118439 - RNA, 19 nt, Artificial Sequence
  Description of Artificial Sequence: Synthetic oligonucleotide
auauauauauauauguaua

SEQ ID NO: 3118440 - RNA, 19 nt, Artificial Sequence
  Description of Artificial Sequence: Synthetic oligonucleotide
agagagagagaggaggagg

SEQ ID NO: 3118441 - RNA, 19 nt, Artificial Sequence
  Description of Artificial Sequence: Synthetic oligonucleotide
uguguguguguguauauau

SEQ ID NO: 3118442 - RNA, 19 nt, Artificial Sequence
  Description of Artificial Sequence: Synthetic oligonucleotide
auauaugugugugugugug

SEQ ID NO: 3118443 - RNA, 19 nt, Artificial Sequence
  Description of Artificial Sequence: Synthetic oligonucleotide
agggaggagagagagagag

SEQ ID NO: 3118444 - RNA, 19 nt, Artificial Sequence
  Description of Artificial Sequence: Synthetic oligonucleotide
cuauauauauauauauaua

SEQ ID NO: 3118445 - RNA, 19 nt, Artificial Sequence
  Description of Artificial Sequence: Synthetic oligonucleotide
gagagagaggaggaggagg

SEQ ID NO: 3118446 - RNA, 19 nt, Artificial Sequence
  Description of Artificial Sequence: Synthetic oligonucleotide
uauauaugugugugugugu

SEQ ID NO: 3118447 - RNA, 19 nt, Artificial Sequence
  Description of Artificial Sequence: Synthetic oligonucleotide
ucucucucucucuauauau

SEQ ID NO: 3118448 - RNA, 19 nt, Artificial Sequence
  Description of Artificial Sequence: Synthetic oligonucleotide
auauauauauauagagaga

SEQ ID NO: 3118449 - RNA, 19 nt, Artificial Sequence
  Description of Artificial Sequence: Synthetic oligonucleotide
auauauauauauauaugua

SEQ ID NO: 3118450 - RNA, 19 nt, Artificial Sequence
  Description of Artificial Sequence: Synthetic oligonucleotide
auauauauauauauauaua

SEQ ID NO: 3118451 - RNA, 19 nt, Artificial Sequence
  Description of Artificial Sequence: Synthetic oligonucleotide
ggaggagagagagagagag

SEQ ID NO: 3118452 - RNA, 19 nt, Artificial Sequence
  Description of Artificial Sequence: Synthetic oligonucleotide
auauauauauauguauaua

SEQ ID NO: 3118453 - RNA, 19 nt, Artificial Sequence
  Description of Artificial Sequence: Synthetic oligonucleotide
auauauauguauauauaua

SEQ ID NO: 3118454 - RNA, 19 nt, Artificial Sequence
  Description of Artificial Sequence: Synthetic oligonucleotide
auauauauauguauauaua

SEQ ID NO: 3118455 - RNA, 19 nt, Artificial Sequence
  Description of Artificial Sequence: Synthetic oligonucleotide
auaugugugugugugugug

SEQ ID NO: 3118456 - RNA, 19 nt, Artificial Sequence
  Description of Artificial Sequence: Synthetic oligonucleotide
guauauauauauauauaua

SEQ ID NO: 3118457 - RNA, 19 nt, Artificial Sequence
  Description of Artificial Sequence: Synthetic oligonucleotide
uauaugugugugugugugu

SEQ ID NO: 3118458 - RNA, 19 nt, Artificial Sequence
  Description of Artificial Sequence: Synthetic oligonucleotide
cucuauauauauauauaua

SEQ ID NO: 3118459 - RNA, 19 nt, Artificial Sequence
  Description of Artificial Sequence: Synthetic oligonucleotide
auauguauauauauauaua

SEQ ID NO: 3118460 - RNA, 19 nt, Artificial Sequence
  Description of Artificial Sequence: Synthetic oligonucleotide
auauauguauauauauaua

SEQ ID NO: 3118461 - RNA, 19 nt, Artificial Sequence
  Description of Artificial Sequence: Synthetic oligonucleotide
auguauauauauauauaua

SEQ ID NO: 3118462 - RNA, 19 nt, Artificial Sequence
  Description of Artificial Sequence: Synthetic oligonucleotide
cucucuauauauauauaua

SEQ ID NO: 3118463 - RNA, 19 nt, Artificial Sequence
  Description of Artificial Sequence: Synthetic oligonucleotide
uguguguguguguguauau

SEQ ID NO: 3118464 - RNA, 19 nt, Artificial Sequence
  Description of Artificial Sequence: Synthetic oligonucleotide
gagagagagaggaggagga

SEQ ID NO: 3118465 - RNA, 19 nt, Artificial Sequence
  Description of Artificial Sequence: Synthetic oligonucleotide
auauauagagagagagaga

SEQ ID NO: 3118466 - RNA, 19 nt, Artificial Sequence
  Description of Artificial Sequence: Synthetic oligonucleotide
uaugugugugugugugugu

SEQ ID NO: 3118467 - RNA, 19 nt, Artificial Sequence
  Description of Artificial Sequence: Synthetic oligonucleotide
gagagagagagaggaggag

SEQ ID NO: 3118468 - RNA, 19 nt, Artificial Sequence
  Description of Artificial Sequence: Synthetic oligonucleotide
ucucucucucucucuauau

SEQ ID NO: 3118469 - RNA, 19 nt, Artificial Sequence
  Description of Artificial Sequence: Synthetic oligonucleotide
augugugugugugugugug

SEQ ID NO: 3118470 - RNA, 19 nt, Artificial Sequence
  Description of Artificial Sequence: Synthetic oligonucleotide
agagagagagagaggagga

SEQ ID NO: 3118471 - RNA, 19 nt, Artificial Sequence
  Description of Artificial Sequence: Synthetic oligonucleotide
agagagagagagagagagg

SEQ ID NO: 3118472 - RNA, 19 nt, Artificial Sequence
  Description of Artificial Sequence: Synthetic oligonucleotide
guguauauauauauauaua

SEQ ID NO: 3118473 - RNA, 19 nt, Artificial Sequence
  Description of Artificial Sequence: Synthetic oligonucleotide
ucucccucuccccacgguc

SEQ ID NO: 3118474 - RNA, 19 nt, Artificial Sequence
  Description of Artificial Sequence: Synthetic oligonucleotide
ugugugugugugugugugu

SEQ ID NO: 3118475 - RNA, 19 nt, Artificial Sequence
  Description of Artificial Sequence: Synthetic oligonucleotide
gugugugugugugugugug

SEQ ID NO: 3118476 - RNA, 19 nt, Artificial Sequence
  Description of Artificial Sequence: Synthetic oligonucleotide
ucucucucucucucucucu

SEQ ID NO: 3118477 - RNA, 19 nt, Artificial Sequence
  Description of Artificial Sequence: Synthetic oligonucleotide
agagagagaggaggaggag

SEQ ID NO: 3118478 - RNA, 19 nt, Artificial Sequence
  Description of Artificial Sequence: Synthetic oligonucleotide
agagagagagagagaggag

SEQ ID NO: 3118479 - RNA, 19 nt, Artificial Sequence
  Description of Artificial Sequence: Synthetic oligonucleotide
guguguauauauauauaua

SEQ ID NO: 3118480 - RNA, 19 nt, Artificial Sequence
  Description of Artificial Sequence: Synthetic oligonucleotide
auauagagagagagagaga

SEQ ID NO: 3118481 - RNA, 19 nt, Artificial Sequence
  Description of Artificial Sequence: Synthetic oligonucleotide
cucucucucucucucucuc

SEQ ID NO: 3118482 - RNA, 19 nt, Artificial Sequence
  Description of Artificial Sequence: Synthetic oligonucleotide
uguguguguguguguguau

SEQ ID NO: 3118483 - RNA, 19 nt, Artificial Sequence
  Description of Artificial Sequence: Synthetic oligonucleotide
ucucccucucucucucucu

SEQ ID NO: 3118484 - RNA, 19 nt, Artificial Sequence
  Description of Artificial Sequence: Synthetic oligonucleotide
auagagagagagagagaga

SEQ ID NO: 3118485 - RNA, 19 nt, Artificial Sequence
  Description of Artificial Sequence: Synthetic oligonucleotide
ucucucucucucucucuau

SEQ ID NO: 3118486 - RNA, 19 nt, Artificial Sequence
  Description of Artificial Sequence: Synthetic oligonucleotide
agagagagagagagagaga

SEQ ID NO: 3118487 - RNA, 19 nt, Artificial Sequence
  Description of Artificial Sequence: Synthetic oligonucleotide
cucucucuauauauauaua

SEQ ID NO: 3118488 - RNA, 19 nt, Artificial Sequence
  Description of Artificial Sequence: Synthetic oligonucleotide
cucucucucucuauauaua

SEQ ID NO: 3118489 - RNA, 19 nt, Artificial Sequence
  Description of Artificial Sequence: Synthetic oligonucleotide
ucccucucucucucucucu

SEQ ID NO: 3118490 - RNA, 19 nt, Artificial Sequence
  Description of Artificial Sequence: Synthetic oligonucleotide
guguguguauauauauaua

SEQ ID NO: 3118491 - RNA, 19 nt, Artificial Sequence
  Description of Artificial Sequence: Synthetic oligonucleotide
cucccucucucucucucuc

SEQ ID NO: 3118492 - RNA, 19 nt, Artificial Sequence
  Description of Artificial Sequence: Synthetic oligonucleotide
cucucccucucucucucuc

SEQ ID NO: 3118493 - RNA, 19 nt, Artificial Sequence
  Description of Artificial Sequence: Synthetic oligonucleotide
gaggagagagagagagaga

SEQ ID NO: 3118494 - RNA, 19 nt, Artificial Sequence
  Description of Artificial Sequence: Synthetic oligonucleotide
cacggucucccucucccuc

SEQ ID NO: 3118495 - RNA, 19 nt, Artificial Sequence
  Description of Artificial Sequence: Synthetic oligonucleotide
cucucucucucucuauaua

SEQ ID NO: 3118496 - RNA, 19 nt, Artificial Sequence
  Description of Artificial Sequence: Synthetic oligonucleotide
guguguguguguauauaua

SEQ ID NO: 3118497 - RNA, 19 nt, Artificial Sequence
  Description of Artificial Sequence: Synthetic oligonucleotide
ucccucuccccacggucuc

SEQ ID NO: 3118498 - RNA, 19 nt, Artificial Sequence
  Description of Artificial Sequence: Synthetic oligonucleotide
guguguguguguguguaua

SEQ ID NO: 3118499 - RNA, 19 nt, Artificial Sequence
  Description of Artificial Sequence: Synthetic oligonucleotide
gugugugugugugugugua

SEQ ID NO: 3118500 - RNA, 19 nt, Artificial Sequence
  Description of Artificial Sequence: Synthetic oligonucleotide
cucucucucucucucuaua

SEQ ID NO: 3118501 - RNA, 19 nt, Artificial Sequence
  Description of Artificial Sequence: Synthetic oligonucleotide
cucucucucucucucucua

SEQ ID NO: 3118502 - RNA, 19 nt, Artificial Sequence
  Description of Artificial Sequence: Synthetic oligonucleotide
guguguguguguguauaua

SEQ ID NO: 3118503 - RNA, 19 nt, Artificial Sequence
  Description of Artificial Sequence: Synthetic oligonucleotide
gagggaggagagagagaga

SEQ ID NO: 3118504 - RNA, 19 nt, Artificial Sequence
  Description of Artificial Sequence: Synthetic oligonucleotide
ggagagagagagagagaga

SEQ ID NO: 3118505 - RNA, 19 nt, Artificial Sequence
  Description of Artificial Sequence: Synthetic oligonucleotide
cucccucuccccacggucu

SEQ ID NO: 3118506 - RNA, 19 nt, Artificial Sequence
  Description of Artificial Sequence: Synthetic oligonucleotide
cuccccacggucucccucu

SEQ ID NO: 3118507 - RNA, 19 nt, Artificial Sequence
  Description of Artificial Sequence: Synthetic oligonucleotide
cccucucucucucucucuc

SEQ ID NO: 3118508 - RNA, 19 nt, Artificial Sequence
  Description of Artificial Sequence: Synthetic oligonucleotide
uccccacggucucccucuc

SEQ ID NO: 3118509 - RNA, 19 nt, Artificial Sequence
  Description of Artificial Sequence: Synthetic oligonucleotide
gggaggagagagagagaga

SEQ ID NO: 3118510 - RNA, 19 nt, Artificial Sequence
  Description of Artificial Sequence: Synthetic oligonucleotide
cccucucccucucucucuc

SEQ ID NO: 3118511 - RNA, 19 nt, Artificial Sequence
  Description of Artificial Sequence: Synthetic oligonucleotide
ccucuccccacggucuccc

SEQ ID NO: 3118512 - RNA, 19 nt, Artificial Sequence
  Description of Artificial Sequence: Synthetic oligonucleotide
ccccacggucucccucucc

SEQ ID NO: 3118513 - RNA, 19 nt, Artificial Sequence
  Description of Artificial Sequence: Synthetic oligonucleotide
ccucucucucucucucucu

SEQ ID NO: 3118514 - RNA, 19 nt, Artificial Sequence
  Description of Artificial Sequence: Synthetic oligonucleotide
cucuccccacggucucccu

SEQ ID NO: 3118515 - RNA, 19 nt, Artificial Sequence
  Description of Artificial Sequence: Synthetic oligonucleotide
ccacggucucccucucccu

SEQ ID NO: 3118516 - RNA, 19 nt, Artificial Sequence
  Description of Artificial Sequence: Synthetic oligonucleotide
ccucucccucucucucucu

SEQ ID NO: 3118517 - RNA, 19 nt, Artificial Sequence
  Description of Artificial Sequence: Synthetic oligonucleotide
auucauauggcuuaacuug

SEQ ID NO: 3118518 - RNA, 19 nt, Artificial Sequence
  Description of Artificial Sequence: Synthetic oligonucleotide
aauucauauggcuuaacuu

SEQ ID NO: 3118519 - RNA, 19 nt, Artificial Sequence
  Description of Artificial Sequence: Synthetic oligonucleotide
uucauauggcuuaacuugc

SEQ ID NO: 3118520 - RNA, 19 nt, Artificial Sequence
  Description of Artificial Sequence: Synthetic oligonucleotide
aaggacaacuccaugcuuc

SEQ ID NO: 3118521 - RNA, 19 nt, Artificial Sequence
  Description of Artificial Sequence: Synthetic oligonucleotide
uuuuguuacauuaggccau

SEQ ID NO: 3118522 - RNA, 19 nt, Artificial Sequence
  Description of Artificial Sequence: Synthetic oligonucleotide
uacaaugaugcccaggcau

SEQ ID NO: 3118523 - RNA, 19 nt, Artificial Sequence
  Description of Artificial Sequence: Synthetic oligonucleotide
auauggcuuaacuugcuug

SEQ ID NO: 3118524 - RNA, 19 nt, Artificial Sequence
  Description of Artificial Sequence: Synthetic oligonucleotide
uauggcuuaacuugcuugu

SEQ ID NO: 3118525 - RNA, 19 nt, Artificial Sequence
  Description of Artificial Sequence: Synthetic oligonucleotide
aggacaacuccaugcuucc

SEQ ID NO: 3118526 - RNA, 19 nt, Artificial Sequence
  Description of Artificial Sequence: Synthetic oligonucleotide
uggccaaaggacaacucca

SEQ ID NO: 3118527 - RNA, 19 nt, Artificial Sequence
  Description of Artificial Sequence: Synthetic oligonucleotide
uguuacauuaggccaugaa

SEQ ID NO: 3118528 - RNA, 19 nt, Artificial Sequence
  Description of Artificial Sequence: Synthetic oligonucleotide
ccaaaggacaacuccaugc

SEQ ID NO: 3118529 - RNA, 19 nt, Artificial Sequence
  Description of Artificial Sequence: Synthetic oligonucleotide
gaauucauauggcuuaacu

SEQ ID NO: 3118530 - RNA, 19 nt, Artificial Sequence
  Description of Artificial Sequence: Synthetic oligonucleotide
uaguccaggucuuuuauuu

SEQ ID NO: 3118531 - RNA, 19 nt, Artificial Sequence
  Description of Artificial Sequence: Synthetic oligonucleotide
guggccaaaggacaacucc

SEQ ID NO: 3118532 - RNA, 19 nt, Artificial Sequence
  Description of Artificial Sequence: Synthetic oligonucleotide
caugaauucauauggcuua

SEQ ID NO: 3118533 - RNA, 19 nt, Artificial Sequence
  Description of Artificial Sequence: Synthetic oligonucleotide
ucauauggcuuaacuugcu

SEQ ID NO: 3118534 - RNA, 19 nt, Artificial Sequence
  Description of Artificial Sequence: Synthetic oligonucleotide
guuacauuaggccaugaau

SEQ ID NO: 3118535 - RNA, 19 nt, Artificial Sequence
  Description of Artificial Sequence: Synthetic oligonucleotide
uuacaaugaugcccaggca

SEQ ID NO: 3118536 - RNA, 19 nt, Artificial Sequence
  Description of Artificial Sequence: Synthetic oligonucleotide
uuuguuacauuaggccaug

SEQ ID NO: 3118537 - RNA, 19 nt, Artificial Sequence
  Description of Artificial Sequence: Synthetic oligonucleotide
aaaggacaacuccaugcuu

SEQ ID NO: 3118538 - RNA, 19 nt, Artificial Sequence
  Description of Artificial Sequence: Synthetic oligonucleotide
uuuuacuaguccaggucuu

SEQ ID NO: 3118539 - RNA, 19 nt, Artificial Sequence
  Description of Artificial Sequence: Synthetic oligonucleotide
acuaguccaggucuuuuau

SEQ ID NO: 3118540 - RNA, 19 nt, Artificial Sequence
  Description of Artificial Sequence: Synthetic oligonucleotide
augaugcccaggcaugcug

SEQ ID NO: 3118541 - RNA, 19 nt, Artificial Sequence
  Description of Artificial Sequence: Synthetic oligonucleotide
acaaugaugcccaggcaug

SEQ ID NO: 3118542 - RNA, 19 nt, Artificial Sequence
  Description of Artificial Sequence: Synthetic oligonucleotide
uggcuuaacuugcuuguuu

SEQ ID NO: 3118543 - RNA, 19 nt, Artificial Sequence
  Description of Artificial Sequence: Synthetic oligonucleotide
uacuaguccaggucuuuua

SEQ ID NO: 3118544 - RNA, 19 nt, Artificial Sequence
  Description of Artificial Sequence: Synthetic oligonucleotide
aaugaugcccaggcaugcu

SEQ ID NO: 3118545 - RNA, 19 nt, Artificial Sequence
  Description of Artificial Sequence: Synthetic oligonucleotide
uuuacuaguccaggucuuu

SEQ ID NO: 3118546 - RNA, 19 nt, Artificial Sequence
  Description of Artificial Sequence: Synthetic oligonucleotide
caaaggacaacuccaugcu

SEQ ID NO: 3118547 - RNA, 19 nt, Artificial Sequence
  Description of Artificial Sequence: Synthetic oligonucleotide
augaauucauauggcuuaa

SEQ ID NO: 3118548 - RNA, 19 nt, Artificial Sequence
  Description of Artificial Sequence: Synthetic oligonucleotide
uuacuaguccaggucuuuu

SEQ ID NO: 3118549 - RNA, 19 nt, Artificial Sequence
  Description of Artificial Sequence: Synthetic oligonucleotide
ggcuuaacuugcuuguuua

SEQ ID NO: 3118550 - RNA, 19 nt, Artificial Sequence
  Description of Artificial Sequence: Synthetic oligonucleotide
uuguuacauuaggccauga

SEQ ID NO: 3118551 - RNA, 19 nt, Artificial Sequence
  Description of Artificial Sequence: Synthetic oligonucleotide
uacguggccaaaggacaac

SEQ ID NO: 3118552 - RNA, 19 nt, Artificial Sequence
  Description of Artificial Sequence: Synthetic oligonucleotide
acguggccaaaggacaacu

SEQ ID NO: 3118553 - RNA, 19 nt, Artificial Sequence
  Description of Artificial Sequence: Synthetic oligonucleotide
gccaaaggacaacuccaug

SEQ ID NO: 3118554 - RNA, 19 nt, Artificial Sequence
  Description of Artificial Sequence: Synthetic oligonucleotide
guacguggccaaaggacaa

SEQ ID NO: 3118555 - RNA, 19 nt, Artificial Sequence
  Description of Artificial Sequence: Synthetic oligonucleotide
auggcuuaacuugcuuguu

SEQ ID NO: 3118556 - RNA, 19 nt, Artificial Sequence
  Description of Artificial Sequence: Synthetic oligonucleotide
cauauggcuuaacuugcuu

SEQ ID NO: 3118557 - RNA, 19 nt, Artificial Sequence
  Description of Artificial Sequence: Synthetic oligonucleotide
cuaguccaggucuuuuauu

SEQ ID NO: 3118558 - RNA, 19 nt, Artificial Sequence
  Description of Artificial Sequence: Synthetic oligonucleotide
augcccaggcaugcugggu

SEQ ID NO: 3118559 - RNA, 19 nt, Artificial Sequence
  Description of Artificial Sequence: Synthetic oligonucleotide
cguggccaaaggacaacuc

SEQ ID NO: 3118560 - RNA, 19 nt, Artificial Sequence
  Description of Artificial Sequence: Synthetic oligonucleotide
caggcaugcugggugacau

SEQ ID NO: 3118561 - RNA, 19 nt, Artificial Sequence
  Description of Artificial Sequence: Synthetic oligonucleotide
gcccaggcaugcuggguga

SEQ ID NO: 3118562 - RNA, 19 nt, Artificial Sequence
  Description of Artificial Sequence: Synthetic oligonucleotide
ggccaaaggacaacuccau

SEQ ID NO: 3118563 - RNA, 19 nt, Artificial Sequence
  Description of Artificial Sequence: Synthetic oligonucleotide
ggacaacuccaugcuuccu

SEQ ID NO: 3118564 - RNA, 19 nt, Artificial Sequence
  Description of Artificial Sequence: Synthetic oligonucleotide
ccaggcaugcugggugaca

SEQ ID NO: 3118565 - RNA, 19 nt, Artificial Sequence
  Description of Artificial Sequence: Synthetic oligonucleotide
cccaggcaugcugggugac

SEQ ID NO: 3118566 - RNA, 19 nt, Artificial Sequence
  Description of Artificial Sequence: Synthetic oligonucleotide
aguauuuauauauauauac

SEQ ID NO: 3118567 - RNA, 19 nt, Artificial Sequence
  Description of Artificial Sequence: Synthetic oligonucleotide
aacaguauguuacaaaccc

SEQ ID NO: 3118568 - RNA, 19 nt, Artificial Sequence
  Description of Artificial Sequence: Synthetic oligonucleotide
aaaacaguauguuacaaac

SEQ ID NO: 3118569 - RNA, 19 nt, Artificial Sequence
  Description of Artificial Sequence: Synthetic oligonucleotide
uauaauuuaaaacagcagc

SEQ ID NO: 3118570 - RNA, 19 nt, Artificial Sequence
  Description of Artificial Sequence: Synthetic oligonucleotide
aguuuuauaauuuaaaaca

SEQ ID NO: 3118571 - RNA, 19 nt, Artificial Sequence
  Description of Artificial Sequence: Synthetic oligonucleotide
aaaauaucauuccagauga

SEQ ID NO: 3118572 - RNA, 19 nt, Artificial Sequence
  Description of Artificial Sequence: Synthetic oligonucleotide
cuauaaagcauaaauauag

SEQ ID NO: 3118573 - RNA, 19 nt, Artificial Sequence
  Description of Artificial Sequence: Synthetic oligonucleotide
uuuauauauauauacaaaa

SEQ ID NO: 3118574 - RNA, 19 nt, Artificial Sequence
  Description of Artificial Sequence: Synthetic oligonucleotide
ugaauuaaaacuuuacaca

SEQ ID NO: 3118575 - RNA, 19 nt, Artificial Sequence
  Description of Artificial Sequence: Synthetic oligonucleotide
auauacaaaauaucauucc

SEQ ID NO: 3118576 - RNA, 19 nt, Artificial Sequence
  Description of Artificial Sequence: Synthetic oligonucleotide
uuuacagcaauuuaaagaa

SEQ ID NO: 3118577 - RNA, 19 nt, Artificial Sequence
  Description of Artificial Sequence: Synthetic oligonucleotide
uuuuacagcaauuuaaaga

SEQ ID NO: 3118578 - RNA, 19 nt, Artificial Sequence
  Description of Artificial Sequence: Synthetic oligonucleotide
uuuaaagaagaaaacaaaa

SEQ ID NO: 3118579 - RNA, 19 nt, Artificial Sequence
  Description of Artificial Sequence: Synthetic oligonucleotide
aaagaaagcccucuugagg

SEQ ID NO: 3118580 - RNA, 19 nt, Artificial Sequence
  Description of Artificial Sequence: Synthetic oligonucleotide
uucuaaaccaaacuuacca

SEQ ID NO: 3118581 - RNA, 19 nt, Artificial Sequence
  Description of Artificial Sequence: Synthetic oligonucleotide
uauauauauauacaaaaua

SEQ ID NO: 3118582 - RNA, 19 nt, Artificial Sequence
  Description of Artificial Sequence: Synthetic oligonucleotide
aaagcauaaauauaguuuu

SEQ ID NO: 3118583 - RNA, 19 nt, Artificial Sequence
  Description of Artificial Sequence: Synthetic oligonucleotide
gauaucaguggccaaaggg

SEQ ID NO: 3118584 - RNA, 19 nt, Artificial Sequence
  Description of Artificial Sequence: Synthetic oligonucleotide
uauuuauauauauauacaa

SEQ ID NO: 3118585 - RNA, 19 nt, Artificial Sequence
  Description of Artificial Sequence: Synthetic oligonucleotide
uuguaaaacaguauguuac

SEQ ID NO: 3118586 - RNA, 19 nt, Artificial Sequence
  Description of Artificial Sequence: Synthetic oligonucleotide
cugaauuaaaacuuuacac

SEQ ID NO: 3118587 - RNA, 19 nt, Artificial Sequence
  Description of Artificial Sequence: Synthetic oligonucleotide
uauauacaaaauaucauuc

SEQ ID NO: 3118588 - RNA, 19 nt, Artificial Sequence
  Description of Artificial Sequence: Synthetic oligonucleotide
uucuauaaagcauaaauau

SEQ ID NO: 3118589 - RNA, 19 nt, Artificial Sequence
  Description of Artificial Sequence: Synthetic oligonucleotide
uuauaauuuaaaacagcag

SEQ ID NO: 3118590 - RNA, 19 nt, Artificial Sequence
  Description of Artificial Sequence: Synthetic oligonucleotide
uauacaaaauaucauucca

SEQ ID NO: 3118591 - RNA, 19 nt, Artificial Sequence
  Description of Artificial Sequence: Synthetic oligonucleotide
auaaauauaguuuuauaau

SEQ ID NO: 3118592 - RNA, 19 nt, Artificial Sequence
  Description of Artificial Sequence: Synthetic oligonucleotide
acaguauuuauauauauau

SEQ ID NO: 3118593 - RNA, 19 nt, Artificial Sequence
  Description of Artificial Sequence: Synthetic oligonucleotide
uaaagcauaaauauaguuu

SEQ ID NO: 3118594 - RNA, 19 nt, Artificial Sequence
  Description of Artificial Sequence: Synthetic oligonucleotide
aauaucauuccagaugauc

SEQ ID NO: 3118595 - RNA, 19 nt, Artificial Sequence
  Description of Artificial Sequence: Synthetic oligonucleotide
aagaaagcccucuugaggu

SEQ ID NO: 3118596 - RNA, 19 nt, Artificial Sequence
  Description of Artificial Sequence: Synthetic oligonucleotide
uauaguuuuauaauuuaaa

SEQ ID NO: 3118597 - RNA, 19 nt, Artificial Sequence
  Description of Artificial Sequence: Synthetic oligonucleotide
auauauauacaaaauauca

SEQ ID NO: 3118598 - RNA, 19 nt, Artificial Sequence
  Description of Artificial Sequence: Synthetic oligonucleotide
uuauauauauauacaaaau

SEQ ID NO: 3118599 - RNA, 19 nt, Artificial Sequence
  Description of Artificial Sequence: Synthetic oligonucleotide
uauauauacaaaauaucau

SEQ ID NO: 3118600 - RNA, 19 nt, Artificial Sequence
  Description of Artificial Sequence: Synthetic oligonucleotide
caaaauaucauuccagaug

SEQ ID NO: 3118601 - RNA, 19 nt, Artificial Sequence
  Description of Artificial Sequence: Synthetic oligonucleotide
auuuucaaaagguuggcug

SEQ ID NO: 3118602 - RNA, 19 nt, Artificial Sequence
  Description of Artificial Sequence: Synthetic oligonucleotide
uuacacaguauuuauauau

SEQ ID NO: 3118603 - RNA, 19 nt, Artificial Sequence
  Description of Artificial Sequence: Synthetic oligonucleotide
uaaauauaguuuuauaauu

SEQ ID NO: 3118604 - RNA, 19 nt, Artificial Sequence
  Description of Artificial Sequence: Synthetic oligonucleotide
uacagcaauuuaaagaaga

SEQ ID NO: 3118605 - RNA, 19 nt, Artificial Sequence
  Description of Artificial Sequence: Synthetic oligonucleotide
auauauacaaaauaucauu

SEQ ID NO: 3118606 - RNA, 19 nt, Artificial Sequence
  Description of Artificial Sequence: Synthetic oligonucleotide
aauauaguuuuauaauuua

SEQ ID NO: 3118607 - RNA, 19 nt, Artificial Sequence
  Description of Artificial Sequence: Synthetic oligonucleotide
uuucuauaaagcauaaaua

SEQ ID NO: 3118608 - RNA, 19 nt, Artificial Sequence
  Description of Artificial Sequence: Synthetic oligonucleotide
aaaccccaguuucuaaacc

SEQ ID NO: 3118609 - RNA, 19 nt, Artificial Sequence
  Description of Artificial Sequence: Synthetic oligonucleotide
aaacaguauguuacaaacc

SEQ ID NO: 3118610 - RNA, 19 nt, Artificial Sequence
  Description of Artificial Sequence: Synthetic oligonucleotide
uacaaaauaucauuccaga

SEQ ID NO: 3118611 - RNA, 19 nt, Artificial Sequence
  Description of Artificial Sequence: Synthetic oligonucleotide
cuaaaccaaacuuaccacc

SEQ ID NO: 3118612 - RNA, 19 nt, Artificial Sequence
  Description of Artificial Sequence: Synthetic oligonucleotide
ucuuggaguuguaaaacag

SEQ ID NO: 3118613 - RNA, 19 nt, Artificial Sequence
  Description of Artificial Sequence: Synthetic oligonucleotide
uauguuacaaaccccaguu

SEQ ID NO: 3118614 - RNA, 19 nt, Artificial Sequence
  Description of Artificial Sequence: Synthetic oligonucleotide
uuuucaaaagguuggcuga

SEQ ID NO: 3118615 - RNA, 19 nt, Artificial Sequence
  Description of Artificial Sequence: Synthetic oligonucleotide
uguuacaaaccccaguuuc

SEQ ID NO: 3118616 - RNA, 19 nt, Artificial Sequence
  Description of Artificial Sequence: Synthetic oligonucleotide
uuccagaugaucuuggagu

SEQ ID NO: 3118617 - RNA, 19 nt, Artificial Sequence
  Description of Artificial Sequence: Synthetic oligonucleotide
ucuauaaagcauaaauaua

SEQ ID NO: 3118618 - RNA, 19 nt, Artificial Sequence
  Description of Artificial Sequence: Synthetic oligonucleotide
agcaauuuaaagaagaaaa

SEQ ID NO: 3118619 - RNA, 19 nt, Artificial Sequence
  Description of Artificial Sequence: Synthetic oligonucleotide
uauaaagcauaaauauagu

SEQ ID NO: 3118620 - RNA, 19 nt, Artificial Sequence
  Description of Artificial Sequence: Synthetic oligonucleotide
uguaaaacaguauguuaca

SEQ ID NO: 3118621 - RNA, 19 nt, Artificial Sequence
  Description of Artificial Sequence: Synthetic oligonucleotide
aacagcagcaauuuucaaa

SEQ ID NO: 3118622 - RNA, 19 nt, Artificial Sequence
  Description of Artificial Sequence: Synthetic oligonucleotide
aaaccaaacuuaccaccgg

SEQ ID NO: 3118623 - RNA, 19 nt, Artificial Sequence
  Description of Artificial Sequence: Synthetic oligonucleotide
aaauauaguuuuauaauuu

SEQ ID NO: 3118624 - RNA, 19 nt, Artificial Sequence
  Description of Artificial Sequence: Synthetic oligonucleotide
aacuuuacacaguauuuau

SEQ ID NO: 3118625 - RNA, 19 nt, Artificial Sequence
  Description of Artificial Sequence: Synthetic oligonucleotide
acagcagcaauuuucaaaa

SEQ ID NO: 3118626 - RNA, 19 nt, Artificial Sequence
  Description of Artificial Sequence: Synthetic oligonucleotide
ucuaaaccaaacuuaccac

SEQ ID NO: 3118627 - RNA, 19 nt, Artificial Sequence
  Description of Artificial Sequence: Synthetic oligonucleotide
aaaacagcagcaauuuuca

SEQ ID NO: 3118628 - RNA, 19 nt, Artificial Sequence
  Description of Artificial Sequence: Synthetic oligonucleotide
ggaguuguaaaacaguaug

SEQ ID NO: 3118629 - RNA, 19 nt, Artificial Sequence
  Description of Artificial Sequence: Synthetic oligonucleotide
auaaagcauaaauauaguu

SEQ ID NO: 3118630 - RNA, 19 nt, Artificial Sequence
  Description of Artificial Sequence: Synthetic oligonucleotide
aaacuuaccaccggauauc

SEQ ID NO: 3118631 - RNA, 19 nt, Artificial Sequence
  Description of Artificial Sequence: Synthetic oligonucleotide
aaaagguuggcugaauuaa

SEQ ID NO: 3118632 - RNA, 19 nt, Artificial Sequence
  Description of Artificial Sequence: Synthetic oligonucleotide
agguuggcugaauuaaaac

SEQ ID NO: 3118633 - RNA, 19 nt, Artificial Sequence
  Description of Artificial Sequence: Synthetic oligonucleotide
cuuuuacagcaauuuaaag

SEQ ID NO: 3118634 - RNA, 19 nt, Artificial Sequence
  Description of Artificial Sequence: Synthetic oligonucleotide
acaaaagaaagcccucuug

SEQ ID NO: 3118635 - RNA, 19 nt, Artificial Sequence
  Description of Artificial Sequence: Synthetic oligonucleotide
uuucuaaaccaaacuuacc

SEQ ID NO: 3118636 - RNA, 19 nt, Artificial Sequence
  Description of Artificial Sequence: Synthetic oligonucleotide
auaucauuccagaugaucu

SEQ ID NO: 3118637 - RNA, 19 nt, Artificial Sequence
  Description of Artificial Sequence: Synthetic oligonucleotide
agcaauuuucaaaagguug

SEQ ID NO: 3118638 - RNA, 19 nt, Artificial Sequence
  Description of Artificial Sequence: Synthetic oligonucleotide
accaccggauaucaguggc

SEQ ID NO: 3118639 - RNA, 19 nt, Artificial Sequence
  Description of Artificial Sequence: Synthetic oligonucleotide
ugaucuuggaguuguaaaa

SEQ ID NO: 3118640 - RNA, 19 nt, Artificial Sequence
  Description of Artificial Sequence: Synthetic oligonucleotide
uuggaguuguaaaacagua

SEQ ID NO: 3118641 - RNA, 19 nt, Artificial Sequence
  Description of Artificial Sequence: Synthetic oligonucleotide
aaccccaguuucuaaacca

SEQ ID NO: 3118642 - RNA, 19 nt, Artificial Sequence
  Description of Artificial Sequence: Synthetic oligonucleotide
aaacaaaagaaagcccucu

SEQ ID NO: 3118643 - RNA, 19 nt, Artificial Sequence
  Description of Artificial Sequence: Synthetic oligonucleotide
uuaccaccggauaucagug

SEQ ID NO: 3118644 - RNA, 19 nt, Artificial Sequence
  Description of Artificial Sequence: Synthetic oligonucleotide
gcaauuuucaaaagguugg

SEQ ID NO: 3118645 - RNA, 19 nt, Artificial Sequence
  Description of Artificial Sequence: Synthetic oligonucleotide
uuacagcaauuuaaagaag

SEQ ID NO: 3118646 - RNA, 19 nt, Artificial Sequence
  Description of Artificial Sequence: Synthetic oligonucleotide
guuucuaaaccaaacuuac

SEQ ID NO: 3118647 - RNA, 19 nt, Artificial Sequence
  Description of Artificial Sequence: Synthetic oligonucleotide
aauuuucaaaagguuggcu

SEQ ID NO: 3118648 - RNA, 19 nt, Artificial Sequence
  Description of Artificial Sequence: Synthetic oligonucleotide
uaucaguggccaaagggac

SEQ ID NO: 3118649 - RNA, 19 nt, Artificial Sequence
  Description of Artificial Sequence: Synthetic oligonucleotide
uauuuucuauaaagcauaa

SEQ ID NO: 3118650 - RNA, 19 nt, Artificial Sequence
  Description of Artificial Sequence: Synthetic oligonucleotide
auuuaaagaagaaaacaaa

SEQ ID NO: 3118651 - RNA, 19 nt, Artificial Sequence
  Description of Artificial Sequence: Synthetic oligonucleotide
auuuauauauauauacaaa

SEQ ID NO: 3118652 - RNA, 19 nt, Artificial Sequence
  Description of Artificial Sequence: Synthetic oligonucleotide
aaccaaacuuaccaccgga

SEQ ID NO: 3118653 - RNA, 19 nt, Artificial Sequence
  Description of Artificial Sequence: Synthetic oligonucleotide
aaacuuuacacaguauuua

SEQ ID NO: 3118654 - RNA, 19 nt, Artificial Sequence
  Description of Artificial Sequence: Synthetic oligonucleotide
gccaaagggacuuuuacag

SEQ ID NO: 3118655 - RNA, 19 nt, Artificial Sequence
  Description of Artificial Sequence: Synthetic oligonucleotide
acaaaauaucauuccagau

SEQ ID NO: 3118656 - RNA, 19 nt, Artificial Sequence
  Description of Artificial Sequence: Synthetic oligonucleotide
guauuuauauauauauaca

SEQ ID NO: 3118657 - RNA, 19 nt, Artificial Sequence
  Description of Artificial Sequence: Synthetic oligonucleotide
caaagggacuuuuacagca

SEQ ID NO: 3118658 - RNA, 19 nt, Artificial Sequence
  Description of Artificial Sequence: Synthetic oligonucleotide
acaguauguuacaaacccc

SEQ ID NO: 3118659 - RNA, 19 nt, Artificial Sequence
  Description of Artificial Sequence: Synthetic oligonucleotide
acacaguauuuauauauau

SEQ ID NO: 3118660 - RNA, 19 nt, Artificial Sequence
  Description of Artificial Sequence: Synthetic oligonucleotide
uacacaguauuuauauaua

SEQ ID NO: 3118661 - RNA, 19 nt, Artificial Sequence
  Description of Artificial Sequence: Synthetic oligonucleotide
gacuuuuacagcaauuuaa

SEQ ID NO: 3118662 - RNA, 19 nt, Artificial Sequence
  Description of Artificial Sequence: Synthetic oligonucleotide
aacaaaagaaagcccucuu

SEQ ID NO: 3118663 - RNA, 19 nt, Artificial Sequence
  Description of Artificial Sequence: Synthetic oligonucleotide
auaucaguggccaaaggga

SEQ ID NO: 3118664 - RNA, 19 nt, Artificial Sequence
  Description of Artificial Sequence: Synthetic oligonucleotide
gaucuuggaguuguaaaac

SEQ ID NO: 3118665 - RNA, 19 nt, Artificial Sequence
  Description of Artificial Sequence: Synthetic oligonucleotide
auuuaaaacagcagcaauu

SEQ ID NO: 3118666 - RNA, 19 nt, Artificial Sequence
  Description of Artificial Sequence: Synthetic oligonucleotide
uuaaaacuuuacacaguau

SEQ ID NO: 3118667 - RNA, 19 nt, Artificial Sequence
  Description of Artificial Sequence: Synthetic oligonucleotide
aucuuggaguuguaaaaca

SEQ ID NO: 3118668 - RNA, 19 nt, Artificial Sequence
  Description of Artificial Sequence: Synthetic oligonucleotide
augaucuuggaguuguaaa

SEQ ID NO: 3118669 - RNA, 19 nt, Artificial Sequence
  Description of Artificial Sequence: Synthetic oligonucleotide
caguauguuacaaacccca

SEQ ID NO: 3118670 - RNA, 19 nt, Artificial Sequence
  Description of Artificial Sequence: Synthetic oligonucleotide
ucaaaagguuggcugaauu

SEQ ID NO: 3118671 - RNA, 19 nt, Artificial Sequence
  Description of Artificial Sequence: Synthetic oligonucleotide
cuuuacacaguauuuauau

SEQ ID NO: 3118672 - RNA, 19 nt, Artificial Sequence
  Description of Artificial Sequence: Synthetic oligonucleotide
guuguaaaacaguauguua

SEQ ID NO: 3118673 - RNA, 19 nt, Artificial Sequence
  Description of Artificial Sequence: Synthetic oligonucleotide
gcugaauuaaaacuuuaca

SEQ ID NO: 3118674 - RNA, 19 nt, Artificial Sequence
  Description of Artificial Sequence: Synthetic oligonucleotide
uggaguuguaaaacaguau

SEQ ID NO: 3118675 - RNA, 19 nt, Artificial Sequence
  Description of Artificial Sequence: Synthetic oligonucleotide
caauuuucaaaagguuggc

SEQ ID NO: 3118676 - RNA, 19 nt, Artificial Sequence
  Description of Artificial Sequence: Synthetic oligonucleotide
aguuguaaaacaguauguu

SEQ ID NO: 3118677 - RNA, 19 nt, Artificial Sequence
  Description of Artificial Sequence: Synthetic oligonucleotide
agcauaaauauaguuuuau

SEQ ID NO: 3118678 - RNA, 19 nt, Artificial Sequence
  Description of Artificial Sequence: Synthetic oligonucleotide
aguuucuaaaccaaacuua

SEQ ID NO: 3118679 - RNA, 19 nt, Artificial Sequence
  Description of Artificial Sequence: Synthetic oligonucleotide
uggccaaagggacuuuuac

SEQ ID NO: 3118680 - RNA, 19 nt, Artificial Sequence
  Description of Artificial Sequence: Synthetic oligonucleotide
caaaccccaguuucuaaac

SEQ ID NO: 3118681 - RNA, 19 nt, Artificial Sequence
  Description of Artificial Sequence: Synthetic oligonucleotide
uuggcugaauuaaaacuuu

SEQ ID NO: 3118682 - RNA, 19 nt, Artificial Sequence
  Description of Artificial Sequence: Synthetic oligonucleotide
uuaaaacagcagcaauuuu

SEQ ID NO: 3118683 - RNA, 19 nt, Artificial Sequence
  Description of Artificial Sequence: Synthetic oligonucleotide
acuuuuacagcaauuuaaa

SEQ ID NO: 3118684 - RNA, 19 nt, Artificial Sequence
  Description of Artificial Sequence: Synthetic oligonucleotide
auauaguuuuauaauuuaa

SEQ ID NO: 3118685 - RNA, 19 nt, Artificial Sequence
  Description of Artificial Sequence: Synthetic oligonucleotide
acaaaccccaguuucuaaa

SEQ ID NO: 3118686 - RNA, 19 nt, Artificial Sequence
  Description of Artificial Sequence: Synthetic oligonucleotide
aacuuaccaccggauauca

SEQ ID NO: 3118687 - RNA, 19 nt, Artificial Sequence
  Description of Artificial Sequence: Synthetic oligonucleotide
uaucauuccagaugaucuu

SEQ ID NO: 3118688 - RNA, 19 nt, Artificial Sequence
  Description of Artificial Sequence: Synthetic oligonucleotide
aucauuccagaugaucuug

SEQ ID NO: 3118689 - RNA, 19 nt, Artificial Sequence
  Description of Artificial Sequence: Synthetic oligonucleotide
aagggacuuuuacagcaau

SEQ ID NO: 3118690 - RNA, 19 nt, Artificial Sequence
  Description of Artificial Sequence: Synthetic oligonucleotide
uccagaugaucuuggaguu

SEQ ID NO: 3118691 - RNA, 19 nt, Artificial Sequence
  Description of Artificial Sequence: Synthetic oligonucleotide
uaccaccggauaucagugg

SEQ ID NO: 3118692 - RNA, 19 nt, Artificial Sequence
  Description of Artificial Sequence: Synthetic oligonucleotide
aagguuggcugaauuaaaa

SEQ ID NO: 3118693 - RNA, 19 nt, Artificial Sequence
  Description of Artificial Sequence: Synthetic oligonucleotide
aguauguuacaaaccccag

SEQ ID NO: 3118694 - RNA, 19 nt, Artificial Sequence
  Description of Artificial Sequence: Synthetic oligonucleotide
cuuaccaccggauaucagu

SEQ ID NO: 3118695 - RNA, 19 nt, Artificial Sequence
  Description of Artificial Sequence: Synthetic oligonucleotide
aaagguuggcugaauuaaa

SEQ ID NO: 3118696 - RNA, 19 nt, Artificial Sequence
  Description of Artificial Sequence: Synthetic oligonucleotide
ucuugagguucuucagggu

SEQ ID NO: 3118697 - RNA, 19 nt, Artificial Sequence
  Description of Artificial Sequence: Synthetic oligonucleotide
caaaagguuggcugaauua

SEQ ID NO: 3118698 - RNA, 19 nt, Artificial Sequence
  Description of Artificial Sequence: Synthetic oligonucleotide
uggcugaauuaaaacuuua

SEQ ID NO: 3118699 - RNA, 19 nt, Artificial Sequence
  Description of Artificial Sequence: Synthetic oligonucleotide
caguauuuauauauauaua

SEQ ID NO: 3118700 - RNA, 19 nt, Artificial Sequence
  Description of Artificial Sequence: Synthetic oligonucleotide
gguuggcugaauuaaaacu

SEQ ID NO: 3118701 - RNA, 19 nt, Artificial Sequence
  Description of Artificial Sequence: Synthetic oligonucleotide
uacaaaccccaguuucuaa

SEQ ID NO: 3118702 - RNA, 19 nt, Artificial Sequence
  Description of Artificial Sequence: Synthetic oligonucleotide
uuacaaaccccaguuucua

SEQ ID NO: 3118703 - RNA, 19 nt, Artificial Sequence
  Description of Artificial Sequence: Synthetic oligonucleotide
gaugaucuuggaguuguaa

SEQ ID NO: 3118704 - RNA, 19 nt, Artificial Sequence
  Description of Artificial Sequence: Synthetic oligonucleotide
gaguuguaaaacaguaugu

SEQ ID NO: 3118705 - RNA, 19 nt, Artificial Sequence
  Description of Artificial Sequence: Synthetic oligonucleotide
cuuggaguuguaaaacagu

SEQ ID NO: 3118706 - RNA, 19 nt, Artificial Sequence
  Description of Artificial Sequence: Synthetic oligonucleotide
ucaguggccaaagggacuu

SEQ ID NO: 3118707 - RNA, 19 nt, Artificial Sequence
  Description of Artificial Sequence: Synthetic oligonucleotide
aaagggacuuuuacagcaa

SEQ ID NO: 3118708 - RNA, 19 nt, Artificial Sequence
  Description of Artificial Sequence: Synthetic oligonucleotide
aagcauaaauauaguuuua

SEQ ID NO: 3118709 - RNA, 19 nt, Artificial Sequence
  Description of Artificial Sequence: Synthetic oligonucleotide
gaaagcccucuugagguuc

SEQ ID NO: 3118710 - RNA, 19 nt, Artificial Sequence
  Description of Artificial Sequence: Synthetic oligonucleotide
auuuucuauaaagcauaaa

SEQ ID NO: 3118711 - RNA, 19 nt, Artificial Sequence
  Description of Artificial Sequence: Synthetic oligonucleotide
ggauaucaguggccaaagg

SEQ ID NO: 3118712 - RNA, 19 nt, Artificial Sequence
  Description of Artificial Sequence: Synthetic oligonucleotide
auguuacaaaccccaguuu

SEQ ID NO: 3118713 - RNA, 19 nt, Artificial Sequence
  Description of Artificial Sequence: Synthetic oligonucleotide
guauguuacaaaccccagu

SEQ ID NO: 3118714 - RNA, 19 nt, Artificial Sequence
  Description of Artificial Sequence: Synthetic oligonucleotide
caaacuuaccaccggauau

SEQ ID NO: 3118715 - RNA, 19 nt, Artificial Sequence
  Description of Artificial Sequence: Synthetic oligonucleotide
cccaguuucuaaaccaaac

SEQ ID NO: 3118716 - RNA, 19 nt, Artificial Sequence
  Description of Artificial Sequence: Synthetic oligonucleotide
ccucuugagguucuucagg

SEQ ID NO: 3118717 - RNA, 19 nt, Artificial Sequence
  Description of Artificial Sequence: Synthetic oligonucleotide
guuggcugaauuaaaacuu

SEQ ID NO: 3118718 - RNA, 19 nt, Artificial Sequence
  Description of Artificial Sequence: Synthetic oligonucleotide
ccaaagggacuuuuacagc

SEQ ID NO: 3118719 - RNA, 19 nt, Artificial Sequence
  Description of Artificial Sequence: Synthetic oligonucleotide
ggcugaauuaaaacuuuac

SEQ ID NO: 3118720 - RNA, 19 nt, Artificial Sequence
  Description of Artificial Sequence: Synthetic oligonucleotide
cagcagcaauuuucaaaag

SEQ ID NO: 3118721 - RNA, 19 nt, Artificial Sequence
  Description of Artificial Sequence: Synthetic oligonucleotide
acuuuacacaguauuuaua

SEQ ID NO: 3118722 - RNA, 19 nt, Artificial Sequence
  Description of Artificial Sequence: Synthetic oligonucleotide
cagcaauuuaaagaagaaa

SEQ ID NO: 3118723 - RNA, 19 nt, Artificial Sequence
  Description of Artificial Sequence: Synthetic oligonucleotide
aaagcccucuugagguucu

SEQ ID NO: 3118724 - RNA, 19 nt, Artificial Sequence
  Description of Artificial Sequence: Synthetic oligonucleotide
guuacaaaccccaguuucu

SEQ ID NO: 3118725 - RNA, 19 nt, Artificial Sequence
  Description of Artificial Sequence: Synthetic oligonucleotide
caguuucuaaaccaaacuu

SEQ ID NO: 3118726 - RNA, 19 nt, Artificial Sequence
  Description of Artificial Sequence: Synthetic oligonucleotide
cauuccagaugaucuugga

SEQ ID NO: 3118727 - RNA, 19 nt, Artificial Sequence
  Description of Artificial Sequence: Synthetic oligonucleotide
ggccaaagggacuuuuaca

SEQ ID NO: 3118728 - RNA, 19 nt, Artificial Sequence
  Description of Artificial Sequence: Synthetic oligonucleotide
agaaagcccucuugagguu

SEQ ID NO: 3118729 - RNA, 19 nt, Artificial Sequence
  Description of Artificial Sequence: Synthetic oligonucleotide
accaaacuuaccaccggau

SEQ ID NO: 3118730 - RNA, 19 nt, Artificial Sequence
  Description of Artificial Sequence: Synthetic oligonucleotide
aucaguggccaaagggacu

SEQ ID NO: 3118731 - RNA, 19 nt, Artificial Sequence
  Description of Artificial Sequence: Synthetic oligonucleotide
ggacuuuuacagcaauuua

SEQ ID NO: 3118732 - RNA, 19 nt, Artificial Sequence
  Description of Artificial Sequence: Synthetic oligonucleotide
cagaugaucuuggaguugu

SEQ ID NO: 3118733 - RNA, 19 nt, Artificial Sequence
  Description of Artificial Sequence: Synthetic oligonucleotide
acuuaccaccggauaucag

SEQ ID NO: 3118734 - RNA, 19 nt, Artificial Sequence
  Description of Artificial Sequence: Synthetic oligonucleotide
agcccucuugagguucuuc

SEQ ID NO: 3118735 - RNA, 19 nt, Artificial Sequence
  Description of Artificial Sequence: Synthetic oligonucleotide
caccggauaucaguggcca

SEQ ID NO: 3118736 - RNA, 19 nt, Artificial Sequence
  Description of Artificial Sequence: Synthetic oligonucleotide
gcccucuugagguucuuca

SEQ ID NO: 3118737 - RNA, 19 nt, Artificial Sequence
  Description of Artificial Sequence: Synthetic oligonucleotide
cccucuugagguucuucag

SEQ ID NO: 3118738 - RNA, 19 nt, Artificial Sequence
  Description of Artificial Sequence: Synthetic oligonucleotide
accccaguuucuaaaccaa

SEQ ID NO: 3118739 - RNA, 19 nt, Artificial Sequence
  Description of Artificial Sequence: Synthetic oligonucleotide
ccaccggauaucaguggcc

SEQ ID NO: 3118740 - RNA, 19 nt, Artificial Sequence
  Description of Artificial Sequence: Synthetic oligonucleotide
cagcaauuuucaaaagguu

SEQ ID NO: 3118741 - RNA, 19 nt, Artificial Sequence
  Description of Artificial Sequence: Synthetic oligonucleotide
aguggccaaagggacuuuu

SEQ ID NO: 3118742 - RNA, 19 nt, Artificial Sequence
  Description of Artificial Sequence: Synthetic oligonucleotide
agggacuuuuacagcaauu

SEQ ID NO: 3118743 - RNA, 19 nt, Artificial Sequence
  Description of Artificial Sequence: Synthetic oligonucleotide
ccaguuucuaaaccaaacu

SEQ ID NO: 3118744 - RNA, 19 nt, Artificial Sequence
  Description of Artificial Sequence: Synthetic oligonucleotide
accggauaucaguggccaa

SEQ ID NO: 3118745 - RNA, 19 nt, Artificial Sequence
  Description of Artificial Sequence: Synthetic oligonucleotide
gggacuuuuacagcaauuu

SEQ ID NO: 3118746 - RNA, 19 nt, Artificial Sequence
  Description of Artificial Sequence: Synthetic oligonucleotide
ccaaacuuaccaccggaua

SEQ ID NO: 3118747 - RNA, 19 nt, Artificial Sequence
  Description of Artificial Sequence: Synthetic oligonucleotide
cggauaucaguggccaaag

SEQ ID NO: 3118748 - RNA, 19 nt, Artificial Sequence
  Description of Artificial Sequence: Synthetic oligonucleotide
ccggauaucaguggccaaa

SEQ ID NO: 3118749 - RNA, 19 nt, Artificial Sequence
  Description of Artificial Sequence: Synthetic oligonucleotide
aagcccucuugagguucuu

SEQ ID NO: 3118750 - RNA, 19 nt, Artificial Sequence
  Description of Artificial Sequence: Synthetic oligonucleotide
ccccaguuucuaaaccaaa

SEQ ID NO: 3118751 - RNA, 19 nt, Artificial Sequence
  Description of Artificial Sequence: Synthetic oligonucleotide
aaagacauggaugagaggc

SEQ ID NO: 3118752 - RNA, 19 nt, Artificial Sequence
  Description of Artificial Sequence: Synthetic oligonucleotide
agaagggucucacagaucc

SEQ ID NO: 3118753 - RNA, 19 nt, Artificial Sequence
  Description of Artificial Sequence: Synthetic oligonucleotide
aacgauaccagguucuucg

SEQ ID NO: 3118754 - RNA, 19 nt, Artificial Sequence
  Description of Artificial Sequence: Synthetic oligonucleotide
ucacagauccugcugagcg

SEQ ID NO: 3118755 - RNA, 19 nt, Artificial Sequence
  Description of Artificial Sequence: Synthetic oligonucleotide
uucgcaaagacauggauga

SEQ ID NO: 3118756 - RNA, 19 nt, Artificial Sequence
  Description of Artificial Sequence: Synthetic oligonucleotide
ugagacacaaacgauacca

SEQ ID NO: 3118757 - RNA, 19 nt, Artificial Sequence
  Description of Artificial Sequence: Synthetic oligonucleotide
auggaugagaggcucgucc

SEQ ID NO: 3118758 - RNA, 19 nt, Artificial Sequence
  Description of Artificial Sequence: Synthetic oligonucleotide
ugcuucuugagacacaaac

SEQ ID NO: 3118759 - RNA, 19 nt, Artificial Sequence
  Description of Artificial Sequence: Synthetic oligonucleotide
aaagaagggucucacagau

SEQ ID NO: 3118760 - RNA, 19 nt, Artificial Sequence
  Description of Artificial Sequence: Synthetic oligonucleotide
cuugagacacaaacgauac

SEQ ID NO: 3118761 - RNA, 19 nt, Artificial Sequence
  Description of Artificial Sequence: Synthetic oligonucleotide
aggaggacagcucuguuuc

SEQ ID NO: 3118762 - RNA, 19 nt, Artificial Sequence
  Description of Artificial Sequence: Synthetic oligonucleotide
ucuugagacacaaacgaua

SEQ ID NO: 3118763 - RNA, 19 nt, Artificial Sequence
  Description of Artificial Sequence: Synthetic oligonucleotide
agacacaaacgauaccagg

SEQ ID NO: 3118764 - RNA, 19 nt, Artificial Sequence
  Description of Artificial Sequence: Synthetic oligonucleotide
uccuucacagccauggcca

SEQ ID NO: 3118765 - RNA, 19 nt, Artificial Sequence
  Description of Artificial Sequence: Synthetic oligonucleotide
ucuguuuccugcuucuuga

SEQ ID NO: 3118766 - RNA, 19 nt, Artificial Sequence
  Description of Artificial Sequence: Synthetic oligonucleotide
cugagcguccgccagaucc

SEQ ID NO: 3118767 - RNA, 19 nt, Artificial Sequence
  Description of Artificial Sequence: Synthetic oligonucleotide
ugucaugcccugcugacug

SEQ ID NO: 3118768 - RNA, 19 nt, Artificial Sequence
  Description of Artificial Sequence: Synthetic oligonucleotide
cuucuugagacacaaacga

SEQ ID NO: 3118769 - RNA, 19 nt, Artificial Sequence
  Description of Artificial Sequence: Synthetic oligonucleotide
ugcaggucaccacaccugg

SEQ ID NO: 3118770 - RNA, 19 nt, Artificial Sequence
  Description of Artificial Sequence: Synthetic oligonucleotide
cuucgcaaagacauggaug

SEQ ID NO: 3118771 - RNA, 19 nt, Artificial Sequence
  Description of Artificial Sequence: Synthetic oligonucleotide
guucuucgcaaagacaugg

SEQ ID NO: 3118772 - RNA, 19 nt, Artificial Sequence
  Description of Artificial Sequence: Synthetic oligonucleotide
agaucccacugucaugccc

SEQ ID NO: 3118773 - RNA, 19 nt, Artificial Sequence
  Description of Artificial Sequence: Synthetic oligonucleotide
acugucaugcccugcugac

SEQ ID NO: 3118774 - RNA, 19 nt, Artificial Sequence
  Description of Artificial Sequence: Synthetic oligonucleotide
cuucaaggccuucagcccc

SEQ ID NO: 3118775 - RNA, 19 nt, Artificial Sequence
  Description of Artificial Sequence: Synthetic oligonucleotide
gaaagaagggucucacaga

SEQ ID NO: 3118776 - RNA, 19 nt, Artificial Sequence
  Description of Artificial Sequence: Synthetic oligonucleotide
gagaggcucguccugcccg

SEQ ID NO: 3118777 - RNA, 19 nt, Artificial Sequence
  Description of Artificial Sequence: Synthetic oligonucleotide
aagggucucacagauccug

SEQ ID NO: 3118778 - RNA, 19 nt, Artificial Sequence
  Description of Artificial Sequence: Synthetic oligonucleotide
aaacgauaccagguucuuc

SEQ ID NO: 3118779 - RNA, 19 nt, Artificial Sequence
  Description of Artificial Sequence: Synthetic oligonucleotide
ucuucgcaaagacauggau

SEQ ID NO: 3118780 - RNA, 19 nt, Artificial Sequence
  Description of Artificial Sequence: Synthetic oligonucleotide
uugagacacaaacgauacc

SEQ ID NO: 3118781 - RNA, 19 nt, Artificial Sequence
  Description of Artificial Sequence: Synthetic oligonucleotide
acugcaggucaccacaccu

SEQ ID NO: 3118782 - RNA, 19 nt, Artificial Sequence
  Description of Artificial Sequence: Synthetic oligonucleotide
gcucuuguccuucacagcc

SEQ ID NO: 3118783 - RNA, 19 nt, Artificial Sequence
  Description of Artificial Sequence: Synthetic oligonucleotide
acgauaccagguucuucgc

SEQ ID NO: 3118784 - RNA, 19 nt, Artificial Sequence
  Description of Artificial Sequence: Synthetic oligonucleotide
agguucuucgcaaagacau

SEQ ID NO: 3118785 - RNA, 19 nt, Artificial Sequence
  Description of Artificial Sequence: Synthetic oligonucleotide
uucuugagacacaaacgau

SEQ ID NO: 3118786 - RNA, 19 nt, Artificial Sequence
  Description of Artificial Sequence: Synthetic oligonucleotide
ccuggcacucgaaagaagg

SEQ ID NO: 3118787 - RNA, 19 nt, Artificial Sequence
  Description of Artificial Sequence: Synthetic oligonucleotide
gcaaagacauggaugagag

SEQ ID NO: 3118788 - RNA, 19 nt, Artificial Sequence
  Description of Artificial Sequence: Synthetic oligonucleotide
cuggcacucgaaagaaggg

SEQ ID NO: 3118789 - RNA, 19 nt, Artificial Sequence
  Description of Artificial Sequence: Synthetic oligonucleotide
acagauccugcugagcguc

SEQ ID NO: 3118790 - RNA, 19 nt, Artificial Sequence
  Description of Artificial Sequence: Synthetic oligonucleotide
ccgaggaggacuuuugugg

SEQ ID NO: 3118791 - RNA, 19 nt, Artificial Sequence
  Description of Artificial Sequence: Synthetic oligonucleotide
augagaggcucguccugcc

SEQ ID NO: 3118792 - RNA, 19 nt, Artificial Sequence
  Description of Artificial Sequence: Synthetic oligonucleotide
gagacacaaacgauaccag

SEQ ID NO: 3118793 - RNA, 19 nt, Artificial Sequence
  Description of Artificial Sequence: Synthetic oligonucleotide
uggcauguccggaucaccu

SEQ ID NO: 3118794 - RNA, 19 nt, Artificial Sequence
  Description of Artificial Sequence: Synthetic oligonucleotide
agacauggaugagaggcuc

SEQ ID NO: 3118795 - RNA, 19 nt, Artificial Sequence
  Description of Artificial Sequence: Synthetic oligonucleotide
gaugagaggcucguccugc

SEQ ID NO: 3118796 - RNA, 19 nt, Artificial Sequence
  Description of Artificial Sequence: Synthetic oligonucleotide
ucucacagauccugcugag

SEQ ID NO: 3118797 - RNA, 19 nt, Artificial Sequence
  Description of Artificial Sequence: Synthetic oligonucleotide
uggaugagaggcucguccu

SEQ ID NO: 3118798 - RNA, 19 nt, Artificial Sequence
  Description of Artificial Sequence: Synthetic oligonucleotide
ugagcguccgccagauccc

SEQ ID NO: 3118799 - RNA, 19 nt, Artificial Sequence
  Description of Artificial Sequence: Synthetic oligonucleotide
uaccagguucuucgcaaag

SEQ ID NO: 3118800 - RNA, 19 nt, Artificial Sequence
  Description of Artificial Sequence: Synthetic oligonucleotide
uuuccugcuucuugagaca

SEQ ID NO: 3118801 - RNA, 19 nt, Artificial Sequence
  Description of Artificial Sequence: Synthetic oligonucleotide
gcuucuugagacacaaacg

SEQ ID NO: 3118802 - RNA, 19 nt, Artificial Sequence
  Description of Artificial Sequence: Synthetic oligonucleotide
acagccauggccaggagga

SEQ ID NO: 3118803 - RNA, 19 nt, Artificial Sequence
  Description of Artificial Sequence: Synthetic oligonucleotide
uucuucgcaaagacaugga

SEQ ID NO: 3118804 - RNA, 19 nt, Artificial Sequence
  Description of Artificial Sequence: Synthetic oligonucleotide
acaaacgauaccagguucu

SEQ ID NO: 3118805 - RNA, 19 nt, Artificial Sequence
  Description of Artificial Sequence: Synthetic oligonucleotide
caaagacauggaugagagg

SEQ ID NO: 3118806 - RNA, 19 nt, Artificial Sequence
  Description of Artificial Sequence: Synthetic oligonucleotide
uucagccccuccaugcucu

SEQ ID NO: 3118807 - RNA, 19 nt, Artificial Sequence
  Description of Artificial Sequence: Synthetic oligonucleotide
cacaaacgauaccagguuc

SEQ ID NO: 3118808 - RNA, 19 nt, Artificial Sequence
  Description of Artificial Sequence: Synthetic oligonucleotide
acacaaacgauaccagguu

SEQ ID NO: 3118809 - RNA, 19 nt, Artificial Sequence
  Description of Artificial Sequence: Synthetic oligonucleotide
gacauggaugagaggcucg

SEQ ID NO: 3118810 - RNA, 19 nt, Artificial Sequence
  Description of Artificial Sequence: Synthetic oligonucleotide
aagacauggaugagaggcu

SEQ ID NO: 3118811 - RNA, 19 nt, Artificial Sequence
  Description of Artificial Sequence: Synthetic oligonucleotide
uggccaggaggacagcucu

SEQ ID NO: 3118812 - RNA, 19 nt, Artificial Sequence
  Description of Artificial Sequence: Synthetic oligonucleotide
cgaaagaagggucucacag

SEQ ID NO: 3118813 - RNA, 19 nt, Artificial Sequence
  Description of Artificial Sequence: Synthetic oligonucleotide
ucgaaagaagggucucaca

SEQ ID NO: 3118814 - RNA, 19 nt, Artificial Sequence
  Description of Artificial Sequence: Synthetic oligonucleotide
ucuuguccuucacagccau

SEQ ID NO: 3118815 - RNA, 19 nt, Artificial Sequence
  Description of Artificial Sequence: Synthetic oligonucleotide
cucuguuuccugcuucuug

SEQ ID NO: 3118816 - RNA, 19 nt, Artificial Sequence
  Description of Artificial Sequence: Synthetic oligonucleotide
gucucacagauccugcuga

SEQ ID NO: 3118817 - RNA, 19 nt, Artificial Sequence
  Description of Artificial Sequence: Synthetic oligonucleotide
caccacaccuggcaugucc

SEQ ID NO: 3118818 - RNA, 19 nt, Artificial Sequence
  Description of Artificial Sequence: Synthetic oligonucleotide
ugcucuuguccuucacagc

SEQ ID NO: 3118819 - RNA, 19 nt, Artificial Sequence
  Description of Artificial Sequence: Synthetic oligonucleotide
augcccugcugacugcagg

SEQ ID NO: 3118820 - RNA, 19 nt, Artificial Sequence
  Description of Artificial Sequence: Synthetic oligonucleotide
gaggaggacuuuuguggug

SEQ ID NO: 3118821 - RNA, 19 nt, Artificial Sequence
  Description of Artificial Sequence: Synthetic oligonucleotide
uccgccagaucccacuguc

SEQ ID NO: 3118822 - RNA, 19 nt, Artificial Sequence
  Description of Artificial Sequence: Synthetic oligonucleotide
uggcacucgaaagaagggu

SEQ ID NO: 3118823 - RNA, 19 nt, Artificial Sequence
  Description of Artificial Sequence: Synthetic oligonucleotide
aagaagggucucacagauc

SEQ ID NO: 3118824 - RNA, 19 nt, Artificial Sequence
  Description of Artificial Sequence: Synthetic oligonucleotide
cggaucaccuccuucaagg

SEQ ID NO: 3118825 - RNA, 19 nt, Artificial Sequence
  Description of Artificial Sequence: Synthetic oligonucleotide
uccuggcacucgaaagaag

SEQ ID NO: 3118826 - RNA, 19 nt, Artificial Sequence
  Description of Artificial Sequence: Synthetic oligonucleotide
ccagaucccacugucaugc

SEQ ID NO: 3118827 - RNA, 19 nt, Artificial Sequence
  Description of Artificial Sequence: Synthetic oligonucleotide
guccggaucaccuccuuca

SEQ ID NO: 3118828 - RNA, 19 nt, Artificial Sequence
  Description of Artificial Sequence: Synthetic oligonucleotide
cucgaaagaagggucucac

SEQ ID NO: 3118829 - RNA, 19 nt, Artificial Sequence
  Description of Artificial Sequence: Synthetic oligonucleotide
auccugcugagcguccgcc

SEQ ID NO: 3118830 - RNA, 19 nt, Artificial Sequence
  Description of Artificial Sequence: Synthetic oligonucleotide
ugacugcaggucaccacac

SEQ ID NO: 3118831 - RNA, 19 nt, Artificial Sequence
  Description of Artificial Sequence: Synthetic oligonucleotide
uucaaggccuucagccccu

SEQ ID NO: 3118832 - RNA, 19 nt, Artificial Sequence
  Description of Artificial Sequence: Synthetic oligonucleotide
agggucucacagauccugc

SEQ ID NO: 3118833 - RNA, 19 nt, Artificial Sequence
  Description of Artificial Sequence: Synthetic oligonucleotide
cugcaggucaccacaccug

SEQ ID NO: 3118834 - RNA, 19 nt, Artificial Sequence
  Description of Artificial Sequence: Synthetic oligonucleotide
uuccugcuucuugagacac

SEQ ID NO: 3118835 - RNA, 19 nt, Artificial Sequence
  Description of Artificial Sequence: Synthetic oligonucleotide
cuguuuccugcuucuugag

SEQ ID NO: 3118836 - RNA, 19 nt, Artificial Sequence
  Description of Artificial Sequence: Synthetic oligonucleotide
ugcccgaggaggacuuuug

SEQ ID NO: 3118837 - RNA, 19 nt, Artificial Sequence
  Description of Artificial Sequence: Synthetic oligonucleotide
accacaccuggcauguccg

SEQ ID NO: 3118838 - RNA, 19 nt, Artificial Sequence
  Description of Artificial Sequence: Synthetic oligonucleotide
gacugcaggucaccacacc

SEQ ID NO: 3118839 - RNA, 19 nt, Artificial Sequence
  Description of Artificial Sequence: Synthetic oligonucleotide
ugcccugcugacugcaggu

SEQ ID NO: 3118840 - RNA, 19 nt, Artificial Sequence
  Description of Artificial Sequence: Synthetic oligonucleotide
ucguccugcccgaggagga

SEQ ID NO: 3118841 - RNA, 19 nt, Artificial Sequence
  Description of Artificial Sequence: Synthetic oligonucleotide
cucguccugcccgaggagg

SEQ ID NO: 3118842 - RNA, 19 nt, Artificial Sequence
  Description of Artificial Sequence: Synthetic oligonucleotide
agccccuccaugcucuugu

SEQ ID NO: 3118843 - RNA, 19 nt, Artificial Sequence
  Description of Artificial Sequence: Synthetic oligonucleotide
caugcucuuguccuucaca

SEQ ID NO: 3118844 - RNA, 19 nt, Artificial Sequence
  Description of Artificial Sequence: Synthetic oligonucleotide
uguccggaucaccuccuuc

SEQ ID NO: 3118845 - RNA, 19 nt, Artificial Sequence
  Description of Artificial Sequence: Synthetic oligonucleotide
agauccugcugagcguccg

SEQ ID NO: 3118846 - RNA, 19 nt, Artificial Sequence
  Description of Artificial Sequence: Synthetic oligonucleotide
gcauguccggaucaccucc

SEQ ID NO: 3118847 - RNA, 19 nt, Artificial Sequence
  Description of Artificial Sequence: Synthetic oligonucleotide
auaccagguucuucgcaaa

SEQ ID NO: 3118848 - RNA, 19 nt, Artificial Sequence
  Description of Artificial Sequence: Synthetic oligonucleotide
acauggaugagaggcucgu

SEQ ID NO: 3118849 - RNA, 19 nt, Artificial Sequence
  Description of Artificial Sequence: Synthetic oligonucleotide
gauccugcugagcguccgc

SEQ ID NO: 3118850 - RNA, 19 nt, Artificial Sequence
  Description of Artificial Sequence: Synthetic oligonucleotide
caggucaccacaccuggca

SEQ ID NO: 3118851 - RNA, 19 nt, Artificial Sequence
  Description of Artificial Sequence: Synthetic oligonucleotide
uccugcuucuugagacaca

SEQ ID NO: 3118852 - RNA, 19 nt, Artificial Sequence
  Description of Artificial Sequence: Synthetic oligonucleotide
ggucucacagauccugcug

SEQ ID NO: 3118853 - RNA, 19 nt, Artificial Sequence
  Description of Artificial Sequence: Synthetic oligonucleotide
accagguucuucgcaaaga

SEQ ID NO: 3118854 - RNA, 19 nt, Artificial Sequence
  Description of Artificial Sequence: Synthetic oligonucleotide
ccagguucuucgcaaagac

SEQ ID NO: 3118855 - RNA, 19 nt, Artificial Sequence
  Description of Artificial Sequence: Synthetic oligonucleotide
ggaucaccuccuucaaggc

SEQ ID NO: 3118856 - RNA, 19 nt, Artificial Sequence
  Description of Artificial Sequence: Synthetic oligonucleotide
uccggaucaccuccuucaa

SEQ ID NO: 3118857 - RNA, 19 nt, Artificial Sequence
  Description of Artificial Sequence: Synthetic oligonucleotide
acucgaaagaagggucuca

SEQ ID NO: 3118858 - RNA, 19 nt, Artificial Sequence
  Description of Artificial Sequence: Synthetic oligonucleotide
acaccuggcauguccggau

SEQ ID NO: 3118859 - RNA, 19 nt, Artificial Sequence
  Description of Artificial Sequence: Synthetic oligonucleotide
cucacagauccugcugagc

SEQ ID NO: 3118860 - RNA, 19 nt, Artificial Sequence
  Description of Artificial Sequence: Synthetic oligonucleotide
gaucccacugucaugcccu

SEQ ID NO: 3118861 - RNA, 19 nt, Artificial Sequence
  Description of Artificial Sequence: Synthetic oligonucleotide
ucaugcccugcugacugca

SEQ ID NO: 3118862 - RNA, 19 nt, Artificial Sequence
  Description of Artificial Sequence: Synthetic oligonucleotide
cagguucuucgcaaagaca

SEQ ID NO: 3118863 - RNA, 19 nt, Artificial Sequence
  Description of Artificial Sequence: Synthetic oligonucleotide
auggccaggaggacagcuc

SEQ ID NO: 3118864 - RNA, 19 nt, Artificial Sequence
  Description of Artificial Sequence: Synthetic oligonucleotide
gccuucagccccuccaugc

SEQ ID NO: 3118865 - RNA, 19 nt, Artificial Sequence
  Description of Artificial Sequence: Synthetic oligonucleotide
ucgcaaagacauggaugag

SEQ ID NO: 3118866 - RNA, 19 nt, Artificial Sequence
  Description of Artificial Sequence: Synthetic oligonucleotide
accuggcauguccggauca

SEQ ID NO: 3118867 - RNA, 19 nt, Artificial Sequence
  Description of Artificial Sequence: Synthetic oligonucleotide
cuucacagccauggccagg

SEQ ID NO: 3118868 - RNA, 19 nt, Artificial Sequence
  Description of Artificial Sequence: Synthetic oligonucleotide
ggacagcucuguuuccugc

SEQ ID NO: 3118869 - RNA, 19 nt, Artificial Sequence
  Description of Artificial Sequence: Synthetic oligonucleotide
ugcugacugcaggucacca

SEQ ID NO: 3118870 - RNA, 19 nt, Artificial Sequence
  Description of Artificial Sequence: Synthetic oligonucleotide
uccugcugagcguccgcca

SEQ ID NO: 3118871 - RNA, 19 nt, Artificial Sequence
  Description of Artificial Sequence: Synthetic oligonucleotide
cuucagccccuccaugcuc

SEQ ID NO: 3118872 - RNA, 19 nt, Artificial Sequence
  Description of Artificial Sequence: Synthetic oligonucleotide
cagauccugcugagcgucc

SEQ ID NO: 3118873 - RNA, 19 nt, Artificial Sequence
  Description of Artificial Sequence: Synthetic oligonucleotide
agaggcucguccugcccga

SEQ ID NO: 3118874 - RNA, 19 nt, Artificial Sequence
  Description of Artificial Sequence: Synthetic oligonucleotide
ggucaccacaccuggcaug

SEQ ID NO: 3118875 - RNA, 19 nt, Artificial Sequence
  Description of Artificial Sequence: Synthetic oligonucleotide
gacagcucuguuuccugcu

SEQ ID NO: 3118876 - RNA, 19 nt, Artificial Sequence
  Description of Artificial Sequence: Synthetic oligonucleotide
caugcccugcugacugcag

SEQ ID NO: 3118877 - RNA, 19 nt, Artificial Sequence
  Description of Artificial Sequence: Synthetic oligonucleotide
cacugucaugcccugcuga

SEQ ID NO: 3118878 - RNA, 19 nt, Artificial Sequence
  Description of Artificial Sequence: Synthetic oligonucleotide
cucuuguccuucacagcca

SEQ ID NO: 3118879 - RNA, 19 nt, Artificial Sequence
  Description of Artificial Sequence: Synthetic oligonucleotide
ggcacucgaaagaaggguc

SEQ ID NO: 3118880 - RNA, 19 nt, Artificial Sequence
  Description of Artificial Sequence: Synthetic oligonucleotide
ggaugagaggcucguccug

SEQ ID NO: 3118881 - RNA, 19 nt, Artificial Sequence
  Description of Artificial Sequence: Synthetic oligonucleotide
cuggcauguccggaucacc

SEQ ID NO: 3118882 - RNA, 19 nt, Artificial Sequence
  Description of Artificial Sequence: Synthetic oligonucleotide
aggcucguccugcccgagg

SEQ ID NO: 3118883 - RNA, 19 nt, Artificial Sequence
  Description of Artificial Sequence: Synthetic oligonucleotide
cagcucuguuuccugcuuc

SEQ ID NO: 3118884 - RNA, 19 nt, Artificial Sequence
  Description of Artificial Sequence: Synthetic oligonucleotide
cacucgaaagaagggucuc

SEQ ID NO: 3118885 - RNA, 19 nt, Artificial Sequence
  Description of Artificial Sequence: Synthetic oligonucleotide
gucaugcccugcugacugc

SEQ ID NO: 3118886 - RNA, 19 nt, Artificial Sequence
  Description of Artificial Sequence: Synthetic oligonucleotide
agccauggccaggaggaca

SEQ ID NO: 3118887 - RNA, 19 nt, Artificial Sequence
  Description of Artificial Sequence: Synthetic oligonucleotide
gccauggccaggaggacag

SEQ ID NO: 3118888 - RNA, 19 nt, Artificial Sequence
  Description of Artificial Sequence: Synthetic oligonucleotide
cagaucccacugucaugcc

SEQ ID NO: 3118889 - RNA, 19 nt, Artificial Sequence
  Description of Artificial Sequence: Synthetic oligonucleotide
aucccacugucaugcccug

SEQ ID NO: 3118890 - RNA, 19 nt, Artificial Sequence
  Description of Artificial Sequence: Synthetic oligonucleotide
gguucuucgcaaagacaug

SEQ ID NO: 3118891 - RNA, 19 nt, Artificial Sequence
  Description of Artificial Sequence: Synthetic oligonucleotide
uccugcccgaggaggacuu

SEQ ID NO: 3118892 - RNA, 19 nt, Artificial Sequence
  Description of Artificial Sequence: Synthetic oligonucleotide
ugcugagcguccgccagau

SEQ ID NO: 3118893 - RNA, 19 nt, Artificial Sequence
  Description of Artificial Sequence: Synthetic oligonucleotide
cccgaggaggacuuuugug

SEQ ID NO: 3118894 - RNA, 19 nt, Artificial Sequence
  Description of Artificial Sequence: Synthetic oligonucleotide
gaggacagcucuguuuccu

SEQ ID NO: 3118895 - RNA, 19 nt, Artificial Sequence
  Description of Artificial Sequence: Synthetic oligonucleotide
cauggaugagaggcucguc

SEQ ID NO: 3118896 - RNA, 19 nt, Artificial Sequence
  Description of Artificial Sequence: Synthetic oligonucleotide
gucaccacaccuggcaugu

SEQ ID NO: 3118897 - RNA, 19 nt, Artificial Sequence
  Description of Artificial Sequence: Synthetic oligonucleotide
gccagaucccacugucaug

SEQ ID NO: 3118898 - RNA, 19 nt, Artificial Sequence
  Description of Artificial Sequence: Synthetic oligonucleotide
ucaccuccuucaaggccuu

SEQ ID NO: 3118899 - RNA, 19 nt, Artificial Sequence
  Description of Artificial Sequence: Synthetic oligonucleotide
ggcauguccggaucaccuc

SEQ ID NO: 3118900 - RNA, 19 nt, Artificial Sequence
  Description of Artificial Sequence: Synthetic oligonucleotide
ggcucguccugcccgagga

SEQ ID NO: 3118901 - RNA, 19 nt, Artificial Sequence
  Description of Artificial Sequence: Synthetic oligonucleotide
ccugcugagcguccgccag

SEQ ID NO: 3118902 - RNA, 19 nt, Artificial Sequence
  Description of Artificial Sequence: Synthetic oligonucleotide
caccuggcauguccggauc

SEQ ID NO: 3118903 - RNA, 19 nt, Artificial Sequence
  Description of Artificial Sequence: Synthetic oligonucleotide
ucccacugucaugcccugc

SEQ ID NO: 3118904 - RNA, 19 nt, Artificial Sequence
  Description of Artificial Sequence: Synthetic oligonucleotide
ccuucacagccauggccag

SEQ ID NO: 3118905 - RNA, 19 nt, Artificial Sequence
  Description of Artificial Sequence: Synthetic oligonucleotide
cacagauccugcugagcgu

SEQ ID NO: 3118906 - RNA, 19 nt, Artificial Sequence
  Description of Artificial Sequence: Synthetic oligonucleotide
cacaccuggcauguccgga

SEQ ID NO: 3118907 - RNA, 19 nt, Artificial Sequence
  Description of Artificial Sequence: Synthetic oligonucleotide
ccacaccuggcauguccgg

SEQ ID NO: 3118908 - RNA, 19 nt, Artificial Sequence
  Description of Artificial Sequence: Synthetic oligonucleotide
auguccggaucaccuccuu

SEQ ID NO: 3118909 - RNA, 19 nt, Artificial Sequence
  Description of Artificial Sequence: Synthetic oligonucleotide
caggaggacagcucuguuu

SEQ ID NO: 3118910 - RNA, 19 nt, Artificial Sequence
  Description of Artificial Sequence: Synthetic oligonucleotide
agcguccgccagaucccac

SEQ ID NO: 3118911 - RNA, 19 nt, Artificial Sequence
  Description of Artificial Sequence: Synthetic oligonucleotide
ccggaucaccuccuucaag

SEQ ID NO: 3118912 - RNA, 19 nt, Artificial Sequence
  Description of Artificial Sequence: Synthetic oligonucleotide
ccugcuucuugagacacaa

SEQ ID NO: 3118913 - RNA, 19 nt, Artificial Sequence
  Description of Artificial Sequence: Synthetic oligonucleotide
gaggcucguccugcccgag

SEQ ID NO: 3118914 - RNA, 19 nt, Artificial Sequence
  Description of Artificial Sequence: Synthetic oligonucleotide
cauguccggaucaccuccu

SEQ ID NO: 3118915 - RNA, 19 nt, Artificial Sequence
  Description of Artificial Sequence: Synthetic oligonucleotide
ccccuccaugcucuugucc

SEQ ID NO: 3118916 - RNA, 19 nt, Artificial Sequence
  Description of Artificial Sequence: Synthetic oligonucleotide
gagcguccgccagauccca

SEQ ID NO: 3118917 - RNA, 19 nt, Artificial Sequence
  Description of Artificial Sequence: Synthetic oligonucleotide
gaagggucucacagauccu

SEQ ID NO: 3118918 - RNA, 19 nt, Artificial Sequence
  Description of Artificial Sequence: Synthetic oligonucleotide
cugcugagcguccgccaga

SEQ ID NO: 3118919 - RNA, 19 nt, Artificial Sequence
  Description of Artificial Sequence: Synthetic oligonucleotide
gcucguccugcccgaggag

SEQ ID NO: 3118920 - RNA, 19 nt, Artificial Sequence
  Description of Artificial Sequence: Synthetic oligonucleotide
ucagccccuccaugcucuu

SEQ ID NO: 3118921 - RNA, 19 nt, Artificial Sequence
  Description of Artificial Sequence: Synthetic oligonucleotide
ucaaggccuucagccccuc

SEQ ID NO: 3118922 - RNA, 19 nt, Artificial Sequence
  Description of Artificial Sequence: Synthetic oligonucleotide
cugcuucuugagacacaaa

SEQ ID NO: 3118923 - RNA, 19 nt, Artificial Sequence
  Description of Artificial Sequence: Synthetic oligonucleotide
ccaugcucuuguccuucac

SEQ ID NO: 3118924 - RNA, 19 nt, Artificial Sequence
  Description of Artificial Sequence: Synthetic oligonucleotide
gggucucacagauccugcu

SEQ ID NO: 3118925 - RNA, 19 nt, Artificial Sequence
  Description of Artificial Sequence: Synthetic oligonucleotide
ccuggcauguccggaucac

SEQ ID NO: 3118926 - RNA, 19 nt, Artificial Sequence
  Description of Artificial Sequence: Synthetic oligonucleotide
gcacucgaaagaagggucu

SEQ ID NO: 3118927 - RNA, 19 nt, Artificial Sequence
  Description of Artificial Sequence: Synthetic oligonucleotide
ccacugucaugcccugcug

SEQ ID NO: 3118928 - RNA, 19 nt, Artificial Sequence
  Description of Artificial Sequence: Synthetic oligonucleotide
gcaggucaccacaccuggc

SEQ ID NO: 3118929 - RNA, 19 nt, Artificial Sequence
  Description of Artificial Sequence: Synthetic oligonucleotide
caaacgauaccagguucuu

SEQ ID NO: 3118930 - RNA, 19 nt, Artificial Sequence
  Description of Artificial Sequence: Synthetic oligonucleotide
cgauaccagguucuucgca

SEQ ID NO: 3118931 - RNA, 19 nt, Artificial Sequence
  Description of Artificial Sequence: Synthetic oligonucleotide
cagccccuccaugcucuug

SEQ ID NO: 3118932 - RNA, 19 nt, Artificial Sequence
  Description of Artificial Sequence: Synthetic oligonucleotide
cugucaugcccugcugacu

SEQ ID NO: 3118933 - RNA, 19 nt, Artificial Sequence
  Description of Artificial Sequence: Synthetic oligonucleotide
ggccaggaggacagcucug

SEQ ID NO: 3118934 - RNA, 19 nt, Artificial Sequence
  Description of Artificial Sequence: Synthetic oligonucleotide
guccgccagaucccacugu

SEQ ID NO: 3118935 - RNA, 19 nt, Artificial Sequence
  Description of Artificial Sequence: Synthetic oligonucleotide
cccacugucaugcccugcu

SEQ ID NO: 3118936 - RNA, 19 nt, Artificial Sequence
  Description of Artificial Sequence: Synthetic oligonucleotide
cgaggaggacuuuuguggu

SEQ ID NO: 3118937 - RNA, 19 nt, Artificial Sequence
  Description of Artificial Sequence: Synthetic oligonucleotide
cguccgccagaucccacug

SEQ ID NO: 3118938 - RNA, 19 nt, Artificial Sequence
  Description of Artificial Sequence: Synthetic oligonucleotide
gccaggaggacagcucugu

SEQ ID NO: 3118939 - RNA, 19 nt, Artificial Sequence
  Description of Artificial Sequence: Synthetic oligonucleotide
gcguccgccagaucccacu

SEQ ID NO: 3118940 - RNA, 19 nt, Artificial Sequence
  Description of Artificial Sequence: Synthetic oligonucleotide
gcccgaggaggacuuuugu

SEQ ID NO: 3118941 - RNA, 19 nt, Artificial Sequence
  Description of Artificial Sequence: Synthetic oligonucleotide
ccgccagaucccacuguca

SEQ ID NO: 3118942 - RNA, 19 nt, Artificial Sequence
  Description of Artificial Sequence: Synthetic oligonucleotide
gcccugcugacugcagguc

SEQ ID NO: 3118943 - RNA, 19 nt, Artificial Sequence
  Description of Artificial Sequence: Synthetic oligonucleotide
ccuucagccccuccaugcu

SEQ ID NO: 3118944 - RNA, 19 nt, Artificial Sequence
  Description of Artificial Sequence: Synthetic oligonucleotide
caccuccuucaaggccuuc

SEQ ID NO: 3118945 - RNA, 19 nt, Artificial Sequence
  Description of Artificial Sequence: Synthetic oligonucleotide
gcugagcguccgccagauc

SEQ ID NO: 3118946 - RNA, 19 nt, Artificial Sequence
  Description of Artificial Sequence: Synthetic oligonucleotide
ccauggccaggaggacagc

SEQ ID NO: 3118947 - RNA, 19 nt, Artificial Sequence
  Description of Artificial Sequence: Synthetic oligonucleotide
cugcccgaggaggacuuuu

SEQ ID NO: 3118948 - RNA, 19 nt, Artificial Sequence
  Description of Artificial Sequence: Synthetic oligonucleotide
cgccagaucccacugucau

SEQ ID NO: 3118949 - RNA, 19 nt, Artificial Sequence
  Description of Artificial Sequence: Synthetic oligonucleotide
cguccugcccgaggaggac

SEQ ID NO: 3118950 - RNA, 19 nt, Artificial Sequence
  Description of Artificial Sequence: Synthetic oligonucleotide
ccaggaggacagcucuguu

SEQ ID NO: 3118951 - RNA, 19 nt, Artificial Sequence
  Description of Artificial Sequence: Synthetic oligonucleotide
ccugcccgaggaggacuuu

SEQ ID NO: 3118952 - RNA, 19 nt, Artificial Sequence
  Description of Artificial Sequence: Synthetic oligonucleotide
ugaauccugaacaugagag

SEQ ID NO: 3118953 - RNA, 19 nt, Artificial Sequence
  Description of Artificial Sequence: Synthetic oligonucleotide
aucauucuauagcagaugc

SEQ ID NO: 3118954 - RNA, 19 nt, Artificial Sequence
  Description of Artificial Sequence: Synthetic oligonucleotide
aagaaucucugaugaaucc

SEQ ID NO: 3118955 - RNA, 19 nt, Artificial Sequence
  Description of Artificial Sequence: Synthetic oligonucleotide
uuagcuaucgugcacauaa

SEQ ID NO: 3118956 - RNA, 19 nt, Artificial Sequence
  Description of Artificial Sequence: Synthetic oligonucleotide
guuguuaucauucuauagc

SEQ ID NO: 3118957 - RNA, 19 nt, Artificial Sequence
  Description of Artificial Sequence: Synthetic oligonucleotide
aguuuuaucuuuuggagug

SEQ ID NO: 3118958 - RNA, 19 nt, Artificial Sequence
  Description of Artificial Sequence: Synthetic oligonucleotide
ucuaugguuggcuuggagg

SEQ ID NO: 3118959 - RNA, 19 nt, Artificial Sequence
  Description of Artificial Sequence: Synthetic oligonucleotide
aauccugaacaugagaguc

SEQ ID NO: 3118960 - RNA, 19 nt, Artificial Sequence
  Description of Artificial Sequence: Synthetic oligonucleotide
ugaugaauccugaacauga

SEQ ID NO: 3118961 - RNA, 19 nt, Artificial Sequence
  Description of Artificial Sequence: Synthetic oligonucleotide
aguauucguaaguuacugc

SEQ ID NO: 3118962 - RNA, 19 nt, Artificial Sequence
  Description of Artificial Sequence: Synthetic oligonucleotide
uuguuaucauucuauagca

SEQ ID NO: 3118963 - RNA, 19 nt, Artificial Sequence
  Description of Artificial Sequence: Synthetic oligonucleotide
augauguaagcuuugguug

SEQ ID NO: 3118964 - RNA, 19 nt, Artificial Sequence
  Description of Artificial Sequence: Synthetic oligonucleotide
guauucguaaguuacugcc

SEQ ID NO: 3118965 - RNA, 19 nt, Artificial Sequence
  Description of Artificial Sequence: Synthetic oligonucleotide
uaugauguaagcuuugguu

SEQ ID NO: 3118966 - RNA, 19 nt, Artificial Sequence
  Description of Artificial Sequence: Synthetic oligonucleotide
uaucgugcacauaagguca

SEQ ID NO: 3118967 - RNA, 19 nt, Artificial Sequence
  Description of Artificial Sequence: Synthetic oligonucleotide
uaaguuacugcccaagaau

SEQ ID NO: 3118968 - RNA, 19 nt, Artificial Sequence
  Description of Artificial Sequence: Synthetic oligonucleotide
aacagaaccagaaagcuau

SEQ ID NO: 3118969 - RNA, 19 nt, Artificial Sequence
  Description of Artificial Sequence: Synthetic oligonucleotide
aaguuacugcccaagaauc

SEQ ID NO: 3118970 - RNA, 19 nt, Artificial Sequence
  Description of Artificial Sequence: Synthetic oligonucleotide
ugcacauaaggucaacagc

SEQ ID NO: 3118971 - RNA, 19 nt, Artificial Sequence
  Description of Artificial Sequence: Synthetic oligonucleotide
gaguggggcaaacagaacc

SEQ ID NO: 3118972 - RNA, 19 nt, Artificial Sequence
  Description of Artificial Sequence: Synthetic oligonucleotide
aucuuuuggaguguucucc

SEQ ID NO: 3118973 - RNA, 19 nt, Artificial Sequence
  Description of Artificial Sequence: Synthetic oligonucleotide
aggucaacagcguugacug

SEQ ID NO: 3118974 - RNA, 19 nt, Artificial Sequence
  Description of Artificial Sequence: Synthetic oligonucleotide
guuaucauucuauagcaga

SEQ ID NO: 3118975 - RNA, 19 nt, Artificial Sequence
  Description of Artificial Sequence: Synthetic oligonucleotide
uauucguaaguuacugccc

SEQ ID NO: 3118976 - RNA, 19 nt, Artificial Sequence
  Description of Artificial Sequence: Synthetic oligonucleotide
uguuaucauucuauagcag

SEQ ID NO: 3118977 - RNA, 19 nt, Artificial Sequence
  Description of Artificial Sequence: Synthetic oligonucleotide
uccaacagggcuuugcucu

SEQ ID NO: 3118978 - RNA, 19 nt, Artificial Sequence
  Description of Artificial Sequence: Synthetic oligonucleotide
uggaguguucuccaacagg

SEQ ID NO: 3118979 - RNA, 19 nt, Artificial Sequence
  Description of Artificial Sequence: Synthetic oligonucleotide
uuaucauucuauagcagau

SEQ ID NO: 3118980 - RNA, 19 nt, Artificial Sequence
  Description of Artificial Sequence: Synthetic oligonucleotide
gaguccauucuucaggccc

SEQ ID NO: 3118981 - RNA, 19 nt, Artificial Sequence
  Description of Artificial Sequence: Synthetic oligonucleotide
cauucuauagcagaugcug

SEQ ID NO: 3118982 - RNA, 19 nt, Artificial Sequence
  Description of Artificial Sequence: Synthetic oligonucleotide
cauaaggucaacagcguug

SEQ ID NO: 3118983 - RNA, 19 nt, Artificial Sequence
  Description of Artificial Sequence: Synthetic oligonucleotide
uuuggaguguucuccaaca

SEQ ID NO: 3118984 - RNA, 19 nt, Artificial Sequence
  Description of Artificial Sequence: Synthetic oligonucleotide
uuaucuuuuggaguguucu

SEQ ID NO: 3118985 - RNA, 19 nt, Artificial Sequence
  Description of Artificial Sequence: Synthetic oligonucleotide
ggcaaacagaaccagaaag

SEQ ID NO: 3118986 - RNA, 19 nt, Artificial Sequence
  Description of Artificial Sequence: Synthetic oligonucleotide
acucaguuuuaucuuuugg

SEQ ID NO: 3118987 - RNA, 19 nt, Artificial Sequence
  Description of Artificial Sequence: Synthetic oligonucleotide
uugguuguuaucauucuau

SEQ ID NO: 3118988 - RNA, 19 nt, Artificial Sequence
  Description of Artificial Sequence: Synthetic oligonucleotide
ucucugaugaauccugaac

SEQ ID NO: 3118989 - RNA, 19 nt, Artificial Sequence
  Description of Artificial Sequence: Synthetic oligonucleotide
cuaucgugcacauaagguc

SEQ ID NO: 3118990 - RNA, 19 nt, Artificial Sequence
  Description of Artificial Sequence: Synthetic oligonucleotide
ugcucuaugauguaagcuu

SEQ ID NO: 3118991 - RNA, 19 nt, Artificial Sequence
  Description of Artificial Sequence: Synthetic oligonucleotide
cuuugcucuaugauguaag

SEQ ID NO: 3118992 - RNA, 19 nt, Artificial Sequence
  Description of Artificial Sequence: Synthetic oligonucleotide
agcuaucgugcacauaagg

SEQ ID NO: 3118993 - RNA, 19 nt, Artificial Sequence
  Description of Artificial Sequence: Synthetic oligonucleotide
gcacauaaggucaacagcg

SEQ ID NO: 3118994 - RNA, 19 nt, Artificial Sequence
  Description of Artificial Sequence: Synthetic oligonucleotide
guagucuuagcuaucgugc

SEQ ID NO: 3118995 - RNA, 19 nt, Artificial Sequence
  Description of Artificial Sequence: Synthetic oligonucleotide
uuugcucuaugauguaagc

SEQ ID NO: 3118996 - RNA, 19 nt, Artificial Sequence
  Description of Artificial Sequence: Synthetic oligonucleotide
uggaguggggcaaacagaa

SEQ ID NO: 3118997 - RNA, 19 nt, Artificial Sequence
  Description of Artificial Sequence: Synthetic oligonucleotide
cauggaguggggcaaacag

SEQ ID NO: 3118998 - RNA, 19 nt, Artificial Sequence
  Description of Artificial Sequence: Synthetic oligonucleotide
ugauguaagcuuugguugu

SEQ ID NO: 3118999 - RNA, 19 nt, Artificial Sequence
  Description of Artificial Sequence: Synthetic oligonucleotide
aacaugagaguccauucuu

SEQ ID NO: 3119000 - RNA, 19 nt, Artificial Sequence
  Description of Artificial Sequence: Synthetic oligonucleotide
ugaacaugagaguccauuc

SEQ ID NO: 3119001 - RNA, 19 nt, Artificial Sequence
  Description of Artificial Sequence: Synthetic oligonucleotide
aacagcguugacuguguug

SEQ ID NO: 3119002 - RNA, 19 nt, Artificial Sequence
  Description of Artificial Sequence: Synthetic oligonucleotide
auucuucaggcccauggag

SEQ ID NO: 3119003 - RNA, 19 nt, Artificial Sequence
  Description of Artificial Sequence: Synthetic oligonucleotide
agggcuuugcucuaugaug

SEQ ID NO: 3119004 - RNA, 19 nt, Artificial Sequence
  Description of Artificial Sequence: Synthetic oligonucleotide
caagaaucucugaugaauc

SEQ ID NO: 3119005 - RNA, 19 nt, Artificial Sequence
  Description of Artificial Sequence: Synthetic oligonucleotide
auucguaaguuacugccca

SEQ ID NO: 3119006 - RNA, 19 nt, Artificial Sequence
  Description of Artificial Sequence: Synthetic oligonucleotide
uguguuguggacaggcagu

SEQ ID NO: 3119007 - RNA, 19 nt, Artificial Sequence
  Description of Artificial Sequence: Synthetic oligonucleotide
cucaguuuuaucuuuugga

SEQ ID NO: 3119008 - RNA, 19 nt, Artificial Sequence
  Description of Artificial Sequence: Synthetic oligonucleotide
uuuuggaguguucuccaac

SEQ ID NO: 3119009 - RNA, 19 nt, Artificial Sequence
  Description of Artificial Sequence: Synthetic oligonucleotide
aaggucaacagcguugacu

SEQ ID NO: 3119010 - RNA, 19 nt, Artificial Sequence
  Description of Artificial Sequence: Synthetic oligonucleotide
cucugaugaauccugaaca

SEQ ID NO: 3119011 - RNA, 19 nt, Artificial Sequence
  Description of Artificial Sequence: Synthetic oligonucleotide
uucuucaggcccauggagu

SEQ ID NO: 3119012 - RNA, 19 nt, Artificial Sequence
  Description of Artificial Sequence: Synthetic oligonucleotide
agucuuagcuaucgugcac

SEQ ID NO: 3119013 - RNA, 19 nt, Artificial Sequence
  Description of Artificial Sequence: Synthetic oligonucleotide
gagguagucuuagcuaucg

SEQ ID NO: 3119014 - RNA, 19 nt, Artificial Sequence
  Description of Artificial Sequence: Synthetic oligonucleotide
gugcacauaaggucaacag

SEQ ID NO: 3119015 - RNA, 19 nt, Artificial Sequence
  Description of Artificial Sequence: Synthetic oligonucleotide
gaaucucugaugaauccug

SEQ ID NO: 3119016 - RNA, 19 nt, Artificial Sequence
  Description of Artificial Sequence: Synthetic oligonucleotide
ucuuuuggaguguucucca

SEQ ID NO: 3119017 - RNA, 19 nt, Artificial Sequence
  Description of Artificial Sequence: Synthetic oligonucleotide
ucugaugaauccugaacau

SEQ ID NO: 3119018 - RNA, 19 nt, Artificial Sequence
  Description of Artificial Sequence: Synthetic oligonucleotide
gguuguuaucauucuauag

SEQ ID NO: 3119019 - RNA, 19 nt, Artificial Sequence
  Description of Artificial Sequence: Synthetic oligonucleotide
acagcguugacuguguugu

SEQ ID NO: 3119020 - RNA, 19 nt, Artificial Sequence
  Description of Artificial Sequence: Synthetic oligonucleotide
uggagguagucuuagcuau

SEQ ID NO: 3119021 - RNA, 19 nt, Artificial Sequence
  Description of Artificial Sequence: Synthetic oligonucleotide
uucuauagcagaugcuguc

SEQ ID NO: 3119022 - RNA, 19 nt, Artificial Sequence
  Description of Artificial Sequence: Synthetic oligonucleotide
uuugguuguuaucauucua

SEQ ID NO: 3119023 - RNA, 19 nt, Artificial Sequence
  Description of Artificial Sequence: Synthetic oligonucleotide
uuggaguguucuccaacag

SEQ ID NO: 3119024 - RNA, 19 nt, Artificial Sequence
  Description of Artificial Sequence: Synthetic oligonucleotide
uaucauucuauagcagaug

SEQ ID NO: 3119025 - RNA, 19 nt, Artificial Sequence
  Description of Artificial Sequence: Synthetic oligonucleotide
ucauucuauagcagaugcu

SEQ ID NO: 3119026 - RNA, 19 nt, Artificial Sequence
  Description of Artificial Sequence: Synthetic oligonucleotide
gguagucuuagcuaucgug

SEQ ID NO: 3119027 - RNA, 19 nt, Artificial Sequence
  Description of Artificial Sequence: Synthetic oligonucleotide
augagaguccauucuucag

SEQ ID NO: 3119028 - RNA, 19 nt, Artificial Sequence
  Description of Artificial Sequence: Synthetic oligonucleotide
ugcccaagaaucucugaug

SEQ ID NO: 3119029 - RNA, 19 nt, Artificial Sequence
  Description of Artificial Sequence: Synthetic oligonucleotide
ucuauagcagaugcugucu

SEQ ID NO: 3119030 - RNA, 19 nt, Artificial Sequence
  Description of Artificial Sequence: Synthetic oligonucleotide
agaguccauucuucaggcc

SEQ ID NO: 3119031 - RNA, 19 nt, Artificial Sequence
  Description of Artificial Sequence: Synthetic oligonucleotide
uagucuuagcuaucgugca

SEQ ID NO: 3119032 - RNA, 19 nt, Artificial Sequence
  Description of Artificial Sequence: Synthetic oligonucleotide
uuacugcccaagaaucucu

SEQ ID NO: 3119033 - RNA, 19 nt, Artificial Sequence
  Description of Artificial Sequence: Synthetic oligonucleotide
uuuaucuuuuggaguguuc

SEQ ID NO: 3119034 - RNA, 19 nt, Artificial Sequence
  Description of Artificial Sequence: Synthetic oligonucleotide
ucuccaacagggcuuugcu

SEQ ID NO: 3119035 - RNA, 19 nt, Artificial Sequence
  Description of Artificial Sequence: Synthetic oligonucleotide
uguggacaggcaguauucg

SEQ ID NO: 3119036 - RNA, 19 nt, Artificial Sequence
  Description of Artificial Sequence: Synthetic oligonucleotide
augaauccugaacaugaga

SEQ ID NO: 3119037 - RNA, 19 nt, Artificial Sequence
  Description of Artificial Sequence: Synthetic oligonucleotide
gaugaauccugaacaugag

SEQ ID NO: 3119038 - RNA, 19 nt, Artificial Sequence
  Description of Artificial Sequence: Synthetic oligonucleotide
acaggcaguauucguaagu

SEQ ID NO: 3119039 - RNA, 19 nt, Artificial Sequence
  Description of Artificial Sequence: Synthetic oligonucleotide
uuguggacaggcaguauuc

SEQ ID NO: 3119040 - RNA, 19 nt, Artificial Sequence
  Description of Artificial Sequence: Synthetic oligonucleotide
auaaggucaacagcguuga

SEQ ID NO: 3119041 - RNA, 19 nt, Artificial Sequence
  Description of Artificial Sequence: Synthetic oligonucleotide
auccugaacaugagagucc

SEQ ID NO: 3119042 - RNA, 19 nt, Artificial Sequence
  Description of Artificial Sequence: Synthetic oligonucleotide
uuggcuuggagguagucuu

SEQ ID NO: 3119043 - RNA, 19 nt, Artificial Sequence
  Description of Artificial Sequence: Synthetic oligonucleotide
uacucaguuuuaucuuuug

SEQ ID NO: 3119044 - RNA, 19 nt, Artificial Sequence
  Description of Artificial Sequence: Synthetic oligonucleotide
uggacaggcaguauucgua

SEQ ID NO: 3119045 - RNA, 19 nt, Artificial Sequence
  Description of Artificial Sequence: Synthetic oligonucleotide
uucaggcccauggaguggg

SEQ ID NO: 3119046 - RNA, 19 nt, Artificial Sequence
  Description of Artificial Sequence: Synthetic oligonucleotide
uuggagguagucuuagcua

SEQ ID NO: 3119047 - RNA, 19 nt, Artificial Sequence
  Description of Artificial Sequence: Synthetic oligonucleotide
agaugcugucuaugguugg

SEQ ID NO: 3119048 - RNA, 19 nt, Artificial Sequence
  Description of Artificial Sequence: Synthetic oligonucleotide
cugucuaugguuggcuugg

SEQ ID NO: 3119049 - RNA, 19 nt, Artificial Sequence
  Description of Artificial Sequence: Synthetic oligonucleotide
ucaacagcguugacugugu

SEQ ID NO: 3119050 - RNA, 19 nt, Artificial Sequence
  Description of Artificial Sequence: Synthetic oligonucleotide
agaaucucugaugaauccu

SEQ ID NO: 3119051 - RNA, 19 nt, Artificial Sequence
  Description of Artificial Sequence: Synthetic oligonucleotide
agcguugacuguguugugg

SEQ ID NO: 3119052 - RNA, 19 nt, Artificial Sequence
  Description of Artificial Sequence: Synthetic oligonucleotide
ucguaaguuacugcccaag

SEQ ID NO: 3119053 - RNA, 19 nt, Artificial Sequence
  Description of Artificial Sequence: Synthetic oligonucleotide
gcaaacagaaccagaaagc

SEQ ID NO: 3119054 - RNA, 19 nt, Artificial Sequence
  Description of Artificial Sequence: Synthetic oligonucleotide
uccugaacaugagagucca

SEQ ID NO: 3119055 - RNA, 19 nt, Artificial Sequence
  Description of Artificial Sequence: Synthetic oligonucleotide
uaucuuuuggaguguucuc

SEQ ID NO: 3119056 - RNA, 19 nt, Artificial Sequence
  Description of Artificial Sequence: Synthetic oligonucleotide
caguauucguaaguuacug

SEQ ID NO: 3119057 - RNA, 19 nt, Artificial Sequence
  Description of Artificial Sequence: Synthetic oligonucleotide
gucaacagcguugacugug

SEQ ID NO: 3119058 - RNA, 19 nt, Artificial Sequence
  Description of Artificial Sequence: Synthetic oligonucleotide
ggcaguauucguaaguuac

SEQ ID NO: 3119059 - RNA, 19 nt, Artificial Sequence
  Description of Artificial Sequence: Synthetic oligonucleotide
aacagggcuuugcucuaug

SEQ ID NO: 3119060 - RNA, 19 nt, Artificial Sequence
  Description of Artificial Sequence: Synthetic oligonucleotide
uugcucuaugauguaagcu

SEQ ID NO: 3119061 - RNA, 19 nt, Artificial Sequence
  Description of Artificial Sequence: Synthetic oligonucleotide
auagcagaugcugucuaug

SEQ ID NO: 3119062 - RNA, 19 nt, Artificial Sequence
  Description of Artificial Sequence: Synthetic oligonucleotide
gaugcugucuaugguuggc

SEQ ID NO: 3119063 - RNA, 19 nt, Artificial Sequence
  Description of Artificial Sequence: Synthetic oligonucleotide
uauagcagaugcugucuau

SEQ ID NO: 3119064 - RNA, 19 nt, Artificial Sequence
  Description of Artificial Sequence: Synthetic oligonucleotide
uacugcccaagaaucucug

SEQ ID NO: 3119065 - RNA, 19 nt, Artificial Sequence
  Description of Artificial Sequence: Synthetic oligonucleotide
ccauucuucaggcccaugg

SEQ ID NO: 3119066 - RNA, 19 nt, Artificial Sequence
  Description of Artificial Sequence: Synthetic oligonucleotide
caugagaguccauucuuca

SEQ ID NO: 3119067 - RNA, 19 nt, Artificial Sequence
  Description of Artificial Sequence: Synthetic oligonucleotide
ugguuguuaucauucuaua

SEQ ID NO: 3119068 - RNA, 19 nt, Artificial Sequence
  Description of Artificial Sequence: Synthetic oligonucleotide
uggggcaaacagaaccaga

SEQ ID NO: 3119069 - RNA, 19 nt, Artificial Sequence
  Description of Artificial Sequence: Synthetic oligonucleotide
cucuaugauguaagcuuug

SEQ ID NO: 3119070 - RNA, 19 nt, Artificial Sequence
  Description of Artificial Sequence: Synthetic oligonucleotide
uagcuaucgugcacauaag

SEQ ID NO: 3119071 - RNA, 19 nt, Artificial Sequence
  Description of Artificial Sequence: Synthetic oligonucleotide
aaucucugaugaauccuga

SEQ ID NO: 3119072 - RNA, 19 nt, Artificial Sequence
  Description of Artificial Sequence: Synthetic oligonucleotide
gacaggcaguauucguaag

SEQ ID NO: 3119073 - RNA, 19 nt, Artificial Sequence
  Description of Artificial Sequence: Synthetic oligonucleotide
aaacagaaccagaaagcua

SEQ ID NO: 3119074 - RNA, 19 nt, Artificial Sequence
  Description of Artificial Sequence: Synthetic oligonucleotide
uucuccaacagggcuuugc

SEQ ID NO: 3119075 - RNA, 19 nt, Artificial Sequence
  Description of Artificial Sequence: Synthetic oligonucleotide
gaacaugagaguccauucu

SEQ ID NO: 3119076 - RNA, 19 nt, Artificial Sequence
  Description of Artificial Sequence: Synthetic oligonucleotide
agcagaugcugucuauggu

SEQ ID NO: 3119077 - RNA, 19 nt, Artificial Sequence
  Description of Artificial Sequence: Synthetic oligonucleotide
auucuauagcagaugcugu

SEQ ID NO: 3119078 - RNA, 19 nt, Artificial Sequence
  Description of Artificial Sequence: Synthetic oligonucleotide
acauaaggucaacagcguu

SEQ ID NO: 3119079 - RNA, 19 nt, Artificial Sequence
  Description of Artificial Sequence: Synthetic oligonucleotide
cugaugaauccugaacaug

SEQ ID NO: 3119080 - RNA, 19 nt, Artificial Sequence
  Description of Artificial Sequence: Synthetic oligonucleotide
cuaugguuggcuuggaggu

SEQ ID NO: 3119081 - RNA, 19 nt, Artificial Sequence
  Description of Artificial Sequence: Synthetic oligonucleotide
uuuuaucuuuuggaguguu

SEQ ID NO: 3119082 - RNA, 19 nt, Artificial Sequence
  Description of Artificial Sequence: Synthetic oligonucleotide
guuacugcccaagaaucuc

SEQ ID NO: 3119083 - RNA, 19 nt, Artificial Sequence
  Description of Artificial Sequence: Synthetic oligonucleotide
gaauccugaacaugagagu

SEQ ID NO: 3119084 - RNA, 19 nt, Artificial Sequence
  Description of Artificial Sequence: Synthetic oligonucleotide
cuuggagguagucuuagcu

SEQ ID NO: 3119085 - RNA, 19 nt, Artificial Sequence
  Description of Artificial Sequence: Synthetic oligonucleotide
aguuacugcccaagaaucu

SEQ ID NO: 3119086 - RNA, 19 nt, Artificial Sequence
  Description of Artificial Sequence: Synthetic oligonucleotide
aguggggcaaacagaacca

SEQ ID NO: 3119087 - RNA, 19 nt, Artificial Sequence
  Description of Artificial Sequence: Synthetic oligonucleotide
gucuaugguuggcuuggag

SEQ ID NO: 3119088 - RNA, 19 nt, Artificial Sequence
  Description of Artificial Sequence: Synthetic oligonucleotide
ucuuagcuaucgugcacau

SEQ ID NO: 3119089 - RNA, 19 nt, Artificial Sequence
  Description of Artificial Sequence: Synthetic oligonucleotide
gucuuagcuaucgugcaca

SEQ ID NO: 3119090 - RNA, 19 nt, Artificial Sequence
  Description of Artificial Sequence: Synthetic oligonucleotide
aucucugaugaauccugaa

SEQ ID NO: 3119091 - RNA, 19 nt, Artificial Sequence
  Description of Artificial Sequence: Synthetic oligonucleotide
caaacagaaccagaaagcu

SEQ ID NO: 3119092 - RNA, 19 nt, Artificial Sequence
  Description of Artificial Sequence: Synthetic oligonucleotide
acagggcuuugcucuauga

SEQ ID NO: 3119093 - RNA, 19 nt, Artificial Sequence
  Description of Artificial Sequence: Synthetic oligonucleotide
uucguaaguuacugcccaa

SEQ ID NO: 3119094 - RNA, 19 nt, Artificial Sequence
  Description of Artificial Sequence: Synthetic oligonucleotide
caguuuuaucuuuuggagu

SEQ ID NO: 3119095 - RNA, 19 nt, Artificial Sequence
  Description of Artificial Sequence: Synthetic oligonucleotide
gaguguucuccaacagggc

SEQ ID NO: 3119096 - RNA, 19 nt, Artificial Sequence
  Description of Artificial Sequence: Synthetic oligonucleotide
gcccaagaaucucugauga

SEQ ID NO: 3119097 - RNA, 19 nt, Artificial Sequence
  Description of Artificial Sequence: Synthetic oligonucleotide
acugcccaagaaucucuga

SEQ ID NO: 3119098 - RNA, 19 nt, Artificial Sequence
  Description of Artificial Sequence: Synthetic oligonucleotide
aggcccauggaguggggca

SEQ ID NO: 3119099 - RNA, 19 nt, Artificial Sequence
  Description of Artificial Sequence: Synthetic oligonucleotide
gcugucuaugguuggcuug

SEQ ID NO: 3119100 - RNA, 19 nt, Artificial Sequence
  Description of Artificial Sequence: Synthetic oligonucleotide
uguucuccaacagggcuuu

SEQ ID NO: 3119101 - RNA, 19 nt, Artificial Sequence
  Description of Artificial Sequence: Synthetic oligonucleotide
aguccauucuucaggccca

SEQ ID NO: 3119102 - RNA, 19 nt, Artificial Sequence
  Description of Artificial Sequence: Synthetic oligonucleotide
cuccaacagggcuuugcuc

SEQ ID NO: 3119103 - RNA, 19 nt, Artificial Sequence
  Description of Artificial Sequence: Synthetic oligonucleotide
ugcugucuaugguuggcuu

SEQ ID NO: 3119104 - RNA, 19 nt, Artificial Sequence
  Description of Artificial Sequence: Synthetic oligonucleotide
agguagucuuagcuaucgu

SEQ ID NO: 3119105 - RNA, 19 nt, Artificial Sequence
  Description of Artificial Sequence: Synthetic oligonucleotide
cuucaggcccauggagugg

SEQ ID NO: 3119106 - RNA, 19 nt, Artificial Sequence
  Description of Artificial Sequence: Synthetic oligonucleotide
auggaguggggcaaacaga

SEQ ID NO: 3119107 - RNA, 19 nt, Artificial Sequence
  Description of Artificial Sequence: Synthetic oligonucleotide
aggcaguauucguaaguua

SEQ ID NO: 3119108 - RNA, 19 nt, Artificial Sequence
  Description of Artificial Sequence: Synthetic oligonucleotide
uaaggucaacagcguugac

SEQ ID NO: 3119109 - RNA, 19 nt, Artificial Sequence
  Description of Artificial Sequence: Synthetic oligonucleotide
ucaggcccauggagugggg

SEQ ID NO: 3119110 - RNA, 19 nt, Artificial Sequence
  Description of Artificial Sequence: Synthetic oligonucleotide
guuguggacaggcaguauu

SEQ ID NO: 3119111 - RNA, 19 nt, Artificial Sequence
  Description of Artificial Sequence: Synthetic oligonucleotide
guggggcaaacagaaccag

SEQ ID NO: 3119112 - RNA, 19 nt, Artificial Sequence
  Description of Artificial Sequence: Synthetic oligonucleotide
cuauagcagaugcugucua

SEQ ID NO: 3119113 - RNA, 19 nt, Artificial Sequence
  Description of Artificial Sequence: Synthetic oligonucleotide
cuaugauguaagcuuuggu

SEQ ID NO: 3119114 - RNA, 19 nt, Artificial Sequence
  Description of Artificial Sequence: Synthetic oligonucleotide
augcugucuaugguuggcu

SEQ ID NO: 3119115 - RNA, 19 nt, Artificial Sequence
  Description of Artificial Sequence: Synthetic oligonucleotide
ggacaggcaguauucguaa

SEQ ID NO: 3119116 - RNA, 19 nt, Artificial Sequence
  Description of Artificial Sequence: Synthetic oligonucleotide
ggggcaaacagaaccagaa

SEQ ID NO: 3119117 - RNA, 19 nt, Artificial Sequence
  Description of Artificial Sequence: Synthetic oligonucleotide
cuuuuggaguguucuccaa

SEQ ID NO: 3119118 - RNA, 19 nt, Artificial Sequence
  Description of Artificial Sequence: Synthetic oligonucleotide
uggcuuggagguagucuua

SEQ ID NO: 3119119 - RNA, 19 nt, Artificial Sequence
  Description of Artificial Sequence: Synthetic oligonucleotide
guuggcuuggagguagucu

SEQ ID NO: 3119120 - RNA, 19 nt, Artificial Sequence
  Description of Artificial Sequence: Synthetic oligonucleotide
cacauaaggucaacagcgu

SEQ ID NO: 3119121 - RNA, 19 nt, Artificial Sequence
  Description of Artificial Sequence: Synthetic oligonucleotide
ggcuuggagguagucuuag

SEQ ID NO: 3119122 - RNA, 19 nt, Artificial Sequence
  Description of Artificial Sequence: Synthetic oligonucleotide
ugucuaugguuggcuugga

SEQ ID NO: 3119123 - RNA, 19 nt, Artificial Sequence
  Description of Artificial Sequence: Synthetic oligonucleotide
gcuaucgugcacauaaggu

SEQ ID NO: 3119124 - RNA, 19 nt, Artificial Sequence
  Description of Artificial Sequence: Synthetic oligonucleotide
uguuguggacaggcaguau

SEQ ID NO: 3119125 - RNA, 19 nt, Artificial Sequence
  Description of Artificial Sequence: Synthetic oligonucleotide
ugguuggcuuggagguagu

SEQ ID NO: 3119126 - RNA, 19 nt, Artificial Sequence
  Description of Artificial Sequence: Synthetic oligonucleotide
gcguugacuguguugugga

SEQ ID NO: 3119127 - RNA, 19 nt, Artificial Sequence
  Description of Artificial Sequence: Synthetic oligonucleotide
guggacaggcaguauucgu

SEQ ID NO: 3119128 - RNA, 19 nt, Artificial Sequence
  Description of Artificial Sequence: Synthetic oligonucleotide
auguaagcuuugguuguua

SEQ ID NO: 3119129 - RNA, 19 nt, Artificial Sequence
  Description of Artificial Sequence: Synthetic oligonucleotide
gcuuggagguagucuuagc

SEQ ID NO: 3119130 - RNA, 19 nt, Artificial Sequence
  Description of Artificial Sequence: Synthetic oligonucleotide
cugaacaugagaguccauu

SEQ ID NO: 3119131 - RNA, 19 nt, Artificial Sequence
  Description of Artificial Sequence: Synthetic oligonucleotide
gggcuuugcucuaugaugu

SEQ ID NO: 3119132 - RNA, 19 nt, Artificial Sequence
  Description of Artificial Sequence: Synthetic oligonucleotide
ucgugcacauaaggucaac

SEQ ID NO: 3119133 - RNA, 19 nt, Artificial Sequence
  Description of Artificial Sequence: Synthetic oligonucleotide
uccauucuucaggcccaug

SEQ ID NO: 3119134 - RNA, 19 nt, Artificial Sequence
  Description of Artificial Sequence: Synthetic oligonucleotide
caggcccauggaguggggc

SEQ ID NO: 3119135 - RNA, 19 nt, Artificial Sequence
  Description of Artificial Sequence: Synthetic oligonucleotide
cugcccaagaaucucugau

SEQ ID NO: 3119136 - RNA, 19 nt, Artificial Sequence
  Description of Artificial Sequence: Synthetic oligonucleotide
aucgugcacauaaggucaa

SEQ ID NO: 3119137 - RNA, 19 nt, Artificial Sequence
  Description of Artificial Sequence: Synthetic oligonucleotide
guguuguggacaggcagua

SEQ ID NO: 3119138 - RNA, 19 nt, Artificial Sequence
  Description of Artificial Sequence: Synthetic oligonucleotide
cagcguugacuguguugug

SEQ ID NO: 3119139 - RNA, 19 nt, Artificial Sequence
  Description of Artificial Sequence: Synthetic oligonucleotide
gauguaagcuuugguuguu

SEQ ID NO: 3119140 - RNA, 19 nt, Artificial Sequence
  Description of Artificial Sequence: Synthetic oligonucleotide
gcuuugcucuaugauguaa

SEQ ID NO: 3119141 - RNA, 19 nt, Artificial Sequence
  Description of Artificial Sequence: Synthetic oligonucleotide
cguaaguuacugcccaaga

SEQ ID NO: 3119142 - RNA, 19 nt, Artificial Sequence
  Description of Artificial Sequence: Synthetic oligonucleotide
ccaagaaucucugaugaau

SEQ ID NO: 3119143 - RNA, 19 nt, Artificial Sequence
  Description of Artificial Sequence: Synthetic oligonucleotide
ggagguagucuuagcuauc

SEQ ID NO: 3119144 - RNA, 19 nt, Artificial Sequence
  Description of Artificial Sequence: Synthetic oligonucleotide
cagggcuuugcucuaugau

SEQ ID NO: 3119145 - RNA, 19 nt, Artificial Sequence
  Description of Artificial Sequence: Synthetic oligonucleotide
acagaaccagaaagcuauu

SEQ ID NO: 3119146 - RNA, 19 nt, Artificial Sequence
  Description of Artificial Sequence: Synthetic oligonucleotide
caggcaguauucguaaguu

SEQ ID NO: 3119147 - RNA, 19 nt, Artificial Sequence
  Description of Artificial Sequence: Synthetic oligonucleotide
gcaguauucguaaguuacu

SEQ ID NO: 3119148 - RNA, 19 nt, Artificial Sequence
  Description of Artificial Sequence: Synthetic oligonucleotide
ggaguggggcaaacagaac

SEQ ID NO: 3119149 - RNA, 19 nt, Artificial Sequence
  Description of Artificial Sequence: Synthetic oligonucleotide
cuuagcuaucgugcacaua

SEQ ID NO: 3119150 - RNA, 19 nt, Artificial Sequence
  Description of Artificial Sequence: Synthetic oligonucleotide
cguugacuguguuguggac

SEQ ID NO: 3119151 - RNA, 19 nt, Artificial Sequence
  Description of Artificial Sequence: Synthetic oligonucleotide
gcucuaugauguaagcuuu

SEQ ID NO: 3119152 - RNA, 19 nt, Artificial Sequence
  Description of Artificial Sequence: Synthetic oligonucleotide
gguuggcuuggagguaguc

SEQ ID NO: 3119153 - RNA, 19 nt, Artificial Sequence
  Description of Artificial Sequence: Synthetic oligonucleotide
guucuccaacagggcuuug

SEQ ID NO: 3119154 - RNA, 19 nt, Artificial Sequence
  Description of Artificial Sequence: Synthetic oligonucleotide
cccaagaaucucugaugaa

SEQ ID NO: 3119155 - RNA, 19 nt, Artificial Sequence
  Description of Artificial Sequence: Synthetic oligonucleotide
ggcuuugcucuaugaugua

SEQ ID NO: 3119156 - RNA, 19 nt, Artificial Sequence
  Description of Artificial Sequence: Synthetic oligonucleotide
cgugcacauaaggucaaca

SEQ ID NO: 3119157 - RNA, 19 nt, Artificial Sequence
  Description of Artificial Sequence: Synthetic oligonucleotide
ggucaacagcguugacugu

SEQ ID NO: 3119158 - RNA, 19 nt, Artificial Sequence
  Description of Artificial Sequence: Synthetic oligonucleotide
ccaacagggcuuugcucua

SEQ ID NO: 3119159 - RNA, 19 nt, Artificial Sequence
  Description of Artificial Sequence: Synthetic oligonucleotide
cccauggaguggggcaaac

SEQ ID NO: 3119160 - RNA, 19 nt, Artificial Sequence
  Description of Artificial Sequence: Synthetic oligonucleotide
ccauggaguggggcaaaca

SEQ ID NO: 3119161 - RNA, 19 nt, Artificial Sequence
  Description of Artificial Sequence: Synthetic oligonucleotide
caacagcguugacuguguu

SEQ ID NO: 3119162 - RNA, 19 nt, Artificial Sequence
  Description of Artificial Sequence: Synthetic oligonucleotide
caacagggcuuugcucuau

SEQ ID NO: 3119163 - RNA, 19 nt, Artificial Sequence
  Description of Artificial Sequence: Synthetic oligonucleotide
guccauucuucaggcccau

SEQ ID NO: 3119164 - RNA, 19 nt, Artificial Sequence
  Description of Artificial Sequence: Synthetic oligonucleotide
ccugaacaugagaguccau

SEQ ID NO: 3119165 - RNA, 19 nt, Artificial Sequence
  Description of Artificial Sequence: Synthetic oligonucleotide
auauauaugauccucaaag

SEQ ID NO: 3119166 - RNA, 19 nt, Artificial Sequence
  Description of Artificial Sequence: Synthetic oligonucleotide
aagauaaggugacagguag

SEQ ID NO: 3119167 - RNA, 19 nt, Artificial Sequence
  Description of Artificial Sequence: Synthetic oligonucleotide
uuuauuuguuaucuuuagg

SEQ ID NO: 3119168 - RNA, 19 nt, Artificial Sequence
  Description of Artificial Sequence: Synthetic oligonucleotide
uaguccauaagccagguca

SEQ ID NO: 3119169 - RNA, 19 nt, Artificial Sequence
  Description of Artificial Sequence: Synthetic oligonucleotide
uaacuucucauauauauga

SEQ ID NO: 3119170 - RNA, 19 nt, Artificial Sequence
  Description of Artificial Sequence: Synthetic oligonucleotide
agugauggcaucuaacuuc

SEQ ID NO: 3119171 - RNA, 19 nt, Artificial Sequence
  Description of Artificial Sequence: Synthetic oligonucleotide
ucuaacuucucauauauau

SEQ ID NO: 3119172 - RNA, 19 nt, Artificial Sequence
  Description of Artificial Sequence: Synthetic oligonucleotide
uuaucuuuaggaauucuug

SEQ ID NO: 3119173 - RNA, 19 nt, Artificial Sequence
  Description of Artificial Sequence: Synthetic oligonucleotide
uagaacaagccaaaguucc

SEQ ID NO: 3119174 - RNA, 19 nt, Artificial Sequence
  Description of Artificial Sequence: Synthetic oligonucleotide
agucauauuguccauagcu

SEQ ID NO: 3119175 - RNA, 19 nt, Artificial Sequence
  Description of Artificial Sequence: Synthetic oligonucleotide
ugucuguuaguccauaagc

SEQ ID NO: 3119176 - RNA, 19 nt, Artificial Sequence
  Description of Artificial Sequence: Synthetic oligonucleotide
uuguccauagcuuugguca

SEQ ID NO: 3119177 - RNA, 19 nt, Artificial Sequence
  Description of Artificial Sequence: Synthetic oligonucleotide
cauagcuuuggucagacag

SEQ ID NO: 3119178 - RNA, 19 nt, Artificial Sequence
  Description of Artificial Sequence: Synthetic oligonucleotide
aaaguucccucacaagcac

SEQ ID NO: 3119179 - RNA, 19 nt, Artificial Sequence
  Description of Artificial Sequence: Synthetic oligonucleotide
ucaaagauaaggugacagg

SEQ ID NO: 3119180 - RNA, 19 nt, Artificial Sequence
  Description of Artificial Sequence: Synthetic oligonucleotide
cacacgaacagucauauug

SEQ ID NO: 3119181 - RNA, 19 nt, Artificial Sequence
  Description of Artificial Sequence: Synthetic oligonucleotide
aagcaugucauucuccuca

SEQ ID NO: 3119182 - RNA, 19 nt, Artificial Sequence
  Description of Artificial Sequence: Synthetic oligonucleotide
uauaugauccucaaagaua

SEQ ID NO: 3119183 - RNA, 19 nt, Artificial Sequence
  Description of Artificial Sequence: Synthetic oligonucleotide
uaucuuuaggaauucuugc

SEQ ID NO: 3119184 - RNA, 19 nt, Artificial Sequence
  Description of Artificial Sequence: Synthetic oligonucleotide
ucugacaucugccaccugc

SEQ ID NO: 3119185 - RNA, 19 nt, Artificial Sequence
  Description of Artificial Sequence: Synthetic oligonucleotide
uauauaugauccucaaaga

SEQ ID NO: 3119186 - RNA, 19 nt, Artificial Sequence
  Description of Artificial Sequence: Synthetic oligonucleotide
acuucucauauauaugauc

SEQ ID NO: 3119187 - RNA, 19 nt, Artificial Sequence
  Description of Artificial Sequence: Synthetic oligonucleotide
aauagacugucugacaucu

SEQ ID NO: 3119188 - RNA, 19 nt, Artificial Sequence
  Description of Artificial Sequence: Synthetic oligonucleotide
ugauccucaaagauaaggu

SEQ ID NO: 3119189 - RNA, 19 nt, Artificial Sequence
  Description of Artificial Sequence: Synthetic oligonucleotide
ucaauagacugucugacau

SEQ ID NO: 3119190 - RNA, 19 nt, Artificial Sequence
  Description of Artificial Sequence: Synthetic oligonucleotide
uguuaguccauaagccagg

SEQ ID NO: 3119191 - RNA, 19 nt, Artificial Sequence
  Description of Artificial Sequence: Synthetic oligonucleotide
uagacugucugacaucugc

SEQ ID NO: 3119192 - RNA, 19 nt, Artificial Sequence
  Description of Artificial Sequence: Synthetic oligonucleotide
ucagugauggcaucuaacu

SEQ ID NO: 3119193 - RNA, 19 nt, Artificial Sequence
  Description of Artificial Sequence: Synthetic oligonucleotide
auauaugauccucaaagau

SEQ ID NO: 3119194 - RNA, 19 nt, Artificial Sequence
  Description of Artificial Sequence: Synthetic oligonucleotide
ucuguuaguccauaagcca

SEQ ID NO: 3119195 - RNA, 19 nt, Artificial Sequence
  Description of Artificial Sequence: Synthetic oligonucleotide
uuuggucagacagacuugg

SEQ ID NO: 3119196 - RNA, 19 nt, Artificial Sequence
  Description of Artificial Sequence: Synthetic oligonucleotide
augauccucaaagauaagg

SEQ ID NO: 3119197 - RNA, 19 nt, Artificial Sequence
  Description of Artificial Sequence: Synthetic oligonucleotide
aacaagccaaaguucccuc

SEQ ID NO: 3119198 - RNA, 19 nt, Artificial Sequence
  Description of Artificial Sequence: Synthetic oligonucleotide
uaggaauucuugcucaugu

SEQ ID NO: 3119199 - RNA, 19 nt, Artificial Sequence
  Description of Artificial Sequence: Synthetic oligonucleotide
gauccucaaagauaaggug

SEQ ID NO: 3119200 - RNA, 19 nt, Artificial Sequence
  Description of Artificial Sequence: Synthetic oligonucleotide
ucuuuaggaauucuugcuc

SEQ ID NO: 3119201 - RNA, 19 nt, Artificial Sequence
  Description of Artificial Sequence: Synthetic oligonucleotide
acagucauauuguccauag

SEQ ID NO: 3119202 - RNA, 19 nt, Artificial Sequence
  Description of Artificial Sequence: Synthetic oligonucleotide
ucugccaccugccucaggc

SEQ ID NO: 3119203 - RNA, 19 nt, Artificial Sequence
  Description of Artificial Sequence: Synthetic oligonucleotide
ugcucaugucaauagacug

SEQ ID NO: 3119204 - RNA, 19 nt, Artificial Sequence
  Description of Artificial Sequence: Synthetic oligonucleotide
ugaccugucuguuagucca

SEQ ID NO: 3119205 - RNA, 19 nt, Artificial Sequence
  Description of Artificial Sequence: Synthetic oligonucleotide
cuugcucaugucaauagac

SEQ ID NO: 3119206 - RNA, 19 nt, Artificial Sequence
  Description of Artificial Sequence: Synthetic oligonucleotide
ucaagcaugucauucuccu

SEQ ID NO: 3119207 - RNA, 19 nt, Artificial Sequence
  Description of Artificial Sequence: Synthetic oligonucleotide
auuguccauagcuuugguc

SEQ ID NO: 3119208 - RNA, 19 nt, Artificial Sequence
  Description of Artificial Sequence: Synthetic oligonucleotide
cuguuaguccauaagccag

SEQ ID NO: 3119209 - RNA, 19 nt, Artificial Sequence
  Description of Artificial Sequence: Synthetic oligonucleotide
cucaaagauaaggugacag

SEQ ID NO: 3119210 - RNA, 19 nt, Artificial Sequence
  Description of Artificial Sequence: Synthetic oligonucleotide
ugacagguagaacaagcca

SEQ ID NO: 3119211 - RNA, 19 nt, Artificial Sequence
  Description of Artificial Sequence: Synthetic oligonucleotide
agacuuggcagcccaaccg

SEQ ID NO: 3119212 - RNA, 19 nt, Artificial Sequence
  Description of Artificial Sequence: Synthetic oligonucleotide
cuaacuucucauauauaug

SEQ ID NO: 3119213 - RNA, 19 nt, Artificial Sequence
  Description of Artificial Sequence: Synthetic oligonucleotide
caugucaauagacugucug

SEQ ID NO: 3119214 - RNA, 19 nt, Artificial Sequence
  Description of Artificial Sequence: Synthetic oligonucleotide
aucuuuaggaauucuugcu

SEQ ID NO: 3119215 - RNA, 19 nt, Artificial Sequence
  Description of Artificial Sequence: Synthetic oligonucleotide
uccucaaagauaaggugac

SEQ ID NO: 3119216 - RNA, 19 nt, Artificial Sequence
  Description of Artificial Sequence: Synthetic oligonucleotide
uucuugcucaugucaauag

SEQ ID NO: 3119217 - RNA, 19 nt, Artificial Sequence
  Description of Artificial Sequence: Synthetic oligonucleotide
auaugauccucaaagauaa

SEQ ID NO: 3119218 - RNA, 19 nt, Artificial Sequence
  Description of Artificial Sequence: Synthetic oligonucleotide
uggucagacagacuuggca

SEQ ID NO: 3119219 - RNA, 19 nt, Artificial Sequence
  Description of Artificial Sequence: Synthetic oligonucleotide
ucauauauaugauccucaa

SEQ ID NO: 3119220 - RNA, 19 nt, Artificial Sequence
  Description of Artificial Sequence: Synthetic oligonucleotide
gauggcaucuaacuucuca

SEQ ID NO: 3119221 - RNA, 19 nt, Artificial Sequence
  Description of Artificial Sequence: Synthetic oligonucleotide
ucauauuguccauagcuuu

SEQ ID NO: 3119222 - RNA, 19 nt, Artificial Sequence
  Description of Artificial Sequence: Synthetic oligonucleotide
cauauuguccauagcuuug

SEQ ID NO: 3119223 - RNA, 19 nt, Artificial Sequence
  Description of Artificial Sequence: Synthetic oligonucleotide
acgaacagucauauugucc

SEQ ID NO: 3119224 - RNA, 19 nt, Artificial Sequence
  Description of Artificial Sequence: Synthetic oligonucleotide
ugucauucuccucaucagu

SEQ ID NO: 3119225 - RNA, 19 nt, Artificial Sequence
  Description of Artificial Sequence: Synthetic oligonucleotide
ugucaauagacugucugac

SEQ ID NO: 3119226 - RNA, 19 nt, Artificial Sequence
  Description of Artificial Sequence: Synthetic oligonucleotide
ucuugcucaugucaauaga

SEQ ID NO: 3119227 - RNA, 19 nt, Artificial Sequence
  Description of Artificial Sequence: Synthetic oligonucleotide
ucucauauauaugauccuc

SEQ ID NO: 3119228 - RNA, 19 nt, Artificial Sequence
  Description of Artificial Sequence: Synthetic oligonucleotide
uugcucaugucaauagacu

SEQ ID NO: 3119229 - RNA, 19 nt, Artificial Sequence
  Description of Artificial Sequence: Synthetic oligonucleotide
ccaaaguucccucacaagc

SEQ ID NO: 3119230 - RNA, 19 nt, Artificial Sequence
  Description of Artificial Sequence: Synthetic oligonucleotide
augucaauagacugucuga

SEQ ID NO: 3119231 - RNA, 19 nt, Artificial Sequence
  Description of Artificial Sequence: Synthetic oligonucleotide
ggucagacagacuuggcag

SEQ ID NO: 3119232 - RNA, 19 nt, Artificial Sequence
  Description of Artificial Sequence: Synthetic oligonucleotide
accgugaccugucuguuag

SEQ ID NO: 3119233 - RNA, 19 nt, Artificial Sequence
  Description of Artificial Sequence: Synthetic oligonucleotide
aauucuugcucaugucaau

SEQ ID NO: 3119234 - RNA, 19 nt, Artificial Sequence
  Description of Artificial Sequence: Synthetic oligonucleotide
gucuguuaguccauaagcc

SEQ ID NO: 3119235 - RNA, 19 nt, Artificial Sequence
  Description of Artificial Sequence: Synthetic oligonucleotide
cuuuaggaauucuugcuca

SEQ ID NO: 3119236 - RNA, 19 nt, Artificial Sequence
  Description of Artificial Sequence: Synthetic oligonucleotide
agguagaacaagccaaagu

SEQ ID NO: 3119237 - RNA, 19 nt, Artificial Sequence
  Description of Artificial Sequence: Synthetic oligonucleotide
augucauucuccucaucag

SEQ ID NO: 3119238 - RNA, 19 nt, Artificial Sequence
  Description of Artificial Sequence: Synthetic oligonucleotide
aaguucccucacaagcacc

SEQ ID NO: 3119239 - RNA, 19 nt, Artificial Sequence
  Description of Artificial Sequence: Synthetic oligonucleotide
agaacaagccaaaguuccc

SEQ ID NO: 3119240 - RNA, 19 nt, Artificial Sequence
  Description of Artificial Sequence: Synthetic oligonucleotide
uguccauagcuuuggucag

SEQ ID NO: 3119241 - RNA, 19 nt, Artificial Sequence
  Description of Artificial Sequence: Synthetic oligonucleotide
uucucauauauaugauccu

SEQ ID NO: 3119242 - RNA, 19 nt, Artificial Sequence
  Description of Artificial Sequence: Synthetic oligonucleotide
cucauauauaugauccuca

SEQ ID NO: 3119243 - RNA, 19 nt, Artificial Sequence
  Description of Artificial Sequence: Synthetic oligonucleotide
aggaauucuugcucauguc

SEQ ID NO: 3119244 - RNA, 19 nt, Artificial Sequence
  Description of Artificial Sequence: Synthetic oligonucleotide
gauaaggugacagguagaa

SEQ ID NO: 3119245 - RNA, 19 nt, Artificial Sequence
  Description of Artificial Sequence: Synthetic oligonucleotide
ucauucuccucaucaguga

SEQ ID NO: 3119246 - RNA, 19 nt, Artificial Sequence
  Description of Artificial Sequence: Synthetic oligonucleotide
auccucaaagauaagguga

SEQ ID NO: 3119247 - RNA, 19 nt, Artificial Sequence
  Description of Artificial Sequence: Synthetic oligonucleotide
uccauaagccaggucaagc

SEQ ID NO: 3119248 - RNA, 19 nt, Artificial Sequence
  Description of Artificial Sequence: Synthetic oligonucleotide
cugucugacaucugccacc

SEQ ID NO: 3119249 - RNA, 19 nt, Artificial Sequence
  Description of Artificial Sequence: Synthetic oligonucleotide
agccaggucaagcauguca

SEQ ID NO: 3119250 - RNA, 19 nt, Artificial Sequence
  Description of Artificial Sequence: Synthetic oligonucleotide
caaaguucccucacaagca

SEQ ID NO: 3119251 - RNA, 19 nt, Artificial Sequence
  Description of Artificial Sequence: Synthetic oligonucleotide
aucagugauggcaucuaac

SEQ ID NO: 3119252 - RNA, 19 nt, Artificial Sequence
  Description of Artificial Sequence: Synthetic oligonucleotide
auggcaucuaacuucucau

SEQ ID NO: 3119253 - RNA, 19 nt, Artificial Sequence
  Description of Artificial Sequence: Synthetic oligonucleotide
gacagguagaacaagccaa

SEQ ID NO: 3119254 - RNA, 19 nt, Artificial Sequence
  Description of Artificial Sequence: Synthetic oligonucleotide
agacugucugacaucugcc

SEQ ID NO: 3119255 - RNA, 19 nt, Artificial Sequence
  Description of Artificial Sequence: Synthetic oligonucleotide
ucaggcacacgaacaguca

SEQ ID NO: 3119256 - RNA, 19 nt, Artificial Sequence
  Description of Artificial Sequence: Synthetic oligonucleotide
aaagauaaggugacaggua

SEQ ID NO: 3119257 - RNA, 19 nt, Artificial Sequence
  Description of Artificial Sequence: Synthetic oligonucleotide
cucaggcacacgaacaguc

SEQ ID NO: 3119258 - RNA, 19 nt, Artificial Sequence
  Description of Artificial Sequence: Synthetic oligonucleotide
ggaauucuugcucauguca

SEQ ID NO: 3119259 - RNA, 19 nt, Artificial Sequence
  Description of Artificial Sequence: Synthetic oligonucleotide
cugucuguuaguccauaag

SEQ ID NO: 3119260 - RNA, 19 nt, Artificial Sequence
  Description of Artificial Sequence: Synthetic oligonucleotide
uuuaggaauucuugcucau

SEQ ID NO: 3119261 - RNA, 19 nt, Artificial Sequence
  Description of Artificial Sequence: Synthetic oligonucleotide
uaugauccucaaagauaag

SEQ ID NO: 3119262 - RNA, 19 nt, Artificial Sequence
  Description of Artificial Sequence: Synthetic oligonucleotide
aggucaagcaugucauucu

SEQ ID NO: 3119263 - RNA, 19 nt, Artificial Sequence
  Description of Artificial Sequence: Synthetic oligonucleotide
uuaggaauucuugcucaug

SEQ ID NO: 3119264 - RNA, 19 nt, Artificial Sequence
  Description of Artificial Sequence: Synthetic oligonucleotide
auaaggugacagguagaac

SEQ ID NO: 3119265 - RNA, 19 nt, Artificial Sequence
  Description of Artificial Sequence: Synthetic oligonucleotide
ucagacagacuuggcagcc

SEQ ID NO: 3119266 - RNA, 19 nt, Artificial Sequence
  Description of Artificial Sequence: Synthetic oligonucleotide
aagccaaaguucccucaca

SEQ ID NO: 3119267 - RNA, 19 nt, Artificial Sequence
  Description of Artificial Sequence: Synthetic oligonucleotide
ugccucaggcacacgaaca

SEQ ID NO: 3119268 - RNA, 19 nt, Artificial Sequence
  Description of Artificial Sequence: Synthetic oligonucleotide
gucagacagacuuggcagc

SEQ ID NO: 3119269 - RNA, 19 nt, Artificial Sequence
  Description of Artificial Sequence: Synthetic oligonucleotide
guagaacaagccaaaguuc

SEQ ID NO: 3119270 - RNA, 19 nt, Artificial Sequence
  Description of Artificial Sequence: Synthetic oligonucleotide
gaauucuugcucaugucaa

SEQ ID NO: 3119271 - RNA, 19 nt, Artificial Sequence
  Description of Artificial Sequence: Synthetic oligonucleotide
cuuuggucagacagacuug

SEQ ID NO: 3119272 - RNA, 19 nt, Artificial Sequence
  Description of Artificial Sequence: Synthetic oligonucleotide
uagcuuuggucagacagac

SEQ ID NO: 3119273 - RNA, 19 nt, Artificial Sequence
  Description of Artificial Sequence: Synthetic oligonucleotide
gugacagguagaacaagcc

SEQ ID NO: 3119274 - RNA, 19 nt, Artificial Sequence
  Description of Artificial Sequence: Synthetic oligonucleotide
uguuaucuuuaggaauucu

SEQ ID NO: 3119275 - RNA, 19 nt, Artificial Sequence
  Description of Artificial Sequence: Synthetic oligonucleotide
gacugucugacaucugcca

SEQ ID NO: 3119276 - RNA, 19 nt, Artificial Sequence
  Description of Artificial Sequence: Synthetic oligonucleotide
acagacuuggcagcccaac

SEQ ID NO: 3119277 - RNA, 19 nt, Artificial Sequence
  Description of Artificial Sequence: Synthetic oligonucleotide
uauuguccauagcuuuggu

SEQ ID NO: 3119278 - RNA, 19 nt, Artificial Sequence
  Description of Artificial Sequence: Synthetic oligonucleotide
acaagccaaaguucccuca

SEQ ID NO: 3119279 - RNA, 19 nt, Artificial Sequence
  Description of Artificial Sequence: Synthetic oligonucleotide
caagccaaaguucccucac

SEQ ID NO: 3119280 - RNA, 19 nt, Artificial Sequence
  Description of Artificial Sequence: Synthetic oligonucleotide
ggugacagguagaacaagc

SEQ ID NO: 3119281 - RNA, 19 nt, Artificial Sequence
  Description of Artificial Sequence: Synthetic oligonucleotide
caauagacugucugacauc

SEQ ID NO: 3119282 - RNA, 19 nt, Artificial Sequence
  Description of Artificial Sequence: Synthetic oligonucleotide
aacuucucauauauaugau

SEQ ID NO: 3119283 - RNA, 19 nt, Artificial Sequence
  Description of Artificial Sequence: Synthetic oligonucleotide
gacaucugccaccugccuc

SEQ ID NO: 3119284 - RNA, 19 nt, Artificial Sequence
  Description of Artificial Sequence: Synthetic oligonucleotide
agacagacuuggcagccca

SEQ ID NO: 3119285 - RNA, 19 nt, Artificial Sequence
  Description of Artificial Sequence: Synthetic oligonucleotide
agccaaaguucccucacaa

SEQ ID NO: 3119286 - RNA, 19 nt, Artificial Sequence
  Description of Artificial Sequence: Synthetic oligonucleotide
acacgaacagucauauugu

SEQ ID NO: 3119287 - RNA, 19 nt, Artificial Sequence
  Description of Artificial Sequence: Synthetic oligonucleotide
ugucugacaucugccaccu

SEQ ID NO: 3119288 - RNA, 19 nt, Artificial Sequence
  Description of Artificial Sequence: Synthetic oligonucleotide
gucaauagacugucugaca

SEQ ID NO: 3119289 - RNA, 19 nt, Artificial Sequence
  Description of Artificial Sequence: Synthetic oligonucleotide
gugaccugucuguuagucc

SEQ ID NO: 3119290 - RNA, 19 nt, Artificial Sequence
  Description of Artificial Sequence: Synthetic oligonucleotide
ucaugucaauagacugucu

SEQ ID NO: 3119291 - RNA, 19 nt, Artificial Sequence
  Description of Artificial Sequence: Synthetic oligonucleotide
cagacuuggcagcccaacc

SEQ ID NO: 3119292 - RNA, 19 nt, Artificial Sequence
  Description of Artificial Sequence: Synthetic oligonucleotide
caaagauaaggugacaggu

SEQ ID NO: 3119293 - RNA, 19 nt, Artificial Sequence
  Description of Artificial Sequence: Synthetic oligonucleotide
auagcuuuggucagacaga

SEQ ID NO: 3119294 - RNA, 19 nt, Artificial Sequence
  Description of Artificial Sequence: Synthetic oligonucleotide
caggucaagcaugucauuc

SEQ ID NO: 3119295 - RNA, 19 nt, Artificial Sequence
  Description of Artificial Sequence: Synthetic oligonucleotide
caucuaacuucucauauau

SEQ ID NO: 3119296 - RNA, 19 nt, Artificial Sequence
  Description of Artificial Sequence: Synthetic oligonucleotide
uuggucagacagacuuggc

SEQ ID NO: 3119297 - RNA, 19 nt, Artificial Sequence
  Description of Artificial Sequence: Synthetic oligonucleotide
uccauagcuuuggucagac

SEQ ID NO: 3119298 - RNA, 19 nt, Artificial Sequence
  Description of Artificial Sequence: Synthetic oligonucleotide
aacagucauauuguccaua

SEQ ID NO: 3119299 - RNA, 19 nt, Artificial Sequence
  Description of Artificial Sequence: Synthetic oligonucleotide
cacgaacagucauauuguc

SEQ ID NO: 3119300 - RNA, 19 nt, Artificial Sequence
  Description of Artificial Sequence: Synthetic oligonucleotide
cauauauaugauccucaaa

SEQ ID NO: 3119301 - RNA, 19 nt, Artificial Sequence
  Description of Artificial Sequence: Synthetic oligonucleotide
uuggcagcccaaccgugac

SEQ ID NO: 3119302 - RNA, 19 nt, Artificial Sequence
  Description of Artificial Sequence: Synthetic oligonucleotide
cgaacagucauauugucca

SEQ ID NO: 3119303 - RNA, 19 nt, Artificial Sequence
  Description of Artificial Sequence: Synthetic oligonucleotide
ugacaucugccaccugccu

SEQ ID NO: 3119304 - RNA, 19 nt, Artificial Sequence
  Description of Artificial Sequence: Synthetic oligonucleotide
uuaguccauaagccagguc

SEQ ID NO: 3119305 - RNA, 19 nt, Artificial Sequence
  Description of Artificial Sequence: Synthetic oligonucleotide
gucaagcaugucauucucc

SEQ ID NO: 3119306 - RNA, 19 nt, Artificial Sequence
  Description of Artificial Sequence: Synthetic oligonucleotide
uggcaucuaacuucucaua

SEQ ID NO: 3119307 - RNA, 19 nt, Artificial Sequence
  Description of Artificial Sequence: Synthetic oligonucleotide
cagucauauuguccauagc

SEQ ID NO: 3119308 - RNA, 19 nt, Artificial Sequence
  Description of Artificial Sequence: Synthetic oligonucleotide
caagcaugucauucuccuc

SEQ ID NO: 3119309 - RNA, 19 nt, Artificial Sequence
  Description of Artificial Sequence: Synthetic oligonucleotide
gaacaagccaaaguucccu

SEQ ID NO: 3119310 - RNA, 19 nt, Artificial Sequence
  Description of Artificial Sequence: Synthetic oligonucleotide
gcuuuggucagacagacuu

SEQ ID NO: 3119311 - RNA, 19 nt, Artificial Sequence
  Description of Artificial Sequence: Synthetic oligonucleotide
cagguagaacaagccaaag

SEQ ID NO: 3119312 - RNA, 19 nt, Artificial Sequence
  Description of Artificial Sequence: Synthetic oligonucleotide
acagguagaacaagccaaa

SEQ ID NO: 3119313 - RNA, 19 nt, Artificial Sequence
  Description of Artificial Sequence: Synthetic oligonucleotide
ucaucagugauggcaucua

SEQ ID NO: 3119314 - RNA, 19 nt, Artificial Sequence
  Description of Artificial Sequence: Synthetic oligonucleotide
agcaugucauucuccucau

SEQ ID NO: 3119315 - RNA, 19 nt, Artificial Sequence
  Description of Artificial Sequence: Synthetic oligonucleotide
cugccucaggcacacgaac

SEQ ID NO: 3119316 - RNA, 19 nt, Artificial Sequence
  Description of Artificial Sequence: Synthetic oligonucleotide
agauaaggugacagguaga

SEQ ID NO: 3119317 - RNA, 19 nt, Artificial Sequence
  Description of Artificial Sequence: Synthetic oligonucleotide
aaccgugaccugucuguua

SEQ ID NO: 3119318 - RNA, 19 nt, Artificial Sequence
  Description of Artificial Sequence: Synthetic oligonucleotide
cuuggcagcccaaccguga

SEQ ID NO: 3119319 - RNA, 19 nt, Artificial Sequence
  Description of Artificial Sequence: Synthetic oligonucleotide
uggcagcccaaccgugacc

SEQ ID NO: 3119320 - RNA, 19 nt, Artificial Sequence
  Description of Artificial Sequence: Synthetic oligonucleotide
guuaucuuuaggaauucuu

SEQ ID NO: 3119321 - RNA, 19 nt, Artificial Sequence
  Description of Artificial Sequence: Synthetic oligonucleotide
gccaaaguucccucacaag

SEQ ID NO: 3119322 - RNA, 19 nt, Artificial Sequence
  Description of Artificial Sequence: Synthetic oligonucleotide
gccucaggcacacgaacag

SEQ ID NO: 3119323 - RNA, 19 nt, Artificial Sequence
  Description of Artificial Sequence: Synthetic oligonucleotide
aggugacagguagaacaag

SEQ ID NO: 3119324 - RNA, 19 nt, Artificial Sequence
  Description of Artificial Sequence: Synthetic oligonucleotide
gacuuggcagcccaaccgu

SEQ ID NO: 3119325 - RNA, 19 nt, Artificial Sequence
  Description of Artificial Sequence: Synthetic oligonucleotide
ccauaagccaggucaagca

SEQ ID NO: 3119326 - RNA, 19 nt, Artificial Sequence
  Description of Artificial Sequence: Synthetic oligonucleotide
aguccauaagccaggucaa

SEQ ID NO: 3119327 - RNA, 19 nt, Artificial Sequence
  Description of Artificial Sequence: Synthetic oligonucleotide
guccauaagccaggucaag

SEQ ID NO: 3119328 - RNA, 19 nt, Artificial Sequence
  Description of Artificial Sequence: Synthetic oligonucleotide
gugauggcaucuaacuucu

SEQ ID NO: 3119329 - RNA, 19 nt, Artificial Sequence
  Description of Artificial Sequence: Synthetic oligonucleotide
gucauauuguccauagcuu

SEQ ID NO: 3119330 - RNA, 19 nt, Artificial Sequence
  Description of Artificial Sequence: Synthetic oligonucleotide
agcccaaccgugaccuguc

SEQ ID NO: 3119331 - RNA, 19 nt, Artificial Sequence
  Description of Artificial Sequence: Synthetic oligonucleotide
cagacagacuuggcagccc

SEQ ID NO: 3119332 - RNA, 19 nt, Artificial Sequence
  Description of Artificial Sequence: Synthetic oligonucleotide
acuuggcagcccaaccgug

SEQ ID NO: 3119333 - RNA, 19 nt, Artificial Sequence
  Description of Artificial Sequence: Synthetic oligonucleotide
gcaucuaacuucucauaua

SEQ ID NO: 3119334 - RNA, 19 nt, Artificial Sequence
  Description of Artificial Sequence: Synthetic oligonucleotide
cauaagccaggucaagcau

SEQ ID NO: 3119335 - RNA, 19 nt, Artificial Sequence
  Description of Artificial Sequence: Synthetic oligonucleotide
ugauggcaucuaacuucuc

SEQ ID NO: 3119336 - RNA, 19 nt, Artificial Sequence
  Description of Artificial Sequence: Synthetic oligonucleotide
aucugccaccugccucagg

SEQ ID NO: 3119337 - RNA, 19 nt, Artificial Sequence
  Description of Artificial Sequence: Synthetic oligonucleotide
auagacugucugacaucug

SEQ ID NO: 3119338 - RNA, 19 nt, Artificial Sequence
  Description of Artificial Sequence: Synthetic oligonucleotide
gaacagucauauuguccau

SEQ ID NO: 3119339 - RNA, 19 nt, Artificial Sequence
  Description of Artificial Sequence: Synthetic oligonucleotide
aucuaacuucucauauaua

SEQ ID NO: 3119340 - RNA, 19 nt, Artificial Sequence
  Description of Artificial Sequence: Synthetic oligonucleotide
cauucuccucaucagugau

SEQ ID NO: 3119341 - RNA, 19 nt, Artificial Sequence
  Description of Artificial Sequence: Synthetic oligonucleotide
guuaguccauaagccaggu

SEQ ID NO: 3119342 - RNA, 19 nt, Artificial Sequence
  Description of Artificial Sequence: Synthetic oligonucleotide
gcucaugucaauagacugu

SEQ ID NO: 3119343 - RNA, 19 nt, Artificial Sequence
  Description of Artificial Sequence: Synthetic oligonucleotide
aggcacacgaacagucaua

SEQ ID NO: 3119344 - RNA, 19 nt, Artificial Sequence
  Description of Artificial Sequence: Synthetic oligonucleotide
agcuuuggucagacagacu

SEQ ID NO: 3119345 - RNA, 19 nt, Artificial Sequence
  Description of Artificial Sequence: Synthetic oligonucleotide
cagugauggcaucuaacuu

SEQ ID NO: 3119346 - RNA, 19 nt, Artificial Sequence
  Description of Artificial Sequence: Synthetic oligonucleotide
ggcagcccaaccgugaccu

SEQ ID NO: 3119347 - RNA, 19 nt, Artificial Sequence
  Description of Artificial Sequence: Synthetic oligonucleotide
gacagacuuggcagcccaa

SEQ ID NO: 3119348 - RNA, 19 nt, Artificial Sequence
  Description of Artificial Sequence: Synthetic oligonucleotide
ccaaccgugaccugucugu

SEQ ID NO: 3119349 - RNA, 19 nt, Artificial Sequence
  Description of Artificial Sequence: Synthetic oligonucleotide
ggcacacgaacagucauau

SEQ ID NO: 3119350 - RNA, 19 nt, Artificial Sequence
  Description of Artificial Sequence: Synthetic oligonucleotide
caggcacacgaacagucau

SEQ ID NO: 3119351 - RNA, 19 nt, Artificial Sequence
  Description of Artificial Sequence: Synthetic oligonucleotide
cugccaccugccucaggca

SEQ ID NO: 3119352 - RNA, 19 nt, Artificial Sequence
  Description of Artificial Sequence: Synthetic oligonucleotide
accugucuguuaguccaua

SEQ ID NO: 3119353 - RNA, 19 nt, Artificial Sequence
  Description of Artificial Sequence: Synthetic oligonucleotide
caucugccaccugccucag

SEQ ID NO: 3119354 - RNA, 19 nt, Artificial Sequence
  Description of Artificial Sequence: Synthetic oligonucleotide
cccaaccgugaccugucug

SEQ ID NO: 3119355 - RNA, 19 nt, Artificial Sequence
  Description of Artificial Sequence: Synthetic oligonucleotide
cgugaccugucuguuaguc

SEQ ID NO: 3119356 - RNA, 19 nt, Artificial Sequence
  Description of Artificial Sequence: Synthetic oligonucleotide
gucugacaucugccaccug

SEQ ID NO: 3119357 - RNA, 19 nt, Artificial Sequence
  Description of Artificial Sequence: Synthetic oligonucleotide
ccucaucagugauggcauc

SEQ ID NO: 3119358 - RNA, 19 nt, Artificial Sequence
  Description of Artificial Sequence: Synthetic oligonucleotide
gcaugucauucuccucauc

SEQ ID NO: 3119359 - RNA, 19 nt, Artificial Sequence
  Description of Artificial Sequence: Synthetic oligonucleotide
ccugucuguuaguccauaa

SEQ ID NO: 3119360 - RNA, 19 nt, Artificial Sequence
  Description of Artificial Sequence: Synthetic oligonucleotide
cagcccaaccgugaccugu

SEQ ID NO: 3119361 - RNA, 19 nt, Artificial Sequence
  Description of Artificial Sequence: Synthetic oligonucleotide
ccugccucaggcacacgaa

SEQ ID NO: 3119362 - RNA, 19 nt, Artificial Sequence
  Description of Artificial Sequence: Synthetic oligonucleotide
gaccugucuguuaguccau

SEQ ID NO: 3119363 - RNA, 19 nt, Artificial Sequence
  Description of Artificial Sequence: Synthetic oligonucleotide
gcagcccaaccgugaccug

SEQ ID NO: 3119364 - RNA, 19 nt, Artificial Sequence
  Description of Artificial Sequence: Synthetic oligonucleotide
ccauagcuuuggucagaca

SEQ ID NO: 3119365 - RNA, 19 nt, Artificial Sequence
  Description of Artificial Sequence: Synthetic oligonucleotide
caccugccucaggcacacg

SEQ ID NO: 3119366 - RNA, 19 nt, Artificial Sequence
  Description of Artificial Sequence: Synthetic oligonucleotide
caaccgugaccugucuguu

SEQ ID NO: 3119367 - RNA, 19 nt, Artificial Sequence
  Description of Artificial Sequence: Synthetic oligonucleotide
ccucaggcacacgaacagu

SEQ ID NO: 3119368 - RNA, 19 nt, Artificial Sequence
  Description of Artificial Sequence: Synthetic oligonucleotide
gcacacgaacagucauauu

SEQ ID NO: 3119369 - RNA, 19 nt, Artificial Sequence
  Description of Artificial Sequence: Synthetic oligonucleotide
gcccaaccgugaccugucu

SEQ ID NO: 3119370 - RNA, 19 nt, Artificial Sequence
  Description of Artificial Sequence: Synthetic oligonucleotide
ccaggucaagcaugucauu

SEQ ID NO: 3119371 - RNA, 19 nt, Artificial Sequence
  Description of Artificial Sequence: Synthetic oligonucleotide
ccgugaccugucuguuagu

SEQ ID NO: 3119372 - RNA, 19 nt, Artificial Sequence
  Description of Artificial Sequence: Synthetic oligonucleotide
aagaagagcgaucacauac

SEQ ID NO: 3119373 - RNA, 19 nt, Artificial Sequence
  Description of Artificial Sequence: Synthetic oligonucleotide
aguauaacaucacuacugc

SEQ ID NO: 3119374 - RNA, 19 nt, Artificial Sequence
  Description of Artificial Sequence: Synthetic oligonucleotide
agagcgaucacauacauca

SEQ ID NO: 3119375 - RNA, 19 nt, Artificial Sequence
  Description of Artificial Sequence: Synthetic oligonucleotide
aaauguagaacaggaaagc

SEQ ID NO: 3119376 - RNA, 19 nt, Artificial Sequence
  Description of Artificial Sequence: Synthetic oligonucleotide
agaucugguggcuugaucc

SEQ ID NO: 3119377 - RNA, 19 nt, Artificial Sequence
  Description of Artificial Sequence: Synthetic oligonucleotide
uguagaacaggaaagcaag

SEQ ID NO: 3119378 - RNA, 19 nt, Artificial Sequence
  Description of Artificial Sequence: Synthetic oligonucleotide
caggaaagcaagaagagcg

SEQ ID NO: 3119379 - RNA, 19 nt, Artificial Sequence
  Description of Artificial Sequence: Synthetic oligonucleotide
uacugcaugacauauacug

SEQ ID NO: 3119380 - RNA, 19 nt, Artificial Sequence
  Description of Artificial Sequence: Synthetic oligonucleotide
acaauaggagcacugauuc

SEQ ID NO: 3119381 - RNA, 19 nt, Artificial Sequence
  Description of Artificial Sequence: Synthetic oligonucleotide
auauacuguugacugaugc

SEQ ID NO: 3119382 - RNA, 19 nt, Artificial Sequence
  Description of Artificial Sequence: Synthetic oligonucleotide
aguccuguacaauaggagc

SEQ ID NO: 3119383 - RNA, 19 nt, Artificial Sequence
  Description of Artificial Sequence: Synthetic oligonucleotide
accaguauaacaucacuac

SEQ ID NO: 3119384 - RNA, 19 nt, Artificial Sequence
  Description of Artificial Sequence: Synthetic oligonucleotide
uauaacaucacuacugcaa

SEQ ID NO: 3119385 - RNA, 19 nt, Artificial Sequence
  Description of Artificial Sequence: Synthetic oligonucleotide
acauacaucacaauuacuc

SEQ ID NO: 3119386 - RNA, 19 nt, Artificial Sequence
  Description of Artificial Sequence: Synthetic oligonucleotide
gaaaguaccguucuggaac

SEQ ID NO: 3119387 - RNA, 19 nt, Artificial Sequence
  Description of Artificial Sequence: Synthetic oligonucleotide
ugacauauacuguugacug

SEQ ID NO: 3119388 - RNA, 19 nt, Artificial Sequence
  Description of Artificial Sequence: Synthetic oligonucleotide
acaggugcgaaacauaguc

SEQ ID NO: 3119389 - RNA, 19 nt, Artificial Sequence
  Description of Artificial Sequence: Synthetic oligonucleotide
uguacugcaugacauauac

SEQ ID NO: 3119390 - RNA, 19 nt, Artificial Sequence
  Description of Artificial Sequence: Synthetic oligonucleotide
aacauagucagggcaaggc

SEQ ID NO: 3119391 - RNA, 19 nt, Artificial Sequence
  Description of Artificial Sequence: Synthetic oligonucleotide
uacaucacaauuacucggg

SEQ ID NO: 3119392 - RNA, 19 nt, Artificial Sequence
  Description of Artificial Sequence: Synthetic oligonucleotide
gaaauguagaacaggaaag

SEQ ID NO: 3119393 - RNA, 19 nt, Artificial Sequence
  Description of Artificial Sequence: Synthetic oligonucleotide
acuuuggaaauguagaaca

SEQ ID NO: 3119394 - RNA, 19 nt, Artificial Sequence
  Description of Artificial Sequence: Synthetic oligonucleotide
uuggaaauguagaacagga

SEQ ID NO: 3119395 - RNA, 19 nt, Artificial Sequence
  Description of Artificial Sequence: Synthetic oligonucleotide
aaggauaugccagaucugg

SEQ ID NO: 3119396 - RNA, 19 nt, Artificial Sequence
  Description of Artificial Sequence: Synthetic oligonucleotide
auacaucacaauuacucgg

SEQ ID NO: 3119397 - RNA, 19 nt, Artificial Sequence
  Description of Artificial Sequence: Synthetic oligonucleotide
gauaugccagaucuggugg

SEQ ID NO: 3119398 - RNA, 19 nt, Artificial Sequence
  Description of Artificial Sequence: Synthetic oligonucleotide
uggaacuuuggaaauguag

SEQ ID NO: 3119399 - RNA, 19 nt, Artificial Sequence
  Description of Artificial Sequence: Synthetic oligonucleotide
cauacaucacaauuacucg

SEQ ID NO: 3119400 - RNA, 19 nt, Artificial Sequence
  Description of Artificial Sequence: Synthetic oligonucleotide
aaagcaagaagagcgauca

SEQ ID NO: 3119401 - RNA, 19 nt, Artificial Sequence
  Description of Artificial Sequence: Synthetic oligonucleotide
aacuuuggaaauguagaac

SEQ ID NO: 3119402 - RNA, 19 nt, Artificial Sequence
  Description of Artificial Sequence: Synthetic oligonucleotide
auaacaucacuacugcaag

SEQ ID NO: 3119403 - RNA, 19 nt, Artificial Sequence
  Description of Artificial Sequence: Synthetic oligonucleotide
aucacaauuacucggggug

SEQ ID NO: 3119404 - RNA, 19 nt, Artificial Sequence
  Description of Artificial Sequence: Synthetic oligonucleotide
aauuacucggggugcaaag

SEQ ID NO: 3119405 - RNA, 19 nt, Artificial Sequence
  Description of Artificial Sequence: Synthetic oligonucleotide
uuuggaaauguagaacagg

SEQ ID NO: 3119406 - RNA, 19 nt, Artificial Sequence
  Description of Artificial Sequence: Synthetic oligonucleotide
agaacaggaaagcaagaag

SEQ ID NO: 3119407 - RNA, 19 nt, Artificial Sequence
  Description of Artificial Sequence: Synthetic oligonucleotide
caguauaacaucacuacug

SEQ ID NO: 3119408 - RNA, 19 nt, Artificial Sequence
  Description of Artificial Sequence: Synthetic oligonucleotide
ucacauacaucacaauuac

SEQ ID NO: 3119409 - RNA, 19 nt, Artificial Sequence
  Description of Artificial Sequence: Synthetic oligonucleotide
uacugcaaggauaugccag

SEQ ID NO: 3119410 - RNA, 19 nt, Artificial Sequence
  Description of Artificial Sequence: Synthetic oligonucleotide
uauacuguugacugaugcc

SEQ ID NO: 3119411 - RNA, 19 nt, Artificial Sequence
  Description of Artificial Sequence: Synthetic oligonucleotide
acuacugcaaggauaugcc

SEQ ID NO: 3119412 - RNA, 19 nt, Artificial Sequence
  Description of Artificial Sequence: Synthetic oligonucleotide
aauguagaacaggaaagca

SEQ ID NO: 3119413 - RNA, 19 nt, Artificial Sequence
  Description of Artificial Sequence: Synthetic oligonucleotide
aacaucacuacugcaagga

SEQ ID NO: 3119414 - RNA, 19 nt, Artificial Sequence
  Description of Artificial Sequence: Synthetic oligonucleotide
aggugcgaaacauagucag

SEQ ID NO: 3119415 - RNA, 19 nt, Artificial Sequence
  Description of Artificial Sequence: Synthetic oligonucleotide
acaggaaagcaagaagagc

SEQ ID NO: 3119416 - RNA, 19 nt, Artificial Sequence
  Description of Artificial Sequence: Synthetic oligonucleotide
uccgagguaguuuagcugu

SEQ ID NO: 3119417 - RNA, 19 nt, Artificial Sequence
  Description of Artificial Sequence: Synthetic oligonucleotide
aaaguaccguucuggaacu

SEQ ID NO: 3119418 - RNA, 19 nt, Artificial Sequence
  Description of Artificial Sequence: Synthetic oligonucleotide
uaacaucacuacugcaagg

SEQ ID NO: 3119419 - RNA, 19 nt, Artificial Sequence
  Description of Artificial Sequence: Synthetic oligonucleotide
ugcaugacauauacuguug

SEQ ID NO: 3119420 - RNA, 19 nt, Artificial Sequence
  Description of Artificial Sequence: Synthetic oligonucleotide
cuuuggaaauguagaacag

SEQ ID NO: 3119421 - RNA, 19 nt, Artificial Sequence
  Description of Artificial Sequence: Synthetic oligonucleotide
acuguugacugaugccacc

SEQ ID NO: 3119422 - RNA, 19 nt, Artificial Sequence
  Description of Artificial Sequence: Synthetic oligonucleotide
ugcaaaguccuguacaaua

SEQ ID NO: 3119423 - RNA, 19 nt, Artificial Sequence
  Description of Artificial Sequence: Synthetic oligonucleotide
gugcgaaacauagucaggg

SEQ ID NO: 3119424 - RNA, 19 nt, Artificial Sequence
  Description of Artificial Sequence: Synthetic oligonucleotide
gguaguuuagcuguccugg

SEQ ID NO: 3119425 - RNA, 19 nt, Artificial Sequence
  Description of Artificial Sequence: Synthetic oligonucleotide
uacaauaggagcacugauu

SEQ ID NO: 3119426 - RNA, 19 nt, Artificial Sequence
  Description of Artificial Sequence: Synthetic oligonucleotide
ugucuguacugcaugacau

SEQ ID NO: 3119427 - RNA, 19 nt, Artificial Sequence
  Description of Artificial Sequence: Synthetic oligonucleotide
uguacaauaggagcacuga

SEQ ID NO: 3119428 - RNA, 19 nt, Artificial Sequence
  Description of Artificial Sequence: Synthetic oligonucleotide
gaucugguggcuugauccg

SEQ ID NO: 3119429 - RNA, 19 nt, Artificial Sequence
  Description of Artificial Sequence: Synthetic oligonucleotide
aaguccuguacaauaggag

SEQ ID NO: 3119430 - RNA, 19 nt, Artificial Sequence
  Description of Artificial Sequence: Synthetic oligonucleotide
guuuagcuguccuggaaag

SEQ ID NO: 3119431 - RNA, 19 nt, Artificial Sequence
  Description of Artificial Sequence: Synthetic oligonucleotide
ggaaauguagaacaggaaa

SEQ ID NO: 3119432 - RNA, 19 nt, Artificial Sequence
  Description of Artificial Sequence: Synthetic oligonucleotide
auacuguugacugaugcca

SEQ ID NO: 3119433 - RNA, 19 nt, Artificial Sequence
  Description of Artificial Sequence: Synthetic oligonucleotide
cuggaaaguaccguucugg

SEQ ID NO: 3119434 - RNA, 19 nt, Artificial Sequence
  Description of Artificial Sequence: Synthetic oligonucleotide
caaaguccuguacaauagg

SEQ ID NO: 3119435 - RNA, 19 nt, Artificial Sequence
  Description of Artificial Sequence: Synthetic oligonucleotide
gaacuuuggaaauguagaa

SEQ ID NO: 3119436 - RNA, 19 nt, Artificial Sequence
  Description of Artificial Sequence: Synthetic oligonucleotide
cacuacugcaaggauaugc

SEQ ID NO: 3119437 - RNA, 19 nt, Artificial Sequence
  Description of Artificial Sequence: Synthetic oligonucleotide
aaacauagucagggcaagg

SEQ ID NO: 3119438 - RNA, 19 nt, Artificial Sequence
  Description of Artificial Sequence: Synthetic oligonucleotide
ucuggaacuuuggaaaugu

SEQ ID NO: 3119439 - RNA, 19 nt, Artificial Sequence
  Description of Artificial Sequence: Synthetic oligonucleotide
augacauauacuguugacu

SEQ ID NO: 3119440 - RNA, 19 nt, Artificial Sequence
  Description of Artificial Sequence: Synthetic oligonucleotide
acaucacaauuacucgggg

SEQ ID NO: 3119441 - RNA, 19 nt, Artificial Sequence
  Description of Artificial Sequence: Synthetic oligonucleotide
caugacauauacuguugac

SEQ ID NO: 3119442 - RNA, 19 nt, Artificial Sequence
  Description of Artificial Sequence: Synthetic oligonucleotide
aguuuagcuguccuggaaa

SEQ ID NO: 3119443 - RNA, 19 nt, Artificial Sequence
  Description of Artificial Sequence: Synthetic oligonucleotide
uggaaaguaccguucugga

SEQ ID NO: 3119444 - RNA, 19 nt, Artificial Sequence
  Description of Artificial Sequence: Synthetic oligonucleotide
uugacugaugccaccagua

SEQ ID NO: 3119445 - RNA, 19 nt, Artificial Sequence
  Description of Artificial Sequence: Synthetic oligonucleotide
uacucggggugcaaagucc

SEQ ID NO: 3119446 - RNA, 19 nt, Artificial Sequence
  Description of Artificial Sequence: Synthetic oligonucleotide
aagcaagaagagcgaucac

SEQ ID NO: 3119447 - RNA, 19 nt, Artificial Sequence
  Description of Artificial Sequence: Synthetic oligonucleotide
agcgaucacauacaucaca

SEQ ID NO: 3119448 - RNA, 19 nt, Artificial Sequence
  Description of Artificial Sequence: Synthetic oligonucleotide
agcaagaagagcgaucaca

SEQ ID NO: 3119449 - RNA, 19 nt, Artificial Sequence
  Description of Artificial Sequence: Synthetic oligonucleotide
uggaaauguagaacaggaa

SEQ ID NO: 3119450 - RNA, 19 nt, Artificial Sequence
  Description of Artificial Sequence: Synthetic oligonucleotide
ugccaccaguauaacauca

SEQ ID NO: 3119451 - RNA, 19 nt, Artificial Sequence
  Description of Artificial Sequence: Synthetic oligonucleotide
uaccguucuggaacuuugg

SEQ ID NO: 3119452 - RNA, 19 nt, Artificial Sequence
  Description of Artificial Sequence: Synthetic oligonucleotide
acugcaaggauaugccaga

SEQ ID NO: 3119453 - RNA, 19 nt, Artificial Sequence
  Description of Artificial Sequence: Synthetic oligonucleotide
ucugguggcuugauccgag

SEQ ID NO: 3119454 - RNA, 19 nt, Artificial Sequence
  Description of Artificial Sequence: Synthetic oligonucleotide
uguugacugaugccaccag

SEQ ID NO: 3119455 - RNA, 19 nt, Artificial Sequence
  Description of Artificial Sequence: Synthetic oligonucleotide
uuacucggggugcaaaguc

SEQ ID NO: 3119456 - RNA, 19 nt, Artificial Sequence
  Description of Artificial Sequence: Synthetic oligonucleotide
uccuggaaaguaccguucu

SEQ ID NO: 3119457 - RNA, 19 nt, Artificial Sequence
  Description of Artificial Sequence: Synthetic oligonucleotide
uuagcuguccuggaaagua

SEQ ID NO: 3119458 - RNA, 19 nt, Artificial Sequence
  Description of Artificial Sequence: Synthetic oligonucleotide
ugcgaaacauagucagggc

SEQ ID NO: 3119459 - RNA, 19 nt, Artificial Sequence
  Description of Artificial Sequence: Synthetic oligonucleotide
gaucacauacaucacaauu

SEQ ID NO: 3119460 - RNA, 19 nt, Artificial Sequence
  Description of Artificial Sequence: Synthetic oligonucleotide
ugaugccaccaguauaaca

SEQ ID NO: 3119461 - RNA, 19 nt, Artificial Sequence
  Description of Artificial Sequence: Synthetic oligonucleotide
aucacuacugcaaggauau

SEQ ID NO: 3119462 - RNA, 19 nt, Artificial Sequence
  Description of Artificial Sequence: Synthetic oligonucleotide
ucuguacugcaugacauau

SEQ ID NO: 3119463 - RNA, 19 nt, Artificial Sequence
  Description of Artificial Sequence: Synthetic oligonucleotide
aucacauacaucacaauua

SEQ ID NO: 3119464 - RNA, 19 nt, Artificial Sequence
  Description of Artificial Sequence: Synthetic oligonucleotide
acauauacuguugacugau

SEQ ID NO: 3119465 - RNA, 19 nt, Artificial Sequence
  Description of Artificial Sequence: Synthetic oligonucleotide
gaugccaccaguauaacau

SEQ ID NO: 3119466 - RNA, 19 nt, Artificial Sequence
  Description of Artificial Sequence: Synthetic oligonucleotide
cuguacaauaggagcacug

SEQ ID NO: 3119467 - RNA, 19 nt, Artificial Sequence
  Description of Artificial Sequence: Synthetic oligonucleotide
ucacaauuacucggggugc

SEQ ID NO: 3119468 - RNA, 19 nt, Artificial Sequence
  Description of Artificial Sequence: Synthetic oligonucleotide
acugaugccaccaguauaa

SEQ ID NO: 3119469 - RNA, 19 nt, Artificial Sequence
  Description of Artificial Sequence: Synthetic oligonucleotide
ggaacuuuggaaauguaga

SEQ ID NO: 3119470 - RNA, 19 nt, Artificial Sequence
  Description of Artificial Sequence: Synthetic oligonucleotide
gacauauacuguugacuga

SEQ ID NO: 3119471 - RNA, 19 nt, Artificial Sequence
  Description of Artificial Sequence: Synthetic oligonucleotide
uacuguugacugaugccac

SEQ ID NO: 3119472 - RNA, 19 nt, Artificial Sequence
  Description of Artificial Sequence: Synthetic oligonucleotide
ggauaugccagaucuggug

SEQ ID NO: 3119473 - RNA, 19 nt, Artificial Sequence
  Description of Artificial Sequence: Synthetic oligonucleotide
guggcuugauccgagguag

SEQ ID NO: 3119474 - RNA, 19 nt, Artificial Sequence
  Description of Artificial Sequence: Synthetic oligonucleotide
caauaggagcacugauucc

SEQ ID NO: 3119475 - RNA, 19 nt, Artificial Sequence
  Description of Artificial Sequence: Synthetic oligonucleotide
aagagcgaucacauacauc

SEQ ID NO: 3119476 - RNA, 19 nt, Artificial Sequence
  Description of Artificial Sequence: Synthetic oligonucleotide
auccgagguaguuuagcug

SEQ ID NO: 3119477 - RNA, 19 nt, Artificial Sequence
  Description of Artificial Sequence: Synthetic oligonucleotide
uaguuuagcuguccuggaa

SEQ ID NO: 3119478 - RNA, 19 nt, Artificial Sequence
  Description of Artificial Sequence: Synthetic oligonucleotide
agcuguccuggaaaguacc

SEQ ID NO: 3119479 - RNA, 19 nt, Artificial Sequence
  Description of Artificial Sequence: Synthetic oligonucleotide
agguaguuuagcuguccug

SEQ ID NO: 3119480 - RNA, 19 nt, Artificial Sequence
  Description of Artificial Sequence: Synthetic oligonucleotide
gaaagcaagaagagcgauc

SEQ ID NO: 3119481 - RNA, 19 nt, Artificial Sequence
  Description of Artificial Sequence: Synthetic oligonucleotide
gcaaggauaugccagaucu

SEQ ID NO: 3119482 - RNA, 19 nt, Artificial Sequence
  Description of Artificial Sequence: Synthetic oligonucleotide
uguccuggaaaguaccguu

SEQ ID NO: 3119483 - RNA, 19 nt, Artificial Sequence
  Description of Artificial Sequence: Synthetic oligonucleotide
ugauccgagguaguuuagc

SEQ ID NO: 3119484 - RNA, 19 nt, Artificial Sequence
  Description of Artificial Sequence: Synthetic oligonucleotide
cuugauccgagguaguuua

SEQ ID NO: 3119485 - RNA, 19 nt, Artificial Sequence
  Description of Artificial Sequence: Synthetic oligonucleotide
ucagggcaaggcuugcugu

SEQ ID NO: 3119486 - RNA, 19 nt, Artificial Sequence
  Description of Artificial Sequence: Synthetic oligonucleotide
ugacugaugccaccaguau

SEQ ID NO: 3119487 - RNA, 19 nt, Artificial Sequence
  Description of Artificial Sequence: Synthetic oligonucleotide
guauaacaucacuacugca

SEQ ID NO: 3119488 - RNA, 19 nt, Artificial Sequence
  Description of Artificial Sequence: Synthetic oligonucleotide
cauauacuguugacugaug

SEQ ID NO: 3119489 - RNA, 19 nt, Artificial Sequence
  Description of Artificial Sequence: Synthetic oligonucleotide
auguagaacaggaaagcaa

SEQ ID NO: 3119490 - RNA, 19 nt, Artificial Sequence
  Description of Artificial Sequence: Synthetic oligonucleotide
uugauccgagguaguuuag

SEQ ID NO: 3119491 - RNA, 19 nt, Artificial Sequence
  Description of Artificial Sequence: Synthetic oligonucleotide
uagcuguccuggaaaguac

SEQ ID NO: 3119492 - RNA, 19 nt, Artificial Sequence
  Description of Artificial Sequence: Synthetic oligonucleotide
uaggagcacugauuccucc

SEQ ID NO: 3119493 - RNA, 19 nt, Artificial Sequence
  Description of Artificial Sequence: Synthetic oligonucleotide
caaggauaugccagaucug

SEQ ID NO: 3119494 - RNA, 19 nt, Artificial Sequence
  Description of Artificial Sequence: Synthetic oligonucleotide
uccuguacaauaggagcac

SEQ ID NO: 3119495 - RNA, 19 nt, Artificial Sequence
  Description of Artificial Sequence: Synthetic oligonucleotide
auagucagggcaaggcuug

SEQ ID NO: 3119496 - RNA, 19 nt, Artificial Sequence
  Description of Artificial Sequence: Synthetic oligonucleotide
agaagagcgaucacauaca

SEQ ID NO: 3119497 - RNA, 19 nt, Artificial Sequence
  Description of Artificial Sequence: Synthetic oligonucleotide
ugcaaggauaugccagauc

SEQ ID NO: 3119498 - RNA, 19 nt, Artificial Sequence
  Description of Artificial Sequence: Synthetic oligonucleotide
uuuagcuguccuggaaagu

SEQ ID NO: 3119499 - RNA, 19 nt, Artificial Sequence
  Description of Artificial Sequence: Synthetic oligonucleotide
gauccgagguaguuuagcu

SEQ ID NO: 3119500 - RNA, 19 nt, Artificial Sequence
  Description of Artificial Sequence: Synthetic oligonucleotide
ugguggcuugauccgaggu

SEQ ID NO: 3119501 - RNA, 19 nt, Artificial Sequence
  Description of Artificial Sequence: Synthetic oligonucleotide
gucagggcaaggcuugcug

SEQ ID NO: 3119502 - RNA, 19 nt, Artificial Sequence
  Description of Artificial Sequence: Synthetic oligonucleotide
gugucuguacugcaugaca

SEQ ID NO: 3119503 - RNA, 19 nt, Artificial Sequence
  Description of Artificial Sequence: Synthetic oligonucleotide
ugccagaucugguggcuug

SEQ ID NO: 3119504 - RNA, 19 nt, Artificial Sequence
  Description of Artificial Sequence: Synthetic oligonucleotide
accguucuggaacuuugga

SEQ ID NO: 3119505 - RNA, 19 nt, Artificial Sequence
  Description of Artificial Sequence: Synthetic oligonucleotide
acugcaugacauauacugu

SEQ ID NO: 3119506 - RNA, 19 nt, Artificial Sequence
  Description of Artificial Sequence: Synthetic oligonucleotide
aggagcacugauuccucca

SEQ ID NO: 3119507 - RNA, 19 nt, Artificial Sequence
  Description of Artificial Sequence: Synthetic oligonucleotide
guccuguacaauaggagca

SEQ ID NO: 3119508 - RNA, 19 nt, Artificial Sequence
  Description of Artificial Sequence: Synthetic oligonucleotide
ugugucuguacugcaugac

SEQ ID NO: 3119509 - RNA, 19 nt, Artificial Sequence
  Description of Artificial Sequence: Synthetic oligonucleotide
caucacuacugcaaggaua

SEQ ID NO: 3119510 - RNA, 19 nt, Artificial Sequence
  Description of Artificial Sequence: Synthetic oligonucleotide
ugcugugucuguacugcau

SEQ ID NO: 3119511 - RNA, 19 nt, Artificial Sequence
  Description of Artificial Sequence: Synthetic oligonucleotide
auuacucggggugcaaagu

SEQ ID NO: 3119512 - RNA, 19 nt, Artificial Sequence
  Description of Artificial Sequence: Synthetic oligonucleotide
acaucacuacugcaaggau

SEQ ID NO: 3119513 - RNA, 19 nt, Artificial Sequence
  Description of Artificial Sequence: Synthetic oligonucleotide
caccaguauaacaucacua

SEQ ID NO: 3119514 - RNA, 19 nt, Artificial Sequence
  Description of Artificial Sequence: Synthetic oligonucleotide
gacugaugccaccaguaua

SEQ ID NO: 3119515 - RNA, 19 nt, Artificial Sequence
  Description of Artificial Sequence: Synthetic oligonucleotide
uaugccagaucugguggcu

SEQ ID NO: 3119516 - RNA, 19 nt, Artificial Sequence
  Description of Artificial Sequence: Synthetic oligonucleotide
guaccguucuggaacuuug

SEQ ID NO: 3119517 - RNA, 19 nt, Artificial Sequence
  Description of Artificial Sequence: Synthetic oligonucleotide
gcgaaacauagucagggca

SEQ ID NO: 3119518 - RNA, 19 nt, Artificial Sequence
  Description of Artificial Sequence: Synthetic oligonucleotide
ggugcaaaguccuguacaa

SEQ ID NO: 3119519 - RNA, 19 nt, Artificial Sequence
  Description of Artificial Sequence: Synthetic oligonucleotide
guaguuuagcuguccugga

SEQ ID NO: 3119520 - RNA, 19 nt, Artificial Sequence
  Description of Artificial Sequence: Synthetic oligonucleotide
gcugugucuguacugcaug

SEQ ID NO: 3119521 - RNA, 19 nt, Artificial Sequence
  Description of Artificial Sequence: Synthetic oligonucleotide
aggaaagcaagaagagcga

SEQ ID NO: 3119522 - RNA, 19 nt, Artificial Sequence
  Description of Artificial Sequence: Synthetic oligonucleotide
uugcugugucuguacugca

SEQ ID NO: 3119523 - RNA, 19 nt, Artificial Sequence
  Description of Artificial Sequence: Synthetic oligonucleotide
cuacugcaaggauaugcca

SEQ ID NO: 3119524 - RNA, 19 nt, Artificial Sequence
  Description of Artificial Sequence: Synthetic oligonucleotide
cagggcaaggcuugcugug

SEQ ID NO: 3119525 - RNA, 19 nt, Artificial Sequence
  Description of Artificial Sequence: Synthetic oligonucleotide
ggugcgaaacauagucagg

SEQ ID NO: 3119526 - RNA, 19 nt, Artificial Sequence
  Description of Artificial Sequence: Synthetic oligonucleotide
ucggggugcaaaguccugu

SEQ ID NO: 3119527 - RNA, 19 nt, Artificial Sequence
  Description of Artificial Sequence: Synthetic oligonucleotide
cugguggcuugauccgagg

SEQ ID NO: 3119528 - RNA, 19 nt, Artificial Sequence
  Description of Artificial Sequence: Synthetic oligonucleotide
guagaacaggaaagcaaga

SEQ ID NO: 3119529 - RNA, 19 nt, Artificial Sequence
  Description of Artificial Sequence: Synthetic oligonucleotide
caggugcgaaacauaguca

SEQ ID NO: 3119530 - RNA, 19 nt, Artificial Sequence
  Description of Artificial Sequence: Synthetic oligonucleotide
gggugcaaaguccuguaca

SEQ ID NO: 3119531 - RNA, 19 nt, Artificial Sequence
  Description of Artificial Sequence: Synthetic oligonucleotide
gaagagcgaucacauacau

SEQ ID NO: 3119532 - RNA, 19 nt, Artificial Sequence
  Description of Artificial Sequence: Synthetic oligonucleotide
aaggcuugcugugucugua

SEQ ID NO: 3119533 - RNA, 19 nt, Artificial Sequence
  Description of Artificial Sequence: Synthetic oligonucleotide
gcaugacauauacuguuga

SEQ ID NO: 3119534 - RNA, 19 nt, Artificial Sequence
  Description of Artificial Sequence: Synthetic oligonucleotide
cugugucuguacugcauga

SEQ ID NO: 3119535 - RNA, 19 nt, Artificial Sequence
  Description of Artificial Sequence: Synthetic oligonucleotide
gagguaguuuagcuguccu

SEQ ID NO: 3119536 - RNA, 19 nt, Artificial Sequence
  Description of Artificial Sequence: Synthetic oligonucleotide
guugacugaugccaccagu

SEQ ID NO: 3119537 - RNA, 19 nt, Artificial Sequence
  Description of Artificial Sequence: Synthetic oligonucleotide
gcuguccuggaaaguaccg

SEQ ID NO: 3119538 - RNA, 19 nt, Artificial Sequence
  Description of Artificial Sequence: Synthetic oligonucleotide
cauagucagggcaaggcuu

SEQ ID NO: 3119539 - RNA, 19 nt, Artificial Sequence
  Description of Artificial Sequence: Synthetic oligonucleotide
guacaauaggagcacugau

SEQ ID NO: 3119540 - RNA, 19 nt, Artificial Sequence
  Description of Artificial Sequence: Synthetic oligonucleotide
gcuugcugugucuguacug

SEQ ID NO: 3119541 - RNA, 19 nt, Artificial Sequence
  Description of Artificial Sequence: Synthetic oligonucleotide
ggaaaguaccguucuggaa

SEQ ID NO: 3119542 - RNA, 19 nt, Artificial Sequence
  Description of Artificial Sequence: Synthetic oligonucleotide
aguaccguucuggaacuuu

SEQ ID NO: 3119543 - RNA, 19 nt, Artificial Sequence
  Description of Artificial Sequence: Synthetic oligonucleotide
caucacaauuacucggggu

SEQ ID NO: 3119544 - RNA, 19 nt, Artificial Sequence
  Description of Artificial Sequence: Synthetic oligonucleotide
cugcaugacauauacuguu

SEQ ID NO: 3119545 - RNA, 19 nt, Artificial Sequence
  Description of Artificial Sequence: Synthetic oligonucleotide
aggauaugccagaucuggu

SEQ ID NO: 3119546 - RNA, 19 nt, Artificial Sequence
  Description of Artificial Sequence: Synthetic oligonucleotide
cuguugacugaugccacca

SEQ ID NO: 3119547 - RNA, 19 nt, Artificial Sequence
  Description of Artificial Sequence: Synthetic oligonucleotide
acucggggugcaaaguccu

SEQ ID NO: 3119548 - RNA, 19 nt, Artificial Sequence
  Description of Artificial Sequence: Synthetic oligonucleotide
uggcuugauccgagguagu

SEQ ID NO: 3119549 - RNA, 19 nt, Artificial Sequence
  Description of Artificial Sequence: Synthetic oligonucleotide
gucuguacugcaugacaua

SEQ ID NO: 3119550 - RNA, 19 nt, Artificial Sequence
  Description of Artificial Sequence: Synthetic oligonucleotide
guccuggaaaguaccguuc

SEQ ID NO: 3119551 - RNA, 19 nt, Artificial Sequence
  Description of Artificial Sequence: Synthetic oligonucleotide
aucugguggcuugauccga

SEQ ID NO: 3119552 - RNA, 19 nt, Artificial Sequence
  Description of Artificial Sequence: Synthetic oligonucleotide
gagcgaucacauacaucac

SEQ ID NO: 3119553 - RNA, 19 nt, Artificial Sequence
  Description of Artificial Sequence: Synthetic oligonucleotide
uagucagggcaaggcuugc

SEQ ID NO: 3119554 - RNA, 19 nt, Artificial Sequence
  Description of Artificial Sequence: Synthetic oligonucleotide
cacaauuacucggggugca

SEQ ID NO: 3119555 - RNA, 19 nt, Artificial Sequence
  Description of Artificial Sequence: Synthetic oligonucleotide
agggcaaggcuugcugugu

SEQ ID NO: 3119556 - RNA, 19 nt, Artificial Sequence
  Description of Artificial Sequence: Synthetic oligonucleotide
gcgaucacauacaucacaa

SEQ ID NO: 3119557 - RNA, 19 nt, Artificial Sequence
  Description of Artificial Sequence: Synthetic oligonucleotide
acaauuacucggggugcaa

SEQ ID NO: 3119558 - RNA, 19 nt, Artificial Sequence
  Description of Artificial Sequence: Synthetic oligonucleotide
cucggggugcaaaguccug

SEQ ID NO: 3119559 - RNA, 19 nt, Artificial Sequence
  Description of Artificial Sequence: Synthetic oligonucleotide
cgaaacauagucagggcaa

SEQ ID NO: 3119560 - RNA, 19 nt, Artificial Sequence
  Description of Artificial Sequence: Synthetic oligonucleotide
cacauacaucacaauuacu

SEQ ID NO: 3119561 - RNA, 19 nt, Artificial Sequence
  Description of Artificial Sequence: Synthetic oligonucleotide
caagaagagcgaucacaua

SEQ ID NO: 3119562 - RNA, 19 nt, Artificial Sequence
  Description of Artificial Sequence: Synthetic oligonucleotide
ucacuacugcaaggauaug

SEQ ID NO: 3119563 - RNA, 19 nt, Artificial Sequence
  Description of Artificial Sequence: Synthetic oligonucleotide
gguggcuugauccgaggua

SEQ ID NO: 3119564 - RNA, 19 nt, Artificial Sequence
  Description of Artificial Sequence: Synthetic oligonucleotide
cugaugccaccaguauaac

SEQ ID NO: 3119565 - RNA, 19 nt, Artificial Sequence
  Description of Artificial Sequence: Synthetic oligonucleotide
gcaaggcuugcugugucug

SEQ ID NO: 3119566 - RNA, 19 nt, Artificial Sequence
  Description of Artificial Sequence: Synthetic oligonucleotide
cuguacugcaugacauaua

SEQ ID NO: 3119567 - RNA, 19 nt, Artificial Sequence
  Description of Artificial Sequence: Synthetic oligonucleotide
caauuacucggggugcaaa

SEQ ID NO: 3119568 - RNA, 19 nt, Artificial Sequence
  Description of Artificial Sequence: Synthetic oligonucleotide
ccuggaaaguaccguucug

SEQ ID NO: 3119569 - RNA, 19 nt, Artificial Sequence
  Description of Artificial Sequence: Synthetic oligonucleotide
ggggugcaaaguccuguac

SEQ ID NO: 3119570 - RNA, 19 nt, Artificial Sequence
  Description of Artificial Sequence: Synthetic oligonucleotide
gcaagaagagcgaucacau

SEQ ID NO: 3119571 - RNA, 19 nt, Artificial Sequence
  Description of Artificial Sequence: Synthetic oligonucleotide
cuggaacuuuggaaaugua

SEQ ID NO: 3119572 - RNA, 19 nt, Artificial Sequence
  Description of Artificial Sequence: Synthetic oligonucleotide
gccaccaguauaacaucac

SEQ ID NO: 3119573 - RNA, 19 nt, Artificial Sequence
  Description of Artificial Sequence: Synthetic oligonucleotide
aaguaccguucuggaacuu

SEQ ID NO: 3119574 - RNA, 19 nt, Artificial Sequence
  Description of Artificial Sequence: Synthetic oligonucleotide
ccguucuggaacuuuggaa

SEQ ID NO: 3119575 - RNA, 19 nt, Artificial Sequence
  Description of Artificial Sequence: Synthetic oligonucleotide
ccaguauaacaucacuacu

SEQ ID NO: 3119576 - RNA, 19 nt, Artificial Sequence
  Description of Artificial Sequence: Synthetic oligonucleotide
caaggcuugcugugucugu

SEQ ID NO: 3119577 - RNA, 19 nt, Artificial Sequence
  Description of Artificial Sequence: Synthetic oligonucleotide
gggcaaggcuugcuguguc

SEQ ID NO: 3119578 - RNA, 19 nt, Artificial Sequence
  Description of Artificial Sequence: Synthetic oligonucleotide
cgagguaguuuagcugucc

SEQ ID NO: 3119579 - RNA, 19 nt, Artificial Sequence
  Description of Artificial Sequence: Synthetic oligonucleotide
cuguccuggaaaguaccgu

SEQ ID NO: 3119580 - RNA, 19 nt, Artificial Sequence
  Description of Artificial Sequence: Synthetic oligonucleotide
gagcacugauuccuccauu

SEQ ID NO: 3119581 - RNA, 19 nt, Artificial Sequence
  Description of Artificial Sequence: Synthetic oligonucleotide
guacugcaugacauauacu

SEQ ID NO: 3119582 - RNA, 19 nt, Artificial Sequence
  Description of Artificial Sequence: Synthetic oligonucleotide
ggagcacugauuccuccau

SEQ ID NO: 3119583 - RNA, 19 nt, Artificial Sequence
  Description of Artificial Sequence: Synthetic oligonucleotide
ccgagguaguuuagcuguc

SEQ ID NO: 3119584 - RNA, 19 nt, Artificial Sequence
  Description of Artificial Sequence: Synthetic oligonucleotide
ccaccaguauaacaucacu

SEQ ID NO: 3119585 - RNA, 19 nt, Artificial Sequence
  Description of Artificial Sequence: Synthetic oligonucleotide
ggcaaggcuugcugugucu

SEQ ID NO: 3119586 - RNA, 19 nt, Artificial Sequence
  Description of Artificial Sequence: Synthetic oligonucleotide
gugcaaaguccuguacaau

SEQ ID NO: 3119587 - RNA, 19 nt, Artificial Sequence
  Description of Artificial Sequence: Synthetic oligonucleotide
gccagaucugguggcuuga

SEQ ID NO: 3119588 - RNA, 19 nt, Artificial Sequence
  Description of Artificial Sequence: Synthetic oligonucleotide
cugcaaggauaugccagau

SEQ ID NO: 3119589 - RNA, 19 nt, Artificial Sequence
  Description of Artificial Sequence: Synthetic oligonucleotide
ggcuugauccgagguaguu

SEQ ID NO: 3119590 - RNA, 19 nt, Artificial Sequence
  Description of Artificial Sequence: Synthetic oligonucleotide
ccuguacaauaggagcacu

SEQ ID NO: 3119591 - RNA, 19 nt, Artificial Sequence
  Description of Artificial Sequence: Synthetic oligonucleotide
cgaucacauacaucacaau

SEQ ID NO: 3119592 - RNA, 19 nt, Artificial Sequence
  Description of Artificial Sequence: Synthetic oligonucleotide
cggggugcaaaguccugua

SEQ ID NO: 3119593 - RNA, 19 nt, Artificial Sequence
  Description of Artificial Sequence: Synthetic oligonucleotide
uccuugcucagaaugagca

SEQ ID NO: 3119594 - RNA, 19 nt, Artificial Sequence
  Description of Artificial Sequence: Synthetic oligonucleotide
aggguaucucuguauagcg

SEQ ID NO: 3119595 - RNA, 19 nt, Artificial Sequence
  Description of Artificial Sequence: Synthetic oligonucleotide
agauccgacugccucugcc

SEQ ID NO: 3119596 - RNA, 19 nt, Artificial Sequence
  Description of Artificial Sequence: Synthetic oligonucleotide
ugugccaccaugccuuccc

SEQ ID NO: 3119597 - RNA, 19 nt, Artificial Sequence
  Description of Artificial Sequence: Synthetic oligonucleotide
uugcucagaaugagcacag

SEQ ID NO: 3119598 - RNA, 19 nt, Artificial Sequence
  Description of Artificial Sequence: Synthetic oligonucleotide
cuuucuuccuugucucucc

SEQ ID NO: 3119599 - RNA, 19 nt, Artificial Sequence
  Description of Artificial Sequence: Synthetic oligonucleotide
uaucucuguauagcgcugg

SEQ ID NO: 3119600 - RNA, 19 nt, Artificial Sequence
  Description of Artificial Sequence: Synthetic oligonucleotide
acaggguaucucuguauag

SEQ ID NO: 3119601 - RNA, 19 nt, Artificial Sequence
  Description of Artificial Sequence: Synthetic oligonucleotide
auagcgcuggcuguccugc

SEQ ID NO: 3119602 - RNA, 19 nt, Artificial Sequence
  Description of Artificial Sequence: Synthetic oligonucleotide
uuccuugcucagaaugagc

SEQ ID NO: 3119603 - RNA, 19 nt, Artificial Sequence
  Description of Artificial Sequence: Synthetic oligonucleotide
augccuucccugucucucc

SEQ ID NO: 3119604 - RNA, 19 nt, Artificial Sequence
  Description of Artificial Sequence: Synthetic oligonucleotide
caggguaucucuguauagc

SEQ ID NO: 3119605 - RNA, 19 nt, Artificial Sequence
  Description of Artificial Sequence: Synthetic oligonucleotide
ugcaccuagcucuguagac

SEQ ID NO: 3119606 - RNA, 19 nt, Artificial Sequence
  Description of Artificial Sequence: Synthetic oligonucleotide
cuugcucagaaugagcaca

SEQ ID NO: 3119607 - RNA, 19 nt, Artificial Sequence
  Description of Artificial Sequence: Synthetic oligonucleotide
cuuccuugcucagaaugag

SEQ ID NO: 3119608 - RNA, 19 nt, Artificial Sequence
  Description of Artificial Sequence: Synthetic oligonucleotide
uauagcgcuggcuguccug

SEQ ID NO: 3119609 - RNA, 19 nt, Artificial Sequence
  Description of Artificial Sequence: Synthetic oligonucleotide
uuucuuccuugucucuccu

SEQ ID NO: 3119610 - RNA, 19 nt, Artificial Sequence
  Description of Artificial Sequence: Synthetic oligonucleotide
uguauagcgcuggcugucc

SEQ ID NO: 3119611 - RNA, 19 nt, Artificial Sequence
  Description of Artificial Sequence: Synthetic oligonucleotide
gacaggguaucucuguaua

SEQ ID NO: 3119612 - RNA, 19 nt, Artificial Sequence
  Description of Artificial Sequence: Synthetic oligonucleotide
uguccugcaccuagcucug

SEQ ID NO: 3119613 - RNA, 19 nt, Artificial Sequence
  Description of Artificial Sequence: Synthetic oligonucleotide
uucccugucucuccuuccu

SEQ ID NO: 3119614 - RNA, 19 nt, Artificial Sequence
  Description of Artificial Sequence: Synthetic oligonucleotide
auccgacugccucugccuc

SEQ ID NO: 3119615 - RNA, 19 nt, Artificial Sequence
  Description of Artificial Sequence: Synthetic oligonucleotide
cucagaaugagcacagccu

SEQ ID NO: 3119616 - RNA, 19 nt, Artificial Sequence
  Description of Artificial Sequence: Synthetic oligonucleotide
accaugccuucccugucuc

SEQ ID NO: 3119617 - RNA, 19 nt, Artificial Sequence
  Description of Artificial Sequence: Synthetic oligonucleotide
ucccuuccuuccuugcuca

SEQ ID NO: 3119618 - RNA, 19 nt, Artificial Sequence
  Description of Artificial Sequence: Synthetic oligonucleotide
cuguccugcaccuagcucu

SEQ ID NO: 3119619 - RNA, 19 nt, Artificial Sequence
  Description of Artificial Sequence: Synthetic oligonucleotide
gguaucucuguauagcgcu

SEQ ID NO: 3119620 - RNA, 19 nt, Artificial Sequence
  Description of Artificial Sequence: Synthetic oligonucleotide
uccuuccuucgcuuccucc

SEQ ID NO: 3119621 - RNA, 19 nt, Artificial Sequence
  Description of Artificial Sequence: Synthetic oligonucleotide
cuucccugucucuccuucc

SEQ ID NO: 3119622 - RNA, 19 nt, Artificial Sequence
  Description of Artificial Sequence: Synthetic oligonucleotide
caccuagcucuguagacca

SEQ ID NO: 3119623 - RNA, 19 nt, Artificial Sequence
  Description of Artificial Sequence: Synthetic oligonucleotide
uccuucgcuuccucccucc

SEQ ID NO: 3119624 - RNA, 19 nt, Artificial Sequence
  Description of Artificial Sequence: Synthetic oligonucleotide
uccgacugccucugccucc

SEQ ID NO: 3119625 - RNA, 19 nt, Artificial Sequence
  Description of Artificial Sequence: Synthetic oligonucleotide
caugccuucccugucucuc

SEQ ID NO: 3119626 - RNA, 19 nt, Artificial Sequence
  Description of Artificial Sequence: Synthetic oligonucleotide
guaucucuguauagcgcug

SEQ ID NO: 3119627 - RNA, 19 nt, Artificial Sequence
  Description of Artificial Sequence: Synthetic oligonucleotide
gauccgacugccucugccu

SEQ ID NO: 3119628 - RNA, 19 nt, Artificial Sequence
  Description of Artificial Sequence: Synthetic oligonucleotide
ugccaccaugccuucccug

SEQ ID NO: 3119629 - RNA, 19 nt, Artificial Sequence
  Description of Artificial Sequence: Synthetic oligonucleotide
gcaccuagcucuguagacc

SEQ ID NO: 3119630 - RNA, 19 nt, Artificial Sequence
  Description of Artificial Sequence: Synthetic oligonucleotide
ggguaucucuguauagcgc

SEQ ID NO: 3119631 - RNA, 19 nt, Artificial Sequence
  Description of Artificial Sequence: Synthetic oligonucleotide
cugcaccuagcucuguaga

SEQ ID NO: 3119632 - RNA, 19 nt, Artificial Sequence
  Description of Artificial Sequence: Synthetic oligonucleotide
uuccuucgcuuccucccuc

SEQ ID NO: 3119633 - RNA, 19 nt, Artificial Sequence
  Description of Artificial Sequence: Synthetic oligonucleotide
gacugccucugccuccuga

SEQ ID NO: 3119634 - RNA, 19 nt, Artificial Sequence
  Description of Artificial Sequence: Synthetic oligonucleotide
ccugucucuccuuccuucc

SEQ ID NO: 3119635 - RNA, 19 nt, Artificial Sequence
  Description of Artificial Sequence: Synthetic oligonucleotide
ccugcaccuagcucuguag

SEQ ID NO: 3119636 - RNA, 19 nt, Artificial Sequence
  Description of Artificial Sequence: Synthetic oligonucleotide
ccuuccuugcucagaauga

SEQ ID NO: 3119637 - RNA, 19 nt, Artificial Sequence
  Description of Artificial Sequence: Synthetic oligonucleotide
gagauccgacugccucugc

SEQ ID NO: 3119638 - RNA, 19 nt, Artificial Sequence
  Description of Artificial Sequence: Synthetic oligonucleotide
ucgcuuccucccucccuca

SEQ ID NO: 3119639 - RNA, 19 nt, Artificial Sequence
  Description of Artificial Sequence: Synthetic oligonucleotide
ucccugucucuccuuccuu

SEQ ID NO: 3119640 - RNA, 19 nt, Artificial Sequence
  Description of Artificial Sequence: Synthetic oligonucleotide
uagcgcuggcuguccugca

SEQ ID NO: 3119641 - RNA, 19 nt, Artificial Sequence
  Description of Artificial Sequence: Synthetic oligonucleotide
cccugucucuccuuccuuc

SEQ ID NO: 3119642 - RNA, 19 nt, Artificial Sequence
  Description of Artificial Sequence: Synthetic oligonucleotide
accuagcucuguagaccag

SEQ ID NO: 3119643 - RNA, 19 nt, Artificial Sequence
  Description of Artificial Sequence: Synthetic oligonucleotide
gcgcuggcuguccugcacc

SEQ ID NO: 3119644 - RNA, 19 nt, Artificial Sequence
  Description of Artificial Sequence: Synthetic oligonucleotide
ccuuccuuucuuccuuguc

SEQ ID NO: 3119645 - RNA, 19 nt, Artificial Sequence
  Description of Artificial Sequence: Synthetic oligonucleotide
cuuccuucgcuuccucccu

SEQ ID NO: 3119646 - RNA, 19 nt, Artificial Sequence
  Description of Artificial Sequence: Synthetic oligonucleotide
guauagcgcuggcuguccu

SEQ ID NO: 3119647 - RNA, 19 nt, Artificial Sequence
  Description of Artificial Sequence: Synthetic oligonucleotide
gccaccaugccuucccugu

SEQ ID NO: 3119648 - RNA, 19 nt, Artificial Sequence
  Description of Artificial Sequence: Synthetic oligonucleotide
uccugagcacugggacuaa

SEQ ID NO: 3119649 - RNA, 19 nt, Artificial Sequence
  Description of Artificial Sequence: Synthetic oligonucleotide
gugugccaccaugccuucc

SEQ ID NO: 3119650 - RNA, 19 nt, Artificial Sequence
  Description of Artificial Sequence: Synthetic oligonucleotide
cuucgcuuccucccucccu

SEQ ID NO: 3119651 - RNA, 19 nt, Artificial Sequence
  Description of Artificial Sequence: Synthetic oligonucleotide
ccuucgcuuccucccuccc

SEQ ID NO: 3119652 - RNA, 19 nt, Artificial Sequence
  Description of Artificial Sequence: Synthetic oligonucleotide
ccaccaugccuucccuguc

SEQ ID NO: 3119653 - RNA, 19 nt, Artificial Sequence
  Description of Artificial Sequence: Synthetic oligonucleotide
gugccaccaugccuucccu

SEQ ID NO: 3119654 - RNA, 19 nt, Artificial Sequence
  Description of Artificial Sequence: Synthetic oligonucleotide
gcuuccucccucccucacu

SEQ ID NO: 3119655 - RNA, 19 nt, Artificial Sequence
  Description of Artificial Sequence: Synthetic oligonucleotide
ccuuccuuccuugcucaga

SEQ ID NO: 3119656 - RNA, 19 nt, Artificial Sequence
  Description of Artificial Sequence: Synthetic oligonucleotide
cgcuuccucccucccucac

SEQ ID NO: 3119657 - RNA, 19 nt, Artificial Sequence
  Description of Artificial Sequence: Synthetic oligonucleotide
ccugagcacugggacuaaa

SEQ ID NO: 3119658 - RNA, 19 nt, Artificial Sequence
  Description of Artificial Sequence: Synthetic oligonucleotide
ccaugccuucccugucucu

SEQ ID NO: 3119659 - RNA, 19 nt, Artificial Sequence
  Description of Artificial Sequence: Synthetic oligonucleotide
guccugcaccuagcucugu

SEQ ID NO: 3119660 - RNA, 19 nt, Artificial Sequence
  Description of Artificial Sequence: Synthetic oligonucleotide
ccgacugccucugccuccu

SEQ ID NO: 3119661 - RNA, 19 nt, Artificial Sequence
  Description of Artificial Sequence: Synthetic oligonucleotide
agugucuccacucagagcc

SEQ ID NO: 3119662 - RNA, 19 nt, Artificial Sequence
  Description of Artificial Sequence: Synthetic oligonucleotide
aauuaaacaagagacauca

SEQ ID NO: 3119663 - RNA, 19 nt, Artificial Sequence
  Description of Artificial Sequence: Synthetic oligonucleotide
auaagguaguuccagaagc

SEQ ID NO: 3119664 - RNA, 19 nt, Artificial Sequence
  Description of Artificial Sequence: Synthetic oligonucleotide
uacagaauaagguaguucc

SEQ ID NO: 3119665 - RNA, 19 nt, Artificial Sequence
  Description of Artificial Sequence: Synthetic oligonucleotide
aguaauccugcccagaggg

SEQ ID NO: 3119666 - RNA, 19 nt, Artificial Sequence
  Description of Artificial Sequence: Synthetic oligonucleotide
ugggguaccgcuaacaggg

SEQ ID NO: 3119667 - RNA, 19 nt, Artificial Sequence
  Description of Artificial Sequence: Synthetic oligonucleotide
aauaagguaguuccagaag

SEQ ID NO: 3119668 - RNA, 19 nt, Artificial Sequence
  Description of Artificial Sequence: Synthetic oligonucleotide
uaaacaagagacaucaaaa

SEQ ID NO: 3119669 - RNA, 19 nt, Artificial Sequence
  Description of Artificial Sequence: Synthetic oligonucleotide
uuaaacaagagacaucaaa

SEQ ID NO: 3119670 - RNA, 19 nt, Artificial Sequence
  Description of Artificial Sequence: Synthetic oligonucleotide
aaaaguggugcuuguuggc

SEQ ID NO: 3119671 - RNA, 19 nt, Artificial Sequence
  Description of Artificial Sequence: Synthetic oligonucleotide
aagaugagcagacuuccuc

SEQ ID NO: 3119672 - RNA, 19 nt, Artificial Sequence
  Description of Artificial Sequence: Synthetic oligonucleotide
uggguaauuaaacaagaga

SEQ ID NO: 3119673 - RNA, 19 nt, Artificial Sequence
  Description of Artificial Sequence: Synthetic oligonucleotide
agaugagcagacuuccucc

SEQ ID NO: 3119674 - RNA, 19 nt, Artificial Sequence
  Description of Artificial Sequence: Synthetic oligonucleotide
uccaacaggacccacaauc

SEQ ID NO: 3119675 - RNA, 19 nt, Artificial Sequence
  Description of Artificial Sequence: Synthetic oligonucleotide
agagccugguaguaaaagc

SEQ ID NO: 3119676 - RNA, 19 nt, Artificial Sequence
  Description of Artificial Sequence: Synthetic oligonucleotide
aaaguggugcuuguuggcc

SEQ ID NO: 3119677 - RNA, 19 nt, Artificial Sequence
  Description of Artificial Sequence: Synthetic oligonucleotide
uaaaagcugguacagaaua

SEQ ID NO: 3119678 - RNA, 19 nt, Artificial Sequence
  Description of Artificial Sequence: Synthetic oligonucleotide
aaugggguaccgcuaacag

SEQ ID NO: 3119679 - RNA, 19 nt, Artificial Sequence
  Description of Artificial Sequence: Synthetic oligonucleotide
aguuccagaagcuagcagu

SEQ ID NO: 3119680 - RNA, 19 nt, Artificial Sequence
  Description of Artificial Sequence: Synthetic oligonucleotide
uccacucagagccugguag

SEQ ID NO: 3119681 - RNA, 19 nt, Artificial Sequence
  Description of Artificial Sequence: Synthetic oligonucleotide
gaagcuagcaguaauccug

SEQ ID NO: 3119682 - RNA, 19 nt, Artificial Sequence
  Description of Artificial Sequence: Synthetic oligonucleotide
aaagcugguacagaauaag

SEQ ID NO: 3119683 - RNA, 19 nt, Artificial Sequence
  Description of Artificial Sequence: Synthetic oligonucleotide
cugguacagaauaagguag

SEQ ID NO: 3119684 - RNA, 19 nt, Artificial Sequence
  Description of Artificial Sequence: Synthetic oligonucleotide
ugguaguaaaagcugguac

SEQ ID NO: 3119685 - RNA, 19 nt, Artificial Sequence
  Description of Artificial Sequence: Synthetic oligonucleotide
ggguaauuaaacaagagac

SEQ ID NO: 3119686 - RNA, 19 nt, Artificial Sequence
  Description of Artificial Sequence: Synthetic oligonucleotide
aaagccaaggcaagccagc

SEQ ID NO: 3119687 - RNA, 19 nt, Artificial Sequence
  Description of Artificial Sequence: Synthetic oligonucleotide
uaauuaaacaagagacauc

SEQ ID NO: 3119688 - RNA, 19 nt, Artificial Sequence
  Description of Artificial Sequence: Synthetic oligonucleotide
aagcuagcaguaauccugc

SEQ ID NO: 3119689 - RNA, 19 nt, Artificial Sequence
  Description of Artificial Sequence: Synthetic oligonucleotide
gacuggguaauuaaacaag

SEQ ID NO: 3119690 - RNA, 19 nt, Artificial Sequence
  Description of Artificial Sequence: Synthetic oligonucleotide
gaugcuagugucuccacuc

SEQ ID NO: 3119691 - RNA, 19 nt, Artificial Sequence
  Description of Artificial Sequence: Synthetic oligonucleotide
uaagguaguuccagaagcu

SEQ ID NO: 3119692 - RNA, 19 nt, Artificial Sequence
  Description of Artificial Sequence: Synthetic oligonucleotide
guaguaaaagcugguacag

SEQ ID NO: 3119693 - RNA, 19 nt, Artificial Sequence
  Description of Artificial Sequence: Synthetic oligonucleotide
aagcugguacagaauaagg

SEQ ID NO: 3119694 - RNA, 19 nt, Artificial Sequence
  Description of Artificial Sequence: Synthetic oligonucleotide
aacagggccaggcugugca

SEQ ID NO: 3119695 - RNA, 19 nt, Artificial Sequence
  Description of Artificial Sequence: Synthetic oligonucleotide
acaaucuggaugcuagugu

SEQ ID NO: 3119696 - RNA, 19 nt, Artificial Sequence
  Description of Artificial Sequence: Synthetic oligonucleotide
gaauaagguaguuccagaa

SEQ ID NO: 3119697 - RNA, 19 nt, Artificial Sequence
  Description of Artificial Sequence: Synthetic oligonucleotide
uguuggccuugucaaagag

SEQ ID NO: 3119698 - RNA, 19 nt, Artificial Sequence
  Description of Artificial Sequence: Synthetic oligonucleotide
cuagcaguaauccugccca

SEQ ID NO: 3119699 - RNA, 19 nt, Artificial Sequence
  Description of Artificial Sequence: Synthetic oligonucleotide
agaauaagguaguuccaga

SEQ ID NO: 3119700 - RNA, 19 nt, Artificial Sequence
  Description of Artificial Sequence: Synthetic oligonucleotide
cuggguaauuaaacaagag

SEQ ID NO: 3119701 - RNA, 19 nt, Artificial Sequence
  Description of Artificial Sequence: Synthetic oligonucleotide
aagccagcccaagaugagc

SEQ ID NO: 3119702 - RNA, 19 nt, Artificial Sequence
  Description of Artificial Sequence: Synthetic oligonucleotide
aagccaaggcaagccagcc

SEQ ID NO: 3119703 - RNA, 19 nt, Artificial Sequence
  Description of Artificial Sequence: Synthetic oligonucleotide
accgcuaacagggccaggc

SEQ ID NO: 3119704 - RNA, 19 nt, Artificial Sequence
  Description of Artificial Sequence: Synthetic oligonucleotide
cuagugucuccacucagag

SEQ ID NO: 3119705 - RNA, 19 nt, Artificial Sequence
  Description of Artificial Sequence: Synthetic oligonucleotide
cagacuuccuccaacagga

SEQ ID NO: 3119706 - RNA, 19 nt, Artificial Sequence
  Description of Artificial Sequence: Synthetic oligonucleotide
ggacccacaaucuggaugc

SEQ ID NO: 3119707 - RNA, 19 nt, Artificial Sequence
  Description of Artificial Sequence: Synthetic oligonucleotide
ugguacagaauaagguagu

SEQ ID NO: 3119708 - RNA, 19 nt, Artificial Sequence
  Description of Artificial Sequence: Synthetic oligonucleotide
gguaguaaaagcugguaca

SEQ ID NO: 3119709 - RNA, 19 nt, Artificial Sequence
  Description of Artificial Sequence: Synthetic oligonucleotide
caaucuggaugcuaguguc

SEQ ID NO: 3119710 - RNA, 19 nt, Artificial Sequence
  Description of Artificial Sequence: Synthetic oligonucleotide
aggacccacaaucuggaug

SEQ ID NO: 3119711 - RNA, 19 nt, Artificial Sequence
  Description of Artificial Sequence: Synthetic oligonucleotide
cagaauaagguaguuccag

SEQ ID NO: 3119712 - RNA, 19 nt, Artificial Sequence
  Description of Artificial Sequence: Synthetic oligonucleotide
augggguaccgcuaacagg

SEQ ID NO: 3119713 - RNA, 19 nt, Artificial Sequence
  Description of Artificial Sequence: Synthetic oligonucleotide
uaauccugcccagaggggc

SEQ ID NO: 3119714 - RNA, 19 nt, Artificial Sequence
  Description of Artificial Sequence: Synthetic oligonucleotide
ugagcagacuuccuccaac

SEQ ID NO: 3119715 - RNA, 19 nt, Artificial Sequence
  Description of Artificial Sequence: Synthetic oligonucleotide
cagaagcuagcaguaaucc

SEQ ID NO: 3119716 - RNA, 19 nt, Artificial Sequence
  Description of Artificial Sequence: Synthetic oligonucleotide
aaguggugcuuguuggccu

SEQ ID NO: 3119717 - RNA, 19 nt, Artificial Sequence
  Description of Artificial Sequence: Synthetic oligonucleotide
agaagcuagcaguaauccu

SEQ ID NO: 3119718 - RNA, 19 nt, Artificial Sequence
  Description of Artificial Sequence: Synthetic oligonucleotide
uaguuccagaagcuagcag

SEQ ID NO: 3119719 - RNA, 19 nt, Artificial Sequence
  Description of Artificial Sequence: Synthetic oligonucleotide
uccagaagcuagcaguaau

SEQ ID NO: 3119720 - RNA, 19 nt, Artificial Sequence
  Description of Artificial Sequence: Synthetic oligonucleotide
aaggcaagccagcccaaga

SEQ ID NO: 3119721 - RNA, 19 nt, Artificial Sequence
  Description of Artificial Sequence: Synthetic oligonucleotide
ugcuagugucuccacucag

SEQ ID NO: 3119722 - RNA, 19 nt, Artificial Sequence
  Description of Artificial Sequence: Synthetic oligonucleotide
ugcaaugggguaccgcuaa

SEQ ID NO: 3119723 - RNA, 19 nt, Artificial Sequence
  Description of Artificial Sequence: Synthetic oligonucleotide
aaaagcccgggacugggua

SEQ ID NO: 3119724 - RNA, 19 nt, Artificial Sequence
  Description of Artificial Sequence: Synthetic oligonucleotide
agaaaagcccgggacuggg

SEQ ID NO: 3119725 - RNA, 19 nt, Artificial Sequence
  Description of Artificial Sequence: Synthetic oligonucleotide
acuggguaauuaaacaaga

SEQ ID NO: 3119726 - RNA, 19 nt, Artificial Sequence
  Description of Artificial Sequence: Synthetic oligonucleotide
agccaaggcaagccagccc

SEQ ID NO: 3119727 - RNA, 19 nt, Artificial Sequence
  Description of Artificial Sequence: Synthetic oligonucleotide
aucuggaugcuagugucuc

SEQ ID NO: 3119728 - RNA, 19 nt, Artificial Sequence
  Description of Artificial Sequence: Synthetic oligonucleotide
aaaagcugguacagaauaa

SEQ ID NO: 3119729 - RNA, 19 nt, Artificial Sequence
  Description of Artificial Sequence: Synthetic oligonucleotide
gcagacuuccuccaacagg

SEQ ID NO: 3119730 - RNA, 19 nt, Artificial Sequence
  Description of Artificial Sequence: Synthetic oligonucleotide
gguaauuaaacaagagaca

SEQ ID NO: 3119731 - RNA, 19 nt, Artificial Sequence
  Description of Artificial Sequence: Synthetic oligonucleotide
cuuucugcaaugggguacc

SEQ ID NO: 3119732 - RNA, 19 nt, Artificial Sequence
  Description of Artificial Sequence: Synthetic oligonucleotide
agguaguuccagaagcuag

SEQ ID NO: 3119733 - RNA, 19 nt, Artificial Sequence
  Description of Artificial Sequence: Synthetic oligonucleotide
gaugagcagacuuccucca

SEQ ID NO: 3119734 - RNA, 19 nt, Artificial Sequence
  Description of Artificial Sequence: Synthetic oligonucleotide
agcugguacagaauaaggu

SEQ ID NO: 3119735 - RNA, 19 nt, Artificial Sequence
  Description of Artificial Sequence: Synthetic oligonucleotide
uccuccaacaggacccaca

SEQ ID NO: 3119736 - RNA, 19 nt, Artificial Sequence
  Description of Artificial Sequence: Synthetic oligonucleotide
agcagacuuccuccaacag

SEQ ID NO: 3119737 - RNA, 19 nt, Artificial Sequence
  Description of Artificial Sequence: Synthetic oligonucleotide
aggggcuuucugcaauggg

SEQ ID NO: 3119738 - RNA, 19 nt, Artificial Sequence
  Description of Artificial Sequence: Synthetic oligonucleotide
ucuggaugcuagugucucc

SEQ ID NO: 3119739 - RNA, 19 nt, Artificial Sequence
  Description of Artificial Sequence: Synthetic oligonucleotide
agcuagcaguaauccugcc

SEQ ID NO: 3119740 - RNA, 19 nt, Artificial Sequence
  Description of Artificial Sequence: Synthetic oligonucleotide
caguaauccugcccagagg

SEQ ID NO: 3119741 - RNA, 19 nt, Artificial Sequence
  Description of Artificial Sequence: Synthetic oligonucleotide
ggggcuuucugcaaugggg

SEQ ID NO: 3119742 - RNA, 19 nt, Artificial Sequence
  Description of Artificial Sequence: Synthetic oligonucleotide
aaagcccgggacuggguaa

SEQ ID NO: 3119743 - RNA, 19 nt, Artificial Sequence
  Description of Artificial Sequence: Synthetic oligonucleotide
gcaguaauccugcccagag

SEQ ID NO: 3119744 - RNA, 19 nt, Artificial Sequence
  Description of Artificial Sequence: Synthetic oligonucleotide
aaucuggaugcuagugucu

SEQ ID NO: 3119745 - RNA, 19 nt, Artificial Sequence
  Description of Artificial Sequence: Synthetic oligonucleotide
uaguaaaagcugguacaga

SEQ ID NO: 3119746 - RNA, 19 nt, Artificial Sequence
  Description of Artificial Sequence: Synthetic oligonucleotide
cacaaucuggaugcuagug

SEQ ID NO: 3119747 - RNA, 19 nt, Artificial Sequence
  Description of Artificial Sequence: Synthetic oligonucleotide
cccacaaucuggaugcuag

SEQ ID NO: 3119748 - RNA, 19 nt, Artificial Sequence
  Description of Artificial Sequence: Synthetic oligonucleotide
uagugucuccacucagagc

SEQ ID NO: 3119749 - RNA, 19 nt, Artificial Sequence
  Description of Artificial Sequence: Synthetic oligonucleotide
guacagaauaagguaguuc

SEQ ID NO: 3119750 - RNA, 19 nt, Artificial Sequence
  Description of Artificial Sequence: Synthetic oligonucleotide
gagcagacuuccuccaaca

SEQ ID NO: 3119751 - RNA, 19 nt, Artificial Sequence
  Description of Artificial Sequence: Synthetic oligonucleotide
gcuagcaguaauccugccc

SEQ ID NO: 3119752 - RNA, 19 nt, Artificial Sequence
  Description of Artificial Sequence: Synthetic oligonucleotide
agaggggcuuucugcaaug

SEQ ID NO: 3119753 - RNA, 19 nt, Artificial Sequence
  Description of Artificial Sequence: Synthetic oligonucleotide
aagguaguuccagaagcua

SEQ ID NO: 3119754 - RNA, 19 nt, Artificial Sequence
  Description of Artificial Sequence: Synthetic oligonucleotide
caacaggacccacaaucug

SEQ ID NO: 3119755 - RNA, 19 nt, Artificial Sequence
  Description of Artificial Sequence: Synthetic oligonucleotide
gggacuggguaauuaaaca

SEQ ID NO: 3119756 - RNA, 19 nt, Artificial Sequence
  Description of Artificial Sequence: Synthetic oligonucleotide
gguaguuccagaagcuagc

SEQ ID NO: 3119757 - RNA, 19 nt, Artificial Sequence
  Description of Artificial Sequence: Synthetic oligonucleotide
ucagagccugguaguaaaa

SEQ ID NO: 3119758 - RNA, 19 nt, Artificial Sequence
  Description of Artificial Sequence: Synthetic oligonucleotide
gcugguacagaauaaggua

SEQ ID NO: 3119759 - RNA, 19 nt, Artificial Sequence
  Description of Artificial Sequence: Synthetic oligonucleotide
ggacuggguaauuaaacaa

SEQ ID NO: 3119760 - RNA, 19 nt, Artificial Sequence
  Description of Artificial Sequence: Synthetic oligonucleotide
cagagccugguaguaaaag

SEQ ID NO: 3119761 - RNA, 19 nt, Artificial Sequence
  Description of Artificial Sequence: Synthetic oligonucleotide
augcuagugucuccacuca

SEQ ID NO: 3119762 - RNA, 19 nt, Artificial Sequence
  Description of Artificial Sequence: Synthetic oligonucleotide
guaauccugcccagagggg

SEQ ID NO: 3119763 - RNA, 19 nt, Artificial Sequence
  Description of Artificial Sequence: Synthetic oligonucleotide
acagaauaagguaguucca

SEQ ID NO: 3119764 - RNA, 19 nt, Artificial Sequence
  Description of Artificial Sequence: Synthetic oligonucleotide
agccugguaguaaaagcug

SEQ ID NO: 3119765 - RNA, 19 nt, Artificial Sequence
  Description of Artificial Sequence: Synthetic oligonucleotide
ccaagaugagcagacuucc

SEQ ID NO: 3119766 - RNA, 19 nt, Artificial Sequence
  Description of Artificial Sequence: Synthetic oligonucleotide
aauccugcccagaggggcu

SEQ ID NO: 3119767 - RNA, 19 nt, Artificial Sequence
  Description of Artificial Sequence: Synthetic oligonucleotide
gaggggcuuucugcaaugg

SEQ ID NO: 3119768 - RNA, 19 nt, Artificial Sequence
  Description of Artificial Sequence: Synthetic oligonucleotide
ugcccagaggggcuuucug

SEQ ID NO: 3119769 - RNA, 19 nt, Artificial Sequence
  Description of Artificial Sequence: Synthetic oligonucleotide
uucugcaaugggguaccgc

SEQ ID NO: 3119770 - RNA, 19 nt, Artificial Sequence
  Description of Artificial Sequence: Synthetic oligonucleotide
gccugguaguaaaagcugg

SEQ ID NO: 3119771 - RNA, 19 nt, Artificial Sequence
  Description of Artificial Sequence: Synthetic oligonucleotide
gccaaggcaagccagccca

SEQ ID NO: 3119772 - RNA, 19 nt, Artificial Sequence
  Description of Artificial Sequence: Synthetic oligonucleotide
acaggacccacaaucugga

SEQ ID NO: 3119773 - RNA, 19 nt, Artificial Sequence
  Description of Artificial Sequence: Synthetic oligonucleotide
ccagaagcuagcaguaauc

SEQ ID NO: 3119774 - RNA, 19 nt, Artificial Sequence
  Description of Artificial Sequence: Synthetic oligonucleotide
cagaaaagcccgggacugg

SEQ ID NO: 3119775 - RNA, 19 nt, Artificial Sequence
  Description of Artificial Sequence: Synthetic oligonucleotide
guaguuccagaagcuagca

SEQ ID NO: 3119776 - RNA, 19 nt, Artificial Sequence
  Description of Artificial Sequence: Synthetic oligonucleotide
cccaagaugagcagacuuc

SEQ ID NO: 3119777 - RNA, 19 nt, Artificial Sequence
  Description of Artificial Sequence: Synthetic oligonucleotide
agccagcccaagaugagca

SEQ ID NO: 3119778 - RNA, 19 nt, Artificial Sequence
  Description of Artificial Sequence: Synthetic oligonucleotide
uggaugcuagugucuccac

SEQ ID NO: 3119779 - RNA, 19 nt, Artificial Sequence
  Description of Artificial Sequence: Synthetic oligonucleotide
cuggaugcuagugucucca

SEQ ID NO: 3119780 - RNA, 19 nt, Artificial Sequence
  Description of Artificial Sequence: Synthetic oligonucleotide
augagcagacuuccuccaa

SEQ ID NO: 3119781 - RNA, 19 nt, Artificial Sequence
  Description of Artificial Sequence: Synthetic oligonucleotide
aguggugcuuguuggccuu

SEQ ID NO: 3119782 - RNA, 19 nt, Artificial Sequence
  Description of Artificial Sequence: Synthetic oligonucleotide
auuaaacaagagacaucaa

SEQ ID NO: 3119783 - RNA, 19 nt, Artificial Sequence
  Description of Artificial Sequence: Synthetic oligonucleotide
uuccagaagcuagcaguaa

SEQ ID NO: 3119784 - RNA, 19 nt, Artificial Sequence
  Description of Artificial Sequence: Synthetic oligonucleotide
gcuuucugcaaugggguac

SEQ ID NO: 3119785 - RNA, 19 nt, Artificial Sequence
  Description of Artificial Sequence: Synthetic oligonucleotide
guaccgcuaacagggccag

SEQ ID NO: 3119786 - RNA, 19 nt, Artificial Sequence
  Description of Artificial Sequence: Synthetic oligonucleotide
agacuuccuccaacaggac

SEQ ID NO: 3119787 - RNA, 19 nt, Artificial Sequence
  Description of Artificial Sequence: Synthetic oligonucleotide
guuccagaagcuagcagua

SEQ ID NO: 3119788 - RNA, 19 nt, Artificial Sequence
  Description of Artificial Sequence: Synthetic oligonucleotide
caaggcaagccagcccaag

SEQ ID NO: 3119789 - RNA, 19 nt, Artificial Sequence
  Description of Artificial Sequence: Synthetic oligonucleotide
caaugggguaccgcuaaca

SEQ ID NO: 3119790 - RNA, 19 nt, Artificial Sequence
  Description of Artificial Sequence: Synthetic oligonucleotide
ggguaccgcuaacagggcc

SEQ ID NO: 3119791 - RNA, 19 nt, Artificial Sequence
  Description of Artificial Sequence: Synthetic oligonucleotide
gguaccgcuaacagggcca

SEQ ID NO: 3119792 - RNA, 19 nt, Artificial Sequence
  Description of Artificial Sequence: Synthetic oligonucleotide
gucuccacucagagccugg

SEQ ID NO: 3119793 - RNA, 19 nt, Artificial Sequence
  Description of Artificial Sequence: Synthetic oligonucleotide
uaacagggccaggcugugc

SEQ ID NO: 3119794 - RNA, 19 nt, Artificial Sequence
  Description of Artificial Sequence: Synthetic oligonucleotide
cuaacagggccaggcugug

SEQ ID NO: 3119795 - RNA, 19 nt, Artificial Sequence
  Description of Artificial Sequence: Synthetic oligonucleotide
acucagagccugguaguaa

SEQ ID NO: 3119796 - RNA, 19 nt, Artificial Sequence
  Description of Artificial Sequence: Synthetic oligonucleotide
aagcccgggacuggguaau

SEQ ID NO: 3119797 - RNA, 19 nt, Artificial Sequence
  Description of Artificial Sequence: Synthetic oligonucleotide
cgggacuggguaauuaaac

SEQ ID NO: 3119798 - RNA, 19 nt, Artificial Sequence
  Description of Artificial Sequence: Synthetic oligonucleotide
agggccaggcugugcaaaa

SEQ ID NO: 3119799 - RNA, 19 nt, Artificial Sequence
  Description of Artificial Sequence: Synthetic oligonucleotide
guaaaagcugguacagaau

SEQ ID NO: 3119800 - RNA, 19 nt, Artificial Sequence
  Description of Artificial Sequence: Synthetic oligonucleotide
cugguaguaaaagcuggua

SEQ ID NO: 3119801 - RNA, 19 nt, Artificial Sequence
  Description of Artificial Sequence: Synthetic oligonucleotide
gcuagugucuccacucaga

SEQ ID NO: 3119802 - RNA, 19 nt, Artificial Sequence
  Description of Artificial Sequence: Synthetic oligonucleotide
caagaugagcagacuuccu

SEQ ID NO: 3119803 - RNA, 19 nt, Artificial Sequence
  Description of Artificial Sequence: Synthetic oligonucleotide
uaccgcuaacagggccagg

SEQ ID NO: 3119804 - RNA, 19 nt, Artificial Sequence
  Description of Artificial Sequence: Synthetic oligonucleotide
agcccaagaugagcagacu

SEQ ID NO: 3119805 - RNA, 19 nt, Artificial Sequence
  Description of Artificial Sequence: Synthetic oligonucleotide
gccagcccaagaugagcag

SEQ ID NO: 3119806 - RNA, 19 nt, Artificial Sequence
  Description of Artificial Sequence: Synthetic oligonucleotide
acagggccaggcugugcaa

SEQ ID NO: 3119807 - RNA, 19 nt, Artificial Sequence
  Description of Artificial Sequence: Synthetic oligonucleotide
ggaugcuagugucuccacu

SEQ ID NO: 3119808 - RNA, 19 nt, Artificial Sequence
  Description of Artificial Sequence: Synthetic oligonucleotide
cuuccuccaacaggaccca

SEQ ID NO: 3119809 - RNA, 19 nt, Artificial Sequence
  Description of Artificial Sequence: Synthetic oligonucleotide
ccaacaggacccacaaucu

SEQ ID NO: 3119810 - RNA, 19 nt, Artificial Sequence
  Description of Artificial Sequence: Synthetic oligonucleotide
cgcuaacagggccaggcug

SEQ ID NO: 3119811 - RNA, 19 nt, Artificial Sequence
  Description of Artificial Sequence: Synthetic oligonucleotide
uuccuccaacaggacccac

SEQ ID NO: 3119812 - RNA, 19 nt, Artificial Sequence
  Description of Artificial Sequence: Synthetic oligonucleotide
gaaaagcccgggacugggu

SEQ ID NO: 3119813 - RNA, 19 nt, Artificial Sequence
  Description of Artificial Sequence: Synthetic oligonucleotide
gcaaugggguaccgcuaac

SEQ ID NO: 3119814 - RNA, 19 nt, Artificial Sequence
  Description of Artificial Sequence: Synthetic oligonucleotide
acccacaaucuggaugcua

SEQ ID NO: 3119815 - RNA, 19 nt, Artificial Sequence
  Description of Artificial Sequence: Synthetic oligonucleotide
ccuccaacaggacccacaa

SEQ ID NO: 3119816 - RNA, 19 nt, Artificial Sequence
  Description of Artificial Sequence: Synthetic oligonucleotide
gggcuuucugcaauggggu

SEQ ID NO: 3119817 - RNA, 19 nt, Artificial Sequence
  Description of Artificial Sequence: Synthetic oligonucleotide
ggcuuucugcaauggggua

SEQ ID NO: 3119818 - RNA, 19 nt, Artificial Sequence
  Description of Artificial Sequence: Synthetic oligonucleotide
cacucagagccugguagua

SEQ ID NO: 3119819 - RNA, 19 nt, Artificial Sequence
  Description of Artificial Sequence: Synthetic oligonucleotide
ccugguaguaaaagcuggu

SEQ ID NO: 3119820 - RNA, 19 nt, Artificial Sequence
  Description of Artificial Sequence: Synthetic oligonucleotide
cagaggggcuuucugcaau

SEQ ID NO: 3119821 - RNA, 19 nt, Artificial Sequence
  Description of Artificial Sequence: Synthetic oligonucleotide
gguacagaauaagguaguu

SEQ ID NO: 3119822 - RNA, 19 nt, Artificial Sequence
  Description of Artificial Sequence: Synthetic oligonucleotide
gcccaagaugagcagacuu

SEQ ID NO: 3119823 - RNA, 19 nt, Artificial Sequence
  Description of Artificial Sequence: Synthetic oligonucleotide
cuccacucagagccuggua

SEQ ID NO: 3119824 - RNA, 19 nt, Artificial Sequence
  Description of Artificial Sequence: Synthetic oligonucleotide
cccgggacuggguaauuaa

SEQ ID NO: 3119825 - RNA, 19 nt, Artificial Sequence
  Description of Artificial Sequence: Synthetic oligonucleotide
ccgggacuggguaauuaaa

SEQ ID NO: 3119826 - RNA, 19 nt, Artificial Sequence
  Description of Artificial Sequence: Synthetic oligonucleotide
gggguaccgcuaacagggc

SEQ ID NO: 3119827 - RNA, 19 nt, Artificial Sequence
  Description of Artificial Sequence: Synthetic oligonucleotide
cagggccaggcugugcaaa

SEQ ID NO: 3119828 - RNA, 19 nt, Artificial Sequence
  Description of Artificial Sequence: Synthetic oligonucleotide
auccugcccagaggggcuu

SEQ ID NO: 3119829 - RNA, 19 nt, Artificial Sequence
  Description of Artificial Sequence: Synthetic oligonucleotide
uccugcccagaggggcuuu

SEQ ID NO: 3119830 - RNA, 19 nt, Artificial Sequence
  Description of Artificial Sequence: Synthetic oligonucleotide
gacccacaaucuggaugcu

SEQ ID NO: 3119831 - RNA, 19 nt, Artificial Sequence
  Description of Artificial Sequence: Synthetic oligonucleotide
caggacccacaaucuggau

SEQ ID NO: 3119832 - RNA, 19 nt, Artificial Sequence
  Description of Artificial Sequence: Synthetic oligonucleotide
cuccaacaggacccacaau

SEQ ID NO: 3119833 - RNA, 19 nt, Artificial Sequence
  Description of Artificial Sequence: Synthetic oligonucleotide
ccacaaucuggaugcuagu

SEQ ID NO: 3119834 - RNA, 19 nt, Artificial Sequence
  Description of Artificial Sequence: Synthetic oligonucleotide
ccaaggcaagccagcccaa

SEQ ID NO: 3119835 - RNA, 19 nt, Artificial Sequence
  Description of Artificial Sequence: Synthetic oligonucleotide
agcccgggacuggguaauu

SEQ ID NO: 3119836 - RNA, 19 nt, Artificial Sequence
  Description of Artificial Sequence: Synthetic oligonucleotide
gcccgggacuggguaauua

SEQ ID NO: 3119837 - RNA, 19 nt, Artificial Sequence
  Description of Artificial Sequence: Synthetic oligonucleotide
ccgcuaacagggccaggcu

SEQ ID NO: 3119838 - RNA, 19 nt, Artificial Sequence
  Description of Artificial Sequence: Synthetic oligonucleotide
gauaauuccaaacugaccg

SEQ ID NO: 3119839 - RNA, 19 nt, Artificial Sequence
  Description of Artificial Sequence: Synthetic oligonucleotide
uuuaucuaaaacuacaucu

SEQ ID NO: 3119840 - RNA, 19 nt, Artificial Sequence
  Description of Artificial Sequence: Synthetic oligonucleotide
aauacuucagucuuuuauc

SEQ ID NO: 3119841 - RNA, 19 nt, Artificial Sequence
  Description of Artificial Sequence: Synthetic oligonucleotide
uuugugaauuacuacaucg

SEQ ID NO: 3119842 - RNA, 19 nt, Artificial Sequence
  Description of Artificial Sequence: Synthetic oligonucleotide
uaaaacuacaucuuccugg

SEQ ID NO: 3119843 - RNA, 19 nt, Artificial Sequence
  Description of Artificial Sequence: Synthetic oligonucleotide
aacacugauaguauggucc

SEQ ID NO: 3119844 - RNA, 19 nt, Artificial Sequence
  Description of Artificial Sequence: Synthetic oligonucleotide
gauacuggaauccuuacag

SEQ ID NO: 3119845 - RNA, 19 nt, Artificial Sequence
  Description of Artificial Sequence: Synthetic oligonucleotide
auucuguggagauugauac

SEQ ID NO: 3119846 - RNA, 19 nt, Artificial Sequence
  Description of Artificial Sequence: Synthetic oligonucleotide
uuuguugucaucuuuguga

SEQ ID NO: 3119847 - RNA, 19 nt, Artificial Sequence
  Description of Artificial Sequence: Synthetic oligonucleotide
ucuuuuaucuaaaacuaca

SEQ ID NO: 3119848 - RNA, 19 nt, Artificial Sequence
  Description of Artificial Sequence: Synthetic oligonucleotide
auccuuacaggauaauucc

SEQ ID NO: 3119849 - RNA, 19 nt, Artificial Sequence
  Description of Artificial Sequence: Synthetic oligonucleotide
aauccuuacaggauaauuc

SEQ ID NO: 3119850 - RNA, 19 nt, Artificial Sequence
  Description of Artificial Sequence: Synthetic oligonucleotide
ucuuugccaacacugauag

SEQ ID NO: 3119851 - RNA, 19 nt, Artificial Sequence
  Description of Artificial Sequence: Synthetic oligonucleotide
aacuacaucuuccugguca

SEQ ID NO: 3119852 - RNA, 19 nt, Artificial Sequence
  Description of Artificial Sequence: Synthetic oligonucleotide
ugaauuacuacaucgcugu

SEQ ID NO: 3119853 - RNA, 19 nt, Artificial Sequence
  Description of Artificial Sequence: Synthetic oligonucleotide
  modified_base (14)..(14): a, c, u, g, unknown or other
uguccaguaugganaaggg

SEQ ID NO: 3119854 - RNA, 19 nt, Artificial Sequence
  Description of Artificial Sequence: Synthetic oligonucleotide
aaaacuacaucuuccuggu

SEQ ID NO: 3119855 - RNA, 19 nt, Artificial Sequence
  Description of Artificial Sequence: Synthetic oligonucleotide
uacaggauaauuccaaacu

SEQ ID NO: 3119856 - RNA, 19 nt, Artificial Sequence
  Description of Artificial Sequence: Synthetic oligonucleotide
aucuuugugaauuacuaca

SEQ ID NO: 3119857 - RNA, 19 nt, Artificial Sequence
  Description of Artificial Sequence: Synthetic oligonucleotide
uaauacuucagucuuuuau

SEQ ID NO: 3119858 - RNA, 19 nt, Artificial Sequence
  Description of Artificial Sequence: Synthetic oligonucleotide
aacaucuuugccaacacug

SEQ ID NO: 3119859 - RNA, 19 nt, Artificial Sequence
  Description of Artificial Sequence: Synthetic oligonucleotide
ucuaaaacuacaucuuccu

SEQ ID NO: 3119860 - RNA, 19 nt, Artificial Sequence
  Description of Artificial Sequence: Synthetic oligonucleotide
uccaccauuguccaguaug

SEQ ID NO: 3119861 - RNA, 19 nt, Artificial Sequence
  Description of Artificial Sequence: Synthetic oligonucleotide
uuuuaucuaaaacuacauc

SEQ ID NO: 3119862 - RNA, 19 nt, Artificial Sequence
  Description of Artificial Sequence: Synthetic oligonucleotide
ugugaauuacuacaucgcu

SEQ ID NO: 3119863 - RNA, 19 nt, Artificial Sequence
  Description of Artificial Sequence: Synthetic oligonucleotide
uuuauauccaugccauucu

SEQ ID NO: 3119864 - RNA, 19 nt, Artificial Sequence
  Description of Artificial Sequence: Synthetic oligonucleotide
uuugccaacacugauagua

SEQ ID NO: 3119865 - RNA, 19 nt, Artificial Sequence
  Description of Artificial Sequence: Synthetic oligonucleotide
aucuaaaacuacaucuucc

SEQ ID NO: 3119866 - RNA, 19 nt, Artificial Sequence
  Description of Artificial Sequence: Synthetic oligonucleotide
uugugaauuacuacaucgc

SEQ ID NO: 3119867 - RNA, 19 nt, Artificial Sequence
  Description of Artificial Sequence: Synthetic oligonucleotide
ucuguaauacuucagucuu

SEQ ID NO: 3119868 - RNA, 19 nt, Artificial Sequence
  Description of Artificial Sequence: Synthetic oligonucleotide
uacuacaucgcuguuaaca

SEQ ID NO: 3119869 - RNA, 19 nt, Artificial Sequence
  Description of Artificial Sequence: Synthetic oligonucleotide
uuuuauauccaugccauuc

SEQ ID NO: 3119870 - RNA, 19 nt, Artificial Sequence
  Description of Artificial Sequence: Synthetic oligonucleotide
uuaucuaaaacuacaucuu

SEQ ID NO: 3119871 - RNA, 19 nt, Artificial Sequence
  Description of Artificial Sequence: Synthetic oligonucleotide
ucuguggagauugauacug

SEQ ID NO: 3119872 - RNA, 19 nt, Artificial Sequence
  Description of Artificial Sequence: Synthetic oligonucleotide
gauggcauugucucgcucc

SEQ ID NO: 3119873 - RNA, 19 nt, Artificial Sequence
  Description of Artificial Sequence: Synthetic oligonucleotide
acaggauaauuccaaacug

SEQ ID NO: 3119874 - RNA, 19 nt, Artificial Sequence
  Description of Artificial Sequence: Synthetic oligonucleotide
ucucgcuccaccauugucc

SEQ ID NO: 3119875 - RNA, 19 nt, Artificial Sequence
  Description of Artificial Sequence: Synthetic oligonucleotide
  modified_base (15)..(15): a, c, u, g, unknown or other
uuguccaguaugganaagg

SEQ ID NO: 3119876 - RNA, 19 nt, Artificial Sequence
  Description of Artificial Sequence: Synthetic oligonucleotide
auuacuacaucgcuguuaa

SEQ ID NO: 3119877 - RNA, 19 nt, Artificial Sequence
  Description of Artificial Sequence: Synthetic oligonucleotide
ucaucuuugugaauuacua

SEQ ID NO: 3119878 - RNA, 19 nt, Artificial Sequence
  Description of Artificial Sequence: Synthetic oligonucleotide
aucuguaauacuucagucu

SEQ ID NO: 3119879 - RNA, 19 nt, Artificial Sequence
  Description of Artificial Sequence: Synthetic oligonucleotide
uaucuaaaacuacaucuuc

SEQ ID NO: 3119880 - RNA, 19 nt, Artificial Sequence
  Description of Artificial Sequence: Synthetic oligonucleotide
uacuggaauccuuacagga

SEQ ID NO: 3119881 - RNA, 19 nt, Artificial Sequence
  Description of Artificial Sequence: Synthetic oligonucleotide
aaacugaccgaggauaucu

SEQ ID NO: 3119882 - RNA, 19 nt, Artificial Sequence
  Description of Artificial Sequence: Synthetic oligonucleotide
auauccaugccauucugug

SEQ ID NO: 3119883 - RNA, 19 nt, Artificial Sequence
  Description of Artificial Sequence: Synthetic oligonucleotide
gagauugauacuggaaucc

SEQ ID NO: 3119884 - RNA, 19 nt, Artificial Sequence
  Description of Artificial Sequence: Synthetic oligonucleotide
ucuuugugaauuacuacau

SEQ ID NO: 3119885 - RNA, 19 nt, Artificial Sequence
  Description of Artificial Sequence: Synthetic oligonucleotide
uuacaggauaauuccaaac

SEQ ID NO: 3119886 - RNA, 19 nt, Artificial Sequence
  Description of Artificial Sequence: Synthetic oligonucleotide
aggauaauuccaaacugac

SEQ ID NO: 3119887 - RNA, 19 nt, Artificial Sequence
  Description of Artificial Sequence: Synthetic oligonucleotide
auacuucagucuuuuaucu

SEQ ID NO: 3119888 - RNA, 19 nt, Artificial Sequence
  Description of Artificial Sequence: Synthetic oligonucleotide
uauccaugccauucugugg

SEQ ID NO: 3119889 - RNA, 19 nt, Artificial Sequence
  Description of Artificial Sequence: Synthetic oligonucleotide
uaucuguaauacuucaguc

SEQ ID NO: 3119890 - RNA, 19 nt, Artificial Sequence
  Description of Artificial Sequence: Synthetic oligonucleotide
uuauauccaugccauucug

SEQ ID NO: 3119891 - RNA, 19 nt, Artificial Sequence
  Description of Artificial Sequence: Synthetic oligonucleotide
acuucagucuuuuaucuaa

SEQ ID NO: 3119892 - RNA, 19 nt, Artificial Sequence
  Description of Artificial Sequence: Synthetic oligonucleotide
ugauacuggaauccuuaca

SEQ ID NO: 3119893 - RNA, 19 nt, Artificial Sequence
  Description of Artificial Sequence: Synthetic oligonucleotide
auacuggaauccuuacagg

SEQ ID NO: 3119894 - RNA, 19 nt, Artificial Sequence
  Description of Artificial Sequence: Synthetic oligonucleotide
auuccaaacugaccgagga

SEQ ID NO: 3119895 - RNA, 19 nt, Artificial Sequence
  Description of Artificial Sequence: Synthetic oligonucleotide
acugauaguaugguccuuc

SEQ ID NO: 3119896 - RNA, 19 nt, Artificial Sequence
  Description of Artificial Sequence: Synthetic oligonucleotide
uaauuccaaacugaccgag

SEQ ID NO: 3119897 - RNA, 19 nt, Artificial Sequence
  Description of Artificial Sequence: Synthetic oligonucleotide
uauauccaugccauucugu

SEQ ID NO: 3119898 - RNA, 19 nt, Artificial Sequence
  Description of Artificial Sequence: Synthetic oligonucleotide
aauuccaaacugaccgagg

SEQ ID NO: 3119899 - RNA, 19 nt, Artificial Sequence
  Description of Artificial Sequence: Synthetic oligonucleotide
acuacaucgcuguuaacau

SEQ ID NO: 3119900 - RNA, 19 nt, Artificial Sequence
  Description of Artificial Sequence: Synthetic oligonucleotide
gcuguuaacaucuuugcca

SEQ ID NO: 3119901 - RNA, 19 nt, Artificial Sequence
  Description of Artificial Sequence: Synthetic oligonucleotide
ugccauucuguggagauug

SEQ ID NO: 3119902 - RNA, 19 nt, Artificial Sequence
  Description of Artificial Sequence: Synthetic oligonucleotide
caucuuugugaauuacuac

SEQ ID NO: 3119903 - RNA, 19 nt, Artificial Sequence
  Description of Artificial Sequence: Synthetic oligonucleotide
aauuacuacaucgcuguua

SEQ ID NO: 3119904 - RNA, 19 nt, Artificial Sequence
  Description of Artificial Sequence: Synthetic oligonucleotide
gaggggauggcauugucuc

SEQ ID NO: 3119905 - RNA, 19 nt, Artificial Sequence
  Description of Artificial Sequence: Synthetic oligonucleotide
uuguugucaucuuugugaa

SEQ ID NO: 3119906 - RNA, 19 nt, Artificial Sequence
  Description of Artificial Sequence: Synthetic oligonucleotide
ucgcuguuaacaucuuugc

SEQ ID NO: 3119907 - RNA, 19 nt, Artificial Sequence
  Description of Artificial Sequence: Synthetic oligonucleotide
auaauuccaaacugaccga

SEQ ID NO: 3119908 - RNA, 19 nt, Artificial Sequence
  Description of Artificial Sequence: Synthetic oligonucleotide
gauaguaugguccuucuuu

SEQ ID NO: 3119909 - RNA, 19 nt, Artificial Sequence
  Description of Artificial Sequence: Synthetic oligonucleotide
cuaaaacuacaucuuccug

SEQ ID NO: 3119910 - RNA, 19 nt, Artificial Sequence
  Description of Artificial Sequence: Synthetic oligonucleotide
uccuuacaggauaauucca

SEQ ID NO: 3119911 - RNA, 19 nt, Artificial Sequence
  Description of Artificial Sequence: Synthetic oligonucleotide
uguggagauugauacugga

SEQ ID NO: 3119912 - RNA, 19 nt, Artificial Sequence
  Description of Artificial Sequence: Synthetic oligonucleotide
guuaacaucuuugccaaca

SEQ ID NO: 3119913 - RNA, 19 nt, Artificial Sequence
  Description of Artificial Sequence: Synthetic oligonucleotide
agucuuuuaucuaaaacua

SEQ ID NO: 3119914 - RNA, 19 nt, Artificial Sequence
  Description of Artificial Sequence: Synthetic oligonucleotide
aucgcuguuaacaucuuug

SEQ ID NO: 3119915 - RNA, 19 nt, Artificial Sequence
  Description of Artificial Sequence: Synthetic oligonucleotide
aaacuacaucuuccugguc

SEQ ID NO: 3119916 - RNA, 19 nt, Artificial Sequence
  Description of Artificial Sequence: Synthetic oligonucleotide
uguaauacuucagucuuuu

SEQ ID NO: 3119917 - RNA, 19 nt, Artificial Sequence
  Description of Artificial Sequence: Synthetic oligonucleotide
gugaauuacuacaucgcug

SEQ ID NO: 3119918 - RNA, 19 nt, Artificial Sequence
  Description of Artificial Sequence: Synthetic oligonucleotide
aggauaucuguaauacuuc

SEQ ID NO: 3119919 - RNA, 19 nt, Artificial Sequence
  Description of Artificial Sequence: Synthetic oligonucleotide
  modified_base (19)..(19): a, c, u, g, unknown or other
accauuguccaguauggan

SEQ ID NO: 3119920 - RNA, 19 nt, Artificial Sequence
  Description of Artificial Sequence: Synthetic oligonucleotide
uccaaacugaccgaggaua

SEQ ID NO: 3119921 - RNA, 19 nt, Artificial Sequence
  Description of Artificial Sequence: Synthetic oligonucleotide
uaacaucuuugccaacacu

SEQ ID NO: 3119922 - RNA, 19 nt, Artificial Sequence
  Description of Artificial Sequence: Synthetic oligonucleotide
acacugauaguaugguccu

SEQ ID NO: 3119923 - RNA, 19 nt, Artificial Sequence
  Description of Artificial Sequence: Synthetic oligonucleotide
caggauaauuccaaacuga

SEQ ID NO: 3119924 - RNA, 19 nt, Artificial Sequence
  Description of Artificial Sequence: Synthetic oligonucleotide
uugauacuggaauccuuac

SEQ ID NO: 3119925 - RNA, 19 nt, Artificial Sequence
  Description of Artificial Sequence: Synthetic oligonucleotide
auaguaugguccuucuuuu

SEQ ID NO: 3119926 - RNA, 19 nt, Artificial Sequence
  Description of Artificial Sequence: Synthetic oligonucleotide
uggaauccuuacaggauaa

SEQ ID NO: 3119927 - RNA, 19 nt, Artificial Sequence
  Description of Artificial Sequence: Synthetic oligonucleotide
ugaccgaggauaucuguaa

SEQ ID NO: 3119928 - RNA, 19 nt, Artificial Sequence
  Description of Artificial Sequence: Synthetic oligonucleotide
cuuugugaauuacuacauc

SEQ ID NO: 3119929 - RNA, 19 nt, Artificial Sequence
  Description of Artificial Sequence: Synthetic oligonucleotide
uugucucgcuccaccauug

SEQ ID NO: 3119930 - RNA, 19 nt, Artificial Sequence
  Description of Artificial Sequence: Synthetic oligonucleotide
cuguggagauugauacugg

SEQ ID NO: 3119931 - RNA, 19 nt, Artificial Sequence
  Description of Artificial Sequence: Synthetic oligonucleotide
cuguuaacaucuuugccaa

SEQ ID NO: 3119932 - RNA, 19 nt, Artificial Sequence
  Description of Artificial Sequence: Synthetic oligonucleotide
  modified_base (13)..(13): a, c, u, g, unknown or other
guccaguaugganaagggg

SEQ ID NO: 3119933 - RNA, 19 nt, Artificial Sequence
  Description of Artificial Sequence: Synthetic oligonucleotide
ugccaacacugauaguaug

SEQ ID NO: 3119934 - RNA, 19 nt, Artificial Sequence
  Description of Artificial Sequence: Synthetic oligonucleotide
auugauacuggaauccuua

SEQ ID NO: 3119935 - RNA, 19 nt, Artificial Sequence
  Description of Artificial Sequence: Synthetic oligonucleotide
gaggauaucuguaauacuu

SEQ ID NO: 3119936 - RNA, 19 nt, Artificial Sequence
  Description of Artificial Sequence: Synthetic oligonucleotide
ggagauugauacuggaauc

SEQ ID NO: 3119937 - RNA, 19 nt, Artificial Sequence
  Description of Artificial Sequence: Synthetic oligonucleotide
uugccaacacugauaguau

SEQ ID NO: 3119938 - RNA, 19 nt, Artificial Sequence
  Description of Artificial Sequence: Synthetic oligonucleotide
gucuuuuaucuaaaacuac

SEQ ID NO: 3119939 - RNA, 19 nt, Artificial Sequence
  Description of Artificial Sequence: Synthetic oligonucleotide
agauugauacuggaauccu

SEQ ID NO: 3119940 - RNA, 19 nt, Artificial Sequence
  Description of Artificial Sequence: Synthetic oligonucleotide
acugaccgaggauaucugu

SEQ ID NO: 3119941 - RNA, 19 nt, Artificial Sequence
  Description of Artificial Sequence: Synthetic oligonucleotide
ggauaucuguaauacuuca

SEQ ID NO: 3119942 - RNA, 19 nt, Artificial Sequence
  Description of Artificial Sequence: Synthetic oligonucleotide
uucuguggagauugauacu

SEQ ID NO: 3119943 - RNA, 19 nt, Artificial Sequence
  Description of Artificial Sequence: Synthetic oligonucleotide
cuuuuaucuaaaacuacau

SEQ ID NO: 3119944 - RNA, 19 nt, Artificial Sequence
  Description of Artificial Sequence: Synthetic oligonucleotide
gccaacacugauaguaugg

SEQ ID NO: 3119945 - RNA, 19 nt, Artificial Sequence
  Description of Artificial Sequence: Synthetic oligonucleotide
aggggauggcauugucucg

SEQ ID NO: 3119946 - RNA, 19 nt, Artificial Sequence
  Description of Artificial Sequence: Synthetic oligonucleotide
ugucaucuuugugaauuac

SEQ ID NO: 3119947 - RNA, 19 nt, Artificial Sequence
  Description of Artificial Sequence: Synthetic oligonucleotide
caacacugauaguaugguc

SEQ ID NO: 3119948 - RNA, 19 nt, Artificial Sequence
  Description of Artificial Sequence: Synthetic oligonucleotide
cuuacaggauaauuccaaa

SEQ ID NO: 3119949 - RNA, 19 nt, Artificial Sequence
  Description of Artificial Sequence: Synthetic oligonucleotide
ccaccauuguccaguaugg

SEQ ID NO: 3119950 - RNA, 19 nt, Artificial Sequence
  Description of Artificial Sequence: Synthetic oligonucleotide
auugucucgcuccaccauu

SEQ ID NO: 3119951 - RNA, 19 nt, Artificial Sequence
  Description of Artificial Sequence: Synthetic oligonucleotide
cauucuguggagauugaua

SEQ ID NO: 3119952 - RNA, 19 nt, Artificial Sequence
  Description of Artificial Sequence: Synthetic oligonucleotide
ggauaauuccaaacugacc

SEQ ID NO: 3119953 - RNA, 19 nt, Artificial Sequence
  Description of Artificial Sequence: Synthetic oligonucleotide
uuccaaacugaccgaggau

SEQ ID NO: 3119954 - RNA, 19 nt, Artificial Sequence
  Description of Artificial Sequence: Synthetic oligonucleotide
uacuucagucuuuuaucua

SEQ ID NO: 3119955 - RNA, 19 nt, Artificial Sequence
  Description of Artificial Sequence: Synthetic oligonucleotide
cuacaucgcuguuaacauc

SEQ ID NO: 3119956 - RNA, 19 nt, Artificial Sequence
  Description of Artificial Sequence: Synthetic oligonucleotide
aguucuuuguugucaucuu

SEQ ID NO: 3119957 - RNA, 19 nt, Artificial Sequence
  Description of Artificial Sequence: Synthetic oligonucleotide
uugucaucuuugugaauua

SEQ ID NO: 3119958 - RNA, 19 nt, Artificial Sequence
  Description of Artificial Sequence: Synthetic oligonucleotide
ugauaguaugguccuucuu

SEQ ID NO: 3119959 - RNA, 19 nt, Artificial Sequence
  Description of Artificial Sequence: Synthetic oligonucleotide
  modified_base (17)..(17): a, c, u, g, unknown or other
cauuguccaguaugganaa

SEQ ID NO: 3119960 - RNA, 19 nt, Artificial Sequence
  Description of Artificial Sequence: Synthetic oligonucleotide
guugucaucuuugugaauu

SEQ ID NO: 3119961 - RNA, 19 nt, Artificial Sequence
  Description of Artificial Sequence: Synthetic oligonucleotide
acaucuuugccaacacuga

SEQ ID NO: 3119962 - RNA, 19 nt, Artificial Sequence
  Description of Artificial Sequence: Synthetic oligonucleotide
accgaggauaucuguaaua

SEQ ID NO: 3119963 - RNA, 19 nt, Artificial Sequence
  Description of Artificial Sequence: Synthetic oligonucleotide
uguuaacaucuuugccaac

SEQ ID NO: 3119964 - RNA, 19 nt, Artificial Sequence
  Description of Artificial Sequence: Synthetic oligonucleotide
aacugaccgaggauaucug

SEQ ID NO: 3119965 - RNA, 19 nt, Artificial Sequence
  Description of Artificial Sequence: Synthetic oligonucleotide
  modified_base (16)..(16): a, c, u, g, unknown or other
auuguccaguaugganaag

SEQ ID NO: 3119966 - RNA, 19 nt, Artificial Sequence
  Description of Artificial Sequence: Synthetic oligonucleotide
ggcauugucucgcuccacc

SEQ ID NO: 3119967 - RNA, 19 nt, Artificial Sequence
  Description of Artificial Sequence: Synthetic oligonucleotide
cuggaauccuuacaggaua

SEQ ID NO: 3119968 - RNA, 19 nt, Artificial Sequence
  Description of Artificial Sequence: Synthetic oligonucleotide
uccaugccauucuguggag

SEQ ID NO: 3119969 - RNA, 19 nt, Artificial Sequence
  Description of Artificial Sequence: Synthetic oligonucleotide
acuggaauccuuacaggau

SEQ ID NO: 3119970 - RNA, 19 nt, Artificial Sequence
  Description of Artificial Sequence: Synthetic oligonucleotide
ccgaggauaucuguaauac

SEQ ID NO: 3119971 - RNA, 19 nt, Artificial Sequence
  Description of Artificial Sequence: Synthetic oligonucleotide
  modified_base (18)..(18): a, c, u, g, unknown or other
ccauuguccaguauggana

SEQ ID NO: 3119972 - RNA, 19 nt, Artificial Sequence
  Description of Artificial Sequence: Synthetic oligonucleotide
cuucagucuuuuaucuaaa

SEQ ID NO: 3119973 - RNA, 19 nt, Artificial Sequence
  Description of Artificial Sequence: Synthetic oligonucleotide
uguugucaucuuugugaau

SEQ ID NO: 3119974 - RNA, 19 nt, Artificial Sequence
  Description of Artificial Sequence: Synthetic oligonucleotide
aucuuugccaacacugaua

SEQ ID NO: 3119975 - RNA, 19 nt, Artificial Sequence
  Description of Artificial Sequence: Synthetic oligonucleotide
gaauccuuacaggauaauu

SEQ ID NO: 3119976 - RNA, 19 nt, Artificial Sequence
  Description of Artificial Sequence: Synthetic oligonucleotide
cucgcuccaccauugucca

SEQ ID NO: 3119977 - RNA, 19 nt, Artificial Sequence
  Description of Artificial Sequence: Synthetic oligonucleotide
uuacuacaucgcuguuaac

SEQ ID NO: 3119978 - RNA, 19 nt, Artificial Sequence
  Description of Artificial Sequence: Synthetic oligonucleotide
cugaccgaggauaucugua

SEQ ID NO: 3119979 - RNA, 19 nt, Artificial Sequence
  Description of Artificial Sequence: Synthetic oligonucleotide
ggggauggcauugucucgc

SEQ ID NO: 3119980 - RNA, 19 nt, Artificial Sequence
  Description of Artificial Sequence: Synthetic oligonucleotide
guggagauugauacuggaa

SEQ ID NO: 3119981 - RNA, 19 nt, Artificial Sequence
  Description of Artificial Sequence: Synthetic oligonucleotide
ccuuacaggauaauuccaa

SEQ ID NO: 3119982 - RNA, 19 nt, Artificial Sequence
  Description of Artificial Sequence: Synthetic oligonucleotide
caguucuuuguugucaucu

SEQ ID NO: 3119983 - RNA, 19 nt, Artificial Sequence
  Description of Artificial Sequence: Synthetic oligonucleotide
caugccauucuguggagau

SEQ ID NO: 3119984 - RNA, 19 nt, Artificial Sequence
  Description of Artificial Sequence: Synthetic oligonucleotide
caaacugaccgaggauauc

SEQ ID NO: 3119985 - RNA, 19 nt, Artificial Sequence
  Description of Artificial Sequence: Synthetic oligonucleotide
guaauacuucagucuuuua

SEQ ID NO: 3119986 - RNA, 19 nt, Artificial Sequence
  Description of Artificial Sequence: Synthetic oligonucleotide
guucuuuguugucaucuuu

SEQ ID NO: 3119987 - RNA, 19 nt, Artificial Sequence
  Description of Artificial Sequence: Synthetic oligonucleotide
gauugauacuggaauccuu

SEQ ID NO: 3119988 - RNA, 19 nt, Artificial Sequence
  Description of Artificial Sequence: Synthetic oligonucleotide
gggccucaguucuuuguug

SEQ ID NO: 3119989 - RNA, 19 nt, Artificial Sequence
  Description of Artificial Sequence: Synthetic oligonucleotide
cgcuguuaacaucuuugcc

SEQ ID NO: 3119990 - RNA, 19 nt, Artificial Sequence
  Description of Artificial Sequence: Synthetic oligonucleotide
cugauaguaugguccuucu

SEQ ID NO: 3119991 - RNA, 19 nt, Artificial Sequence
  Description of Artificial Sequence: Synthetic oligonucleotide
gcauugucucgcuccacca

SEQ ID NO: 3119992 - RNA, 19 nt, Artificial Sequence
  Description of Artificial Sequence: Synthetic oligonucleotide
ucgcuccaccauuguccag

SEQ ID NO: 3119993 - RNA, 19 nt, Artificial Sequence
  Description of Artificial Sequence: Synthetic oligonucleotide
gaccgaggauaucuguaau

SEQ ID NO: 3119994 - RNA, 19 nt, Artificial Sequence
  Description of Artificial Sequence: Synthetic oligonucleotide
caucuuugccaacacugau

SEQ ID NO: 3119995 - RNA, 19 nt, Artificial Sequence
  Description of Artificial Sequence: Synthetic oligonucleotide
gaauuacuacaucgcuguu

SEQ ID NO: 3119996 - RNA, 19 nt, Artificial Sequence
  Description of Artificial Sequence: Synthetic oligonucleotide
ggccucaguucuuuguugu

SEQ ID NO: 3119997 - RNA, 19 nt, Artificial Sequence
  Description of Artificial Sequence: Synthetic oligonucleotide
ccucaguucuuuguuguca

SEQ ID NO: 3119998 - RNA, 19 nt, Artificial Sequence
  Description of Artificial Sequence: Synthetic oligonucleotide
cuguaauacuucagucuuu

SEQ ID NO: 3119999 - RNA, 19 nt, Artificial Sequence
  Description of Artificial Sequence: Synthetic oligonucleotide
caccauuguccaguaugga

SEQ ID NO: 3120000 - RNA, 19 nt, Artificial Sequence
  Description of Artificial Sequence: Synthetic oligonucleotide
augccauucuguggagauu

SEQ ID NO: 3120001 - RNA, 19 nt, Artificial Sequence
  Description of Artificial Sequence: Synthetic oligonucleotide
gccucaguucuuuguuguc

SEQ ID NO: 3120002 - RNA, 19 nt, Artificial Sequence
  Description of Artificial Sequence: Synthetic oligonucleotide
ggauggcauugucucgcuc

SEQ ID NO: 3120003 - RNA, 19 nt, Artificial Sequence
  Description of Artificial Sequence: Synthetic oligonucleotide
cauugucucgcuccaccau

SEQ ID NO: 3120004 - RNA, 19 nt, Artificial Sequence
  Description of Artificial Sequence: Synthetic oligonucleotide
ggaggggauggcauugucu

SEQ ID NO: 3120005 - RNA, 19 nt, Artificial Sequence
  Description of Artificial Sequence: Synthetic oligonucleotide
cuuugccaacacugauagu

SEQ ID NO: 3120006 - RNA, 19 nt, Artificial Sequence
  Description of Artificial Sequence: Synthetic oligonucleotide
acaucgcuguuaacaucuu

SEQ ID NO: 3120007 - RNA, 19 nt, Artificial Sequence
  Description of Artificial Sequence: Synthetic oligonucleotide
ccaaacugaccgaggauau

SEQ ID NO: 3120008 - RNA, 19 nt, Artificial Sequence
  Description of Artificial Sequence: Synthetic oligonucleotide
caucgcuguuaacaucuuu

SEQ ID NO: 3120009 - RNA, 19 nt, Artificial Sequence
  Description of Artificial Sequence: Synthetic oligonucleotide
ccaacacugauaguauggu

SEQ ID NO: 3120010 - RNA, 19 nt, Artificial Sequence
  Description of Artificial Sequence: Synthetic oligonucleotide
ggggccucaguucuuuguu

SEQ ID NO: 3120011 - RNA, 19 nt, Artificial Sequence
  Description of Artificial Sequence: Synthetic oligonucleotide
guggaggggauggcauugu

SEQ ID NO: 3120012 - RNA, 19 nt, Artificial Sequence
  Description of Artificial Sequence: Synthetic oligonucleotide
gcuccaccauuguccagua

SEQ ID NO: 3120013 - RNA, 19 nt, Artificial Sequence
  Description of Artificial Sequence: Synthetic oligonucleotide
gggauggcauugucucgcu

SEQ ID NO: 3120014 - RNA, 19 nt, Artificial Sequence
  Description of Artificial Sequence: Synthetic oligonucleotide
cgaggauaucuguaauacu

SEQ ID NO: 3120015 - RNA, 19 nt, Artificial Sequence
  Description of Artificial Sequence: Synthetic oligonucleotide
ggaauccuuacaggauaau

SEQ ID NO: 3120016 - RNA, 19 nt, Artificial Sequence
  Description of Artificial Sequence: Synthetic oligonucleotide
gccauucuguggagauuga

SEQ ID NO: 3120017 - RNA, 19 nt, Artificial Sequence
  Description of Artificial Sequence: Synthetic oligonucleotide
ccaugccauucuguggaga

SEQ ID NO: 3120018 - RNA, 19 nt, Artificial Sequence
  Description of Artificial Sequence: Synthetic oligonucleotide
cacugauaguaugguccuu

SEQ ID NO: 3120019 - RNA, 19 nt, Artificial Sequence
  Description of Artificial Sequence: Synthetic oligonucleotide
cgcuccaccauuguccagu

SEQ ID NO: 3120020 - RNA, 19 nt, Artificial Sequence
  Description of Artificial Sequence: Synthetic oligonucleotide
cuccaccauuguccaguau

SEQ ID NO: 3120021 - RNA, 19 nt, Artificial Sequence
  Description of Artificial Sequence: Synthetic oligonucleotide
ccauucuguggagauugau

SEQ ID NO: 3120022 - RNA, 19 nt, Artificial Sequence
  Description of Artificial Sequence: Synthetic oligonucleotide
aaaucaaagauacaucugc

SEQ ID NO: 3120023 - RNA, 19 nt, Artificial Sequence
  Description of Artificial Sequence: Synthetic oligonucleotide
aauuacacuauuuaaauau

SEQ ID NO: 3120024 - RNA, 19 nt, Artificial Sequence
  Description of Artificial Sequence: Synthetic oligonucleotide
aauuugaugaaacagaaua

SEQ ID NO: 3120025 - RNA, 19 nt, Artificial Sequence
  Description of Artificial Sequence: Synthetic oligonucleotide
uuucauaaaauuuacaaaa

SEQ ID NO: 3120026 - RNA, 19 nt, Artificial Sequence
  Description of Artificial Sequence: Synthetic oligonucleotide
aaauuuacaaaauuacacu

SEQ ID NO: 3120027 - RNA, 19 nt, Artificial Sequence
  Description of Artificial Sequence: Synthetic oligonucleotide
uuugucauaaaucaaagau

SEQ ID NO: 3120028 - RNA, 19 nt, Artificial Sequence
  Description of Artificial Sequence: Synthetic oligonucleotide
agauacaucugcuucaagc

SEQ ID NO: 3120029 - RNA, 19 nt, Artificial Sequence
  Description of Artificial Sequence: Synthetic oligonucleotide
ugucauaaaucaaagauac

SEQ ID NO: 3120030 - RNA, 19 nt, Artificial Sequence
  Description of Artificial Sequence: Synthetic oligonucleotide
uuugauauuauguaaauuu

SEQ ID NO: 3120031 - RNA, 19 nt, Artificial Sequence
  Description of Artificial Sequence: Synthetic oligonucleotide
aauauuauugucaauaaaa

SEQ ID NO: 3120032 - RNA, 19 nt, Artificial Sequence
  Description of Artificial Sequence: Synthetic oligonucleotide
ugauauaaaguuuuccuag

SEQ ID NO: 3120033 - RNA, 19 nt, Artificial Sequence
  Description of Artificial Sequence: Synthetic oligonucleotide
auuauugucaauaaaaugu

SEQ ID NO: 3120034 - RNA, 19 nt, Artificial Sequence
  Description of Artificial Sequence: Synthetic oligonucleotide
ucagauuccacauagcuca

SEQ ID NO: 3120035 - RNA, 19 nt, Artificial Sequence
  Description of Artificial Sequence: Synthetic oligonucleotide
uauaauucaaugcauauuu

SEQ ID NO: 3120036 - RNA, 19 nt, Artificial Sequence
  Description of Artificial Sequence: Synthetic oligonucleotide
auaaaucaaagauacaucu

SEQ ID NO: 3120037 - RNA, 19 nt, Artificial Sequence
  Description of Artificial Sequence: Synthetic oligonucleotide
cacuauuuaaauauuauug

SEQ ID NO: 3120038 - RNA, 19 nt, Artificial Sequence
  Description of Artificial Sequence: Synthetic oligonucleotide
aucaaaauauaauucaaug

SEQ ID NO: 3120039 - RNA, 19 nt, Artificial Sequence
  Description of Artificial Sequence: Synthetic oligonucleotide
aagcauauucauuacauga

SEQ ID NO: 3120040 - RNA, 19 nt, Artificial Sequence
  Description of Artificial Sequence: Synthetic oligonucleotide
aauccugagugauauaaag

SEQ ID NO: 3120041 - RNA, 19 nt, Artificial Sequence
  Description of Artificial Sequence: Synthetic oligonucleotide
uuaaauauuauugucaaua

SEQ ID NO: 3120042 - RNA, 19 nt, Artificial Sequence
  Description of Artificial Sequence: Synthetic oligonucleotide
aauuuacaaaauuacacua

SEQ ID NO: 3120043 - RNA, 19 nt, Artificial Sequence
  Description of Artificial Sequence: Synthetic oligonucleotide
aauauaauucaaugcauau

SEQ ID NO: 3120044 - RNA, 19 nt, Artificial Sequence
  Description of Artificial Sequence: Synthetic oligonucleotide
acuauuuaaauauuauugu

SEQ ID NO: 3120045 - RNA, 19 nt, Artificial Sequence
  Description of Artificial Sequence: Synthetic oligonucleotide
uauuuugucauaaaucaaa

SEQ ID NO: 3120046 - RNA, 19 nt, Artificial Sequence
  Description of Artificial Sequence: Synthetic oligonucleotide
uauuauugucaauaaaaug

SEQ ID NO: 3120047 - RNA, 19 nt, Artificial Sequence
  Description of Artificial Sequence: Synthetic oligonucleotide
cauauuuugucauaaauca

SEQ ID NO: 3120048 - RNA, 19 nt, Artificial Sequence
  Description of Artificial Sequence: Synthetic oligonucleotide
auauucauuacaugauugg

SEQ ID NO: 3120049 - RNA, 19 nt, Artificial Sequence
  Description of Artificial Sequence: Synthetic oligonucleotide
agugauauaaaguuuuccu

SEQ ID NO: 3120050 - RNA, 19 nt, Artificial Sequence
  Description of Artificial Sequence: Synthetic oligonucleotide
uuccacauagcucauagca

SEQ ID NO: 3120051 - RNA, 19 nt, Artificial Sequence
  Description of Artificial Sequence: Synthetic oligonucleotide
aucugcuucaagcauauuc

SEQ ID NO: 3120052 - RNA, 19 nt, Artificial Sequence
  Description of Artificial Sequence: Synthetic oligonucleotide
uaauucaaugcauauuuug

SEQ ID NO: 3120053 - RNA, 19 nt, Artificial Sequence
  Description of Artificial Sequence: Synthetic oligonucleotide
auaucaucaaaauauaauu

SEQ ID NO: 3120054 - RNA, 19 nt, Artificial Sequence
  Description of Artificial Sequence: Synthetic oligonucleotide
uugaugaaacagaauauca

SEQ ID NO: 3120055 - RNA, 19 nt, Artificial Sequence
  Description of Artificial Sequence: Synthetic oligonucleotide
ucugugugcauuuugauau

SEQ ID NO: 3120056 - RNA, 19 nt, Artificial Sequence
  Description of Artificial Sequence: Synthetic oligonucleotide
ucugcuucaagcauauuca

SEQ ID NO: 3120057 - RNA, 19 nt, Artificial Sequence
  Description of Artificial Sequence: Synthetic oligonucleotide
uuuucauaaaauuuacaaa

SEQ ID NO: 3120058 - RNA, 19 nt, Artificial Sequence
  Description of Artificial Sequence: Synthetic oligonucleotide
uauaaaguuuuccuaguac

SEQ ID NO: 3120059 - RNA, 19 nt, Artificial Sequence
  Description of Artificial Sequence: Synthetic oligonucleotide
auaaaguuuuccuaguaca

SEQ ID NO: 3120060 - RNA, 19 nt, Artificial Sequence
  Description of Artificial Sequence: Synthetic oligonucleotide
auucaaugcauauuuuguc

SEQ ID NO: 3120061 - RNA, 19 nt, Artificial Sequence
  Description of Artificial Sequence: Synthetic oligonucleotide
aauaucaucaaaauauaau

SEQ ID NO: 3120062 - RNA, 19 nt, Artificial Sequence
  Description of Artificial Sequence: Synthetic oligonucleotide
ucaaagauacaucugcuuc

SEQ ID NO: 3120063 - RNA, 19 nt, Artificial Sequence
  Description of Artificial Sequence: Synthetic oligonucleotide
auuuaaauauuauugucaa

SEQ ID NO: 3120064 - RNA, 19 nt, Artificial Sequence
  Description of Artificial Sequence: Synthetic oligonucleotide
gaugaaacagaauaucauc

SEQ ID NO: 3120065 - RNA, 19 nt, Artificial Sequence
  Description of Artificial Sequence: Synthetic oligonucleotide
agugucagauuccacauag

SEQ ID NO: 3120066 - RNA, 19 nt, Artificial Sequence
  Description of Artificial Sequence: Synthetic oligonucleotide
aacagaauaucaucaaaau

SEQ ID NO: 3120067 - RNA, 19 nt, Artificial Sequence
  Description of Artificial Sequence: Synthetic oligonucleotide
auuuuccagugucagauuc

SEQ ID NO: 3120068 - RNA, 19 nt, Artificial Sequence
  Description of Artificial Sequence: Synthetic oligonucleotide
uuauugucaauaaaauguc

SEQ ID NO: 3120069 - RNA, 19 nt, Artificial Sequence
  Description of Artificial Sequence: Synthetic oligonucleotide
gauuccacauagcucauag

SEQ ID NO: 3120070 - RNA, 19 nt, Artificial Sequence
  Description of Artificial Sequence: Synthetic oligonucleotide
uucaaugcauauuuuguca

SEQ ID NO: 3120071 - RNA, 19 nt, Artificial Sequence
  Description of Artificial Sequence: Synthetic oligonucleotide
ucaagcauauucauuacau

SEQ ID NO: 3120072 - RNA, 19 nt, Artificial Sequence
  Description of Artificial Sequence: Synthetic oligonucleotide
uaaaucaaagauacaucug

SEQ ID NO: 3120073 - RNA, 19 nt, Artificial Sequence
  Description of Artificial Sequence: Synthetic oligonucleotide
aaauauuauugucaauaaa

SEQ ID NO: 3120074 - RNA, 19 nt, Artificial Sequence
  Description of Artificial Sequence: Synthetic oligonucleotide
aauucaaugcauauuuugu

SEQ ID NO: 3120075 - RNA, 19 nt, Artificial Sequence
  Description of Artificial Sequence: Synthetic oligonucleotide
gaauucccaauccugagug

SEQ ID NO: 3120076 - RNA, 19 nt, Artificial Sequence
  Description of Artificial Sequence: Synthetic oligonucleotide
cauauucauuacaugauug

SEQ ID NO: 3120077 - RNA, 19 nt, Artificial Sequence
  Description of Artificial Sequence: Synthetic oligonucleotide
ugucagauuccacauagcu

SEQ ID NO: 3120078 - RNA, 19 nt, Artificial Sequence
  Description of Artificial Sequence: Synthetic oligonucleotide
uuuccuaguacauuuucca

SEQ ID NO: 3120079 - RNA, 19 nt, Artificial Sequence
  Description of Artificial Sequence: Synthetic oligonucleotide
acaaaauuacacuauuuaa

SEQ ID NO: 3120080 - RNA, 19 nt, Artificial Sequence
  Description of Artificial Sequence: Synthetic oligonucleotide
uaaauauuauugucaauaa

SEQ ID NO: 3120081 - RNA, 19 nt, Artificial Sequence
  Description of Artificial Sequence: Synthetic oligonucleotide
uuuucugugugcauuuuga

SEQ ID NO: 3120082 - RNA, 19 nt, Artificial Sequence
  Description of Artificial Sequence: Synthetic oligonucleotide
gauacaucugcuucaagca

SEQ ID NO: 3120083 - RNA, 19 nt, Artificial Sequence
  Description of Artificial Sequence: Synthetic oligonucleotide
uuuacaaaauuacacuauu

SEQ ID NO: 3120084 - RNA, 19 nt, Artificial Sequence
  Description of Artificial Sequence: Synthetic oligonucleotide
ugcauauuuugucauaaau

SEQ ID NO: 3120085 - RNA, 19 nt, Artificial Sequence
  Description of Artificial Sequence: Synthetic oligonucleotide
cagaauaucaucaaaauau

SEQ ID NO: 3120086 - RNA, 19 nt, Artificial Sequence
  Description of Artificial Sequence: Synthetic oligonucleotide
aaguuuuccuaguacauuu

SEQ ID NO: 3120087 - RNA, 19 nt, Artificial Sequence
  Description of Artificial Sequence: Synthetic oligonucleotide
uucauaaaauuuacaaaau

SEQ ID NO: 3120088 - RNA, 19 nt, Artificial Sequence
  Description of Artificial Sequence: Synthetic oligonucleotide
uugucauaaaucaaagaua

SEQ ID NO: 3120089 - RNA, 19 nt, Artificial Sequence
  Description of Artificial Sequence: Synthetic oligonucleotide
ugcauuuugauauuaugua

SEQ ID NO: 3120090 - RNA, 19 nt, Artificial Sequence
  Description of Artificial Sequence: Synthetic oligonucleotide
cauagcaauuugaugaaac

SEQ ID NO: 3120091 - RNA, 19 nt, Artificial Sequence
  Description of Artificial Sequence: Synthetic oligonucleotide
uauugucaauaaaauguca

SEQ ID NO: 3120092 - RNA, 19 nt, Artificial Sequence
  Description of Artificial Sequence: Synthetic oligonucleotide
ugugcauuuugauauuaug

SEQ ID NO: 3120093 - RNA, 19 nt, Artificial Sequence
  Description of Artificial Sequence: Synthetic oligonucleotide
aaacagaauaucaucaaaa

SEQ ID NO: 3120094 - RNA, 19 nt, Artificial Sequence
  Description of Artificial Sequence: Synthetic oligonucleotide
aaauuacacuauuuaaaua

SEQ ID NO: 3120095 - RNA, 19 nt, Artificial Sequence
  Description of Artificial Sequence: Synthetic oligonucleotide
uacacuauuuaaauauuau

SEQ ID NO: 3120096 - RNA, 19 nt, Artificial Sequence
  Description of Artificial Sequence: Synthetic oligonucleotide
uacaugauuggcuuuucug

SEQ ID NO: 3120097 - RNA, 19 nt, Artificial Sequence
  Description of Artificial Sequence: Synthetic oligonucleotide
uuugaugaaacagaauauc

SEQ ID NO: 3120098 - RNA, 19 nt, Artificial Sequence
  Description of Artificial Sequence: Synthetic oligonucleotide
uagcaauuugaugaaacag

SEQ ID NO: 3120099 - RNA, 19 nt, Artificial Sequence
  Description of Artificial Sequence: Synthetic oligonucleotide
acaugauuggcuuuucugu

SEQ ID NO: 3120100 - RNA, 19 nt, Artificial Sequence
  Description of Artificial Sequence: Synthetic oligonucleotide
uuuugucauaaaucaaaga

SEQ ID NO: 3120101 - RNA, 19 nt, Artificial Sequence
  Description of Artificial Sequence: Synthetic oligonucleotide
gcucauagcaauuugauga

SEQ ID NO: 3120102 - RNA, 19 nt, Artificial Sequence
  Description of Artificial Sequence: Synthetic oligonucleotide
uccagugucagauuccaca

SEQ ID NO: 3120103 - RNA, 19 nt, Artificial Sequence
  Description of Artificial Sequence: Synthetic oligonucleotide
uugauauuauguaaauuuu

SEQ ID NO: 3120104 - RNA, 19 nt, Artificial Sequence
  Description of Artificial Sequence: Synthetic oligonucleotide
uccugagugauauaaaguu

SEQ ID NO: 3120105 - RNA, 19 nt, Artificial Sequence
  Description of Artificial Sequence: Synthetic oligonucleotide
uuacacuauuuaaauauua

SEQ ID NO: 3120106 - RNA, 19 nt, Artificial Sequence
  Description of Artificial Sequence: Synthetic oligonucleotide
aaugcauauuuugucauaa

SEQ ID NO: 3120107 - RNA, 19 nt, Artificial Sequence
  Description of Artificial Sequence: Synthetic oligonucleotide
auagcaauuugaugaaaca

SEQ ID NO: 3120108 - RNA, 19 nt, Artificial Sequence
  Description of Artificial Sequence: Synthetic oligonucleotide
uucaagcauauucauuaca

SEQ ID NO: 3120109 - RNA, 19 nt, Artificial Sequence
  Description of Artificial Sequence: Synthetic oligonucleotide
aaauauaauucaaugcaua

SEQ ID NO: 3120110 - RNA, 19 nt, Artificial Sequence
  Description of Artificial Sequence: Synthetic oligonucleotide
auuuugauauuauguaaau

SEQ ID NO: 3120111 - RNA, 19 nt, Artificial Sequence
  Description of Artificial Sequence: Synthetic oligonucleotide
auuuugucauaaaucaaag

SEQ ID NO: 3120112 - RNA, 19 nt, Artificial Sequence
  Description of Artificial Sequence: Synthetic oligonucleotide
uccuaguacauuuuccagu

SEQ ID NO: 3120113 - RNA, 19 nt, Artificial Sequence
  Description of Artificial Sequence: Synthetic oligonucleotide
augaaacagaauaucauca

SEQ ID NO: 3120114 - RNA, 19 nt, Artificial Sequence
  Description of Artificial Sequence: Synthetic oligonucleotide
uuuuccagugucagauucc

SEQ ID NO: 3120115 - RNA, 19 nt, Artificial Sequence
  Description of Artificial Sequence: Synthetic oligonucleotide
acagaauaucaucaaaaua

SEQ ID NO: 3120116 - RNA, 19 nt, Artificial Sequence
  Description of Artificial Sequence: Synthetic oligonucleotide
cauuuugauauuauguaaa

SEQ ID NO: 3120117 - RNA, 19 nt, Artificial Sequence
  Description of Artificial Sequence: Synthetic oligonucleotide
uuccuaguacauuuuccag

SEQ ID NO: 3120118 - RNA, 19 nt, Artificial Sequence
  Description of Artificial Sequence: Synthetic oligonucleotide
aaucaaagauacaucugcu

SEQ ID NO: 3120119 - RNA, 19 nt, Artificial Sequence
  Description of Artificial Sequence: Synthetic oligonucleotide
auuccacauagcucauagc

SEQ ID NO: 3120120 - RNA, 19 nt, Artificial Sequence
  Description of Artificial Sequence: Synthetic oligonucleotide
auauuauugucaauaaaau

SEQ ID NO: 3120121 - RNA, 19 nt, Artificial Sequence
  Description of Artificial Sequence: Synthetic oligonucleotide
acacuauuuaaauauuauu

SEQ ID NO: 3120122 - RNA, 19 nt, Artificial Sequence
  Description of Artificial Sequence: Synthetic oligonucleotide
ugauuggcuuuucugugug

SEQ ID NO: 3120123 - RNA, 19 nt, Artificial Sequence
  Description of Artificial Sequence: Synthetic oligonucleotide
gaaacagaauaucaucaaa

SEQ ID NO: 3120124 - RNA, 19 nt, Artificial Sequence
  Description of Artificial Sequence: Synthetic oligonucleotide
caugauuggcuuuucugug

SEQ ID NO: 3120125 - RNA, 19 nt, Artificial Sequence
  Description of Artificial Sequence: Synthetic oligonucleotide
ucaaugcauauuuugucau

SEQ ID NO: 3120126 - RNA, 19 nt, Artificial Sequence
  Description of Artificial Sequence: Synthetic oligonucleotide
uuuaaauauuauugucaau

SEQ ID NO: 3120127 - RNA, 19 nt, Artificial Sequence
  Description of Artificial Sequence: Synthetic oligonucleotide
gagugauauaaaguuuucc

SEQ ID NO: 3120128 - RNA, 19 nt, Artificial Sequence
  Description of Artificial Sequence: Synthetic oligonucleotide
agaauucccaauccugagu

SEQ ID NO: 3120129 - RNA, 19 nt, Artificial Sequence
  Description of Artificial Sequence: Synthetic oligonucleotide
caagcauauucauuacaug

SEQ ID NO: 3120130 - RNA, 19 nt, Artificial Sequence
  Description of Artificial Sequence: Synthetic oligonucleotide
caaagauacaucugcuuca

SEQ ID NO: 3120131 - RNA, 19 nt, Artificial Sequence
  Description of Artificial Sequence: Synthetic oligonucleotide
agcucauagcaauuugaug

SEQ ID NO: 3120132 - RNA, 19 nt, Artificial Sequence
  Description of Artificial Sequence: Synthetic oligonucleotide
uccacauagcucauagcaa

SEQ ID NO: 3120133 - RNA, 19 nt, Artificial Sequence
  Description of Artificial Sequence: Synthetic oligonucleotide
auauaaaguuuuccuagua

SEQ ID NO: 3120134 - RNA, 19 nt, Artificial Sequence
  Description of Artificial Sequence: Synthetic oligonucleotide
uacaucugcuucaagcaua

SEQ ID NO: 3120135 - RNA, 19 nt, Artificial Sequence
  Description of Artificial Sequence: Synthetic oligonucleotide
gauauaaaguuuuccuagu

SEQ ID NO: 3120136 - RNA, 19 nt, Artificial Sequence
  Description of Artificial Sequence: Synthetic oligonucleotide
uagcucauagcaauuugau

SEQ ID NO: 3120137 - RNA, 19 nt, Artificial Sequence
  Description of Artificial Sequence: Synthetic oligonucleotide
aaagauacaucugcuucaa

SEQ ID NO: 3120138 - RNA, 19 nt, Artificial Sequence
  Description of Artificial Sequence: Synthetic oligonucleotide
aaaguuuuccuaguacauu

SEQ ID NO: 3120139 - RNA, 19 nt, Artificial Sequence
  Description of Artificial Sequence: Synthetic oligonucleotide
uuacaugauuggcuuuucu

SEQ ID NO: 3120140 - RNA, 19 nt, Artificial Sequence
  Description of Artificial Sequence: Synthetic oligonucleotide
uuuugauauuauguaaauu

SEQ ID NO: 3120141 - RNA, 19 nt, Artificial Sequence
  Description of Artificial Sequence: Synthetic oligonucleotide
aagauacaucugcuucaag

SEQ ID NO: 3120142 - RNA, 19 nt, Artificial Sequence
  Description of Artificial Sequence: Synthetic oligonucleotide
cauagcucauagcaauuug

SEQ ID NO: 3120143 - RNA, 19 nt, Artificial Sequence
  Description of Artificial Sequence: Synthetic oligonucleotide
aauucccaauccugaguga

SEQ ID NO: 3120144 - RNA, 19 nt, Artificial Sequence
  Description of Artificial Sequence: Synthetic oligonucleotide
uucugugugcauuuugaua

SEQ ID NO: 3120145 - RNA, 19 nt, Artificial Sequence
  Description of Artificial Sequence: Synthetic oligonucleotide
guacauuuuccagugucag

SEQ ID NO: 3120146 - RNA, 19 nt, Artificial Sequence
  Description of Artificial Sequence: Synthetic oligonucleotide
gugauauaaaguuuuccua

SEQ ID NO: 3120147 - RNA, 19 nt, Artificial Sequence
  Description of Artificial Sequence: Synthetic oligonucleotide
auuugaugaaacagaauau

SEQ ID NO: 3120148 - RNA, 19 nt, Artificial Sequence
  Description of Artificial Sequence: Synthetic oligonucleotide
uacauuuuccagugucaga

SEQ ID NO: 3120149 - RNA, 19 nt, Artificial Sequence
  Description of Artificial Sequence: Synthetic oligonucleotide
gcuucaagcauauucauua

SEQ ID NO: 3120150 - RNA, 19 nt, Artificial Sequence
  Description of Artificial Sequence: Synthetic oligonucleotide
uuuccagugucagauucca

SEQ ID NO: 3120151 - RNA, 19 nt, Artificial Sequence
  Description of Artificial Sequence: Synthetic oligonucleotide
aucaaagauacaucugcuu

SEQ ID NO: 3120152 - RNA, 19 nt, Artificial Sequence
  Description of Artificial Sequence: Synthetic oligonucleotide
cagaauucccaauccugag

SEQ ID NO: 3120153 - RNA, 19 nt, Artificial Sequence
  Description of Artificial Sequence: Synthetic oligonucleotide
cuucaagcauauucauuac

SEQ ID NO: 3120154 - RNA, 19 nt, Artificial Sequence
  Description of Artificial Sequence: Synthetic oligonucleotide
cuuuucugugugcauuuug

SEQ ID NO: 3120155 - RNA, 19 nt, Artificial Sequence
  Description of Artificial Sequence: Synthetic oligonucleotide
guuuuccuaguacauuuuc

SEQ ID NO: 3120156 - RNA, 19 nt, Artificial Sequence
  Description of Artificial Sequence: Synthetic oligonucleotide
auauaauucaaugcauauu

SEQ ID NO: 3120157 - RNA, 19 nt, Artificial Sequence
  Description of Artificial Sequence: Synthetic oligonucleotide
auagcucauagcaauuuga

SEQ ID NO: 3120158 - RNA, 19 nt, Artificial Sequence
  Description of Artificial Sequence: Synthetic oligonucleotide
gcauauuuugucauaaauc

SEQ ID NO: 3120159 - RNA, 19 nt, Artificial Sequence
  Description of Artificial Sequence: Synthetic oligonucleotide
auacaucugcuucaagcau

SEQ ID NO: 3120160 - RNA, 19 nt, Artificial Sequence
  Description of Artificial Sequence: Synthetic oligonucleotide
uuucugugugcauuuugau

SEQ ID NO: 3120161 - RNA, 19 nt, Artificial Sequence
  Description of Artificial Sequence: Synthetic oligonucleotide
aguacauuuuccaguguca

SEQ ID NO: 3120162 - RNA, 19 nt, Artificial Sequence
  Description of Artificial Sequence: Synthetic oligonucleotide
auuacaugauuggcuuuuc

SEQ ID NO: 3120163 - RNA, 19 nt, Artificial Sequence
  Description of Artificial Sequence: Synthetic oligonucleotide
agaauaucaucaaaauaua

SEQ ID NO: 3120164 - RNA, 19 nt, Artificial Sequence
  Description of Artificial Sequence: Synthetic oligonucleotide
agcauauucauuacaugau

SEQ ID NO: 3120165 - RNA, 19 nt, Artificial Sequence
  Description of Artificial Sequence: Synthetic oligonucleotide
ugcuucaagcauauucauu

SEQ ID NO: 3120166 - RNA, 19 nt, Artificial Sequence
  Description of Artificial Sequence: Synthetic oligonucleotide
gauuggcuuuucugugugc

SEQ ID NO: 3120167 - RNA, 19 nt, Artificial Sequence
  Description of Artificial Sequence: Synthetic oligonucleotide
ucccaauccugagugauau

SEQ ID NO: 3120168 - RNA, 19 nt, Artificial Sequence
  Description of Artificial Sequence: Synthetic oligonucleotide
gcauuuugauauuauguaa

SEQ ID NO: 3120169 - RNA, 19 nt, Artificial Sequence
  Description of Artificial Sequence: Synthetic oligonucleotide
auuacacuauuuaaauauu

SEQ ID NO: 3120170 - RNA, 19 nt, Artificial Sequence
  Description of Artificial Sequence: Synthetic oligonucleotide
gucagauuccacauagcuc

SEQ ID NO: 3120171 - RNA, 19 nt, Artificial Sequence
  Description of Artificial Sequence: Synthetic oligonucleotide
gugcauuuugauauuaugu

SEQ ID NO: 3120172 - RNA, 19 nt, Artificial Sequence
  Description of Artificial Sequence: Synthetic oligonucleotide
auccugagugauauaaagu

SEQ ID NO: 3120173 - RNA, 19 nt, Artificial Sequence
  Description of Artificial Sequence: Synthetic oligonucleotide
cucauagcaauuugaugaa

SEQ ID NO: 3120174 - RNA, 19 nt, Artificial Sequence
  Description of Artificial Sequence: Synthetic oligonucleotide
ugugugcauuuugauauua

SEQ ID NO: 3120175 - RNA, 19 nt, Artificial Sequence
  Description of Artificial Sequence: Synthetic oligonucleotide
cugagugauauaaaguuuu

SEQ ID NO: 3120176 - RNA, 19 nt, Artificial Sequence
  Description of Artificial Sequence: Synthetic oligonucleotide
auucccaauccugagugau

SEQ ID NO: 3120177 - RNA, 19 nt, Artificial Sequence
  Description of Artificial Sequence: Synthetic oligonucleotide
ucauuacaugauuggcuuu

SEQ ID NO: 3120178 - RNA, 19 nt, Artificial Sequence
  Description of Artificial Sequence: Synthetic oligonucleotide
ucauagcaauuugaugaaa

SEQ ID NO: 3120179 - RNA, 19 nt, Artificial Sequence
  Description of Artificial Sequence: Synthetic oligonucleotide
augcauauuuugucauaaa

SEQ ID NO: 3120180 - RNA, 19 nt, Artificial Sequence
  Description of Artificial Sequence: Synthetic oligonucleotide
gcaauuugaugaaacagaa

SEQ ID NO: 3120181 - RNA, 19 nt, Artificial Sequence
  Description of Artificial Sequence: Synthetic oligonucleotide
auaauucaaugcauauuuu

SEQ ID NO: 3120182 - RNA, 19 nt, Artificial Sequence
  Description of Artificial Sequence: Synthetic oligonucleotide
acauagcucauagcaauuu

SEQ ID NO: 3120183 - RNA, 19 nt, Artificial Sequence
  Description of Artificial Sequence: Synthetic oligonucleotide
uuggcuuuucugugugcau

SEQ ID NO: 3120184 - RNA, 19 nt, Artificial Sequence
  Description of Artificial Sequence: Synthetic oligonucleotide
uuccagugucagauuccac

SEQ ID NO: 3120185 - RNA, 19 nt, Artificial Sequence
  Description of Artificial Sequence: Synthetic oligonucleotide
uggcuuuucugugugcauu

SEQ ID NO: 3120186 - RNA, 19 nt, Artificial Sequence
  Description of Artificial Sequence: Synthetic oligonucleotide
gucauaaaucaaagauaca

SEQ ID NO: 3120187 - RNA, 19 nt, Artificial Sequence
  Description of Artificial Sequence: Synthetic oligonucleotide
acaucugcuucaagcauau

SEQ ID NO: 3120188 - RNA, 19 nt, Artificial Sequence
  Description of Artificial Sequence: Synthetic oligonucleotide
caauccugagugauauaaa

SEQ ID NO: 3120189 - RNA, 19 nt, Artificial Sequence
  Description of Artificial Sequence: Synthetic oligonucleotide
caaugcauauuuugucaua

SEQ ID NO: 3120190 - RNA, 19 nt, Artificial Sequence
  Description of Artificial Sequence: Synthetic oligonucleotide
aguuuuccuaguacauuuu

SEQ ID NO: 3120191 - RNA, 19 nt, Artificial Sequence
  Description of Artificial Sequence: Synthetic oligonucleotide
gugucagauuccacauagc

SEQ ID NO: 3120192 - RNA, 19 nt, Artificial Sequence
  Description of Artificial Sequence: Synthetic oligonucleotide
ccaauccugagugauauaa

SEQ ID NO: 3120193 - RNA, 19 nt, Artificial Sequence
  Description of Artificial Sequence: Synthetic oligonucleotide
caauuugaugaaacagaau

SEQ ID NO: 3120194 - RNA, 19 nt, Artificial Sequence
  Description of Artificial Sequence: Synthetic oligonucleotide
cauuacaugauuggcuuuu

SEQ ID NO: 3120195 - RNA, 19 nt, Artificial Sequence
  Description of Artificial Sequence: Synthetic oligonucleotide
gcauauucauuacaugauu

SEQ ID NO: 3120196 - RNA, 19 nt, Artificial Sequence
  Description of Artificial Sequence: Synthetic oligonucleotide
agauuccacauagcucaua

SEQ ID NO: 3120197 - RNA, 19 nt, Artificial Sequence
  Description of Artificial Sequence: Synthetic oligonucleotide
cugcuucaagcauauucau

SEQ ID NO: 3120198 - RNA, 19 nt, Artificial Sequence
  Description of Artificial Sequence: Synthetic oligonucleotide
ccacauagcucauagcaau

SEQ ID NO: 3120199 - RNA, 19 nt, Artificial Sequence
  Description of Artificial Sequence: Synthetic oligonucleotide
cacauagcucauagcaauu

SEQ ID NO: 3120200 - RNA, 19 nt, Artificial Sequence
  Description of Artificial Sequence: Synthetic oligonucleotide
cagugucagauuccacaua

SEQ ID NO: 3120201 - RNA, 19 nt, Artificial Sequence
  Description of Artificial Sequence: Synthetic oligonucleotide
gugugcauuuugauauuau

SEQ ID NO: 3120202 - RNA, 19 nt, Artificial Sequence
  Description of Artificial Sequence: Synthetic oligonucleotide
ccugagugauauaaaguuu

SEQ ID NO: 3120203 - RNA, 19 nt, Artificial Sequence
  Description of Artificial Sequence: Synthetic oligonucleotide
cauuuuccagugucagauu

SEQ ID NO: 3120204 - RNA, 19 nt, Artificial Sequence
  Description of Artificial Sequence: Synthetic oligonucleotide
ccagugucagauuccacau

SEQ ID NO: 3120205 - RNA, 19 nt, Artificial Sequence
  Description of Artificial Sequence: Synthetic oligonucleotide
cagauuccacauagcucau

SEQ ID NO: 3120206 - RNA, 19 nt, Artificial Sequence
  Description of Artificial Sequence: Synthetic oligonucleotide
gcuuuucugugugcauuuu

SEQ ID NO: 3120207 - RNA, 19 nt, Artificial Sequence
  Description of Artificial Sequence: Synthetic oligonucleotide
cccaauccugagugauaua

SEQ ID NO: 3120208 - RNA, 19 nt, Artificial Sequence
  Description of Artificial Sequence: Synthetic oligonucleotide
aaaucuagcacauuccucg

SEQ ID NO: 3120209 - RNA, 19 nt, Artificial Sequence
  Description of Artificial Sequence: Synthetic oligonucleotide
uuaccaagaaaucaaaugc

SEQ ID NO: 3120210 - RNA, 19 nt, Artificial Sequence
  Description of Artificial Sequence: Synthetic oligonucleotide
uuuacauucuuucacaaca

SEQ ID NO: 3120211 - RNA, 19 nt, Artificial Sequence
  Description of Artificial Sequence: Synthetic oligonucleotide
ucagauuccauuuacauuc

SEQ ID NO: 3120212 - RNA, 19 nt, Artificial Sequence
  Description of Artificial Sequence: Synthetic oligonucleotide
agauggauagcccaaauuc

SEQ ID NO: 3120213 - RNA, 19 nt, Artificial Sequence
  Description of Artificial Sequence: Synthetic oligonucleotide
aagaaucuauguaagaugg

SEQ ID NO: 3120214 - RNA, 19 nt, Artificial Sequence
  Description of Artificial Sequence: Synthetic oligonucleotide
uuucacaacagcuauaggu

SEQ ID NO: 3120215 - RNA, 19 nt, Artificial Sequence
  Description of Artificial Sequence: Synthetic oligonucleotide
aucuauguaagauggauag

SEQ ID NO: 3120216 - RNA, 19 nt, Artificial Sequence
  Description of Artificial Sequence: Synthetic oligonucleotide
uuugaagaaucuauguaag

SEQ ID NO: 3120217 - RNA, 19 nt, Artificial Sequence
  Description of Artificial Sequence: Synthetic oligonucleotide
auuaccaagaaaucaaaug

SEQ ID NO: 3120218 - RNA, 19 nt, Artificial Sequence
  Description of Artificial Sequence: Synthetic oligonucleotide
aaugcaucucuuuagacau

SEQ ID NO: 3120219 - RNA, 19 nt, Artificial Sequence
  Description of Artificial Sequence: Synthetic oligonucleotide
ucugacuucucuuugaaga

SEQ ID NO: 3120220 - RNA, 19 nt, Artificial Sequence
  Description of Artificial Sequence: Synthetic oligonucleotide
aaaugcaucucuuuagaca

SEQ ID NO: 3120221 - RNA, 19 nt, Artificial Sequence
  Description of Artificial Sequence: Synthetic oligonucleotide
agacaaaucuagcacauuc

SEQ ID NO: 3120222 - RNA, 19 nt, Artificial Sequence
  Description of Artificial Sequence: Synthetic oligonucleotide
uuuuguaucacagaauugu

SEQ ID NO: 3120223 - RNA, 19 nt, Artificial Sequence
  Description of Artificial Sequence: Synthetic oligonucleotide
uguaucacagaauugucug

SEQ ID NO: 3120224 - RNA, 19 nt, Artificial Sequence
  Description of Artificial Sequence: Synthetic oligonucleotide
gaagaaucuauguaagaug

SEQ ID NO: 3120225 - RNA, 19 nt, Artificial Sequence
  Description of Artificial Sequence: Synthetic oligonucleotide
uuagacaugguuuuguauc

SEQ ID NO: 3120226 - RNA, 19 nt, Artificial Sequence
  Description of Artificial Sequence: Synthetic oligonucleotide
cuauguaagauggauagcc

SEQ ID NO: 3120227 - RNA, 19 nt, Artificial Sequence
  Description of Artificial Sequence: Synthetic oligonucleotide
uccauuuacauucuuucac

SEQ ID NO: 3120228 - RNA, 19 nt, Artificial Sequence
  Description of Artificial Sequence: Synthetic oligonucleotide
uuuagaggaggaauucucc

SEQ ID NO: 3120229 - RNA, 19 nt, Artificial Sequence
  Description of Artificial Sequence: Synthetic oligonucleotide
uucaacgguaacuucauac

SEQ ID NO: 3120230 - RNA, 19 nt, Artificial Sequence
  Description of Artificial Sequence: Synthetic oligonucleotide
ucuuucacaacagcuauag

SEQ ID NO: 3120231 - RNA, 19 nt, Artificial Sequence
  Description of Artificial Sequence: Synthetic oligonucleotide
auuuacauucuuucacaac

SEQ ID NO: 3120232 - RNA, 19 nt, Artificial Sequence
  Description of Artificial Sequence: Synthetic oligonucleotide
ucuuugcuccucuucaacg

SEQ ID NO: 3120233 - RNA, 19 nt, Artificial Sequence
  Description of Artificial Sequence: Synthetic oligonucleotide
ugcauuaccaagaaaucaa

SEQ ID NO: 3120234 - RNA, 19 nt, Artificial Sequence
  Description of Artificial Sequence: Synthetic oligonucleotide
aucaaaugcaucucuuuag

SEQ ID NO: 3120235 - RNA, 19 nt, Artificial Sequence
  Description of Artificial Sequence: Synthetic oligonucleotide
aacagcuauagguaucucu

SEQ ID NO: 3120236 - RNA, 19 nt, Artificial Sequence
  Description of Artificial Sequence: Synthetic oligonucleotide
ucaaaugcaucucuuuaga

SEQ ID NO: 3120237 - RNA, 19 nt, Artificial Sequence
  Description of Artificial Sequence: Synthetic oligonucleotide
uucucuuugaagaaucuau

SEQ ID NO: 3120238 - RNA, 19 nt, Artificial Sequence
  Description of Artificial Sequence: Synthetic oligonucleotide
aagaaaucaaaugcaucuc

SEQ ID NO: 3120239 - RNA, 19 nt, Artificial Sequence
  Description of Artificial Sequence: Synthetic oligonucleotide
aaucaaaugcaucucuuua

SEQ ID NO: 3120240 - RNA, 19 nt, Artificial Sequence
  Description of Artificial Sequence: Synthetic oligonucleotide
uuacauucuuucacaacag

SEQ ID NO: 3120241 - RNA, 19 nt, Artificial Sequence
  Description of Artificial Sequence: Synthetic oligonucleotide
uaccaagaaaucaaaugca

SEQ ID NO: 3120242 - RNA, 19 nt, Artificial Sequence
  Description of Artificial Sequence: Synthetic oligonucleotide
uauguaagauggauagccc

SEQ ID NO: 3120243 - RNA, 19 nt, Artificial Sequence
  Description of Artificial Sequence: Synthetic oligonucleotide
ucucuuugaagaaucuaug

SEQ ID NO: 3120244 - RNA, 19 nt, Artificial Sequence
  Description of Artificial Sequence: Synthetic oligonucleotide
ucuuugaagaaucuaugua

SEQ ID NO: 3120245 - RNA, 19 nt, Artificial Sequence
  Description of Artificial Sequence: Synthetic oligonucleotide
uucacaacagcuauaggua

SEQ ID NO: 3120246 - RNA, 19 nt, Artificial Sequence
  Description of Artificial Sequence: Synthetic oligonucleotide
uuuuagaggaggaauucuc

SEQ ID NO: 3120247 - RNA, 19 nt, Artificial Sequence
  Description of Artificial Sequence: Synthetic oligonucleotide
agaaaucaaaugcaucucu

SEQ ID NO: 3120248 - RNA, 19 nt, Artificial Sequence
  Description of Artificial Sequence: Synthetic oligonucleotide
agaggaggaauucuccuuc

SEQ ID NO: 3120249 - RNA, 19 nt, Artificial Sequence
  Description of Artificial Sequence: Synthetic oligonucleotide
cuuugaagaaucuauguaa

SEQ ID NO: 3120250 - RNA, 19 nt, Artificial Sequence
  Description of Artificial Sequence: Synthetic oligonucleotide
augguuuuguaucacagaa

SEQ ID NO: 3120251 - RNA, 19 nt, Artificial Sequence
  Description of Artificial Sequence: Synthetic oligonucleotide
gguaacuucauacucugcc

SEQ ID NO: 3120252 - RNA, 19 nt, Artificial Sequence
  Description of Artificial Sequence: Synthetic oligonucleotide
ucaacgguaacuucauacu

SEQ ID NO: 3120253 - RNA, 19 nt, Artificial Sequence
  Description of Artificial Sequence: Synthetic oligonucleotide
ugcaucucuuuagacaugg

SEQ ID NO: 3120254 - RNA, 19 nt, Artificial Sequence
  Description of Artificial Sequence: Synthetic oligonucleotide
acaaaucuagcacauuccu

SEQ ID NO: 3120255 - RNA, 19 nt, Artificial Sequence
  Description of Artificial Sequence: Synthetic oligonucleotide
aaaucaaaugcaucucuuu

SEQ ID NO: 3120256 - RNA, 19 nt, Artificial Sequence
  Description of Artificial Sequence: Synthetic oligonucleotide
cuuugcuccucuucaacgg

SEQ ID NO: 3120257 - RNA, 19 nt, Artificial Sequence
  Description of Artificial Sequence: Synthetic oligonucleotide
uguaagauggauagcccaa

SEQ ID NO: 3120258 - RNA, 19 nt, Artificial Sequence
  Description of Artificial Sequence: Synthetic oligonucleotide
uacauucuuucacaacagc

SEQ ID NO: 3120259 - RNA, 19 nt, Artificial Sequence
  Description of Artificial Sequence: Synthetic oligonucleotide
uaacuucauacucugccac

SEQ ID NO: 3120260 - RNA, 19 nt, Artificial Sequence
  Description of Artificial Sequence: Synthetic oligonucleotide
uuuguaucacagaauuguc

SEQ ID NO: 3120261 - RNA, 19 nt, Artificial Sequence
  Description of Artificial Sequence: Synthetic oligonucleotide
uagacaugguuuuguauca

SEQ ID NO: 3120262 - RNA, 19 nt, Artificial Sequence
  Description of Artificial Sequence: Synthetic oligonucleotide
uuagaggaggaauucuccu

SEQ ID NO: 3120263 - RNA, 19 nt, Artificial Sequence
  Description of Artificial Sequence: Synthetic oligonucleotide
guaucacagaauugucugg

SEQ ID NO: 3120264 - RNA, 19 nt, Artificial Sequence
  Description of Artificial Sequence: Synthetic oligonucleotide
uauagguaucucugguaag

SEQ ID NO: 3120265 - RNA, 19 nt, Artificial Sequence
  Description of Artificial Sequence: Synthetic oligonucleotide
ucuagcacauuccucgaaa

SEQ ID NO: 3120266 - RNA, 19 nt, Artificial Sequence
  Description of Artificial Sequence: Synthetic oligonucleotide
auucuuucacaacagcuau

SEQ ID NO: 3120267 - RNA, 19 nt, Artificial Sequence
  Description of Artificial Sequence: Synthetic oligonucleotide
gacaaaucuagcacauucc

SEQ ID NO: 3120268 - RNA, 19 nt, Artificial Sequence
  Description of Artificial Sequence: Synthetic oligonucleotide
auguaagauggauagccca

SEQ ID NO: 3120269 - RNA, 19 nt, Artificial Sequence
  Description of Artificial Sequence: Synthetic oligonucleotide
aaauucucuuugcuccucu

SEQ ID NO: 3120270 - RNA, 19 nt, Artificial Sequence
  Description of Artificial Sequence: Synthetic oligonucleotide
uuccauuuacauucuuuca

SEQ ID NO: 3120271 - RNA, 19 nt, Artificial Sequence
  Description of Artificial Sequence: Synthetic oligonucleotide
auagcccaaauucucuuug

SEQ ID NO: 3120272 - RNA, 19 nt, Artificial Sequence
  Description of Artificial Sequence: Synthetic oligonucleotide
uuuagacaugguuuuguau

SEQ ID NO: 3120273 - RNA, 19 nt, Artificial Sequence
  Description of Artificial Sequence: Synthetic oligonucleotide
uucauacucugccacugca

SEQ ID NO: 3120274 - RNA, 19 nt, Artificial Sequence
  Description of Artificial Sequence: Synthetic oligonucleotide
aacgguaacuucauacucu

SEQ ID NO: 3120275 - RNA, 19 nt, Artificial Sequence
  Description of Artificial Sequence: Synthetic oligonucleotide
uaucacagaauugucugga

SEQ ID NO: 3120276 - RNA, 19 nt, Artificial Sequence
  Description of Artificial Sequence: Synthetic oligonucleotide
cccaaauucucuuugcucc

SEQ ID NO: 3120277 - RNA, 19 nt, Artificial Sequence
  Description of Artificial Sequence: Synthetic oligonucleotide
acagcuauagguaucucug

SEQ ID NO: 3120278 - RNA, 19 nt, Artificial Sequence
  Description of Artificial Sequence: Synthetic oligonucleotide
agguaucucugguaagggg

SEQ ID NO: 3120279 - RNA, 19 nt, Artificial Sequence
  Description of Artificial Sequence: Synthetic oligonucleotide
agcacauuccucgaaaaca

SEQ ID NO: 3120280 - RNA, 19 nt, Artificial Sequence
  Description of Artificial Sequence: Synthetic oligonucleotide
ucucuuuagacaugguuuu

SEQ ID NO: 3120281 - RNA, 19 nt, Artificial Sequence
  Description of Artificial Sequence: Synthetic oligonucleotide
uccuucagauuccauuuac

SEQ ID NO: 3120282 - RNA, 19 nt, Artificial Sequence
  Description of Artificial Sequence: Synthetic oligonucleotide
aagauggauagcccaaauu

SEQ ID NO: 3120283 - RNA, 19 nt, Artificial Sequence
  Description of Artificial Sequence: Synthetic oligonucleotide
ucacagaauugucuggaaa

SEQ ID NO: 3120284 - RNA, 19 nt, Artificial Sequence
  Description of Artificial Sequence: Synthetic oligonucleotide
acagaauugucuggaaaag

SEQ ID NO: 3120285 - RNA, 19 nt, Artificial Sequence
  Description of Artificial Sequence: Synthetic oligonucleotide
uggauagcccaaauucucu

SEQ ID NO: 3120286 - RNA, 19 nt, Artificial Sequence
  Description of Artificial Sequence: Synthetic oligonucleotide
ucuccuucagauuccauuu

SEQ ID NO: 3120287 - RNA, 19 nt, Artificial Sequence
  Description of Artificial Sequence: Synthetic oligonucleotide
ucuuuagacaugguuuugu

SEQ ID NO: 3120288 - RNA, 19 nt, Artificial Sequence
  Description of Artificial Sequence: Synthetic oligonucleotide
acugcauuaccaagaaauc

SEQ ID NO: 3120289 - RNA, 19 nt, Artificial Sequence
  Description of Artificial Sequence: Synthetic oligonucleotide
uucagauuccauuuacauu

SEQ ID NO: 3120290 - RNA, 19 nt, Artificial Sequence
  Description of Artificial Sequence: Synthetic oligonucleotide
ugccacugcauuaccaaga

SEQ ID NO: 3120291 - RNA, 19 nt, Artificial Sequence
  Description of Artificial Sequence: Synthetic oligonucleotide
caaaugcaucucuuuagac

SEQ ID NO: 3120292 - RNA, 19 nt, Artificial Sequence
  Description of Artificial Sequence: Synthetic oligonucleotide
ucugguaaggggacuucug

SEQ ID NO: 3120293 - RNA, 19 nt, Artificial Sequence
  Description of Artificial Sequence: Synthetic oligonucleotide
aaucuagcacauuccucga

SEQ ID NO: 3120294 - RNA, 19 nt, Artificial Sequence
  Description of Artificial Sequence: Synthetic oligonucleotide
acgguaacuucauacucug

SEQ ID NO: 3120295 - RNA, 19 nt, Artificial Sequence
  Description of Artificial Sequence: Synthetic oligonucleotide
acauucuuucacaacagcu

SEQ ID NO: 3120296 - RNA, 19 nt, Artificial Sequence
  Description of Artificial Sequence: Synthetic oligonucleotide
auggauagcccaaauucuc

SEQ ID NO: 3120297 - RNA, 19 nt, Artificial Sequence
  Description of Artificial Sequence: Synthetic oligonucleotide
ucuucaacgguaacuucau

SEQ ID NO: 3120298 - RNA, 19 nt, Artificial Sequence
  Description of Artificial Sequence: Synthetic oligonucleotide
cucuucaacgguaacuuca

SEQ ID NO: 3120299 - RNA, 19 nt, Artificial Sequence
  Description of Artificial Sequence: Synthetic oligonucleotide
agcuauagguaucucuggu

SEQ ID NO: 3120300 - RNA, 19 nt, Artificial Sequence
  Description of Artificial Sequence: Synthetic oligonucleotide
uucuccuucagauuccauu

SEQ ID NO: 3120301 - RNA, 19 nt, Artificial Sequence
  Description of Artificial Sequence: Synthetic oligonucleotide
uucugacuucucuuugaag

SEQ ID NO: 3120302 - RNA, 19 nt, Artificial Sequence
  Description of Artificial Sequence: Synthetic oligonucleotide
guaacuucauacucugcca

SEQ ID NO: 3120303 - RNA, 19 nt, Artificial Sequence
  Description of Artificial Sequence: Synthetic oligonucleotide
caaaucuagcacauuccuc

SEQ ID NO: 3120304 - RNA, 19 nt, Artificial Sequence
  Description of Artificial Sequence: Synthetic oligonucleotide
acaugguuuuguaucacag

SEQ ID NO: 3120305 - RNA, 19 nt, Artificial Sequence
  Description of Artificial Sequence: Synthetic oligonucleotide
aaucuauguaagauggaua

SEQ ID NO: 3120306 - RNA, 19 nt, Artificial Sequence
  Description of Artificial Sequence: Synthetic oligonucleotide
ucuauguaagauggauagc

SEQ ID NO: 3120307 - RNA, 19 nt, Artificial Sequence
  Description of Artificial Sequence: Synthetic oligonucleotide
cacagaauugucuggaaaa

SEQ ID NO: 3120308 - RNA, 19 nt, Artificial Sequence
  Description of Artificial Sequence: Synthetic oligonucleotide
cuauagguaucucugguaa

SEQ ID NO: 3120309 - RNA, 19 nt, Artificial Sequence
  Description of Artificial Sequence: Synthetic oligonucleotide
gaggaauucuccuucagau

SEQ ID NO: 3120310 - RNA, 19 nt, Artificial Sequence
  Description of Artificial Sequence: Synthetic oligonucleotide
aucucuuuagacaugguuu

SEQ ID NO: 3120311 - RNA, 19 nt, Artificial Sequence
  Description of Artificial Sequence: Synthetic oligonucleotide
cacugcauuaccaagaaau

SEQ ID NO: 3120312 - RNA, 19 nt, Artificial Sequence
  Description of Artificial Sequence: Synthetic oligonucleotide
ucacaacagcuauagguau

SEQ ID NO: 3120313 - RNA, 19 nt, Artificial Sequence
  Description of Artificial Sequence: Synthetic oligonucleotide
acaacagcuauagguaucu

SEQ ID NO: 3120314 - RNA, 19 nt, Artificial Sequence
  Description of Artificial Sequence: Synthetic oligonucleotide
acuucugacuucucuuuga

SEQ ID NO: 3120315 - RNA, 19 nt, Artificial Sequence
  Description of Artificial Sequence: Synthetic oligonucleotide
cauucuuucacaacagcua

SEQ ID NO: 3120316 - RNA, 19 nt, Artificial Sequence
  Description of Artificial Sequence: Synthetic oligonucleotide
gacuucugacuucucuuug

SEQ ID NO: 3120317 - RNA, 19 nt, Artificial Sequence
  Description of Artificial Sequence: Synthetic oligonucleotide
uaagauggauagcccaaau

SEQ ID NO: 3120318 - RNA, 19 nt, Artificial Sequence
  Description of Artificial Sequence: Synthetic oligonucleotide
ugguaaggggacuucugac

SEQ ID NO: 3120319 - RNA, 19 nt, Artificial Sequence
  Description of Artificial Sequence: Synthetic oligonucleotide
cagcuauagguaucucugg

SEQ ID NO: 3120320 - RNA, 19 nt, Artificial Sequence
  Description of Artificial Sequence: Synthetic oligonucleotide
ugguuuuguaucacagaau

SEQ ID NO: 3120321 - RNA, 19 nt, Artificial Sequence
  Description of Artificial Sequence: Synthetic oligonucleotide
caacgguaacuucauacuc

SEQ ID NO: 3120322 - RNA, 19 nt, Artificial Sequence
  Description of Artificial Sequence: Synthetic oligonucleotide
gacaugguuuuguaucaca

SEQ ID NO: 3120323 - RNA, 19 nt, Artificial Sequence
  Description of Artificial Sequence: Synthetic oligonucleotide
aauucuccuucagauucca

SEQ ID NO: 3120324 - RNA, 19 nt, Artificial Sequence
  Description of Artificial Sequence: Synthetic oligonucleotide
gacuucucuuugaagaauc

SEQ ID NO: 3120325 - RNA, 19 nt, Artificial Sequence
  Description of Artificial Sequence: Synthetic oligonucleotide
acuucauacucugccacug

SEQ ID NO: 3120326 - RNA, 19 nt, Artificial Sequence
  Description of Artificial Sequence: Synthetic oligonucleotide
aaggggacuucugacuucu

SEQ ID NO: 3120327 - RNA, 19 nt, Artificial Sequence
  Description of Artificial Sequence: Synthetic oligonucleotide
gaauucuccuucagauucc

SEQ ID NO: 3120328 - RNA, 19 nt, Artificial Sequence
  Description of Artificial Sequence: Synthetic oligonucleotide
cuuucacaacagcuauagg

SEQ ID NO: 3120329 - RNA, 19 nt, Artificial Sequence
  Description of Artificial Sequence: Synthetic oligonucleotide
guuuuguaucacagaauug

SEQ ID NO: 3120330 - RNA, 19 nt, Artificial Sequence
  Description of Artificial Sequence: Synthetic oligonucleotide
uagcccaaauucucuuugc

SEQ ID NO: 3120331 - RNA, 19 nt, Artificial Sequence
  Description of Artificial Sequence: Synthetic oligonucleotide
ucauacucugccacugcau

SEQ ID NO: 3120332 - RNA, 19 nt, Artificial Sequence
  Description of Artificial Sequence: Synthetic oligonucleotide
gaaucuauguaagauggau

SEQ ID NO: 3120333 - RNA, 19 nt, Artificial Sequence
  Description of Artificial Sequence: Synthetic oligonucleotide
uccucuucaacgguaacuu

SEQ ID NO: 3120334 - RNA, 19 nt, Artificial Sequence
  Description of Artificial Sequence: Synthetic oligonucleotide
agcccaaauucucuuugcu

SEQ ID NO: 3120335 - RNA, 19 nt, Artificial Sequence
  Description of Artificial Sequence: Synthetic oligonucleotide
cuucauacucugccacugc

SEQ ID NO: 3120336 - RNA, 19 nt, Artificial Sequence
  Description of Artificial Sequence: Synthetic oligonucleotide
agacaugguuuuguaucac

SEQ ID NO: 3120337 - RNA, 19 nt, Artificial Sequence
  Description of Artificial Sequence: Synthetic oligonucleotide
cacaacagcuauagguauc

SEQ ID NO: 3120338 - RNA, 19 nt, Artificial Sequence
  Description of Artificial Sequence: Synthetic oligonucleotide
cauuuacauucuuucacaa

SEQ ID NO: 3120339 - RNA, 19 nt, Artificial Sequence
  Description of Artificial Sequence: Synthetic oligonucleotide
caugguuuuguaucacaga

SEQ ID NO: 3120340 - RNA, 19 nt, Artificial Sequence
  Description of Artificial Sequence: Synthetic oligonucleotide
uagaggaggaauucuccuu

SEQ ID NO: 3120341 - RNA, 19 nt, Artificial Sequence
  Description of Artificial Sequence: Synthetic oligonucleotide
cugcauuaccaagaaauca

SEQ ID NO: 3120342 - RNA, 19 nt, Artificial Sequence
  Description of Artificial Sequence: Synthetic oligonucleotide
gguuuuguaucacagaauu

SEQ ID NO: 3120343 - RNA, 19 nt, Artificial Sequence
  Description of Artificial Sequence: Synthetic oligonucleotide
gguaucucugguaagggga

SEQ ID NO: 3120344 - RNA, 19 nt, Artificial Sequence
  Description of Artificial Sequence: Synthetic oligonucleotide
cucuuugcuccucuucaac

SEQ ID NO: 3120345 - RNA, 19 nt, Artificial Sequence
  Description of Artificial Sequence: Synthetic oligonucleotide
ugcuccucuucaacgguaa

SEQ ID NO: 3120346 - RNA, 19 nt, Artificial Sequence
  Description of Artificial Sequence: Synthetic oligonucleotide
aggaauucuccuucagauu

SEQ ID NO: 3120347 - RNA, 19 nt, Artificial Sequence
  Description of Artificial Sequence: Synthetic oligonucleotide
cucuuugaagaaucuaugu

SEQ ID NO: 3120348 - RNA, 19 nt, Artificial Sequence
  Description of Artificial Sequence: Synthetic oligonucleotide
cugccacugcauuaccaag

SEQ ID NO: 3120349 - RNA, 19 nt, Artificial Sequence
  Description of Artificial Sequence: Synthetic oligonucleotide
cuucagauuccauuuacau

SEQ ID NO: 3120350 - RNA, 19 nt, Artificial Sequence
  Description of Artificial Sequence: Synthetic oligonucleotide
ugacuucucuuugaagaau

SEQ ID NO: 3120351 - RNA, 19 nt, Artificial Sequence
  Description of Artificial Sequence: Synthetic oligonucleotide
aucacagaauugucuggaa

SEQ ID NO: 3120352 - RNA, 19 nt, Artificial Sequence
  Description of Artificial Sequence: Synthetic oligonucleotide
guaucucugguaaggggac

SEQ ID NO: 3120353 - RNA, 19 nt, Artificial Sequence
  Description of Artificial Sequence: Synthetic oligonucleotide
gaggaggaauucuccuuca

SEQ ID NO: 3120354 - RNA, 19 nt, Artificial Sequence
  Description of Artificial Sequence: Synthetic oligonucleotide
cugacuucucuuugaagaa

SEQ ID NO: 3120355 - RNA, 19 nt, Artificial Sequence
  Description of Artificial Sequence: Synthetic oligonucleotide
uaaggggacuucugacuuc

SEQ ID NO: 3120356 - RNA, 19 nt, Artificial Sequence
  Description of Artificial Sequence: Synthetic oligonucleotide
cuuuagacaugguuuugua

SEQ ID NO: 3120357 - RNA, 19 nt, Artificial Sequence
  Description of Artificial Sequence: Synthetic oligonucleotide
cugguaaggggacuucuga

SEQ ID NO: 3120358 - RNA, 19 nt, Artificial Sequence
  Description of Artificial Sequence: Synthetic oligonucleotide
ccauuuacauucuuucaca

SEQ ID NO: 3120359 - RNA, 19 nt, Artificial Sequence
  Description of Artificial Sequence: Synthetic oligonucleotide
ggaggaauucuccuucaga

SEQ ID NO: 3120360 - RNA, 19 nt, Artificial Sequence
  Description of Artificial Sequence: Synthetic oligonucleotide
cuagcacauuccucgaaaa

SEQ ID NO: 3120361 - RNA, 19 nt, Artificial Sequence
  Description of Artificial Sequence: Synthetic oligonucleotide
agaaucuauguaagaugga

SEQ ID NO: 3120362 - RNA, 19 nt, Artificial Sequence
  Description of Artificial Sequence: Synthetic oligonucleotide
acuucucuuugaagaaucu

SEQ ID NO: 3120363 - RNA, 19 nt, Artificial Sequence
  Description of Artificial Sequence: Synthetic oligonucleotide
uugcuccucuucaacggua

SEQ ID NO: 3120364 - RNA, 19 nt, Artificial Sequence
  Description of Artificial Sequence: Synthetic oligonucleotide
cagaauugucuggaaaaga

SEQ ID NO: 3120365 - RNA, 19 nt, Artificial Sequence
  Description of Artificial Sequence: Synthetic oligonucleotide
cucuuuagacaugguuuug

SEQ ID NO: 3120366 - RNA, 19 nt, Artificial Sequence
  Description of Artificial Sequence: Synthetic oligonucleotide
aucuagcacauuccucgaa

SEQ ID NO: 3120367 - RNA, 19 nt, Artificial Sequence
  Description of Artificial Sequence: Synthetic oligonucleotide
gaaaucaaaugcaucucuu

SEQ ID NO: 3120368 - RNA, 19 nt, Artificial Sequence
  Description of Artificial Sequence: Synthetic oligonucleotide
cauuaccaagaaaucaaau

SEQ ID NO: 3120369 - RNA, 19 nt, Artificial Sequence
  Description of Artificial Sequence: Synthetic oligonucleotide
uaucucugguaaggggacu

SEQ ID NO: 3120370 - RNA, 19 nt, Artificial Sequence
  Description of Artificial Sequence: Synthetic oligonucleotide
guaaggggacuucugacuu

SEQ ID NO: 3120371 - RNA, 19 nt, Artificial Sequence
  Description of Artificial Sequence: Synthetic oligonucleotide
caaauucucuuugcuccuc

SEQ ID NO: 3120372 - RNA, 19 nt, Artificial Sequence
  Description of Artificial Sequence: Synthetic oligonucleotide
gauagcccaaauucucuuu

SEQ ID NO: 3120373 - RNA, 19 nt, Artificial Sequence
  Description of Artificial Sequence: Synthetic oligonucleotide
gguaaggggacuucugacu

SEQ ID NO: 3120374 - RNA, 19 nt, Artificial Sequence
  Description of Artificial Sequence: Synthetic oligonucleotide
agauuccauuuacauucuu

SEQ ID NO: 3120375 - RNA, 19 nt, Artificial Sequence
  Description of Artificial Sequence: Synthetic oligonucleotide
guaagauggauagcccaaa

SEQ ID NO: 3120376 - RNA, 19 nt, Artificial Sequence
  Description of Artificial Sequence: Synthetic oligonucleotide
gcccaaauucucuuugcuc

SEQ ID NO: 3120377 - RNA, 19 nt, Artificial Sequence
  Description of Artificial Sequence: Synthetic oligonucleotide
caucucuuuagacaugguu

SEQ ID NO: 3120378 - RNA, 19 nt, Artificial Sequence
  Description of Artificial Sequence: Synthetic oligonucleotide
gcuauagguaucucuggua

SEQ ID NO: 3120379 - RNA, 19 nt, Artificial Sequence
  Description of Artificial Sequence: Synthetic oligonucleotide
ucucugguaaggggacuuc

SEQ ID NO: 3120380 - RNA, 19 nt, Artificial Sequence
  Description of Artificial Sequence: Synthetic oligonucleotide
aucucugguaaggggacuu

SEQ ID NO: 3120381 - RNA, 19 nt, Artificial Sequence
  Description of Artificial Sequence: Synthetic oligonucleotide
cauuccucgaaaacauuuu

SEQ ID NO: 3120382 - RNA, 19 nt, Artificial Sequence
  Description of Artificial Sequence: Synthetic oligonucleotide
ccuucagauuccauuuaca

SEQ ID NO: 3120383 - RNA, 19 nt, Artificial Sequence
  Description of Artificial Sequence: Synthetic oligonucleotide
gcauuaccaagaaaucaaa

SEQ ID NO: 3120384 - RNA, 19 nt, Artificial Sequence
  Description of Artificial Sequence: Synthetic oligonucleotide
gccacugcauuaccaagaa

SEQ ID NO: 3120385 - RNA, 19 nt, Artificial Sequence
  Description of Artificial Sequence: Synthetic oligonucleotide
cuccucuucaacgguaacu

SEQ ID NO: 3120386 - RNA, 19 nt, Artificial Sequence
  Description of Artificial Sequence: Synthetic oligonucleotide
cuccuucagauuccauuua

SEQ ID NO: 3120387 - RNA, 19 nt, Artificial Sequence
  Description of Artificial Sequence: Synthetic oligonucleotide
caacagcuauagguaucuc

SEQ ID NO: 3120388 - RNA, 19 nt, Artificial Sequence
  Description of Artificial Sequence: Synthetic oligonucleotide
ccucuucaacgguaacuuc

SEQ ID NO: 3120389 - RNA, 19 nt, Artificial Sequence
  Description of Artificial Sequence: Synthetic oligonucleotide
cuucaacgguaacuucaua

SEQ ID NO: 3120390 - RNA, 19 nt, Artificial Sequence
  Description of Artificial Sequence: Synthetic oligonucleotide
gggacuucugacuucucuu

SEQ ID NO: 3120391 - RNA, 19 nt, Artificial Sequence
  Description of Artificial Sequence: Synthetic oligonucleotide
gcacauuccucgaaaacau

SEQ ID NO: 3120392 - RNA, 19 nt, Artificial Sequence
  Description of Artificial Sequence: Synthetic oligonucleotide
ggacuucugacuucucuuu

SEQ ID NO: 3120393 - RNA, 19 nt, Artificial Sequence
  Description of Artificial Sequence: Synthetic oligonucleotide
ggauagcccaaauucucuu

SEQ ID NO: 3120394 - RNA, 19 nt, Artificial Sequence
  Description of Artificial Sequence: Synthetic oligonucleotide
auucuccuucagauuccau

SEQ ID NO: 3120395 - RNA, 19 nt, Artificial Sequence
  Description of Artificial Sequence: Synthetic oligonucleotide
aggggacuucugacuucuc

SEQ ID NO: 3120396 - RNA, 19 nt, Artificial Sequence
  Description of Artificial Sequence: Synthetic oligonucleotide
gcuccucuucaacgguaac

SEQ ID NO: 3120397 - RNA, 19 nt, Artificial Sequence
  Description of Artificial Sequence: Synthetic oligonucleotide
cgguaacuucauacucugc

SEQ ID NO: 3120398 - RNA, 19 nt, Artificial Sequence
  Description of Artificial Sequence: Synthetic oligonucleotide
cucugguaaggggacuucu

SEQ ID NO: 3120399 - RNA, 19 nt, Artificial Sequence
  Description of Artificial Sequence: Synthetic oligonucleotide
cacauuccucgaaaacauu

SEQ ID NO: 3120400 - RNA, 19 nt, Artificial Sequence
  Description of Artificial Sequence: Synthetic oligonucleotide
gcaucucuuuagacauggu

SEQ ID NO: 3120401 - RNA, 19 nt, Artificial Sequence
  Description of Artificial Sequence: Synthetic oligonucleotide
acaagcaggugcuagcucc

SEQ ID NO: 3120402 - RNA, 19 nt, Artificial Sequence
  Description of Artificial Sequence: Synthetic oligonucleotide
uuugccacagguugcaugg

SEQ ID NO: 3120403 - RNA, 19 nt, Artificial Sequence
  Description of Artificial Sequence: Synthetic oligonucleotide
aaggucaauguugacaggg

SEQ ID NO: 3120404 - RNA, 19 nt, Artificial Sequence
  Description of Artificial Sequence: Synthetic oligonucleotide
gaaagugugaccaggauac

SEQ ID NO: 3120405 - RNA, 19 nt, Artificial Sequence
  Description of Artificial Sequence: Synthetic oligonucleotide
caaucgaaggucaauguug

SEQ ID NO: 3120406 - RNA, 19 nt, Artificial Sequence
  Description of Artificial Sequence: Synthetic oligonucleotide
gaccaggauacuuggaggg

SEQ ID NO: 3120407 - RNA, 19 nt, Artificial Sequence
  Description of Artificial Sequence: Synthetic oligonucleotide
gaggaaucggagcaggaag

SEQ ID NO: 3120408 - RNA, 19 nt, Artificial Sequence
  Description of Artificial Sequence: Synthetic oligonucleotide
uuggaguccaccuuugcca

SEQ ID NO: 3120409 - RNA, 19 nt, Artificial Sequence
  Description of Artificial Sequence: Synthetic oligonucleotide
ugaccaggauacuuggagg

SEQ ID NO: 3120410 - RNA, 19 nt, Artificial Sequence
  Description of Artificial Sequence: Synthetic oligonucleotide
acucuggagaacugcagac

SEQ ID NO: 3120411 - RNA, 19 nt, Artificial Sequence
  Description of Artificial Sequence: Synthetic oligonucleotide
aagcccagggcccacauga

SEQ ID NO: 3120412 - RNA, 19 nt, Artificial Sequence
  Description of Artificial Sequence: Synthetic oligonucleotide
aauguugacaggggacugg

SEQ ID NO: 3120413 - RNA, 19 nt, Artificial Sequence
  Description of Artificial Sequence: Synthetic oligonucleotide
gacaaggaaagugugacca

SEQ ID NO: 3120414 - RNA, 19 nt, Artificial Sequence
  Description of Artificial Sequence: Synthetic oligonucleotide
agaacugcagacuggacaa

SEQ ID NO: 3120415 - RNA, 19 nt, Artificial Sequence
  Description of Artificial Sequence: Synthetic oligonucleotide
gugaccaggauacuuggag

SEQ ID NO: 3120416 - RNA, 19 nt, Artificial Sequence
  Description of Artificial Sequence: Synthetic oligonucleotide
gagaacugcagacuggaca

SEQ ID NO: 3120417 - RNA, 19 nt, Artificial Sequence
  Description of Artificial Sequence: Synthetic oligonucleotide
aacugcagacuggacaagg

SEQ ID NO: 3120418 - RNA, 19 nt, Artificial Sequence
  Description of Artificial Sequence: Synthetic oligonucleotide
agucguagcaccaggcacc

SEQ ID NO: 3120419 - RNA, 19 nt, Artificial Sequence
  Description of Artificial Sequence: Synthetic oligonucleotide
ucgaaggucaauguugaca

SEQ ID NO: 3120420 - RNA, 19 nt, Artificial Sequence
  Description of Artificial Sequence: Synthetic oligonucleotide
ucaauguugacaggggacu

SEQ ID NO: 3120421 - RNA, 19 nt, Artificial Sequence
  Description of Artificial Sequence: Synthetic oligonucleotide
aaucgaaggucaauguuga

SEQ ID NO: 3120422 - RNA, 19 nt, Artificial Sequence
  Description of Artificial Sequence: Synthetic oligonucleotide
ugcagacuggacaaggaaa

SEQ ID NO: 3120423 - RNA, 19 nt, Artificial Sequence
  Description of Artificial Sequence: Synthetic oligonucleotide
uggacaaggaaagugugac

SEQ ID NO: 3120424 - RNA, 19 nt, Artificial Sequence
  Description of Artificial Sequence: Synthetic oligonucleotide
auggcgaggaaucggagca

SEQ ID NO: 3120425 - RNA, 19 nt, Artificial Sequence
  Description of Artificial Sequence: Synthetic oligonucleotide
aggaaucggagcaggaagc

SEQ ID NO: 3120426 - RNA, 19 nt, Artificial Sequence
  Description of Artificial Sequence: Synthetic oligonucleotide
cuuggaguccaccuuugcc

SEQ ID NO: 3120427 - RNA, 19 nt, Artificial Sequence
  Description of Artificial Sequence: Synthetic oligonucleotide
uguguagggccgcacguug

SEQ ID NO: 3120428 - RNA, 19 nt, Artificial Sequence
  Description of Artificial Sequence: Synthetic oligonucleotide
uggaucuugggagucguag

SEQ ID NO: 3120429 - RNA, 19 nt, Artificial Sequence
  Description of Artificial Sequence: Synthetic oligonucleotide
cacaugaugcagcuguggc

SEQ ID NO: 3120430 - RNA, 19 nt, Artificial Sequence
  Description of Artificial Sequence: Synthetic oligonucleotide
caugaugcagcuguggcug

SEQ ID NO: 3120431 - RNA, 19 nt, Artificial Sequence
  Description of Artificial Sequence: Synthetic oligonucleotide
cuuccaguguguagggccg

SEQ ID NO: 3120432 - RNA, 19 nt, Artificial Sequence
  Description of Artificial Sequence: Synthetic oligonucleotide
ugcauggcgaggaaucgga

SEQ ID NO: 3120433 - RNA, 19 nt, Artificial Sequence
  Description of Artificial Sequence: Synthetic oligonucleotide
aaucggagcaggaagccca

SEQ ID NO: 3120434 - RNA, 19 nt, Artificial Sequence
  Description of Artificial Sequence: Synthetic oligonucleotide
caaggaaagugugaccagg

SEQ ID NO: 3120435 - RNA, 19 nt, Artificial Sequence
  Description of Artificial Sequence: Synthetic oligonucleotide
gaucuugggagucguagca

SEQ ID NO: 3120436 - RNA, 19 nt, Artificial Sequence
  Description of Artificial Sequence: Synthetic oligonucleotide
ugacucuggagaacugcag

SEQ ID NO: 3120437 - RNA, 19 nt, Artificial Sequence
  Description of Artificial Sequence: Synthetic oligonucleotide
gaccaaucgaaggucaaug

SEQ ID NO: 3120438 - RNA, 19 nt, Artificial Sequence
  Description of Artificial Sequence: Synthetic oligonucleotide
ugugacucuggagaacugc

SEQ ID NO: 3120439 - RNA, 19 nt, Artificial Sequence
  Description of Artificial Sequence: Synthetic oligonucleotide
ugggagucguagcaccagg

SEQ ID NO: 3120440 - RNA, 19 nt, Artificial Sequence
  Description of Artificial Sequence: Synthetic oligonucleotide
acaaggaaagugugaccag

SEQ ID NO: 3120441 - RNA, 19 nt, Artificial Sequence
  Description of Artificial Sequence: Synthetic oligonucleotide
gagucguagcaccaggcac

SEQ ID NO: 3120442 - RNA, 19 nt, Artificial Sequence
  Description of Artificial Sequence: Synthetic oligonucleotide
uugacaggggacugggcug

SEQ ID NO: 3120443 - RNA, 19 nt, Artificial Sequence
  Description of Artificial Sequence: Synthetic oligonucleotide
cauggcgaggaaucggagc

SEQ ID NO: 3120444 - RNA, 19 nt, Artificial Sequence
  Description of Artificial Sequence: Synthetic oligonucleotide
agugugaccaggauacuug

SEQ ID NO: 3120445 - RNA, 19 nt, Artificial Sequence
  Description of Artificial Sequence: Synthetic oligonucleotide
agacuggacaaggaaagug

SEQ ID NO: 3120446 - RNA, 19 nt, Artificial Sequence
  Description of Artificial Sequence: Synthetic oligonucleotide
gcacguuggaucuugggag

SEQ ID NO: 3120447 - RNA, 19 nt, Artificial Sequence
  Description of Artificial Sequence: Synthetic oligonucleotide
gugugaccaggauacuugg

SEQ ID NO: 3120448 - RNA, 19 nt, Artificial Sequence
  Description of Artificial Sequence: Synthetic oligonucleotide
gaaggucaauguugacagg

SEQ ID NO: 3120449 - RNA, 19 nt, Artificial Sequence
  Description of Artificial Sequence: Synthetic oligonucleotide
acaugaugcagcuguggcu

SEQ ID NO: 3120450 - RNA, 19 nt, Artificial Sequence
  Description of Artificial Sequence: Synthetic oligonucleotide
accaaucgaaggucaaugu

SEQ ID NO: 3120451 - RNA, 19 nt, Artificial Sequence
  Description of Artificial Sequence: Synthetic oligonucleotide
uguggcugugacucuggag

SEQ ID NO: 3120452 - RNA, 19 nt, Artificial Sequence
  Description of Artificial Sequence: Synthetic oligonucleotide
cgaaggucaauguugacag

SEQ ID NO: 3120453 - RNA, 19 nt, Artificial Sequence
  Description of Artificial Sequence: Synthetic oligonucleotide
uggagaacugcagacugga

SEQ ID NO: 3120454 - RNA, 19 nt, Artificial Sequence
  Description of Artificial Sequence: Synthetic oligonucleotide
gacucuggagaacugcaga

SEQ ID NO: 3120455 - RNA, 19 nt, Artificial Sequence
  Description of Artificial Sequence: Synthetic oligonucleotide
cuuugccacagguugcaug

SEQ ID NO: 3120456 - RNA, 19 nt, Artificial Sequence
  Description of Artificial Sequence: Synthetic oligonucleotide
aaggaaagugugaccagga

SEQ ID NO: 3120457 - RNA, 19 nt, Artificial Sequence
  Description of Artificial Sequence: Synthetic oligonucleotide
ugacaggggacugggcugg

SEQ ID NO: 3120458 - RNA, 19 nt, Artificial Sequence
  Description of Artificial Sequence: Synthetic oligonucleotide
accaggauacuuggagggc

SEQ ID NO: 3120459 - RNA, 19 nt, Artificial Sequence
  Description of Artificial Sequence: Synthetic oligonucleotide
aguguguagggccgcacgu

SEQ ID NO: 3120460 - RNA, 19 nt, Artificial Sequence
  Description of Artificial Sequence: Synthetic oligonucleotide
guugcauggcgaggaaucg

SEQ ID NO: 3120461 - RNA, 19 nt, Artificial Sequence
  Description of Artificial Sequence: Synthetic oligonucleotide
auguugacaggggacuggg

SEQ ID NO: 3120462 - RNA, 19 nt, Artificial Sequence
  Description of Artificial Sequence: Synthetic oligonucleotide
uggaguccaccuuugccac

SEQ ID NO: 3120463 - RNA, 19 nt, Artificial Sequence
  Description of Artificial Sequence: Synthetic oligonucleotide
gucaauguugacaggggac

SEQ ID NO: 3120464 - RNA, 19 nt, Artificial Sequence
  Description of Artificial Sequence: Synthetic oligonucleotide
aucgaaggucaauguugac

SEQ ID NO: 3120465 - RNA, 19 nt, Artificial Sequence
  Description of Artificial Sequence: Synthetic oligonucleotide
ugugaccaggauacuugga

SEQ ID NO: 3120466 - RNA, 19 nt, Artificial Sequence
  Description of Artificial Sequence: Synthetic oligonucleotide
accaggcacccuuggaguc

SEQ ID NO: 3120467 - RNA, 19 nt, Artificial Sequence
  Description of Artificial Sequence: Synthetic oligonucleotide
uugcauggcgaggaaucgg

SEQ ID NO: 3120468 - RNA, 19 nt, Artificial Sequence
  Description of Artificial Sequence: Synthetic oligonucleotide
uguagggccgcacguugga

SEQ ID NO: 3120469 - RNA, 19 nt, Artificial Sequence
  Description of Artificial Sequence: Synthetic oligonucleotide
acagguugcauggcgagga

SEQ ID NO: 3120470 - RNA, 19 nt, Artificial Sequence
  Description of Artificial Sequence: Synthetic oligonucleotide
gaguccaccuuugccacag

SEQ ID NO: 3120471 - RNA, 19 nt, Artificial Sequence
  Description of Artificial Sequence: Synthetic oligonucleotide
aucuugggagucguagcac

SEQ ID NO: 3120472 - RNA, 19 nt, Artificial Sequence
  Description of Artificial Sequence: Synthetic oligonucleotide
ccuuccaguguguagggcc

SEQ ID NO: 3120473 - RNA, 19 nt, Artificial Sequence
  Description of Artificial Sequence: Synthetic oligonucleotide
agcaggugcuagcuccuuc

SEQ ID NO: 3120474 - RNA, 19 nt, Artificial Sequence
  Description of Artificial Sequence: Synthetic oligonucleotide
gcuagcuccuuccagugug

SEQ ID NO: 3120475 - RNA, 19 nt, Artificial Sequence
  Description of Artificial Sequence: Synthetic oligonucleotide
gcagacuggacaaggaaag

SEQ ID NO: 3120476 - RNA, 19 nt, Artificial Sequence
  Description of Artificial Sequence: Synthetic oligonucleotide
acuggacaaggaaagugug

SEQ ID NO: 3120477 - RNA, 19 nt, Artificial Sequence
  Description of Artificial Sequence: Synthetic oligonucleotide
gaaucggagcaggaagccc

SEQ ID NO: 3120478 - RNA, 19 nt, Artificial Sequence
  Description of Artificial Sequence: Synthetic oligonucleotide
agcuccuuccaguguguag

SEQ ID NO: 3120479 - RNA, 19 nt, Artificial Sequence
  Description of Artificial Sequence: Synthetic oligonucleotide
caguguguagggccgcacg

SEQ ID NO: 3120480 - RNA, 19 nt, Artificial Sequence
  Description of Artificial Sequence: Synthetic oligonucleotide
aggucaauguugacagggg

SEQ ID NO: 3120481 - RNA, 19 nt, Artificial Sequence
  Description of Artificial Sequence: Synthetic oligonucleotide
guugacaggggacugggcu

SEQ ID NO: 3120482 - RNA, 19 nt, Artificial Sequence
  Description of Artificial Sequence: Synthetic oligonucleotide
aagugugaccaggauacuu

SEQ ID NO: 3120483 - RNA, 19 nt, Artificial Sequence
  Description of Artificial Sequence: Synthetic oligonucleotide
uguugacaggggacugggc

SEQ ID NO: 3120484 - RNA, 19 nt, Artificial Sequence
  Description of Artificial Sequence: Synthetic oligonucleotide
uccaccuuugccacagguu

SEQ ID NO: 3120485 - RNA, 19 nt, Artificial Sequence
  Description of Artificial Sequence: Synthetic oligonucleotide
agggcccacaugaugcagc

SEQ ID NO: 3120486 - RNA, 19 nt, Artificial Sequence
  Description of Artificial Sequence: Synthetic oligonucleotide
aggugcuagcuccuuccag

SEQ ID NO: 3120487 - RNA, 19 nt, Artificial Sequence
  Description of Artificial Sequence: Synthetic oligonucleotide
cuccuuccaguguguaggg

SEQ ID NO: 3120488 - RNA, 19 nt, Artificial Sequence
  Description of Artificial Sequence: Synthetic oligonucleotide
agggccgcacguuggaucu

SEQ ID NO: 3120489 - RNA, 19 nt, Artificial Sequence
  Description of Artificial Sequence: Synthetic oligonucleotide
ggaucuugggagucguagc

SEQ ID NO: 3120490 - RNA, 19 nt, Artificial Sequence
  Description of Artificial Sequence: Synthetic oligonucleotide
uagcaccaggcacccuugg

SEQ ID NO: 3120491 - RNA, 19 nt, Artificial Sequence
  Description of Artificial Sequence: Synthetic oligonucleotide
augcagcuguggcugugac

SEQ ID NO: 3120492 - RNA, 19 nt, Artificial Sequence
  Description of Artificial Sequence: Synthetic oligonucleotide
aggaaagugugaccaggau

SEQ ID NO: 3120493 - RNA, 19 nt, Artificial Sequence
  Description of Artificial Sequence: Synthetic oligonucleotide
uggaccaaucgaaggucaa

SEQ ID NO: 3120494 - RNA, 19 nt, Artificial Sequence
  Description of Artificial Sequence: Synthetic oligonucleotide
cuggacaaggaaaguguga

SEQ ID NO: 3120495 - RNA, 19 nt, Artificial Sequence
  Description of Artificial Sequence: Synthetic oligonucleotide
gacuggacaaggaaagugu

SEQ ID NO: 3120496 - RNA, 19 nt, Artificial Sequence
  Description of Artificial Sequence: Synthetic oligonucleotide
uugggagucguagcaccag

SEQ ID NO: 3120497 - RNA, 19 nt, Artificial Sequence
  Description of Artificial Sequence: Synthetic oligonucleotide
caggauacuuggagggcug

SEQ ID NO: 3120498 - RNA, 19 nt, Artificial Sequence
  Description of Artificial Sequence: Synthetic oligonucleotide
gcaccaggcacccuuggag

SEQ ID NO: 3120499 - RNA, 19 nt, Artificial Sequence
  Description of Artificial Sequence: Synthetic oligonucleotide
ggaaagugugaccaggaua

SEQ ID NO: 3120500 - RNA, 19 nt, Artificial Sequence
  Description of Artificial Sequence: Synthetic oligonucleotide
aaagugugaccaggauacu

SEQ ID NO: 3120501 - RNA, 19 nt, Artificial Sequence
  Description of Artificial Sequence: Synthetic oligonucleotide
gugcuagcuccuuccagug

SEQ ID NO: 3120502 - RNA, 19 nt, Artificial Sequence
  Description of Artificial Sequence: Synthetic oligonucleotide
ugcuagcuccuuccagugu

SEQ ID NO: 3120503 - RNA, 19 nt, Artificial Sequence
  Description of Artificial Sequence: Synthetic oligonucleotide
ggacaaggaaagugugacc

SEQ ID NO: 3120504 - RNA, 19 nt, Artificial Sequence
  Description of Artificial Sequence: Synthetic oligonucleotide
uagggccgcacguuggauc

SEQ ID NO: 3120505 - RNA, 19 nt, Artificial Sequence
  Description of Artificial Sequence: Synthetic oligonucleotide
caauguugacaggggacug

SEQ ID NO: 3120506 - RNA, 19 nt, Artificial Sequence
  Description of Artificial Sequence: Synthetic oligonucleotide
ggucaauguugacagggga

SEQ ID NO: 3120507 - RNA, 19 nt, Artificial Sequence
  Description of Artificial Sequence: Synthetic oligonucleotide
acguuggaucuugggaguc

SEQ ID NO: 3120508 - RNA, 19 nt, Artificial Sequence
  Description of Artificial Sequence: Synthetic oligonucleotide
ugcagcuguggcugugacu

SEQ ID NO: 3120509 - RNA, 19 nt, Artificial Sequence
  Description of Artificial Sequence: Synthetic oligonucleotide
gguugcauggcgaggaauc

SEQ ID NO: 3120510 - RNA, 19 nt, Artificial Sequence
  Description of Artificial Sequence: Synthetic oligonucleotide
cacagguugcauggcgagg

SEQ ID NO: 3120511 - RNA, 19 nt, Artificial Sequence
  Description of Artificial Sequence: Synthetic oligonucleotide
gaacugcagacuggacaag

SEQ ID NO: 3120512 - RNA, 19 nt, Artificial Sequence
  Description of Artificial Sequence: Synthetic oligonucleotide
gugacucuggagaacugca

SEQ ID NO: 3120513 - RNA, 19 nt, Artificial Sequence
  Description of Artificial Sequence: Synthetic oligonucleotide
acccuuggaguccaccuuu

SEQ ID NO: 3120514 - RNA, 19 nt, Artificial Sequence
  Description of Artificial Sequence: Synthetic oligonucleotide
gaagcccagggcccacaug

SEQ ID NO: 3120515 - RNA, 19 nt, Artificial Sequence
  Description of Artificial Sequence: Synthetic oligonucleotide
ggaaucggagcaggaagcc

SEQ ID NO: 3120516 - RNA, 19 nt, Artificial Sequence
  Description of Artificial Sequence: Synthetic oligonucleotide
acugcagacuggacaagga

SEQ ID NO: 3120517 - RNA, 19 nt, Artificial Sequence
  Description of Artificial Sequence: Synthetic oligonucleotide
cugugacucuggagaacug

SEQ ID NO: 3120518 - RNA, 19 nt, Artificial Sequence
  Description of Artificial Sequence: Synthetic oligonucleotide
gucguagcaccaggcaccc

SEQ ID NO: 3120519 - RNA, 19 nt, Artificial Sequence
  Description of Artificial Sequence: Synthetic oligonucleotide
cacaagcaggugcuagcuc

SEQ ID NO: 3120520 - RNA, 19 nt, Artificial Sequence
  Description of Artificial Sequence: Synthetic oligonucleotide
uccuuccaguguguagggc

SEQ ID NO: 3120521 - RNA, 19 nt, Artificial Sequence
  Description of Artificial Sequence: Synthetic oligonucleotide
ggagucguagcaccaggca

SEQ ID NO: 3120522 - RNA, 19 nt, Artificial Sequence
  Description of Artificial Sequence: Synthetic oligonucleotide
ggugcuagcuccuuccagu

SEQ ID NO: 3120523 - RNA, 19 nt, Artificial Sequence
  Description of Artificial Sequence: Synthetic oligonucleotide
uggcgaggaaucggagcag

SEQ ID NO: 3120524 - RNA, 19 nt, Artificial Sequence
  Description of Artificial Sequence: Synthetic oligonucleotide
ggcgaggaaucggagcagg

SEQ ID NO: 3120525 - RNA, 19 nt, Artificial Sequence
  Description of Artificial Sequence: Synthetic oligonucleotide
aguccaccuuugccacagg

SEQ ID NO: 3120526 - RNA, 19 nt, Artificial Sequence
  Description of Artificial Sequence: Synthetic oligonucleotide
cccacaagcaggugcuagc

SEQ ID NO: 3120527 - RNA, 19 nt, Artificial Sequence
  Description of Artificial Sequence: Synthetic oligonucleotide
guagcaccaggcacccuug

SEQ ID NO: 3120528 - RNA, 19 nt, Artificial Sequence
  Description of Artificial Sequence: Synthetic oligonucleotide
uuggaucuugggagucgua

SEQ ID NO: 3120529 - RNA, 19 nt, Artificial Sequence
  Description of Artificial Sequence: Synthetic oligonucleotide
uuccaguguguagggccgc

SEQ ID NO: 3120530 - RNA, 19 nt, Artificial Sequence
  Description of Artificial Sequence: Synthetic oligonucleotide
uccaguguguagggccgca

SEQ ID NO: 3120531 - RNA, 19 nt, Artificial Sequence
  Description of Artificial Sequence: Synthetic oligonucleotide
ccacagguugcauggcgag

SEQ ID NO: 3120532 - RNA, 19 nt, Artificial Sequence
  Description of Artificial Sequence: Synthetic oligonucleotide
aucggagcaggaagcccag

SEQ ID NO: 3120533 - RNA, 19 nt, Artificial Sequence
  Description of Artificial Sequence: Synthetic oligonucleotide
uugccacagguugcauggc

SEQ ID NO: 3120534 - RNA, 19 nt, Artificial Sequence
  Description of Artificial Sequence: Synthetic oligonucleotide
ccacaugaugcagcugugg

SEQ ID NO: 3120535 - RNA, 19 nt, Artificial Sequence
  Description of Artificial Sequence: Synthetic oligonucleotide
gggagucguagcaccaggc

SEQ ID NO: 3120536 - RNA, 19 nt, Artificial Sequence
  Description of Artificial Sequence: Synthetic oligonucleotide
agguugcauggcgaggaau

SEQ ID NO: 3120537 - RNA, 19 nt, Artificial Sequence
  Description of Artificial Sequence: Synthetic oligonucleotide
cacguuggaucuugggagu

SEQ ID NO: 3120538 - RNA, 19 nt, Artificial Sequence
  Description of Artificial Sequence: Synthetic oligonucleotide
guuggaucuugggagucgu

SEQ ID NO: 3120539 - RNA, 19 nt, Artificial Sequence
  Description of Artificial Sequence: Synthetic oligonucleotide
cagggcccacaugaugcag

SEQ ID NO: 3120540 - RNA, 19 nt, Artificial Sequence
  Description of Artificial Sequence: Synthetic oligonucleotide
gacaggggacugggcuggg

SEQ ID NO: 3120541 - RNA, 19 nt, Artificial Sequence
  Description of Artificial Sequence: Synthetic oligonucleotide
guccaccuuugccacaggu

SEQ ID NO: 3120542 - RNA, 19 nt, Artificial Sequence
  Description of Artificial Sequence: Synthetic oligonucleotide
caccaggcacccuuggagu

SEQ ID NO: 3120543 - RNA, 19 nt, Artificial Sequence
  Description of Artificial Sequence: Synthetic oligonucleotide
caggugcuagcuccuucca

SEQ ID NO: 3120544 - RNA, 19 nt, Artificial Sequence
  Description of Artificial Sequence: Synthetic oligonucleotide
aagcaggugcuagcuccuu

SEQ ID NO: 3120545 - RNA, 19 nt, Artificial Sequence
  Description of Artificial Sequence: Synthetic oligonucleotide
caagcaggugcuagcuccu

SEQ ID NO: 3120546 - RNA, 19 nt, Artificial Sequence
  Description of Artificial Sequence: Synthetic oligonucleotide
cucuggagaacugcagacu

SEQ ID NO: 3120547 - RNA, 19 nt, Artificial Sequence
  Description of Artificial Sequence: Synthetic oligonucleotide
ccgcacguuggaucuuggg

SEQ ID NO: 3120548 - RNA, 19 nt, Artificial Sequence
  Description of Artificial Sequence: Synthetic oligonucleotide
uagcuccuuccagugugua

SEQ ID NO: 3120549 - RNA, 19 nt, Artificial Sequence
  Description of Artificial Sequence: Synthetic oligonucleotide
cgcacguuggaucuuggga

SEQ ID NO: 3120550 - RNA, 19 nt, Artificial Sequence
  Description of Artificial Sequence: Synthetic oligonucleotide
cuagcuccuuccagugugu

SEQ ID NO: 3120551 - RNA, 19 nt, Artificial Sequence
  Description of Artificial Sequence: Synthetic oligonucleotide
gcauggcgaggaaucggag

SEQ ID NO: 3120552 - RNA, 19 nt, Artificial Sequence
  Description of Artificial Sequence: Synthetic oligonucleotide
cguuggaucuugggagucg

SEQ ID NO: 3120553 - RNA, 19 nt, Artificial Sequence
  Description of Artificial Sequence: Synthetic oligonucleotide
ggagaacugcagacuggac

SEQ ID NO: 3120554 - RNA, 19 nt, Artificial Sequence
  Description of Artificial Sequence: Synthetic oligonucleotide
cccacaugaugcagcugug

SEQ ID NO: 3120555 - RNA, 19 nt, Artificial Sequence
  Description of Artificial Sequence: Synthetic oligonucleotide
ccaggcacccuuggagucc

SEQ ID NO: 3120556 - RNA, 19 nt, Artificial Sequence
  Description of Artificial Sequence: Synthetic oligonucleotide
ggcacccuuggaguccacc

SEQ ID NO: 3120557 - RNA, 19 nt, Artificial Sequence
  Description of Artificial Sequence: Synthetic oligonucleotide
gccacagguugcauggcga

SEQ ID NO: 3120558 - RNA, 19 nt, Artificial Sequence
  Description of Artificial Sequence: Synthetic oligonucleotide
cccuuggaguccaccuuug

SEQ ID NO: 3120559 - RNA, 19 nt, Artificial Sequence
  Description of Artificial Sequence: Synthetic oligonucleotide
gcacccuuggaguccaccu

SEQ ID NO: 3120560 - RNA, 19 nt, Artificial Sequence
  Description of Artificial Sequence: Synthetic oligonucleotide
ccccacaagcaggugcuag

SEQ ID NO: 3120561 - RNA, 19 nt, Artificial Sequence
  Description of Artificial Sequence: Synthetic oligonucleotide
ggaguccaccuuugccaca

SEQ ID NO: 3120562 - RNA, 19 nt, Artificial Sequence
  Description of Artificial Sequence: Synthetic oligonucleotide
ggccgcacguuggaucuug

SEQ ID NO: 3120563 - RNA, 19 nt, Artificial Sequence
  Description of Artificial Sequence: Synthetic oligonucleotide
ggggacugggcugggcccc

SEQ ID NO: 3120564 - RNA, 19 nt, Artificial Sequence
  Description of Artificial Sequence: Synthetic oligonucleotide
caggcacccuuggagucca

SEQ ID NO: 3120565 - RNA, 19 nt, Artificial Sequence
  Description of Artificial Sequence: Synthetic oligonucleotide
cagacuggacaaggaaagu

SEQ ID NO: 3120566 - RNA, 19 nt, Artificial Sequence
  Description of Artificial Sequence: Synthetic oligonucleotide
cagguugcauggcgaggaa

SEQ ID NO: 3120567 - RNA, 19 nt, Artificial Sequence
  Description of Artificial Sequence: Synthetic oligonucleotide
caggaagcccagggcccac

SEQ ID NO: 3120568 - RNA, 19 nt, Artificial Sequence
  Description of Artificial Sequence: Synthetic oligonucleotide
ccaaucgaaggucaauguu

SEQ ID NO: 3120569 - RNA, 19 nt, Artificial Sequence
  Description of Artificial Sequence: Synthetic oligonucleotide
gggcccacaugaugcagcu

SEQ ID NO: 3120570 - RNA, 19 nt, Artificial Sequence
  Description of Artificial Sequence: Synthetic oligonucleotide
ucguagcaccaggcacccu

SEQ ID NO: 3120571 - RNA, 19 nt, Artificial Sequence
  Description of Artificial Sequence: Synthetic oligonucleotide
gccgcacguuggaucuugg

SEQ ID NO: 3120572 - RNA, 19 nt, Artificial Sequence
  Description of Artificial Sequence: Synthetic oligonucleotide
ccaggauacuuggagggcu

SEQ ID NO: 3120573 - RNA, 19 nt, Artificial Sequence
  Description of Artificial Sequence: Synthetic oligonucleotide
ggaccaaucgaaggucaau

SEQ ID NO: 3120574 - RNA, 19 nt, Artificial Sequence
  Description of Artificial Sequence: Synthetic oligonucleotide
gcgaggaaucggagcagga

SEQ ID NO: 3120575 - RNA, 19 nt, Artificial Sequence
  Description of Artificial Sequence: Synthetic oligonucleotide
ccaguguguagggccgcac

SEQ ID NO: 3120576 - RNA, 19 nt, Artificial Sequence
  Description of Artificial Sequence: Synthetic oligonucleotide
agcccagggcccacaugau

SEQ ID NO: 3120577 - RNA, 19 nt, Artificial Sequence
  Description of Artificial Sequence: Synthetic oligonucleotide
cacccuuggaguccaccuu

SEQ ID NO: 3120578 - RNA, 19 nt, Artificial Sequence
  Description of Artificial Sequence: Synthetic oligonucleotide
guguguagggccgcacguu

SEQ ID NO: 3120579 - RNA, 19 nt, Artificial Sequence
  Description of Artificial Sequence: Synthetic oligonucleotide
ggcccacaugaugcagcug

SEQ ID NO: 3120580 - RNA, 19 nt, Artificial Sequence
  Description of Artificial Sequence: Synthetic oligonucleotide
aggcacccuuggaguccac

SEQ ID NO: 3120581 - RNA, 19 nt, Artificial Sequence
  Description of Artificial Sequence: Synthetic oligonucleotide
cgaggaaucggagcaggaa

SEQ ID NO: 3120582 - RNA, 19 nt, Artificial Sequence
  Description of Artificial Sequence: Synthetic oligonucleotide
ccacaagcaggugcuagcu

SEQ ID NO: 3120583 - RNA, 19 nt, Artificial Sequence
  Description of Artificial Sequence: Synthetic oligonucleotide
guagggccgcacguuggau

SEQ ID NO: 3120584 - RNA, 19 nt, Artificial Sequence
  Description of Artificial Sequence: Synthetic oligonucleotide
ggaagcccagggcccacau

SEQ ID NO: 3120585 - RNA, 19 nt, Artificial Sequence
  Description of Artificial Sequence: Synthetic oligonucleotide
cguagcaccaggcacccuu

SEQ ID NO: 3120586 - RNA, 19 nt, Artificial Sequence
  Description of Artificial Sequence: Synthetic oligonucleotide
cagcuguggcugugacucu

SEQ ID NO: 3120587 - RNA, 19 nt, Artificial Sequence
  Description of Artificial Sequence: Synthetic oligonucleotide
ccuuugccacagguugcau

SEQ ID NO: 3120588 - RNA, 19 nt, Artificial Sequence
  Description of Artificial Sequence: Synthetic oligonucleotide
gggccgcacguuggaucuu

SEQ ID NO: 3120589 - RNA, 19 nt, Artificial Sequence
  Description of Artificial Sequence: Synthetic oligonucleotide
aauaugaggaaccaguucc

SEQ ID NO: 3120590 - RNA, 19 nt, Artificial Sequence
  Description of Artificial Sequence: Synthetic oligonucleotide
uauugugugauccaugucg

SEQ ID NO: 3120591 - RNA, 19 nt, Artificial Sequence
  Description of Artificial Sequence: Synthetic oligonucleotide
uucaacaccaacaugauca

SEQ ID NO: 3120592 - RNA, 19 nt, Artificial Sequence
  Description of Artificial Sequence: Synthetic oligonucleotide
aaugugaaaagccagguga

SEQ ID NO: 3120593 - RNA, 19 nt, Artificial Sequence
  Description of Artificial Sequence: Synthetic oligonucleotide
uguccaaauauccagacug

SEQ ID NO: 3120594 - RNA, 19 nt, Artificial Sequence
  Description of Artificial Sequence: Synthetic oligonucleotide
auugcaaugagguaccagg

SEQ ID NO: 3120595 - RNA, 19 nt, Artificial Sequence
  Description of Artificial Sequence: Synthetic oligonucleotide
aauauugugugauccaugu

SEQ ID NO: 3120596 - RNA, 19 nt, Artificial Sequence
  Description of Artificial Sequence: Synthetic oligonucleotide
aacaugaucaggaagagca

SEQ ID NO: 3120597 - RNA, 19 nt, Artificial Sequence
  Description of Artificial Sequence: Synthetic oligonucleotide
auuuucacaauacagcaug

SEQ ID NO: 3120598 - RNA, 19 nt, Artificial Sequence
  Description of Artificial Sequence: Synthetic oligonucleotide
aaauaugaggaaccaguuc

SEQ ID NO: 3120599 - RNA, 19 nt, Artificial Sequence
  Description of Artificial Sequence: Synthetic oligonucleotide
aagagcaaugugaaaagcc

SEQ ID NO: 3120600 - RNA, 19 nt, Artificial Sequence
  Description of Artificial Sequence: Synthetic oligonucleotide
uuaaguaacauugcaauga

SEQ ID NO: 3120601 - RNA, 19 nt, Artificial Sequence
  Description of Artificial Sequence: Synthetic oligonucleotide
uuuuaauauugugugaucc

SEQ ID NO: 3120602 - RNA, 19 nt, Artificial Sequence
  Description of Artificial Sequence: Synthetic oligonucleotide
gacuggaauaaauaugagg

SEQ ID NO: 3120603 - RNA, 19 nt, Artificial Sequence
  Description of Artificial Sequence: Synthetic oligonucleotide
ucacaauacagcaugacaa

SEQ ID NO: 3120604 - RNA, 19 nt, Artificial Sequence
  Description of Artificial Sequence: Synthetic oligonucleotide
acuggaauaaauaugagga

SEQ ID NO: 3120605 - RNA, 19 nt, Artificial Sequence
  Description of Artificial Sequence: Synthetic oligonucleotide
caaagccagacuuacaccg

SEQ ID NO: 3120606 - RNA, 19 nt, Artificial Sequence
  Description of Artificial Sequence: Synthetic oligonucleotide
auaguguccaaauauccag

SEQ ID NO: 3120607 - RNA, 19 nt, Artificial Sequence
  Description of Artificial Sequence: Synthetic oligonucleotide
aguuucaacaccaacauga

SEQ ID NO: 3120608 - RNA, 19 nt, Artificial Sequence
  Description of Artificial Sequence: Synthetic oligonucleotide
uaaguaacauugcaaugag

SEQ ID NO: 3120609 - RNA, 19 nt, Artificial Sequence
  Description of Artificial Sequence: Synthetic oligonucleotide
aauaaauaugaggaaccag

SEQ ID NO: 3120610 - RNA, 19 nt, Artificial Sequence
  Description of Artificial Sequence: Synthetic oligonucleotide
acuuaaguaacauugcaau

SEQ ID NO: 3120611 - RNA, 19 nt, Artificial Sequence
  Description of Artificial Sequence: Synthetic oligonucleotide
aguaacauugcaaugaggu

SEQ ID NO: 3120612 - RNA, 19 nt, Artificial Sequence
  Description of Artificial Sequence: Synthetic oligonucleotide
aacauugcaaugagguacc

SEQ ID NO: 3120613 - RNA, 19 nt, Artificial Sequence
  Description of Artificial Sequence: Synthetic oligonucleotide
uucacaauacagcaugaca

SEQ ID NO: 3120614 - RNA, 19 nt, Artificial Sequence
  Description of Artificial Sequence: Synthetic oligonucleotide
uaacauugcaaugagguac

SEQ ID NO: 3120615 - RNA, 19 nt, Artificial Sequence
  Description of Artificial Sequence: Synthetic oligonucleotide
uuuaauauugugugaucca

SEQ ID NO: 3120616 - RNA, 19 nt, Artificial Sequence
  Description of Artificial Sequence: Synthetic oligonucleotide
uaacuuaaguaacauugca

SEQ ID NO: 3120617 - RNA, 19 nt, Artificial Sequence
  Description of Artificial Sequence: Synthetic oligonucleotide
auaaauaugaggaaccagu

SEQ ID NO: 3120618 - RNA, 19 nt, Artificial Sequence
  Description of Artificial Sequence: Synthetic oligonucleotide
cuaacuuaaguaacauugc

SEQ ID NO: 3120619 - RNA, 19 nt, Artificial Sequence
  Description of Artificial Sequence: Synthetic oligonucleotide
agacuuacaccguccagcc

SEQ ID NO: 3120620 - RNA, 19 nt, Artificial Sequence
  Description of Artificial Sequence: Synthetic oligonucleotide
aacaccaacaugaucagga

SEQ ID NO: 3120621 - RNA, 19 nt, Artificial Sequence
  Description of Artificial Sequence: Synthetic oligonucleotide
gcuaacuuaaguaacauug

SEQ ID NO: 3120622 - RNA, 19 nt, Artificial Sequence
  Description of Artificial Sequence: Synthetic oligonucleotide
uggaauaaauaugaggaac

SEQ ID NO: 3120623 - RNA, 19 nt, Artificial Sequence
  Description of Artificial Sequence: Synthetic oligonucleotide
ucauccaguuucaacacca

SEQ ID NO: 3120624 - RNA, 19 nt, Artificial Sequence
  Description of Artificial Sequence: Synthetic oligonucleotide
aguguccaaauauccagac

SEQ ID NO: 3120625 - RNA, 19 nt, Artificial Sequence
  Description of Artificial Sequence: Synthetic oligonucleotide
ugugugauccaugucgggg

SEQ ID NO: 3120626 - RNA, 19 nt, Artificial Sequence
  Description of Artificial Sequence: Synthetic oligonucleotide
cagacuggaauaaauauga

SEQ ID NO: 3120627 - RNA, 19 nt, Artificial Sequence
  Description of Artificial Sequence: Synthetic oligonucleotide
cuuaaguaacauugcaaug

SEQ ID NO: 3120628 - RNA, 19 nt, Artificial Sequence
  Description of Artificial Sequence: Synthetic oligonucleotide
agaaggcuaacuuaaguaa

SEQ ID NO: 3120629 - RNA, 19 nt, Artificial Sequence
  Description of Artificial Sequence: Synthetic oligonucleotide
gucaaagccagacuuacac

SEQ ID NO: 3120630 - RNA, 19 nt, Artificial Sequence
  Description of Artificial Sequence: Synthetic oligonucleotide
aaauauccagacuggaaua

SEQ ID NO: 3120631 - RNA, 19 nt, Artificial Sequence
  Description of Artificial Sequence: Synthetic oligonucleotide
uaauauugugugauccaug

SEQ ID NO: 3120632 - RNA, 19 nt, Artificial Sequence
  Description of Artificial Sequence: Synthetic oligonucleotide
ucaggaagagcaaugugaa

SEQ ID NO: 3120633 - RNA, 19 nt, Artificial Sequence
  Description of Artificial Sequence: Synthetic oligonucleotide
acaccguccagccauuuuc

SEQ ID NO: 3120634 - RNA, 19 nt, Artificial Sequence
  Description of Artificial Sequence: Synthetic oligonucleotide
uaaauaugaggaaccaguu

SEQ ID NO: 3120635 - RNA, 19 nt, Artificial Sequence
  Description of Artificial Sequence: Synthetic oligonucleotide
uccagacuggaauaaauau

SEQ ID NO: 3120636 - RNA, 19 nt, Artificial Sequence
  Description of Artificial Sequence: Synthetic oligonucleotide
cacaauacagcaugacaag

SEQ ID NO: 3120637 - RNA, 19 nt, Artificial Sequence
  Description of Artificial Sequence: Synthetic oligonucleotide
aagccagacuuacaccguc

SEQ ID NO: 3120638 - RNA, 19 nt, Artificial Sequence
  Description of Artificial Sequence: Synthetic oligonucleotide
uuuucacaauacagcauga

SEQ ID NO: 3120639 - RNA, 19 nt, Artificial Sequence
  Description of Artificial Sequence: Synthetic oligonucleotide
ggaauaaauaugaggaacc

SEQ ID NO: 3120640 - RNA, 19 nt, Artificial Sequence
  Description of Artificial Sequence: Synthetic oligonucleotide
acuuacaccguccagccau

SEQ ID NO: 3120641 - RNA, 19 nt, Artificial Sequence
  Description of Artificial Sequence: Synthetic oligonucleotide
ucaaagccagacuuacacc

SEQ ID NO: 3120642 - RNA, 19 nt, Artificial Sequence
  Description of Artificial Sequence: Synthetic oligonucleotide
uuaauauugugugauccau

SEQ ID NO: 3120643 - RNA, 19 nt, Artificial Sequence
  Description of Artificial Sequence: Synthetic oligonucleotide
accaacaugaucaggaaga

SEQ ID NO: 3120644 - RNA, 19 nt, Artificial Sequence
  Description of Artificial Sequence: Synthetic oligonucleotide
uugcaaugagguaccaggc

SEQ ID NO: 3120645 - RNA, 19 nt, Artificial Sequence
  Description of Artificial Sequence: Synthetic oligonucleotide
aacuuaaguaacauugcaa

SEQ ID NO: 3120646 - RNA, 19 nt, Artificial Sequence
  Description of Artificial Sequence: Synthetic oligonucleotide
caugacaaggaggauagug

SEQ ID NO: 3120647 - RNA, 19 nt, Artificial Sequence
  Description of Artificial Sequence: Synthetic oligonucleotide
aucaggaagagcaauguga

SEQ ID NO: 3120648 - RNA, 19 nt, Artificial Sequence
  Description of Artificial Sequence: Synthetic oligonucleotide
ugugaaaagccaggugagg

SEQ ID NO: 3120649 - RNA, 19 nt, Artificial Sequence
  Description of Artificial Sequence: Synthetic oligonucleotide
aauauccagacuggaauaa

SEQ ID NO: 3120650 - RNA, 19 nt, Artificial Sequence
  Description of Artificial Sequence: Synthetic oligonucleotide
uauccagacuggaauaaau

SEQ ID NO: 3120651 - RNA, 19 nt, Artificial Sequence
  Description of Artificial Sequence: Synthetic oligonucleotide
auugugugauccaugucgg

SEQ ID NO: 3120652 - RNA, 19 nt, Artificial Sequence
  Description of Artificial Sequence: Synthetic oligonucleotide
gaauaaauaugaggaacca

SEQ ID NO: 3120653 - RNA, 19 nt, Artificial Sequence
  Description of Artificial Sequence: Synthetic oligonucleotide
aaguaacauugcaaugagg

SEQ ID NO: 3120654 - RNA, 19 nt, Artificial Sequence
  Description of Artificial Sequence: Synthetic oligonucleotide
gaaggcuaacuuaaguaac

SEQ ID NO: 3120655 - RNA, 19 nt, Artificial Sequence
  Description of Artificial Sequence: Synthetic oligonucleotide
ugacaaggaggauaguguc

SEQ ID NO: 3120656 - RNA, 19 nt, Artificial Sequence
  Description of Artificial Sequence: Synthetic oligonucleotide
agcaaugugaaaagccagg

SEQ ID NO: 3120657 - RNA, 19 nt, Artificial Sequence
  Description of Artificial Sequence: Synthetic oligonucleotide
agccauuuucacaauacag

SEQ ID NO: 3120658 - RNA, 19 nt, Artificial Sequence
  Description of Artificial Sequence: Synthetic oligonucleotide
aaggcuaacuuaaguaaca

SEQ ID NO: 3120659 - RNA, 19 nt, Artificial Sequence
  Description of Artificial Sequence: Synthetic oligonucleotide
gauaguguccaaauaucca

SEQ ID NO: 3120660 - RNA, 19 nt, Artificial Sequence
  Description of Artificial Sequence: Synthetic oligonucleotide
aggauaguguccaaauauc

SEQ ID NO: 3120661 - RNA, 19 nt, Artificial Sequence
  Description of Artificial Sequence: Synthetic oligonucleotide
cagacuuacaccguccagc

SEQ ID NO: 3120662 - RNA, 19 nt, Artificial Sequence
  Description of Artificial Sequence: Synthetic oligonucleotide
gaucaggaagagcaaugug

SEQ ID NO: 3120663 - RNA, 19 nt, Artificial Sequence
  Description of Artificial Sequence: Synthetic oligonucleotide
auauugugugauccauguc

SEQ ID NO: 3120664 - RNA, 19 nt, Artificial Sequence
  Description of Artificial Sequence: Synthetic oligonucleotide
ggaagagcaaugugaaaag

SEQ ID NO: 3120665 - RNA, 19 nt, Artificial Sequence
  Description of Artificial Sequence: Synthetic oligonucleotide
agagcaaugugaaaagcca

SEQ ID NO: 3120666 - RNA, 19 nt, Artificial Sequence
  Description of Artificial Sequence: Synthetic oligonucleotide
gaagagcaaugugaaaagc

SEQ ID NO: 3120667 - RNA, 19 nt, Artificial Sequence
  Description of Artificial Sequence: Synthetic oligonucleotide
augaggaaccaguuccaag

SEQ ID NO: 3120668 - RNA, 19 nt, Artificial Sequence
  Description of Artificial Sequence: Synthetic oligonucleotide
gaggauaguguccaaauau

SEQ ID NO: 3120669 - RNA, 19 nt, Artificial Sequence
  Description of Artificial Sequence: Synthetic oligonucleotide
ugaucaggaagagcaaugu

SEQ ID NO: 3120670 - RNA, 19 nt, Artificial Sequence
  Description of Artificial Sequence: Synthetic oligonucleotide
cuucucauccaguuucaac

SEQ ID NO: 3120671 - RNA, 19 nt, Artificial Sequence
  Description of Artificial Sequence: Synthetic oligonucleotide
acaaggaggauagugucca

SEQ ID NO: 3120672 - RNA, 19 nt, Artificial Sequence
  Description of Artificial Sequence: Synthetic oligonucleotide
uuucaacaccaacaugauc

SEQ ID NO: 3120673 - RNA, 19 nt, Artificial Sequence
  Description of Artificial Sequence: Synthetic oligonucleotide
gagcaaugugaaaagccag

SEQ ID NO: 3120674 - RNA, 19 nt, Artificial Sequence
  Description of Artificial Sequence: Synthetic oligonucleotide
aguuccaaggugccuucuc

SEQ ID NO: 3120675 - RNA, 19 nt, Artificial Sequence
  Description of Artificial Sequence: Synthetic oligonucleotide
gccauuuucacaauacagc

SEQ ID NO: 3120676 - RNA, 19 nt, Artificial Sequence
  Description of Artificial Sequence: Synthetic oligonucleotide
augacaaggaggauagugu

SEQ ID NO: 3120677 - RNA, 19 nt, Artificial Sequence
  Description of Artificial Sequence: Synthetic oligonucleotide
gacaaggaggauagugucc

SEQ ID NO: 3120678 - RNA, 19 nt, Artificial Sequence
  Description of Artificial Sequence: Synthetic oligonucleotide
uuucacaauacagcaugac

SEQ ID NO: 3120679 - RNA, 19 nt, Artificial Sequence
  Description of Artificial Sequence: Synthetic oligonucleotide
ggaaccaguuccaaggugc

SEQ ID NO: 3120680 - RNA, 19 nt, Artificial Sequence
  Description of Artificial Sequence: Synthetic oligonucleotide
uccaaauauccagacugga

SEQ ID NO: 3120681 - RNA, 19 nt, Artificial Sequence
  Description of Artificial Sequence: Synthetic oligonucleotide
caaugugaaaagccaggug

SEQ ID NO: 3120682 - RNA, 19 nt, Artificial Sequence
  Description of Artificial Sequence: Synthetic oligonucleotide
ggauaguguccaaauaucc

SEQ ID NO: 3120683 - RNA, 19 nt, Artificial Sequence
  Description of Artificial Sequence: Synthetic oligonucleotide
aggaggauaguguccaaau

SEQ ID NO: 3120684 - RNA, 19 nt, Artificial Sequence
  Description of Artificial Sequence: Synthetic oligonucleotide
uugugugauccaugucggg

SEQ ID NO: 3120685 - RNA, 19 nt, Artificial Sequence
  Description of Artificial Sequence: Synthetic oligonucleotide
guccaaauauccagacugg

SEQ ID NO: 3120686 - RNA, 19 nt, Artificial Sequence
  Description of Artificial Sequence: Synthetic oligonucleotide
caaauauccagacuggaau

SEQ ID NO: 3120687 - RNA, 19 nt, Artificial Sequence
  Description of Artificial Sequence: Synthetic oligonucleotide
augugaaaagccaggugag

SEQ ID NO: 3120688 - RNA, 19 nt, Artificial Sequence
  Description of Artificial Sequence: Synthetic oligonucleotide
cagaaggcuaacuuaagua

SEQ ID NO: 3120689 - RNA, 19 nt, Artificial Sequence
  Description of Artificial Sequence: Synthetic oligonucleotide
cucauccaguuucaacacc

SEQ ID NO: 3120690 - RNA, 19 nt, Artificial Sequence
  Description of Artificial Sequence: Synthetic oligonucleotide
augaucaggaagagcaaug

SEQ ID NO: 3120691 - RNA, 19 nt, Artificial Sequence
  Description of Artificial Sequence: Synthetic oligonucleotide
aaaagccaggugaggagca

SEQ ID NO: 3120692 - RNA, 19 nt, Artificial Sequence
  Description of Artificial Sequence: Synthetic oligonucleotide
ccagacuggaauaaauaug

SEQ ID NO: 3120693 - RNA, 19 nt, Artificial Sequence
  Description of Artificial Sequence: Synthetic oligonucleotide
aggaaccaguuccaaggug

SEQ ID NO: 3120694 - RNA, 19 nt, Artificial Sequence
  Description of Artificial Sequence: Synthetic oligonucleotide
ccauuuucacaauacagca

SEQ ID NO: 3120695 - RNA, 19 nt, Artificial Sequence
  Description of Artificial Sequence: Synthetic oligonucleotide
cuggaauaaauaugaggaa

SEQ ID NO: 3120696 - RNA, 19 nt, Artificial Sequence
  Description of Artificial Sequence: Synthetic oligonucleotide
aaggaggauaguguccaaa

SEQ ID NO: 3120697 - RNA, 19 nt, Artificial Sequence
  Description of Artificial Sequence: Synthetic oligonucleotide
uccagccauuuucacaaua

SEQ ID NO: 3120698 - RNA, 19 nt, Artificial Sequence
  Description of Artificial Sequence: Synthetic oligonucleotide
ccaaggugccuucucaucc

SEQ ID NO: 3120699 - RNA, 19 nt, Artificial Sequence
  Description of Artificial Sequence: Synthetic oligonucleotide
aaagccagacuuacaccgu

SEQ ID NO: 3120700 - RNA, 19 nt, Artificial Sequence
  Description of Artificial Sequence: Synthetic oligonucleotide
guaacauugcaaugaggua

SEQ ID NO: 3120701 - RNA, 19 nt, Artificial Sequence
  Description of Artificial Sequence: Synthetic oligonucleotide
accguccagccauuuucac

SEQ ID NO: 3120702 - RNA, 19 nt, Artificial Sequence
  Description of Artificial Sequence: Synthetic oligonucleotide
uccaaggugccuucucauc

SEQ ID NO: 3120703 - RNA, 19 nt, Artificial Sequence
  Description of Artificial Sequence: Synthetic oligonucleotide
agccagacuuacaccgucc

SEQ ID NO: 3120704 - RNA, 19 nt, Artificial Sequence
  Description of Artificial Sequence: Synthetic oligonucleotide
aggugaggagcacucucug

SEQ ID NO: 3120705 - RNA, 19 nt, Artificial Sequence
  Description of Artificial Sequence: Synthetic oligonucleotide
caacaugaucaggaagagc

SEQ ID NO: 3120706 - RNA, 19 nt, Artificial Sequence
  Description of Artificial Sequence: Synthetic oligonucleotide
cauugcaaugagguaccag

SEQ ID NO: 3120707 - RNA, 19 nt, Artificial Sequence
  Description of Artificial Sequence: Synthetic oligonucleotide
uaugaggaaccaguuccaa

SEQ ID NO: 3120708 - RNA, 19 nt, Artificial Sequence
  Description of Artificial Sequence: Synthetic oligonucleotide
ccagccauuuucacaauac

SEQ ID NO: 3120709 - RNA, 19 nt, Artificial Sequence
  Description of Artificial Sequence: Synthetic oligonucleotide
acaccaacaugaucaggaa

SEQ ID NO: 3120710 - RNA, 19 nt, Artificial Sequence
  Description of Artificial Sequence: Synthetic oligonucleotide
agacuggaauaaauaugag

SEQ ID NO: 3120711 - RNA, 19 nt, Artificial Sequence
  Description of Artificial Sequence: Synthetic oligonucleotide
caguuucaacaccaacaug

SEQ ID NO: 3120712 - RNA, 19 nt, Artificial Sequence
  Description of Artificial Sequence: Synthetic oligonucleotide
auaugaggaaccaguucca

SEQ ID NO: 3120713 - RNA, 19 nt, Artificial Sequence
  Description of Artificial Sequence: Synthetic oligonucleotide
aggcagaaggcuaacuuaa

SEQ ID NO: 3120714 - RNA, 19 nt, Artificial Sequence
  Description of Artificial Sequence: Synthetic oligonucleotide
accaguuccaaggugccuu

SEQ ID NO: 3120715 - RNA, 19 nt, Artificial Sequence
  Description of Artificial Sequence: Synthetic oligonucleotide
agguaccaggcuuucuuuu

SEQ ID NO: 3120716 - RNA, 19 nt, Artificial Sequence
  Description of Artificial Sequence: Synthetic oligonucleotide
cagccauuuucacaauaca

SEQ ID NO: 3120717 - RNA, 19 nt, Artificial Sequence
  Description of Artificial Sequence: Synthetic oligonucleotide
aaccaguuccaaggugccu

SEQ ID NO: 3120718 - RNA, 19 nt, Artificial Sequence
  Description of Artificial Sequence: Synthetic oligonucleotide
auccagacuggaauaaaua

SEQ ID NO: 3120719 - RNA, 19 nt, Artificial Sequence
  Description of Artificial Sequence: Synthetic oligonucleotide
caaggugccuucucaucca

SEQ ID NO: 3120720 - RNA, 19 nt, Artificial Sequence
  Description of Artificial Sequence: Synthetic oligonucleotide
uacaccguccagccauuuu

SEQ ID NO: 3120721 - RNA, 19 nt, Artificial Sequence
  Description of Artificial Sequence: Synthetic oligonucleotide
gaggaaccaguuccaaggu

SEQ ID NO: 3120722 - RNA, 19 nt, Artificial Sequence
  Description of Artificial Sequence: Synthetic oligonucleotide
cauuuucacaauacagcau

SEQ ID NO: 3120723 - RNA, 19 nt, Artificial Sequence
  Description of Artificial Sequence: Synthetic oligonucleotide
gggucaaagccagacuuac

SEQ ID NO: 3120724 - RNA, 19 nt, Artificial Sequence
  Description of Artificial Sequence: Synthetic oligonucleotide
gacuuacaccguccagcca

SEQ ID NO: 3120725 - RNA, 19 nt, Artificial Sequence
  Description of Artificial Sequence: Synthetic oligonucleotide
ccaaauauccagacuggaa

SEQ ID NO: 3120726 - RNA, 19 nt, Artificial Sequence
  Description of Artificial Sequence: Synthetic oligonucleotide
acaugaucaggaagagcaa

SEQ ID NO: 3120727 - RNA, 19 nt, Artificial Sequence
  Description of Artificial Sequence: Synthetic oligonucleotide
caccguccagccauuuuca

SEQ ID NO: 3120728 - RNA, 19 nt, Artificial Sequence
  Description of Artificial Sequence: Synthetic oligonucleotide
guguccaaauauccagacu

SEQ ID NO: 3120729 - RNA, 19 nt, Artificial Sequence
  Description of Artificial Sequence: Synthetic oligonucleotide
gcagaaggcuaacuuaagu

SEQ ID NO: 3120730 - RNA, 19 nt, Artificial Sequence
  Description of Artificial Sequence: Synthetic oligonucleotide
ggcagaaggcuaacuuaag

SEQ ID NO: 3120731 - RNA, 19 nt, Artificial Sequence
  Description of Artificial Sequence: Synthetic oligonucleotide
ggaggauaguguccaaaua

SEQ ID NO: 3120732 - RNA, 19 nt, Artificial Sequence
  Description of Artificial Sequence: Synthetic oligonucleotide
cguccagccauuuucacaa

SEQ ID NO: 3120733 - RNA, 19 nt, Artificial Sequence
  Description of Artificial Sequence: Synthetic oligonucleotide
cauccaguuucaacaccaa

SEQ ID NO: 3120734 - RNA, 19 nt, Artificial Sequence
  Description of Artificial Sequence: Synthetic oligonucleotide
acauugcaaugagguacca

SEQ ID NO: 3120735 - RNA, 19 nt, Artificial Sequence
  Description of Artificial Sequence: Synthetic oligonucleotide
guuucaacaccaacaugau

SEQ ID NO: 3120736 - RNA, 19 nt, Artificial Sequence
  Description of Artificial Sequence: Synthetic oligonucleotide
augagguaccaggcuuucu

SEQ ID NO: 3120737 - RNA, 19 nt, Artificial Sequence
  Description of Artificial Sequence: Synthetic oligonucleotide
caggugaggagcacucucu

SEQ ID NO: 3120738 - RNA, 19 nt, Artificial Sequence
  Description of Artificial Sequence: Synthetic oligonucleotide
ccagacuuacaccguccag

SEQ ID NO: 3120739 - RNA, 19 nt, Artificial Sequence
  Description of Artificial Sequence: Synthetic oligonucleotide
gagguaccaggcuuucuuu

SEQ ID NO: 3120740 - RNA, 19 nt, Artificial Sequence
  Description of Artificial Sequence: Synthetic oligonucleotide
gccagacuuacaccgucca

SEQ ID NO: 3120741 - RNA, 19 nt, Artificial Sequence
  Description of Artificial Sequence: Synthetic oligonucleotide
caaugagguaccaggcuuu

SEQ ID NO: 3120742 - RNA, 19 nt, Artificial Sequence
  Description of Artificial Sequence: Synthetic oligonucleotide
ccaggugaggagcacucuc

SEQ ID NO: 3120743 - RNA, 19 nt, Artificial Sequence
  Description of Artificial Sequence: Synthetic oligonucleotide
gcaaugugaaaagccaggu

SEQ ID NO: 3120744 - RNA, 19 nt, Artificial Sequence
  Description of Artificial Sequence: Synthetic oligonucleotide
uuacaccguccagccauuu

SEQ ID NO: 3120745 - RNA, 19 nt, Artificial Sequence
  Description of Artificial Sequence: Synthetic oligonucleotide
ggcuaacuuaaguaacauu

SEQ ID NO: 3120746 - RNA, 19 nt, Artificial Sequence
  Description of Artificial Sequence: Synthetic oligonucleotide
ccaguuccaaggugccuuc

SEQ ID NO: 3120747 - RNA, 19 nt, Artificial Sequence
  Description of Artificial Sequence: Synthetic oligonucleotide
caaggaggauaguguccaa

SEQ ID NO: 3120748 - RNA, 19 nt, Artificial Sequence
  Description of Artificial Sequence: Synthetic oligonucleotide
ggucaaagccagacuuaca

SEQ ID NO: 3120749 - RNA, 19 nt, Artificial Sequence
  Description of Artificial Sequence: Synthetic oligonucleotide
ccguccagccauuuucaca

SEQ ID NO: 3120750 - RNA, 19 nt, Artificial Sequence
  Description of Artificial Sequence: Synthetic oligonucleotide
aggugccuucucauccagu

SEQ ID NO: 3120751 - RNA, 19 nt, Artificial Sequence
  Description of Artificial Sequence: Synthetic oligonucleotide
cuuacaccguccagccauu

SEQ ID NO: 3120752 - RNA, 19 nt, Artificial Sequence
  Description of Artificial Sequence: Synthetic oligonucleotide
gccuucucauccaguuuca

SEQ ID NO: 3120753 - RNA, 19 nt, Artificial Sequence
  Description of Artificial Sequence: Synthetic oligonucleotide
gugccuucucauccaguuu

SEQ ID NO: 3120754 - RNA, 19 nt, Artificial Sequence
  Description of Artificial Sequence: Synthetic oligonucleotide
guccagccauuuucacaau

SEQ ID NO: 3120755 - RNA, 19 nt, Artificial Sequence
  Description of Artificial Sequence: Synthetic oligonucleotide
caguuccaaggugccuucu

SEQ ID NO: 3120756 - RNA, 19 nt, Artificial Sequence
  Description of Artificial Sequence: Synthetic oligonucleotide
gccaggugaggagcacucu

SEQ ID NO: 3120757 - RNA, 19 nt, Artificial Sequence
  Description of Artificial Sequence: Synthetic oligonucleotide
gcaugacaaggaggauagu

SEQ ID NO: 3120758 - RNA, 19 nt, Artificial Sequence
  Description of Artificial Sequence: Synthetic oligonucleotide
uaggaaaugacacagcugc

SEQ ID NO: 3120759 - RNA, 19 nt, Artificial Sequence
  Description of Artificial Sequence: Synthetic oligonucleotide
uuuaaagggauucuugucu

SEQ ID NO: 3120760 - RNA, 19 nt, Artificial Sequence
  Description of Artificial Sequence: Synthetic oligonucleotide
aacauuuagacaccuguug

SEQ ID NO: 3120761 - RNA, 19 nt, Artificial Sequence
  Description of Artificial Sequence: Synthetic oligonucleotide
uuccuuuuccgacagaucc

SEQ ID NO: 3120762 - RNA, 19 nt, Artificial Sequence
  Description of Artificial Sequence: Synthetic oligonucleotide
aacuucuuugcgaaguugc

SEQ ID NO: 3120763 - RNA, 19 nt, Artificial Sequence
  Description of Artificial Sequence: Synthetic oligonucleotide
uucuucagaacauuuagac

SEQ ID NO: 3120764 - RNA, 19 nt, Artificial Sequence
  Description of Artificial Sequence: Synthetic oligonucleotide
agaacauuuagacaccugu

SEQ ID NO: 3120765 - RNA, 19 nt, Artificial Sequence
  Description of Artificial Sequence: Synthetic oligonucleotide
uggaauucccuucaccagg

SEQ ID NO: 3120766 - RNA, 19 nt, Artificial Sequence
  Description of Artificial Sequence: Synthetic oligonucleotide
ucuggaauucccuucacca

SEQ ID NO: 3120767 - RNA, 19 nt, Artificial Sequence
  Description of Artificial Sequence: Synthetic oligonucleotide
ugcaacuuaacuucuuugc

SEQ ID NO: 3120768 - RNA, 19 nt, Artificial Sequence
  Description of Artificial Sequence: Synthetic oligonucleotide
agauccucaauguggaggg

SEQ ID NO: 3120769 - RNA, 19 nt, Artificial Sequence
  Description of Artificial Sequence: Synthetic oligonucleotide
uuugcgaaguugcucaacc

SEQ ID NO: 3120770 - RNA, 19 nt, Artificial Sequence
  Description of Artificial Sequence: Synthetic oligonucleotide
uucuuaggaaaugacacag

SEQ ID NO: 3120771 - RNA, 19 nt, Artificial Sequence
  Description of Artificial Sequence: Synthetic oligonucleotide
ucuuuaaagggauucuugu

SEQ ID NO: 3120772 - RNA, 19 nt, Artificial Sequence
  Description of Artificial Sequence: Synthetic oligonucleotide
uucuuuaaagggauucuug

SEQ ID NO: 3120773 - RNA, 19 nt, Artificial Sequence
  Description of Artificial Sequence: Synthetic oligonucleotide
uucuuugcgaaguugcuca

SEQ ID NO: 3120774 - RNA, 19 nt, Artificial Sequence
  Description of Artificial Sequence: Synthetic oligonucleotide
aacuuaacuucuuugcgaa

SEQ ID NO: 3120775 - RNA, 19 nt, Artificial Sequence
  Description of Artificial Sequence: Synthetic oligonucleotide
uucagcuuuuccuuuuccg

SEQ ID NO: 3120776 - RNA, 19 nt, Artificial Sequence
  Description of Artificial Sequence: Synthetic oligonucleotide
agggcaggcaucuuugccc

SEQ ID NO: 3120777 - RNA, 19 nt, Artificial Sequence
  Description of Artificial Sequence: Synthetic oligonucleotide
guuucuuaggaaaugacac

SEQ ID NO: 3120778 - RNA, 19 nt, Artificial Sequence
  Description of Artificial Sequence: Synthetic oligonucleotide
uccaacuucagcuuuuccu

SEQ ID NO: 3120779 - RNA, 19 nt, Artificial Sequence
  Description of Artificial Sequence: Synthetic oligonucleotide
uuaggaaaugacacagcug

SEQ ID NO: 3120780 - RNA, 19 nt, Artificial Sequence
  Description of Artificial Sequence: Synthetic oligonucleotide
ucuucagaacauuuagaca

SEQ ID NO: 3120781 - RNA, 19 nt, Artificial Sequence
  Description of Artificial Sequence: Synthetic oligonucleotide
uuucuucagaacauuuaga

SEQ ID NO: 3120782 - RNA, 19 nt, Artificial Sequence
  Description of Artificial Sequence: Synthetic oligonucleotide
aguucuuuauuucuucaga

SEQ ID NO: 3120783 - RNA, 19 nt, Artificial Sequence
  Description of Artificial Sequence: Synthetic oligonucleotide
uuucuuaggaaaugacaca

SEQ ID NO: 3120784 - RNA, 19 nt, Artificial Sequence
  Description of Artificial Sequence: Synthetic oligonucleotide
aguugcucaaccuccaacu

SEQ ID NO: 3120785 - RNA, 19 nt, Artificial Sequence
  Description of Artificial Sequence: Synthetic oligonucleotide
ucuucuggaauucccuuca

SEQ ID NO: 3120786 - RNA, 19 nt, Artificial Sequence
  Description of Artificial Sequence: Synthetic oligonucleotide
uaguucuuuauuucuucag

SEQ ID NO: 3120787 - RNA, 19 nt, Artificial Sequence
  Description of Artificial Sequence: Synthetic oligonucleotide
uucuuuauuucuucagaac

SEQ ID NO: 3120788 - RNA, 19 nt, Artificial Sequence
  Description of Artificial Sequence: Synthetic oligonucleotide
aauucccuucaccagggga

SEQ ID NO: 3120789 - RNA, 19 nt, Artificial Sequence
  Description of Artificial Sequence: Synthetic oligonucleotide
ucagcuuuuccuuuuccga

SEQ ID NO: 3120790 - RNA, 19 nt, Artificial Sequence
  Description of Artificial Sequence: Synthetic oligonucleotide
agaacguucuucgauguag

SEQ ID NO: 3120791 - RNA, 19 nt, Artificial Sequence
  Description of Artificial Sequence: Synthetic oligonucleotide
uccagaacguucuucgaug

SEQ ID NO: 3120792 - RNA, 19 nt, Artificial Sequence
  Description of Artificial Sequence: Synthetic oligonucleotide
uguaguucuuuauuucuuc

SEQ ID NO: 3120793 - RNA, 19 nt, Artificial Sequence
  Description of Artificial Sequence: Synthetic oligonucleotide
uucagaacauuuagacacc

SEQ ID NO: 3120794 - RNA, 19 nt, Artificial Sequence
  Description of Artificial Sequence: Synthetic oligonucleotide
cuugucuucuggaauuccc

SEQ ID NO: 3120795 - RNA, 19 nt, Artificial Sequence
  Description of Artificial Sequence: Synthetic oligonucleotide
gucucugcaacuuaacuuc

SEQ ID NO: 3120796 - RNA, 19 nt, Artificial Sequence
  Description of Artificial Sequence: Synthetic oligonucleotide
ucuuaggaaaugacacagc

SEQ ID NO: 3120797 - RNA, 19 nt, Artificial Sequence
  Description of Artificial Sequence: Synthetic oligonucleotide
uuauuucuucagaacauuu

SEQ ID NO: 3120798 - RNA, 19 nt, Artificial Sequence
  Description of Artificial Sequence: Synthetic oligonucleotide
agggauucuugucuucugg

SEQ ID NO: 3120799 - RNA, 19 nt, Artificial Sequence
  Description of Artificial Sequence: Synthetic oligonucleotide
ugucucugcaacuuaacuu

SEQ ID NO: 3120800 - RNA, 19 nt, Artificial Sequence
  Description of Artificial Sequence: Synthetic oligonucleotide
uucgauguaguucuuuauu

SEQ ID NO: 3120801 - RNA, 19 nt, Artificial Sequence
  Description of Artificial Sequence: Synthetic oligonucleotide
uuuuccuuuuccgacagau

SEQ ID NO: 3120802 - RNA, 19 nt, Artificial Sequence
  Description of Artificial Sequence: Synthetic oligonucleotide
gcaacuuaacuucuuugcg

SEQ ID NO: 3120803 - RNA, 19 nt, Artificial Sequence
  Description of Artificial Sequence: Synthetic oligonucleotide
aaagggauucuugucuucu

SEQ ID NO: 3120804 - RNA, 19 nt, Artificial Sequence
  Description of Artificial Sequence: Synthetic oligonucleotide
uucuggaauucccuucacc

SEQ ID NO: 3120805 - RNA, 19 nt, Artificial Sequence
  Description of Artificial Sequence: Synthetic oligonucleotide
auuuagacaccuguugucu

SEQ ID NO: 3120806 - RNA, 19 nt, Artificial Sequence
  Description of Artificial Sequence: Synthetic oligonucleotide
ucgauguaguucuuuauuu

SEQ ID NO: 3120807 - RNA, 19 nt, Artificial Sequence
  Description of Artificial Sequence: Synthetic oligonucleotide
aguuucuuaggaaaugaca

SEQ ID NO: 3120808 - RNA, 19 nt, Artificial Sequence
  Description of Artificial Sequence: Synthetic oligonucleotide
uguugucucugcaacuuaa

SEQ ID NO: 3120809 - RNA, 19 nt, Artificial Sequence
  Description of Artificial Sequence: Synthetic oligonucleotide
uuagacaccuguugucucu

SEQ ID NO: 3120810 - RNA, 19 nt, Artificial Sequence
  Description of Artificial Sequence: Synthetic oligonucleotide
uuaaagggauucuugucuu

SEQ ID NO: 3120811 - RNA, 19 nt, Artificial Sequence
  Description of Artificial Sequence: Synthetic oligonucleotide
cauuuagacaccuguuguc

SEQ ID NO: 3120812 - RNA, 19 nt, Artificial Sequence
  Description of Artificial Sequence: Synthetic oligonucleotide
auucuugucuucuggaauu

SEQ ID NO: 3120813 - RNA, 19 nt, Artificial Sequence
  Description of Artificial Sequence: Synthetic oligonucleotide
ucuucgauguaguucuuua

SEQ ID NO: 3120814 - RNA, 19 nt, Artificial Sequence
  Description of Artificial Sequence: Synthetic oligonucleotide
uccgacagauccucaaugu

SEQ ID NO: 3120815 - RNA, 19 nt, Artificial Sequence
  Description of Artificial Sequence: Synthetic oligonucleotide
guucuuuauuucuucagaa

SEQ ID NO: 3120816 - RNA, 19 nt, Artificial Sequence
  Description of Artificial Sequence: Synthetic oligonucleotide
aagggauucuugucuucug

SEQ ID NO: 3120817 - RNA, 19 nt, Artificial Sequence
  Description of Artificial Sequence: Synthetic oligonucleotide
ucugcaacuuaacuucuuu

SEQ ID NO: 3120818 - RNA, 19 nt, Artificial Sequence
  Description of Artificial Sequence: Synthetic oligonucleotide
agaguuucuuaggaaauga

SEQ ID NO: 3120819 - RNA, 19 nt, Artificial Sequence
  Description of Artificial Sequence: Synthetic oligonucleotide
acguucuucgauguaguuc

SEQ ID NO: 3120820 - RNA, 19 nt, Artificial Sequence
  Description of Artificial Sequence: Synthetic oligonucleotide
aauguggagggcaggcauc

SEQ ID NO: 3120821 - RNA, 19 nt, Artificial Sequence
  Description of Artificial Sequence: Synthetic oligonucleotide
caacuuaacuucuuugcga

SEQ ID NO: 3120822 - RNA, 19 nt, Artificial Sequence
  Description of Artificial Sequence: Synthetic oligonucleotide
uuuuccgacagauccucaa

SEQ ID NO: 3120823 - RNA, 19 nt, Artificial Sequence
  Description of Artificial Sequence: Synthetic oligonucleotide
uuaacuucuuugcgaaguu

SEQ ID NO: 3120824 - RNA, 19 nt, Artificial Sequence
  Description of Artificial Sequence: Synthetic oligonucleotide
cuggaauucccuucaccag

SEQ ID NO: 3120825 - RNA, 19 nt, Artificial Sequence
  Description of Artificial Sequence: Synthetic oligonucleotide
uuuagacaccuguugucuc

SEQ ID NO: 3120826 - RNA, 19 nt, Artificial Sequence
  Description of Artificial Sequence: Synthetic oligonucleotide
cugcaacuuaacuucuuug

SEQ ID NO: 3120827 - RNA, 19 nt, Artificial Sequence
  Description of Artificial Sequence: Synthetic oligonucleotide
ggggaucaucuccagaacg

SEQ ID NO: 3120828 - RNA, 19 nt, Artificial Sequence
  Description of Artificial Sequence: Synthetic oligonucleotide
guaguucuuuauuucuuca

SEQ ID NO: 3120829 - RNA, 19 nt, Artificial Sequence
  Description of Artificial Sequence: Synthetic oligonucleotide
aggggaucaucuccagaac

SEQ ID NO: 3120830 - RNA, 19 nt, Artificial Sequence
  Description of Artificial Sequence: Synthetic oligonucleotide
acuuaacuucuuugcgaag

SEQ ID NO: 3120831 - RNA, 19 nt, Artificial Sequence
  Description of Artificial Sequence: Synthetic oligonucleotide
cagcuuuuccuuuuccgac

SEQ ID NO: 3120832 - RNA, 19 nt, Artificial Sequence
  Description of Artificial Sequence: Synthetic oligonucleotide
ucagaacauuuagacaccu

SEQ ID NO: 3120833 - RNA, 19 nt, Artificial Sequence
  Description of Artificial Sequence: Synthetic oligonucleotide
agcuuuuccuuuuccgaca

SEQ ID NO: 3120834 - RNA, 19 nt, Artificial Sequence
  Description of Artificial Sequence: Synthetic oligonucleotide
gacagauccucaaugugga

SEQ ID NO: 3120835 - RNA, 19 nt, Artificial Sequence
  Description of Artificial Sequence: Synthetic oligonucleotide
ucucugcaacuuaacuucu

SEQ ID NO: 3120836 - RNA, 19 nt, Artificial Sequence
  Description of Artificial Sequence: Synthetic oligonucleotide
aaugacacagcugcccuuu

SEQ ID NO: 3120837 - RNA, 19 nt, Artificial Sequence
  Description of Artificial Sequence: Synthetic oligonucleotide
uaacuucuuugcgaaguug

SEQ ID NO: 3120838 - RNA, 19 nt, Artificial Sequence
  Description of Artificial Sequence: Synthetic oligonucleotide
aucaucuccagaacguucu

SEQ ID NO: 3120839 - RNA, 19 nt, Artificial Sequence
  Description of Artificial Sequence: Synthetic oligonucleotide
uuuccgacagauccucaau

SEQ ID NO: 3120840 - RNA, 19 nt, Artificial Sequence
  Description of Artificial Sequence: Synthetic oligonucleotide
ggaaaugacacagcugccc

SEQ ID NO: 3120841 - RNA, 19 nt, Artificial Sequence
  Description of Artificial Sequence: Synthetic oligonucleotide
gaaaugacacagcugcccu

SEQ ID NO: 3120842 - RNA, 19 nt, Artificial Sequence
  Description of Artificial Sequence: Synthetic oligonucleotide
gagggcaggcaucuuugcc

SEQ ID NO: 3120843 - RNA, 19 nt, Artificial Sequence
  Description of Artificial Sequence: Synthetic oligonucleotide
aggaaaugacacagcugcc

SEQ ID NO: 3120844 - RNA, 19 nt, Artificial Sequence
  Description of Artificial Sequence: Synthetic oligonucleotide
gaguuucuuaggaaaugac

SEQ ID NO: 3120845 - RNA, 19 nt, Artificial Sequence
  Description of Artificial Sequence: Synthetic oligonucleotide
aaaugacacagcugcccuu

SEQ ID NO: 3120846 - RNA, 19 nt, Artificial Sequence
  Description of Artificial Sequence: Synthetic oligonucleotide
uaaagggauucuugucuuc

SEQ ID NO: 3120847 - RNA, 19 nt, Artificial Sequence
  Description of Artificial Sequence: Synthetic oligonucleotide
acagcugcccuuuucuuua

SEQ ID NO: 3120848 - RNA, 19 nt, Artificial Sequence
  Description of Artificial Sequence: Synthetic oligonucleotide
gaauucccuucaccagggg

SEQ ID NO: 3120849 - RNA, 19 nt, Artificial Sequence
  Description of Artificial Sequence: Synthetic oligonucleotide
cgacagauccucaaugugg

SEQ ID NO: 3120850 - RNA, 19 nt, Artificial Sequence
  Description of Artificial Sequence: Synthetic oligonucleotide
ucuugucuucuggaauucc

SEQ ID NO: 3120851 - RNA, 19 nt, Artificial Sequence
  Description of Artificial Sequence: Synthetic oligonucleotide
gauucuugucuucuggaau

SEQ ID NO: 3120852 - RNA, 19 nt, Artificial Sequence
  Description of Artificial Sequence: Synthetic oligonucleotide
gaucaucuccagaacguuc

SEQ ID NO: 3120853 - RNA, 19 nt, Artificial Sequence
  Description of Artificial Sequence: Synthetic oligonucleotide
aacguucuucgauguaguu

SEQ ID NO: 3120854 - RNA, 19 nt, Artificial Sequence
  Description of Artificial Sequence: Synthetic oligonucleotide
caccuguugucucugcaac

SEQ ID NO: 3120855 - RNA, 19 nt, Artificial Sequence
  Description of Artificial Sequence: Synthetic oligonucleotide
cagaguuucuuaggaaaug

SEQ ID NO: 3120856 - RNA, 19 nt, Artificial Sequence
  Description of Artificial Sequence: Synthetic oligonucleotide
uugcgaaguugcucaaccu

SEQ ID NO: 3120857 - RNA, 19 nt, Artificial Sequence
  Description of Artificial Sequence: Synthetic oligonucleotide
uucaccaggggaucaucuc

SEQ ID NO: 3120858 - RNA, 19 nt, Artificial Sequence
  Description of Artificial Sequence: Synthetic oligonucleotide
ugucuucuggaauucccuu

SEQ ID NO: 3120859 - RNA, 19 nt, Artificial Sequence
  Description of Artificial Sequence: Synthetic oligonucleotide
acagauccucaauguggag

SEQ ID NO: 3120860 - RNA, 19 nt, Artificial Sequence
  Description of Artificial Sequence: Synthetic oligonucleotide
ggaauucccuucaccaggg

SEQ ID NO: 3120861 - RNA, 19 nt, Artificial Sequence
  Description of Artificial Sequence: Synthetic oligonucleotide
ucuccagaacguucuucga

SEQ ID NO: 3120862 - RNA, 19 nt, Artificial Sequence
  Description of Artificial Sequence: Synthetic oligonucleotide
ucaauguggagggcaggca

SEQ ID NO: 3120863 - RNA, 19 nt, Artificial Sequence
  Description of Artificial Sequence: Synthetic oligonucleotide
auucccuucaccaggggau

SEQ ID NO: 3120864 - RNA, 19 nt, Artificial Sequence
  Description of Artificial Sequence: Synthetic oligonucleotide
cuuaacuucuuugcgaagu

SEQ ID NO: 3120865 - RNA, 19 nt, Artificial Sequence
  Description of Artificial Sequence: Synthetic oligonucleotide
gacacagcugcccuuuucu

SEQ ID NO: 3120866 - RNA, 19 nt, Artificial Sequence
  Description of Artificial Sequence: Synthetic oligonucleotide
gcugcccuuuucuuuaaag

SEQ ID NO: 3120867 - RNA, 19 nt, Artificial Sequence
  Description of Artificial Sequence: Synthetic oligonucleotide
acaccuguugucucugcaa

SEQ ID NO: 3120868 - RNA, 19 nt, Artificial Sequence
  Description of Artificial Sequence: Synthetic oligonucleotide
accuguugucucugcaacu

SEQ ID NO: 3120869 - RNA, 19 nt, Artificial Sequence
  Description of Artificial Sequence: Synthetic oligonucleotide
gacaccuguugucucugca

SEQ ID NO: 3120870 - RNA, 19 nt, Artificial Sequence
  Description of Artificial Sequence: Synthetic oligonucleotide
ugacacagcugcccuuuuc

SEQ ID NO: 3120871 - RNA, 19 nt, Artificial Sequence
  Description of Artificial Sequence: Synthetic oligonucleotide
uucuugucuucuggaauuc

SEQ ID NO: 3120872 - RNA, 19 nt, Artificial Sequence
  Description of Artificial Sequence: Synthetic oligonucleotide
uagacaccuguugucucug

SEQ ID NO: 3120873 - RNA, 19 nt, Artificial Sequence
  Description of Artificial Sequence: Synthetic oligonucleotide
ucuuugcgaaguugcucaa

SEQ ID NO: 3120874 - RNA, 19 nt, Artificial Sequence
  Description of Artificial Sequence: Synthetic oligonucleotide
acuucuuugcgaaguugcu

SEQ ID NO: 3120875 - RNA, 19 nt, Artificial Sequence
  Description of Artificial Sequence: Synthetic oligonucleotide
guugucucugcaacuuaac

SEQ ID NO: 3120876 - RNA, 19 nt, Artificial Sequence
  Description of Artificial Sequence: Synthetic oligonucleotide
cuccaacuucagcuuuucc

SEQ ID NO: 3120877 - RNA, 19 nt, Artificial Sequence
  Description of Artificial Sequence: Synthetic oligonucleotide
accaggggaucaucuccag

SEQ ID NO: 3120878 - RNA, 19 nt, Artificial Sequence
  Description of Artificial Sequence: Synthetic oligonucleotide
cuucuggaauucccuucac

SEQ ID NO: 3120879 - RNA, 19 nt, Artificial Sequence
  Description of Artificial Sequence: Synthetic oligonucleotide
cuuugcgaaguugcucaac

SEQ ID NO: 3120880 - RNA, 19 nt, Artificial Sequence
  Description of Artificial Sequence: Synthetic oligonucleotide
auguggagggcaggcaucu

SEQ ID NO: 3120881 - RNA, 19 nt, Artificial Sequence
  Description of Artificial Sequence: Synthetic oligonucleotide
ggauucuugucuucuggaa

SEQ ID NO: 3120882 - RNA, 19 nt, Artificial Sequence
  Description of Artificial Sequence: Synthetic oligonucleotide
ucaucuccagaacguucuu

SEQ ID NO: 3120883 - RNA, 19 nt, Artificial Sequence
  Description of Artificial Sequence: Synthetic oligonucleotide
uucuucgauguaguucuuu

SEQ ID NO: 3120884 - RNA, 19 nt, Artificial Sequence
  Description of Artificial Sequence: Synthetic oligonucleotide
caucuccagaacguucuuc

SEQ ID NO: 3120885 - RNA, 19 nt, Artificial Sequence
  Description of Artificial Sequence: Synthetic oligonucleotide
gggcaggcaucuuugcccc

SEQ ID NO: 3120886 - RNA, 19 nt, Artificial Sequence
  Description of Artificial Sequence: Synthetic oligonucleotide
caccaggggaucaucucca

SEQ ID NO: 3120887 - RNA, 19 nt, Artificial Sequence
  Description of Artificial Sequence: Synthetic oligonucleotide
cgauguaguucuuuauuuc

SEQ ID NO: 3120888 - RNA, 19 nt, Artificial Sequence
  Description of Artificial Sequence: Synthetic oligonucleotide
gauccucaauguggagggc

SEQ ID NO: 3120889 - RNA, 19 nt, Artificial Sequence
  Description of Artificial Sequence: Synthetic oligonucleotide
gaacauuuagacaccuguu

SEQ ID NO: 3120890 - RNA, 19 nt, Artificial Sequence
  Description of Artificial Sequence: Synthetic oligonucleotide
cccagaguuucuuaggaaa

SEQ ID NO: 3120891 - RNA, 19 nt, Artificial Sequence
  Description of Artificial Sequence: Synthetic oligonucleotide
gaacguucuucgauguagu

SEQ ID NO: 3120892 - RNA, 19 nt, Artificial Sequence
  Description of Artificial Sequence: Synthetic oligonucleotide
acacagcugcccuuuucuu

SEQ ID NO: 3120893 - RNA, 19 nt, Artificial Sequence
  Description of Artificial Sequence: Synthetic oligonucleotide
uucccuucaccaggggauc

SEQ ID NO: 3120894 - RNA, 19 nt, Artificial Sequence
  Description of Artificial Sequence: Synthetic oligonucleotide
cguucuucgauguaguucu

SEQ ID NO: 3120895 - RNA, 19 nt, Artificial Sequence
  Description of Artificial Sequence: Synthetic oligonucleotide
cuucaccaggggaucaucu

SEQ ID NO: 3120896 - RNA, 19 nt, Artificial Sequence
  Description of Artificial Sequence: Synthetic oligonucleotide
ccgacagauccucaaugug

SEQ ID NO: 3120897 - RNA, 19 nt, Artificial Sequence
  Description of Artificial Sequence: Synthetic oligonucleotide
ucccuucaccaggggauca

SEQ ID NO: 3120898 - RNA, 19 nt, Artificial Sequence
  Description of Artificial Sequence: Synthetic oligonucleotide
ggagggcaggcaucuuugc

SEQ ID NO: 3120899 - RNA, 19 nt, Artificial Sequence
  Description of Artificial Sequence: Synthetic oligonucleotide
cuucgauguaguucuuuau

SEQ ID NO: 3120900 - RNA, 19 nt, Artificial Sequence
  Description of Artificial Sequence: Synthetic oligonucleotide
caauguggagggcaggcau

SEQ ID NO: 3120901 - RNA, 19 nt, Artificial Sequence
  Description of Artificial Sequence: Synthetic oligonucleotide
cuccagaacguucuucgau

SEQ ID NO: 3120902 - RNA, 19 nt, Artificial Sequence
  Description of Artificial Sequence: Synthetic oligonucleotide
guugcucaaccuccaacuu

SEQ ID NO: 3120903 - RNA, 19 nt, Artificial Sequence
  Description of Artificial Sequence: Synthetic oligonucleotide
cuuuuccuuuuccgacaga

SEQ ID NO: 3120904 - RNA, 19 nt, Artificial Sequence
  Description of Artificial Sequence: Synthetic oligonucleotide
agcugcccuuuucuuuaaa

SEQ ID NO: 3120905 - RNA, 19 nt, Artificial Sequence
  Description of Artificial Sequence: Synthetic oligonucleotide
gggaucaucuccagaacgu

SEQ ID NO: 3120906 - RNA, 19 nt, Artificial Sequence
  Description of Artificial Sequence: Synthetic oligonucleotide
cuguugucucugcaacuua

SEQ ID NO: 3120907 - RNA, 19 nt, Artificial Sequence
  Description of Artificial Sequence: Synthetic oligonucleotide
augacacagcugcccuuuu

SEQ ID NO: 3120908 - RNA, 19 nt, Artificial Sequence
  Description of Artificial Sequence: Synthetic oligonucleotide
accuccaacuucagcuuuu

SEQ ID NO: 3120909 - RNA, 19 nt, Artificial Sequence
  Description of Artificial Sequence: Synthetic oligonucleotide
cacagcugcccuuuucuuu

SEQ ID NO: 3120910 - RNA, 19 nt, Artificial Sequence
  Description of Artificial Sequence: Synthetic oligonucleotide
caaccuccaacuucagcuu

SEQ ID NO: 3120911 - RNA, 19 nt, Artificial Sequence
  Description of Artificial Sequence: Synthetic oligonucleotide
cagaacguucuucgaugua

SEQ ID NO: 3120912 - RNA, 19 nt, Artificial Sequence
  Description of Artificial Sequence: Synthetic oligonucleotide
caacuucagcuuuuccuuu

SEQ ID NO: 3120913 - RNA, 19 nt, Artificial Sequence
  Description of Artificial Sequence: Synthetic oligonucleotide
ccagaguuucuuaggaaau

SEQ ID NO: 3120914 - RNA, 19 nt, Artificial Sequence
  Description of Artificial Sequence: Synthetic oligonucleotide
cgaaguugcucaaccucca

SEQ ID NO: 3120915 - RNA, 19 nt, Artificial Sequence
  Description of Artificial Sequence: Synthetic oligonucleotide
ccagaacguucuucgaugu

SEQ ID NO: 3120916 - RNA, 19 nt, Artificial Sequence
  Description of Artificial Sequence: Synthetic oligonucleotide
uguggagggcaggcaucuu

SEQ ID NO: 3120917 - RNA, 19 nt, Artificial Sequence
  Description of Artificial Sequence: Synthetic oligonucleotide
cucugcaacuuaacuucuu

SEQ ID NO: 3120918 - RNA, 19 nt, Artificial Sequence
  Description of Artificial Sequence: Synthetic oligonucleotide
ccuucaccaggggaucauc

SEQ ID NO: 3120919 - RNA, 19 nt, Artificial Sequence
  Description of Artificial Sequence: Synthetic oligonucleotide
ccccagaguuucuuaggaa

SEQ ID NO: 3120920 - RNA, 19 nt, Artificial Sequence
  Description of Artificial Sequence: Synthetic oligonucleotide
ggaucaucuccagaacguu

SEQ ID NO: 3120921 - RNA, 19 nt, Artificial Sequence
  Description of Artificial Sequence: Synthetic oligonucleotide
ccaggggaucaucuccaga

SEQ ID NO: 3120922 - RNA, 19 nt, Artificial Sequence
  Description of Artificial Sequence: Synthetic oligonucleotide
ccuguugucucugcaacuu

SEQ ID NO: 3120923 - RNA, 19 nt, Artificial Sequence
  Description of Artificial Sequence: Synthetic oligonucleotide
aggauuuacagucugagcc

SEQ ID NO: 3120924 - RNA, 19 nt, Artificial Sequence
  Description of Artificial Sequence: Synthetic oligonucleotide
aauauagugcucauaaucc

SEQ ID NO: 3120925 - RNA, 19 nt, Artificial Sequence
  Description of Artificial Sequence: Synthetic oligonucleotide
auucugaggauuuacaguc

SEQ ID NO: 3120926 - RNA, 19 nt, Artificial Sequence
  Description of Artificial Sequence: Synthetic oligonucleotide
uaauauagugcucauaauc

SEQ ID NO: 3120927 - RNA, 19 nt, Artificial Sequence
  Description of Artificial Sequence: Synthetic oligonucleotide
ucuauuucucacaaaacca

SEQ ID NO: 3120928 - RNA, 19 nt, Artificial Sequence
  Description of Artificial Sequence: Synthetic oligonucleotide
aacucuauuucucacaaaa

SEQ ID NO: 3120929 - RNA, 19 nt, Artificial Sequence
  Description of Artificial Sequence: Synthetic oligonucleotide
cucuauuucucacaaaacc

SEQ ID NO: 3120930 - RNA, 19 nt, Artificial Sequence
  Description of Artificial Sequence: Synthetic oligonucleotide
agacuuauugccuuugcuc

SEQ ID NO: 3120931 - RNA, 19 nt, Artificial Sequence
  Description of Artificial Sequence: Synthetic oligonucleotide
cacaaaaccauucugagga

SEQ ID NO: 3120932 - RNA, 19 nt, Artificial Sequence
  Description of Artificial Sequence: Synthetic oligonucleotide
aagaaucacucucacucuc

SEQ ID NO: 3120933 - RNA, 19 nt, Artificial Sequence
  Description of Artificial Sequence: Synthetic oligonucleotide
ugccugauaauuuccacag

SEQ ID NO: 3120934 - RNA, 19 nt, Artificial Sequence
  Description of Artificial Sequence: Synthetic oligonucleotide
uaaccccucuuuaauauag

SEQ ID NO: 3120935 - RNA, 19 nt, Artificial Sequence
  Description of Artificial Sequence: Synthetic oligonucleotide
ugagcugcaagaaucacuc

SEQ ID NO: 3120936 - RNA, 19 nt, Artificial Sequence
  Description of Artificial Sequence: Synthetic oligonucleotide
uucugcaaaagacaaagua

SEQ ID NO: 3120937 - RNA, 19 nt, Artificial Sequence
  Description of Artificial Sequence: Synthetic oligonucleotide
ugauaauuuccacagguuu

SEQ ID NO: 3120938 - RNA, 19 nt, Artificial Sequence
  Description of Artificial Sequence: Synthetic oligonucleotide
ucacaaaaccauucugagg

SEQ ID NO: 3120939 - RNA, 19 nt, Artificial Sequence
  Description of Artificial Sequence: Synthetic oligonucleotide
aaguccuugagcugcaaga

SEQ ID NO: 3120940 - RNA, 19 nt, Artificial Sequence
  Description of Artificial Sequence: Synthetic oligonucleotide
aucacucucacucucugag

SEQ ID NO: 3120941 - RNA, 19 nt, Artificial Sequence
  Description of Artificial Sequence: Synthetic oligonucleotide
ucucugaguccccagacug

SEQ ID NO: 3120942 - RNA, 19 nt, Artificial Sequence
  Description of Artificial Sequence: Synthetic oligonucleotide
aauaucugugcucugucuu

SEQ ID NO: 3120943 - RNA, 19 nt, Artificial Sequence
  Description of Artificial Sequence: Synthetic oligonucleotide
aauuuccacagguuucucu

SEQ ID NO: 3120944 - RNA, 19 nt, Artificial Sequence
  Description of Artificial Sequence: Synthetic oligonucleotide
ucuucggaaacucuauuuc

SEQ ID NO: 3120945 - RNA, 19 nt, Artificial Sequence
  Description of Artificial Sequence: Synthetic oligonucleotide
cucacaaaaccauucugag

SEQ ID NO: 3120946 - RNA, 19 nt, Artificial Sequence
  Description of Artificial Sequence: Synthetic oligonucleotide
aauccucuaccaguucugc

SEQ ID NO: 3120947 - RNA, 19 nt, Artificial Sequence
  Description of Artificial Sequence: Synthetic oligonucleotide
gcaagaaucacucucacuc

SEQ ID NO: 3120948 - RNA, 19 nt, Artificial Sequence
  Description of Artificial Sequence: Synthetic oligonucleotide
aagacuuauugccuuugcu

SEQ ID NO: 3120949 - RNA, 19 nt, Artificial Sequence
  Description of Artificial Sequence: Synthetic oligonucleotide
ugaggauuuacagucugag

SEQ ID NO: 3120950 - RNA, 19 nt, Artificial Sequence
  Description of Artificial Sequence: Synthetic oligonucleotide
auaauccucuaccaguucu

SEQ ID NO: 3120951 - RNA, 19 nt, Artificial Sequence
  Description of Artificial Sequence: Synthetic oligonucleotide
uucucacaaaaccauucug

SEQ ID NO: 3120952 - RNA, 19 nt, Artificial Sequence
  Description of Artificial Sequence: Synthetic oligonucleotide
auuucucacaaaaccauuc

SEQ ID NO: 3120953 - RNA, 19 nt, Artificial Sequence
  Description of Artificial Sequence: Synthetic oligonucleotide
ucugaggauuuacagucug

SEQ ID NO: 3120954 - RNA, 19 nt, Artificial Sequence
  Description of Artificial Sequence: Synthetic oligonucleotide
acagucugagccccgggcc

SEQ ID NO: 3120955 - RNA, 19 nt, Artificial Sequence
  Description of Artificial Sequence: Synthetic oligonucleotide
uccuugagcugcaagaauc

SEQ ID NO: 3120956 - RNA, 19 nt, Artificial Sequence
  Description of Artificial Sequence: Synthetic oligonucleotide
uauagugcucauaauccuc

SEQ ID NO: 3120957 - RNA, 19 nt, Artificial Sequence
  Description of Artificial Sequence: Synthetic oligonucleotide
aaccauucugaggauuuac

SEQ ID NO: 3120958 - RNA, 19 nt, Artificial Sequence
  Description of Artificial Sequence: Synthetic oligonucleotide
uguagugccugauaauuuc

SEQ ID NO: 3120959 - RNA, 19 nt, Artificial Sequence
  Description of Artificial Sequence: Synthetic oligonucleotide
auaucugugcucugucuuc

SEQ ID NO: 3120960 - RNA, 19 nt, Artificial Sequence
  Description of Artificial Sequence: Synthetic oligonucleotide
agugcucauaauccucuac

SEQ ID NO: 3120961 - RNA, 19 nt, Artificial Sequence
  Description of Artificial Sequence: Synthetic oligonucleotide
agugccugauaauuuccac

SEQ ID NO: 3120962 - RNA, 19 nt, Artificial Sequence
  Description of Artificial Sequence: Synthetic oligonucleotide
ucuaaccccucuuuaauau

SEQ ID NO: 3120963 - RNA, 19 nt, Artificial Sequence
  Description of Artificial Sequence: Synthetic oligonucleotide
auauagugcucauaauccu

SEQ ID NO: 3120964 - RNA, 19 nt, Artificial Sequence
  Description of Artificial Sequence: Synthetic oligonucleotide
gaaacucuauuucucacaa

SEQ ID NO: 3120965 - RNA, 19 nt, Artificial Sequence
  Description of Artificial Sequence: Synthetic oligonucleotide
uaagacuuauugccuuugc

SEQ ID NO: 3120966 - RNA, 19 nt, Artificial Sequence
  Description of Artificial Sequence: Synthetic oligonucleotide
uugagcugcaagaaucacu

SEQ ID NO: 3120967 - RNA, 19 nt, Artificial Sequence
  Description of Artificial Sequence: Synthetic oligonucleotide
uaauccucuaccaguucug

SEQ ID NO: 3120968 - RNA, 19 nt, Artificial Sequence
  Description of Artificial Sequence: Synthetic oligonucleotide
acucucacucucugagucc

SEQ ID NO: 3120969 - RNA, 19 nt, Artificial Sequence
  Description of Artificial Sequence: Synthetic oligonucleotide
ugcucauaauccucuacca

SEQ ID NO: 3120970 - RNA, 19 nt, Artificial Sequence
  Description of Artificial Sequence: Synthetic oligonucleotide
uucggaaacucuauuucuc

SEQ ID NO: 3120971 - RNA, 19 nt, Artificial Sequence
  Description of Artificial Sequence: Synthetic oligonucleotide
ucugucuucggaaacucua

SEQ ID NO: 3120972 - RNA, 19 nt, Artificial Sequence
  Description of Artificial Sequence: Synthetic oligonucleotide
gugcucauaauccucuacc

SEQ ID NO: 3120973 - RNA, 19 nt, Artificial Sequence
  Description of Artificial Sequence: Synthetic oligonucleotide
auaauuuccacagguuucu

SEQ ID NO: 3120974 - RNA, 19 nt, Artificial Sequence
  Description of Artificial Sequence: Synthetic oligonucleotide
ucggaaacucuauuucuca

SEQ ID NO: 3120975 - RNA, 19 nt, Artificial Sequence
  Description of Artificial Sequence: Synthetic oligonucleotide
ucuaccaguucugcaaaag

SEQ ID NO: 3120976 - RNA, 19 nt, Artificial Sequence
  Description of Artificial Sequence: Synthetic oligonucleotide
ucugggaagaaguccuuga

SEQ ID NO: 3120977 - RNA, 19 nt, Artificial Sequence
  Description of Artificial Sequence: Synthetic oligonucleotide
acucucugaguccccagac

SEQ ID NO: 3120978 - RNA, 19 nt, Artificial Sequence
  Description of Artificial Sequence: Synthetic oligonucleotide
uccucuaccaguucugcaa

SEQ ID NO: 3120979 - RNA, 19 nt, Artificial Sequence
  Description of Artificial Sequence: Synthetic oligonucleotide
uuuacagucugagccccgg

SEQ ID NO: 3120980 - RNA, 19 nt, Artificial Sequence
  Description of Artificial Sequence: Synthetic oligonucleotide
gauuuacagucugagcccc

SEQ ID NO: 3120981 - RNA, 19 nt, Artificial Sequence
  Description of Artificial Sequence: Synthetic oligonucleotide
uuugcucugggaagaaguc

SEQ ID NO: 3120982 - RNA, 19 nt, Artificial Sequence
  Description of Artificial Sequence: Synthetic oligonucleotide
cuacucgccaauaucugug

SEQ ID NO: 3120983 - RNA, 19 nt, Artificial Sequence
  Description of Artificial Sequence: Synthetic oligonucleotide
uacuacucgccaauaucug

SEQ ID NO: 3120984 - RNA, 19 nt, Artificial Sequence
  Description of Artificial Sequence: Synthetic oligonucleotide
uaucugugcucugucuucg

SEQ ID NO: 3120985 - RNA, 19 nt, Artificial Sequence
  Description of Artificial Sequence: Synthetic oligonucleotide
aaaaccauucugaggauuu

SEQ ID NO: 3120986 - RNA, 19 nt, Artificial Sequence
  Description of Artificial Sequence: Synthetic oligonucleotide
uugccuuugcucugggaag

SEQ ID NO: 3120987 - RNA, 19 nt, Artificial Sequence
  Description of Artificial Sequence: Synthetic oligonucleotide
uauuucucacaaaaccauu

SEQ ID NO: 3120988 - RNA, 19 nt, Artificial Sequence
  Description of Artificial Sequence: Synthetic oligonucleotide
ucucuaaccccucuuuaau

SEQ ID NO: 3120989 - RNA, 19 nt, Artificial Sequence
  Description of Artificial Sequence: Synthetic oligonucleotide
acucuauuucucacaaaac

SEQ ID NO: 3120990 - RNA, 19 nt, Artificial Sequence
  Description of Artificial Sequence: Synthetic oligonucleotide
cuuauugccuuugcucugg

SEQ ID NO: 3120991 - RNA, 19 nt, Artificial Sequence
  Description of Artificial Sequence: Synthetic oligonucleotide
uucucuaaccccucuuuaa

SEQ ID NO: 3120992 - RNA, 19 nt, Artificial Sequence
  Description of Artificial Sequence: Synthetic oligonucleotide
aaucacucucacucucuga

SEQ ID NO: 3120993 - RNA, 19 nt, Artificial Sequence
  Description of Artificial Sequence: Synthetic oligonucleotide
gaaucacucucacucucug

SEQ ID NO: 3120994 - RNA, 19 nt, Artificial Sequence
  Description of Artificial Sequence: Synthetic oligonucleotide
cucuuuaauauagugcuca

SEQ ID NO: 3120995 - RNA, 19 nt, Artificial Sequence
  Description of Artificial Sequence: Synthetic oligonucleotide
gaaguccuugagcugcaag

SEQ ID NO: 3120996 - RNA, 19 nt, Artificial Sequence
  Description of Artificial Sequence: Synthetic oligonucleotide
acuacucgccaauaucugu

SEQ ID NO: 3120997 - RNA, 19 nt, Artificial Sequence
  Description of Artificial Sequence: Synthetic oligonucleotide
ggauuuacagucugagccc

SEQ ID NO: 3120998 - RNA, 19 nt, Artificial Sequence
  Description of Artificial Sequence: Synthetic oligonucleotide
acuuauugccuuugcucug

SEQ ID NO: 3120999 - RNA, 19 nt, Artificial Sequence
  Description of Artificial Sequence: Synthetic oligonucleotide
accccucuuuaauauagug

SEQ ID NO: 3121000 - RNA, 19 nt, Artificial Sequence
  Description of Artificial Sequence: Synthetic oligonucleotide
uuauugccuuugcucuggg

SEQ ID NO: 3121001 - RNA, 19 nt, Artificial Sequence
  Description of Artificial Sequence: Synthetic oligonucleotide
ucuuuaauauagugcucau

SEQ ID NO: 3121002 - RNA, 19 nt, Artificial Sequence
  Description of Artificial Sequence: Synthetic oligonucleotide
uuucucuaaccccucuuua

SEQ ID NO: 3121003 - RNA, 19 nt, Artificial Sequence
  Description of Artificial Sequence: Synthetic oligonucleotide
ugugcucugucuucggaaa

SEQ ID NO: 3121004 - RNA, 19 nt, Artificial Sequence
  Description of Artificial Sequence: Synthetic oligonucleotide
uuacagucugagccccggg

SEQ ID NO: 3121005 - RNA, 19 nt, Artificial Sequence
  Description of Artificial Sequence: Synthetic oligonucleotide
ucgccaauaucugugcucu

SEQ ID NO: 3121006 - RNA, 19 nt, Artificial Sequence
  Description of Artificial Sequence: Synthetic oligonucleotide
ucugaguccccagacuggc

SEQ ID NO: 3121007 - RNA, 19 nt, Artificial Sequence
  Description of Artificial Sequence: Synthetic oligonucleotide
uacucgccaauaucugugc

SEQ ID NO: 3121008 - RNA, 19 nt, Artificial Sequence
  Description of Artificial Sequence: Synthetic oligonucleotide
uucugaggauuuacagucu

SEQ ID NO: 3121009 - RNA, 19 nt, Artificial Sequence
  Description of Artificial Sequence: Synthetic oligonucleotide
ugcaagaaucacucucacu

SEQ ID NO: 3121010 - RNA, 19 nt, Artificial Sequence
  Description of Artificial Sequence: Synthetic oligonucleotide
cacucucacucucugaguc

SEQ ID NO: 3121011 - RNA, 19 nt, Artificial Sequence
  Description of Artificial Sequence: Synthetic oligonucleotide
auagugcucauaauccucu

SEQ ID NO: 3121012 - RNA, 19 nt, Artificial Sequence
  Description of Artificial Sequence: Synthetic oligonucleotide
cuacuacucgccaauaucu

SEQ ID NO: 3121013 - RNA, 19 nt, Artificial Sequence
  Description of Artificial Sequence: Synthetic oligonucleotide
agacuggcuacuacucgcc

SEQ ID NO: 3121014 - RNA, 19 nt, Artificial Sequence
  Description of Artificial Sequence: Synthetic oligonucleotide
ugaguccccagacuggcua

SEQ ID NO: 3121015 - RNA, 19 nt, Artificial Sequence
  Description of Artificial Sequence: Synthetic oligonucleotide
aaacucuauuucucacaaa

SEQ ID NO: 3121016 - RNA, 19 nt, Artificial Sequence
  Description of Artificial Sequence: Synthetic oligonucleotide
cucugaguccccagacugg

SEQ ID NO: 3121017 - RNA, 19 nt, Artificial Sequence
  Description of Artificial Sequence: Synthetic oligonucleotide
ccauucugaggauuuacag

SEQ ID NO: 3121018 - RNA, 19 nt, Artificial Sequence
  Description of Artificial Sequence: Synthetic oligonucleotide
cucucacucucugaguccc

SEQ ID NO: 3121019 - RNA, 19 nt, Artificial Sequence
  Description of Artificial Sequence: Synthetic oligonucleotide
guagugccugauaauuucc

SEQ ID NO: 3121020 - RNA, 19 nt, Artificial Sequence
  Description of Artificial Sequence: Synthetic oligonucleotide
gugccugauaauuuccaca

SEQ ID NO: 3121021 - RNA, 19 nt, Artificial Sequence
  Description of Artificial Sequence: Synthetic oligonucleotide
ggaaacucuauuucucaca

SEQ ID NO: 3121022 - RNA, 19 nt, Artificial Sequence
  Description of Artificial Sequence: Synthetic oligonucleotide
cucgccaauaucugugcuc

SEQ ID NO: 3121023 - RNA, 19 nt, Artificial Sequence
  Description of Artificial Sequence: Synthetic oligonucleotide
guaagacuuauugccuuug

SEQ ID NO: 3121024 - RNA, 19 nt, Artificial Sequence
  Description of Artificial Sequence: Synthetic oligonucleotide
cuauuucucacaaaaccau

SEQ ID NO: 3121025 - RNA, 19 nt, Artificial Sequence
  Description of Artificial Sequence: Synthetic oligonucleotide
ccccucuuuaauauagugc

SEQ ID NO: 3121026 - RNA, 19 nt, Artificial Sequence
  Description of Artificial Sequence: Synthetic oligonucleotide
uuuccacagguuucucuaa

SEQ ID NO: 3121027 - RNA, 19 nt, Artificial Sequence
  Description of Artificial Sequence: Synthetic oligonucleotide
cuuugcucugggaagaagu

SEQ ID NO: 3121028 - RNA, 19 nt, Artificial Sequence
  Description of Artificial Sequence: Synthetic oligonucleotide
ugucuucggaaacucuauu

SEQ ID NO: 3121029 - RNA, 19 nt, Artificial Sequence
  Description of Artificial Sequence: Synthetic oligonucleotide
cauucugaggauuuacagu

SEQ ID NO: 3121030 - RNA, 19 nt, Artificial Sequence
  Description of Artificial Sequence: Synthetic oligonucleotide
aucugugcucugucuucgg

SEQ ID NO: 3121031 - RNA, 19 nt, Artificial Sequence
  Description of Artificial Sequence: Synthetic oligonucleotide
ucacucucacucucugagu

SEQ ID NO: 3121032 - RNA, 19 nt, Artificial Sequence
  Description of Artificial Sequence: Synthetic oligonucleotide
gcuacuacucgccaauauc

SEQ ID NO: 3121033 - RNA, 19 nt, Artificial Sequence
  Description of Artificial Sequence: Synthetic oligonucleotide
uauugccuuugcucuggga

SEQ ID NO: 3121034 - RNA, 19 nt, Artificial Sequence
  Description of Artificial Sequence: Synthetic oligonucleotide
cauaauccucuaccaguuc

SEQ ID NO: 3121035 - RNA, 19 nt, Artificial Sequence
  Description of Artificial Sequence: Synthetic oligonucleotide
acaaaaccauucugaggau

SEQ ID NO: 3121036 - RNA, 19 nt, Artificial Sequence
  Description of Artificial Sequence: Synthetic oligonucleotide
ucacucucugaguccccag

SEQ ID NO: 3121037 - RNA, 19 nt, Artificial Sequence
  Description of Artificial Sequence: Synthetic oligonucleotide
ugccuuugcucugggaaga

SEQ ID NO: 3121038 - RNA, 19 nt, Artificial Sequence
  Description of Artificial Sequence: Synthetic oligonucleotide
accauucugaggauuuaca

SEQ ID NO: 3121039 - RNA, 19 nt, Artificial Sequence
  Description of Artificial Sequence: Synthetic oligonucleotide
agaaucacucucacucucu

SEQ ID NO: 3121040 - RNA, 19 nt, Artificial Sequence
  Description of Artificial Sequence: Synthetic oligonucleotide
acuggcuacuacucgccaa

SEQ ID NO: 3121041 - RNA, 19 nt, Artificial Sequence
  Description of Artificial Sequence: Synthetic oligonucleotide
agucugagccccgggcccc

SEQ ID NO: 3121042 - RNA, 19 nt, Artificial Sequence
  Description of Artificial Sequence: Synthetic oligonucleotide
cuucggaaacucuauuucu

SEQ ID NO: 3121043 - RNA, 19 nt, Artificial Sequence
  Description of Artificial Sequence: Synthetic oligonucleotide
ccacagguuucucuaaccc

SEQ ID NO: 3121044 - RNA, 19 nt, Artificial Sequence
  Description of Artificial Sequence: Synthetic oligonucleotide
aguccuugagcugcaagaa

SEQ ID NO: 3121045 - RNA, 19 nt, Artificial Sequence
  Description of Artificial Sequence: Synthetic oligonucleotide
auuuacagucugagccccg

SEQ ID NO: 3121046 - RNA, 19 nt, Artificial Sequence
  Description of Artificial Sequence: Synthetic oligonucleotide
acucgccaauaucugugcu

SEQ ID NO: 3121047 - RNA, 19 nt, Artificial Sequence
  Description of Artificial Sequence: Synthetic oligonucleotide
cagucugagccccgggccc

SEQ ID NO: 3121048 - RNA, 19 nt, Artificial Sequence
  Description of Artificial Sequence: Synthetic oligonucleotide
cuugagcugcaagaaucac

SEQ ID NO: 3121049 - RNA, 19 nt, Artificial Sequence
  Description of Artificial Sequence: Synthetic oligonucleotide
cccucuuuaauauagugcu

SEQ ID NO: 3121050 - RNA, 19 nt, Artificial Sequence
  Description of Artificial Sequence: Synthetic oligonucleotide
aaaccauucugaggauuua

SEQ ID NO: 3121051 - RNA, 19 nt, Artificial Sequence
  Description of Artificial Sequence: Synthetic oligonucleotide
ucucacucucugagucccc

SEQ ID NO: 3121052 - RNA, 19 nt, Artificial Sequence
  Description of Artificial Sequence: Synthetic oligonucleotide
agguuucucuaaccccucu

SEQ ID NO: 3121053 - RNA, 19 nt, Artificial Sequence
  Description of Artificial Sequence: Synthetic oligonucleotide
cugaggauuuacagucuga

SEQ ID NO: 3121054 - RNA, 19 nt, Artificial Sequence
  Description of Artificial Sequence: Synthetic oligonucleotide
aagaaguccuugagcugca

SEQ ID NO: 3121055 - RNA, 19 nt, Artificial Sequence
  Description of Artificial Sequence: Synthetic oligonucleotide
uccccagacuggcuacuac

SEQ ID NO: 3121056 - RNA, 19 nt, Artificial Sequence
  Description of Artificial Sequence: Synthetic oligonucleotide
aaccccucuuuaauauagu

SEQ ID NO: 3121057 - RNA, 19 nt, Artificial Sequence
  Description of Artificial Sequence: Synthetic oligonucleotide
gaguccccagacuggcuac

SEQ ID NO: 3121058 - RNA, 19 nt, Artificial Sequence
  Description of Artificial Sequence: Synthetic oligonucleotide
cucuaaccccucuuuaaua

SEQ ID NO: 3121059 - RNA, 19 nt, Artificial Sequence
  Description of Artificial Sequence: Synthetic oligonucleotide
caagaaucacucucacucu

SEQ ID NO: 3121060 - RNA, 19 nt, Artificial Sequence
  Description of Artificial Sequence: Synthetic oligonucleotide
cucugggaagaaguccuug

SEQ ID NO: 3121061 - RNA, 19 nt, Artificial Sequence
  Description of Artificial Sequence: Synthetic oligonucleotide
gcugcaagaaucacucuca

SEQ ID NO: 3121062 - RNA, 19 nt, Artificial Sequence
  Description of Artificial Sequence: Synthetic oligonucleotide
gccugauaauuuccacagg

SEQ ID NO: 3121063 - RNA, 19 nt, Artificial Sequence
  Description of Artificial Sequence: Synthetic oligonucleotide
uaauuuccacagguuucuc

SEQ ID NO: 3121064 - RNA, 19 nt, Artificial Sequence
  Description of Artificial Sequence: Synthetic oligonucleotide
ccugauaauuuccacaggu

SEQ ID NO: 3121065 - RNA, 19 nt, Artificial Sequence
  Description of Artificial Sequence: Synthetic oligonucleotide
gacuggcuacuacucgcca

SEQ ID NO: 3121066 - RNA, 19 nt, Artificial Sequence
  Description of Artificial Sequence: Synthetic oligonucleotide
uagugcucauaauccucua

SEQ ID NO: 3121067 - RNA, 19 nt, Artificial Sequence
  Description of Artificial Sequence: Synthetic oligonucleotide
gucuucggaaacucuauuu

SEQ ID NO: 3121068 - RNA, 19 nt, Artificial Sequence
  Description of Artificial Sequence: Synthetic oligonucleotide
caauaucugugcucugucu

SEQ ID NO: 3121069 - RNA, 19 nt, Artificial Sequence
  Description of Artificial Sequence: Synthetic oligonucleotide
ugagccccgggccccgugu

SEQ ID NO: 3121070 - RNA, 19 nt, Artificial Sequence
  Description of Artificial Sequence: Synthetic oligonucleotide
cugugcucugucuucggaa

SEQ ID NO: 3121071 - RNA, 19 nt, Artificial Sequence
  Description of Artificial Sequence: Synthetic oligonucleotide
guuucucuaaccccucuuu

SEQ ID NO: 3121072 - RNA, 19 nt, Artificial Sequence
  Description of Artificial Sequence: Synthetic oligonucleotide
gugcucugucuucggaaac

SEQ ID NO: 3121073 - RNA, 19 nt, Artificial Sequence
  Description of Artificial Sequence: Synthetic oligonucleotide
cuaaccccucuuuaauaua

SEQ ID NO: 3121074 - RNA, 19 nt, Artificial Sequence
  Description of Artificial Sequence: Synthetic oligonucleotide
ccaauaucugugcucuguc

SEQ ID NO: 3121075 - RNA, 19 nt, Artificial Sequence
  Description of Artificial Sequence: Synthetic oligonucleotide
cugauaauuuccacagguu

SEQ ID NO: 3121076 - RNA, 19 nt, Artificial Sequence
  Description of Artificial Sequence: Synthetic oligonucleotide
cacucucugaguccccaga

SEQ ID NO: 3121077 - RNA, 19 nt, Artificial Sequence
  Description of Artificial Sequence: Synthetic oligonucleotide
ccucuuuaauauagugcuc

SEQ ID NO: 3121078 - RNA, 19 nt, Artificial Sequence
  Description of Artificial Sequence: Synthetic oligonucleotide
ccuugagcugcaagaauca

SEQ ID NO: 3121079 - RNA, 19 nt, Artificial Sequence
  Description of Artificial Sequence: Synthetic oligonucleotide
cggaaacucuauuucucac

SEQ ID NO: 3121080 - RNA, 19 nt, Artificial Sequence
  Description of Artificial Sequence: Synthetic oligonucleotide
cucuaccaguucugcaaaa

SEQ ID NO: 3121081 - RNA, 19 nt, Artificial Sequence
  Description of Artificial Sequence: Synthetic oligonucleotide
cucacucucugagucccca

SEQ ID NO: 3121082 - RNA, 19 nt, Artificial Sequence
  Description of Artificial Sequence: Synthetic oligonucleotide
cugucuucggaaacucuau

SEQ ID NO: 3121083 - RNA, 19 nt, Artificial Sequence
  Description of Artificial Sequence: Synthetic oligonucleotide
agccccgggccccguguag

SEQ ID NO: 3121084 - RNA, 19 nt, Artificial Sequence
  Description of Artificial Sequence: Synthetic oligonucleotide
guucugcaaaagacaaagu

SEQ ID NO: 3121085 - RNA, 19 nt, Artificial Sequence
  Description of Artificial Sequence: Synthetic oligonucleotide
aguccccagacuggcuacu

SEQ ID NO: 3121086 - RNA, 19 nt, Artificial Sequence
  Description of Artificial Sequence: Synthetic oligonucleotide
cuggcuacuacucgccaau

SEQ ID NO: 3121087 - RNA, 19 nt, Artificial Sequence
  Description of Artificial Sequence: Synthetic oligonucleotide
cccguguagugccugauaa

SEQ ID NO: 3121088 - RNA, 19 nt, Artificial Sequence
  Description of Artificial Sequence: Synthetic oligonucleotide
uggcuacuacucgccaaua

SEQ ID NO: 3121089 - RNA, 19 nt, Artificial Sequence
  Description of Artificial Sequence: Synthetic oligonucleotide
cucucugaguccccagacu

SEQ ID NO: 3121090 - RNA, 19 nt, Artificial Sequence
  Description of Artificial Sequence: Synthetic oligonucleotide
guccuugagcugcaagaau

SEQ ID NO: 3121091 - RNA, 19 nt, Artificial Sequence
  Description of Artificial Sequence: Synthetic oligonucleotide
gcucugucuucggaaacuc

SEQ ID NO: 3121092 - RNA, 19 nt, Artificial Sequence
  Description of Artificial Sequence: Synthetic oligonucleotide
caaaaccauucugaggauu

SEQ ID NO: 3121093 - RNA, 19 nt, Artificial Sequence
  Description of Artificial Sequence: Synthetic oligonucleotide
guguagugccugauaauuu

SEQ ID NO: 3121094 - RNA, 19 nt, Artificial Sequence
  Description of Artificial Sequence: Synthetic oligonucleotide
gccaauaucugugcucugu

SEQ ID NO: 3121095 - RNA, 19 nt, Artificial Sequence
  Description of Artificial Sequence: Synthetic oligonucleotide
ccuuugcucugggaagaag

SEQ ID NO: 3121096 - RNA, 19 nt, Artificial Sequence
  Description of Artificial Sequence: Synthetic oligonucleotide
gucugagccccgggccccg

SEQ ID NO: 3121097 - RNA, 19 nt, Artificial Sequence
  Description of Artificial Sequence: Synthetic oligonucleotide
ccgggccccguguagugcc

SEQ ID NO: 3121098 - RNA, 19 nt, Artificial Sequence
  Description of Artificial Sequence: Synthetic oligonucleotide
gguuucucuaaccccucuu

SEQ ID NO: 3121099 - RNA, 19 nt, Artificial Sequence
  Description of Artificial Sequence: Synthetic oligonucleotide
ggcuacuacucgccaauau

SEQ ID NO: 3121100 - RNA, 19 nt, Artificial Sequence
  Description of Artificial Sequence: Synthetic oligonucleotide
cugagccccgggccccgug

SEQ ID NO: 3121101 - RNA, 19 nt, Artificial Sequence
  Description of Artificial Sequence: Synthetic oligonucleotide
cugaguccccagacuggcu

SEQ ID NO: 3121102 - RNA, 19 nt, Artificial Sequence
  Description of Artificial Sequence: Synthetic oligonucleotide
gagccccgggccccgugua

SEQ ID NO: 3121103 - RNA, 19 nt, Artificial Sequence
  Description of Artificial Sequence: Synthetic oligonucleotide
cguguagugccugauaauu

SEQ ID NO: 3121104 - RNA, 19 nt, Artificial Sequence
  Description of Artificial Sequence: Synthetic oligonucleotide
guccccagacuggcuacua

SEQ ID NO: 3121105 - RNA, 19 nt, Artificial Sequence
  Description of Artificial Sequence: Synthetic oligonucleotide
ggccccguguagugccuga

SEQ ID NO: 3121106 - RNA, 19 nt, Artificial Sequence
  Description of Artificial Sequence: Synthetic oligonucleotide
ccccgggccccguguagug

SEQ ID NO: 3121107 - RNA, 19 nt, Artificial Sequence
  Description of Artificial Sequence: Synthetic oligonucleotide
cgccaauaucugugcucug

SEQ ID NO: 3121108 - RNA, 19 nt, Artificial Sequence
  Description of Artificial Sequence: Synthetic oligonucleotide
gccuuugcucugggaagaa

SEQ ID NO: 3121109 - RNA, 19 nt, Artificial Sequence
  Description of Artificial Sequence: Synthetic oligonucleotide
cccgggccccguguagugc

SEQ ID NO: 3121110 - RNA, 19 nt, Artificial Sequence
  Description of Artificial Sequence: Synthetic oligonucleotide
gggccccguguagugccug

SEQ ID NO: 3121111 - RNA, 19 nt, Artificial Sequence
  Description of Artificial Sequence: Synthetic oligonucleotide
ccguguagugccugauaau

SEQ ID NO: 3121112 - RNA, 19 nt, Artificial Sequence
  Description of Artificial Sequence: Synthetic oligonucleotide
ccccguguagugccugaua

SEQ ID NO: 3121113 - RNA, 19 nt, Artificial Sequence
  Description of Artificial Sequence: Synthetic oligonucleotide
gcucugggaagaaguccuu

SEQ ID NO: 3121114 - RNA, 19 nt, Artificial Sequence
  Description of Artificial Sequence: Synthetic oligonucleotide
gccccgggccccguguagu

SEQ ID NO: 3121115 - RNA, 19 nt, Artificial Sequence
  Description of Artificial Sequence: Synthetic oligonucleotide
gccccguguagugccugau

SEQ ID NO: 3121116 - RNA, 19 nt, Artificial Sequence
  Description of Artificial Sequence: Synthetic oligonucleotide
cgggccccguguagugccu

SEQ ID NO: 3121117 - RNA, 19 nt, Artificial Sequence
  Description of Artificial Sequence: Synthetic oligonucleotide
uguagaaucagccauuuca

SEQ ID NO: 3121118 - RNA, 19 nt, Artificial Sequence
  Description of Artificial Sequence: Synthetic oligonucleotide
uucauguuguuucucuugg

SEQ ID NO: 3121119 - RNA, 19 nt, Artificial Sequence
  Description of Artificial Sequence: Synthetic oligonucleotide
acguauguccuguagaauc

SEQ ID NO: 3121120 - RNA, 19 nt, Artificial Sequence
  Description of Artificial Sequence: Synthetic oligonucleotide
agaaucagccauuucaugu

SEQ ID NO: 3121121 - RNA, 19 nt, Artificial Sequence
  Description of Artificial Sequence: Synthetic oligonucleotide
uuucauguuguuucucuug

SEQ ID NO: 3121122 - RNA, 19 nt, Artificial Sequence
  Description of Artificial Sequence: Synthetic oligonucleotide
aaucagccauuucauguug

SEQ ID NO: 3121123 - RNA, 19 nt, Artificial Sequence
  Description of Artificial Sequence: Synthetic oligonucleotide
auguccuguagaaucagcc

SEQ ID NO: 3121124 - RNA, 19 nt, Artificial Sequence
  Description of Artificial Sequence: Synthetic oligonucleotide
ucugagcugaguccaugcg

SEQ ID NO: 3121125 - RNA, 19 nt, Artificial Sequence
  Description of Artificial Sequence: Synthetic oligonucleotide
gacccugggacguaugucc

SEQ ID NO: 3121126 - RNA, 19 nt, Artificial Sequence
  Description of Artificial Sequence: Synthetic oligonucleotide
gucaacagacccugggacg

SEQ ID NO: 3121127 - RNA, 19 nt, Artificial Sequence
  Description of Artificial Sequence: Synthetic oligonucleotide
aguccaugcguucccacuc

SEQ ID NO: 3121128 - RNA, 19 nt, Artificial Sequence
  Description of Artificial Sequence: Synthetic oligonucleotide
ucuugguugaguuucucuu

SEQ ID NO: 3121129 - RNA, 19 nt, Artificial Sequence
  Description of Artificial Sequence: Synthetic oligonucleotide
uguccuguagaaucagcca

SEQ ID NO: 3121130 - RNA, 19 nt, Artificial Sequence
  Description of Artificial Sequence: Synthetic oligonucleotide
uauguccuguagaaucagc

SEQ ID NO: 3121131 - RNA, 19 nt, Artificial Sequence
  Description of Artificial Sequence: Synthetic oligonucleotide
uagaaucagccauuucaug

SEQ ID NO: 3121132 - RNA, 19 nt, Artificial Sequence
  Description of Artificial Sequence: Synthetic oligonucleotide
uugguugaguuucucuuuc

SEQ ID NO: 3121133 - RNA, 19 nt, Artificial Sequence
  Description of Artificial Sequence: Synthetic oligonucleotide
ugggacguauguccuguag

SEQ ID NO: 3121134 - RNA, 19 nt, Artificial Sequence
  Description of Artificial Sequence: Synthetic oligonucleotide
uacagaguccucugagcug

SEQ ID NO: 3121135 - RNA, 19 nt, Artificial Sequence
  Description of Artificial Sequence: Synthetic oligonucleotide
agcugaguccaugcguucc

SEQ ID NO: 3121136 - RNA, 19 nt, Artificial Sequence
  Description of Artificial Sequence: Synthetic oligonucleotide
gguugaguuucucuuucag

SEQ ID NO: 3121137 - RNA, 19 nt, Artificial Sequence
  Description of Artificial Sequence: Synthetic oligonucleotide
auuucauguuguuucucuu

SEQ ID NO: 3121138 - RNA, 19 nt, Artificial Sequence
  Description of Artificial Sequence: Synthetic oligonucleotide
ucauguuguuucucuuggu

SEQ ID NO: 3121139 - RNA, 19 nt, Artificial Sequence
  Description of Artificial Sequence: Synthetic oligonucleotide
ugcguucccacuccuccug

SEQ ID NO: 3121140 - RNA, 19 nt, Artificial Sequence
  Description of Artificial Sequence: Synthetic oligonucleotide
ugguugaguuucucuuuca

SEQ ID NO: 3121141 - RNA, 19 nt, Artificial Sequence
  Description of Artificial Sequence: Synthetic oligonucleotide
guauguccuguagaaucag

SEQ ID NO: 3121142 - RNA, 19 nt, Artificial Sequence
  Description of Artificial Sequence: Synthetic oligonucleotide
gaaucagccauuucauguu

SEQ ID NO: 3121143 - RNA, 19 nt, Artificial Sequence
  Description of Artificial Sequence: Synthetic oligonucleotide
agacccugggacguauguc

SEQ ID NO: 3121144 - RNA, 19 nt, Artificial Sequence
  Description of Artificial Sequence: Synthetic oligonucleotide
ggacguauguccuguagaa

SEQ ID NO: 3121145 - RNA, 19 nt, Artificial Sequence
  Description of Artificial Sequence: Synthetic oligonucleotide
uccaugcguucccacuccu

SEQ ID NO: 3121146 - RNA, 19 nt, Artificial Sequence
  Description of Artificial Sequence: Synthetic oligonucleotide
guccaugcguucccacucc

SEQ ID NO: 3121147 - RNA, 19 nt, Artificial Sequence
  Description of Artificial Sequence: Synthetic oligonucleotide
guagaaucagccauuucau

SEQ ID NO: 3121148 - RNA, 19 nt, Artificial Sequence
  Description of Artificial Sequence: Synthetic oligonucleotide
gggacguauguccuguaga

SEQ ID NO: 3121149 - RNA, 19 nt, Artificial Sequence
  Description of Artificial Sequence: Synthetic oligonucleotide
augcguucccacuccuccu

SEQ ID NO: 3121150 - RNA, 19 nt, Artificial Sequence
  Description of Artificial Sequence: Synthetic oligonucleotide
aucagccauuucauguugu

SEQ ID NO: 3121151 - RNA, 19 nt, Artificial Sequence
  Description of Artificial Sequence: Synthetic oligonucleotide
cauguuguuucucuugguu

SEQ ID NO: 3121152 - RNA, 19 nt, Artificial Sequence
  Description of Artificial Sequence: Synthetic oligonucleotide
gagcugaguccaugcguuc

SEQ ID NO: 3121153 - RNA, 19 nt, Artificial Sequence
  Description of Artificial Sequence: Synthetic oligonucleotide
ucucuugguugaguuucuc

SEQ ID NO: 3121154 - RNA, 19 nt, Artificial Sequence
  Description of Artificial Sequence: Synthetic oligonucleotide
cucuugguugaguuucucu

SEQ ID NO: 3121155 - RNA, 19 nt, Artificial Sequence
  Description of Artificial Sequence: Synthetic oligonucleotide
cuugguugaguuucucuuu

SEQ ID NO: 3121156 - RNA, 19 nt, Artificial Sequence
  Description of Artificial Sequence: Synthetic oligonucleotide
cugagcugaguccaugcgu

SEQ ID NO: 3121157 - RNA, 19 nt, Artificial Sequence
  Description of Artificial Sequence: Synthetic oligonucleotide
cguauguccuguagaauca

SEQ ID NO: 3121158 - RNA, 19 nt, Artificial Sequence
  Description of Artificial Sequence: Synthetic oligonucleotide
cagaguccucugagcugag

SEQ ID NO: 3121159 - RNA, 19 nt, Artificial Sequence
  Description of Artificial Sequence: Synthetic oligonucleotide
agaguccucugagcugagu

SEQ ID NO: 3121160 - RNA, 19 nt, Artificial Sequence
  Description of Artificial Sequence: Synthetic oligonucleotide
gacguauguccuguagaau

SEQ ID NO: 3121161 - RNA, 19 nt, Artificial Sequence
  Description of Artificial Sequence: Synthetic oligonucleotide
gccauuucauguuguuucu

SEQ ID NO: 3121162 - RNA, 19 nt, Artificial Sequence
  Description of Artificial Sequence: Synthetic oligonucleotide
acagacccugggacguaug

SEQ ID NO: 3121163 - RNA, 19 nt, Artificial Sequence
  Description of Artificial Sequence: Synthetic oligonucleotide
cugaguccaugcguuccca

SEQ ID NO: 3121164 - RNA, 19 nt, Artificial Sequence
  Description of Artificial Sequence: Synthetic oligonucleotide
ccauuucauguuguuucuc

SEQ ID NO: 3121165 - RNA, 19 nt, Artificial Sequence
  Description of Artificial Sequence: Synthetic oligonucleotide
cagacccugggacguaugu

SEQ ID NO: 3121166 - RNA, 19 nt, Artificial Sequence
  Description of Artificial Sequence: Synthetic oligonucleotide
ccaugcguucccacuccuc

SEQ ID NO: 3121167 - RNA, 19 nt, Artificial Sequence
  Description of Artificial Sequence: Synthetic oligonucleotide
cccugggacguauguccug

SEQ ID NO: 3121168 - RNA, 19 nt, Artificial Sequence
  Description of Artificial Sequence: Synthetic oligonucleotide
cugggacguauguccugua

SEQ ID NO: 3121169 - RNA, 19 nt, Artificial Sequence
  Description of Artificial Sequence: Synthetic oligonucleotide
ccugggacguauguccugu

SEQ ID NO: 3121170 - RNA, 19 nt, Artificial Sequence
  Description of Artificial Sequence: Synthetic oligonucleotide
aaguugaugaugaagagcc

SEQ ID NO: 3121171 - RNA, 19 nt, Artificial Sequence
  Description of Artificial Sequence: Synthetic oligonucleotide
gaaauagacagccagcgcc

SEQ ID NO: 3121172 - RNA, 19 nt, Artificial Sequence
  Description of Artificial Sequence: Synthetic oligonucleotide
auuagcagcucuuuguuuc

SEQ ID NO: 3121173 - RNA, 19 nt, Artificial Sequence
  Description of Artificial Sequence: Synthetic oligonucleotide
aacaguguacuccaggaug

SEQ ID NO: 3121174 - RNA, 19 nt, Artificial Sequence
  Description of Artificial Sequence: Synthetic oligonucleotide
aaagaugguauacacucca

SEQ ID NO: 3121175 - RNA, 19 nt, Artificial Sequence
  Description of Artificial Sequence: Synthetic oligonucleotide
ucacaauacauguugugcc

SEQ ID NO: 3121176 - RNA, 19 nt, Artificial Sequence
  Description of Artificial Sequence: Synthetic oligonucleotide
ucagaaucucuuuuccucg

SEQ ID NO: 3121177 - RNA, 19 nt, Artificial Sequence
  Description of Artificial Sequence: Synthetic oligonucleotide
uguugugccggaaauagac

SEQ ID NO: 3121178 - RNA, 19 nt, Artificial Sequence
  Description of Artificial Sequence: Synthetic oligonucleotide
agaugguauacacuccagc

SEQ ID NO: 3121179 - RNA, 19 nt, Artificial Sequence
  Description of Artificial Sequence: Synthetic oligonucleotide
uuuccgaagucccaccagg

SEQ ID NO: 3121180 - RNA, 19 nt, Artificial Sequence
  Description of Artificial Sequence: Synthetic oligonucleotide
gaugaaguugaugaugaag

SEQ ID NO: 3121181 - RNA, 19 nt, Artificial Sequence
  Description of Artificial Sequence: Synthetic oligonucleotide
ugagagguuauuagcagcu

SEQ ID NO: 3121182 - RNA, 19 nt, Artificial Sequence
  Description of Artificial Sequence: Synthetic oligonucleotide
caggcugucauguggaacg

SEQ ID NO: 3121183 - RNA, 19 nt, Artificial Sequence
  Description of Artificial Sequence: Synthetic oligonucleotide
uugugccggaaauagacag

SEQ ID NO: 3121184 - RNA, 19 nt, Artificial Sequence
  Description of Artificial Sequence: Synthetic oligonucleotide
aaauagacagccagcgccg

SEQ ID NO: 3121185 - RNA, 19 nt, Artificial Sequence
  Description of Artificial Sequence: Synthetic oligonucleotide
cagagauagguucagaauc

SEQ ID NO: 3121186 - RNA, 19 nt, Artificial Sequence
  Description of Artificial Sequence: Synthetic oligonucleotide
uucagaaucucuuuuccuc

SEQ ID NO: 3121187 - RNA, 19 nt, Artificial Sequence
  Description of Artificial Sequence: Synthetic oligonucleotide
gacaacaguguacuccagg

SEQ ID NO: 3121188 - RNA, 19 nt, Artificial Sequence
  Description of Artificial Sequence: Synthetic oligonucleotide
aagaaggagaugaaguuga

SEQ ID NO: 3121189 - RNA, 19 nt, Artificial Sequence
  Description of Artificial Sequence: Synthetic oligonucleotide
augaaguugaugaugaaga

SEQ ID NO: 3121190 - RNA, 19 nt, Artificial Sequence
  Description of Artificial Sequence: Synthetic oligonucleotide
aaucucuuuuccucgggcu

SEQ ID NO: 3121191 - RNA, 19 nt, Artificial Sequence
  Description of Artificial Sequence: Synthetic oligonucleotide
uggaacgccauguugguga

SEQ ID NO: 3121192 - RNA, 19 nt, Artificial Sequence
  Description of Artificial Sequence: Synthetic oligonucleotide
cacaauacauguugugccg

SEQ ID NO: 3121193 - RNA, 19 nt, Artificial Sequence
  Description of Artificial Sequence: Synthetic oligonucleotide
gaaguugaugaugaagagc

SEQ ID NO: 3121194 - RNA, 19 nt, Artificial Sequence
  Description of Artificial Sequence: Synthetic oligonucleotide
cucacaauacauguugugc

SEQ ID NO: 3121195 - RNA, 19 nt, Artificial Sequence
  Description of Artificial Sequence: Synthetic oligonucleotide
gcaaagaugguauacacuc

SEQ ID NO: 3121196 - RNA, 19 nt, Artificial Sequence
  Description of Artificial Sequence: Synthetic oligonucleotide
gaagaaggagaugaaguug

SEQ ID NO: 3121197 - RNA, 19 nt, Artificial Sequence
  Description of Artificial Sequence: Synthetic oligonucleotide
agccucacaauacauguug

SEQ ID NO: 3121198 - RNA, 19 nt, Artificial Sequence
  Description of Artificial Sequence: Synthetic oligonucleotide
guuggugaggacaacagug

SEQ ID NO: 3121199 - RNA, 19 nt, Artificial Sequence
  Description of Artificial Sequence: Synthetic oligonucleotide
uuuuccucgggcugagagg

SEQ ID NO: 3121200 - RNA, 19 nt, Artificial Sequence
  Description of Artificial Sequence: Synthetic oligonucleotide
ugguauacacuccagccuc

SEQ ID NO: 3121201 - RNA, 19 nt, Artificial Sequence
  Description of Artificial Sequence: Synthetic oligonucleotide
acaacaguguacuccagga

SEQ ID NO: 3121202 - RNA, 19 nt, Artificial Sequence
  Description of Artificial Sequence: Synthetic oligonucleotide
agcuguaggacuugcgauc

SEQ ID NO: 3121203 - RNA, 19 nt, Artificial Sequence
  Description of Artificial Sequence: Synthetic oligonucleotide
agguucagaaucucuuuuc

SEQ ID NO: 3121204 - RNA, 19 nt, Artificial Sequence
  Description of Artificial Sequence: Synthetic oligonucleotide
cauguugugccggaaauag

SEQ ID NO: 3121205 - RNA, 19 nt, Artificial Sequence
  Description of Artificial Sequence: Synthetic oligonucleotide
gaggacaacaguguacucc

SEQ ID NO: 3121206 - RNA, 19 nt, Artificial Sequence
  Description of Artificial Sequence: Synthetic oligonucleotide
agcucuuuguuuccgaagu

SEQ ID NO: 3121207 - RNA, 19 nt, Artificial Sequence
  Description of Artificial Sequence: Synthetic oligonucleotide
aagagccgcuguuuccagc

SEQ ID NO: 3121208 - RNA, 19 nt, Artificial Sequence
  Description of Artificial Sequence: Synthetic oligonucleotide
auacacuccagccucacaa

SEQ ID NO: 3121209 - RNA, 19 nt, Artificial Sequence
  Description of Artificial Sequence: Synthetic oligonucleotide
uuauuagcagcucuuuguu

SEQ ID NO: 3121210 - RNA, 19 nt, Artificial Sequence
  Description of Artificial Sequence: Synthetic oligonucleotide
auguggaacgccauguugg

SEQ ID NO: 3121211 - RNA, 19 nt, Artificial Sequence
  Description of Artificial Sequence: Synthetic oligonucleotide
uugaugaugaagagccgcu

SEQ ID NO: 3121212 - RNA, 19 nt, Artificial Sequence
  Description of Artificial Sequence: Synthetic oligonucleotide
aggacaacaguguacucca

SEQ ID NO: 3121213 - RNA, 19 nt, Artificial Sequence
  Description of Artificial Sequence: Synthetic oligonucleotide
aacgccauguuggugagga

SEQ ID NO: 3121214 - RNA, 19 nt, Artificial Sequence
  Description of Artificial Sequence: Synthetic oligonucleotide
aucagagauagguucagaa

SEQ ID NO: 3121215 - RNA, 19 nt, Artificial Sequence
  Description of Artificial Sequence: Synthetic oligonucleotide
ucagagauagguucagaau

SEQ ID NO: 3121216 - RNA, 19 nt, Artificial Sequence
  Description of Artificial Sequence: Synthetic oligonucleotide
cugagagguuauuagcagc

SEQ ID NO: 3121217 - RNA, 19 nt, Artificial Sequence
  Description of Artificial Sequence: Synthetic oligonucleotide
cuuuuccucgggcugagag

SEQ ID NO: 3121218 - RNA, 19 nt, Artificial Sequence
  Description of Artificial Sequence: Synthetic oligonucleotide
agagguuauuagcagcucu

SEQ ID NO: 3121219 - RNA, 19 nt, Artificial Sequence
  Description of Artificial Sequence: Synthetic oligonucleotide
caaagaugguauacacucc

SEQ ID NO: 3121220 - RNA, 19 nt, Artificial Sequence
  Description of Artificial Sequence: Synthetic oligonucleotide
gaaucucuuuuccucgggc

SEQ ID NO: 3121221 - RNA, 19 nt, Artificial Sequence
  Description of Artificial Sequence: Synthetic oligonucleotide
acaguguacuccaggaugg

SEQ ID NO: 3121222 - RNA, 19 nt, Artificial Sequence
  Description of Artificial Sequence: Synthetic oligonucleotide
augguauacacuccagccu

SEQ ID NO: 3121223 - RNA, 19 nt, Artificial Sequence
  Description of Artificial Sequence: Synthetic oligonucleotide
agaaucucuuuuccucggg

SEQ ID NO: 3121224 - RNA, 19 nt, Artificial Sequence
  Description of Artificial Sequence: Synthetic oligonucleotide
uccagccucacaauacaug

SEQ ID NO: 3121225 - RNA, 19 nt, Artificial Sequence
  Description of Artificial Sequence: Synthetic oligonucleotide
gaugaagagccgcuguuuc

SEQ ID NO: 3121226 - RNA, 19 nt, Artificial Sequence
  Description of Artificial Sequence: Synthetic oligonucleotide
uuuguuuccgaagucccac

SEQ ID NO: 3121227 - RNA, 19 nt, Artificial Sequence
  Description of Artificial Sequence: Synthetic oligonucleotide
gauggcaaagaugguauac

SEQ ID NO: 3121228 - RNA, 19 nt, Artificial Sequence
  Description of Artificial Sequence: Synthetic oligonucleotide
uacauguugugccggaaau

SEQ ID NO: 3121229 - RNA, 19 nt, Artificial Sequence
  Description of Artificial Sequence: Synthetic oligonucleotide
uggcaaagaugguauacac

SEQ ID NO: 3121230 - RNA, 19 nt, Artificial Sequence
  Description of Artificial Sequence: Synthetic oligonucleotide
guuauuagcagcucuuugu

SEQ ID NO: 3121231 - RNA, 19 nt, Artificial Sequence
  Description of Artificial Sequence: Synthetic oligonucleotide
ugugccggaaauagacagc

SEQ ID NO: 3121232 - RNA, 19 nt, Artificial Sequence
  Description of Artificial Sequence: Synthetic oligonucleotide
uguuuccgaagucccacca

SEQ ID NO: 3121233 - RNA, 19 nt, Artificial Sequence
  Description of Artificial Sequence: Synthetic oligonucleotide
uguuggugaggacaacagu

SEQ ID NO: 3121234 - RNA, 19 nt, Artificial Sequence
  Description of Artificial Sequence: Synthetic oligonucleotide
acaauacauguugugccgg

SEQ ID NO: 3121235 - RNA, 19 nt, Artificial Sequence
  Description of Artificial Sequence: Synthetic oligonucleotide
uuagcagcucuuuguuucc

SEQ ID NO: 3121236 - RNA, 19 nt, Artificial Sequence
  Description of Artificial Sequence: Synthetic oligonucleotide
ugucauguggaacgccaug

SEQ ID NO: 3121237 - RNA, 19 nt, Artificial Sequence
  Description of Artificial Sequence: Synthetic oligonucleotide
cagcaucagagauagguuc

SEQ ID NO: 3121238 - RNA, 19 nt, Artificial Sequence
  Description of Artificial Sequence: Synthetic oligonucleotide
uuuccucgggcugagaggu

SEQ ID NO: 3121239 - RNA, 19 nt, Artificial Sequence
  Description of Artificial Sequence: Synthetic oligonucleotide
gguucagaaucucuuuucc

SEQ ID NO: 3121240 - RNA, 19 nt, Artificial Sequence
  Description of Artificial Sequence: Synthetic oligonucleotide
aucucuuuuccucgggcug

SEQ ID NO: 3121241 - RNA, 19 nt, Artificial Sequence
  Description of Artificial Sequence: Synthetic oligonucleotide
cagaaucucuuuuccucgg

SEQ ID NO: 3121242 - RNA, 19 nt, Artificial Sequence
  Description of Artificial Sequence: Synthetic oligonucleotide
agagauagguucagaaucu

SEQ ID NO: 3121243 - RNA, 19 nt, Artificial Sequence
  Description of Artificial Sequence: Synthetic oligonucleotide
cauguggaacgccauguug

SEQ ID NO: 3121244 - RNA, 19 nt, Artificial Sequence
  Description of Artificial Sequence: Synthetic oligonucleotide
uagguucagaaucucuuuu

SEQ ID NO: 3121245 - RNA, 19 nt, Artificial Sequence
  Description of Artificial Sequence: Synthetic oligonucleotide
gaaggagaugaaguugaug

SEQ ID NO: 3121246 - RNA, 19 nt, Artificial Sequence
  Description of Artificial Sequence: Synthetic oligonucleotide
aagaugguauacacuccag

SEQ ID NO: 3121247 - RNA, 19 nt, Artificial Sequence
  Description of Artificial Sequence: Synthetic oligonucleotide
uuccgaagucccaccaggc

SEQ ID NO: 3121248 - RNA, 19 nt, Artificial Sequence
  Description of Artificial Sequence: Synthetic oligonucleotide
agagccgcuguuuccagcu

SEQ ID NO: 3121249 - RNA, 19 nt, Artificial Sequence
  Description of Artificial Sequence: Synthetic oligonucleotide
auagguucagaaucucuuu

SEQ ID NO: 3121250 - RNA, 19 nt, Artificial Sequence
  Description of Artificial Sequence: Synthetic oligonucleotide
gccggaaauagacagccag

SEQ ID NO: 3121251 - RNA, 19 nt, Artificial Sequence
  Description of Artificial Sequence: Synthetic oligonucleotide
uauacacuccagccucaca

SEQ ID NO: 3121252 - RNA, 19 nt, Artificial Sequence
  Description of Artificial Sequence: Synthetic oligonucleotide
uguggaacgccauguuggu

SEQ ID NO: 3121253 - RNA, 19 nt, Artificial Sequence
  Description of Artificial Sequence: Synthetic oligonucleotide
ggagaugaaguugaugaug

SEQ ID NO: 3121254 - RNA, 19 nt, Artificial Sequence
  Description of Artificial Sequence: Synthetic oligonucleotide
acuccagccucacaauaca

SEQ ID NO: 3121255 - RNA, 19 nt, Artificial Sequence
  Description of Artificial Sequence: Synthetic oligonucleotide
gguuauuagcagcucuuug

SEQ ID NO: 3121256 - RNA, 19 nt, Artificial Sequence
  Description of Artificial Sequence: Synthetic oligonucleotide
gugccggaaauagacagcc

SEQ ID NO: 3121257 - RNA, 19 nt, Artificial Sequence
  Description of Artificial Sequence: Synthetic oligonucleotide
uuguuuccgaagucccacc

SEQ ID NO: 3121258 - RNA, 19 nt, Artificial Sequence
  Description of Artificial Sequence: Synthetic oligonucleotide
auggcaaagaugguauaca

SEQ ID NO: 3121259 - RNA, 19 nt, Artificial Sequence
  Description of Artificial Sequence: Synthetic oligonucleotide
agucccaccaggcugucau

SEQ ID NO: 3121260 - RNA, 19 nt, Artificial Sequence
  Description of Artificial Sequence: Synthetic oligonucleotide
ugaugaugaagagccgcug

SEQ ID NO: 3121261 - RNA, 19 nt, Artificial Sequence
  Description of Artificial Sequence: Synthetic oligonucleotide
uguacuccaggauggcaaa

SEQ ID NO: 3121262 - RNA, 19 nt, Artificial Sequence
  Description of Artificial Sequence: Synthetic oligonucleotide
uauuagcagcucuuuguuu

SEQ ID NO: 3121263 - RNA, 19 nt, Artificial Sequence
  Description of Artificial Sequence: Synthetic oligonucleotide
gcugagagguuauuagcag

SEQ ID NO: 3121264 - RNA, 19 nt, Artificial Sequence
  Description of Artificial Sequence: Synthetic oligonucleotide
auacauguugugccggaaa

SEQ ID NO: 3121265 - RNA, 19 nt, Artificial Sequence
  Description of Artificial Sequence: Synthetic oligonucleotide
uccgaagucccaccaggcu

SEQ ID NO: 3121266 - RNA, 19 nt, Artificial Sequence
  Description of Artificial Sequence: Synthetic oligonucleotide
gcuguuuccagcuguagga

SEQ ID NO: 3121267 - RNA, 19 nt, Artificial Sequence
  Description of Artificial Sequence: Synthetic oligonucleotide
guuuccgaagucccaccag

SEQ ID NO: 3121268 - RNA, 19 nt, Artificial Sequence
  Description of Artificial Sequence: Synthetic oligonucleotide
ucucuuuuccucgggcuga

SEQ ID NO: 3121269 - RNA, 19 nt, Artificial Sequence
  Description of Artificial Sequence: Synthetic oligonucleotide
aauacauguugugccggaa

SEQ ID NO: 3121270 - RNA, 19 nt, Artificial Sequence
  Description of Artificial Sequence: Synthetic oligonucleotide
gaagagccgcuguuuccag

SEQ ID NO: 3121271 - RNA, 19 nt, Artificial Sequence
  Description of Artificial Sequence: Synthetic oligonucleotide
ggaaauagacagccagcgc

SEQ ID NO: 3121272 - RNA, 19 nt, Artificial Sequence
  Description of Artificial Sequence: Synthetic oligonucleotide
aguugaugaugaagagccg

SEQ ID NO: 3121273 - RNA, 19 nt, Artificial Sequence
  Description of Artificial Sequence: Synthetic oligonucleotide
cagcucuuuguuuccgaag

SEQ ID NO: 3121274 - RNA, 19 nt, Artificial Sequence
  Description of Artificial Sequence: Synthetic oligonucleotide
aggauggcaaagaugguau

SEQ ID NO: 3121275 - RNA, 19 nt, Artificial Sequence
  Description of Artificial Sequence: Synthetic oligonucleotide
uggugaggacaacagugua

SEQ ID NO: 3121276 - RNA, 19 nt, Artificial Sequence
  Description of Artificial Sequence: Synthetic oligonucleotide
uagacagccagcgccgaga

SEQ ID NO: 3121277 - RNA, 19 nt, Artificial Sequence
  Description of Artificial Sequence: Synthetic oligonucleotide
agcaucagagauagguuca

SEQ ID NO: 3121278 - RNA, 19 nt, Artificial Sequence
  Description of Artificial Sequence: Synthetic oligonucleotide
augaugaagagccgcuguu

SEQ ID NO: 3121279 - RNA, 19 nt, Artificial Sequence
  Description of Artificial Sequence: Synthetic oligonucleotide
auagacagccagcgccgag

SEQ ID NO: 3121280 - RNA, 19 nt, Artificial Sequence
  Description of Artificial Sequence: Synthetic oligonucleotide
aauagacagccagcgccga

SEQ ID NO: 3121281 - RNA, 19 nt, Artificial Sequence
  Description of Artificial Sequence: Synthetic oligonucleotide
agauagguucagaaucucu

SEQ ID NO: 3121282 - RNA, 19 nt, Artificial Sequence
  Description of Artificial Sequence: Synthetic oligonucleotide
gauagguucagaaucucuu

SEQ ID NO: 3121283 - RNA, 19 nt, Artificial Sequence
  Description of Artificial Sequence: Synthetic oligonucleotide
gccgagaagaaggagauga

SEQ ID NO: 3121284 - RNA, 19 nt, Artificial Sequence
  Description of Artificial Sequence: Synthetic oligonucleotide
gccagcgccgagaagaagg

SEQ ID NO: 3121285 - RNA, 19 nt, Artificial Sequence
  Description of Artificial Sequence: Synthetic oligonucleotide
ucauguggaacgccauguu

SEQ ID NO: 3121286 - RNA, 19 nt, Artificial Sequence
  Description of Artificial Sequence: Synthetic oligonucleotide
cuuuguuuccgaaguccca

SEQ ID NO: 3121287 - RNA, 19 nt, Artificial Sequence
  Description of Artificial Sequence: Synthetic oligonucleotide
agcgccgagaagaaggaga

SEQ ID NO: 3121288 - RNA, 19 nt, Artificial Sequence
  Description of Artificial Sequence: Synthetic oligonucleotide
cauguuggugaggacaaca

SEQ ID NO: 3121289 - RNA, 19 nt, Artificial Sequence
  Description of Artificial Sequence: Synthetic oligonucleotide
uagcagcucuuuguuuccg

SEQ ID NO: 3121290 - RNA, 19 nt, Artificial Sequence
  Description of Artificial Sequence: Synthetic oligonucleotide
uacacuccagccucacaau

SEQ ID NO: 3121291 - RNA, 19 nt, Artificial Sequence
  Description of Artificial Sequence: Synthetic oligonucleotide
ugaugaagagccgcuguuu

SEQ ID NO: 3121292 - RNA, 19 nt, Artificial Sequence
  Description of Artificial Sequence: Synthetic oligonucleotide
gggcugagagguuauuagc

SEQ ID NO: 3121293 - RNA, 19 nt, Artificial Sequence
  Description of Artificial Sequence: Synthetic oligonucleotide
aggcugucauguggaacgc

SEQ ID NO: 3121294 - RNA, 19 nt, Artificial Sequence
  Description of Artificial Sequence: Synthetic oligonucleotide
caauacauguugugccgga

SEQ ID NO: 3121295 - RNA, 19 nt, Artificial Sequence
  Description of Artificial Sequence: Synthetic oligonucleotide
agaugaaguugaugaugaa

SEQ ID NO: 3121296 - RNA, 19 nt, Artificial Sequence
  Description of Artificial Sequence: Synthetic oligonucleotide
gagauagguucagaaucuc

SEQ ID NO: 3121297 - RNA, 19 nt, Artificial Sequence
  Description of Artificial Sequence: Synthetic oligonucleotide
aguguacuccaggauggca

SEQ ID NO: 3121298 - RNA, 19 nt, Artificial Sequence
  Description of Artificial Sequence: Synthetic oligonucleotide
agcagcucuuuguuuccga

SEQ ID NO: 3121299 - RNA, 19 nt, Artificial Sequence
  Description of Artificial Sequence: Synthetic oligonucleotide
gugaggacaacaguguacu

SEQ ID NO: 3121300 - RNA, 19 nt, Artificial Sequence
  Description of Artificial Sequence: Synthetic oligonucleotide
cuguuuccagcuguaggac

SEQ ID NO: 3121301 - RNA, 19 nt, Artificial Sequence
  Description of Artificial Sequence: Synthetic oligonucleotide
guucagaaucucuuuuccu

SEQ ID NO: 3121302 - RNA, 19 nt, Artificial Sequence
  Description of Artificial Sequence: Synthetic oligonucleotide
ggugaggacaacaguguac

SEQ ID NO: 3121303 - RNA, 19 nt, Artificial Sequence
  Description of Artificial Sequence: Synthetic oligonucleotide
ugccggaaauagacagcca

SEQ ID NO: 3121304 - RNA, 19 nt, Artificial Sequence
  Description of Artificial Sequence: Synthetic oligonucleotide
ugaggacaacaguguacuc

SEQ ID NO: 3121305 - RNA, 19 nt, Artificial Sequence
  Description of Artificial Sequence: Synthetic oligonucleotide
ccggaaauagacagccagc

SEQ ID NO: 3121306 - RNA, 19 nt, Artificial Sequence
  Description of Artificial Sequence: Synthetic oligonucleotide
ucccaccaggcugucaugu

SEQ ID NO: 3121307 - RNA, 19 nt, Artificial Sequence
  Description of Artificial Sequence: Synthetic oligonucleotide
ggcugagagguuauuagca

SEQ ID NO: 3121308 - RNA, 19 nt, Artificial Sequence
  Description of Artificial Sequence: Synthetic oligonucleotide
agccgcuguuuccagcugu

SEQ ID NO: 3121309 - RNA, 19 nt, Artificial Sequence
  Description of Artificial Sequence: Synthetic oligonucleotide
ccucacaauacauguugug

SEQ ID NO: 3121310 - RNA, 19 nt, Artificial Sequence
  Description of Artificial Sequence: Synthetic oligonucleotide
ccaccaggcugucaugugg

SEQ ID NO: 3121311 - RNA, 19 nt, Artificial Sequence
  Description of Artificial Sequence: Synthetic oligonucleotide
guugugccggaaauagaca

SEQ ID NO: 3121312 - RNA, 19 nt, Artificial Sequence
  Description of Artificial Sequence: Synthetic oligonucleotide
gagagguuauuagcagcuc

SEQ ID NO: 3121313 - RNA, 19 nt, Artificial Sequence
  Description of Artificial Sequence: Synthetic oligonucleotide
ggaacgccauguuggugag

SEQ ID NO: 3121314 - RNA, 19 nt, Artificial Sequence
  Description of Artificial Sequence: Synthetic oligonucleotide
ccgaagucccaccaggcug

SEQ ID NO: 3121315 - RNA, 19 nt, Artificial Sequence
  Description of Artificial Sequence: Synthetic oligonucleotide
ucgggcugagagguuauua

SEQ ID NO: 3121316 - RNA, 19 nt, Artificial Sequence
  Description of Artificial Sequence: Synthetic oligonucleotide
agguuauuagcagcucuuu

SEQ ID NO: 3121317 - RNA, 19 nt, Artificial Sequence
  Description of Artificial Sequence: Synthetic oligonucleotide
caccaggcugucaugugga

SEQ ID NO: 3121318 - RNA, 19 nt, Artificial Sequence
  Description of Artificial Sequence: Synthetic oligonucleotide
guacuccaggauggcaaag

SEQ ID NO: 3121319 - RNA, 19 nt, Artificial Sequence
  Description of Artificial Sequence: Synthetic oligonucleotide
acgccauguuggugaggac

SEQ ID NO: 3121320 - RNA, 19 nt, Artificial Sequence
  Description of Artificial Sequence: Synthetic oligonucleotide
guauacacuccagccucac

SEQ ID NO: 3121321 - RNA, 19 nt, Artificial Sequence
  Description of Artificial Sequence: Synthetic oligonucleotide
gucauguggaacgccaugu

SEQ ID NO: 3121322 - RNA, 19 nt, Artificial Sequence
  Description of Artificial Sequence: Synthetic oligonucleotide
caggauggcaaagauggua

SEQ ID NO: 3121323 - RNA, 19 nt, Artificial Sequence
  Description of Artificial Sequence: Synthetic oligonucleotide
acauguugugccggaaaua

SEQ ID NO: 3121324 - RNA, 19 nt, Artificial Sequence
  Description of Artificial Sequence: Synthetic oligonucleotide
gacagccagcgccgagaag

SEQ ID NO: 3121325 - RNA, 19 nt, Artificial Sequence
  Description of Artificial Sequence: Synthetic oligonucleotide
gaacgccauguuggugagg

SEQ ID NO: 3121326 - RNA, 19 nt, Artificial Sequence
  Description of Artificial Sequence: Synthetic oligonucleotide
gcaucagagauagguucag

SEQ ID NO: 3121327 - RNA, 19 nt, Artificial Sequence
  Description of Artificial Sequence: Synthetic oligonucleotide
caguguacuccaggauggc

SEQ ID NO: 3121328 - RNA, 19 nt, Artificial Sequence
  Description of Artificial Sequence: Synthetic oligonucleotide
gcugucauguggaacgcca

SEQ ID NO: 3121329 - RNA, 19 nt, Artificial Sequence
  Description of Artificial Sequence: Synthetic oligonucleotide
cgcuguuuccagcuguagg

SEQ ID NO: 3121330 - RNA, 19 nt, Artificial Sequence
  Description of Artificial Sequence: Synthetic oligonucleotide
cgggcugagagguuauuag

SEQ ID NO: 3121331 - RNA, 19 nt, Artificial Sequence
  Description of Artificial Sequence: Synthetic oligonucleotide
cucuuuuccucgggcugag

SEQ ID NO: 3121332 - RNA, 19 nt, Artificial Sequence
  Description of Artificial Sequence: Synthetic oligonucleotide
auguugugccggaaauaga

SEQ ID NO: 3121333 - RNA, 19 nt, Artificial Sequence
  Description of Artificial Sequence: Synthetic oligonucleotide
gagguuauuagcagcucuu

SEQ ID NO: 3121334 - RNA, 19 nt, Artificial Sequence
  Description of Artificial Sequence: Synthetic oligonucleotide
ccagcuguaggacuugcga

SEQ ID NO: 3121335 - RNA, 19 nt, Artificial Sequence
  Description of Artificial Sequence: Synthetic oligonucleotide
agaaggagaugaaguugau

SEQ ID NO: 3121336 - RNA, 19 nt, Artificial Sequence
  Description of Artificial Sequence: Synthetic oligonucleotide
gagccgcuguuuccagcug

SEQ ID NO: 3121337 - RNA, 19 nt, Artificial Sequence
  Description of Artificial Sequence: Synthetic oligonucleotide
guggaacgccauguuggug

SEQ ID NO: 3121338 - RNA, 19 nt, Artificial Sequence
  Description of Artificial Sequence: Synthetic oligonucleotide
ccagccucacaauacaugu

SEQ ID NO: 3121339 - RNA, 19 nt, Artificial Sequence
  Description of Artificial Sequence: Synthetic oligonucleotide
accaggcugucauguggaa

SEQ ID NO: 3121340 - RNA, 19 nt, Artificial Sequence
  Description of Artificial Sequence: Synthetic oligonucleotide
gcucuuuguuuccgaaguc

SEQ ID NO: 3121341 - RNA, 19 nt, Artificial Sequence
  Description of Artificial Sequence: Synthetic oligonucleotide
caucagagauagguucaga

SEQ ID NO: 3121342 - RNA, 19 nt, Artificial Sequence
  Description of Artificial Sequence: Synthetic oligonucleotide
ucuuuuccucgggcugaga

SEQ ID NO: 3121343 - RNA, 19 nt, Artificial Sequence
  Description of Artificial Sequence: Synthetic oligonucleotide
guuuccagcuguaggacuu

SEQ ID NO: 3121344 - RNA, 19 nt, Artificial Sequence
  Description of Artificial Sequence: Synthetic oligonucleotide
aagucccaccaggcuguca

SEQ ID NO: 3121345 - RNA, 19 nt, Artificial Sequence
  Description of Artificial Sequence: Synthetic oligonucleotide
cagcuguaggacuugcgau

SEQ ID NO: 3121346 - RNA, 19 nt, Artificial Sequence
  Description of Artificial Sequence: Synthetic oligonucleotide
gucccaccaggcugucaug

SEQ ID NO: 3121347 - RNA, 19 nt, Artificial Sequence
  Description of Artificial Sequence: Synthetic oligonucleotide
ggcaaagaugguauacacu

SEQ ID NO: 3121348 - RNA, 19 nt, Artificial Sequence
  Description of Artificial Sequence: Synthetic oligonucleotide
gguauacacuccagccuca

SEQ ID NO: 3121349 - RNA, 19 nt, Artificial Sequence
  Description of Artificial Sequence: Synthetic oligonucleotide
gcagcucuuuguuuccgaa

SEQ ID NO: 3121350 - RNA, 19 nt, Artificial Sequence
  Description of Artificial Sequence: Synthetic oligonucleotide
caacaguguacuccaggau

SEQ ID NO: 3121351 - RNA, 19 nt, Artificial Sequence
  Description of Artificial Sequence: Synthetic oligonucleotide
agccagcgccgagaagaag

SEQ ID NO: 3121352 - RNA, 19 nt, Artificial Sequence
  Description of Artificial Sequence: Synthetic oligonucleotide
cagcgccgagaagaaggag

SEQ ID NO: 3121353 - RNA, 19 nt, Artificial Sequence
  Description of Artificial Sequence: Synthetic oligonucleotide
ggauggcaaagaugguaua

SEQ ID NO: 3121354 - RNA, 19 nt, Artificial Sequence
  Description of Artificial Sequence: Synthetic oligonucleotide
ggacaacaguguacuccag

SEQ ID NO: 3121355 - RNA, 19 nt, Artificial Sequence
  Description of Artificial Sequence: Synthetic oligonucleotide
ggcugucauguggaacgcc

SEQ ID NO: 3121356 - RNA, 19 nt, Artificial Sequence
  Description of Artificial Sequence: Synthetic oligonucleotide
ccaggcugucauguggaac

SEQ ID NO: 3121357 - RNA, 19 nt, Artificial Sequence
  Description of Artificial Sequence: Synthetic oligonucleotide
gaagucccaccaggcuguc

SEQ ID NO: 3121358 - RNA, 19 nt, Artificial Sequence
  Description of Artificial Sequence: Synthetic oligonucleotide
cugucauguggaacgccau

SEQ ID NO: 3121359 - RNA, 19 nt, Artificial Sequence
  Description of Artificial Sequence: Synthetic oligonucleotide
uuccucgggcugagagguu

SEQ ID NO: 3121360 - RNA, 19 nt, Artificial Sequence
  Description of Artificial Sequence: Synthetic oligonucleotide
cuccagccucacaauacau

SEQ ID NO: 3121361 - RNA, 19 nt, Artificial Sequence
  Description of Artificial Sequence: Synthetic oligonucleotide
cagccagcgccgagaagaa

SEQ ID NO: 3121362 - RNA, 19 nt, Artificial Sequence
  Description of Artificial Sequence: Synthetic oligonucleotide
ccagcgccgagaagaagga

SEQ ID NO: 3121363 - RNA, 19 nt, Artificial Sequence
  Description of Artificial Sequence: Synthetic oligonucleotide
cccaccaggcugucaugug

SEQ ID NO: 3121364 - RNA, 19 nt, Artificial Sequence
  Description of Artificial Sequence: Synthetic oligonucleotide
ccgagaagaaggagaugaa

SEQ ID NO: 3121365 - RNA, 19 nt, Artificial Sequence
  Description of Artificial Sequence: Synthetic oligonucleotide
ccagcaucagagauagguu

SEQ ID NO: 3121366 - RNA, 19 nt, Artificial Sequence
  Description of Artificial Sequence: Synthetic oligonucleotide
gccucacaauacauguugu

SEQ ID NO: 3121367 - RNA, 19 nt, Artificial Sequence
  Description of Artificial Sequence: Synthetic oligonucleotide
ccauguuggugaggacaac

SEQ ID NO: 3121368 - RNA, 19 nt, Artificial Sequence
  Description of Artificial Sequence: Synthetic oligonucleotide
cgaagucccaccaggcugu

SEQ ID NO: 3121369 - RNA, 19 nt, Artificial Sequence
  Description of Artificial Sequence: Synthetic oligonucleotide
ccgcuguuuccagcuguag

SEQ ID NO: 3121370 - RNA, 19 nt, Artificial Sequence
  Description of Artificial Sequence: Synthetic oligonucleotide
gcgccgagaagaaggagau

SEQ ID NO: 3121371 - RNA, 19 nt, Artificial Sequence
  Description of Artificial Sequence: Synthetic oligonucleotide
gccgcuguuuccagcugua

SEQ ID NO: 3121372 - RNA, 19 nt, Artificial Sequence
  Description of Artificial Sequence: Synthetic oligonucleotide
cgccgagaagaaggagaug

SEQ ID NO: 3121373 - RNA, 19 nt, Artificial Sequence
  Description of Artificial Sequence: Synthetic oligonucleotide
cucgggcugagagguuauu

SEQ ID NO: 3121374 - RNA, 19 nt, Artificial Sequence
  Description of Artificial Sequence: Synthetic oligonucleotide
ccucgggcugagagguuau

SEQ ID NO: 3121375 - RNA, 19 nt, Artificial Sequence
  Description of Artificial Sequence: Synthetic oligonucleotide
uuugucaagaugaaguugc

SEQ ID NO: 3121376 - RNA, 19 nt, Artificial Sequence
  Description of Artificial Sequence: Synthetic oligonucleotide
gaugaugagguucauaaag

SEQ ID NO: 3121377 - RNA, 19 nt, Artificial Sequence
  Description of Artificial Sequence: Synthetic oligonucleotide
aagaugaaguugcucuugc

SEQ ID NO: 3121378 - RNA, 19 nt, Artificial Sequence
  Description of Artificial Sequence: Synthetic oligonucleotide
uaguuugucaagaugaagu

SEQ ID NO: 3121379 - RNA, 19 nt, Artificial Sequence
  Description of Artificial Sequence: Synthetic oligonucleotide
gaugaaguugcucuugcgg

SEQ ID NO: 3121380 - RNA, 19 nt, Artificial Sequence
  Description of Artificial Sequence: Synthetic oligonucleotide
ugucgcagaacugugagcg

SEQ ID NO: 3121381 - RNA, 19 nt, Artificial Sequence
  Description of Artificial Sequence: Synthetic oligonucleotide
agguucauaaagcagagga

SEQ ID NO: 3121382 - RNA, 19 nt, Artificial Sequence
  Description of Artificial Sequence: Synthetic oligonucleotide
aaagcagaggagcacgaug

SEQ ID NO: 3121383 - RNA, 19 nt, Artificial Sequence
  Description of Artificial Sequence: Synthetic oligonucleotide
uugcaguugacacgcaccg

SEQ ID NO: 3121384 - RNA, 19 nt, Artificial Sequence
  Description of Artificial Sequence: Synthetic oligonucleotide
uguguaguuugucaagaug

SEQ ID NO: 3121385 - RNA, 19 nt, Artificial Sequence
  Description of Artificial Sequence: Synthetic oligonucleotide
uugcggaagaugaagaggu

SEQ ID NO: 3121386 - RNA, 19 nt, Artificial Sequence
  Description of Artificial Sequence: Synthetic oligonucleotide
uucauaaagcagaggagca

SEQ ID NO: 3121387 - RNA, 19 nt, Artificial Sequence
  Description of Artificial Sequence: Synthetic oligonucleotide
guucauaaagcagaggagc

SEQ ID NO: 3121388 - RNA, 19 nt, Artificial Sequence
  Description of Artificial Sequence: Synthetic oligonucleotide
auguugaugucgcagaacu

SEQ ID NO: 3121389 - RNA, 19 nt, Artificial Sequence
  Description of Artificial Sequence: Synthetic oligonucleotide
augaugagguucauaaagc

SEQ ID NO: 3121390 - RNA, 19 nt, Artificial Sequence
  Description of Artificial Sequence: Synthetic oligonucleotide
gaagagguggaugagguug

SEQ ID NO: 3121391 - RNA, 19 nt, Artificial Sequence
  Description of Artificial Sequence: Synthetic oligonucleotide
ugagguucauaaagcagag

SEQ ID NO: 3121392 - RNA, 19 nt, Artificial Sequence
  Description of Artificial Sequence: Synthetic oligonucleotide
gaugucgcagaacugugag

SEQ ID NO: 3121393 - RNA, 19 nt, Artificial Sequence
  Description of Artificial Sequence: Synthetic oligonucleotide
ugaugagguucauaaagca

SEQ ID NO: 3121394 - RNA, 19 nt, Artificial Sequence
  Description of Artificial Sequence: Synthetic oligonucleotide
agguggaugagguugacga

SEQ ID NO: 3121395 - RNA, 19 nt, Artificial Sequence
  Description of Artificial Sequence: Synthetic oligonucleotide
aggagcacgauguccacac

SEQ ID NO: 3121396 - RNA, 19 nt, Artificial Sequence
  Description of Artificial Sequence: Synthetic oligonucleotide
cauaaagcagaggagcacg

SEQ ID NO: 3121397 - RNA, 19 nt, Artificial Sequence
  Description of Artificial Sequence: Synthetic oligonucleotide
gaugaagagguggaugagg

SEQ ID NO: 3121398 - RNA, 19 nt, Artificial Sequence
  Description of Artificial Sequence: Synthetic oligonucleotide
acagauggcagcuugcagu

SEQ ID NO: 3121399 - RNA, 19 nt, Artificial Sequence
  Description of Artificial Sequence: Synthetic oligonucleotide
uugcucuugcggaagauga

SEQ ID NO: 3121400 - RNA, 19 nt, Artificial Sequence
  Description of Artificial Sequence: Synthetic oligonucleotide
gcugcagcugcacagaugg

SEQ ID NO: 3121401 - RNA, 19 nt, Artificial Sequence
  Description of Artificial Sequence: Synthetic oligonucleotide
gaugagguucauaaagcag

SEQ ID NO: 3121402 - RNA, 19 nt, Artificial Sequence
  Description of Artificial Sequence: Synthetic oligonucleotide
gaugagguugacgaggaug

SEQ ID NO: 3121403 - RNA, 19 nt, Artificial Sequence
  Description of Artificial Sequence: Synthetic oligonucleotide
ucuugcggaagaugaagag

SEQ ID NO: 3121404 - RNA, 19 nt, Artificial Sequence
  Description of Artificial Sequence: Synthetic oligonucleotide
cuugcaguugacacgcacc

SEQ ID NO: 3121405 - RNA, 19 nt, Artificial Sequence
  Description of Artificial Sequence: Synthetic oligonucleotide
augaaguugcucuugcgga

SEQ ID NO: 3121406 - RNA, 19 nt, Artificial Sequence
  Description of Artificial Sequence: Synthetic oligonucleotide
gaagaugaagagguggaug

SEQ ID NO: 3121407 - RNA, 19 nt, Artificial Sequence
  Description of Artificial Sequence: Synthetic oligonucleotide
guugacgaggaugaugagg

SEQ ID NO: 3121408 - RNA, 19 nt, Artificial Sequence
  Description of Artificial Sequence: Synthetic oligonucleotide
ucuugaugccaccuugugu

SEQ ID NO: 3121409 - RNA, 19 nt, Artificial Sequence
  Description of Artificial Sequence: Synthetic oligonucleotide
uguaguuugucaagaugaa

SEQ ID NO: 3121410 - RNA, 19 nt, Artificial Sequence
  Description of Artificial Sequence: Synthetic oligonucleotide
augagguucauaaagcaga

SEQ ID NO: 3121411 - RNA, 19 nt, Artificial Sequence
  Description of Artificial Sequence: Synthetic oligonucleotide
cuugaugccaccuugugua

SEQ ID NO: 3121412 - RNA, 19 nt, Artificial Sequence
  Description of Artificial Sequence: Synthetic oligonucleotide
cuugcggaagaugaagagg

SEQ ID NO: 3121413 - RNA, 19 nt, Artificial Sequence
  Description of Artificial Sequence: Synthetic oligonucleotide
agaugaaguugcucuugcg

SEQ ID NO: 3121414 - RNA, 19 nt, Artificial Sequence
  Description of Artificial Sequence: Synthetic oligonucleotide
aacauggccaggauguuga

SEQ ID NO: 3121415 - RNA, 19 nt, Artificial Sequence
  Description of Artificial Sequence: Synthetic oligonucleotide
aagcagaggagcacgaugu

SEQ ID NO: 3121416 - RNA, 19 nt, Artificial Sequence
  Description of Artificial Sequence: Synthetic oligonucleotide
uggaugagguugacgagga

SEQ ID NO: 3121417 - RNA, 19 nt, Artificial Sequence
  Description of Artificial Sequence: Synthetic oligonucleotide
augucgcagaacugugagc

SEQ ID NO: 3121418 - RNA, 19 nt, Artificial Sequence
  Description of Artificial Sequence: Synthetic oligonucleotide
agguugacgaggaugauga

SEQ ID NO: 3121419 - RNA, 19 nt, Artificial Sequence
  Description of Artificial Sequence: Synthetic oligonucleotide
aggauguugaugucgcaga

SEQ ID NO: 3121420 - RNA, 19 nt, Artificial Sequence
  Description of Artificial Sequence: Synthetic oligonucleotide
uugacacgcaccgugggcc

SEQ ID NO: 3121421 - RNA, 19 nt, Artificial Sequence
  Description of Artificial Sequence: Synthetic oligonucleotide
gauggcagcuugcaguuga

SEQ ID NO: 3121422 - RNA, 19 nt, Artificial Sequence
  Description of Artificial Sequence: Synthetic oligonucleotide
uguugaugucgcagaacug

SEQ ID NO: 3121423 - RNA, 19 nt, Artificial Sequence
  Description of Artificial Sequence: Synthetic oligonucleotide
gauguccacaccugcgaug

SEQ ID NO: 3121424 - RNA, 19 nt, Artificial Sequence
  Description of Artificial Sequence: Synthetic oligonucleotide
ugaugucgcagaacuguga

SEQ ID NO: 3121425 - RNA, 19 nt, Artificial Sequence
  Description of Artificial Sequence: Synthetic oligonucleotide
ugcagcugcacagauggca

SEQ ID NO: 3121426 - RNA, 19 nt, Artificial Sequence
  Description of Artificial Sequence: Synthetic oligonucleotide
accugcgaugauccgcugc

SEQ ID NO: 3121427 - RNA, 19 nt, Artificial Sequence
  Description of Artificial Sequence: Synthetic oligonucleotide
cacgauguccacaccugcg

SEQ ID NO: 3121428 - RNA, 19 nt, Artificial Sequence
  Description of Artificial Sequence: Synthetic oligonucleotide
ugcgaugauccgcugcagc

SEQ ID NO: 3121429 - RNA, 19 nt, Artificial Sequence
  Description of Artificial Sequence: Synthetic oligonucleotide
ucauaaagcagaggagcac

SEQ ID NO: 3121430 - RNA, 19 nt, Artificial Sequence
  Description of Artificial Sequence: Synthetic oligonucleotide
augagguugacgaggauga

SEQ ID NO: 3121431 - RNA, 19 nt, Artificial Sequence
  Description of Artificial Sequence: Synthetic oligonucleotide
guaguuugucaagaugaag

SEQ ID NO: 3121432 - RNA, 19 nt, Artificial Sequence
  Description of Artificial Sequence: Synthetic oligonucleotide
ugcacagauggcagcuugc

SEQ ID NO: 3121433 - RNA, 19 nt, Artificial Sequence
  Description of Artificial Sequence: Synthetic oligonucleotide
gaaguugcucuugcggaag

SEQ ID NO: 3121434 - RNA, 19 nt, Artificial Sequence
  Description of Artificial Sequence: Synthetic oligonucleotide
ucaagaugaaguugcucuu

SEQ ID NO: 3121435 - RNA, 19 nt, Artificial Sequence
  Description of Artificial Sequence: Synthetic oligonucleotide
cagcuugcaguugacacgc

SEQ ID NO: 3121436 - RNA, 19 nt, Artificial Sequence
  Description of Artificial Sequence: Synthetic oligonucleotide
ugagcgccgccacugccgg

SEQ ID NO: 3121437 - RNA, 19 nt, Artificial Sequence
  Description of Artificial Sequence: Synthetic oligonucleotide
agaacugugagcgccgcca

SEQ ID NO: 3121438 - RNA, 19 nt, Artificial Sequence
  Description of Artificial Sequence: Synthetic oligonucleotide
caguugacacgcaccgugg

SEQ ID NO: 3121439 - RNA, 19 nt, Artificial Sequence
  Description of Artificial Sequence: Synthetic oligonucleotide
gacgaggaugaugagguuc

SEQ ID NO: 3121440 - RNA, 19 nt, Artificial Sequence
  Description of Artificial Sequence: Synthetic oligonucleotide
gagguugacgaggaugaug

SEQ ID NO: 3121441 - RNA, 19 nt, Artificial Sequence
  Description of Artificial Sequence: Synthetic oligonucleotide
aaguugcucuugcggaaga

SEQ ID NO: 3121442 - RNA, 19 nt, Artificial Sequence
  Description of Artificial Sequence: Synthetic oligonucleotide
gcagcuugcaguugacacg

SEQ ID NO: 3121443 - RNA, 19 nt, Artificial Sequence
  Description of Artificial Sequence: Synthetic oligonucleotide
ucgcagaacugugagcgcc

SEQ ID NO: 3121444 - RNA, 19 nt, Artificial Sequence
  Description of Artificial Sequence: Synthetic oligonucleotide
uugucaagaugaaguugcu

SEQ ID NO: 3121445 - RNA, 19 nt, Artificial Sequence
  Description of Artificial Sequence: Synthetic oligonucleotide
uugaugccaccuuguguag

SEQ ID NO: 3121446 - RNA, 19 nt, Artificial Sequence
  Description of Artificial Sequence: Synthetic oligonucleotide
acgauguccacaccugcga

SEQ ID NO: 3121447 - RNA, 19 nt, Artificial Sequence
  Description of Artificial Sequence: Synthetic oligonucleotide
caggauguugaugucgcag

SEQ ID NO: 3121448 - RNA, 19 nt, Artificial Sequence
  Description of Artificial Sequence: Synthetic oligonucleotide
ugccaccuuguguaguuug

SEQ ID NO: 3121449 - RNA, 19 nt, Artificial Sequence
  Description of Artificial Sequence: Synthetic oligonucleotide
auccgcugcagcugcacag

SEQ ID NO: 3121450 - RNA, 19 nt, Artificial Sequence
  Description of Artificial Sequence: Synthetic oligonucleotide
guugacacgcaccgugggc

SEQ ID NO: 3121451 - RNA, 19 nt, Artificial Sequence
  Description of Artificial Sequence: Synthetic oligonucleotide
cagaggagcacgaugucca

SEQ ID NO: 3121452 - RNA, 19 nt, Artificial Sequence
  Description of Artificial Sequence: Synthetic oligonucleotide
gguucauaaagcagaggag

SEQ ID NO: 3121453 - RNA, 19 nt, Artificial Sequence
  Description of Artificial Sequence: Synthetic oligonucleotide
ugccggcgcgucuugaugc

SEQ ID NO: 3121454 - RNA, 19 nt, Artificial Sequence
  Description of Artificial Sequence: Synthetic oligonucleotide
agcgcuacccauuggccca

SEQ ID NO: 3121455 - RNA, 19 nt, Artificial Sequence
  Description of Artificial Sequence: Synthetic oligonucleotide
gagguucauaaagcagagg

SEQ ID NO: 3121456 - RNA, 19 nt, Artificial Sequence
  Description of Artificial Sequence: Synthetic oligonucleotide
gauguugaugucgcagaac

SEQ ID NO: 3121457 - RNA, 19 nt, Artificial Sequence
  Description of Artificial Sequence: Synthetic oligonucleotide
caagaugaaguugcucuug

SEQ ID NO: 3121458 - RNA, 19 nt, Artificial Sequence
  Description of Artificial Sequence: Synthetic oligonucleotide
gcaguugacacgcaccgug

SEQ ID NO: 3121459 - RNA, 19 nt, Artificial Sequence
  Description of Artificial Sequence: Synthetic oligonucleotide
ggcagcuugcaguugacac

SEQ ID NO: 3121460 - RNA, 19 nt, Artificial Sequence
  Description of Artificial Sequence: Synthetic oligonucleotide
cagcgcuacccauuggccc

SEQ ID NO: 3121461 - RNA, 19 nt, Artificial Sequence
  Description of Artificial Sequence: Synthetic oligonucleotide
auguccacaccugcgauga

SEQ ID NO: 3121462 - RNA, 19 nt, Artificial Sequence
  Description of Artificial Sequence: Synthetic oligonucleotide
ugugagcgccgccacugcc

SEQ ID NO: 3121463 - RNA, 19 nt, Artificial Sequence
  Description of Artificial Sequence: Synthetic oligonucleotide
ugcggaagaugaagaggug

SEQ ID NO: 3121464 - RNA, 19 nt, Artificial Sequence
  Description of Artificial Sequence: Synthetic oligonucleotide
aagagguggaugagguuga

SEQ ID NO: 3121465 - RNA, 19 nt, Artificial Sequence
  Description of Artificial Sequence: Synthetic oligonucleotide
guugaugucgcagaacugu

SEQ ID NO: 3121466 - RNA, 19 nt, Artificial Sequence
  Description of Artificial Sequence: Synthetic oligonucleotide
cuacccauuggcccaucag

SEQ ID NO: 3121467 - RNA, 19 nt, Artificial Sequence
  Description of Artificial Sequence: Synthetic oligonucleotide
gagguggaugagguugacg

SEQ ID NO: 3121468 - RNA, 19 nt, Artificial Sequence
  Description of Artificial Sequence: Synthetic oligonucleotide
cacaccugcgaugauccgc

SEQ ID NO: 3121469 - RNA, 19 nt, Artificial Sequence
  Description of Artificial Sequence: Synthetic oligonucleotide
acugugagcgccgccacug

SEQ ID NO: 3121470 - RNA, 19 nt, Artificial Sequence
  Description of Artificial Sequence: Synthetic oligonucleotide
gucuugaugccaccuugug

SEQ ID NO: 3121471 - RNA, 19 nt, Artificial Sequence
  Description of Artificial Sequence: Synthetic oligonucleotide
gcggaagaugaagaggugg

SEQ ID NO: 3121472 - RNA, 19 nt, Artificial Sequence
  Description of Artificial Sequence: Synthetic oligonucleotide
cucuugcggaagaugaaga

SEQ ID NO: 3121473 - RNA, 19 nt, Artificial Sequence
  Description of Artificial Sequence: Synthetic oligonucleotide
acgaggaugaugagguuca

SEQ ID NO: 3121474 - RNA, 19 nt, Artificial Sequence
  Description of Artificial Sequence: Synthetic oligonucleotide
guugcucuugcggaagaug

SEQ ID NO: 3121475 - RNA, 19 nt, Artificial Sequence
  Description of Artificial Sequence: Synthetic oligonucleotide
cacagauggcagcuugcag

SEQ ID NO: 3121476 - RNA, 19 nt, Artificial Sequence
  Description of Artificial Sequence: Synthetic oligonucleotide
aacugugagcgccgccacu

SEQ ID NO: 3121477 - RNA, 19 nt, Artificial Sequence
  Description of Artificial Sequence: Synthetic oligonucleotide
ugcucuugcggaagaugaa

SEQ ID NO: 3121478 - RNA, 19 nt, Artificial Sequence
  Description of Artificial Sequence: Synthetic oligonucleotide
ugacacgcaccgugggccc

SEQ ID NO: 3121479 - RNA, 19 nt, Artificial Sequence
  Description of Artificial Sequence: Synthetic oligonucleotide
auaaagcagaggagcacga

SEQ ID NO: 3121480 - RNA, 19 nt, Artificial Sequence
  Description of Artificial Sequence: Synthetic oligonucleotide
ccuuguguaguuugucaag

SEQ ID NO: 3121481 - RNA, 19 nt, Artificial Sequence
  Description of Artificial Sequence: Synthetic oligonucleotide
gguggaugagguugacgag

SEQ ID NO: 3121482 - RNA, 19 nt, Artificial Sequence
  Description of Artificial Sequence: Synthetic oligonucleotide
gaacugugagcgccgccac

SEQ ID NO: 3121483 - RNA, 19 nt, Artificial Sequence
  Description of Artificial Sequence: Synthetic oligonucleotide
uaaagcagaggagcacgau

SEQ ID NO: 3121484 - RNA, 19 nt, Artificial Sequence
  Description of Artificial Sequence: Synthetic oligonucleotide
agcacgauguccacaccug

SEQ ID NO: 3121485 - RNA, 19 nt, Artificial Sequence
  Description of Artificial Sequence: Synthetic oligonucleotide
agcgccgccacugccggcg

SEQ ID NO: 3121486 - RNA, 19 nt, Artificial Sequence
  Description of Artificial Sequence: Synthetic oligonucleotide
gugagcgccgccacugccg

SEQ ID NO: 3121487 - RNA, 19 nt, Artificial Sequence
  Description of Artificial Sequence: Synthetic oligonucleotide
agcugcacagauggcagcu

SEQ ID NO: 3121488 - RNA, 19 nt, Artificial Sequence
  Description of Artificial Sequence: Synthetic oligonucleotide
acaccugcgaugauccgcu

SEQ ID NO: 3121489 - RNA, 19 nt, Artificial Sequence
  Description of Artificial Sequence: Synthetic oligonucleotide
gcucuugcggaagaugaag

SEQ ID NO: 3121490 - RNA, 19 nt, Artificial Sequence
  Description of Artificial Sequence: Synthetic oligonucleotide
ggccaggauguugaugucg

SEQ ID NO: 3121491 - RNA, 19 nt, Artificial Sequence
  Description of Artificial Sequence: Synthetic oligonucleotide
agagguggaugagguugac

SEQ ID NO: 3121492 - RNA, 19 nt, Artificial Sequence
  Description of Artificial Sequence: Synthetic oligonucleotide
ugaugccaccuuguguagu

SEQ ID NO: 3121493 - RNA, 19 nt, Artificial Sequence
  Description of Artificial Sequence: Synthetic oligonucleotide
gauccgcugcagcugcaca

SEQ ID NO: 3121494 - RNA, 19 nt, Artificial Sequence
  Description of Artificial Sequence: Synthetic oligonucleotide
gucgcagaacugugagcgc

SEQ ID NO: 3121495 - RNA, 19 nt, Artificial Sequence
  Description of Artificial Sequence: Synthetic oligonucleotide
cagcugcacagauggcagc

SEQ ID NO: 3121496 - RNA, 19 nt, Artificial Sequence
  Description of Artificial Sequence: Synthetic oligonucleotide
uccgcugcagcugcacaga

SEQ ID NO: 3121497 - RNA, 19 nt, Artificial Sequence
  Description of Artificial Sequence: Synthetic oligonucleotide
gaugccaccuuguguaguu

SEQ ID NO: 3121498 - RNA, 19 nt, Artificial Sequence
  Description of Artificial Sequence: Synthetic oligonucleotide
cccagcgcuacccauuggc

SEQ ID NO: 3121499 - RNA, 19 nt, Artificial Sequence
  Description of Artificial Sequence: Synthetic oligonucleotide
gcgucuugaugccaccuug

SEQ ID NO: 3121500 - RNA, 19 nt, Artificial Sequence
  Description of Artificial Sequence: Synthetic oligonucleotide
gccaggauguugaugucgc

SEQ ID NO: 3121501 - RNA, 19 nt, Artificial Sequence
  Description of Artificial Sequence: Synthetic oligonucleotide
cagaacugugagcgccgcc

SEQ ID NO: 3121502 - RNA, 19 nt, Artificial Sequence
  Description of Artificial Sequence: Synthetic oligonucleotide
gcuugcaguugacacgcac

SEQ ID NO: 3121503 - RNA, 19 nt, Artificial Sequence
  Description of Artificial Sequence: Synthetic oligonucleotide
auggcagcuugcaguugac

SEQ ID NO: 3121504 - RNA, 19 nt, Artificial Sequence
  Description of Artificial Sequence: Synthetic oligonucleotide
ugcaguugacacgcaccgu

SEQ ID NO: 3121505 - RNA, 19 nt, Artificial Sequence
  Description of Artificial Sequence: Synthetic oligonucleotide
ccagcgcuacccauuggcc

SEQ ID NO: 3121506 - RNA, 19 nt, Artificial Sequence
  Description of Artificial Sequence: Synthetic oligonucleotide
guccacaccugcgaugauc

SEQ ID NO: 3121507 - RNA, 19 nt, Artificial Sequence
  Description of Artificial Sequence: Synthetic oligonucleotide
uggcagcuugcaguugaca

SEQ ID NO: 3121508 - RNA, 19 nt, Artificial Sequence
  Description of Artificial Sequence: Synthetic oligonucleotide
gcacgauguccacaccugc

SEQ ID NO: 3121509 - RNA, 19 nt, Artificial Sequence
  Description of Artificial Sequence: Synthetic oligonucleotide
ggauguugaugucgcagaa

SEQ ID NO: 3121510 - RNA, 19 nt, Artificial Sequence
  Description of Artificial Sequence: Synthetic oligonucleotide
ggaugaugagguucauaaa

SEQ ID NO: 3121511 - RNA, 19 nt, Artificial Sequence
  Description of Artificial Sequence: Synthetic oligonucleotide
cugugagcgccgccacugc

SEQ ID NO: 3121512 - RNA, 19 nt, Artificial Sequence
  Description of Artificial Sequence: Synthetic oligonucleotide
gguugacgaggaugaugag

SEQ ID NO: 3121513 - RNA, 19 nt, Artificial Sequence
  Description of Artificial Sequence: Synthetic oligonucleotide
accgugggcccagcgcuac

SEQ ID NO: 3121514 - RNA, 19 nt, Artificial Sequence
  Description of Artificial Sequence: Synthetic oligonucleotide
acugccggcgcgucuugau

SEQ ID NO: 3121515 - RNA, 19 nt, Artificial Sequence
  Description of Artificial Sequence: Synthetic oligonucleotide
cugccggcgcgucuugaug

SEQ ID NO: 3121516 - RNA, 19 nt, Artificial Sequence
  Description of Artificial Sequence: Synthetic oligonucleotide
gaggaugaugagguucaua

SEQ ID NO: 3121517 - RNA, 19 nt, Artificial Sequence
  Description of Artificial Sequence: Synthetic oligonucleotide
cugcagcugcacagauggc

SEQ ID NO: 3121518 - RNA, 19 nt, Artificial Sequence
  Description of Artificial Sequence: Synthetic oligonucleotide
ugagguugacgaggaugau

SEQ ID NO: 3121519 - RNA, 19 nt, Artificial Sequence
  Description of Artificial Sequence: Synthetic oligonucleotide
ccugcgaugauccgcugca

SEQ ID NO: 3121520 - RNA, 19 nt, Artificial Sequence
  Description of Artificial Sequence: Synthetic oligonucleotide
ggcccagcgcuacccauug

SEQ ID NO: 3121521 - RNA, 19 nt, Artificial Sequence
  Description of Artificial Sequence: Synthetic oligonucleotide
acgcaccgugggcccagcg

SEQ ID NO: 3121522 - RNA, 19 nt, Artificial Sequence
  Description of Artificial Sequence: Synthetic oligonucleotide
cugcgaugauccgcugcag

SEQ ID NO: 3121523 - RNA, 19 nt, Artificial Sequence
  Description of Artificial Sequence: Synthetic oligonucleotide
gcgaugauccgcugcagcu

SEQ ID NO: 3121524 - RNA, 19 nt, Artificial Sequence
  Description of Artificial Sequence: Synthetic oligonucleotide
cgcagaacugugagcgccg

SEQ ID NO: 3121525 - RNA, 19 nt, Artificial Sequence
  Description of Artificial Sequence: Synthetic oligonucleotide
cagauggcagcuugcaguu

SEQ ID NO: 3121526 - RNA, 19 nt, Artificial Sequence
  Description of Artificial Sequence: Synthetic oligonucleotide
ggagcacgauguccacacc

SEQ ID NO: 3121527 - RNA, 19 nt, Artificial Sequence
  Description of Artificial Sequence: Synthetic oligonucleotide
uguccacaccugcgaugau

SEQ ID NO: 3121528 - RNA, 19 nt, Artificial Sequence
  Description of Artificial Sequence: Synthetic oligonucleotide
acacgcaccgugggcccag

SEQ ID NO: 3121529 - RNA, 19 nt, Artificial Sequence
  Description of Artificial Sequence: Synthetic oligonucleotide
gcacagauggcagcuugca

SEQ ID NO: 3121530 - RNA, 19 nt, Artificial Sequence
  Description of Artificial Sequence: Synthetic oligonucleotide
ggcgcgucuugaugccacc

SEQ ID NO: 3121531 - RNA, 19 nt, Artificial Sequence
  Description of Artificial Sequence: Synthetic oligonucleotide
gcagaacugugagcgccgc

SEQ ID NO: 3121532 - RNA, 19 nt, Artificial Sequence
  Description of Artificial Sequence: Synthetic oligonucleotide
gcuacccauuggcccauca

SEQ ID NO: 3121533 - RNA, 19 nt, Artificial Sequence
  Description of Artificial Sequence: Synthetic oligonucleotide
ccacaccugcgaugauccg

SEQ ID NO: 3121534 - RNA, 19 nt, Artificial Sequence
  Description of Artificial Sequence: Synthetic oligonucleotide
gugggcccagcgcuaccca

SEQ ID NO: 3121535 - RNA, 19 nt, Artificial Sequence
  Description of Artificial Sequence: Synthetic oligonucleotide
gacacgcaccgugggccca

SEQ ID NO: 3121536 - RNA, 19 nt, Artificial Sequence
  Description of Artificial Sequence: Synthetic oligonucleotide
caccugcgaugauccgcug

SEQ ID NO: 3121537 - RNA, 19 nt, Artificial Sequence
  Description of Artificial Sequence: Synthetic oligonucleotide
gcaccgugggcccagcgcu

SEQ ID NO: 3121538 - RNA, 19 nt, Artificial Sequence
  Description of Artificial Sequence: Synthetic oligonucleotide
ccaccuuguguaguuuguc

SEQ ID NO: 3121539 - RNA, 19 nt, Artificial Sequence
  Description of Artificial Sequence: Synthetic oligonucleotide
gccggcgcgucuugaugcc

SEQ ID NO: 3121540 - RNA, 19 nt, Artificial Sequence
  Description of Artificial Sequence: Synthetic oligonucleotide
cgaugauccgcugcagcug

SEQ ID NO: 3121541 - RNA, 19 nt, Artificial Sequence
  Description of Artificial Sequence: Synthetic oligonucleotide
augccaccuuguguaguuu

SEQ ID NO: 3121542 - RNA, 19 nt, Artificial Sequence
  Description of Artificial Sequence: Synthetic oligonucleotide
gagcgccgccacugccggc

SEQ ID NO: 3121543 - RNA, 19 nt, Artificial Sequence
  Description of Artificial Sequence: Synthetic oligonucleotide
cgcaccgugggcccagcgc

SEQ ID NO: 3121544 - RNA, 19 nt, Artificial Sequence
  Description of Artificial Sequence: Synthetic oligonucleotide
gcccagcgcuacccauugg

SEQ ID NO: 3121545 - RNA, 19 nt, Artificial Sequence
  Description of Artificial Sequence: Synthetic oligonucleotide
agcuugcaguugacacgca

SEQ ID NO: 3121546 - RNA, 19 nt, Artificial Sequence
  Description of Artificial Sequence: Synthetic oligonucleotide
cgugggcccagcgcuaccc

SEQ ID NO: 3121547 - RNA, 19 nt, Artificial Sequence
  Description of Artificial Sequence: Synthetic oligonucleotide
cgcugcagcugcacagaug

SEQ ID NO: 3121548 - RNA, 19 nt, Artificial Sequence
  Description of Artificial Sequence: Synthetic oligonucleotide
cacgcaccgugggcccagc

SEQ ID NO: 3121549 - RNA, 19 nt, Artificial Sequence
  Description of Artificial Sequence: Synthetic oligonucleotide
gccaccuuguguaguuugu

SEQ ID NO: 3121550 - RNA, 19 nt, Artificial Sequence
  Description of Artificial Sequence: Synthetic oligonucleotide
cggcgcgucuugaugccac

SEQ ID NO: 3121551 - RNA, 19 nt, Artificial Sequence
  Description of Artificial Sequence: Synthetic oligonucleotide
caccgugggcccagcgcua

SEQ ID NO: 3121552 - RNA, 19 nt, Artificial Sequence
  Description of Artificial Sequence: Synthetic oligonucleotide
ggaugagguugacgaggau

SEQ ID NO: 3121553 - RNA, 19 nt, Artificial Sequence
  Description of Artificial Sequence: Synthetic oligonucleotide
cacugccggcgcgucuuga

SEQ ID NO: 3121554 - RNA, 19 nt, Artificial Sequence
  Description of Artificial Sequence: Synthetic oligonucleotide
ccgugggcccagcgcuacc

SEQ ID NO: 3121555 - RNA, 19 nt, Artificial Sequence
  Description of Artificial Sequence: Synthetic oligonucleotide
ccacugccggcgcgucuug

SEQ ID NO: 3121556 - RNA, 19 nt, Artificial Sequence
  Description of Artificial Sequence: Synthetic oligonucleotide
gcgcgucuugaugccaccu

SEQ ID NO: 3121557 - RNA, 19 nt, Artificial Sequence
  Description of Artificial Sequence: Synthetic oligonucleotide
gccacugccggcgcgucuu

SEQ ID NO: 3121558 - RNA, 19 nt, Artificial Sequence
  Description of Artificial Sequence: Synthetic oligonucleotide
cgccgccacugccggcgcg

SEQ ID NO: 3121559 - RNA, 19 nt, Artificial Sequence
  Description of Artificial Sequence: Synthetic oligonucleotide
gccgccacugccggcgcgu

SEQ ID NO: 3121560 - RNA, 19 nt, Artificial Sequence
  Description of Artificial Sequence: Synthetic oligonucleotide
gggcccagcgcuacccauu

SEQ ID NO: 3121561 - RNA, 19 nt, Artificial Sequence
  Description of Artificial Sequence: Synthetic oligonucleotide
ccggcgcgucuugaugcca

SEQ ID NO: 3121562 - RNA, 19 nt, Artificial Sequence
  Description of Artificial Sequence: Synthetic oligonucleotide
cgcgucuugaugccaccuu

SEQ ID NO: 3121563 - RNA, 19 nt, Artificial Sequence
  Description of Artificial Sequence: Synthetic oligonucleotide
ccgcugcagcugcacagau

SEQ ID NO: 3121564 - RNA, 19 nt, Artificial Sequence
  Description of Artificial Sequence: Synthetic oligonucleotide
ccgccacugccggcgcguc

SEQ ID NO: 3121565 - RNA, 19 nt, Artificial Sequence
  Description of Artificial Sequence: Synthetic oligonucleotide
gcgcuacccauuggcccau

SEQ ID NO: 3121566 - RNA, 19 nt, Artificial Sequence
  Description of Artificial Sequence: Synthetic oligonucleotide
cgcuacccauuggcccauc

SEQ ID NO: 3121567 - RNA, 19 nt, Artificial Sequence
  Description of Artificial Sequence: Synthetic oligonucleotide
cgaggaugaugagguucau

SEQ ID NO: 3121568 - RNA, 19 nt, Artificial Sequence
  Description of Artificial Sequence: Synthetic oligonucleotide
cgccacugccggcgcgucu

SEQ ID NO: 3121569 - RNA, 19 nt, Artificial Sequence
  Description of Artificial Sequence: Synthetic oligonucleotide
aaucauuggguguuguucc

SEQ ID NO: 3121570 - RNA, 19 nt, Artificial Sequence
  Description of Artificial Sequence: Synthetic oligonucleotide
ucucuuuuacaccugaagg

SEQ ID NO: 3121571 - RNA, 19 nt, Artificial Sequence
  Description of Artificial Sequence: Synthetic oligonucleotide
uuuugcuccagaaauguca

SEQ ID NO: 3121572 - RNA, 19 nt, Artificial Sequence
  Description of Artificial Sequence: Synthetic oligonucleotide
cuuaggcacagcaagaccc

SEQ ID NO: 3121573 - RNA, 19 nt, Artificial Sequence
  Description of Artificial Sequence: Synthetic oligonucleotide
uuucauucccagcacuugg

SEQ ID NO: 3121574 - RNA, 19 nt, Artificial Sequence
  Description of Artificial Sequence: Synthetic oligonucleotide
aacauucccucucuucugg

SEQ ID NO: 3121575 - RNA, 19 nt, Artificial Sequence
  Description of Artificial Sequence: Synthetic oligonucleotide
cucuuuuacaccugaaggc

SEQ ID NO: 3121576 - RNA, 19 nt, Artificial Sequence
  Description of Artificial Sequence: Synthetic oligonucleotide
auucccagcacuugggagg

SEQ ID NO: 3121577 - RNA, 19 nt, Artificial Sequence
  Description of Artificial Sequence: Synthetic oligonucleotide
aucaagguggcuguaauuc

SEQ ID NO: 3121578 - RNA, 19 nt, Artificial Sequence
  Description of Artificial Sequence: Synthetic oligonucleotide
uuugcuccagaaaugucac

SEQ ID NO: 3121579 - RNA, 19 nt, Artificial Sequence
  Description of Artificial Sequence: Synthetic oligonucleotide
uggguguuguuccuggugc

SEQ ID NO: 3121580 - RNA, 19 nt, Artificial Sequence
  Description of Artificial Sequence: Synthetic oligonucleotide
aaacauucccucucuucug

SEQ ID NO: 3121581 - RNA, 19 nt, Artificial Sequence
  Description of Artificial Sequence: Synthetic oligonucleotide
agaaaugucaccaggugug

SEQ ID NO: 3121582 - RNA, 19 nt, Artificial Sequence
  Description of Artificial Sequence: Synthetic oligonucleotide
uuuuacaccugaaggcucu

SEQ ID NO: 3121583 - RNA, 19 nt, Artificial Sequence
  Description of Artificial Sequence: Synthetic oligonucleotide
uccagaaaugucaccaggu

SEQ ID NO: 3121584 - RNA, 19 nt, Artificial Sequence
  Description of Artificial Sequence: Synthetic oligonucleotide
aaaugucaccagguguggc

SEQ ID NO: 3121585 - RNA, 19 nt, Artificial Sequence
  Description of Artificial Sequence: Synthetic oligonucleotide
uguacagauuccacugagc

SEQ ID NO: 3121586 - RNA, 19 nt, Artificial Sequence
  Description of Artificial Sequence: Synthetic oligonucleotide
aaaucaagguggcuguaau

SEQ ID NO: 3121587 - RNA, 19 nt, Artificial Sequence
  Description of Artificial Sequence: Synthetic oligonucleotide
aagguggcuguaauucucc

SEQ ID NO: 3121588 - RNA, 19 nt, Artificial Sequence
  Description of Artificial Sequence: Synthetic oligonucleotide
guggcuuaggcacagcaag

SEQ ID NO: 3121589 - RNA, 19 nt, Artificial Sequence
  Description of Artificial Sequence: Synthetic oligonucleotide
ucuccaacaucacaucccu

SEQ ID NO: 3121590 - RNA, 19 nt, Artificial Sequence
  Description of Artificial Sequence: Synthetic oligonucleotide
cugcuugucucuuuuacac

SEQ ID NO: 3121591 - RNA, 19 nt, Artificial Sequence
  Description of Artificial Sequence: Synthetic oligonucleotide
guacagauuccacugagca

SEQ ID NO: 3121592 - RNA, 19 nt, Artificial Sequence
  Description of Artificial Sequence: Synthetic oligonucleotide
gauuccacugagcaggcuc

SEQ ID NO: 3121593 - RNA, 19 nt, Artificial Sequence
  Description of Artificial Sequence: Synthetic oligonucleotide
ugcuccagaaaugucacca

SEQ ID NO: 3121594 - RNA, 19 nt, Artificial Sequence
  Description of Artificial Sequence: Synthetic oligonucleotide
acccaggaaaucaaggugg

SEQ ID NO: 3121595 - RNA, 19 nt, Artificial Sequence
  Description of Artificial Sequence: Synthetic oligonucleotide
gacccaggaaaucaaggug

SEQ ID NO: 3121596 - RNA, 19 nt, Artificial Sequence
  Description of Artificial Sequence: Synthetic oligonucleotide
aucacaucccuguacagau

SEQ ID NO: 3121597 - RNA, 19 nt, Artificial Sequence
  Description of Artificial Sequence: Synthetic oligonucleotide
gaggcagaggcaaucauug

SEQ ID NO: 3121598 - RNA, 19 nt, Artificial Sequence
  Description of Artificial Sequence: Synthetic oligonucleotide
uguuguuccuggugcacag

SEQ ID NO: 3121599 - RNA, 19 nt, Artificial Sequence
  Description of Artificial Sequence: Synthetic oligonucleotide
uuguuccuggugcacagug

SEQ ID NO: 3121600 - RNA, 19 nt, Artificial Sequence
  Description of Artificial Sequence: Synthetic oligonucleotide
agacccaggaaaucaaggu

SEQ ID NO: 3121601 - RNA, 19 nt, Artificial Sequence
  Description of Artificial Sequence: Synthetic oligonucleotide
caggaaaucaagguggcug

SEQ ID NO: 3121602 - RNA, 19 nt, Artificial Sequence
  Description of Artificial Sequence: Synthetic oligonucleotide
cauuggguguuguuccugg

SEQ ID NO: 3121603 - RNA, 19 nt, Artificial Sequence
  Description of Artificial Sequence: Synthetic oligonucleotide
aggaaaucaagguggcugu

SEQ ID NO: 3121604 - RNA, 19 nt, Artificial Sequence
  Description of Artificial Sequence: Synthetic oligonucleotide
uacaccugaaggcucuugu

SEQ ID NO: 3121605 - RNA, 19 nt, Artificial Sequence
  Description of Artificial Sequence: Synthetic oligonucleotide
gugacacacgcuuucauuc

SEQ ID NO: 3121606 - RNA, 19 nt, Artificial Sequence
  Description of Artificial Sequence: Synthetic oligonucleotide
ggcagaggcaaucauuggg

SEQ ID NO: 3121607 - RNA, 19 nt, Artificial Sequence
  Description of Artificial Sequence: Synthetic oligonucleotide
auuccacugagcaggcucc

SEQ ID NO: 3121608 - RNA, 19 nt, Artificial Sequence
  Description of Artificial Sequence: Synthetic oligonucleotide
gaaaugucaccaggugugg

SEQ ID NO: 3121609 - RNA, 19 nt, Artificial Sequence
  Description of Artificial Sequence: Synthetic oligonucleotide
uuaggcacagcaagaccca

SEQ ID NO: 3121610 - RNA, 19 nt, Artificial Sequence
  Description of Artificial Sequence: Synthetic oligonucleotide
cuccagaaaugucaccagg

SEQ ID NO: 3121611 - RNA, 19 nt, Artificial Sequence
  Description of Artificial Sequence: Synthetic oligonucleotide
uugucucuuuuacaccuga

SEQ ID NO: 3121612 - RNA, 19 nt, Artificial Sequence
  Description of Artificial Sequence: Synthetic oligonucleotide
cacgcuuucauucccagca

SEQ ID NO: 3121613 - RNA, 19 nt, Artificial Sequence
  Description of Artificial Sequence: Synthetic oligonucleotide
ucaagguggcuguaauucu

SEQ ID NO: 3121614 - RNA, 19 nt, Artificial Sequence
  Description of Artificial Sequence: Synthetic oligonucleotide
cacagcaagacccaggaaa

SEQ ID NO: 3121615 - RNA, 19 nt, Artificial Sequence
  Description of Artificial Sequence: Synthetic oligonucleotide
caaucauuggguguuguuc

SEQ ID NO: 3121616 - RNA, 19 nt, Artificial Sequence
  Description of Artificial Sequence: Synthetic oligonucleotide
aaucaagguggcuguaauu

SEQ ID NO: 3121617 - RNA, 19 nt, Artificial Sequence
  Description of Artificial Sequence: Synthetic oligonucleotide
ugcuugucucuuuuacacc

SEQ ID NO: 3121618 - RNA, 19 nt, Artificial Sequence
  Description of Artificial Sequence: Synthetic oligonucleotide
agcaagacccaggaaauca

SEQ ID NO: 3121619 - RNA, 19 nt, Artificial Sequence
  Description of Artificial Sequence: Synthetic oligonucleotide
gacacacgcuuucauuccc

SEQ ID NO: 3121620 - RNA, 19 nt, Artificial Sequence
  Description of Artificial Sequence: Synthetic oligonucleotide
cuuuuacaccugaaggcuc

SEQ ID NO: 3121621 - RNA, 19 nt, Artificial Sequence
  Description of Artificial Sequence: Synthetic oligonucleotide
cauucccagcacuugggag

SEQ ID NO: 3121622 - RNA, 19 nt, Artificial Sequence
  Description of Artificial Sequence: Synthetic oligonucleotide
agaggcaaucauugggugu

SEQ ID NO: 3121623 - RNA, 19 nt, Artificial Sequence
  Description of Artificial Sequence: Synthetic oligonucleotide
cacaucccuguacagauuc

SEQ ID NO: 3121624 - RNA, 19 nt, Artificial Sequence
  Description of Artificial Sequence: Synthetic oligonucleotide
caagacccaggaaaucaag

SEQ ID NO: 3121625 - RNA, 19 nt, Artificial Sequence
  Description of Artificial Sequence: Synthetic oligonucleotide
uguggcuuaggcacagcaa

SEQ ID NO: 3121626 - RNA, 19 nt, Artificial Sequence
  Description of Artificial Sequence: Synthetic oligonucleotide
ccagguguggcuuaggcac

SEQ ID NO: 3121627 - RNA, 19 nt, Artificial Sequence
  Description of Artificial Sequence: Synthetic oligonucleotide
ucccuguacagauuccacu

SEQ ID NO: 3121628 - RNA, 19 nt, Artificial Sequence
  Description of Artificial Sequence: Synthetic oligonucleotide
uggcuuaggcacagcaaga

SEQ ID NO: 3121629 - RNA, 19 nt, Artificial Sequence
  Description of Artificial Sequence: Synthetic oligonucleotide
caagguggcuguaauucuc

SEQ ID NO: 3121630 - RNA, 19 nt, Artificial Sequence
  Description of Artificial Sequence: Synthetic oligonucleotide
ugagcaggcuccaaacauu

SEQ ID NO: 3121631 - RNA, 19 nt, Artificial Sequence
  Description of Artificial Sequence: Synthetic oligonucleotide
acugagcaggcuccaaaca

SEQ ID NO: 3121632 - RNA, 19 nt, Artificial Sequence
  Description of Artificial Sequence: Synthetic oligonucleotide
uggcuguaauucuccaaca

SEQ ID NO: 3121633 - RNA, 19 nt, Artificial Sequence
  Description of Artificial Sequence: Synthetic oligonucleotide
acgcuuucauucccagcac

SEQ ID NO: 3121634 - RNA, 19 nt, Artificial Sequence
  Description of Artificial Sequence: Synthetic oligonucleotide
cauucccucucuucuggag

SEQ ID NO: 3121635 - RNA, 19 nt, Artificial Sequence
  Description of Artificial Sequence: Synthetic oligonucleotide
aggcuccaaacauucccuc

SEQ ID NO: 3121636 - RNA, 19 nt, Artificial Sequence
  Description of Artificial Sequence: Synthetic oligonucleotide
gcaggcuccaaacauuccc

SEQ ID NO: 3121637 - RNA, 19 nt, Artificial Sequence
  Description of Artificial Sequence: Synthetic oligonucleotide
aggcagaggcaaucauugg

SEQ ID NO: 3121638 - RNA, 19 nt, Artificial Sequence
  Description of Artificial Sequence: Synthetic oligonucleotide
cuuucauucccagcacuug

SEQ ID NO: 3121639 - RNA, 19 nt, Artificial Sequence
  Description of Artificial Sequence: Synthetic oligonucleotide
cuugucucuuuuacaccug

SEQ ID NO: 3121640 - RNA, 19 nt, Artificial Sequence
  Description of Artificial Sequence: Synthetic oligonucleotide
accugaaggcucuuguuuu

SEQ ID NO: 3121641 - RNA, 19 nt, Artificial Sequence
  Description of Artificial Sequence: Synthetic oligonucleotide
accagguguggcuuaggca

SEQ ID NO: 3121642 - RNA, 19 nt, Artificial Sequence
  Description of Artificial Sequence: Synthetic oligonucleotide
cagaggcaaucauugggug

SEQ ID NO: 3121643 - RNA, 19 nt, Artificial Sequence
  Description of Artificial Sequence: Synthetic oligonucleotide
ugucucuuuuacaccugaa

SEQ ID NO: 3121644 - RNA, 19 nt, Artificial Sequence
  Description of Artificial Sequence: Synthetic oligonucleotide
aucauuggguguuguuccu

SEQ ID NO: 3121645 - RNA, 19 nt, Artificial Sequence
  Description of Artificial Sequence: Synthetic oligonucleotide
caccagguguggcuuaggc

SEQ ID NO: 3121646 - RNA, 19 nt, Artificial Sequence
  Description of Artificial Sequence: Synthetic oligonucleotide
gaaaucaagguggcuguaa

SEQ ID NO: 3121647 - RNA, 19 nt, Artificial Sequence
  Description of Artificial Sequence: Synthetic oligonucleotide
ucauuggguguuguuccug

SEQ ID NO: 3121648 - RNA, 19 nt, Artificial Sequence
  Description of Artificial Sequence: Synthetic oligonucleotide
aucccuguacagauuccac

SEQ ID NO: 3121649 - RNA, 19 nt, Artificial Sequence
  Description of Artificial Sequence: Synthetic oligonucleotide
acaucccuguacagauucc

SEQ ID NO: 3121650 - RNA, 19 nt, Artificial Sequence
  Description of Artificial Sequence: Synthetic oligonucleotide
acagcaagacccaggaaau

SEQ ID NO: 3121651 - RNA, 19 nt, Artificial Sequence
  Description of Artificial Sequence: Synthetic oligonucleotide
gagcaggcuccaaacauuc

SEQ ID NO: 3121652 - RNA, 19 nt, Artificial Sequence
  Description of Artificial Sequence: Synthetic oligonucleotide
cccuguacagauuccacug

SEQ ID NO: 3121653 - RNA, 19 nt, Artificial Sequence
  Description of Artificial Sequence: Synthetic oligonucleotide
uugcuccagaaaugucacc

SEQ ID NO: 3121654 - RNA, 19 nt, Artificial Sequence
  Description of Artificial Sequence: Synthetic oligonucleotide
guguggcuuaggcacagca

SEQ ID NO: 3121655 - RNA, 19 nt, Artificial Sequence
  Description of Artificial Sequence: Synthetic oligonucleotide
uggugacacacgcuuucau

SEQ ID NO: 3121656 - RNA, 19 nt, Artificial Sequence
  Description of Artificial Sequence: Synthetic oligonucleotide
agcaggcuccaaacauucc

SEQ ID NO: 3121657 - RNA, 19 nt, Artificial Sequence
  Description of Artificial Sequence: Synthetic oligonucleotide
uuacaccugaaggcucuug

SEQ ID NO: 3121658 - RNA, 19 nt, Artificial Sequence
  Description of Artificial Sequence: Synthetic oligonucleotide
cagaaaugucaccaggugu

SEQ ID NO: 3121659 - RNA, 19 nt, Artificial Sequence
  Description of Artificial Sequence: Synthetic oligonucleotide
uccaaacauucccucucuu

SEQ ID NO: 3121660 - RNA, 19 nt, Artificial Sequence
  Description of Artificial Sequence: Synthetic oligonucleotide
ggcacagcaagacccagga

SEQ ID NO: 3121661 - RNA, 19 nt, Artificial Sequence
  Description of Artificial Sequence: Synthetic oligonucleotide
gcuuaggcacagcaagacc

SEQ ID NO: 3121662 - RNA, 19 nt, Artificial Sequence
  Description of Artificial Sequence: Synthetic oligonucleotide
ccagaaaugucaccaggug

SEQ ID NO: 3121663 - RNA, 19 nt, Artificial Sequence
  Description of Artificial Sequence: Synthetic oligonucleotide
ccaaacauucccucucuuc

SEQ ID NO: 3121664 - RNA, 19 nt, Artificial Sequence
  Description of Artificial Sequence: Synthetic oligonucleotide
cucucuucuggagagaacu

SEQ ID NO: 3121665 - RNA, 19 nt, Artificial Sequence
  Description of Artificial Sequence: Synthetic oligonucleotide
ugggaggcagaggcaauca

SEQ ID NO: 3121666 - RNA, 19 nt, Artificial Sequence
  Description of Artificial Sequence: Synthetic oligonucleotide
acauucccucucuucugga

SEQ ID NO: 3121667 - RNA, 19 nt, Artificial Sequence
  Description of Artificial Sequence: Synthetic oligonucleotide
uaggcacagcaagacccag

SEQ ID NO: 3121668 - RNA, 19 nt, Artificial Sequence
  Description of Artificial Sequence: Synthetic oligonucleotide
gcuugucucuuuuacaccu

SEQ ID NO: 3121669 - RNA, 19 nt, Artificial Sequence
  Description of Artificial Sequence: Synthetic oligonucleotide
acaguggcugcugcuuguc

SEQ ID NO: 3121670 - RNA, 19 nt, Artificial Sequence
  Description of Artificial Sequence: Synthetic oligonucleotide
gcuccaaacauucccucuc

SEQ ID NO: 3121671 - RNA, 19 nt, Artificial Sequence
  Description of Artificial Sequence: Synthetic oligonucleotide
acaccugaaggcucuuguu

SEQ ID NO: 3121672 - RNA, 19 nt, Artificial Sequence
  Description of Artificial Sequence: Synthetic oligonucleotide
ugcacaguggcugcugcuu

SEQ ID NO: 3121673 - RNA, 19 nt, Artificial Sequence
  Description of Artificial Sequence: Synthetic oligonucleotide
caucccuguacagauucca

SEQ ID NO: 3121674 - RNA, 19 nt, Artificial Sequence
  Description of Artificial Sequence: Synthetic oligonucleotide
gcugcuugucucuuuuaca

SEQ ID NO: 3121675 - RNA, 19 nt, Artificial Sequence
  Description of Artificial Sequence: Synthetic oligonucleotide
ucacaucccuguacagauu

SEQ ID NO: 3121676 - RNA, 19 nt, Artificial Sequence
  Description of Artificial Sequence: Synthetic oligonucleotide
ucaccagguguggcuuagg

SEQ ID NO: 3121677 - RNA, 19 nt, Artificial Sequence
  Description of Artificial Sequence: Synthetic oligonucleotide
ggugcacaguggcugcugc

SEQ ID NO: 3121678 - RNA, 19 nt, Artificial Sequence
  Description of Artificial Sequence: Synthetic oligonucleotide
cuccaacaucacaucccug

SEQ ID NO: 3121679 - RNA, 19 nt, Artificial Sequence
  Description of Artificial Sequence: Synthetic oligonucleotide
gaggcaaucauuggguguu

SEQ ID NO: 3121680 - RNA, 19 nt, Artificial Sequence
  Description of Artificial Sequence: Synthetic oligonucleotide
gucaccagguguggcuuag

SEQ ID NO: 3121681 - RNA, 19 nt, Artificial Sequence
  Description of Artificial Sequence: Synthetic oligonucleotide
agguguggcuuaggcacag

SEQ ID NO: 3121682 - RNA, 19 nt, Artificial Sequence
  Description of Artificial Sequence: Synthetic oligonucleotide
ggcuuaggcacagcaagac

SEQ ID NO: 3121683 - RNA, 19 nt, Artificial Sequence
  Description of Artificial Sequence: Synthetic oligonucleotide
uggugcacaguggcugcug

SEQ ID NO: 3121684 - RNA, 19 nt, Artificial Sequence
  Description of Artificial Sequence: Synthetic oligonucleotide
guguuguuccuggugcaca

SEQ ID NO: 3121685 - RNA, 19 nt, Artificial Sequence
  Description of Artificial Sequence: Synthetic oligonucleotide
cugagcaggcuccaaacau

SEQ ID NO: 3121686 - RNA, 19 nt, Artificial Sequence
  Description of Artificial Sequence: Synthetic oligonucleotide
caggcuccaaacauucccu

SEQ ID NO: 3121687 - RNA, 19 nt, Artificial Sequence
  Description of Artificial Sequence: Synthetic oligonucleotide
ccuggugcacaguggcugc

SEQ ID NO: 3121688 - RNA, 19 nt, Artificial Sequence
  Description of Artificial Sequence: Synthetic oligonucleotide
gguggcuguaauucuccaa

SEQ ID NO: 3121689 - RNA, 19 nt, Artificial Sequence
  Description of Artificial Sequence: Synthetic oligonucleotide
uuuacaccugaaggcucuu

SEQ ID NO: 3121690 - RNA, 19 nt, Artificial Sequence
  Description of Artificial Sequence: Synthetic oligonucleotide
gcacaguggcugcugcuug

SEQ ID NO: 3121691 - RNA, 19 nt, Artificial Sequence
  Description of Artificial Sequence: Synthetic oligonucleotide
gguguuguuccuggugcac

SEQ ID NO: 3121692 - RNA, 19 nt, Artificial Sequence
  Description of Artificial Sequence: Synthetic oligonucleotide
cagcaagacccaggaaauc

SEQ ID NO: 3121693 - RNA, 19 nt, Artificial Sequence
  Description of Artificial Sequence: Synthetic oligonucleotide
aggcaaucauuggguguug

SEQ ID NO: 3121694 - RNA, 19 nt, Artificial Sequence
  Description of Artificial Sequence: Synthetic oligonucleotide
cagguguggcuuaggcaca

SEQ ID NO: 3121695 - RNA, 19 nt, Artificial Sequence
  Description of Artificial Sequence: Synthetic oligonucleotide
guggugacacacgcuuuca

SEQ ID NO: 3121696 - RNA, 19 nt, Artificial Sequence
  Description of Artificial Sequence: Synthetic oligonucleotide
cuccaaacauucccucucu

SEQ ID NO: 3121697 - RNA, 19 nt, Artificial Sequence
  Description of Artificial Sequence: Synthetic oligonucleotide
gcagaggcaaucauugggu

SEQ ID NO: 3121698 - RNA, 19 nt, Artificial Sequence
  Description of Artificial Sequence: Synthetic oligonucleotide
ggguguuguuccuggugca

SEQ ID NO: 3121699 - RNA, 19 nt, Artificial Sequence
  Description of Artificial Sequence: Synthetic oligonucleotide
ucccucucuucuggagaga

SEQ ID NO: 3121700 - RNA, 19 nt, Artificial Sequence
  Description of Artificial Sequence: Synthetic oligonucleotide
ggugacacacgcuuucauu

SEQ ID NO: 3121701 - RNA, 19 nt, Artificial Sequence
  Description of Artificial Sequence: Synthetic oligonucleotide
caccugaaggcucuuguuu

SEQ ID NO: 3121702 - RNA, 19 nt, Artificial Sequence
  Description of Artificial Sequence: Synthetic oligonucleotide
ccuguacagauuccacuga

SEQ ID NO: 3121703 - RNA, 19 nt, Artificial Sequence
  Description of Artificial Sequence: Synthetic oligonucleotide
gcaagacccaggaaaucaa

SEQ ID NO: 3121704 - RNA, 19 nt, Artificial Sequence
  Description of Artificial Sequence: Synthetic oligonucleotide
ccucucuucuggagagaac

SEQ ID NO: 3121705 - RNA, 19 nt, Artificial Sequence
  Description of Artificial Sequence: Synthetic oligonucleotide
cacaguggcugcugcuugu

SEQ ID NO: 3121706 - RNA, 19 nt, Artificial Sequence
  Description of Artificial Sequence: Synthetic oligonucleotide
gugcacaguggcugcugcu

SEQ ID NO: 3121707 - RNA, 19 nt, Artificial Sequence
  Description of Artificial Sequence: Synthetic oligonucleotide
cugcugcuugucucuuuua

SEQ ID NO: 3121708 - RNA, 19 nt, Artificial Sequence
  Description of Artificial Sequence: Synthetic oligonucleotide
ggaaaucaagguggcugua

SEQ ID NO: 3121709 - RNA, 19 nt, Artificial Sequence
  Description of Artificial Sequence: Synthetic oligonucleotide
gcaaucauuggguguuguu

SEQ ID NO: 3121710 - RNA, 19 nt, Artificial Sequence
  Description of Artificial Sequence: Synthetic oligonucleotide
gguguggcuuaggcacagc

SEQ ID NO: 3121711 - RNA, 19 nt, Artificial Sequence
  Description of Artificial Sequence: Synthetic oligonucleotide
ggaggcagaggcaaucauu

SEQ ID NO: 3121712 - RNA, 19 nt, Artificial Sequence
  Description of Artificial Sequence: Synthetic oligonucleotide
uggcugcugcuugucucuu

SEQ ID NO: 3121713 - RNA, 19 nt, Artificial Sequence
  Description of Artificial Sequence: Synthetic oligonucleotide
ccacugagcaggcuccaaa

SEQ ID NO: 3121714 - RNA, 19 nt, Artificial Sequence
  Description of Artificial Sequence: Synthetic oligonucleotide
gcuuucauucccagcacuu

SEQ ID NO: 3121715 - RNA, 19 nt, Artificial Sequence
  Description of Artificial Sequence: Synthetic oligonucleotide
caguggcugcugcuugucu

SEQ ID NO: 3121716 - RNA, 19 nt, Artificial Sequence
  Description of Artificial Sequence: Synthetic oligonucleotide
ggcaaucauuggguguugu

SEQ ID NO: 3121717 - RNA, 19 nt, Artificial Sequence
  Description of Artificial Sequence: Synthetic oligonucleotide
gcacagcaagacccaggaa

SEQ ID NO: 3121718 - RNA, 19 nt, Artificial Sequence
  Description of Artificial Sequence: Synthetic oligonucleotide
cccucucuucuggagagaa

SEQ ID NO: 3121719 - RNA, 19 nt, Artificial Sequence
  Description of Artificial Sequence: Synthetic oligonucleotide
cuggugcacaguggcugcu

SEQ ID NO: 3121720 - RNA, 19 nt, Artificial Sequence
  Description of Artificial Sequence: Synthetic oligonucleotide
cgcuuucauucccagcacu

SEQ ID NO: 3121721 - RNA, 19 nt, Artificial Sequence
  Description of Artificial Sequence: Synthetic oligonucleotide
ccaggaaaucaagguggcu

SEQ ID NO: 3121722 - RNA, 19 nt, Artificial Sequence
  Description of Artificial Sequence: Synthetic oligonucleotide
uugaaguuaacucugauga

SEQ ID NO: 3121723 - RNA, 19 nt, Artificial Sequence
  Description of Artificial Sequence: Synthetic oligonucleotide
ugcaauuugaaguugacug

SEQ ID NO: 3121724 - RNA, 19 nt, Artificial Sequence
  Description of Artificial Sequence: Synthetic oligonucleotide
aguaugucuccuuuuaugc

SEQ ID NO: 3121725 - RNA, 19 nt, Artificial Sequence
  Description of Artificial Sequence: Synthetic oligonucleotide
uaugaguucuuucauguag

SEQ ID NO: 3121726 - RNA, 19 nt, Artificial Sequence
  Description of Artificial Sequence: Synthetic oligonucleotide
uuugaaguugacuguagcg

SEQ ID NO: 3121727 - RNA, 19 nt, Artificial Sequence
  Description of Artificial Sequence: Synthetic oligonucleotide
uccuuuaugcauuugaaga

SEQ ID NO: 3121728 - RNA, 19 nt, Artificial Sequence
  Description of Artificial Sequence: Synthetic oligonucleotide
ucuguuauugugcaaaggu

SEQ ID NO: 3121729 - RNA, 19 nt, Artificial Sequence
  Description of Artificial Sequence: Synthetic oligonucleotide
uguaguugaaguuaacucu

SEQ ID NO: 3121730 - RNA, 19 nt, Artificial Sequence
  Description of Artificial Sequence: Synthetic oligonucleotide
auguaguugaaguuaacuc

SEQ ID NO: 3121731 - RNA, 19 nt, Artificial Sequence
  Description of Artificial Sequence: Synthetic oligonucleotide
aacucugaugagaaaaggc

SEQ ID NO: 3121732 - RNA, 19 nt, Artificial Sequence
  Description of Artificial Sequence: Synthetic oligonucleotide
uuaacucugaugagaaaag

SEQ ID NO: 3121733 - RNA, 19 nt, Artificial Sequence
  Description of Artificial Sequence: Synthetic oligonucleotide
auuugaaguugacuguagc

SEQ ID NO: 3121734 - RNA, 19 nt, Artificial Sequence
  Description of Artificial Sequence: Synthetic oligonucleotide
aagaugucuguuauugugc

SEQ ID NO: 3121735 - RNA, 19 nt, Artificial Sequence
  Description of Artificial Sequence: Synthetic oligonucleotide
uugaaguugacuguagcgg

SEQ ID NO: 3121736 - RNA, 19 nt, Artificial Sequence
  Description of Artificial Sequence: Synthetic oligonucleotide
gaagaugucuguuauugug

SEQ ID NO: 3121737 - RNA, 19 nt, Artificial Sequence
  Description of Artificial Sequence: Synthetic oligonucleotide
ugaaguugacuguagcggg

SEQ ID NO: 3121738 - RNA, 19 nt, Artificial Sequence
  Description of Artificial Sequence: Synthetic oligonucleotide
uguuauugugcaaagguuu

SEQ ID NO: 3121739 - RNA, 19 nt, Artificial Sequence
  Description of Artificial Sequence: Synthetic oligonucleotide
uuuuaugcaauuugaaguu

SEQ ID NO: 3121740 - RNA, 19 nt, Artificial Sequence
  Description of Artificial Sequence: Synthetic oligonucleotide
uuaugcaauuugaaguuga

SEQ ID NO: 3121741 - RNA, 19 nt, Artificial Sequence
  Description of Artificial Sequence: Synthetic oligonucleotide
cagugugucuccuuuaugc

SEQ ID NO: 3121742 - RNA, 19 nt, Artificial Sequence
  Description of Artificial Sequence: Synthetic oligonucleotide
guugaaguuaacucugaug

SEQ ID NO: 3121743 - RNA, 19 nt, Artificial Sequence
  Description of Artificial Sequence: Synthetic oligonucleotide
uaugucuccuuuuaugcaa

SEQ ID NO: 3121744 - RNA, 19 nt, Artificial Sequence
  Description of Artificial Sequence: Synthetic oligonucleotide
ugaaguuaacucugaugag

SEQ ID NO: 3121745 - RNA, 19 nt, Artificial Sequence
  Description of Artificial Sequence: Synthetic oligonucleotide
uucauguaguugaaguuaa

SEQ ID NO: 3121746 - RNA, 19 nt, Artificial Sequence
  Description of Artificial Sequence: Synthetic oligonucleotide
gaaguuaacucugaugaga

SEQ ID NO: 3121747 - RNA, 19 nt, Artificial Sequence
  Description of Artificial Sequence: Synthetic oligonucleotide
uuucauguaguugaaguua

SEQ ID NO: 3121748 - RNA, 19 nt, Artificial Sequence
  Description of Artificial Sequence: Synthetic oligonucleotide
ucugaugagaaaaggcuuu

SEQ ID NO: 3121749 - RNA, 19 nt, Artificial Sequence
  Description of Artificial Sequence: Synthetic oligonucleotide
aauuugaaguugacuguag

SEQ ID NO: 3121750 - RNA, 19 nt, Artificial Sequence
  Description of Artificial Sequence: Synthetic oligonucleotide
uaugcaauuugaaguugac

SEQ ID NO: 3121751 - RNA, 19 nt, Artificial Sequence
  Description of Artificial Sequence: Synthetic oligonucleotide
guuaacucugaugagaaaa

SEQ ID NO: 3121752 - RNA, 19 nt, Artificial Sequence
  Description of Artificial Sequence: Synthetic oligonucleotide
guaguugaaguuaacucug

SEQ ID NO: 3121753 - RNA, 19 nt, Artificial Sequence
  Description of Artificial Sequence: Synthetic oligonucleotide
cuccuuuaugcauuugaag

SEQ ID NO: 3121754 - RNA, 19 nt, Artificial Sequence
  Description of Artificial Sequence: Synthetic oligonucleotide
uccuuuuaugcaauuugaa

SEQ ID NO: 3121755 - RNA, 19 nt, Artificial Sequence
  Description of Artificial Sequence: Synthetic oligonucleotide
uauugugcaaagguuuuac

SEQ ID NO: 3121756 - RNA, 19 nt, Artificial Sequence
  Description of Artificial Sequence: Synthetic oligonucleotide
ugucuguuauugugcaaag

SEQ ID NO: 3121757 - RNA, 19 nt, Artificial Sequence
  Description of Artificial Sequence: Synthetic oligonucleotide
acucugaugagaaaaggcu

SEQ ID NO: 3121758 - RNA, 19 nt, Artificial Sequence
  Description of Artificial Sequence: Synthetic oligonucleotide
aaguuaacucugaugagaa

SEQ ID NO: 3121759 - RNA, 19 nt, Artificial Sequence
  Description of Artificial Sequence: Synthetic oligonucleotide
agaugucuguuauugugca

SEQ ID NO: 3121760 - RNA, 19 nt, Artificial Sequence
  Description of Artificial Sequence: Synthetic oligonucleotide
uugacuguagcgggcaaag

SEQ ID NO: 3121761 - RNA, 19 nt, Artificial Sequence
  Description of Artificial Sequence: Synthetic oligonucleotide
ugugucuccuuuaugcauu

SEQ ID NO: 3121762 - RNA, 19 nt, Artificial Sequence
  Description of Artificial Sequence: Synthetic oligonucleotide
agugugucuccuuuaugca

SEQ ID NO: 3121763 - RNA, 19 nt, Artificial Sequence
  Description of Artificial Sequence: Synthetic oligonucleotide
uaguugaaguuaacucuga

SEQ ID NO: 3121764 - RNA, 19 nt, Artificial Sequence
  Description of Artificial Sequence: Synthetic oligonucleotide
cuccuuuuaugcaauuuga

SEQ ID NO: 3121765 - RNA, 19 nt, Artificial Sequence
  Description of Artificial Sequence: Synthetic oligonucleotide
gucuccuuuaugcauuuga

SEQ ID NO: 3121766 - RNA, 19 nt, Artificial Sequence
  Description of Artificial Sequence: Synthetic oligonucleotide
augucuguuauugugcaaa

SEQ ID NO: 3121767 - RNA, 19 nt, Artificial Sequence
  Description of Artificial Sequence: Synthetic oligonucleotide
agcgggcaaaggcuuuacc

SEQ ID NO: 3121768 - RNA, 19 nt, Artificial Sequence
  Description of Artificial Sequence: Synthetic oligonucleotide
gaaguugacuguagcgggc

SEQ ID NO: 3121769 - RNA, 19 nt, Artificial Sequence
  Description of Artificial Sequence: Synthetic oligonucleotide
aaguugacuguagcgggca

SEQ ID NO: 3121770 - RNA, 19 nt, Artificial Sequence
  Description of Artificial Sequence: Synthetic oligonucleotide
aguugaaguuaacucugau

SEQ ID NO: 3121771 - RNA, 19 nt, Artificial Sequence
  Description of Artificial Sequence: Synthetic oligonucleotide
ucauguaguugaaguuaac

SEQ ID NO: 3121772 - RNA, 19 nt, Artificial Sequence
  Description of Artificial Sequence: Synthetic oligonucleotide
uccagugugucuccuuuau

SEQ ID NO: 3121773 - RNA, 19 nt, Artificial Sequence
  Description of Artificial Sequence: Synthetic oligonucleotide
guaugucuccuuuuaugca

SEQ ID NO: 3121774 - RNA, 19 nt, Artificial Sequence
  Description of Artificial Sequence: Synthetic oligonucleotide
gucuguuauugugcaaagg

SEQ ID NO: 3121775 - RNA, 19 nt, Artificial Sequence
  Description of Artificial Sequence: Synthetic oligonucleotide
augcaauuugaaguugacu

SEQ ID NO: 3121776 - RNA, 19 nt, Artificial Sequence
  Description of Artificial Sequence: Synthetic oligonucleotide
uuauugugcaaagguuuua

SEQ ID NO: 3121777 - RNA, 19 nt, Artificial Sequence
  Description of Artificial Sequence: Synthetic oligonucleotide
aguuaacucugaugagaaa

SEQ ID NO: 3121778 - RNA, 19 nt, Artificial Sequence
  Description of Artificial Sequence: Synthetic oligonucleotide
ugaugagaaaaggcuuuau

SEQ ID NO: 3121779 - RNA, 19 nt, Artificial Sequence
  Description of Artificial Sequence: Synthetic oligonucleotide
cauguaguugaaguuaacu

SEQ ID NO: 3121780 - RNA, 19 nt, Artificial Sequence
  Description of Artificial Sequence: Synthetic oligonucleotide
gaugucuguuauugugcaa

SEQ ID NO: 3121781 - RNA, 19 nt, Artificial Sequence
  Description of Artificial Sequence: Synthetic oligonucleotide
caauuugaaguugacugua

SEQ ID NO: 3121782 - RNA, 19 nt, Artificial Sequence
  Description of Artificial Sequence: Synthetic oligonucleotide
uguagcgggcaaaggcuuu

SEQ ID NO: 3121783 - RNA, 19 nt, Artificial Sequence
  Description of Artificial Sequence: Synthetic oligonucleotide
gcgggcaaaggcuuuacca

SEQ ID NO: 3121784 - RNA, 19 nt, Artificial Sequence
  Description of Artificial Sequence: Synthetic oligonucleotide
gcaauuugaaguugacugu

SEQ ID NO: 3121785 - RNA, 19 nt, Artificial Sequence
  Description of Artificial Sequence: Synthetic oligonucleotide
cuguuauugugcaaagguu

SEQ ID NO: 3121786 - RNA, 19 nt, Artificial Sequence
  Description of Artificial Sequence: Synthetic oligonucleotide
cucugaugagaaaaggcuu

SEQ ID NO: 3121787 - RNA, 19 nt, Artificial Sequence
  Description of Artificial Sequence: Synthetic oligonucleotide
ugucuccuuuuaugcaauu

SEQ ID NO: 3121788 - RNA, 19 nt, Artificial Sequence
  Description of Artificial Sequence: Synthetic oligonucleotide
aguugacuguagcgggcaa

SEQ ID NO: 3121789 - RNA, 19 nt, Artificial Sequence
  Description of Artificial Sequence: Synthetic oligonucleotide
guuauugugcaaagguuuu

SEQ ID NO: 3121790 - RNA, 19 nt, Artificial Sequence
  Description of Artificial Sequence: Synthetic oligonucleotide
ugucuccuuuaugcauuug

SEQ ID NO: 3121791 - RNA, 19 nt, Artificial Sequence
  Description of Artificial Sequence: Synthetic oligonucleotide
cgggcaaaggcuuuaccac

SEQ ID NO: 3121792 - RNA, 19 nt, Artificial Sequence
  Description of Artificial Sequence: Synthetic oligonucleotide
gugugucuccuuuaugcau

SEQ ID NO: 3121793 - RNA, 19 nt, Artificial Sequence
  Description of Artificial Sequence: Synthetic oligonucleotide
augucuccuuuuaugcaau

SEQ ID NO: 3121794 - RNA, 19 nt, Artificial Sequence
  Description of Artificial Sequence: Synthetic oligonucleotide
guugacuguagcgggcaaa

SEQ ID NO: 3121795 - RNA, 19 nt, Artificial Sequence
  Description of Artificial Sequence: Synthetic oligonucleotide
cugaugagaaaaggcuuua

SEQ ID NO: 3121796 - RNA, 19 nt, Artificial Sequence
  Description of Artificial Sequence: Synthetic oligonucleotide
uagcgggcaaaggcuuuac

SEQ ID NO: 3121797 - RNA, 19 nt, Artificial Sequence
  Description of Artificial Sequence: Synthetic oligonucleotide
ccagugugucuccuuuaug

SEQ ID NO: 3121798 - RNA, 19 nt, Artificial Sequence
  Description of Artificial Sequence: Synthetic oligonucleotide
guagcgggcaaaggcuuua

SEQ ID NO: 3121799 - RNA, 19 nt, Artificial Sequence
  Description of Artificial Sequence: Synthetic oligonucleotide
cuguagcgggcaaaggcuu

SEQ ID NO: 3121800 - RNA, 19 nt, Artificial Sequence
  Description of Artificial Sequence: Synthetic oligonucleotide
gugucuccuuuaugcauuu

SEQ ID NO: 3121801 - RNA, 19 nt, Artificial Sequence
  Description of Artificial Sequence: Synthetic oligonucleotide
cuuucaguaaagcugauag

SEQ ID NO: 3121802 - RNA, 19 nt, Artificial Sequence
  Description of Artificial Sequence: Synthetic oligonucleotide
ugugguuuccaccagagug

SEQ ID NO: 3121803 - RNA, 19 nt, Artificial Sequence
  Description of Artificial Sequence: Synthetic oligonucleotide
aaaacugccacaauucuuc

SEQ ID NO: 3121804 - RNA, 19 nt, Artificial Sequence
  Description of Artificial Sequence: Synthetic oligonucleotide
auacaguccuuguauaucc

SEQ ID NO: 3121805 - RNA, 19 nt, Artificial Sequence
  Description of Artificial Sequence: Synthetic oligonucleotide
auauccugaaagcugaagg

SEQ ID NO: 3121806 - RNA, 19 nt, Artificial Sequence
  Description of Artificial Sequence: Synthetic oligonucleotide
uccuuguauauccugaaag

SEQ ID NO: 3121807 - RNA, 19 nt, Artificial Sequence
  Description of Artificial Sequence: Synthetic oligonucleotide
uguauauccugaaagcuga

SEQ ID NO: 3121808 - RNA, 19 nt, Artificial Sequence
  Description of Artificial Sequence: Synthetic oligonucleotide
aaagcugauagaaugaggu

SEQ ID NO: 3121809 - RNA, 19 nt, Artificial Sequence
  Description of Artificial Sequence: Synthetic oligonucleotide
ugcaaagucagguuaaaac

SEQ ID NO: 3121810 - RNA, 19 nt, Artificial Sequence
  Description of Artificial Sequence: Synthetic oligonucleotide
ucucauagccucaugacac

SEQ ID NO: 3121811 - RNA, 19 nt, Artificial Sequence
  Description of Artificial Sequence: Synthetic oligonucleotide
aaugagguguucccguggg

SEQ ID NO: 3121812 - RNA, 19 nt, Artificial Sequence
  Description of Artificial Sequence: Synthetic oligonucleotide
uuguauauccugaaagcug

SEQ ID NO: 3121813 - RNA, 19 nt, Artificial Sequence
  Description of Artificial Sequence: Synthetic oligonucleotide
aaggcuuucaguaaagcug

SEQ ID NO: 3121814 - RNA, 19 nt, Artificial Sequence
  Description of Artificial Sequence: Synthetic oligonucleotide
uaaagcugauagaaugagg

SEQ ID NO: 3121815 - RNA, 19 nt, Artificial Sequence
  Description of Artificial Sequence: Synthetic oligonucleotide
gauagaaugagguguuccc

SEQ ID NO: 3121816 - RNA, 19 nt, Artificial Sequence
  Description of Artificial Sequence: Synthetic oligonucleotide
ucagucaggagauacaguc

SEQ ID NO: 3121817 - RNA, 19 nt, Artificial Sequence
  Description of Artificial Sequence: Synthetic oligonucleotide
uucaguaaagcugauagaa

SEQ ID NO: 3121818 - RNA, 19 nt, Artificial Sequence
  Description of Artificial Sequence: Synthetic oligonucleotide
acugccacaauucuuccuc

SEQ ID NO: 3121819 - RNA, 19 nt, Artificial Sequence
  Description of Artificial Sequence: Synthetic oligonucleotide
uuaaaacugccacaauucu

SEQ ID NO: 3121820 - RNA, 19 nt, Artificial Sequence
  Description of Artificial Sequence: Synthetic oligonucleotide
caguaaagcugauagaaug

SEQ ID NO: 3121821 - RNA, 19 nt, Artificial Sequence
  Description of Artificial Sequence: Synthetic oligonucleotide
uauccugaaagcugaaggc

SEQ ID NO: 3121822 - RNA, 19 nt, Artificial Sequence
  Description of Artificial Sequence: Synthetic oligonucleotide
aaacugccacaauucuucc

SEQ ID NO: 3121823 - RNA, 19 nt, Artificial Sequence
  Description of Artificial Sequence: Synthetic oligonucleotide
ucaucugugguuuccacca

SEQ ID NO: 3121824 - RNA, 19 nt, Artificial Sequence
  Description of Artificial Sequence: Synthetic oligonucleotide
aaaucagcagaaccaucuc

SEQ ID NO: 3121825 - RNA, 19 nt, Artificial Sequence
  Description of Artificial Sequence: Synthetic oligonucleotide
ucccaaaucagcagaacca

SEQ ID NO: 3121826 - RNA, 19 nt, Artificial Sequence
  Description of Artificial Sequence: Synthetic oligonucleotide
aaucagcagaaccaucucu

SEQ ID NO: 3121827 - RNA, 19 nt, Artificial Sequence
  Description of Artificial Sequence: Synthetic oligonucleotide
ugggccacccaucucauag

SEQ ID NO: 3121828 - RNA, 19 nt, Artificial Sequence
  Description of Artificial Sequence: Synthetic oligonucleotide
aagugggccacccaucuca

SEQ ID NO: 3121829 - RNA, 19 nt, Artificial Sequence
  Description of Artificial Sequence: Synthetic oligonucleotide
aagcugaaggcuuucagua

SEQ ID NO: 3121830 - RNA, 19 nt, Artificial Sequence
  Description of Artificial Sequence: Synthetic oligonucleotide
auggcuucagguccuuugc

SEQ ID NO: 3121831 - RNA, 19 nt, Artificial Sequence
  Description of Artificial Sequence: Synthetic oligonucleotide
ucugugguuuccaccagag

SEQ ID NO: 3121832 - RNA, 19 nt, Artificial Sequence
  Description of Artificial Sequence: Synthetic oligonucleotide
gaaagcugaaggcuuucag

SEQ ID NO: 3121833 - RNA, 19 nt, Artificial Sequence
  Description of Artificial Sequence: Synthetic oligonucleotide
ucagcugcucccaaaucag

SEQ ID NO: 3121834 - RNA, 19 nt, Artificial Sequence
  Description of Artificial Sequence: Synthetic oligonucleotide
guuaaaacugccacaauuc

SEQ ID NO: 3121835 - RNA, 19 nt, Artificial Sequence
  Description of Artificial Sequence: Synthetic oligonucleotide
aagucagguuaaaacugcc

SEQ ID NO: 3121836 - RNA, 19 nt, Artificial Sequence
  Description of Artificial Sequence: Synthetic oligonucleotide
ucagguuaaaacugccaca

SEQ ID NO: 3121837 - RNA, 19 nt, Artificial Sequence
  Description of Artificial Sequence: Synthetic oligonucleotide
agucaggagauacaguccu

SEQ ID NO: 3121838 - RNA, 19 nt, Artificial Sequence
  Description of Artificial Sequence: Synthetic oligonucleotide
ugauagaaugagguguucc

SEQ ID NO: 3121839 - RNA, 19 nt, Artificial Sequence
  Description of Artificial Sequence: Synthetic oligonucleotide
ugacacacuucaucugugg

SEQ ID NO: 3121840 - RNA, 19 nt, Artificial Sequence
  Description of Artificial Sequence: Synthetic oligonucleotide
aagcugauagaaugaggug

SEQ ID NO: 3121841 - RNA, 19 nt, Artificial Sequence
  Description of Artificial Sequence: Synthetic oligonucleotide
agccucaugacacacuuca

SEQ ID NO: 3121842 - RNA, 19 nt, Artificial Sequence
  Description of Artificial Sequence: Synthetic oligonucleotide
gucagguuaaaacugccac

SEQ ID NO: 3121843 - RNA, 19 nt, Artificial Sequence
  Description of Artificial Sequence: Synthetic oligonucleotide
auagaaugagguguucccg

SEQ ID NO: 3121844 - RNA, 19 nt, Artificial Sequence
  Description of Artificial Sequence: Synthetic oligonucleotide
cucccaaaucagcagaacc

SEQ ID NO: 3121845 - RNA, 19 nt, Artificial Sequence
  Description of Artificial Sequence: Synthetic oligonucleotide
agcugauagaaugaggugu

SEQ ID NO: 3121846 - RNA, 19 nt, Artificial Sequence
  Description of Artificial Sequence: Synthetic oligonucleotide
gaaugagguguucccgugg

SEQ ID NO: 3121847 - RNA, 19 nt, Artificial Sequence
  Description of Artificial Sequence: Synthetic oligonucleotide
uugugucuggcuuccauca

SEQ ID NO: 3121848 - RNA, 19 nt, Artificial Sequence
  Description of Artificial Sequence: Synthetic oligonucleotide
guaaagcugauagaaugag

SEQ ID NO: 3121849 - RNA, 19 nt, Artificial Sequence
  Description of Artificial Sequence: Synthetic oligonucleotide
agaguguucugccauggcu

SEQ ID NO: 3121850 - RNA, 19 nt, Artificial Sequence
  Description of Artificial Sequence: Synthetic oligonucleotide
aucucauagccucaugaca

SEQ ID NO: 3121851 - RNA, 19 nt, Artificial Sequence
  Description of Artificial Sequence: Synthetic oligonucleotide
uuucaguaaagcugauaga

SEQ ID NO: 3121852 - RNA, 19 nt, Artificial Sequence
  Description of Artificial Sequence: Synthetic oligonucleotide
uauauccugaaagcugaag

SEQ ID NO: 3121853 - RNA, 19 nt, Artificial Sequence
  Description of Artificial Sequence: Synthetic oligonucleotide
ucaguaaagcugauagaau

SEQ ID NO: 3121854 - RNA, 19 nt, Artificial Sequence
  Description of Artificial Sequence: Synthetic oligonucleotide
ucugccauggcuucagguc

SEQ ID NO: 3121855 - RNA, 19 nt, Artificial Sequence
  Description of Artificial Sequence: Synthetic oligonucleotide
aguguucugccauggcuuc

SEQ ID NO: 3121856 - RNA, 19 nt, Artificial Sequence
  Description of Artificial Sequence: Synthetic oligonucleotide
gcuuccaucagucaggaga

SEQ ID NO: 3121857 - RNA, 19 nt, Artificial Sequence
  Description of Artificial Sequence: Synthetic oligonucleotide
uagaaugagguguucccgu

SEQ ID NO: 3121858 - RNA, 19 nt, Artificial Sequence
  Description of Artificial Sequence: Synthetic oligonucleotide
cuggcuuccaucagucagg

SEQ ID NO: 3121859 - RNA, 19 nt, Artificial Sequence
  Description of Artificial Sequence: Synthetic oligonucleotide
uccaccagaguguucugcc

SEQ ID NO: 3121860 - RNA, 19 nt, Artificial Sequence
  Description of Artificial Sequence: Synthetic oligonucleotide
cuucagguccuuugcaaag

SEQ ID NO: 3121861 - RNA, 19 nt, Artificial Sequence
  Description of Artificial Sequence: Synthetic oligonucleotide
guucccgugggcuugcaag

SEQ ID NO: 3121862 - RNA, 19 nt, Artificial Sequence
  Description of Artificial Sequence: Synthetic oligonucleotide
ucaugacacacuucaucug

SEQ ID NO: 3121863 - RNA, 19 nt, Artificial Sequence
  Description of Artificial Sequence: Synthetic oligonucleotide
aguaaagcugauagaauga

SEQ ID NO: 3121864 - RNA, 19 nt, Artificial Sequence
  Description of Artificial Sequence: Synthetic oligonucleotide
caucucauagccucaugac

SEQ ID NO: 3121865 - RNA, 19 nt, Artificial Sequence
  Description of Artificial Sequence: Synthetic oligonucleotide
ucaggagauacaguccuug

SEQ ID NO: 3121866 - RNA, 19 nt, Artificial Sequence
  Description of Artificial Sequence: Synthetic oligonucleotide
caucagucaggagauacag

SEQ ID NO: 3121867 - RNA, 19 nt, Artificial Sequence
  Description of Artificial Sequence: Synthetic oligonucleotide
ccuuguauauccugaaagc

SEQ ID NO: 3121868 - RNA, 19 nt, Artificial Sequence
  Description of Artificial Sequence: Synthetic oligonucleotide
gauacaguccuuguauauc

SEQ ID NO: 3121869 - RNA, 19 nt, Artificial Sequence
  Description of Artificial Sequence: Synthetic oligonucleotide
uccaucagucaggagauac

SEQ ID NO: 3121870 - RNA, 19 nt, Artificial Sequence
  Description of Artificial Sequence: Synthetic oligonucleotide
agauacaguccuuguauau

SEQ ID NO: 3121871 - RNA, 19 nt, Artificial Sequence
  Description of Artificial Sequence: Synthetic oligonucleotide
cugccauggcuucaggucc

SEQ ID NO: 3121872 - RNA, 19 nt, Artificial Sequence
  Description of Artificial Sequence: Synthetic oligonucleotide
agaaugagguguucccgug

SEQ ID NO: 3121873 - RNA, 19 nt, Artificial Sequence
  Description of Artificial Sequence: Synthetic oligonucleotide
caaaucagcagaaccaucu

SEQ ID NO: 3121874 - RNA, 19 nt, Artificial Sequence
  Description of Artificial Sequence: Synthetic oligonucleotide
ugaaggcuuucaguaaagc

SEQ ID NO: 3121875 - RNA, 19 nt, Artificial Sequence
  Description of Artificial Sequence: Synthetic oligonucleotide
aucagcagaaccaucucug

SEQ ID NO: 3121876 - RNA, 19 nt, Artificial Sequence
  Description of Artificial Sequence: Synthetic oligonucleotide
aacugccacaauucuuccu

SEQ ID NO: 3121877 - RNA, 19 nt, Artificial Sequence
  Description of Artificial Sequence: Synthetic oligonucleotide
gaaggcuuucaguaaagcu

SEQ ID NO: 3121878 - RNA, 19 nt, Artificial Sequence
  Description of Artificial Sequence: Synthetic oligonucleotide
cauggcuucagguccuuug

SEQ ID NO: 3121879 - RNA, 19 nt, Artificial Sequence
  Description of Artificial Sequence: Synthetic oligonucleotide
ugucuggcuuccaucaguc

SEQ ID NO: 3121880 - RNA, 19 nt, Artificial Sequence
  Description of Artificial Sequence: Synthetic oligonucleotide
acaguccuuguauauccug

SEQ ID NO: 3121881 - RNA, 19 nt, Artificial Sequence
  Description of Artificial Sequence: Synthetic oligonucleotide
agguccuuugcaaagucag

SEQ ID NO: 3121882 - RNA, 19 nt, Artificial Sequence
  Description of Artificial Sequence: Synthetic oligonucleotide
uccugaaagcugaaggcuu

SEQ ID NO: 3121883 - RNA, 19 nt, Artificial Sequence
  Description of Artificial Sequence: Synthetic oligonucleotide
ugugucuggcuuccaucag

SEQ ID NO: 3121884 - RNA, 19 nt, Artificial Sequence
  Description of Artificial Sequence: Synthetic oligonucleotide
ugagguguucccgugggcu

SEQ ID NO: 3121885 - RNA, 19 nt, Artificial Sequence
  Description of Artificial Sequence: Synthetic oligonucleotide
cugaaggcuuucaguaaag

SEQ ID NO: 3121886 - RNA, 19 nt, Artificial Sequence
  Description of Artificial Sequence: Synthetic oligonucleotide
uguucugccauggcuucag

SEQ ID NO: 3121887 - RNA, 19 nt, Artificial Sequence
  Description of Artificial Sequence: Synthetic oligonucleotide
ugcagcuugugucuggcuu

SEQ ID NO: 3121888 - RNA, 19 nt, Artificial Sequence
  Description of Artificial Sequence: Synthetic oligonucleotide
cucaugacacacuucaucu

SEQ ID NO: 3121889 - RNA, 19 nt, Artificial Sequence
  Description of Artificial Sequence: Synthetic oligonucleotide
cucagcugcucccaaauca

SEQ ID NO: 3121890 - RNA, 19 nt, Artificial Sequence
  Description of Artificial Sequence: Synthetic oligonucleotide
augagguguucccgugggc

SEQ ID NO: 3121891 - RNA, 19 nt, Artificial Sequence
  Description of Artificial Sequence: Synthetic oligonucleotide
uugcaagugggccacccau

SEQ ID NO: 3121892 - RNA, 19 nt, Artificial Sequence
  Description of Artificial Sequence: Synthetic oligonucleotide
ucagguccuuugcaaaguc

SEQ ID NO: 3121893 - RNA, 19 nt, Artificial Sequence
  Description of Artificial Sequence: Synthetic oligonucleotide
gcaaagucagguuaaaacu

SEQ ID NO: 3121894 - RNA, 19 nt, Artificial Sequence
  Description of Artificial Sequence: Synthetic oligonucleotide
auccugaaagcugaaggcu

SEQ ID NO: 3121895 - RNA, 19 nt, Artificial Sequence
  Description of Artificial Sequence: Synthetic oligonucleotide
uacaguccuuguauauccu

SEQ ID NO: 3121896 - RNA, 19 nt, Artificial Sequence
  Description of Artificial Sequence: Synthetic oligonucleotide
aggcuuucaguaaagcuga

SEQ ID NO: 3121897 - RNA, 19 nt, Artificial Sequence
  Description of Artificial Sequence: Synthetic oligonucleotide
acacacuucaucugugguu

SEQ ID NO: 3121898 - RNA, 19 nt, Artificial Sequence
  Description of Artificial Sequence: Synthetic oligonucleotide
cuuugcaaagucagguuaa

SEQ ID NO: 3121899 - RNA, 19 nt, Artificial Sequence
  Description of Artificial Sequence: Synthetic oligonucleotide
uucugccauggcuucaggu

SEQ ID NO: 3121900 - RNA, 19 nt, Artificial Sequence
  Description of Artificial Sequence: Synthetic oligonucleotide
ugaaagcugaaggcuuuca

SEQ ID NO: 3121901 - RNA, 19 nt, Artificial Sequence
  Description of Artificial Sequence: Synthetic oligonucleotide
aguccuuguauauccugaa

SEQ ID NO: 3121902 - RNA, 19 nt, Artificial Sequence
  Description of Artificial Sequence: Synthetic oligonucleotide
uccucagcugcucccaaau

SEQ ID NO: 3121903 - RNA, 19 nt, Artificial Sequence
  Description of Artificial Sequence: Synthetic oligonucleotide
ugcucccaaaucagcagaa

SEQ ID NO: 3121904 - RNA, 19 nt, Artificial Sequence
  Description of Artificial Sequence: Synthetic oligonucleotide
uuugcaaagucagguuaaa

SEQ ID NO: 3121905 - RNA, 19 nt, Artificial Sequence
  Description of Artificial Sequence: Synthetic oligonucleotide
ucauagccucaugacacac

SEQ ID NO: 3121906 - RNA, 19 nt, Artificial Sequence
  Description of Artificial Sequence: Synthetic oligonucleotide
cuucaucugugguuuccac

SEQ ID NO: 3121907 - RNA, 19 nt, Artificial Sequence
  Description of Artificial Sequence: Synthetic oligonucleotide
aggagauacaguccuugua

SEQ ID NO: 3121908 - RNA, 19 nt, Artificial Sequence
  Description of Artificial Sequence: Synthetic oligonucleotide
gagauacaguccuuguaua

SEQ ID NO: 3121909 - RNA, 19 nt, Artificial Sequence
  Description of Artificial Sequence: Synthetic oligonucleotide
uccuuugcaaagucagguu

SEQ ID NO: 3121910 - RNA, 19 nt, Artificial Sequence
  Description of Artificial Sequence: Synthetic oligonucleotide
uggcuucagguccuuugca

SEQ ID NO: 3121911 - RNA, 19 nt, Artificial Sequence
  Description of Artificial Sequence: Synthetic oligonucleotide
cagguuaaaacugccacaa

SEQ ID NO: 3121912 - RNA, 19 nt, Artificial Sequence
  Description of Artificial Sequence: Synthetic oligonucleotide
aucugugguuuccaccaga

SEQ ID NO: 3121913 - RNA, 19 nt, Artificial Sequence
  Description of Artificial Sequence: Synthetic oligonucleotide
cuuguauauccugaaagcu

SEQ ID NO: 3121914 - RNA, 19 nt, Artificial Sequence
  Description of Artificial Sequence: Synthetic oligonucleotide
uucccgugggcuugcaagu

SEQ ID NO: 3121915 - RNA, 19 nt, Artificial Sequence
  Description of Artificial Sequence: Synthetic oligonucleotide
ugcaagugggccacccauc

SEQ ID NO: 3121916 - RNA, 19 nt, Artificial Sequence
  Description of Artificial Sequence: Synthetic oligonucleotide
uuccaccagaguguucugc

SEQ ID NO: 3121917 - RNA, 19 nt, Artificial Sequence
  Description of Artificial Sequence: Synthetic oligonucleotide
gguuaaaacugccacaauu

SEQ ID NO: 3121918 - RNA, 19 nt, Artificial Sequence
  Description of Artificial Sequence: Synthetic oligonucleotide
agucagguuaaaacugcca

SEQ ID NO: 3121919 - RNA, 19 nt, Artificial Sequence
  Description of Artificial Sequence: Synthetic oligonucleotide
cacuucaucugugguuucc

SEQ ID NO: 3121920 - RNA, 19 nt, Artificial Sequence
  Description of Artificial Sequence: Synthetic oligonucleotide
ggagauacaguccuuguau

SEQ ID NO: 3121921 - RNA, 19 nt, Artificial Sequence
  Description of Artificial Sequence: Synthetic oligonucleotide
acacuucaucugugguuuc

SEQ ID NO: 3121922 - RNA, 19 nt, Artificial Sequence
  Description of Artificial Sequence: Synthetic oligonucleotide
uugcaaagucagguuaaaa

SEQ ID NO: 3121923 - RNA, 19 nt, Artificial Sequence
  Description of Artificial Sequence: Synthetic oligonucleotide
gcugcucccaaaucagcag

SEQ ID NO: 3121924 - RNA, 19 nt, Artificial Sequence
  Description of Artificial Sequence: Synthetic oligonucleotide
gugggcuugcaagugggcc

SEQ ID NO: 3121925 - RNA, 19 nt, Artificial Sequence
  Description of Artificial Sequence: Synthetic oligonucleotide
ugccauggcuucagguccu

SEQ ID NO: 3121926 - RNA, 19 nt, Artificial Sequence
  Description of Artificial Sequence: Synthetic oligonucleotide
agcugcucccaaaucagca

SEQ ID NO: 3121927 - RNA, 19 nt, Artificial Sequence
  Description of Artificial Sequence: Synthetic oligonucleotide
gacacacuucaucuguggu

SEQ ID NO: 3121928 - RNA, 19 nt, Artificial Sequence
  Description of Artificial Sequence: Synthetic oligonucleotide
ccacccaucucauagccuc

SEQ ID NO: 3121929 - RNA, 19 nt, Artificial Sequence
  Description of Artificial Sequence: Synthetic oligonucleotide
cagcugcucccaaaucagc

SEQ ID NO: 3121930 - RNA, 19 nt, Artificial Sequence
  Description of Artificial Sequence: Synthetic oligonucleotide
ccucaugacacacuucauc

SEQ ID NO: 3121931 - RNA, 19 nt, Artificial Sequence
  Description of Artificial Sequence: Synthetic oligonucleotide
augacacacuucaucugug

SEQ ID NO: 3121932 - RNA, 19 nt, Artificial Sequence
  Description of Artificial Sequence: Synthetic oligonucleotide
cuuccaucagucaggagau

SEQ ID NO: 3121933 - RNA, 19 nt, Artificial Sequence
  Description of Artificial Sequence: Synthetic oligonucleotide
cucauagccucaugacaca

SEQ ID NO: 3121934 - RNA, 19 nt, Artificial Sequence
  Description of Artificial Sequence: Synthetic oligonucleotide
uggcuuccaucagucagga

SEQ ID NO: 3121935 - RNA, 19 nt, Artificial Sequence
  Description of Artificial Sequence: Synthetic oligonucleotide
gguccuuugcaaagucagg

SEQ ID NO: 3121936 - RNA, 19 nt, Artificial Sequence
  Description of Artificial Sequence: Synthetic oligonucleotide
agguuaaaacugccacaau

SEQ ID NO: 3121937 - RNA, 19 nt, Artificial Sequence
  Description of Artificial Sequence: Synthetic oligonucleotide
guucugccauggcuucagg

SEQ ID NO: 3121938 - RNA, 19 nt, Artificial Sequence
  Description of Artificial Sequence: Synthetic oligonucleotide
guccuuugcaaagucaggu

SEQ ID NO: 3121939 - RNA, 19 nt, Artificial Sequence
  Description of Artificial Sequence: Synthetic oligonucleotide
cugcucccaaaucagcaga

SEQ ID NO: 3121940 - RNA, 19 nt, Artificial Sequence
  Description of Artificial Sequence: Synthetic oligonucleotide
cagguccuuugcaaaguca

SEQ ID NO: 3121941 - RNA, 19 nt, Artificial Sequence
  Description of Artificial Sequence: Synthetic oligonucleotide
ccaucucauagccucauga

SEQ ID NO: 3121942 - RNA, 19 nt, Artificial Sequence
  Description of Artificial Sequence: Synthetic oligonucleotide
uagccucaugacacacuuc

SEQ ID NO: 3121943 - RNA, 19 nt, Artificial Sequence
  Description of Artificial Sequence: Synthetic oligonucleotide
aucagucaggagauacagu

SEQ ID NO: 3121944 - RNA, 19 nt, Artificial Sequence
  Description of Artificial Sequence: Synthetic oligonucleotide
uguucccgugggcuugcaa

SEQ ID NO: 3121945 - RNA, 19 nt, Artificial Sequence
  Description of Artificial Sequence: Synthetic oligonucleotide
guccuuguauauccugaaa

SEQ ID NO: 3121946 - RNA, 19 nt, Artificial Sequence
  Description of Artificial Sequence: Synthetic oligonucleotide
cugauagaaugagguguuc

SEQ ID NO: 3121947 - RNA, 19 nt, Artificial Sequence
  Description of Artificial Sequence: Synthetic oligonucleotide
cagcuugugucuggcuucc

SEQ ID NO: 3121948 - RNA, 19 nt, Artificial Sequence
  Description of Artificial Sequence: Synthetic oligonucleotide
cugaaagcugaaggcuuuc

SEQ ID NO: 3121949 - RNA, 19 nt, Artificial Sequence
  Description of Artificial Sequence: Synthetic oligonucleotide
ugguuuccaccagaguguu

SEQ ID NO: 3121950 - RNA, 19 nt, Artificial Sequence
  Description of Artificial Sequence: Synthetic oligonucleotide
gcagcuugugucuggcuuc

SEQ ID NO: 3121951 - RNA, 19 nt, Artificial Sequence
  Description of Artificial Sequence: Synthetic oligonucleotide
agguguucccgugggcuug

SEQ ID NO: 3121952 - RNA, 19 nt, Artificial Sequence
  Description of Artificial Sequence: Synthetic oligonucleotide
gaguguucugccauggcuu

SEQ ID NO: 3121953 - RNA, 19 nt, Artificial Sequence
  Description of Artificial Sequence: Synthetic oligonucleotide
cuugcaagugggccaccca

SEQ ID NO: 3121954 - RNA, 19 nt, Artificial Sequence
  Description of Artificial Sequence: Synthetic oligonucleotide
ccaaaucagcagaaccauc

SEQ ID NO: 3121955 - RNA, 19 nt, Artificial Sequence
  Description of Artificial Sequence: Synthetic oligonucleotide
ucccgugggcuugcaagug

SEQ ID NO: 3121956 - RNA, 19 nt, Artificial Sequence
  Description of Artificial Sequence: Synthetic oligonucleotide
cugccacaauucuuccuca

SEQ ID NO: 3121957 - RNA, 19 nt, Artificial Sequence
  Description of Artificial Sequence: Synthetic oligonucleotide
ggcuucagguccuuugcaa

SEQ ID NO: 3121958 - RNA, 19 nt, Artificial Sequence
  Description of Artificial Sequence: Synthetic oligonucleotide
gugucuggcuuccaucagu

SEQ ID NO: 3121959 - RNA, 19 nt, Artificial Sequence
  Description of Artificial Sequence: Synthetic oligonucleotide
ccgugggcuugcaaguggg

SEQ ID NO: 3121960 - RNA, 19 nt, Artificial Sequence
  Description of Artificial Sequence: Synthetic oligonucleotide
ccuuugcaaagucagguua

SEQ ID NO: 3121961 - RNA, 19 nt, Artificial Sequence
  Description of Artificial Sequence: Synthetic oligonucleotide
cacacuucaucugugguuu

SEQ ID NO: 3121962 - RNA, 19 nt, Artificial Sequence
  Description of Artificial Sequence: Synthetic oligonucleotide
cauagccucaugacacacu

SEQ ID NO: 3121963 - RNA, 19 nt, Artificial Sequence
  Description of Artificial Sequence: Synthetic oligonucleotide
caagugggccacccaucuc

SEQ ID NO: 3121964 - RNA, 19 nt, Artificial Sequence
  Description of Artificial Sequence: Synthetic oligonucleotide
gucuggcuuccaucaguca

SEQ ID NO: 3121965 - RNA, 19 nt, Artificial Sequence
  Description of Artificial Sequence: Synthetic oligonucleotide
caggagauacaguccuugu

SEQ ID NO: 3121966 - RNA, 19 nt, Artificial Sequence
  Description of Artificial Sequence: Synthetic oligonucleotide
ccaucagucaggagauaca

SEQ ID NO: 3121967 - RNA, 19 nt, Artificial Sequence
  Description of Artificial Sequence: Synthetic oligonucleotide
gggccacccaucucauagc

SEQ ID NO: 3121968 - RNA, 19 nt, Artificial Sequence
  Description of Artificial Sequence: Synthetic oligonucleotide
guauauccugaaagcugaa

SEQ ID NO: 3121969 - RNA, 19 nt, Artificial Sequence
  Description of Artificial Sequence: Synthetic oligonucleotide
cccgugggcuugcaagugg

SEQ ID NO: 3121970 - RNA, 19 nt, Artificial Sequence
  Description of Artificial Sequence: Synthetic oligonucleotide
cacccaucucauagccuca

SEQ ID NO: 3121971 - RNA, 19 nt, Artificial Sequence
  Description of Artificial Sequence: Synthetic oligonucleotide
gcuugcaagugggccaccc

SEQ ID NO: 3121972 - RNA, 19 nt, Artificial Sequence
  Description of Artificial Sequence: Synthetic oligonucleotide
gcaagugggccacccaucu

SEQ ID NO: 3121973 - RNA, 19 nt, Artificial Sequence
  Description of Artificial Sequence: Synthetic oligonucleotide
acccaucucauagccucau

SEQ ID NO: 3121974 - RNA, 19 nt, Artificial Sequence
  Description of Artificial Sequence: Synthetic oligonucleotide
gagguguucccgugggcuu

SEQ ID NO: 3121975 - RNA, 19 nt, Artificial Sequence
  Description of Artificial Sequence: Synthetic oligonucleotide
uuccaucagucaggagaua

SEQ ID NO: 3121976 - RNA, 19 nt, Artificial Sequence
  Description of Artificial Sequence: Synthetic oligonucleotide
agugggccacccaucucau

SEQ ID NO: 3121977 - RNA, 19 nt, Artificial Sequence
  Description of Artificial Sequence: Synthetic oligonucleotide
caccagaguguucugccau

SEQ ID NO: 3121978 - RNA, 19 nt, Artificial Sequence
  Description of Artificial Sequence: Synthetic oligonucleotide
gcucccaaaucagcagaac

SEQ ID NO: 3121979 - RNA, 19 nt, Artificial Sequence
  Description of Artificial Sequence: Synthetic oligonucleotide
guguucugccauggcuuca

SEQ ID NO: 3121980 - RNA, 19 nt, Artificial Sequence
  Description of Artificial Sequence: Synthetic oligonucleotide
gggcuugcaagugggccac

SEQ ID NO: 3121981 - RNA, 19 nt, Artificial Sequence
  Description of Artificial Sequence: Synthetic oligonucleotide
gcuuucaguaaagcugaua

SEQ ID NO: 3121982 - RNA, 19 nt, Artificial Sequence
  Description of Artificial Sequence: Synthetic oligonucleotide
cuuccucagcugcucccaa

SEQ ID NO: 3121983 - RNA, 19 nt, Artificial Sequence
  Description of Artificial Sequence: Synthetic oligonucleotide
ggcuuccaucagucaggag

SEQ ID NO: 3121984 - RNA, 19 nt, Artificial Sequence
  Description of Artificial Sequence: Synthetic oligonucleotide
gcugauagaaugagguguu

SEQ ID NO: 3121985 - RNA, 19 nt, Artificial Sequence
  Description of Artificial Sequence: Synthetic oligonucleotide
gguguucccgugggcuugc

SEQ ID NO: 3121986 - RNA, 19 nt, Artificial Sequence
  Description of Artificial Sequence: Synthetic oligonucleotide
ccucagcugcucccaaauc

SEQ ID NO: 3121987 - RNA, 19 nt, Artificial Sequence
  Description of Artificial Sequence: Synthetic oligonucleotide
cugugguuuccaccagagu

SEQ ID NO: 3121988 - RNA, 19 nt, Artificial Sequence
  Description of Artificial Sequence: Synthetic oligonucleotide
cccaucucauagccucaug

SEQ ID NO: 3121989 - RNA, 19 nt, Artificial Sequence
  Description of Artificial Sequence: Synthetic oligonucleotide
ccaccagaguguucugcca

SEQ ID NO: 3121990 - RNA, 19 nt, Artificial Sequence
  Description of Artificial Sequence: Synthetic oligonucleotide
cgugggcuugcaagugggc

SEQ ID NO: 3121991 - RNA, 19 nt, Artificial Sequence
  Description of Artificial Sequence: Synthetic oligonucleotide
agcuugugucuggcuucca

SEQ ID NO: 3121992 - RNA, 19 nt, Artificial Sequence
  Description of Artificial Sequence: Synthetic oligonucleotide
gcuugugucuggcuuccau

SEQ ID NO: 3121993 - RNA, 19 nt, Artificial Sequence
  Description of Artificial Sequence: Synthetic oligonucleotide
gguuuccaccagaguguuc

SEQ ID NO: 3121994 - RNA, 19 nt, Artificial Sequence
  Description of Artificial Sequence: Synthetic oligonucleotide
ccugaaagcugaaggcuuu

SEQ ID NO: 3121995 - RNA, 19 nt, Artificial Sequence
  Description of Artificial Sequence: Synthetic oligonucleotide
cccaaaucagcagaaccau

SEQ ID NO: 3121996 - RNA, 19 nt, Artificial Sequence
  Description of Artificial Sequence: Synthetic oligonucleotide
gucaggagauacaguccuu

SEQ ID NO: 3121997 - RNA, 19 nt, Artificial Sequence
  Description of Artificial Sequence: Synthetic oligonucleotide
ggcuugcaagugggccacc

SEQ ID NO: 3121998 - RNA, 19 nt, Artificial Sequence
  Description of Artificial Sequence: Synthetic oligonucleotide
guguucccgugggcuugca

SEQ ID NO: 3121999 - RNA, 19 nt, Artificial Sequence
  Description of Artificial Sequence: Synthetic oligonucleotide
aauggguucauuuauuucc

SEQ ID NO: 3122000 - RNA, 19 nt, Artificial Sequence
  Description of Artificial Sequence: Synthetic oligonucleotide
aaucuuuccacauaagacc

SEQ ID NO: 3122001 - RNA, 19 nt, Artificial Sequence
  Description of Artificial Sequence: Synthetic oligonucleotide
aaaucuuuccacauaagac

SEQ ID NO: 3122002 - RNA, 19 nt, Artificial Sequence
  Description of Artificial Sequence: Synthetic oligonucleotide
aacagauucuucugaauac

SEQ ID NO: 3122003 - RNA, 19 nt, Artificial Sequence
  Description of Artificial Sequence: Synthetic oligonucleotide
aaaacagguguuucauucc

SEQ ID NO: 3122004 - RNA, 19 nt, Artificial Sequence
  Description of Artificial Sequence: Synthetic oligonucleotide
uucaaauaauccaggaucc

SEQ ID NO: 3122005 - RNA, 19 nt, Artificial Sequence
  Description of Artificial Sequence: Synthetic oligonucleotide
auuuauuucccuuucuaag

SEQ ID NO: 3122006 - RNA, 19 nt, Artificial Sequence
  Description of Artificial Sequence: Synthetic oligonucleotide
aucuaucaaacacugaguc

SEQ ID NO: 3122007 - RNA, 19 nt, Artificial Sequence
  Description of Artificial Sequence: Synthetic oligonucleotide
cuucaaauaauccaggauc

SEQ ID NO: 3122008 - RNA, 19 nt, Artificial Sequence
  Description of Artificial Sequence: Synthetic oligonucleotide
augauucuggcccaggccc

SEQ ID NO: 3122009 - RNA, 19 nt, Artificial Sequence
  Description of Artificial Sequence: Synthetic oligonucleotide
aauacuguacaaaucuuuc

SEQ ID NO: 3122010 - RNA, 19 nt, Artificial Sequence
  Description of Artificial Sequence: Synthetic oligonucleotide
cugaucaugauucuggccc

SEQ ID NO: 3122011 - RNA, 19 nt, Artificial Sequence
  Description of Artificial Sequence: Synthetic oligonucleotide
auacuguacaaaucuuucc

SEQ ID NO: 3122012 - RNA, 19 nt, Artificial Sequence
  Description of Artificial Sequence: Synthetic oligonucleotide
uaauccaggauccuuugag

SEQ ID NO: 3122013 - RNA, 19 nt, Artificial Sequence
  Description of Artificial Sequence: Synthetic oligonucleotide
uuuauuucccuuucuaagu

SEQ ID NO: 3122014 - RNA, 19 nt, Artificial Sequence
  Description of Artificial Sequence: Synthetic oligonucleotide
acauaagacccuucaaugg

SEQ ID NO: 3122015 - RNA, 19 nt, Artificial Sequence
  Description of Artificial Sequence: Synthetic oligonucleotide
gaaaucaaggcaucuauca

SEQ ID NO: 3122016 - RNA, 19 nt, Artificial Sequence
  Description of Artificial Sequence: Synthetic oligonucleotide
uacuguacaaaucuuucca

SEQ ID NO: 3122017 - RNA, 19 nt, Artificial Sequence
  Description of Artificial Sequence: Synthetic oligonucleotide
caaacacugagucaagucc

SEQ ID NO: 3122018 - RNA, 19 nt, Artificial Sequence
  Description of Artificial Sequence: Synthetic oligonucleotide
uacaaaucuuuccacauaa

SEQ ID NO: 3122019 - RNA, 19 nt, Artificial Sequence
  Description of Artificial Sequence: Synthetic oligonucleotide
guuuucugaauucagcagc

SEQ ID NO: 3122020 - RNA, 19 nt, Artificial Sequence
  Description of Artificial Sequence: Synthetic oligonucleotide
cauaagacccuucaauggg

SEQ ID NO: 3122021 - RNA, 19 nt, Artificial Sequence
  Description of Artificial Sequence: Synthetic oligonucleotide
uuguuuucugaauucagca

SEQ ID NO: 3122022 - RNA, 19 nt, Artificial Sequence
  Description of Artificial Sequence: Synthetic oligonucleotide
uguuuucugaauucagcag

SEQ ID NO: 3122023 - RNA, 19 nt, Artificial Sequence
  Description of Artificial Sequence: Synthetic oligonucleotide
aauaauccaggauccuuug

SEQ ID NO: 3122024 - RNA, 19 nt, Artificial Sequence
  Description of Artificial Sequence: Synthetic oligonucleotide
cuuguuuucugaauucagc

SEQ ID NO: 3122025 - RNA, 19 nt, Artificial Sequence
  Description of Artificial Sequence: Synthetic oligonucleotide
ugaauucagcagcugauca

SEQ ID NO: 3122026 - RNA, 19 nt, Artificial Sequence
  Description of Artificial Sequence: Synthetic oligonucleotide
ugacuucaaauaauccagg

SEQ ID NO: 3122027 - RNA, 19 nt, Artificial Sequence
  Description of Artificial Sequence: Synthetic oligonucleotide
uucacuugucaaaacaggu

SEQ ID NO: 3122028 - RNA, 19 nt, Artificial Sequence
  Description of Artificial Sequence: Synthetic oligonucleotide
caaaacagguguuucauuc

SEQ ID NO: 3122029 - RNA, 19 nt, Artificial Sequence
  Description of Artificial Sequence: Synthetic oligonucleotide
caaggcaucuaucaaacac

SEQ ID NO: 3122030 - RNA, 19 nt, Artificial Sequence
  Description of Artificial Sequence: Synthetic oligonucleotide
uucuucugaauacuguaca

SEQ ID NO: 3122031 - RNA, 19 nt, Artificial Sequence
  Description of Artificial Sequence: Synthetic oligonucleotide
cuucacuugucaaaacagg

SEQ ID NO: 3122032 - RNA, 19 nt, Artificial Sequence
  Description of Artificial Sequence: Synthetic oligonucleotide
augacuucaaauaauccag

SEQ ID NO: 3122033 - RNA, 19 nt, Artificial Sequence
  Description of Artificial Sequence: Synthetic oligonucleotide
ucacuugucaaaacaggug

SEQ ID NO: 3122034 - RNA, 19 nt, Artificial Sequence
  Description of Artificial Sequence: Synthetic oligonucleotide
aauucagcagcugaucaug

SEQ ID NO: 3122035 - RNA, 19 nt, Artificial Sequence
  Description of Artificial Sequence: Synthetic oligonucleotide
caugacuucaaauaaucca

SEQ ID NO: 3122036 - RNA, 19 nt, Artificial Sequence
  Description of Artificial Sequence: Synthetic oligonucleotide
cacauaagacccuucaaug

SEQ ID NO: 3122037 - RNA, 19 nt, Artificial Sequence
  Description of Artificial Sequence: Synthetic oligonucleotide
aaccggaacagauucuucu

SEQ ID NO: 3122038 - RNA, 19 nt, Artificial Sequence
  Description of Artificial Sequence: Synthetic oligonucleotide
uccaugacuucaaauaauc

SEQ ID NO: 3122039 - RNA, 19 nt, Artificial Sequence
  Description of Artificial Sequence: Synthetic oligonucleotide
uuuucugaauucagcagcu

SEQ ID NO: 3122040 - RNA, 19 nt, Artificial Sequence
  Description of Artificial Sequence: Synthetic oligonucleotide
aaacagguguuucauuccu

SEQ ID NO: 3122041 - RNA, 19 nt, Artificial Sequence
  Description of Artificial Sequence: Synthetic oligonucleotide
uucugaauacuguacaaau

SEQ ID NO: 3122042 - RNA, 19 nt, Artificial Sequence
  Description of Artificial Sequence: Synthetic oligonucleotide
uucugaauucagcagcuga

SEQ ID NO: 3122043 - RNA, 19 nt, Artificial Sequence
  Description of Artificial Sequence: Synthetic oligonucleotide
uugaguaaccggaacagau

SEQ ID NO: 3122044 - RNA, 19 nt, Artificial Sequence
  Description of Artificial Sequence: Synthetic oligonucleotide
ucuaucaaacacugaguca

SEQ ID NO: 3122045 - RNA, 19 nt, Artificial Sequence
  Description of Artificial Sequence: Synthetic oligonucleotide
aaaucaaggcaucuaucaa

SEQ ID NO: 3122046 - RNA, 19 nt, Artificial Sequence
  Description of Artificial Sequence: Synthetic oligonucleotide
ucugaauacuguacaaauc

SEQ ID NO: 3122047 - RNA, 19 nt, Artificial Sequence
  Description of Artificial Sequence: Synthetic oligonucleotide
uguacaaaucuuuccacau

SEQ ID NO: 3122048 - RNA, 19 nt, Artificial Sequence
  Description of Artificial Sequence: Synthetic oligonucleotide
uuauuucccuuucuaaguc

SEQ ID NO: 3122049 - RNA, 19 nt, Artificial Sequence
  Description of Artificial Sequence: Synthetic oligonucleotide
aucaaggcaucuaucaaac

SEQ ID NO: 3122050 - RNA, 19 nt, Artificial Sequence
  Description of Artificial Sequence: Synthetic oligonucleotide
agcugaucaugauucuggc

SEQ ID NO: 3122051 - RNA, 19 nt, Artificial Sequence
  Description of Artificial Sequence: Synthetic oligonucleotide
uggaaaucaaggcaucuau

SEQ ID NO: 3122052 - RNA, 19 nt, Artificial Sequence
  Description of Artificial Sequence: Synthetic oligonucleotide
aauccaggauccuuugagu

SEQ ID NO: 3122053 - RNA, 19 nt, Artificial Sequence
  Description of Artificial Sequence: Synthetic oligonucleotide
cagcugaucaugauucugg

SEQ ID NO: 3122054 - RNA, 19 nt, Artificial Sequence
  Description of Artificial Sequence: Synthetic oligonucleotide
ugucaaaacagguguuuca

SEQ ID NO: 3122055 - RNA, 19 nt, Artificial Sequence
  Description of Artificial Sequence: Synthetic oligonucleotide
gauccuuugaguaaccgga

SEQ ID NO: 3122056 - RNA, 19 nt, Artificial Sequence
  Description of Artificial Sequence: Synthetic oligonucleotide
gaguaaccggaacagauuc

SEQ ID NO: 3122057 - RNA, 19 nt, Artificial Sequence
  Description of Artificial Sequence: Synthetic oligonucleotide
agguguuucauuccuugag

SEQ ID NO: 3122058 - RNA, 19 nt, Artificial Sequence
  Description of Artificial Sequence: Synthetic oligonucleotide
uuccacauaagacccuuca

SEQ ID NO: 3122059 - RNA, 19 nt, Artificial Sequence
  Description of Artificial Sequence: Synthetic oligonucleotide
ucugaauucagcagcugau

SEQ ID NO: 3122060 - RNA, 19 nt, Artificial Sequence
  Description of Artificial Sequence: Synthetic oligonucleotide
aaauggaaaucaaggcauc

SEQ ID NO: 3122061 - RNA, 19 nt, Artificial Sequence
  Description of Artificial Sequence: Synthetic oligonucleotide
ucaaacacugagucaaguc

SEQ ID NO: 3122062 - RNA, 19 nt, Artificial Sequence
  Description of Artificial Sequence: Synthetic oligonucleotide
auucuucugaauacuguac

SEQ ID NO: 3122063 - RNA, 19 nt, Artificial Sequence
  Description of Artificial Sequence: Synthetic oligonucleotide
aaggcaucuaucaaacacu

SEQ ID NO: 3122064 - RNA, 19 nt, Artificial Sequence
  Description of Artificial Sequence: Synthetic oligonucleotide
cuuugaguaaccggaacag

SEQ ID NO: 3122065 - RNA, 19 nt, Artificial Sequence
  Description of Artificial Sequence: Synthetic oligonucleotide
aaacacugagucaaguccu

SEQ ID NO: 3122066 - RNA, 19 nt, Artificial Sequence
  Description of Artificial Sequence: Synthetic oligonucleotide
guguuucauuccuugagcc

SEQ ID NO: 3122067 - RNA, 19 nt, Artificial Sequence
  Description of Artificial Sequence: Synthetic oligonucleotide
ugagucaaguccuuguuuu

SEQ ID NO: 3122068 - RNA, 19 nt, Artificial Sequence
  Description of Artificial Sequence: Synthetic oligonucleotide
acuucaaauaauccaggau

SEQ ID NO: 3122069 - RNA, 19 nt, Artificial Sequence
  Description of Artificial Sequence: Synthetic oligonucleotide
aauggaaaucaaggcaucu

SEQ ID NO: 3122070 - RNA, 19 nt, Artificial Sequence
  Description of Artificial Sequence: Synthetic oligonucleotide
aagacccuucaauggguuc

SEQ ID NO: 3122071 - RNA, 19 nt, Artificial Sequence
  Description of Artificial Sequence: Synthetic oligonucleotide
uguuucauuccuugagcca

SEQ ID NO: 3122072 - RNA, 19 nt, Artificial Sequence
  Description of Artificial Sequence: Synthetic oligonucleotide
uucauuuauuucccuuucu

SEQ ID NO: 3122073 - RNA, 19 nt, Artificial Sequence
  Description of Artificial Sequence: Synthetic oligonucleotide
aguccaugacuucaaauaa

SEQ ID NO: 3122074 - RNA, 19 nt, Artificial Sequence
  Description of Artificial Sequence: Synthetic oligonucleotide
acagguguuucauuccuug

SEQ ID NO: 3122075 - RNA, 19 nt, Artificial Sequence
  Description of Artificial Sequence: Synthetic oligonucleotide
aaauaauccaggauccuuu

SEQ ID NO: 3122076 - RNA, 19 nt, Artificial Sequence
  Description of Artificial Sequence: Synthetic oligonucleotide
auggguucauuuauuuccc

SEQ ID NO: 3122077 - RNA, 19 nt, Artificial Sequence
  Description of Artificial Sequence: Synthetic oligonucleotide
cuaucaaacacugagucaa

SEQ ID NO: 3122078 - RNA, 19 nt, Artificial Sequence
  Description of Artificial Sequence: Synthetic oligonucleotide
ucuucugaauacuguacaa

SEQ ID NO: 3122079 - RNA, 19 nt, Artificial Sequence
  Description of Artificial Sequence: Synthetic oligonucleotide
cugaauacuguacaaaucu

SEQ ID NO: 3122080 - RNA, 19 nt, Artificial Sequence
  Description of Artificial Sequence: Synthetic oligonucleotide
ucagaggcuucacuuguca

SEQ ID NO: 3122081 - RNA, 19 nt, Artificial Sequence
  Description of Artificial Sequence: Synthetic oligonucleotide
ucccuuucuaagucagagg

SEQ ID NO: 3122082 - RNA, 19 nt, Artificial Sequence
  Description of Artificial Sequence: Synthetic oligonucleotide
gacuucaaauaauccagga

SEQ ID NO: 3122083 - RNA, 19 nt, Artificial Sequence
  Description of Artificial Sequence: Synthetic oligonucleotide
cagcagcugaucaugauuc

SEQ ID NO: 3122084 - RNA, 19 nt, Artificial Sequence
  Description of Artificial Sequence: Synthetic oligonucleotide
ugaauacuguacaaaucuu

SEQ ID NO: 3122085 - RNA, 19 nt, Artificial Sequence
  Description of Artificial Sequence: Synthetic oligonucleotide
cccuuucuaagucagaggc

SEQ ID NO: 3122086 - RNA, 19 nt, Artificial Sequence
  Description of Artificial Sequence: Synthetic oligonucleotide
gaaauggaaaucaaggcau

SEQ ID NO: 3122087 - RNA, 19 nt, Artificial Sequence
  Description of Artificial Sequence: Synthetic oligonucleotide
ggauccuuugaguaaccgg

SEQ ID NO: 3122088 - RNA, 19 nt, Artificial Sequence
  Description of Artificial Sequence: Synthetic oligonucleotide
aaguccuuguuuucugaau

SEQ ID NO: 3122089 - RNA, 19 nt, Artificial Sequence
  Description of Artificial Sequence: Synthetic oligonucleotide
cagauucuucugaauacug

SEQ ID NO: 3122090 - RNA, 19 nt, Artificial Sequence
  Description of Artificial Sequence: Synthetic oligonucleotide
ucagcagcugaucaugauu

SEQ ID NO: 3122091 - RNA, 19 nt, Artificial Sequence
  Description of Artificial Sequence: Synthetic oligonucleotide
ucaaguccuuguuuucuga

SEQ ID NO: 3122092 - RNA, 19 nt, Artificial Sequence
  Description of Artificial Sequence: Synthetic oligonucleotide
ugaucaugauucuggccca

SEQ ID NO: 3122093 - RNA, 19 nt, Artificial Sequence
  Description of Artificial Sequence: Synthetic oligonucleotide
aguccuuguuuucugaauu

SEQ ID NO: 3122094 - RNA, 19 nt, Artificial Sequence
  Description of Artificial Sequence: Synthetic oligonucleotide
agucagaggcuucacuugu

SEQ ID NO: 3122095 - RNA, 19 nt, Artificial Sequence
  Description of Artificial Sequence: Synthetic oligonucleotide
gguguuucauuccuugagc

SEQ ID NO: 3122096 - RNA, 19 nt, Artificial Sequence
  Description of Artificial Sequence: Synthetic oligonucleotide
ugaguaaccggaacagauu

SEQ ID NO: 3122097 - RNA, 19 nt, Artificial Sequence
  Description of Artificial Sequence: Synthetic oligonucleotide
auuucccuuucuaagucag

SEQ ID NO: 3122098 - RNA, 19 nt, Artificial Sequence
  Description of Artificial Sequence: Synthetic oligonucleotide
uccuuugaguaaccggaac

SEQ ID NO: 3122099 - RNA, 19 nt, Artificial Sequence
  Description of Artificial Sequence: Synthetic oligonucleotide
uucuaagucagaggcuuca

SEQ ID NO: 3122100 - RNA, 19 nt, Artificial Sequence
  Description of Artificial Sequence: Synthetic oligonucleotide
uuugaguaaccggaacaga

SEQ ID NO: 3122101 - RNA, 19 nt, Artificial Sequence
  Description of Artificial Sequence: Synthetic oligonucleotide
agaggcuucacuugucaaa

SEQ ID NO: 3122102 - RNA, 19 nt, Artificial Sequence
  Description of Artificial Sequence: Synthetic oligonucleotide
uccuuguuuucugaauuca

SEQ ID NO: 3122103 - RNA, 19 nt, Artificial Sequence
  Description of Artificial Sequence: Synthetic oligonucleotide
uccacauaagacccuucaa

SEQ ID NO: 3122104 - RNA, 19 nt, Artificial Sequence
  Description of Artificial Sequence: Synthetic oligonucleotide
acagauucuucugaauacu

SEQ ID NO: 3122105 - RNA, 19 nt, Artificial Sequence
  Description of Artificial Sequence: Synthetic oligonucleotide
uccaggauccuuugaguaa

SEQ ID NO: 3122106 - RNA, 19 nt, Artificial Sequence
  Description of Artificial Sequence: Synthetic oligonucleotide
accggaacagauucuucug

SEQ ID NO: 3122107 - RNA, 19 nt, Artificial Sequence
  Description of Artificial Sequence: Synthetic oligonucleotide
aggcccaccaguccaugac

SEQ ID NO: 3122108 - RNA, 19 nt, Artificial Sequence
  Description of Artificial Sequence: Synthetic oligonucleotide
ucaaauaauccaggauccu

SEQ ID NO: 3122109 - RNA, 19 nt, Artificial Sequence
  Description of Artificial Sequence: Synthetic oligonucleotide
cuguacaaaucuuuccaca

SEQ ID NO: 3122110 - RNA, 19 nt, Artificial Sequence
  Description of Artificial Sequence: Synthetic oligonucleotide
caguccaugacuucaaaua

SEQ ID NO: 3122111 - RNA, 19 nt, Artificial Sequence
  Description of Artificial Sequence: Synthetic oligonucleotide
gucaaguccuuguuuucug

SEQ ID NO: 3122112 - RNA, 19 nt, Artificial Sequence
  Description of Artificial Sequence: Synthetic oligonucleotide
auaauccaggauccuuuga

SEQ ID NO: 3122113 - RNA, 19 nt, Artificial Sequence
  Description of Artificial Sequence: Synthetic oligonucleotide
uugucaaaacagguguuuc

SEQ ID NO: 3122114 - RNA, 19 nt, Artificial Sequence
  Description of Artificial Sequence: Synthetic oligonucleotide
ucuuuccacauaagacccu

SEQ ID NO: 3122115 - RNA, 19 nt, Artificial Sequence
  Description of Artificial Sequence: Synthetic oligonucleotide
ucaaggcaucuaucaaaca

SEQ ID NO: 3122116 - RNA, 19 nt, Artificial Sequence
  Description of Artificial Sequence: Synthetic oligonucleotide
agauucuucugaauacugu

SEQ ID NO: 3122117 - RNA, 19 nt, Artificial Sequence
  Description of Artificial Sequence: Synthetic oligonucleotide
ucaaaacagguguuucauu

SEQ ID NO: 3122118 - RNA, 19 nt, Artificial Sequence
  Description of Artificial Sequence: Synthetic oligonucleotide
agucaaguccuuguuuucu

SEQ ID NO: 3122119 - RNA, 19 nt, Artificial Sequence
  Description of Artificial Sequence: Synthetic oligonucleotide
uuucuaagucagaggcuuc

SEQ ID NO: 3122120 - RNA, 19 nt, Artificial Sequence
  Description of Artificial Sequence: Synthetic oligonucleotide
auccaggauccuuugagua

SEQ ID NO: 3122121 - RNA, 19 nt, Artificial Sequence
  Description of Artificial Sequence: Synthetic oligonucleotide
gcuucacuugucaaaacag

SEQ ID NO: 3122122 - RNA, 19 nt, Artificial Sequence
  Description of Artificial Sequence: Synthetic oligonucleotide
uuucccuuucuaagucaga

SEQ ID NO: 3122123 - RNA, 19 nt, Artificial Sequence
  Description of Artificial Sequence: Synthetic oligonucleotide
aggauccuuugaguaaccg

SEQ ID NO: 3122124 - RNA, 19 nt, Artificial Sequence
  Description of Artificial Sequence: Synthetic oligonucleotide
agacccuucaauggguuca

SEQ ID NO: 3122125 - RNA, 19 nt, Artificial Sequence
  Description of Artificial Sequence: Synthetic oligonucleotide
uaagacccuucaauggguu

SEQ ID NO: 3122126 - RNA, 19 nt, Artificial Sequence
  Description of Artificial Sequence: Synthetic oligonucleotide
aggcuucacuugucaaaac

SEQ ID NO: 3122127 - RNA, 19 nt, Artificial Sequence
  Description of Artificial Sequence: Synthetic oligonucleotide
cacuugucaaaacaggugu

SEQ ID NO: 3122128 - RNA, 19 nt, Artificial Sequence
  Description of Artificial Sequence: Synthetic oligonucleotide
uuucauuccuugagccauc

SEQ ID NO: 3122129 - RNA, 19 nt, Artificial Sequence
  Description of Artificial Sequence: Synthetic oligonucleotide
auaagacccuucaaugggu

SEQ ID NO: 3122130 - RNA, 19 nt, Artificial Sequence
  Description of Artificial Sequence: Synthetic oligonucleotide
ccaugacuucaaauaaucc

SEQ ID NO: 3122131 - RNA, 19 nt, Artificial Sequence
  Description of Artificial Sequence: Synthetic oligonucleotide
aggcaucuaucaaacacug

SEQ ID NO: 3122132 - RNA, 19 nt, Artificial Sequence
  Description of Artificial Sequence: Synthetic oligonucleotide
acaaaucuuuccacauaag

SEQ ID NO: 3122133 - RNA, 19 nt, Artificial Sequence
  Description of Artificial Sequence: Synthetic oligonucleotide
uaaccggaacagauucuuc

SEQ ID NO: 3122134 - RNA, 19 nt, Artificial Sequence
  Description of Artificial Sequence: Synthetic oligonucleotide
uuucugaauucagcagcug

SEQ ID NO: 3122135 - RNA, 19 nt, Artificial Sequence
  Description of Artificial Sequence: Synthetic oligonucleotide
gagucaaguccuuguuuuc

SEQ ID NO: 3122136 - RNA, 19 nt, Artificial Sequence
  Description of Artificial Sequence: Synthetic oligonucleotide
gaggcuucacuugucaaaa

SEQ ID NO: 3122137 - RNA, 19 nt, Artificial Sequence
  Description of Artificial Sequence: Synthetic oligonucleotide
uuuccacauaagacccuuc

SEQ ID NO: 3122138 - RNA, 19 nt, Artificial Sequence
  Description of Artificial Sequence: Synthetic oligonucleotide
ucuaagucagaggcuucac

SEQ ID NO: 3122139 - RNA, 19 nt, Artificial Sequence
  Description of Artificial Sequence: Synthetic oligonucleotide
cugaauucagcagcugauc

SEQ ID NO: 3122140 - RNA, 19 nt, Artificial Sequence
  Description of Artificial Sequence: Synthetic oligonucleotide
ggcuucacuugucaaaaca

SEQ ID NO: 3122141 - RNA, 19 nt, Artificial Sequence
  Description of Artificial Sequence: Synthetic oligonucleotide
ccuuguuuucugaauucag

SEQ ID NO: 3122142 - RNA, 19 nt, Artificial Sequence
  Description of Artificial Sequence: Synthetic oligonucleotide
gaauacuguacaaaucuuu

SEQ ID NO: 3122143 - RNA, 19 nt, Artificial Sequence
  Description of Artificial Sequence: Synthetic oligonucleotide
uggguucauuuauuucccu

SEQ ID NO: 3122144 - RNA, 19 nt, Artificial Sequence
  Description of Artificial Sequence: Synthetic oligonucleotide
aucaugauucuggcccagg

SEQ ID NO: 3122145 - RNA, 19 nt, Artificial Sequence
  Description of Artificial Sequence: Synthetic oligonucleotide
gaucaugauucuggcccag

SEQ ID NO: 3122146 - RNA, 19 nt, Artificial Sequence
  Description of Artificial Sequence: Synthetic oligonucleotide
uucagcagcugaucaugau

SEQ ID NO: 3122147 - RNA, 19 nt, Artificial Sequence
  Description of Artificial Sequence: Synthetic oligonucleotide
guacaaaucuuuccacaua

SEQ ID NO: 3122148 - RNA, 19 nt, Artificial Sequence
  Description of Artificial Sequence: Synthetic oligonucleotide
agcagcugaucaugauucu

SEQ ID NO: 3122149 - RNA, 19 nt, Artificial Sequence
  Description of Artificial Sequence: Synthetic oligonucleotide
gaauucagcagcugaucau

SEQ ID NO: 3122150 - RNA, 19 nt, Artificial Sequence
  Description of Artificial Sequence: Synthetic oligonucleotide
gcugaucaugauucuggcc

SEQ ID NO: 3122151 - RNA, 19 nt, Artificial Sequence
  Description of Artificial Sequence: Synthetic oligonucleotide
caggauccuuugaguaacc

SEQ ID NO: 3122152 - RNA, 19 nt, Artificial Sequence
  Description of Artificial Sequence: Synthetic oligonucleotide
guuucauuccuugagccau

SEQ ID NO: 3122153 - RNA, 19 nt, Artificial Sequence
  Description of Artificial Sequence: Synthetic oligonucleotide
auggaaaucaaggcaucua

SEQ ID NO: 3122154 - RNA, 19 nt, Artificial Sequence
  Description of Artificial Sequence: Synthetic oligonucleotide
aguaaccggaacagauucu

SEQ ID NO: 3122155 - RNA, 19 nt, Artificial Sequence
  Description of Artificial Sequence: Synthetic oligonucleotide
cuucaauggguucauuuau

SEQ ID NO: 3122156 - RNA, 19 nt, Artificial Sequence
  Description of Artificial Sequence: Synthetic oligonucleotide
cuuucuaagucagaggcuu

SEQ ID NO: 3122157 - RNA, 19 nt, Artificial Sequence
  Description of Artificial Sequence: Synthetic oligonucleotide
caaguccuuguuuucugaa

SEQ ID NO: 3122158 - RNA, 19 nt, Artificial Sequence
  Description of Artificial Sequence: Synthetic oligonucleotide
ccuuugaguaaccggaaca

SEQ ID NO: 3122159 - RNA, 19 nt, Artificial Sequence
  Description of Artificial Sequence: Synthetic oligonucleotide
auucagcagcugaucauga

SEQ ID NO: 3122160 - RNA, 19 nt, Artificial Sequence
  Description of Artificial Sequence: Synthetic oligonucleotide
ggaaaucaaggcaucuauc

SEQ ID NO: 3122161 - RNA, 19 nt, Artificial Sequence
  Description of Artificial Sequence: Synthetic oligonucleotide
aacacugagucaaguccuu

SEQ ID NO: 3122162 - RNA, 19 nt, Artificial Sequence
  Description of Artificial Sequence: Synthetic oligonucleotide
uggcccaggcccaccaguc

SEQ ID NO: 3122163 - RNA, 19 nt, Artificial Sequence
  Description of Artificial Sequence: Synthetic oligonucleotide
aacagguguuucauuccuu

SEQ ID NO: 3122164 - RNA, 19 nt, Artificial Sequence
  Description of Artificial Sequence: Synthetic oligonucleotide
cagguguuucauuccuuga

SEQ ID NO: 3122165 - RNA, 19 nt, Artificial Sequence
  Description of Artificial Sequence: Synthetic oligonucleotide
gucaaaacagguguuucau

SEQ ID NO: 3122166 - RNA, 19 nt, Artificial Sequence
  Description of Artificial Sequence: Synthetic oligonucleotide
acuugucaaaacagguguu

SEQ ID NO: 3122167 - RNA, 19 nt, Artificial Sequence
  Description of Artificial Sequence: Synthetic oligonucleotide
accaguccaugacuucaaa

SEQ ID NO: 3122168 - RNA, 19 nt, Artificial Sequence
  Description of Artificial Sequence: Synthetic oligonucleotide
cuaagucagaggcuucacu

SEQ ID NO: 3122169 - RNA, 19 nt, Artificial Sequence
  Description of Artificial Sequence: Synthetic oligonucleotide
ccaggauccuuugaguaac

SEQ ID NO: 3122170 - RNA, 19 nt, Artificial Sequence
  Description of Artificial Sequence: Synthetic oligonucleotide
gcagcugaucaugauucug

SEQ ID NO: 3122171 - RNA, 19 nt, Artificial Sequence
  Description of Artificial Sequence: Synthetic oligonucleotide
ccuucaauggguucauuua

SEQ ID NO: 3122172 - RNA, 19 nt, Artificial Sequence
  Description of Artificial Sequence: Synthetic oligonucleotide
caaauaauccaggauccuu

SEQ ID NO: 3122173 - RNA, 19 nt, Artificial Sequence
  Description of Artificial Sequence: Synthetic oligonucleotide
guaaccggaacagauucuu

SEQ ID NO: 3122174 - RNA, 19 nt, Artificial Sequence
  Description of Artificial Sequence: Synthetic oligonucleotide
auccuuugaguaaccggaa

SEQ ID NO: 3122175 - RNA, 19 nt, Artificial Sequence
  Description of Artificial Sequence: Synthetic oligonucleotide
cagaggcuucacuugucaa

SEQ ID NO: 3122176 - RNA, 19 nt, Artificial Sequence
  Description of Artificial Sequence: Synthetic oligonucleotide
cuugucaaaacagguguuu

SEQ ID NO: 3122177 - RNA, 19 nt, Artificial Sequence
  Description of Artificial Sequence: Synthetic oligonucleotide
gucagaggcuucacuuguc

SEQ ID NO: 3122178 - RNA, 19 nt, Artificial Sequence
  Description of Artificial Sequence: Synthetic oligonucleotide
ggaacagauucuucugaau

SEQ ID NO: 3122179 - RNA, 19 nt, Artificial Sequence
  Description of Artificial Sequence: Synthetic oligonucleotide
caccaguccaugacuucaa

SEQ ID NO: 3122180 - RNA, 19 nt, Artificial Sequence
  Description of Artificial Sequence: Synthetic oligonucleotide
ccacauaagacccuucaau

SEQ ID NO: 3122181 - RNA, 19 nt, Artificial Sequence
  Description of Artificial Sequence: Synthetic oligonucleotide
cugagucaaguccuuguuu

SEQ ID NO: 3122182 - RNA, 19 nt, Artificial Sequence
  Description of Artificial Sequence: Synthetic oligonucleotide
cuuuccacauaagacccuu

SEQ ID NO: 3122183 - RNA, 19 nt, Artificial Sequence
  Description of Artificial Sequence: Synthetic oligonucleotide
ggguucauuuauuucccuu

SEQ ID NO: 3122184 - RNA, 19 nt, Artificial Sequence
  Description of Artificial Sequence: Synthetic oligonucleotide
ggcaucuaucaaacacuga

SEQ ID NO: 3122185 - RNA, 19 nt, Artificial Sequence
  Description of Artificial Sequence: Synthetic oligonucleotide
ccaccaguccaugacuuca

SEQ ID NO: 3122186 - RNA, 19 nt, Artificial Sequence
  Description of Artificial Sequence: Synthetic oligonucleotide
ccuuucuaagucagaggcu

SEQ ID NO: 3122187 - RNA, 19 nt, Artificial Sequence
  Description of Artificial Sequence: Synthetic oligonucleotide
cggaacagauucuucugaa

SEQ ID NO: 3122188 - RNA, 19 nt, Artificial Sequence
  Description of Artificial Sequence: Synthetic oligonucleotide
gacccuucaauggguucau

SEQ ID NO: 3122189 - RNA, 19 nt, Artificial Sequence
  Description of Artificial Sequence: Synthetic oligonucleotide
cuggcccaggcccaccagu

SEQ ID NO: 3122190 - RNA, 19 nt, Artificial Sequence
  Description of Artificial Sequence: Synthetic oligonucleotide
ggcccaccaguccaugacu

SEQ ID NO: 3122191 - RNA, 19 nt, Artificial Sequence
  Description of Artificial Sequence: Synthetic oligonucleotide
acccuucaauggguucauu

SEQ ID NO: 3122192 - RNA, 19 nt, Artificial Sequence
  Description of Artificial Sequence: Synthetic oligonucleotide
aagaacaauaacgaaaacc

SEQ ID NO: 3122193 - RNA, 19 nt, Artificial Sequence
  Description of Artificial Sequence: Synthetic oligonucleotide
aauaacgaaaaccucucag

SEQ ID NO: 3122194 - RNA, 19 nt, Artificial Sequence
  Description of Artificial Sequence: Synthetic oligonucleotide
acugucuucagccacaggg

SEQ ID NO: 3122195 - RNA, 19 nt, Artificial Sequence
  Description of Artificial Sequence: Synthetic oligonucleotide
uggaaaagaacaauaacga

SEQ ID NO: 3122196 - RNA, 19 nt, Artificial Sequence
  Description of Artificial Sequence: Synthetic oligonucleotide
guggaaaagaacaauaacg

SEQ ID NO: 3122197 - RNA, 19 nt, Artificial Sequence
  Description of Artificial Sequence: Synthetic oligonucleotide
gcuagcagcacuuagaggg

SEQ ID NO: 3122198 - RNA, 19 nt, Artificial Sequence
  Description of Artificial Sequence: Synthetic oligonucleotide
uccaguaaagccuaggugu

SEQ ID NO: 3122199 - RNA, 19 nt, Artificial Sequence
  Description of Artificial Sequence: Synthetic oligonucleotide
acuuagaggguuaagagcg

SEQ ID NO: 3122200 - RNA, 19 nt, Artificial Sequence
  Description of Artificial Sequence: Synthetic oligonucleotide
agaacaauaacgaaaaccu

SEQ ID NO: 3122201 - RNA, 19 nt, Artificial Sequence
  Description of Artificial Sequence: Synthetic oligonucleotide
aagccuaggugucaggugg

SEQ ID NO: 3122202 - RNA, 19 nt, Artificial Sequence
  Description of Artificial Sequence: Synthetic oligonucleotide
aaaagaacaauaacgaaaa

SEQ ID NO: 3122203 - RNA, 19 nt, Artificial Sequence
  Description of Artificial Sequence: Synthetic oligonucleotide
agucucaaaaccugaauuc

SEQ ID NO: 3122204 - RNA, 19 nt, Artificial Sequence
  Description of Artificial Sequence: Synthetic oligonucleotide
aacaauaacgaaaaccucu

SEQ ID NO: 3122205 - RNA, 19 nt, Artificial Sequence
  Description of Artificial Sequence: Synthetic oligonucleotide
aaagaacaauaacgaaaac

SEQ ID NO: 3122206 - RNA, 19 nt, Artificial Sequence
  Description of Artificial Sequence: Synthetic oligonucleotide
acgaaaaccucucagucuc

SEQ ID NO: 3122207 - RNA, 19 nt, Artificial Sequence
  Description of Artificial Sequence: Synthetic oligonucleotide
ugaguggaagugcagaggc

SEQ ID NO: 3122208 - RNA, 19 nt, Artificial Sequence
  Description of Artificial Sequence: Synthetic oligonucleotide
aaccucucagucucaaaac

SEQ ID NO: 3122209 - RNA, 19 nt, Artificial Sequence
  Description of Artificial Sequence: Synthetic oligonucleotide
gaaaagaacaauaacgaaa

SEQ ID NO: 3122210 - RNA, 19 nt, Artificial Sequence
  Description of Artificial Sequence: Synthetic oligonucleotide
cuuucagaaguccuugugg

SEQ ID NO: 3122211 - RNA, 19 nt, Artificial Sequence
  Description of Artificial Sequence: Synthetic oligonucleotide
aaaccucucagucucaaaa

SEQ ID NO: 3122212 - RNA, 19 nt, Artificial Sequence
  Description of Artificial Sequence: Synthetic oligonucleotide
uaagagcgcacgaaguggg

SEQ ID NO: 3122213 - RNA, 19 nt, Artificial Sequence
  Description of Artificial Sequence: Synthetic oligonucleotide
accucucagucucaaaacc

SEQ ID NO: 3122214 - RNA, 19 nt, Artificial Sequence
  Description of Artificial Sequence: Synthetic oligonucleotide
uaugacaugaguggaagug

SEQ ID NO: 3122215 - RNA, 19 nt, Artificial Sequence
  Description of Artificial Sequence: Synthetic oligonucleotide
auaacgaaaaccucucagu

SEQ ID NO: 3122216 - RNA, 19 nt, Artificial Sequence
  Description of Artificial Sequence: Synthetic oligonucleotide
aacgaaaaccucucagucu

SEQ ID NO: 3122217 - RNA, 19 nt, Artificial Sequence
  Description of Artificial Sequence: Synthetic oligonucleotide
uuaagagcgcacgaagugg

SEQ ID NO: 3122218 - RNA, 19 nt, Artificial Sequence
  Description of Artificial Sequence: Synthetic oligonucleotide
uaacgaaaaccucucaguc

SEQ ID NO: 3122219 - RNA, 19 nt, Artificial Sequence
  Description of Artificial Sequence: Synthetic oligonucleotide
accugaauuccaguaaagc

SEQ ID NO: 3122220 - RNA, 19 nt, Artificial Sequence
  Description of Artificial Sequence: Synthetic oligonucleotide
ucuuucagaaguccuugug

SEQ ID NO: 3122221 - RNA, 19 nt, Artificial Sequence
  Description of Artificial Sequence: Synthetic oligonucleotide
uaggagacaucuuucagaa

SEQ ID NO: 3122222 - RNA, 19 nt, Artificial Sequence
  Description of Artificial Sequence: Synthetic oligonucleotide
ucucaaaaccugaauucca

SEQ ID NO: 3122223 - RNA, 19 nt, Artificial Sequence
  Description of Artificial Sequence: Synthetic oligonucleotide
cacagguaugacaugagug

SEQ ID NO: 3122224 - RNA, 19 nt, Artificial Sequence
  Description of Artificial Sequence: Synthetic oligonucleotide
cucaaaaccugaauuccag

SEQ ID NO: 3122225 - RNA, 19 nt, Artificial Sequence
  Description of Artificial Sequence: Synthetic oligonucleotide
uuccaguaaagccuaggug

SEQ ID NO: 3122226 - RNA, 19 nt, Artificial Sequence
  Description of Artificial Sequence: Synthetic oligonucleotide
cacuuagaggguuaagagc

SEQ ID NO: 3122227 - RNA, 19 nt, Artificial Sequence
  Description of Artificial Sequence: Synthetic oligonucleotide
uggcuagcagcacuuagag

SEQ ID NO: 3122228 - RNA, 19 nt, Artificial Sequence
  Description of Artificial Sequence: Synthetic oligonucleotide
guuaagagcgcacgaagug

SEQ ID NO: 3122229 - RNA, 19 nt, Artificial Sequence
  Description of Artificial Sequence: Synthetic oligonucleotide
acaauaacgaaaaccucuc

SEQ ID NO: 3122230 - RNA, 19 nt, Artificial Sequence
  Description of Artificial Sequence: Synthetic oligonucleotide
ucagaaguccuuguggggc

SEQ ID NO: 3122231 - RNA, 19 nt, Artificial Sequence
  Description of Artificial Sequence: Synthetic oligonucleotide
cuaggugucagguggcagg

SEQ ID NO: 3122232 - RNA, 19 nt, Artificial Sequence
  Description of Artificial Sequence: Synthetic oligonucleotide
ugaauuccaguaaagccua

SEQ ID NO: 3122233 - RNA, 19 nt, Artificial Sequence
  Description of Artificial Sequence: Synthetic oligonucleotide
uucagaaguccuugugggg

SEQ ID NO: 3122234 - RNA, 19 nt, Artificial Sequence
  Description of Artificial Sequence: Synthetic oligonucleotide
aaagccuaggugucaggug

SEQ ID NO: 3122235 - RNA, 19 nt, Artificial Sequence
  Description of Artificial Sequence: Synthetic oligonucleotide
auuccaguaaagccuaggu

SEQ ID NO: 3122236 - RNA, 19 nt, Artificial Sequence
  Description of Artificial Sequence: Synthetic oligonucleotide
ugacaugaguggaagugca

SEQ ID NO: 3122237 - RNA, 19 nt, Artificial Sequence
  Description of Artificial Sequence: Synthetic oligonucleotide
ucagccacaggggucaagg

SEQ ID NO: 3122238 - RNA, 19 nt, Artificial Sequence
  Description of Artificial Sequence: Synthetic oligonucleotide
aaguggguaggagacaucu

SEQ ID NO: 3122239 - RNA, 19 nt, Artificial Sequence
  Description of Artificial Sequence: Synthetic oligonucleotide
agacaucuuucagaagucc

SEQ ID NO: 3122240 - RNA, 19 nt, Artificial Sequence
  Description of Artificial Sequence: Synthetic oligonucleotide
ccugaauuccaguaaagcc

SEQ ID NO: 3122241 - RNA, 19 nt, Artificial Sequence
  Description of Artificial Sequence: Synthetic oligonucleotide
aagugcagaggccuguccu

SEQ ID NO: 3122242 - RNA, 19 nt, Artificial Sequence
  Description of Artificial Sequence: Synthetic oligonucleotide
ugguccuucaagcuguggu

SEQ ID NO: 3122243 - RNA, 19 nt, Artificial Sequence
  Description of Artificial Sequence: Synthetic oligonucleotide
ucaagcuguggucugccug

SEQ ID NO: 3122244 - RNA, 19 nt, Artificial Sequence
  Description of Artificial Sequence: Synthetic oligonucleotide
caagcuguggucugccugg

SEQ ID NO: 3122245 - RNA, 19 nt, Artificial Sequence
  Description of Artificial Sequence: Synthetic oligonucleotide
caugaguggaagugcagag

SEQ ID NO: 3122246 - RNA, 19 nt, Artificial Sequence
  Description of Artificial Sequence: Synthetic oligonucleotide
caaggcugguccuucaagc

SEQ ID NO: 3122247 - RNA, 19 nt, Artificial Sequence
  Description of Artificial Sequence: Synthetic oligonucleotide
ucaaggcugguccuucaag

SEQ ID NO: 3122248 - RNA, 19 nt, Artificial Sequence
  Description of Artificial Sequence: Synthetic oligonucleotide
cacgaaguggguaggagac

SEQ ID NO: 3122249 - RNA, 19 nt, Artificial Sequence
  Description of Artificial Sequence: Synthetic oligonucleotide
guaggagacaucuuucaga

SEQ ID NO: 3122250 - RNA, 19 nt, Artificial Sequence
  Description of Artificial Sequence: Synthetic oligonucleotide
acaggcccuggcuagcagc

SEQ ID NO: 3122251 - RNA, 19 nt, Artificial Sequence
  Description of Artificial Sequence: Synthetic oligonucleotide
uggucugccuggcuuacag

SEQ ID NO: 3122252 - RNA, 19 nt, Artificial Sequence
  Description of Artificial Sequence: Synthetic oligonucleotide
ucucagucucaaaaccuga

SEQ ID NO: 3122253 - RNA, 19 nt, Artificial Sequence
  Description of Artificial Sequence: Synthetic oligonucleotide
ucaaaaccugaauuccagu

SEQ ID NO: 3122254 - RNA, 19 nt, Artificial Sequence
  Description of Artificial Sequence: Synthetic oligonucleotide
cugaauuccaguaaagccu

SEQ ID NO: 3122255 - RNA, 19 nt, Artificial Sequence
  Description of Artificial Sequence: Synthetic oligonucleotide
gucugccuggcuuacaggc

SEQ ID NO: 3122256 - RNA, 19 nt, Artificial Sequence
  Description of Artificial Sequence: Synthetic oligonucleotide
gucucaaaaccugaauucc

SEQ ID NO: 3122257 - RNA, 19 nt, Artificial Sequence
  Description of Artificial Sequence: Synthetic oligonucleotide
ucuucagccacagggguca

SEQ ID NO: 3122258 - RNA, 19 nt, Artificial Sequence
  Description of Artificial Sequence: Synthetic oligonucleotide
agaggguuaagagcgcacg

SEQ ID NO: 3122259 - RNA, 19 nt, Artificial Sequence
  Description of Artificial Sequence: Synthetic oligonucleotide
agcacuuagaggguuaaga

SEQ ID NO: 3122260 - RNA, 19 nt, Artificial Sequence
  Description of Artificial Sequence: Synthetic oligonucleotide
cucucagucucaaaaccug

SEQ ID NO: 3122261 - RNA, 19 nt, Artificial Sequence
  Description of Artificial Sequence: Synthetic oligonucleotide
ucagucucaaaaccugaau

SEQ ID NO: 3122262 - RNA, 19 nt, Artificial Sequence
  Description of Artificial Sequence: Synthetic oligonucleotide
aguaaagccuaggugucag

SEQ ID NO: 3122263 - RNA, 19 nt, Artificial Sequence
  Description of Artificial Sequence: Synthetic oligonucleotide
uaaagccuaggugucaggu

SEQ ID NO: 3122264 - RNA, 19 nt, Artificial Sequence
  Description of Artificial Sequence: Synthetic oligonucleotide
ggagacaucuuucagaagu

SEQ ID NO: 3122265 - RNA, 19 nt, Artificial Sequence
  Description of Artificial Sequence: Synthetic oligonucleotide
aguggaagugcagaggccu

SEQ ID NO: 3122266 - RNA, 19 nt, Artificial Sequence
  Description of Artificial Sequence: Synthetic oligonucleotide
gagcgcacgaaguggguag

SEQ ID NO: 3122267 - RNA, 19 nt, Artificial Sequence
  Description of Artificial Sequence: Synthetic oligonucleotide
gcacuuagaggguuaagag

SEQ ID NO: 3122268 - RNA, 19 nt, Artificial Sequence
  Description of Artificial Sequence: Synthetic oligonucleotide
caggggucaaggcuggucc

SEQ ID NO: 3122269 - RNA, 19 nt, Artificial Sequence
  Description of Artificial Sequence: Synthetic oligonucleotide
ugcacugucuucagccaca

SEQ ID NO: 3122270 - RNA, 19 nt, Artificial Sequence
  Description of Artificial Sequence: Synthetic oligonucleotide
augaguggaagugcagagg

SEQ ID NO: 3122271 - RNA, 19 nt, Artificial Sequence
  Description of Artificial Sequence: Synthetic oligonucleotide
cuuagaggguuaagagcgc

SEQ ID NO: 3122272 - RNA, 19 nt, Artificial Sequence
  Description of Artificial Sequence: Synthetic oligonucleotide
ucugccuggcuuacaggcc

SEQ ID NO: 3122273 - RNA, 19 nt, Artificial Sequence
  Description of Artificial Sequence: Synthetic oligonucleotide
uggguaggagacaucuuuc

SEQ ID NO: 3122274 - RNA, 19 nt, Artificial Sequence
  Description of Artificial Sequence: Synthetic oligonucleotide
gguaugacaugaguggaag

SEQ ID NO: 3122275 - RNA, 19 nt, Artificial Sequence
  Description of Artificial Sequence: Synthetic oligonucleotide
uuagaggguuaagagcgca

SEQ ID NO: 3122276 - RNA, 19 nt, Artificial Sequence
  Description of Artificial Sequence: Synthetic oligonucleotide
gaacaauaacgaaaaccuc

SEQ ID NO: 3122277 - RNA, 19 nt, Artificial Sequence
  Description of Artificial Sequence: Synthetic oligonucleotide
caaaaccugaauuccagua

SEQ ID NO: 3122278 - RNA, 19 nt, Artificial Sequence
  Description of Artificial Sequence: Synthetic oligonucleotide
aaaaccucucagucucaaa

SEQ ID NO: 3122279 - RNA, 19 nt, Artificial Sequence
  Description of Artificial Sequence: Synthetic oligonucleotide
gguaggagacaucuuucag

SEQ ID NO: 3122280 - RNA, 19 nt, Artificial Sequence
  Description of Artificial Sequence: Synthetic oligonucleotide
agugcagaggccuguccug

SEQ ID NO: 3122281 - RNA, 19 nt, Artificial Sequence
  Description of Artificial Sequence: Synthetic oligonucleotide
ugucagguggcaggcacag

SEQ ID NO: 3122282 - RNA, 19 nt, Artificial Sequence
  Description of Artificial Sequence: Synthetic oligonucleotide
acaugaguggaagugcaga

SEQ ID NO: 3122283 - RNA, 19 nt, Artificial Sequence
  Description of Artificial Sequence: Synthetic oligonucleotide
gaagugcagaggccugucc

SEQ ID NO: 3122284 - RNA, 19 nt, Artificial Sequence
  Description of Artificial Sequence: Synthetic oligonucleotide
guaaagccuaggugucagg

SEQ ID NO: 3122285 - RNA, 19 nt, Artificial Sequence
  Description of Artificial Sequence: Synthetic oligonucleotide
agccacaggggucaaggcu

SEQ ID NO: 3122286 - RNA, 19 nt, Artificial Sequence
  Description of Artificial Sequence: Synthetic oligonucleotide
uggcuuacaggcccuggcu

SEQ ID NO: 3122287 - RNA, 19 nt, Artificial Sequence
  Description of Artificial Sequence: Synthetic oligonucleotide
cugccuggcuuacaggccc

SEQ ID NO: 3122288 - RNA, 19 nt, Artificial Sequence
  Description of Artificial Sequence: Synthetic oligonucleotide
uagaggguuaagagcgcac

SEQ ID NO: 3122289 - RNA, 19 nt, Artificial Sequence
  Description of Artificial Sequence: Synthetic oligonucleotide
ggaaaagaacaauaacgaa

SEQ ID NO: 3122290 - RNA, 19 nt, Artificial Sequence
  Description of Artificial Sequence: Synthetic oligonucleotide
ggguuaagagcgcacgaag

SEQ ID NO: 3122291 - RNA, 19 nt, Artificial Sequence
  Description of Artificial Sequence: Synthetic oligonucleotide
aucuuucagaaguccuugu

SEQ ID NO: 3122292 - RNA, 19 nt, Artificial Sequence
  Description of Artificial Sequence: Synthetic oligonucleotide
aggccuguccugcacuguc

SEQ ID NO: 3122293 - RNA, 19 nt, Artificial Sequence
  Description of Artificial Sequence: Synthetic oligonucleotide
gacaugaguggaagugcag

SEQ ID NO: 3122294 - RNA, 19 nt, Artificial Sequence
  Description of Artificial Sequence: Synthetic oligonucleotide
uguccugcacugucuucag

SEQ ID NO: 3122295 - RNA, 19 nt, Artificial Sequence
  Description of Artificial Sequence: Synthetic oligonucleotide
cuggcuuacaggcccuggc

SEQ ID NO: 3122296 - RNA, 19 nt, Artificial Sequence
  Description of Artificial Sequence: Synthetic oligonucleotide
aggcugguccuucaagcug

SEQ ID NO: 3122297 - RNA, 19 nt, Artificial Sequence
  Description of Artificial Sequence: Synthetic oligonucleotide
gagacaucuuucagaaguc

SEQ ID NO: 3122298 - RNA, 19 nt, Artificial Sequence
  Description of Artificial Sequence: Synthetic oligonucleotide
uccuucaagcuguggucug

SEQ ID NO: 3122299 - RNA, 19 nt, Artificial Sequence
  Description of Artificial Sequence: Synthetic oligonucleotide
aagcuguggucugccuggc

SEQ ID NO: 3122300 - RNA, 19 nt, Artificial Sequence
  Description of Artificial Sequence: Synthetic oligonucleotide
gaggguuaagagcgcacga

SEQ ID NO: 3122301 - RNA, 19 nt, Artificial Sequence
  Description of Artificial Sequence: Synthetic oligonucleotide
uaggugucagguggcaggc

SEQ ID NO: 3122302 - RNA, 19 nt, Artificial Sequence
  Description of Artificial Sequence: Synthetic oligonucleotide
cuggcuagcagcacuuaga

SEQ ID NO: 3122303 - RNA, 19 nt, Artificial Sequence
  Description of Artificial Sequence: Synthetic oligonucleotide
aggagacaucuuucagaag

SEQ ID NO: 3122304 - RNA, 19 nt, Artificial Sequence
  Description of Artificial Sequence: Synthetic oligonucleotide
acaggggucaaggcugguc

SEQ ID NO: 3122305 - RNA, 19 nt, Artificial Sequence
  Description of Artificial Sequence: Synthetic oligonucleotide
gcuuacaggcccuggcuag

SEQ ID NO: 3122306 - RNA, 19 nt, Artificial Sequence
  Description of Artificial Sequence: Synthetic oligonucleotide
cuucaagcuguggucugcc

SEQ ID NO: 3122307 - RNA, 19 nt, Artificial Sequence
  Description of Artificial Sequence: Synthetic oligonucleotide
uacaggcccuggcuagcag

SEQ ID NO: 3122308 - RNA, 19 nt, Artificial Sequence
  Description of Artificial Sequence: Synthetic oligonucleotide
caauaacgaaaaccucuca

SEQ ID NO: 3122309 - RNA, 19 nt, Artificial Sequence
  Description of Artificial Sequence: Synthetic oligonucleotide
agguggcaggcacagguau

SEQ ID NO: 3122310 - RNA, 19 nt, Artificial Sequence
  Description of Artificial Sequence: Synthetic oligonucleotide
gacaucuuucagaaguccu

SEQ ID NO: 3122311 - RNA, 19 nt, Artificial Sequence
  Description of Artificial Sequence: Synthetic oligonucleotide
ggugucagguggcaggcac

SEQ ID NO: 3122312 - RNA, 19 nt, Artificial Sequence
  Description of Artificial Sequence: Synthetic oligonucleotide
gaauuccaguaaagccuag

SEQ ID NO: 3122313 - RNA, 19 nt, Artificial Sequence
  Description of Artificial Sequence: Synthetic oligonucleotide
acaucuuucagaaguccuu

SEQ ID NO: 3122314 - RNA, 19 nt, Artificial Sequence
  Description of Artificial Sequence: Synthetic oligonucleotide
cugcacugucuucagccac

SEQ ID NO: 3122315 - RNA, 19 nt, Artificial Sequence
  Description of Artificial Sequence: Synthetic oligonucleotide
uucaagcuguggucugccu

SEQ ID NO: 3122316 - RNA, 19 nt, Artificial Sequence
  Description of Artificial Sequence: Synthetic oligonucleotide
cuuacaggcccuggcuagc

SEQ ID NO: 3122317 - RNA, 19 nt, Artificial Sequence
  Description of Artificial Sequence: Synthetic oligonucleotide
gaguggaagugcagaggcc

SEQ ID NO: 3122318 - RNA, 19 nt, Artificial Sequence
  Description of Artificial Sequence: Synthetic oligonucleotide
gguccuucaagcugugguc

SEQ ID NO: 3122319 - RNA, 19 nt, Artificial Sequence
  Description of Artificial Sequence: Synthetic oligonucleotide
cucagucucaaaaccugaa

SEQ ID NO: 3122320 - RNA, 19 nt, Artificial Sequence
  Description of Artificial Sequence: Synthetic oligonucleotide
ggcuagcagcacuuagagg

SEQ ID NO: 3122321 - RNA, 19 nt, Artificial Sequence
  Description of Artificial Sequence: Synthetic oligonucleotide
uggaagugcagaggccugu

SEQ ID NO: 3122322 - RNA, 19 nt, Artificial Sequence
  Description of Artificial Sequence: Synthetic oligonucleotide
uuacaggcccuggcuagca

SEQ ID NO: 3122323 - RNA, 19 nt, Artificial Sequence
  Description of Artificial Sequence: Synthetic oligonucleotide
agccuaggugucagguggc

SEQ ID NO: 3122324 - RNA, 19 nt, Artificial Sequence
  Description of Artificial Sequence: Synthetic oligonucleotide
aggguuaagagcgcacgaa

SEQ ID NO: 3122325 - RNA, 19 nt, Artificial Sequence
  Description of Artificial Sequence: Synthetic oligonucleotide
cuguccugcacugucuuca

SEQ ID NO: 3122326 - RNA, 19 nt, Artificial Sequence
  Description of Artificial Sequence: Synthetic oligonucleotide
ggguaggagacaucuuuca

SEQ ID NO: 3122327 - RNA, 19 nt, Artificial Sequence
  Description of Artificial Sequence: Synthetic oligonucleotide
ccaguaaagccuagguguc

SEQ ID NO: 3122328 - RNA, 19 nt, Artificial Sequence
  Description of Artificial Sequence: Synthetic oligonucleotide
ugcagaggccuguccugca

SEQ ID NO: 3122329 - RNA, 19 nt, Artificial Sequence
  Description of Artificial Sequence: Synthetic oligonucleotide
guggguaggagacaucuuu

SEQ ID NO: 3122330 - RNA, 19 nt, Artificial Sequence
  Description of Artificial Sequence: Synthetic oligonucleotide
agcgcacgaaguggguagg

SEQ ID NO: 3122331 - RNA, 19 nt, Artificial Sequence
  Description of Artificial Sequence: Synthetic oligonucleotide
cagguaugacaugagugga

SEQ ID NO: 3122332 - RNA, 19 nt, Artificial Sequence
  Description of Artificial Sequence: Synthetic oligonucleotide
cagucucaaaaccugaauu

SEQ ID NO: 3122333 - RNA, 19 nt, Artificial Sequence
  Description of Artificial Sequence: Synthetic oligonucleotide
guggcaggcacagguauga

SEQ ID NO: 3122334 - RNA, 19 nt, Artificial Sequence
  Description of Artificial Sequence: Synthetic oligonucleotide
aggggucaaggcugguccu

SEQ ID NO: 3122335 - RNA, 19 nt, Artificial Sequence
  Description of Artificial Sequence: Synthetic oligonucleotide
ggucugccuggcuuacagg

SEQ ID NO: 3122336 - RNA, 19 nt, Artificial Sequence
  Description of Artificial Sequence: Synthetic oligonucleotide
cagccacaggggucaaggc

SEQ ID NO: 3122337 - RNA, 19 nt, Artificial Sequence
  Description of Artificial Sequence: Synthetic oligonucleotide
gcacgaaguggguaggaga

SEQ ID NO: 3122338 - RNA, 19 nt, Artificial Sequence
  Description of Artificial Sequence: Synthetic oligonucleotide
uguggucugccuggcuuac

SEQ ID NO: 3122339 - RNA, 19 nt, Artificial Sequence
  Description of Artificial Sequence: Synthetic oligonucleotide
agguaugacaugaguggaa

SEQ ID NO: 3122340 - RNA, 19 nt, Artificial Sequence
  Description of Artificial Sequence: Synthetic oligonucleotide
aagagcgcacgaagugggu

SEQ ID NO: 3122341 - RNA, 19 nt, Artificial Sequence
  Description of Artificial Sequence: Synthetic oligonucleotide
guaugacaugaguggaagu

SEQ ID NO: 3122342 - RNA, 19 nt, Artificial Sequence
  Description of Artificial Sequence: Synthetic oligonucleotide
gugcagaggccuguccugc

SEQ ID NO: 3122343 - RNA, 19 nt, Artificial Sequence
  Description of Artificial Sequence: Synthetic oligonucleotide
ggcaggcacagguaugaca

SEQ ID NO: 3122344 - RNA, 19 nt, Artificial Sequence
  Description of Artificial Sequence: Synthetic oligonucleotide
uucagccacaggggucaag

SEQ ID NO: 3122345 - RNA, 19 nt, Artificial Sequence
  Description of Artificial Sequence: Synthetic oligonucleotide
caggcacagguaugacaug

SEQ ID NO: 3122346 - RNA, 19 nt, Artificial Sequence
  Description of Artificial Sequence: Synthetic oligonucleotide
guggaagugcagaggccug

SEQ ID NO: 3122347 - RNA, 19 nt, Artificial Sequence
  Description of Artificial Sequence: Synthetic oligonucleotide
ccuggcuagcagcacuuag

SEQ ID NO: 3122348 - RNA, 19 nt, Artificial Sequence
  Description of Artificial Sequence: Synthetic oligonucleotide
cacugucuucagccacagg

SEQ ID NO: 3122349 - RNA, 19 nt, Artificial Sequence
  Description of Artificial Sequence: Synthetic oligonucleotide
caggcccuggcuagcagca

SEQ ID NO: 3122350 - RNA, 19 nt, Artificial Sequence
  Description of Artificial Sequence: Synthetic oligonucleotide
gaaguggguaggagacauc

SEQ ID NO: 3122351 - RNA, 19 nt, Artificial Sequence
  Description of Artificial Sequence: Synthetic oligonucleotide
acgaaguggguaggagaca

SEQ ID NO: 3122352 - RNA, 19 nt, Artificial Sequence
  Description of Artificial Sequence: Synthetic oligonucleotide
agagcgcacgaagugggua

SEQ ID NO: 3122353 - RNA, 19 nt, Artificial Sequence
  Description of Artificial Sequence: Synthetic oligonucleotide
ggcacagguaugacaugag

SEQ ID NO: 3122354 - RNA, 19 nt, Artificial Sequence
  Description of Artificial Sequence: Synthetic oligonucleotide
gguuaagagcgcacgaagu

SEQ ID NO: 3122355 - RNA, 19 nt, Artificial Sequence
  Description of Artificial Sequence: Synthetic oligonucleotide
cugguccuucaagcugugg

SEQ ID NO: 3122356 - RNA, 19 nt, Artificial Sequence
  Description of Artificial Sequence: Synthetic oligonucleotide
gucaaggcugguccuucaa

SEQ ID NO: 3122357 - RNA, 19 nt, Artificial Sequence
  Description of Artificial Sequence: Synthetic oligonucleotide
cuagcagcacuuagagggu

SEQ ID NO: 3122358 - RNA, 19 nt, Artificial Sequence
  Description of Artificial Sequence: Synthetic oligonucleotide
caguaaagccuagguguca

SEQ ID NO: 3122359 - RNA, 19 nt, Artificial Sequence
  Description of Artificial Sequence: Synthetic oligonucleotide
uagcagcacuuagaggguu

SEQ ID NO: 3122360 - RNA, 19 nt, Artificial Sequence
  Description of Artificial Sequence: Synthetic oligonucleotide
cagcacuuagaggguuaag

SEQ ID NO: 3122361 - RNA, 19 nt, Artificial Sequence
  Description of Artificial Sequence: Synthetic oligonucleotide
gcaggcacagguaugacau

SEQ ID NO: 3122362 - RNA, 19 nt, Artificial Sequence
  Description of Artificial Sequence: Synthetic oligonucleotide
guccuucaagcuguggucu

SEQ ID NO: 3122363 - RNA, 19 nt, Artificial Sequence
  Description of Artificial Sequence: Synthetic oligonucleotide
gguggcaggcacagguaug

SEQ ID NO: 3122364 - RNA, 19 nt, Artificial Sequence
  Description of Artificial Sequence: Synthetic oligonucleotide
cagaaguccuuguggggcu

SEQ ID NO: 3122365 - RNA, 19 nt, Artificial Sequence
  Description of Artificial Sequence: Synthetic oligonucleotide
gucagguggcaggcacagg

SEQ ID NO: 3122366 - RNA, 19 nt, Artificial Sequence
  Description of Artificial Sequence: Synthetic oligonucleotide
cuguggucugccuggcuua

SEQ ID NO: 3122367 - RNA, 19 nt, Artificial Sequence
  Description of Artificial Sequence: Synthetic oligonucleotide
ccuucaagcuguggucugc

SEQ ID NO: 3122368 - RNA, 19 nt, Artificial Sequence
  Description of Artificial Sequence: Synthetic oligonucleotide
uggcaggcacagguaugac

SEQ ID NO: 3122369 - RNA, 19 nt, Artificial Sequence
  Description of Artificial Sequence: Synthetic oligonucleotide
ggcuuacaggcccuggcua

SEQ ID NO: 3122370 - RNA, 19 nt, Artificial Sequence
  Description of Artificial Sequence: Synthetic oligonucleotide
agcagcacuuagaggguua

SEQ ID NO: 3122371 - RNA, 19 nt, Artificial Sequence
  Description of Artificial Sequence: Synthetic oligonucleotide
aggcccuggcuagcagcac

SEQ ID NO: 3122372 - RNA, 19 nt, Artificial Sequence
  Description of Artificial Sequence: Synthetic oligonucleotide
gcagaggccuguccugcac

SEQ ID NO: 3122373 - RNA, 19 nt, Artificial Sequence
  Description of Artificial Sequence: Synthetic oligonucleotide
gcacagguaugacaugagu

SEQ ID NO: 3122374 - RNA, 19 nt, Artificial Sequence
  Description of Artificial Sequence: Synthetic oligonucleotide
gugucagguggcaggcaca

SEQ ID NO: 3122375 - RNA, 19 nt, Artificial Sequence
  Description of Artificial Sequence: Synthetic oligonucleotide
ggucaaggcugguccuuca

SEQ ID NO: 3122376 - RNA, 19 nt, Artificial Sequence
  Description of Artificial Sequence: Synthetic oligonucleotide
ccucucagucucaaaaccu

SEQ ID NO: 3122377 - RNA, 19 nt, Artificial Sequence
  Description of Artificial Sequence: Synthetic oligonucleotide
ccuaggugucagguggcag

SEQ ID NO: 3122378 - RNA, 19 nt, Artificial Sequence
  Description of Artificial Sequence: Synthetic oligonucleotide
ggaagugcagaggccuguc

SEQ ID NO: 3122379 - RNA, 19 nt, Artificial Sequence
  Description of Artificial Sequence: Synthetic oligonucleotide
cagguggcaggcacaggua

SEQ ID NO: 3122380 - RNA, 19 nt, Artificial Sequence
  Description of Artificial Sequence: Synthetic oligonucleotide
ccuggcuuacaggcccugg

SEQ ID NO: 3122381 - RNA, 19 nt, Artificial Sequence
  Description of Artificial Sequence: Synthetic oligonucleotide
aggugucagguggcaggca

SEQ ID NO: 3122382 - RNA, 19 nt, Artificial Sequence
  Description of Artificial Sequence: Synthetic oligonucleotide
gcuguggucugccuggcuu

SEQ ID NO: 3122383 - RNA, 19 nt, Artificial Sequence
  Description of Artificial Sequence: Synthetic oligonucleotide
ccuguccugcacugucuuc

SEQ ID NO: 3122384 - RNA, 19 nt, Artificial Sequence
  Description of Artificial Sequence: Synthetic oligonucleotide
gggucaaggcugguccuuc

SEQ ID NO: 3122385 - RNA, 19 nt, Artificial Sequence
  Description of Artificial Sequence: Synthetic oligonucleotide
cagaggccuguccugcacu

SEQ ID NO: 3122386 - RNA, 19 nt, Artificial Sequence
  Description of Artificial Sequence: Synthetic oligonucleotide
gcagcacuuagaggguuaa

SEQ ID NO: 3122387 - RNA, 19 nt, Artificial Sequence
  Description of Artificial Sequence: Synthetic oligonucleotide
cgcacgaaguggguaggag

SEQ ID NO: 3122388 - RNA, 19 nt, Artificial Sequence
  Description of Artificial Sequence: Synthetic oligonucleotide
ggcccuggcuagcagcacu

SEQ ID NO: 3122389 - RNA, 19 nt, Artificial Sequence
  Description of Artificial Sequence: Synthetic oligonucleotide
guggucugccuggcuuaca

SEQ ID NO: 3122390 - RNA, 19 nt, Artificial Sequence
  Description of Artificial Sequence: Synthetic oligonucleotide
gccuaggugucagguggca

SEQ ID NO: 3122391 - RNA, 19 nt, Artificial Sequence
  Description of Artificial Sequence: Synthetic oligonucleotide
gccuggcuuacaggcccug

SEQ ID NO: 3122392 - RNA, 19 nt, Artificial Sequence
  Description of Artificial Sequence: Synthetic oligonucleotide
gcgcacgaaguggguagga

SEQ ID NO: 3122393 - RNA, 19 nt, Artificial Sequence
  Description of Artificial Sequence: Synthetic oligonucleotide
cuucagccacaggggucaa

SEQ ID NO: 3122394 - RNA, 19 nt, Artificial Sequence
  Description of Artificial Sequence: Synthetic oligonucleotide
gccuguccugcacugucuu

SEQ ID NO: 3122395 - RNA, 19 nt, Artificial Sequence
  Description of Artificial Sequence: Synthetic oligonucleotide
ggccuguccugcacugucu

SEQ ID NO: 3122396 - RNA, 19 nt, Artificial Sequence
  Description of Artificial Sequence: Synthetic oligonucleotide
ggggucaaggcugguccuu

SEQ ID NO: 3122397 - RNA, 19 nt, Artificial Sequence
  Description of Artificial Sequence: Synthetic oligonucleotide
cacaggggucaaggcuggu

SEQ ID NO: 3122398 - RNA, 19 nt, Artificial Sequence
  Description of Artificial Sequence: Synthetic oligonucleotide
gcccuggcuagcagcacuu

SEQ ID NO: 3122399 - RNA, 19 nt, Artificial Sequence
  Description of Artificial Sequence: Synthetic oligonucleotide
cccuggcuagcagcacuua

SEQ ID NO: 3122400 - RNA, 19 nt, Artificial Sequence
  Description of Artificial Sequence: Synthetic oligonucleotide
aacacugucagcuggaugc

SEQ ID NO: 3122401 - RNA, 19 nt, Artificial Sequence
  Description of Artificial Sequence: Synthetic oligonucleotide
gaaacuauggucuuggcug

SEQ ID NO: 3122402 - RNA, 19 nt, Artificial Sequence
  Description of Artificial Sequence: Synthetic oligonucleotide
uuauucagcagcuggauag

SEQ ID NO: 3122403 - RNA, 19 nt, Artificial Sequence
  Description of Artificial Sequence: Synthetic oligonucleotide
ucuuggcugaagaacaugg

SEQ ID NO: 3122404 - RNA, 19 nt, Artificial Sequence
  Description of Artificial Sequence: Synthetic oligonucleotide
uggauagccacacagaaaa

SEQ ID NO: 3122405 - RNA, 19 nt, Artificial Sequence
  Description of Artificial Sequence: Synthetic oligonucleotide
ucaugcuuauccuacuacg

SEQ ID NO: 3122406 - RNA, 19 nt, Artificial Sequence
  Description of Artificial Sequence: Synthetic oligonucleotide
cauuaccuugucaaaaucc

SEQ ID NO: 3122407 - RNA, 19 nt, Artificial Sequence
  Description of Artificial Sequence: Synthetic oligonucleotide
caugaagcagcucacacag

SEQ ID NO: 3122408 - RNA, 19 nt, Artificial Sequence
  Description of Artificial Sequence: Synthetic oligonucleotide
cacacagaaaagcucaugg

SEQ ID NO: 3122409 - RNA, 19 nt, Artificial Sequence
  Description of Artificial Sequence: Synthetic oligonucleotide
uaccuugucaaaauccucc

SEQ ID NO: 3122410 - RNA, 19 nt, Artificial Sequence
  Description of Artificial Sequence: Synthetic oligonucleotide
aaauccuccuguguugccc

SEQ ID NO: 3122411 - RNA, 19 nt, Artificial Sequence
  Description of Artificial Sequence: Synthetic oligonucleotide
augcuuauccuacuacggc

SEQ ID NO: 3122412 - RNA, 19 nt, Artificial Sequence
  Description of Artificial Sequence: Synthetic oligonucleotide
acuguucuccagcacaaac

SEQ ID NO: 3122413 - RNA, 19 nt, Artificial Sequence
  Description of Artificial Sequence: Synthetic oligonucleotide
aaaauccuccuguguugcc

SEQ ID NO: 3122414 - RNA, 19 nt, Artificial Sequence
  Description of Artificial Sequence: Synthetic oligonucleotide
aagcucauggaaacuaugg

SEQ ID NO: 3122415 - RNA, 19 nt, Artificial Sequence
  Description of Artificial Sequence: Synthetic oligonucleotide
uggcugaagaacaugggug

SEQ ID NO: 3122416 - RNA, 19 nt, Artificial Sequence
  Description of Artificial Sequence: Synthetic oligonucleotide
caugcuuauccuacuacgg

SEQ ID NO: 3122417 - RNA, 19 nt, Artificial Sequence
  Description of Artificial Sequence: Synthetic oligonucleotide
gauagccacacagaaaagc

SEQ ID NO: 3122418 - RNA, 19 nt, Artificial Sequence
  Description of Artificial Sequence: Synthetic oligonucleotide
ucaaaauccuccuguguug

SEQ ID NO: 3122419 - RNA, 19 nt, Artificial Sequence
  Description of Artificial Sequence: Synthetic oligonucleotide
aauccuccuguguugcccg

SEQ ID NO: 3122420 - RNA, 19 nt, Artificial Sequence
  Description of Artificial Sequence: Synthetic oligonucleotide
gggacauucaugcuuaucc

SEQ ID NO: 3122421 - RNA, 19 nt, Artificial Sequence
  Description of Artificial Sequence: Synthetic oligonucleotide
accaugaagcagcucacac

SEQ ID NO: 3122422 - RNA, 19 nt, Artificial Sequence
  Description of Artificial Sequence: Synthetic oligonucleotide
ggcaaagggacauucaugc

SEQ ID NO: 3122423 - RNA, 19 nt, Artificial Sequence
  Description of Artificial Sequence: Synthetic oligonucleotide
uggucuuggcugaagaaca

SEQ ID NO: 3122424 - RNA, 19 nt, Artificial Sequence
  Description of Artificial Sequence: Synthetic oligonucleotide
cacacagcaacacugucag

SEQ ID NO: 3122425 - RNA, 19 nt, Artificial Sequence
  Description of Artificial Sequence: Synthetic oligonucleotide
cagaaaagcucauggaaac

SEQ ID NO: 3122426 - RNA, 19 nt, Artificial Sequence
  Description of Artificial Sequence: Synthetic oligonucleotide
acauucaugcuuauccuac

SEQ ID NO: 3122427 - RNA, 19 nt, Artificial Sequence
  Description of Artificial Sequence: Synthetic oligonucleotide
uuggcugaagaacaugggu

SEQ ID NO: 3122428 - RNA, 19 nt, Artificial Sequence
  Description of Artificial Sequence: Synthetic oligonucleotide
aaacuauggucuuggcuga

SEQ ID NO: 3122429 - RNA, 19 nt, Artificial Sequence
  Description of Artificial Sequence: Synthetic oligonucleotide
auggucuuggcugaagaac

SEQ ID NO: 3122430 - RNA, 19 nt, Artificial Sequence
  Description of Artificial Sequence: Synthetic oligonucleotide
uucaugcuuauccuacuac

SEQ ID NO: 3122431 - RNA, 19 nt, Artificial Sequence
  Description of Artificial Sequence: Synthetic oligonucleotide
ugcuuauccuacuacggcu

SEQ ID NO: 3122432 - RNA, 19 nt, Artificial Sequence
  Description of Artificial Sequence: Synthetic oligonucleotide
auggaaacuauggucuugg

SEQ ID NO: 3122433 - RNA, 19 nt, Artificial Sequence
  Description of Artificial Sequence: Synthetic oligonucleotide
ugaagaacaugggugagaa

SEQ ID NO: 3122434 - RNA, 19 nt, Artificial Sequence
  Description of Artificial Sequence: Synthetic oligonucleotide
ucagcagcuggauagccac

SEQ ID NO: 3122435 - RNA, 19 nt, Artificial Sequence
  Description of Artificial Sequence: Synthetic oligonucleotide
uuccagguuuuauucagca

SEQ ID NO: 3122436 - RNA, 19 nt, Artificial Sequence
  Description of Artificial Sequence: Synthetic oligonucleotide
cuuacuguucuccagcaca

SEQ ID NO: 3122437 - RNA, 19 nt, Artificial Sequence
  Description of Artificial Sequence: Synthetic oligonucleotide
ugucaaaauccuccugugu

SEQ ID NO: 3122438 - RNA, 19 nt, Artificial Sequence
  Description of Artificial Sequence: Synthetic oligonucleotide
ccagguuuuauucagcagc

SEQ ID NO: 3122439 - RNA, 19 nt, Artificial Sequence
  Description of Artificial Sequence: Synthetic oligonucleotide
uugucaaaauccuccugug

SEQ ID NO: 3122440 - RNA, 19 nt, Artificial Sequence
  Description of Artificial Sequence: Synthetic oligonucleotide
cugcucuuggcaaagggac

SEQ ID NO: 3122441 - RNA, 19 nt, Artificial Sequence
  Description of Artificial Sequence: Synthetic oligonucleotide
uuggcaaagggacauucau

SEQ ID NO: 3122442 - RNA, 19 nt, Artificial Sequence
  Description of Artificial Sequence: Synthetic oligonucleotide
auuaccuugucaaaauccu

SEQ ID NO: 3122443 - RNA, 19 nt, Artificial Sequence
  Description of Artificial Sequence: Synthetic oligonucleotide
cuuggcugaagaacauggg

SEQ ID NO: 3122444 - RNA, 19 nt, Artificial Sequence
  Description of Artificial Sequence: Synthetic oligonucleotide
uggcaaagggacauucaug

SEQ ID NO: 3122445 - RNA, 19 nt, Artificial Sequence
  Description of Artificial Sequence: Synthetic oligonucleotide
uuuauucagcagcuggaua

SEQ ID NO: 3122446 - RNA, 19 nt, Artificial Sequence
  Description of Artificial Sequence: Synthetic oligonucleotide
acugucagcuggaugcugc

SEQ ID NO: 3122447 - RNA, 19 nt, Artificial Sequence
  Description of Artificial Sequence: Synthetic oligonucleotide
uccuacuacggcuuacugu

SEQ ID NO: 3122448 - RNA, 19 nt, Artificial Sequence
  Description of Artificial Sequence: Synthetic oligonucleotide
uuacuguucuccagcacaa

SEQ ID NO: 3122449 - RNA, 19 nt, Artificial Sequence
  Description of Artificial Sequence: Synthetic oligonucleotide
ugggugagaaguccugggc

SEQ ID NO: 3122450 - RNA, 19 nt, Artificial Sequence
  Description of Artificial Sequence: Synthetic oligonucleotide
augggugagaaguccuggg

SEQ ID NO: 3122451 - RNA, 19 nt, Artificial Sequence
  Description of Artificial Sequence: Synthetic oligonucleotide
acacagaaaagcucaugga

SEQ ID NO: 3122452 - RNA, 19 nt, Artificial Sequence
  Description of Artificial Sequence: Synthetic oligonucleotide
uacuacggcuuacuguucu

SEQ ID NO: 3122453 - RNA, 19 nt, Artificial Sequence
  Description of Artificial Sequence: Synthetic oligonucleotide
gaaguccugggcugucucg

SEQ ID NO: 3122454 - RNA, 19 nt, Artificial Sequence
  Description of Artificial Sequence: Synthetic oligonucleotide
aaagcucauggaaacuaug

SEQ ID NO: 3122455 - RNA, 19 nt, Artificial Sequence
  Description of Artificial Sequence: Synthetic oligonucleotide
agcucauggaaacuauggu

SEQ ID NO: 3122456 - RNA, 19 nt, Artificial Sequence
  Description of Artificial Sequence: Synthetic oligonucleotide
auagccacacagaaaagcu

SEQ ID NO: 3122457 - RNA, 19 nt, Artificial Sequence
  Description of Artificial Sequence: Synthetic oligonucleotide
cucauggaaacuauggucu

SEQ ID NO: 3122458 - RNA, 19 nt, Artificial Sequence
  Description of Artificial Sequence: Synthetic oligonucleotide
aaguccugggcugucucgg

SEQ ID NO: 3122459 - RNA, 19 nt, Artificial Sequence
  Description of Artificial Sequence: Synthetic oligonucleotide
uuaccuugucaaaauccuc

SEQ ID NO: 3122460 - RNA, 19 nt, Artificial Sequence
  Description of Artificial Sequence: Synthetic oligonucleotide
aaagggacauucaugcuua

SEQ ID NO: 3122461 - RNA, 19 nt, Artificial Sequence
  Description of Artificial Sequence: Synthetic oligonucleotide
gaacaugggugagaagucc

SEQ ID NO: 3122462 - RNA, 19 nt, Artificial Sequence
  Description of Artificial Sequence: Synthetic oligonucleotide
uucagcagcuggauagcca

SEQ ID NO: 3122463 - RNA, 19 nt, Artificial Sequence
  Description of Artificial Sequence: Synthetic oligonucleotide
caaaauccuccuguguugc

SEQ ID NO: 3122464 - RNA, 19 nt, Artificial Sequence
  Description of Artificial Sequence: Synthetic oligonucleotide
auuccuuccagguuuuauu

SEQ ID NO: 3122465 - RNA, 19 nt, Artificial Sequence
  Description of Artificial Sequence: Synthetic oligonucleotide
agaaguccugggcugucuc

SEQ ID NO: 3122466 - RNA, 19 nt, Artificial Sequence
  Description of Artificial Sequence: Synthetic oligonucleotide
agaacaugggugagaaguc

SEQ ID NO: 3122467 - RNA, 19 nt, Artificial Sequence
  Description of Artificial Sequence: Synthetic oligonucleotide
gaaaagcucauggaaacua

SEQ ID NO: 3122468 - RNA, 19 nt, Artificial Sequence
  Description of Artificial Sequence: Synthetic oligonucleotide
uauggucuuggcugaagaa

SEQ ID NO: 3122469 - RNA, 19 nt, Artificial Sequence
  Description of Artificial Sequence: Synthetic oligonucleotide
cagcuggauagccacacag

SEQ ID NO: 3122470 - RNA, 19 nt, Artificial Sequence
  Description of Artificial Sequence: Synthetic oligonucleotide
aaaagcucauggaaacuau

SEQ ID NO: 3122471 - RNA, 19 nt, Artificial Sequence
  Description of Artificial Sequence: Synthetic oligonucleotide
uccuguguugcccgcauuc

SEQ ID NO: 3122472 - RNA, 19 nt, Artificial Sequence
  Description of Artificial Sequence: Synthetic oligonucleotide
ugucucggagcaaggcucc

SEQ ID NO: 3122473 - RNA, 19 nt, Artificial Sequence
  Description of Artificial Sequence: Synthetic oligonucleotide
agcagcuggauagccacac

SEQ ID NO: 3122474 - RNA, 19 nt, Artificial Sequence
  Description of Artificial Sequence: Synthetic oligonucleotide
agcucacacagcaacacug

SEQ ID NO: 3122475 - RNA, 19 nt, Artificial Sequence
  Description of Artificial Sequence: Synthetic oligonucleotide
aacaugggugagaaguccu

SEQ ID NO: 3122476 - RNA, 19 nt, Artificial Sequence
  Description of Artificial Sequence: Synthetic oligonucleotide
gaugcugcucuuggcaaag

SEQ ID NO: 3122477 - RNA, 19 nt, Artificial Sequence
  Description of Artificial Sequence: Synthetic oligonucleotide
ugggcugucucggagcaag

SEQ ID NO: 3122478 - RNA, 19 nt, Artificial Sequence
  Description of Artificial Sequence: Synthetic oligonucleotide
cuugucaaaauccuccugu

SEQ ID NO: 3122479 - RNA, 19 nt, Artificial Sequence
  Description of Artificial Sequence: Synthetic oligonucleotide
ugcucuuggcaaagggaca

SEQ ID NO: 3122480 - RNA, 19 nt, Artificial Sequence
  Description of Artificial Sequence: Synthetic oligonucleotide
uagccacacagaaaagcuc

SEQ ID NO: 3122481 - RNA, 19 nt, Artificial Sequence
  Description of Artificial Sequence: Synthetic oligonucleotide
acuacggcuuacuguucuc

SEQ ID NO: 3122482 - RNA, 19 nt, Artificial Sequence
  Description of Artificial Sequence: Synthetic oligonucleotide
agccacacagaaaagcuca

SEQ ID NO: 3122483 - RNA, 19 nt, Artificial Sequence
  Description of Artificial Sequence: Synthetic oligonucleotide
gcucauggaaacuaugguc

SEQ ID NO: 3122484 - RNA, 19 nt, Artificial Sequence
  Description of Artificial Sequence: Synthetic oligonucleotide
gaagaacaugggugagaag

SEQ ID NO: 3122485 - RNA, 19 nt, Artificial Sequence
  Description of Artificial Sequence: Synthetic oligonucleotide
gacauucaugcuuauccua

SEQ ID NO: 3122486 - RNA, 19 nt, Artificial Sequence
  Description of Artificial Sequence: Synthetic oligonucleotide
uacggcuuacuguucucca

SEQ ID NO: 3122487 - RNA, 19 nt, Artificial Sequence
  Description of Artificial Sequence: Synthetic oligonucleotide
ccaaccaugaagcagcuca

SEQ ID NO: 3122488 - RNA, 19 nt, Artificial Sequence
  Description of Artificial Sequence: Synthetic oligonucleotide
caugggugagaaguccugg

SEQ ID NO: 3122489 - RNA, 19 nt, Artificial Sequence
  Description of Artificial Sequence: Synthetic oligonucleotide
uguguugcccgcauuccuu

SEQ ID NO: 3122490 - RNA, 19 nt, Artificial Sequence
  Description of Artificial Sequence: Synthetic oligonucleotide
uauccuacuacggcuuacu

SEQ ID NO: 3122491 - RNA, 19 nt, Artificial Sequence
  Description of Artificial Sequence: Synthetic oligonucleotide
acggcuuacuguucuccag

SEQ ID NO: 3122492 - RNA, 19 nt, Artificial Sequence
  Description of Artificial Sequence: Synthetic oligonucleotide
agaaaagcucauggaaacu

SEQ ID NO: 3122493 - RNA, 19 nt, Artificial Sequence
  Description of Artificial Sequence: Synthetic oligonucleotide
aggcuccccaaccaugaag

SEQ ID NO: 3122494 - RNA, 19 nt, Artificial Sequence
  Description of Artificial Sequence: Synthetic oligonucleotide
auucaugcuuauccuacua

SEQ ID NO: 3122495 - RNA, 19 nt, Artificial Sequence
  Description of Artificial Sequence: Synthetic oligonucleotide
uggaugcugcucuuggcaa

SEQ ID NO: 3122496 - RNA, 19 nt, Artificial Sequence
  Description of Artificial Sequence: Synthetic oligonucleotide
uugcccgcauuccuuccag

SEQ ID NO: 3122497 - RNA, 19 nt, Artificial Sequence
  Description of Artificial Sequence: Synthetic oligonucleotide
caaccaugaagcagcucac

SEQ ID NO: 3122498 - RNA, 19 nt, Artificial Sequence
  Description of Artificial Sequence: Synthetic oligonucleotide
uggaaacuauggucuuggc

SEQ ID NO: 3122499 - RNA, 19 nt, Artificial Sequence
  Description of Artificial Sequence: Synthetic oligonucleotide
acacagcaacacugucagc

SEQ ID NO: 3122500 - RNA, 19 nt, Artificial Sequence
  Description of Artificial Sequence: Synthetic oligonucleotide
ggagcaaggcuccccaacc

SEQ ID NO: 3122501 - RNA, 19 nt, Artificial Sequence
  Description of Artificial Sequence: Synthetic oligonucleotide
auccuacuacggcuuacug

SEQ ID NO: 3122502 - RNA, 19 nt, Artificial Sequence
  Description of Artificial Sequence: Synthetic oligonucleotide
cuacggcuuacuguucucc

SEQ ID NO: 3122503 - RNA, 19 nt, Artificial Sequence
  Description of Artificial Sequence: Synthetic oligonucleotide
aaccaugaagcagcucaca

SEQ ID NO: 3122504 - RNA, 19 nt, Artificial Sequence
  Description of Artificial Sequence: Synthetic oligonucleotide
uccugggcugucucggagc

SEQ ID NO: 3122505 - RNA, 19 nt, Artificial Sequence
  Description of Artificial Sequence: Synthetic oligonucleotide
ggcugaagaacauggguga

SEQ ID NO: 3122506 - RNA, 19 nt, Artificial Sequence
  Description of Artificial Sequence: Synthetic oligonucleotide
ucauggaaacuauggucuu

SEQ ID NO: 3122507 - RNA, 19 nt, Artificial Sequence
  Description of Artificial Sequence: Synthetic oligonucleotide
cuauggucuuggcugaaga

SEQ ID NO: 3122508 - RNA, 19 nt, Artificial Sequence
  Description of Artificial Sequence: Synthetic oligonucleotide
cuggaugcugcucuuggca

SEQ ID NO: 3122509 - RNA, 19 nt, Artificial Sequence
  Description of Artificial Sequence: Synthetic oligonucleotide
cacagcaacacugucagcu

SEQ ID NO: 3122510 - RNA, 19 nt, Artificial Sequence
  Description of Artificial Sequence: Synthetic oligonucleotide
uguugcccgcauuccuucc

SEQ ID NO: 3122511 - RNA, 19 nt, Artificial Sequence
  Description of Artificial Sequence: Synthetic oligonucleotide
uuauccuacuacggcuuac

SEQ ID NO: 3122512 - RNA, 19 nt, Artificial Sequence
  Description of Artificial Sequence: Synthetic oligonucleotide
cuuggcaaagggacauuca

SEQ ID NO: 3122513 - RNA, 19 nt, Artificial Sequence
  Description of Artificial Sequence: Synthetic oligonucleotide
acuauggucuuggcugaag

SEQ ID NO: 3122514 - RNA, 19 nt, Artificial Sequence
  Description of Artificial Sequence: Synthetic oligonucleotide
caaggcuccccaaccauga

SEQ ID NO: 3122515 - RNA, 19 nt, Artificial Sequence
  Description of Artificial Sequence: Synthetic oligonucleotide
ggcuccccaaccaugaagc

SEQ ID NO: 3122516 - RNA, 19 nt, Artificial Sequence
  Description of Artificial Sequence: Synthetic oligonucleotide
agggacauucaugcuuauc

SEQ ID NO: 3122517 - RNA, 19 nt, Artificial Sequence
  Description of Artificial Sequence: Synthetic oligonucleotide
caacacugucagcuggaug

SEQ ID NO: 3122518 - RNA, 19 nt, Artificial Sequence
  Description of Artificial Sequence: Synthetic oligonucleotide
agcaaggcuccccaaccau

SEQ ID NO: 3122519 - RNA, 19 nt, Artificial Sequence
  Description of Artificial Sequence: Synthetic oligonucleotide
auccuccuguguugcccgc

SEQ ID NO: 3122520 - RNA, 19 nt, Artificial Sequence
  Description of Artificial Sequence: Synthetic oligonucleotide
augaagcagcucacacagc

SEQ ID NO: 3122521 - RNA, 19 nt, Artificial Sequence
  Description of Artificial Sequence: Synthetic oligonucleotide
gagcaaggcuccccaacca

SEQ ID NO: 3122522 - RNA, 19 nt, Artificial Sequence
  Description of Artificial Sequence: Synthetic oligonucleotide
ugcccgcauuccuuccagg

SEQ ID NO: 3122523 - RNA, 19 nt, Artificial Sequence
  Description of Artificial Sequence: Synthetic oligonucleotide
cagguuuuauucagcagcu

SEQ ID NO: 3122524 - RNA, 19 nt, Artificial Sequence
  Description of Artificial Sequence: Synthetic oligonucleotide
caaagggacauucaugcuu

SEQ ID NO: 3122525 - RNA, 19 nt, Artificial Sequence
  Description of Artificial Sequence: Synthetic oligonucleotide
ggaaacuauggucuuggcu

SEQ ID NO: 3122526 - RNA, 19 nt, Artificial Sequence
  Description of Artificial Sequence: Synthetic oligonucleotide
ucucggagcaaggcucccc

SEQ ID NO: 3122527 - RNA, 19 nt, Artificial Sequence
  Description of Artificial Sequence: Synthetic oligonucleotide
acaugggugagaaguccug

SEQ ID NO: 3122528 - RNA, 19 nt, Artificial Sequence
  Description of Artificial Sequence: Synthetic oligonucleotide
aagggacauucaugcuuau

SEQ ID NO: 3122529 - RNA, 19 nt, Artificial Sequence
  Description of Artificial Sequence: Synthetic oligonucleotide
agguuuuauucagcagcug

SEQ ID NO: 3122530 - RNA, 19 nt, Artificial Sequence
  Description of Artificial Sequence: Synthetic oligonucleotide
cuggauagccacacagaaa

SEQ ID NO: 3122531 - RNA, 19 nt, Artificial Sequence
  Description of Artificial Sequence: Synthetic oligonucleotide
agcuggauagccacacaga

SEQ ID NO: 3122532 - RNA, 19 nt, Artificial Sequence
  Description of Artificial Sequence: Synthetic oligonucleotide
aaggcuccccaaccaugaa

SEQ ID NO: 3122533 - RNA, 19 nt, Artificial Sequence
  Description of Artificial Sequence: Synthetic oligonucleotide
guccugggcugucucggag

SEQ ID NO: 3122534 - RNA, 19 nt, Artificial Sequence
  Description of Artificial Sequence: Synthetic oligonucleotide
cugaagaacaugggugaga

SEQ ID NO: 3122535 - RNA, 19 nt, Artificial Sequence
  Description of Artificial Sequence: Synthetic oligonucleotide
guguugcccgcauuccuuc

SEQ ID NO: 3122536 - RNA, 19 nt, Artificial Sequence
  Description of Artificial Sequence: Synthetic oligonucleotide
agcaacacugucagcugga

SEQ ID NO: 3122537 - RNA, 19 nt, Artificial Sequence
  Description of Artificial Sequence: Synthetic oligonucleotide
cuacuacggcuuacuguuc

SEQ ID NO: 3122538 - RNA, 19 nt, Artificial Sequence
  Description of Artificial Sequence: Synthetic oligonucleotide
guugcccgcauuccuucca

SEQ ID NO: 3122539 - RNA, 19 nt, Artificial Sequence
  Description of Artificial Sequence: Synthetic oligonucleotide
ucagcuggaugcugcucuu

SEQ ID NO: 3122540 - RNA, 19 nt, Artificial Sequence
  Description of Artificial Sequence: Synthetic oligonucleotide
aacuauggucuuggcugaa

SEQ ID NO: 3122541 - RNA, 19 nt, Artificial Sequence
  Description of Artificial Sequence: Synthetic oligonucleotide
gcugaagaacaugggugag

SEQ ID NO: 3122542 - RNA, 19 nt, Artificial Sequence
  Description of Artificial Sequence: Synthetic oligonucleotide
ggcuuacuguucuccagca

SEQ ID NO: 3122543 - RNA, 19 nt, Artificial Sequence
  Description of Artificial Sequence: Synthetic oligonucleotide
ugagaaguccugggcuguc

SEQ ID NO: 3122544 - RNA, 19 nt, Artificial Sequence
  Description of Artificial Sequence: Synthetic oligonucleotide
ggacauucaugcuuauccu

SEQ ID NO: 3122545 - RNA, 19 nt, Artificial Sequence
  Description of Artificial Sequence: Synthetic oligonucleotide
aguccugggcugucucgga

SEQ ID NO: 3122546 - RNA, 19 nt, Artificial Sequence
  Description of Artificial Sequence: Synthetic oligonucleotide
cauucaugcuuauccuacu

SEQ ID NO: 3122547 - RNA, 19 nt, Artificial Sequence
  Description of Artificial Sequence: Synthetic oligonucleotide
ccuacuacggcuuacuguu

SEQ ID NO: 3122548 - RNA, 19 nt, Artificial Sequence
  Description of Artificial Sequence: Synthetic oligonucleotide
ccaugaagcagcucacaca

SEQ ID NO: 3122549 - RNA, 19 nt, Artificial Sequence
  Description of Artificial Sequence: Synthetic oligonucleotide
augcugcucuuggcaaagg

SEQ ID NO: 3122550 - RNA, 19 nt, Artificial Sequence
  Description of Artificial Sequence: Synthetic oligonucleotide
cuuauccuacuacggcuua

SEQ ID NO: 3122551 - RNA, 19 nt, Artificial Sequence
  Description of Artificial Sequence: Synthetic oligonucleotide
gcagcucacacagcaacac

SEQ ID NO: 3122552 - RNA, 19 nt, Artificial Sequence
  Description of Artificial Sequence: Synthetic oligonucleotide
uacuguucuccagcacaaa

SEQ ID NO: 3122553 - RNA, 19 nt, Artificial Sequence
  Description of Artificial Sequence: Synthetic oligonucleotide
acacugucagcuggaugcu

SEQ ID NO: 3122554 - RNA, 19 nt, Artificial Sequence
  Description of Artificial Sequence: Synthetic oligonucleotide
ugucagcuggaugcugcuc

SEQ ID NO: 3122555 - RNA, 19 nt, Artificial Sequence
  Description of Artificial Sequence: Synthetic oligonucleotide
uccuccuguguugcccgca

SEQ ID NO: 3122556 - RNA, 19 nt, Artificial Sequence
  Description of Artificial Sequence: Synthetic oligonucleotide
ucggagcaaggcuccccaa

SEQ ID NO: 3122557 - RNA, 19 nt, Artificial Sequence
  Description of Artificial Sequence: Synthetic oligonucleotide
gcaaggcuccccaaccaug

SEQ ID NO: 3122558 - RNA, 19 nt, Artificial Sequence
  Description of Artificial Sequence: Synthetic oligonucleotide
cacugucagcuggaugcug

SEQ ID NO: 3122559 - RNA, 19 nt, Artificial Sequence
  Description of Artificial Sequence: Synthetic oligonucleotide
cggcuuacuguucuccagc

SEQ ID NO: 3122560 - RNA, 19 nt, Artificial Sequence
  Description of Artificial Sequence: Synthetic oligonucleotide
ccuguguugcccgcauucc

SEQ ID NO: 3122561 - RNA, 19 nt, Artificial Sequence
  Description of Artificial Sequence: Synthetic oligonucleotide
ggcugucucggagcaaggc

SEQ ID NO: 3122562 - RNA, 19 nt, Artificial Sequence
  Description of Artificial Sequence: Synthetic oligonucleotide
gcugucucggagcaaggcu

SEQ ID NO: 3122563 - RNA, 19 nt, Artificial Sequence
  Description of Artificial Sequence: Synthetic oligonucleotide
ggaugcugcucuuggcaaa

SEQ ID NO: 3122564 - RNA, 19 nt, Artificial Sequence
  Description of Artificial Sequence: Synthetic oligonucleotide
cuguguugcccgcauuccu

SEQ ID NO: 3122565 - RNA, 19 nt, Artificial Sequence
  Description of Artificial Sequence: Synthetic oligonucleotide
gucucggagcaaggcuccc

SEQ ID NO: 3122566 - RNA, 19 nt, Artificial Sequence
  Description of Artificial Sequence: Synthetic oligonucleotide
gcaaagggacauucaugcu

SEQ ID NO: 3122567 - RNA, 19 nt, Artificial Sequence
  Description of Artificial Sequence: Synthetic oligonucleotide
gugagaaguccugggcugu

SEQ ID NO: 3122568 - RNA, 19 nt, Artificial Sequence
  Description of Artificial Sequence: Synthetic oligonucleotide
cagcucacacagcaacacu

SEQ ID NO: 3122569 - RNA, 19 nt, Artificial Sequence
  Description of Artificial Sequence: Synthetic oligonucleotide
cugucagcuggaugcugcu

SEQ ID NO: 3122570 - RNA, 19 nt, Artificial Sequence
  Description of Artificial Sequence: Synthetic oligonucleotide
gcagcuggauagccacaca

SEQ ID NO: 3122571 - RNA, 19 nt, Artificial Sequence
  Description of Artificial Sequence: Synthetic oligonucleotide
cggagcaaggcuccccaac

SEQ ID NO: 3122572 - RNA, 19 nt, Artificial Sequence
  Description of Artificial Sequence: Synthetic oligonucleotide
gggcugucucggagcaagg

SEQ ID NO: 3122573 - RNA, 19 nt, Artificial Sequence
  Description of Artificial Sequence: Synthetic oligonucleotide
gcucuuggcaaagggacau

SEQ ID NO: 3122574 - RNA, 19 nt, Artificial Sequence
  Description of Artificial Sequence: Synthetic oligonucleotide
gcucacacagcaacacugu

SEQ ID NO: 3122575 - RNA, 19 nt, Artificial Sequence
  Description of Artificial Sequence: Synthetic oligonucleotide
gcccgcauuccuuccaggu

SEQ ID NO: 3122576 - RNA, 19 nt, Artificial Sequence
  Description of Artificial Sequence: Synthetic oligonucleotide
gcuuauccuacuacggcuu

SEQ ID NO: 3122577 - RNA, 19 nt, Artificial Sequence
  Description of Artificial Sequence: Synthetic oligonucleotide
ccgcauuccuuccagguuu

SEQ ID NO: 3122578 - RNA, 19 nt, Artificial Sequence
  Description of Artificial Sequence: Synthetic oligonucleotide
ggucuuggcugaagaacau

SEQ ID NO: 3122579 - RNA, 19 nt, Artificial Sequence
  Description of Artificial Sequence: Synthetic oligonucleotide
gcaacacugucagcuggau

SEQ ID NO: 3122580 - RNA, 19 nt, Artificial Sequence
  Description of Artificial Sequence: Synthetic oligonucleotide
cccaaccaugaagcagcuc

SEQ ID NO: 3122581 - RNA, 19 nt, Artificial Sequence
  Description of Artificial Sequence: Synthetic oligonucleotide
cugggcugucucggagcaa

SEQ ID NO: 3122582 - RNA, 19 nt, Artificial Sequence
  Description of Artificial Sequence: Synthetic oligonucleotide
gccacacagaaaagcucau

SEQ ID NO: 3122583 - RNA, 19 nt, Artificial Sequence
  Description of Artificial Sequence: Synthetic oligonucleotide
cuccuguguugcccgcauu

SEQ ID NO: 3122584 - RNA, 19 nt, Artificial Sequence
  Description of Artificial Sequence: Synthetic oligonucleotide
gcauuccuuccagguuuua

SEQ ID NO: 3122585 - RNA, 19 nt, Artificial Sequence
  Description of Artificial Sequence: Synthetic oligonucleotide
cccgcauuccuuccagguu

SEQ ID NO: 3122586 - RNA, 19 nt, Artificial Sequence
  Description of Artificial Sequence: Synthetic oligonucleotide
ccccaaccaugaagcagcu

SEQ ID NO: 3122587 - RNA, 19 nt, Artificial Sequence
  Description of Artificial Sequence: Synthetic oligonucleotide
ccuccuguguugcccgcau

SEQ ID NO: 3122588 - RNA, 19 nt, Artificial Sequence
  Description of Artificial Sequence: Synthetic oligonucleotide
cgcauuccuuccagguuuu

SEQ ID NO: 3122589 - RNA, 19 nt, Artificial Sequence
  Description of Artificial Sequence: Synthetic oligonucleotide
auugaugauucucugucgc

SEQ ID NO: 3122590 - RNA, 19 nt, Artificial Sequence
  Description of Artificial Sequence: Synthetic oligonucleotide
uaagugacagcucuaacac

SEQ ID NO: 3122591 - RNA, 19 nt, Artificial Sequence
  Description of Artificial Sequence: Synthetic oligonucleotide
ucuaacacgggcuggaaug

SEQ ID NO: 3122592 - RNA, 19 nt, Artificial Sequence
  Description of Artificial Sequence: Synthetic oligonucleotide
auaagugacagcucuaaca

SEQ ID NO: 3122593 - RNA, 19 nt, Artificial Sequence
  Description of Artificial Sequence: Synthetic oligonucleotide
cauucuuuccaaaugcagc

SEQ ID NO: 3122594 - RNA, 19 nt, Artificial Sequence
  Description of Artificial Sequence: Synthetic oligonucleotide
ucauugaugauucucuguc

SEQ ID NO: 3122595 - RNA, 19 nt, Artificial Sequence
  Description of Artificial Sequence: Synthetic oligonucleotide
uugcauucuuuccaaaugc

SEQ ID NO: 3122596 - RNA, 19 nt, Artificial Sequence
  Description of Artificial Sequence: Synthetic oligonucleotide
uucuucaguucauugauga

SEQ ID NO: 3122597 - RNA, 19 nt, Artificial Sequence
  Description of Artificial Sequence: Synthetic oligonucleotide
uauucaguggugccgagga

SEQ ID NO: 3122598 - RNA, 19 nt, Artificial Sequence
  Description of Artificial Sequence: Synthetic oligonucleotide
agugacagcucuaacacgg

SEQ ID NO: 3122599 - RNA, 19 nt, Artificial Sequence
  Description of Artificial Sequence: Synthetic oligonucleotide
aucuucaaguacugggagc

SEQ ID NO: 3122600 - RNA, 19 nt, Artificial Sequence
  Description of Artificial Sequence: Synthetic oligonucleotide
ucagauguagacucagagc

SEQ ID NO: 3122601 - RNA, 19 nt, Artificial Sequence
  Description of Artificial Sequence: Synthetic oligonucleotide
aagguauucaguggugccg

SEQ ID NO: 3122602 - RNA, 19 nt, Artificial Sequence
  Description of Artificial Sequence: Synthetic oligonucleotide
cucgucaagguauucagug

SEQ ID NO: 3122603 - RNA, 19 nt, Artificial Sequence
  Description of Artificial Sequence: Synthetic oligonucleotide
cucagauguagacucagag

SEQ ID NO: 3122604 - RNA, 19 nt, Artificial Sequence
  Description of Artificial Sequence: Synthetic oligonucleotide
ucuucaaguacugggagcu

SEQ ID NO: 3122605 - RNA, 19 nt, Artificial Sequence
  Description of Artificial Sequence: Synthetic oligonucleotide
aguacugggagcucagaug

SEQ ID NO: 3122606 - RNA, 19 nt, Artificial Sequence
  Description of Artificial Sequence: Synthetic oligonucleotide
ucgucaagguauucagugg

SEQ ID NO: 3122607 - RNA, 19 nt, Artificial Sequence
  Description of Artificial Sequence: Synthetic oligonucleotide
cauugaugauucucugucg

SEQ ID NO: 3122608 - RNA, 19 nt, Artificial Sequence
  Description of Artificial Sequence: Synthetic oligonucleotide
ugcauucuuuccaaaugca

SEQ ID NO: 3122609 - RNA, 19 nt, Artificial Sequence
  Description of Artificial Sequence: Synthetic oligonucleotide
uccucgucaagguauucag

SEQ ID NO: 3122610 - RNA, 19 nt, Artificial Sequence
  Description of Artificial Sequence: Synthetic oligonucleotide
gauguagacucagagcuac

SEQ ID NO: 3122611 - RNA, 19 nt, Artificial Sequence
  Description of Artificial Sequence: Synthetic oligonucleotide
ucuuuccaaaugcagcuuc

SEQ ID NO: 3122612 - RNA, 19 nt, Artificial Sequence
  Description of Artificial Sequence: Synthetic oligonucleotide
uucucugucgccuccucag

SEQ ID NO: 3122613 - RNA, 19 nt, Artificial Sequence
  Description of Artificial Sequence: Synthetic oligonucleotide
uguagacucagagcuaccc

SEQ ID NO: 3122614 - RNA, 19 nt, Artificial Sequence
  Description of Artificial Sequence: Synthetic oligonucleotide
uucauugaugauucucugu

SEQ ID NO: 3122615 - RNA, 19 nt, Artificial Sequence
  Description of Artificial Sequence: Synthetic oligonucleotide
uucuuccucgucaagguau

SEQ ID NO: 3122616 - RNA, 19 nt, Artificial Sequence
  Description of Artificial Sequence: Synthetic oligonucleotide
aguucauugaugauucucu

SEQ ID NO: 3122617 - RNA, 19 nt, Artificial Sequence
  Description of Artificial Sequence: Synthetic oligonucleotide
ucaagguauucaguggugc

SEQ ID NO: 3122618 - RNA, 19 nt, Artificial Sequence
  Description of Artificial Sequence: Synthetic oligonucleotide
augauucucugucgccucc

SEQ ID NO: 3122619 - RNA, 19 nt, Artificial Sequence
  Description of Artificial Sequence: Synthetic oligonucleotide
gccaucuucaaguacuggg

SEQ ID NO: 3122620 - RNA, 19 nt, Artificial Sequence
  Description of Artificial Sequence: Synthetic oligonucleotide
aaguacugggagcucagau

SEQ ID NO: 3122621 - RNA, 19 nt, Artificial Sequence
  Description of Artificial Sequence: Synthetic oligonucleotide
ucaaguacugggagcucag

SEQ ID NO: 3122622 - RNA, 19 nt, Artificial Sequence
  Description of Artificial Sequence: Synthetic oligonucleotide
cagauguagacucagagcu

SEQ ID NO: 3122623 - RNA, 19 nt, Artificial Sequence
  Description of Artificial Sequence: Synthetic oligonucleotide
uugaugauucucugucgcc

SEQ ID NO: 3122624 - RNA, 19 nt, Artificial Sequence
  Description of Artificial Sequence: Synthetic oligonucleotide
gaauccacagccaucuuca

SEQ ID NO: 3122625 - RNA, 19 nt, Artificial Sequence
  Description of Artificial Sequence: Synthetic oligonucleotide
acagcucuaacacgggcug

SEQ ID NO: 3122626 - RNA, 19 nt, Artificial Sequence
  Description of Artificial Sequence: Synthetic oligonucleotide
ugcagcuucuuucucuuuc

SEQ ID NO: 3122627 - RNA, 19 nt, Artificial Sequence
  Description of Artificial Sequence: Synthetic oligonucleotide
gauaagugacagcucuaac

SEQ ID NO: 3122628 - RNA, 19 nt, Artificial Sequence
  Description of Artificial Sequence: Synthetic oligonucleotide
ugaugauucucugucgccu

SEQ ID NO: 3122629 - RNA, 19 nt, Artificial Sequence
  Description of Artificial Sequence: Synthetic oligonucleotide
uccuccaggugauaaguga

SEQ ID NO: 3122630 - RNA, 19 nt, Artificial Sequence
  Description of Artificial Sequence: Synthetic oligonucleotide
acagccaucuucaaguacu

SEQ ID NO: 3122631 - RNA, 19 nt, Artificial Sequence
  Description of Artificial Sequence: Synthetic oligonucleotide
ugcccucucuucuuccucg

SEQ ID NO: 3122632 - RNA, 19 nt, Artificial Sequence
  Description of Artificial Sequence: Synthetic oligonucleotide
ugauaagugacagcucuaa

SEQ ID NO: 3122633 - RNA, 19 nt, Artificial Sequence
  Description of Artificial Sequence: Synthetic oligonucleotide
uucaaguacugggagcuca

SEQ ID NO: 3122634 - RNA, 19 nt, Artificial Sequence
  Description of Artificial Sequence: Synthetic oligonucleotide
aacacgggcuggaauguuc

SEQ ID NO: 3122635 - RNA, 19 nt, Artificial Sequence
  Description of Artificial Sequence: Synthetic oligonucleotide
ggagcucagauguagacuc

SEQ ID NO: 3122636 - RNA, 19 nt, Artificial Sequence
  Description of Artificial Sequence: Synthetic oligonucleotide
guagacucagagcuacccc

SEQ ID NO: 3122637 - RNA, 19 nt, Artificial Sequence
  Description of Artificial Sequence: Synthetic oligonucleotide
ucucugucgccuccucagg

SEQ ID NO: 3122638 - RNA, 19 nt, Artificial Sequence
  Description of Artificial Sequence: Synthetic oligonucleotide
acugggagcucagauguag

SEQ ID NO: 3122639 - RNA, 19 nt, Artificial Sequence
  Description of Artificial Sequence: Synthetic oligonucleotide
uugggccuucuucaguuca

SEQ ID NO: 3122640 - RNA, 19 nt, Artificial Sequence
  Description of Artificial Sequence: Synthetic oligonucleotide
cauagguugcccucucuuc

SEQ ID NO: 3122641 - RNA, 19 nt, Artificial Sequence
  Description of Artificial Sequence: Synthetic oligonucleotide
gaugauucucugucgccuc

SEQ ID NO: 3122642 - RNA, 19 nt, Artificial Sequence
  Description of Artificial Sequence: Synthetic oligonucleotide
auccacagccaucuucaag

SEQ ID NO: 3122643 - RNA, 19 nt, Artificial Sequence
  Description of Artificial Sequence: Synthetic oligonucleotide
ucaguggugccgaggaauc

SEQ ID NO: 3122644 - RNA, 19 nt, Artificial Sequence
  Description of Artificial Sequence: Synthetic oligonucleotide
ugggagcucagauguagac

SEQ ID NO: 3122645 - RNA, 19 nt, Artificial Sequence
  Description of Artificial Sequence: Synthetic oligonucleotide
uuccaaaugcagcuucuuu

SEQ ID NO: 3122646 - RNA, 19 nt, Artificial Sequence
  Description of Artificial Sequence: Synthetic oligonucleotide
acgggcuggaauguucccc

SEQ ID NO: 3122647 - RNA, 19 nt, Artificial Sequence
  Description of Artificial Sequence: Synthetic oligonucleotide
acacgggcuggaauguucc

SEQ ID NO: 3122648 - RNA, 19 nt, Artificial Sequence
  Description of Artificial Sequence: Synthetic oligonucleotide
uucaguggugccgaggaau

SEQ ID NO: 3122649 - RNA, 19 nt, Artificial Sequence
  Description of Artificial Sequence: Synthetic oligonucleotide
guacugggagcucagaugu

SEQ ID NO: 3122650 - RNA, 19 nt, Artificial Sequence
  Description of Artificial Sequence: Synthetic oligonucleotide
ucuuucuucuccagagcuu

SEQ ID NO: 3122651 - RNA, 19 nt, Artificial Sequence
  Description of Artificial Sequence: Synthetic oligonucleotide
ugugcauagguugcccucu

SEQ ID NO: 3122652 - RNA, 19 nt, Artificial Sequence
  Description of Artificial Sequence: Synthetic oligonucleotide
auugggccuucuucaguuc

SEQ ID NO: 3122653 - RNA, 19 nt, Artificial Sequence
  Description of Artificial Sequence: Synthetic oligonucleotide
uuccucgucaagguauuca

SEQ ID NO: 3122654 - RNA, 19 nt, Artificial Sequence
  Description of Artificial Sequence: Synthetic oligonucleotide
ggugccgaggaauccacag

SEQ ID NO: 3122655 - RNA, 19 nt, Artificial Sequence
  Description of Artificial Sequence: Synthetic oligonucleotide
guauucaguggugccgagg

SEQ ID NO: 3122656 - RNA, 19 nt, Artificial Sequence
  Description of Artificial Sequence: Synthetic oligonucleotide
caguucauugaugauucuc

SEQ ID NO: 3122657 - RNA, 19 nt, Artificial Sequence
  Description of Artificial Sequence: Synthetic oligonucleotide
caggugauaagugacagcu

SEQ ID NO: 3122658 - RNA, 19 nt, Artificial Sequence
  Description of Artificial Sequence: Synthetic oligonucleotide
agguugcccucucuucuuc

SEQ ID NO: 3122659 - RNA, 19 nt, Artificial Sequence
  Description of Artificial Sequence: Synthetic oligonucleotide
gaggaauccacagccaucu

SEQ ID NO: 3122660 - RNA, 19 nt, Artificial Sequence
  Description of Artificial Sequence: Synthetic oligonucleotide
agcucagauguagacucag

SEQ ID NO: 3122661 - RNA, 19 nt, Artificial Sequence
  Description of Artificial Sequence: Synthetic oligonucleotide
cugucgccuccucaggucc

SEQ ID NO: 3122662 - RNA, 19 nt, Artificial Sequence
  Description of Artificial Sequence: Synthetic oligonucleotide
agguccuccaggugauaag

SEQ ID NO: 3122663 - RNA, 19 nt, Artificial Sequence
  Description of Artificial Sequence: Synthetic oligonucleotide
ggaauccacagccaucuuc

SEQ ID NO: 3122664 - RNA, 19 nt, Artificial Sequence
  Description of Artificial Sequence: Synthetic oligonucleotide
ucugucgccuccucagguc

SEQ ID NO: 3122665 - RNA, 19 nt, Artificial Sequence
  Description of Artificial Sequence: Synthetic oligonucleotide
ucaguucauugaugauucu

SEQ ID NO: 3122666 - RNA, 19 nt, Artificial Sequence
  Description of Artificial Sequence: Synthetic oligonucleotide
agguauucaguggugccga

SEQ ID NO: 3122667 - RNA, 19 nt, Artificial Sequence
  Description of Artificial Sequence: Synthetic oligonucleotide
ugcauagguugcccucucu

SEQ ID NO: 3122668 - RNA, 19 nt, Artificial Sequence
  Description of Artificial Sequence: Synthetic oligonucleotide
aguggugccgaggaaucca

SEQ ID NO: 3122669 - RNA, 19 nt, Artificial Sequence
  Description of Artificial Sequence: Synthetic oligonucleotide
cugugcauagguugcccuc

SEQ ID NO: 3122670 - RNA, 19 nt, Artificial Sequence
  Description of Artificial Sequence: Synthetic oligonucleotide
auguagacucagagcuacc

SEQ ID NO: 3122671 - RNA, 19 nt, Artificial Sequence
  Description of Artificial Sequence: Synthetic oligonucleotide
gucaagguauucaguggug

SEQ ID NO: 3122672 - RNA, 19 nt, Artificial Sequence
  Description of Artificial Sequence: Synthetic oligonucleotide
uccucagguccuccaggug

SEQ ID NO: 3122673 - RNA, 19 nt, Artificial Sequence
  Description of Artificial Sequence: Synthetic oligonucleotide
cacagccaucuucaaguac

SEQ ID NO: 3122674 - RNA, 19 nt, Artificial Sequence
  Description of Artificial Sequence: Synthetic oligonucleotide
cucuuucuucuccagagcu

SEQ ID NO: 3122675 - RNA, 19 nt, Artificial Sequence
  Description of Artificial Sequence: Synthetic oligonucleotide
gugccgaggaauccacagc

SEQ ID NO: 3122676 - RNA, 19 nt, Artificial Sequence
  Description of Artificial Sequence: Synthetic oligonucleotide
cagccaucuucaaguacug

SEQ ID NO: 3122677 - RNA, 19 nt, Artificial Sequence
  Description of Artificial Sequence: Synthetic oligonucleotide
agccaucuucaaguacugg

SEQ ID NO: 3122678 - RNA, 19 nt, Artificial Sequence
  Description of Artificial Sequence: Synthetic oligonucleotide
aggugauaagugacagcuc

SEQ ID NO: 3122679 - RNA, 19 nt, Artificial Sequence
  Description of Artificial Sequence: Synthetic oligonucleotide
gauucucugucgccuccuc

SEQ ID NO: 3122680 - RNA, 19 nt, Artificial Sequence
  Description of Artificial Sequence: Synthetic oligonucleotide
uuuccaaaugcagcuucuu

SEQ ID NO: 3122681 - RNA, 19 nt, Artificial Sequence
  Description of Artificial Sequence: Synthetic oligonucleotide
ccuccaggugauaagugac

SEQ ID NO: 3122682 - RNA, 19 nt, Artificial Sequence
  Description of Artificial Sequence: Synthetic oligonucleotide
agcucuaacacgggcugga

SEQ ID NO: 3122683 - RNA, 19 nt, Artificial Sequence
  Description of Artificial Sequence: Synthetic oligonucleotide
gacagcucuaacacgggcu

SEQ ID NO: 3122684 - RNA, 19 nt, Artificial Sequence
  Description of Artificial Sequence: Synthetic oligonucleotide
ugauucucugucgccuccu

SEQ ID NO: 3122685 - RNA, 19 nt, Artificial Sequence
  Description of Artificial Sequence: Synthetic oligonucleotide
uugcccucucuucuuccuc

SEQ ID NO: 3122686 - RNA, 19 nt, Artificial Sequence
  Description of Artificial Sequence: Synthetic oligonucleotide
ugggccuucuucaguucau

SEQ ID NO: 3122687 - RNA, 19 nt, Artificial Sequence
  Description of Artificial Sequence: Synthetic oligonucleotide
uucuuuccaaaugcagcuu

SEQ ID NO: 3122688 - RNA, 19 nt, Artificial Sequence
  Description of Artificial Sequence: Synthetic oligonucleotide
ggccuucuucaguucauug

SEQ ID NO: 3122689 - RNA, 19 nt, Artificial Sequence
  Description of Artificial Sequence: Synthetic oligonucleotide
uggugccgaggaauccaca

SEQ ID NO: 3122690 - RNA, 19 nt, Artificial Sequence
  Description of Artificial Sequence: Synthetic oligonucleotide
uagguugcccucucuucuu

SEQ ID NO: 3122691 - RNA, 19 nt, Artificial Sequence
  Description of Artificial Sequence: Synthetic oligonucleotide
ugucgccuccucagguccu

SEQ ID NO: 3122692 - RNA, 19 nt, Artificial Sequence
  Description of Artificial Sequence: Synthetic oligonucleotide
cuuuccaaaugcagcuucu

SEQ ID NO: 3122693 - RNA, 19 nt, Artificial Sequence
  Description of Artificial Sequence: Synthetic oligonucleotide
auucaguggugccgaggaa

SEQ ID NO: 3122694 - RNA, 19 nt, Artificial Sequence
  Description of Artificial Sequence: Synthetic oligonucleotide
cacgggcuggaauguuccc

SEQ ID NO: 3122695 - RNA, 19 nt, Artificial Sequence
  Description of Artificial Sequence: Synthetic oligonucleotide
ccaggugauaagugacagc

SEQ ID NO: 3122696 - RNA, 19 nt, Artificial Sequence
  Description of Artificial Sequence: Synthetic oligonucleotide
gguugcccucucuucuucc

SEQ ID NO: 3122697 - RNA, 19 nt, Artificial Sequence
  Description of Artificial Sequence: Synthetic oligonucleotide
gguauucaguggugccgag

SEQ ID NO: 3122698 - RNA, 19 nt, Artificial Sequence
  Description of Artificial Sequence: Synthetic oligonucleotide
cagcucuaacacgggcugg

SEQ ID NO: 3122699 - RNA, 19 nt, Artificial Sequence
  Description of Artificial Sequence: Synthetic oligonucleotide
cugggagcucagauguaga

SEQ ID NO: 3122700 - RNA, 19 nt, Artificial Sequence
  Description of Artificial Sequence: Synthetic oligonucleotide
cauugggccuucuucaguu

SEQ ID NO: 3122701 - RNA, 19 nt, Artificial Sequence
  Description of Artificial Sequence: Synthetic oligonucleotide
caguggugccgaggaaucc

SEQ ID NO: 3122702 - RNA, 19 nt, Artificial Sequence
  Description of Artificial Sequence: Synthetic oligonucleotide
agauguagacucagagcua

SEQ ID NO: 3122703 - RNA, 19 nt, Artificial Sequence
  Description of Artificial Sequence: Synthetic oligonucleotide
uacugggagcucagaugua

SEQ ID NO: 3122704 - RNA, 19 nt, Artificial Sequence
  Description of Artificial Sequence: Synthetic oligonucleotide
ccucagguccuccagguga

SEQ ID NO: 3122705 - RNA, 19 nt, Artificial Sequence
  Description of Artificial Sequence: Synthetic oligonucleotide
cuucaaguacugggagcuc

SEQ ID NO: 3122706 - RNA, 19 nt, Artificial Sequence
  Description of Artificial Sequence: Synthetic oligonucleotide
ccaaaugcagcuucuuucu

SEQ ID NO: 3122707 - RNA, 19 nt, Artificial Sequence
  Description of Artificial Sequence: Synthetic oligonucleotide
cccauugggccuucuucag

SEQ ID NO: 3122708 - RNA, 19 nt, Artificial Sequence
  Description of Artificial Sequence: Synthetic oligonucleotide
gagcucagauguagacuca

SEQ ID NO: 3122709 - RNA, 19 nt, Artificial Sequence
  Description of Artificial Sequence: Synthetic oligonucleotide
cuucuuccucgucaaggua

SEQ ID NO: 3122710 - RNA, 19 nt, Artificial Sequence
  Description of Artificial Sequence: Synthetic oligonucleotide
guggugccgaggaauccac

SEQ ID NO: 3122711 - RNA, 19 nt, Artificial Sequence
  Description of Artificial Sequence: Synthetic oligonucleotide
guugcccucucuucuuccu

SEQ ID NO: 3122712 - RNA, 19 nt, Artificial Sequence
  Description of Artificial Sequence: Synthetic oligonucleotide
gugcauagguugcccucuc

SEQ ID NO: 3122713 - RNA, 19 nt, Artificial Sequence
  Description of Artificial Sequence: Synthetic oligonucleotide
gugauaagugacagcucua

SEQ ID NO: 3122714 - RNA, 19 nt, Artificial Sequence
  Description of Artificial Sequence: Synthetic oligonucleotide
ccccauugggccuucuuca

SEQ ID NO: 3122715 - RNA, 19 nt, Artificial Sequence
  Description of Artificial Sequence: Synthetic oligonucleotide
cuaacacgggcuggaaugu

SEQ ID NO: 3122716 - RNA, 19 nt, Artificial Sequence
  Description of Artificial Sequence: Synthetic oligonucleotide
cuccucagguccuccaggu

SEQ ID NO: 3122717 - RNA, 19 nt, Artificial Sequence
  Description of Artificial Sequence: Synthetic oligonucleotide
aggaauccacagccaucuu

SEQ ID NO: 3122718 - RNA, 19 nt, Artificial Sequence
  Description of Artificial Sequence: Synthetic oligonucleotide
augcagcuucuuucucuuu

SEQ ID NO: 3122719 - RNA, 19 nt, Artificial Sequence
  Description of Artificial Sequence: Synthetic oligonucleotide
caaguacugggagcucaga

SEQ ID NO: 3122720 - RNA, 19 nt, Artificial Sequence
  Description of Artificial Sequence: Synthetic oligonucleotide
cgaggaauccacagccauc

SEQ ID NO: 3122721 - RNA, 19 nt, Artificial Sequence
  Description of Artificial Sequence: Synthetic oligonucleotide
cucuaacacgggcuggaau

SEQ ID NO: 3122722 - RNA, 19 nt, Artificial Sequence
  Description of Artificial Sequence: Synthetic oligonucleotide
cucugucgccuccucaggu

SEQ ID NO: 3122723 - RNA, 19 nt, Artificial Sequence
  Description of Artificial Sequence: Synthetic oligonucleotide
gggagcucagauguagacu

SEQ ID NO: 3122724 - RNA, 19 nt, Artificial Sequence
  Description of Artificial Sequence: Synthetic oligonucleotide
ucagguccuccaggugaua

SEQ ID NO: 3122725 - RNA, 19 nt, Artificial Sequence
  Description of Artificial Sequence: Synthetic oligonucleotide
gcucagauguagacucaga

SEQ ID NO: 3122726 - RNA, 19 nt, Artificial Sequence
  Description of Artificial Sequence: Synthetic oligonucleotide
cgucaagguauucaguggu

SEQ ID NO: 3122727 - RNA, 19 nt, Artificial Sequence
  Description of Artificial Sequence: Synthetic oligonucleotide
gcauagguugcccucucuu

SEQ ID NO: 3122728 - RNA, 19 nt, Artificial Sequence
  Description of Artificial Sequence: Synthetic oligonucleotide
gucgccuccucagguccuc

SEQ ID NO: 3122729 - RNA, 19 nt, Artificial Sequence
  Description of Artificial Sequence: Synthetic oligonucleotide
ccucgucaagguauucagu

SEQ ID NO: 3122730 - RNA, 19 nt, Artificial Sequence
  Description of Artificial Sequence: Synthetic oligonucleotide
ccacagccaucuucaagua

SEQ ID NO: 3122731 - RNA, 19 nt, Artificial Sequence
  Description of Artificial Sequence: Synthetic oligonucleotide
ccgaggaauccacagccau

SEQ ID NO: 3122732 - RNA, 19 nt, Artificial Sequence
  Description of Artificial Sequence: Synthetic oligonucleotide
gcucuaacacgggcuggaa

SEQ ID NO: 3122733 - RNA, 19 nt, Artificial Sequence
  Description of Artificial Sequence: Synthetic oligonucleotide
ccauugggccuucuucagu

SEQ ID NO: 3122734 - RNA, 19 nt, Artificial Sequence
  Description of Artificial Sequence: Synthetic oligonucleotide
gggccuucuucaguucauu

SEQ ID NO: 3122735 - RNA, 19 nt, Artificial Sequence
  Description of Artificial Sequence: Synthetic oligonucleotide
uaaaaggugacaucgaugg

SEQ ID NO: 3122736 - RNA, 19 nt, Artificial Sequence
  Description of Artificial Sequence: Synthetic oligonucleotide
cuuuuaaaaggugacaucg

SEQ ID NO: 3122737 - RNA, 19 nt, Artificial Sequence
  Description of Artificial Sequence: Synthetic oligonucleotide
uuugcugacaaacacugag

SEQ ID NO: 3122738 - RNA, 19 nt, Artificial Sequence
  Description of Artificial Sequence: Synthetic oligonucleotide
aaaggugacaucgaugggg

SEQ ID NO: 3122739 - RNA, 19 nt, Artificial Sequence
  Description of Artificial Sequence: Synthetic oligonucleotide
gaugcgaucugugagaucc

SEQ ID NO: 3122740 - RNA, 19 nt, Artificial Sequence
  Description of Artificial Sequence: Synthetic oligonucleotide
cugacaaacacugagcacg

SEQ ID NO: 3122741 - RNA, 19 nt, Artificial Sequence
  Description of Artificial Sequence: Synthetic oligonucleotide
uuaaaaggugacaucgaug

SEQ ID NO: 3122742 - RNA, 19 nt, Artificial Sequence
  Description of Artificial Sequence: Synthetic oligonucleotide
auacucuggaaacugggcg

SEQ ID NO: 3122743 - RNA, 19 nt, Artificial Sequence
  Description of Artificial Sequence: Synthetic oligonucleotide
ucauacucuggaaacuggg

SEQ ID NO: 3122744 - RNA, 19 nt, Artificial Sequence
  Description of Artificial Sequence: Synthetic oligonucleotide
aaacugggcgcucuccacc

SEQ ID NO: 3122745 - RNA, 19 nt, Artificial Sequence
  Description of Artificial Sequence: Synthetic oligonucleotide
acaucgauggggaaguucc

SEQ ID NO: 3122746 - RNA, 19 nt, Artificial Sequence
  Description of Artificial Sequence: Synthetic oligonucleotide
uuuaaaaggugacaucgau

SEQ ID NO: 3122747 - RNA, 19 nt, Artificial Sequence
  Description of Artificial Sequence: Synthetic oligonucleotide
acaaacacugagcacgauc

SEQ ID NO: 3122748 - RNA, 19 nt, Artificial Sequence
  Description of Artificial Sequence: Synthetic oligonucleotide
uacacaaagcaguacuugc

SEQ ID NO: 3122749 - RNA, 19 nt, Artificial Sequence
  Description of Artificial Sequence: Synthetic oligonucleotide
acuuuuaaaaggugacauc

SEQ ID NO: 3122750 - RNA, 19 nt, Artificial Sequence
  Description of Artificial Sequence: Synthetic oligonucleotide
ugguacuuuuaaaagguga

SEQ ID NO: 3122751 - RNA, 19 nt, Artificial Sequence
  Description of Artificial Sequence: Synthetic oligonucleotide
ugcugacaaacacugagca

SEQ ID NO: 3122752 - RNA, 19 nt, Artificial Sequence
  Description of Artificial Sequence: Synthetic oligonucleotide
gguugguacuuuuaaaagg

SEQ ID NO: 3122753 - RNA, 19 nt, Artificial Sequence
  Description of Artificial Sequence: Synthetic oligonucleotide
acugagcacgaucuguggc

SEQ ID NO: 3122754 - RNA, 19 nt, Artificial Sequence
  Description of Artificial Sequence: Synthetic oligonucleotide
uuuuaaaaggugacaucga

SEQ ID NO: 3122755 - RNA, 19 nt, Artificial Sequence
  Description of Artificial Sequence: Synthetic oligonucleotide
aaaaggugacaucgauggg

SEQ ID NO: 3122756 - RNA, 19 nt, Artificial Sequence
  Description of Artificial Sequence: Synthetic oligonucleotide
uggccauacacaaagcagu

SEQ ID NO: 3122757 - RNA, 19 nt, Artificial Sequence
  Description of Artificial Sequence: Synthetic oligonucleotide
uacuuuuaaaaggugacau

SEQ ID NO: 3122758 - RNA, 19 nt, Artificial Sequence
  Description of Artificial Sequence: Synthetic oligonucleotide
uacaucuuggcucuuggau

SEQ ID NO: 3122759 - RNA, 19 nt, Artificial Sequence
  Description of Artificial Sequence: Synthetic oligonucleotide
cuuggaugcgaucugugag

SEQ ID NO: 3122760 - RNA, 19 nt, Artificial Sequence
  Description of Artificial Sequence: Synthetic oligonucleotide
gucaucauacucuggaaac

SEQ ID NO: 3122761 - RNA, 19 nt, Artificial Sequence
  Description of Artificial Sequence: Synthetic oligonucleotide
caucuuggcucuuggaugc

SEQ ID NO: 3122762 - RNA, 19 nt, Artificial Sequence
  Description of Artificial Sequence: Synthetic oligonucleotide
aaagcaguacuugcaguag

SEQ ID NO: 3122763 - RNA, 19 nt, Artificial Sequence
  Description of Artificial Sequence: Synthetic oligonucleotide
uacucuggaaacugggcgc

SEQ ID NO: 3122764 - RNA, 19 nt, Artificial Sequence
  Description of Artificial Sequence: Synthetic oligonucleotide
cuggccauacacaaagcag

SEQ ID NO: 3122765 - RNA, 19 nt, Artificial Sequence
  Description of Artificial Sequence: Synthetic oligonucleotide
uugcugacaaacacugagc

SEQ ID NO: 3122766 - RNA, 19 nt, Artificial Sequence
  Description of Artificial Sequence: Synthetic oligonucleotide
gaggucaucauacucugga

SEQ ID NO: 3122767 - RNA, 19 nt, Artificial Sequence
  Description of Artificial Sequence: Synthetic oligonucleotide
cauacucuggaaacugggc

SEQ ID NO: 3122768 - RNA, 19 nt, Artificial Sequence
  Description of Artificial Sequence: Synthetic oligonucleotide
aguacuugcaguagagguc

SEQ ID NO: 3122769 - RNA, 19 nt, Artificial Sequence
  Description of Artificial Sequence: Synthetic oligonucleotide
guccuggccauacacaaag

SEQ ID NO: 3122770 - RNA, 19 nt, Artificial Sequence
  Description of Artificial Sequence: Synthetic oligonucleotide
uagaggucaucauacucug

SEQ ID NO: 3122771 - RNA, 19 nt, Artificial Sequence
  Description of Artificial Sequence: Synthetic oligonucleotide
cacaaagcaguacuugcag

SEQ ID NO: 3122772 - RNA, 19 nt, Artificial Sequence
  Description of Artificial Sequence: Synthetic oligonucleotide
uugguacuuuuaaaaggug

SEQ ID NO: 3122773 - RNA, 19 nt, Artificial Sequence
  Description of Artificial Sequence: Synthetic oligonucleotide
cugagcacgaucuguggcc

SEQ ID NO: 3122774 - RNA, 19 nt, Artificial Sequence
  Description of Artificial Sequence: Synthetic oligonucleotide
uuggaugcgaucugugaga

SEQ ID NO: 3122775 - RNA, 19 nt, Artificial Sequence
  Description of Artificial Sequence: Synthetic oligonucleotide
ugcaguagaggucaucaua

SEQ ID NO: 3122776 - RNA, 19 nt, Artificial Sequence
  Description of Artificial Sequence: Synthetic oligonucleotide
auggggaaguuccacacca

SEQ ID NO: 3122777 - RNA, 19 nt, Artificial Sequence
  Description of Artificial Sequence: Synthetic oligonucleotide
uugccguacaucuuggcuc

SEQ ID NO: 3122778 - RNA, 19 nt, Artificial Sequence
  Description of Artificial Sequence: Synthetic oligonucleotide
aacacugagcacgaucugu

SEQ ID NO: 3122779 - RNA, 19 nt, Artificial Sequence
  Description of Artificial Sequence: Synthetic oligonucleotide
ggaaguuccacaccagugc

SEQ ID NO: 3122780 - RNA, 19 nt, Artificial Sequence
  Description of Artificial Sequence: Synthetic oligonucleotide
aagcaguacuugcaguaga

SEQ ID NO: 3122781 - RNA, 19 nt, Artificial Sequence
  Description of Artificial Sequence: Synthetic oligonucleotide
uccacaccagugcuugccg

SEQ ID NO: 3122782 - RNA, 19 nt, Artificial Sequence
  Description of Artificial Sequence: Synthetic oligonucleotide
ugacaaacacugagcacga

SEQ ID NO: 3122783 - RNA, 19 nt, Artificial Sequence
  Description of Artificial Sequence: Synthetic oligonucleotide
auacacaaagcaguacuug

SEQ ID NO: 3122784 - RNA, 19 nt, Artificial Sequence
  Description of Artificial Sequence: Synthetic oligonucleotide
aaacacugagcacgaucug

SEQ ID NO: 3122785 - RNA, 19 nt, Artificial Sequence
  Description of Artificial Sequence: Synthetic oligonucleotide
uagggguugguacuuuuaa

SEQ ID NO: 3122786 - RNA, 19 nt, Artificial Sequence
  Description of Artificial Sequence: Synthetic oligonucleotide
acaaagcaguacuugcagu

SEQ ID NO: 3122787 - RNA, 19 nt, Artificial Sequence
  Description of Artificial Sequence: Synthetic oligonucleotide
ggguugguacuuuuaaaag

SEQ ID NO: 3122788 - RNA, 19 nt, Artificial Sequence
  Description of Artificial Sequence: Synthetic oligonucleotide
ucaucauacucuggaaacu

SEQ ID NO: 3122789 - RNA, 19 nt, Artificial Sequence
  Description of Artificial Sequence: Synthetic oligonucleotide
uuuugcugacaaacacuga

SEQ ID NO: 3122790 - RNA, 19 nt, Artificial Sequence
  Description of Artificial Sequence: Synthetic oligonucleotide
gauggggaaguuccacacc

SEQ ID NO: 3122791 - RNA, 19 nt, Artificial Sequence
  Description of Artificial Sequence: Synthetic oligonucleotide
aguuccacaccagugcuug

SEQ ID NO: 3122792 - RNA, 19 nt, Artificial Sequence
  Description of Artificial Sequence: Synthetic oligonucleotide
caaacacugagcacgaucu

SEQ ID NO: 3122793 - RNA, 19 nt, Artificial Sequence
  Description of Artificial Sequence: Synthetic oligonucleotide
ugcuugccguacaucuugg

SEQ ID NO: 3122794 - RNA, 19 nt, Artificial Sequence
  Description of Artificial Sequence: Synthetic oligonucleotide
gguacuuuuaaaaggugac

SEQ ID NO: 3122795 - RNA, 19 nt, Artificial Sequence
  Description of Artificial Sequence: Synthetic oligonucleotide
caucauacucuggaaacug

SEQ ID NO: 3122796 - RNA, 19 nt, Artificial Sequence
  Description of Artificial Sequence: Synthetic oligonucleotide
aaggugacaucgaugggga

SEQ ID NO: 3122797 - RNA, 19 nt, Artificial Sequence
  Description of Artificial Sequence: Synthetic oligonucleotide
ucgauggggaaguuccaca

SEQ ID NO: 3122798 - RNA, 19 nt, Artificial Sequence
  Description of Artificial Sequence: Synthetic oligonucleotide
aucauacucuggaaacugg

SEQ ID NO: 3122799 - RNA, 19 nt, Artificial Sequence
  Description of Artificial Sequence: Synthetic oligonucleotide
guugguacuuuuaaaaggu

SEQ ID NO: 3122800 - RNA, 19 nt, Artificial Sequence
  Description of Artificial Sequence: Synthetic oligonucleotide
aacugggcgcucuccaccu

SEQ ID NO: 3122801 - RNA, 19 nt, Artificial Sequence
  Description of Artificial Sequence: Synthetic oligonucleotide
guacuugcaguagagguca

SEQ ID NO: 3122802 - RNA, 19 nt, Artificial Sequence
  Description of Artificial Sequence: Synthetic oligonucleotide
uguggccagccauaggggu

SEQ ID NO: 3122803 - RNA, 19 nt, Artificial Sequence
  Description of Artificial Sequence: Synthetic oligonucleotide
ugccguacaucuuggcucu

SEQ ID NO: 3122804 - RNA, 19 nt, Artificial Sequence
  Description of Artificial Sequence: Synthetic oligonucleotide
cagccauagggguugguac

SEQ ID NO: 3122805 - RNA, 19 nt, Artificial Sequence
  Description of Artificial Sequence: Synthetic oligonucleotide
caaagcaguacuugcagua

SEQ ID NO: 3122806 - RNA, 19 nt, Artificial Sequence
  Description of Artificial Sequence: Synthetic oligonucleotide
uggcucuuggaugcgaucu

SEQ ID NO: 3122807 - RNA, 19 nt, Artificial Sequence
  Description of Artificial Sequence: Synthetic oligonucleotide
gaaacugggcgcucuccac

SEQ ID NO: 3122808 - RNA, 19 nt, Artificial Sequence
  Description of Artificial Sequence: Synthetic oligonucleotide
agcaguacuugcaguagag

SEQ ID NO: 3122809 - RNA, 19 nt, Artificial Sequence
  Description of Artificial Sequence: Synthetic oligonucleotide
agcacgaucuguggccagc

SEQ ID NO: 3122810 - RNA, 19 nt, Artificial Sequence
  Description of Artificial Sequence: Synthetic oligonucleotide
agccauagggguugguacu

SEQ ID NO: 3122811 - RNA, 19 nt, Artificial Sequence
  Description of Artificial Sequence: Synthetic oligonucleotide
ggugacaucgauggggaag

SEQ ID NO: 3122812 - RNA, 19 nt, Artificial Sequence
  Description of Artificial Sequence: Synthetic oligonucleotide
cacugagcacgaucugugg

SEQ ID NO: 3122813 - RNA, 19 nt, Artificial Sequence
  Description of Artificial Sequence: Synthetic oligonucleotide
guacuuuuaaaaggugaca

SEQ ID NO: 3122814 - RNA, 19 nt, Artificial Sequence
  Description of Artificial Sequence: Synthetic oligonucleotide
uggggaaguuccacaccag

SEQ ID NO: 3122815 - RNA, 19 nt, Artificial Sequence
  Description of Artificial Sequence: Synthetic oligonucleotide
gaucuguggccagccauag

SEQ ID NO: 3122816 - RNA, 19 nt, Artificial Sequence
  Description of Artificial Sequence: Synthetic oligonucleotide
gcaguagaggucaucauac

SEQ ID NO: 3122817 - RNA, 19 nt, Artificial Sequence
  Description of Artificial Sequence: Synthetic oligonucleotide
cuguggccagccauagggg

SEQ ID NO: 3122818 - RNA, 19 nt, Artificial Sequence
  Description of Artificial Sequence: Synthetic oligonucleotide
acacaaagcaguacuugca

SEQ ID NO: 3122819 - RNA, 19 nt, Artificial Sequence
  Description of Artificial Sequence: Synthetic oligonucleotide
gaaguuccacaccagugcu

SEQ ID NO: 3122820 - RNA, 19 nt, Artificial Sequence
  Description of Artificial Sequence: Synthetic oligonucleotide
gggguugguacuuuuaaaa

SEQ ID NO: 3122821 - RNA, 19 nt, Artificial Sequence
  Description of Artificial Sequence: Synthetic oligonucleotide
caguacuugcaguagaggu

SEQ ID NO: 3122822 - RNA, 19 nt, Artificial Sequence
  Description of Artificial Sequence: Synthetic oligonucleotide
acaccagugcuugccguac

SEQ ID NO: 3122823 - RNA, 19 nt, Artificial Sequence
  Description of Artificial Sequence: Synthetic oligonucleotide
ugagcacgaucuguggcca

SEQ ID NO: 3122824 - RNA, 19 nt, Artificial Sequence
  Description of Artificial Sequence: Synthetic oligonucleotide
ugcgaucugugagaucccc

SEQ ID NO: 3122825 - RNA, 19 nt, Artificial Sequence
  Description of Artificial Sequence: Synthetic oligonucleotide
acgaucuguggccagccau

SEQ ID NO: 3122826 - RNA, 19 nt, Artificial Sequence
  Description of Artificial Sequence: Synthetic oligonucleotide
ucuggaaacugggcgcucu

SEQ ID NO: 3122827 - RNA, 19 nt, Artificial Sequence
  Description of Artificial Sequence: Synthetic oligonucleotide
acacugagcacgaucugug

SEQ ID NO: 3122828 - RNA, 19 nt, Artificial Sequence
  Description of Artificial Sequence: Synthetic oligonucleotide
cucuuggaugcgaucugug

SEQ ID NO: 3122829 - RNA, 19 nt, Artificial Sequence
  Description of Artificial Sequence: Synthetic oligonucleotide
agggguugguacuuuuaaa

SEQ ID NO: 3122830 - RNA, 19 nt, Artificial Sequence
  Description of Artificial Sequence: Synthetic oligonucleotide
aggucaucauacucuggaa

SEQ ID NO: 3122831 - RNA, 19 nt, Artificial Sequence
  Description of Artificial Sequence: Synthetic oligonucleotide
acuugcaguagaggucauc

SEQ ID NO: 3122832 - RNA, 19 nt, Artificial Sequence
  Description of Artificial Sequence: Synthetic oligonucleotide
uccuccagacccgccgugg

SEQ ID NO: 3122833 - RNA, 19 nt, Artificial Sequence
  Description of Artificial Sequence: Synthetic oligonucleotide
uggaaacugggcgcucucc

SEQ ID NO: 3122834 - RNA, 19 nt, Artificial Sequence
  Description of Artificial Sequence: Synthetic oligonucleotide
ggucaucauacucuggaaa

SEQ ID NO: 3122835 - RNA, 19 nt, Artificial Sequence
  Description of Artificial Sequence: Synthetic oligonucleotide
uggccagccauagggguug

SEQ ID NO: 3122836 - RNA, 19 nt, Artificial Sequence
  Description of Artificial Sequence: Synthetic oligonucleotide
uggaugcgaucugugagau

SEQ ID NO: 3122837 - RNA, 19 nt, Artificial Sequence
  Description of Artificial Sequence: Synthetic oligonucleotide
gggaaguuccacaccagug

SEQ ID NO: 3122838 - RNA, 19 nt, Artificial Sequence
  Description of Artificial Sequence: Synthetic oligonucleotide
uugcaguagaggucaucau

SEQ ID NO: 3122839 - RNA, 19 nt, Artificial Sequence
  Description of Artificial Sequence: Synthetic oligonucleotide
agaggucaucauacucugg

SEQ ID NO: 3122840 - RNA, 19 nt, Artificial Sequence
  Description of Artificial Sequence: Synthetic oligonucleotide
caguccuggccauacacaa

SEQ ID NO: 3122841 - RNA, 19 nt, Artificial Sequence
  Description of Artificial Sequence: Synthetic oligonucleotide
acucuggaaacugggcgcu

SEQ ID NO: 3122842 - RNA, 19 nt, Artificial Sequence
  Description of Artificial Sequence: Synthetic oligonucleotide
cagugcuugccguacaucu

SEQ ID NO: 3122843 - RNA, 19 nt, Artificial Sequence
  Description of Artificial Sequence: Synthetic oligonucleotide
gcaguacuugcaguagagg

SEQ ID NO: 3122844 - RNA, 19 nt, Artificial Sequence
  Description of Artificial Sequence: Synthetic oligonucleotide
cugggcgcucuccaccugc

SEQ ID NO: 3122845 - RNA, 19 nt, Artificial Sequence
  Description of Artificial Sequence: Synthetic oligonucleotide
guacaucuuggcucuugga

SEQ ID NO: 3122846 - RNA, 19 nt, Artificial Sequence
  Description of Artificial Sequence: Synthetic oligonucleotide
gcugacaaacacugagcac

SEQ ID NO: 3122847 - RNA, 19 nt, Artificial Sequence
  Description of Artificial Sequence: Synthetic oligonucleotide
uuggcucuuggaugcgauc

SEQ ID NO: 3122848 - RNA, 19 nt, Artificial Sequence
  Description of Artificial Sequence: Synthetic oligonucleotide
cuugccguacaucuuggcu

SEQ ID NO: 3122849 - RNA, 19 nt, Artificial Sequence
  Description of Artificial Sequence: Synthetic oligonucleotide
cuccagacccgccgugggg

SEQ ID NO: 3122850 - RNA, 19 nt, Artificial Sequence
  Description of Artificial Sequence: Synthetic oligonucleotide
accagugcuugccguacau

SEQ ID NO: 3122851 - RNA, 19 nt, Artificial Sequence
  Description of Artificial Sequence: Synthetic oligonucleotide
ugggcgcucuccaccugcc

SEQ ID NO: 3122852 - RNA, 19 nt, Artificial Sequence
  Description of Artificial Sequence: Synthetic oligonucleotide
ggaaacugggcgcucucca

SEQ ID NO: 3122853 - RNA, 19 nt, Artificial Sequence
  Description of Artificial Sequence: Synthetic oligonucleotide
augcgaucugugagauccc

SEQ ID NO: 3122854 - RNA, 19 nt, Artificial Sequence
  Description of Artificial Sequence: Synthetic oligonucleotide
cauacacaaagcaguacuu

SEQ ID NO: 3122855 - RNA, 19 nt, Artificial Sequence
  Description of Artificial Sequence: Synthetic oligonucleotide
gagcacgaucuguggccag

SEQ ID NO: 3122856 - RNA, 19 nt, Artificial Sequence
  Description of Artificial Sequence: Synthetic oligonucleotide
cguacaucuuggcucuugg

SEQ ID NO: 3122857 - RNA, 19 nt, Artificial Sequence
  Description of Artificial Sequence: Synthetic oligonucleotide
gugacaucgauggggaagu

SEQ ID NO: 3122858 - RNA, 19 nt, Artificial Sequence
  Description of Artificial Sequence: Synthetic oligonucleotide
aucuuggcucuuggaugcg

SEQ ID NO: 3122859 - RNA, 19 nt, Artificial Sequence
  Description of Artificial Sequence: Synthetic oligonucleotide
ccauacacaaagcaguacu

SEQ ID NO: 3122860 - RNA, 19 nt, Artificial Sequence
  Description of Artificial Sequence: Synthetic oligonucleotide
aaguuccacaccagugcuu

SEQ ID NO: 3122861 - RNA, 19 nt, Artificial Sequence
  Description of Artificial Sequence: Synthetic oligonucleotide
ccuggccauacacaaagca

SEQ ID NO: 3122862 - RNA, 19 nt, Artificial Sequence
  Description of Artificial Sequence: Synthetic oligonucleotide
cuggaaacugggcgcucuc

SEQ ID NO: 3122863 - RNA, 19 nt, Artificial Sequence
  Description of Artificial Sequence: Synthetic oligonucleotide
cccaguccuggccauacac

SEQ ID NO: 3122864 - RNA, 19 nt, Artificial Sequence
  Description of Artificial Sequence: Synthetic oligonucleotide
auagggguugguacuuuua

SEQ ID NO: 3122865 - RNA, 19 nt, Artificial Sequence
  Description of Artificial Sequence: Synthetic oligonucleotide
cgauggggaaguuccacac

SEQ ID NO: 3122866 - RNA, 19 nt, Artificial Sequence
  Description of Artificial Sequence: Synthetic oligonucleotide
uacuugcaguagaggucau

SEQ ID NO: 3122867 - RNA, 19 nt, Artificial Sequence
  Description of Artificial Sequence: Synthetic oligonucleotide
cccuccuccagacccgccg

SEQ ID NO: 3122868 - RNA, 19 nt, Artificial Sequence
  Description of Artificial Sequence: Synthetic oligonucleotide
agugcuugccguacaucuu

SEQ ID NO: 3122869 - RNA, 19 nt, Artificial Sequence
  Description of Artificial Sequence: Synthetic oligonucleotide
gccauacacaaagcaguac

SEQ ID NO: 3122870 - RNA, 19 nt, Artificial Sequence
  Description of Artificial Sequence: Synthetic oligonucleotide
cacaccagugcuugccgua

SEQ ID NO: 3122871 - RNA, 19 nt, Artificial Sequence
  Description of Artificial Sequence: Synthetic oligonucleotide
aggugacaucgauggggaa

SEQ ID NO: 3122872 - RNA, 19 nt, Artificial Sequence
  Description of Artificial Sequence: Synthetic oligonucleotide
caguagaggucaucauacu

SEQ ID NO: 3122873 - RNA, 19 nt, Artificial Sequence
  Description of Artificial Sequence: Synthetic oligonucleotide
cuccuccagacccgccgug

SEQ ID NO: 3122874 - RNA, 19 nt, Artificial Sequence
  Description of Artificial Sequence: Synthetic oligonucleotide
aguccuggccauacacaaa

SEQ ID NO: 3122875 - RNA, 19 nt, Artificial Sequence
  Description of Artificial Sequence: Synthetic oligonucleotide
ggggaaguuccacaccagu

SEQ ID NO: 3122876 - RNA, 19 nt, Artificial Sequence
  Description of Artificial Sequence: Synthetic oligonucleotide
ccaguccuggccauacaca

SEQ ID NO: 3122877 - RNA, 19 nt, Artificial Sequence
  Description of Artificial Sequence: Synthetic oligonucleotide
ccuccagacccgccguggg

SEQ ID NO: 3122878 - RNA, 19 nt, Artificial Sequence
  Description of Artificial Sequence: Synthetic oligonucleotide
gcacgaucuguggccagcc

SEQ ID NO: 3122879 - RNA, 19 nt, Artificial Sequence
  Description of Artificial Sequence: Synthetic oligonucleotide
cacgaucuguggccagcca

SEQ ID NO: 3122880 - RNA, 19 nt, Artificial Sequence
  Description of Artificial Sequence: Synthetic oligonucleotide
cauagggguugguacuuuu

SEQ ID NO: 3122881 - RNA, 19 nt, Artificial Sequence
  Description of Artificial Sequence: Synthetic oligonucleotide
ggccauacacaaagcagua

SEQ ID NO: 3122882 - RNA, 19 nt, Artificial Sequence
  Description of Artificial Sequence: Synthetic oligonucleotide
ugacaucgauggggaaguu

SEQ ID NO: 3122883 - RNA, 19 nt, Artificial Sequence
  Description of Artificial Sequence: Synthetic oligonucleotide
cucuggaaacugggcgcuc

SEQ ID NO: 3122884 - RNA, 19 nt, Artificial Sequence
  Description of Artificial Sequence: Synthetic oligonucleotide
caccagugcuugccguaca

SEQ ID NO: 3122885 - RNA, 19 nt, Artificial Sequence
  Description of Artificial Sequence: Synthetic oligonucleotide
ggaugcgaucugugagauc

SEQ ID NO: 3122886 - RNA, 19 nt, Artificial Sequence
  Description of Artificial Sequence: Synthetic oligonucleotide
ggcccaguccuggccauac

SEQ ID NO: 3122887 - RNA, 19 nt, Artificial Sequence
  Description of Artificial Sequence: Synthetic oligonucleotide
ccguacaucuuggcucuug

SEQ ID NO: 3122888 - RNA, 19 nt, Artificial Sequence
  Description of Artificial Sequence: Synthetic oligonucleotide
gacaaacacugagcacgau

SEQ ID NO: 3122889 - RNA, 19 nt, Artificial Sequence
  Description of Artificial Sequence: Synthetic oligonucleotide
ccagugcuugccguacauc

SEQ ID NO: 3122890 - RNA, 19 nt, Artificial Sequence
  Description of Artificial Sequence: Synthetic oligonucleotide
gcucuuggaugcgaucugu

SEQ ID NO: 3122891 - RNA, 19 nt, Artificial Sequence
  Description of Artificial Sequence: Synthetic oligonucleotide
ccagccauagggguuggua

SEQ ID NO: 3122892 - RNA, 19 nt, Artificial Sequence
  Description of Artificial Sequence: Synthetic oligonucleotide
cgaucuguggccagccaua

SEQ ID NO: 3122893 - RNA, 19 nt, Artificial Sequence
  Description of Artificial Sequence: Synthetic oligonucleotide
guggccagccauagggguu

SEQ ID NO: 3122894 - RNA, 19 nt, Artificial Sequence
  Description of Artificial Sequence: Synthetic oligonucleotide
ggccagccauagggguugg

SEQ ID NO: 3122895 - RNA, 19 nt, Artificial Sequence
  Description of Artificial Sequence: Synthetic oligonucleotide
gcccaguccuggccauaca

SEQ ID NO: 3122896 - RNA, 19 nt, Artificial Sequence
  Description of Artificial Sequence: Synthetic oligonucleotide
ccacaccagugcuugccgu

SEQ ID NO: 3122897 - RNA, 19 nt, Artificial Sequence
  Description of Artificial Sequence: Synthetic oligonucleotide
ggggcccaguccuggccau

SEQ ID NO: 3122898 - RNA, 19 nt, Artificial Sequence
  Description of Artificial Sequence: Synthetic oligonucleotide
ccauagggguugguacuuu

SEQ ID NO: 3122899 - RNA, 19 nt, Artificial Sequence
  Description of Artificial Sequence: Synthetic oligonucleotide
gggcccaguccuggccaua

SEQ ID NO: 3122900 - RNA, 19 nt, Artificial Sequence
  Description of Artificial Sequence: Synthetic oligonucleotide
gccagccauagggguuggu

SEQ ID NO: 3122901 - RNA, 19 nt, Artificial Sequence
  Description of Artificial Sequence: Synthetic oligonucleotide
gccguacaucuuggcucuu

SEQ ID NO: 3122902 - RNA, 19 nt, Artificial Sequence
  Description of Artificial Sequence: Synthetic oligonucleotide
aauaaugucauucuacaac

SEQ ID NO: 3122903 - RNA, 19 nt, Artificial Sequence
  Description of Artificial Sequence: Synthetic oligonucleotide
aaaacacaaaacuucuucc

SEQ ID NO: 3122904 - RNA, 19 nt, Artificial Sequence
  Description of Artificial Sequence: Synthetic oligonucleotide
accaaaaugauccucaggg

SEQ ID NO: 3122905 - RNA, 19 nt, Artificial Sequence
  Description of Artificial Sequence: Synthetic oligonucleotide
aaacacaaaacuucuuccc

SEQ ID NO: 3122906 - RNA, 19 nt, Artificial Sequence
  Description of Artificial Sequence: Synthetic oligonucleotide
aauagaguaagacacaaaa

SEQ ID NO: 3122907 - RNA, 19 nt, Artificial Sequence
  Description of Artificial Sequence: Synthetic oligonucleotide
ucuacaacagacaagacaa

SEQ ID NO: 3122908 - RNA, 19 nt, Artificial Sequence
  Description of Artificial Sequence: Synthetic oligonucleotide
uaauucauaauucugucug

SEQ ID NO: 3122909 - RNA, 19 nt, Artificial Sequence
  Description of Artificial Sequence: Synthetic oligonucleotide
aagacaaugagacuuaaaa

SEQ ID NO: 3122910 - RNA, 19 nt, Artificial Sequence
  Description of Artificial Sequence: Synthetic oligonucleotide
uucaguagcauuuugucag

SEQ ID NO: 3122911 - RNA, 19 nt, Artificial Sequence
  Description of Artificial Sequence: Synthetic oligonucleotide
acagacaagacaaugagac

SEQ ID NO: 3122912 - RNA, 19 nt, Artificial Sequence
  Description of Artificial Sequence: Synthetic oligonucleotide
uugcaauagaguaagacac

SEQ ID NO: 3122913 - RNA, 19 nt, Artificial Sequence
  Description of Artificial Sequence: Synthetic oligonucleotide
uuugcaauagaguaagaca

SEQ ID NO: 3122914 - RNA, 19 nt, Artificial Sequence
  Description of Artificial Sequence: Synthetic oligonucleotide
uagaguaagacacaaaaua

SEQ ID NO: 3122915 - RNA, 19 nt, Artificial Sequence
  Description of Artificial Sequence: Synthetic oligonucleotide
aauucauaauucugucugg

SEQ ID NO: 3122916 - RNA, 19 nt, Artificial Sequence
  Description of Artificial Sequence: Synthetic oligonucleotide
cauaauucugucuggaacc

SEQ ID NO: 3122917 - RNA, 19 nt, Artificial Sequence
  Description of Artificial Sequence: Synthetic oligonucleotide
agaauuuaacuuuguuugc

SEQ ID NO: 3122918 - RNA, 19 nt, Artificial Sequence
  Description of Artificial Sequence: Synthetic oligonucleotide
aauaacuccuucaagguug

SEQ ID NO: 3122919 - RNA, 19 nt, Artificial Sequence
  Description of Artificial Sequence: Synthetic oligonucleotide
uuguaauucauaauucugu

SEQ ID NO: 3122920 - RNA, 19 nt, Artificial Sequence
  Description of Artificial Sequence: Synthetic oligonucleotide
caaaauaaugucauucuac

SEQ ID NO: 3122921 - RNA, 19 nt, Artificial Sequence
  Description of Artificial Sequence: Synthetic oligonucleotide
uucaagguugacauggugc

SEQ ID NO: 3122922 - RNA, 19 nt, Artificial Sequence
  Description of Artificial Sequence: Synthetic oligonucleotide
auaaugucauucuacaaca

SEQ ID NO: 3122923 - RNA, 19 nt, Artificial Sequence
  Description of Artificial Sequence: Synthetic oligonucleotide
uucuacaacagacaagaca

SEQ ID NO: 3122924 - RNA, 19 nt, Artificial Sequence
  Description of Artificial Sequence: Synthetic oligonucleotide
uaagacacaaaauaauguc

SEQ ID NO: 3122925 - RNA, 19 nt, Artificial Sequence
  Description of Artificial Sequence: Synthetic oligonucleotide
uuaacuuuguuugcaauag

SEQ ID NO: 3122926 - RNA, 19 nt, Artificial Sequence
  Description of Artificial Sequence: Synthetic oligonucleotide
ucauaauucugucuggaac

SEQ ID NO: 3122927 - RNA, 19 nt, Artificial Sequence
  Description of Artificial Sequence: Synthetic oligonucleotide
acacaaaauaaugucauuc

SEQ ID NO: 3122928 - RNA, 19 nt, Artificial Sequence
  Description of Artificial Sequence: Synthetic oligonucleotide
uccuucaagguugacaugg

SEQ ID NO: 3122929 - RNA, 19 nt, Artificial Sequence
  Description of Artificial Sequence: Synthetic oligonucleotide
aaugucauucuacaacaga

SEQ ID NO: 3122930 - RNA, 19 nt, Artificial Sequence
  Description of Artificial Sequence: Synthetic oligonucleotide
aaaaugauccucaggguag

SEQ ID NO: 3122931 - RNA, 19 nt, Artificial Sequence
  Description of Artificial Sequence: Synthetic oligonucleotide
aacuuuguuugcaauagag

SEQ ID NO: 3122932 - RNA, 19 nt, Artificial Sequence
  Description of Artificial Sequence: Synthetic oligonucleotide
ugagaauuuaacuuuguuu

SEQ ID NO: 3122933 - RNA, 19 nt, Artificial Sequence
  Description of Artificial Sequence: Synthetic oligonucleotide
aacacaaaacuucuucccu

SEQ ID NO: 3122934 - RNA, 19 nt, Artificial Sequence
  Description of Artificial Sequence: Synthetic oligonucleotide
cuuguaauucauaauucug

SEQ ID NO: 3122935 - RNA, 19 nt, Artificial Sequence
  Description of Artificial Sequence: Synthetic oligonucleotide
ugaacugugccaaacgccu

SEQ ID NO: 3122936 - RNA, 19 nt, Artificial Sequence
  Description of Artificial Sequence: Synthetic oligonucleotide
augucauucuacaacagac

SEQ ID NO: 3122937 - RNA, 19 nt, Artificial Sequence
  Description of Artificial Sequence: Synthetic oligonucleotide
uuuguuugcaauagaguaa

SEQ ID NO: 3122938 - RNA, 19 nt, Artificial Sequence
  Description of Artificial Sequence: Synthetic oligonucleotide
ucaauaacuccuucaaggu

SEQ ID NO: 3122939 - RNA, 19 nt, Artificial Sequence
  Description of Artificial Sequence: Synthetic oligonucleotide
uuguuugcaauagaguaag

SEQ ID NO: 3122940 - RNA, 19 nt, Artificial Sequence
  Description of Artificial Sequence: Synthetic oligonucleotide
aguaagacacaaaauaaug

SEQ ID NO: 3122941 - RNA, 19 nt, Artificial Sequence
  Description of Artificial Sequence: Synthetic oligonucleotide
uguaauucauaauucuguc

SEQ ID NO: 3122942 - RNA, 19 nt, Artificial Sequence
  Description of Artificial Sequence: Synthetic oligonucleotide
aauuuaacuuuguuugcaa

SEQ ID NO: 3122943 - RNA, 19 nt, Artificial Sequence
  Description of Artificial Sequence: Synthetic oligonucleotide
uguuucaauaacuccuuca

SEQ ID NO: 3122944 - RNA, 19 nt, Artificial Sequence
  Description of Artificial Sequence: Synthetic oligonucleotide
uuugucaggguagacauga

SEQ ID NO: 3122945 - RNA, 19 nt, Artificial Sequence
  Description of Artificial Sequence: Synthetic oligonucleotide
ucaagguugacauggugca

SEQ ID NO: 3122946 - RNA, 19 nt, Artificial Sequence
  Description of Artificial Sequence: Synthetic oligonucleotide
aacugugccaaacgccugg

SEQ ID NO: 3122947 - RNA, 19 nt, Artificial Sequence
  Description of Artificial Sequence: Synthetic oligonucleotide
auuuugucaggguagacau

SEQ ID NO: 3122948 - RNA, 19 nt, Artificial Sequence
  Description of Artificial Sequence: Synthetic oligonucleotide
uuuaacuuuguuugcaaua

SEQ ID NO: 3122949 - RNA, 19 nt, Artificial Sequence
  Description of Artificial Sequence: Synthetic oligonucleotide
aagacacaaaauaauguca

SEQ ID NO: 3122950 - RNA, 19 nt, Artificial Sequence
  Description of Artificial Sequence: Synthetic oligonucleotide
aaauaaugucauucuacaa

SEQ ID NO: 3122951 - RNA, 19 nt, Artificial Sequence
  Description of Artificial Sequence: Synthetic oligonucleotide
gugcacaccaaaaugaucc

SEQ ID NO: 3122952 - RNA, 19 nt, Artificial Sequence
  Description of Artificial Sequence: Synthetic oligonucleotide
ucauucuacaacagacaag

SEQ ID NO: 3122953 - RNA, 19 nt, Artificial Sequence
  Description of Artificial Sequence: Synthetic oligonucleotide
uuucaguagcauuuuguca

SEQ ID NO: 3122954 - RNA, 19 nt, Artificial Sequence
  Description of Artificial Sequence: Synthetic oligonucleotide
uagcauuuugucaggguag

SEQ ID NO: 3122955 - RNA, 19 nt, Artificial Sequence
  Description of Artificial Sequence: Synthetic oligonucleotide
acacaaaacuucuucccuc

SEQ ID NO: 3122956 - RNA, 19 nt, Artificial Sequence
  Description of Artificial Sequence: Synthetic oligonucleotide
ugucauucuacaacagaca

SEQ ID NO: 3122957 - RNA, 19 nt, Artificial Sequence
  Description of Artificial Sequence: Synthetic oligonucleotide
cauucuacaacagacaaga

SEQ ID NO: 3122958 - RNA, 19 nt, Artificial Sequence
  Description of Artificial Sequence: Synthetic oligonucleotide
guugacauggugcacacca

SEQ ID NO: 3122959 - RNA, 19 nt, Artificial Sequence
  Description of Artificial Sequence: Synthetic oligonucleotide
cuuuguuugcaauagagua

SEQ ID NO: 3122960 - RNA, 19 nt, Artificial Sequence
  Description of Artificial Sequence: Synthetic oligonucleotide
acaugaacugugccaaacg

SEQ ID NO: 3122961 - RNA, 19 nt, Artificial Sequence
  Description of Artificial Sequence: Synthetic oligonucleotide
cuuucaguagcauuuuguc

SEQ ID NO: 3122962 - RNA, 19 nt, Artificial Sequence
  Description of Artificial Sequence: Synthetic oligonucleotide
caacagacaagacaaugag

SEQ ID NO: 3122963 - RNA, 19 nt, Artificial Sequence
  Description of Artificial Sequence: Synthetic oligonucleotide
ucaggguagacaugaacug

SEQ ID NO: 3122964 - RNA, 19 nt, Artificial Sequence
  Description of Artificial Sequence: Synthetic oligonucleotide
aacuucuucccucuuguaa

SEQ ID NO: 3122965 - RNA, 19 nt, Artificial Sequence
  Description of Artificial Sequence: Synthetic oligonucleotide
caugaacugugccaaacgc

SEQ ID NO: 3122966 - RNA, 19 nt, Artificial Sequence
  Description of Artificial Sequence: Synthetic oligonucleotide
uacaacagacaagacaaug

SEQ ID NO: 3122967 - RNA, 19 nt, Artificial Sequence
  Description of Artificial Sequence: Synthetic oligonucleotide
uaaugucauucuacaacag

SEQ ID NO: 3122968 - RNA, 19 nt, Artificial Sequence
  Description of Artificial Sequence: Synthetic oligonucleotide
augaacugugccaaacgcc

SEQ ID NO: 3122969 - RNA, 19 nt, Artificial Sequence
  Description of Artificial Sequence: Synthetic oligonucleotide
cauggugcacaccaaaaug

SEQ ID NO: 3122970 - RNA, 19 nt, Artificial Sequence
  Description of Artificial Sequence: Synthetic oligonucleotide
ugcaauagaguaagacaca

SEQ ID NO: 3122971 - RNA, 19 nt, Artificial Sequence
  Description of Artificial Sequence: Synthetic oligonucleotide
cucuuguaauucauaauuc

SEQ ID NO: 3122972 - RNA, 19 nt, Artificial Sequence
  Description of Artificial Sequence: Synthetic oligonucleotide
aauucugucuggaacccug

SEQ ID NO: 3122973 - RNA, 19 nt, Artificial Sequence
  Description of Artificial Sequence: Synthetic oligonucleotide
acgccuggcuaucaggagc

SEQ ID NO: 3122974 - RNA, 19 nt, Artificial Sequence
  Description of Artificial Sequence: Synthetic oligonucleotide
guagacaugaacugugcca

SEQ ID NO: 3122975 - RNA, 19 nt, Artificial Sequence
  Description of Artificial Sequence: Synthetic oligonucleotide
ucaguagcauuuugucagg

SEQ ID NO: 3122976 - RNA, 19 nt, Artificial Sequence
  Description of Artificial Sequence: Synthetic oligonucleotide
gaauuuaacuuuguuugca

SEQ ID NO: 3122977 - RNA, 19 nt, Artificial Sequence
  Description of Artificial Sequence: Synthetic oligonucleotide
guuugcaauagaguaagac

SEQ ID NO: 3122978 - RNA, 19 nt, Artificial Sequence
  Description of Artificial Sequence: Synthetic oligonucleotide
acaaaauaaugucauucua

SEQ ID NO: 3122979 - RNA, 19 nt, Artificial Sequence
  Description of Artificial Sequence: Synthetic oligonucleotide
agacaagacaaugagacuu

SEQ ID NO: 3122980 - RNA, 19 nt, Artificial Sequence
  Description of Artificial Sequence: Synthetic oligonucleotide
aagguugacauggugcaca

SEQ ID NO: 3122981 - RNA, 19 nt, Artificial Sequence
  Description of Artificial Sequence: Synthetic oligonucleotide
aacuccuucaagguugaca

SEQ ID NO: 3122982 - RNA, 19 nt, Artificial Sequence
  Description of Artificial Sequence: Synthetic oligonucleotide
agaguaagacacaaaauaa

SEQ ID NO: 3122983 - RNA, 19 nt, Artificial Sequence
  Description of Artificial Sequence: Synthetic oligonucleotide
acuucuucccucuuguaau

SEQ ID NO: 3122984 - RNA, 19 nt, Artificial Sequence
  Description of Artificial Sequence: Synthetic oligonucleotide
ugucaggguagacaugaac

SEQ ID NO: 3122985 - RNA, 19 nt, Artificial Sequence
  Description of Artificial Sequence: Synthetic oligonucleotide
uagacaugaacugugccaa

SEQ ID NO: 3122986 - RNA, 19 nt, Artificial Sequence
  Description of Artificial Sequence: Synthetic oligonucleotide
ucaggagcuguuucaauaa

SEQ ID NO: 3122987 - RNA, 19 nt, Artificial Sequence
  Description of Artificial Sequence: Synthetic oligonucleotide
ucccucuuguaauucauaa

SEQ ID NO: 3122988 - RNA, 19 nt, Artificial Sequence
  Description of Artificial Sequence: Synthetic oligonucleotide
aacccugccucucccuuuc

SEQ ID NO: 3122989 - RNA, 19 nt, Artificial Sequence
  Description of Artificial Sequence: Synthetic oligonucleotide
ucugucuggaacccugccu

SEQ ID NO: 3122990 - RNA, 19 nt, Artificial Sequence
  Description of Artificial Sequence: Synthetic oligonucleotide
ugugccaaacgccuggcua

SEQ ID NO: 3122991 - RNA, 19 nt, Artificial Sequence
  Description of Artificial Sequence: Synthetic oligonucleotide
uaacuuuguuugcaauaga

SEQ ID NO: 3122992 - RNA, 19 nt, Artificial Sequence
  Description of Artificial Sequence: Synthetic oligonucleotide
gucauucuacaacagacaa

SEQ ID NO: 3122993 - RNA, 19 nt, Artificial Sequence
  Description of Artificial Sequence: Synthetic oligonucleotide
uucauaauucugucuggaa

SEQ ID NO: 3122994 - RNA, 19 nt, Artificial Sequence
  Description of Artificial Sequence: Synthetic oligonucleotide
caaacgccuggcuaucagg

SEQ ID NO: 3122995 - RNA, 19 nt, Artificial Sequence
  Description of Artificial Sequence: Synthetic oligonucleotide
cacaccaaaaugauccuca

SEQ ID NO: 3122996 - RNA, 19 nt, Artificial Sequence
  Description of Artificial Sequence: Synthetic oligonucleotide
ucuucccucuuguaauuca

SEQ ID NO: 3122997 - RNA, 19 nt, Artificial Sequence
  Description of Artificial Sequence: Synthetic oligonucleotide
agguugacauggugcacac

SEQ ID NO: 3122998 - RNA, 19 nt, Artificial Sequence
  Description of Artificial Sequence: Synthetic oligonucleotide
ucuggaacccugccucucc

SEQ ID NO: 3122999 - RNA, 19 nt, Artificial Sequence
  Description of Artificial Sequence: Synthetic oligonucleotide
agacacaaaauaaugucau

SEQ ID NO: 3123000 - RNA, 19 nt, Artificial Sequence
  Description of Artificial Sequence: Synthetic oligonucleotide
aucaggagcuguuucaaua

SEQ ID NO: 3123001 - RNA, 19 nt, Artificial Sequence
  Description of Artificial Sequence: Synthetic oligonucleotide
aacgccuggcuaucaggag

SEQ ID NO: 3123002 - RNA, 19 nt, Artificial Sequence
  Description of Artificial Sequence: Synthetic oligonucleotide
aguagcauuuugucagggu

SEQ ID NO: 3123003 - RNA, 19 nt, Artificial Sequence
  Description of Artificial Sequence: Synthetic oligonucleotide
caaaaugauccucagggua

SEQ ID NO: 3123004 - RNA, 19 nt, Artificial Sequence
  Description of Artificial Sequence: Synthetic oligonucleotide
auucauaauucugucugga

SEQ ID NO: 3123005 - RNA, 19 nt, Artificial Sequence
  Description of Artificial Sequence: Synthetic oligonucleotide
uuuugucaggguagacaug

SEQ ID NO: 3123006 - RNA, 19 nt, Artificial Sequence
  Description of Artificial Sequence: Synthetic oligonucleotide
ugacauggugcacaccaaa

SEQ ID NO: 3123007 - RNA, 19 nt, Artificial Sequence
  Description of Artificial Sequence: Synthetic oligonucleotide
guagcauuuugucagggua

SEQ ID NO: 3123008 - RNA, 19 nt, Artificial Sequence
  Description of Artificial Sequence: Synthetic oligonucleotide
aaacgccuggcuaucagga

SEQ ID NO: 3123009 - RNA, 19 nt, Artificial Sequence
  Description of Artificial Sequence: Synthetic oligonucleotide
auggugcacaccaaaauga

SEQ ID NO: 3123010 - RNA, 19 nt, Artificial Sequence
  Description of Artificial Sequence: Synthetic oligonucleotide
acauggugcacaccaaaau

SEQ ID NO: 3123011 - RNA, 19 nt, Artificial Sequence
  Description of Artificial Sequence: Synthetic oligonucleotide
acuuuguuugcaauagagu

SEQ ID NO: 3123012 - RNA, 19 nt, Artificial Sequence
  Description of Artificial Sequence: Synthetic oligonucleotide
cugucuggaacccugccuc

SEQ ID NO: 3123013 - RNA, 19 nt, Artificial Sequence
  Description of Artificial Sequence: Synthetic oligonucleotide
caccaaaaugauccucagg

SEQ ID NO: 3123014 - RNA, 19 nt, Artificial Sequence
  Description of Artificial Sequence: Synthetic oligonucleotide
cacaaaauaaugucauucu

SEQ ID NO: 3123015 - RNA, 19 nt, Artificial Sequence
  Description of Artificial Sequence: Synthetic oligonucleotide
guaagacacaaaauaaugu

SEQ ID NO: 3123016 - RNA, 19 nt, Artificial Sequence
  Description of Artificial Sequence: Synthetic oligonucleotide
gacaugaacugugccaaac

SEQ ID NO: 3123017 - RNA, 19 nt, Artificial Sequence
  Description of Artificial Sequence: Synthetic oligonucleotide
guaauucauaauucugucu

SEQ ID NO: 3123018 - RNA, 19 nt, Artificial Sequence
  Description of Artificial Sequence: Synthetic oligonucleotide
uucugucuggaacccugcc

SEQ ID NO: 3123019 - RNA, 19 nt, Artificial Sequence
  Description of Artificial Sequence: Synthetic oligonucleotide
auagaguaagacacaaaau

SEQ ID NO: 3123020 - RNA, 19 nt, Artificial Sequence
  Description of Artificial Sequence: Synthetic oligonucleotide
uggugcacaccaaaaugau

SEQ ID NO: 3123021 - RNA, 19 nt, Artificial Sequence
  Description of Artificial Sequence: Synthetic oligonucleotide
cuucaagguugacauggug

SEQ ID NO: 3123022 - RNA, 19 nt, Artificial Sequence
  Description of Artificial Sequence: Synthetic oligonucleotide
gguagacaugaacugugcc

SEQ ID NO: 3123023 - RNA, 19 nt, Artificial Sequence
  Description of Artificial Sequence: Synthetic oligonucleotide
uguuugcaauagaguaaga

SEQ ID NO: 3123024 - RNA, 19 nt, Artificial Sequence
  Description of Artificial Sequence: Synthetic oligonucleotide
auucugucuggaacccugc

SEQ ID NO: 3123025 - RNA, 19 nt, Artificial Sequence
  Description of Artificial Sequence: Synthetic oligonucleotide
ugcacaccaaaaugauccu

SEQ ID NO: 3123026 - RNA, 19 nt, Artificial Sequence
  Description of Artificial Sequence: Synthetic oligonucleotide
ugccucucccuuucaguag

SEQ ID NO: 3123027 - RNA, 19 nt, Artificial Sequence
  Description of Artificial Sequence: Synthetic oligonucleotide
aggguagacaugaacugug

SEQ ID NO: 3123028 - RNA, 19 nt, Artificial Sequence
  Description of Artificial Sequence: Synthetic oligonucleotide
ucucccuuucaguagcauu

SEQ ID NO: 3123029 - RNA, 19 nt, Artificial Sequence
  Description of Artificial Sequence: Synthetic oligonucleotide
acugugccaaacgccuggc

SEQ ID NO: 3123030 - RNA, 19 nt, Artificial Sequence
  Description of Artificial Sequence: Synthetic oligonucleotide
gucaggguagacaugaacu

SEQ ID NO: 3123031 - RNA, 19 nt, Artificial Sequence
  Description of Artificial Sequence: Synthetic oligonucleotide
auucuacaacagacaagac

SEQ ID NO: 3123032 - RNA, 19 nt, Artificial Sequence
  Description of Artificial Sequence: Synthetic oligonucleotide
aggagcuguuucaauaacu

SEQ ID NO: 3123033 - RNA, 19 nt, Artificial Sequence
  Description of Artificial Sequence: Synthetic oligonucleotide
uugacauggugcacaccaa

SEQ ID NO: 3123034 - RNA, 19 nt, Artificial Sequence
  Description of Artificial Sequence: Synthetic oligonucleotide
agcauuuugucaggguaga

SEQ ID NO: 3123035 - RNA, 19 nt, Artificial Sequence
  Description of Artificial Sequence: Synthetic oligonucleotide
uaucaggagcuguuucaau

SEQ ID NO: 3123036 - RNA, 19 nt, Artificial Sequence
  Description of Artificial Sequence: Synthetic oligonucleotide
caguagcauuuugucaggg

SEQ ID NO: 3123037 - RNA, 19 nt, Artificial Sequence
  Description of Artificial Sequence: Synthetic oligonucleotide
uucccucuuguaauucaua

SEQ ID NO: 3123038 - RNA, 19 nt, Artificial Sequence
  Description of Artificial Sequence: Synthetic oligonucleotide
caggagcuguuucaauaac

SEQ ID NO: 3123039 - RNA, 19 nt, Artificial Sequence
  Description of Artificial Sequence: Synthetic oligonucleotide
cuguuucaauaacuccuuc

SEQ ID NO: 3123040 - RNA, 19 nt, Artificial Sequence
  Description of Artificial Sequence: Synthetic oligonucleotide
ugucuggaacccugccucu

SEQ ID NO: 3123041 - RNA, 19 nt, Artificial Sequence
  Description of Artificial Sequence: Synthetic oligonucleotide
uaauucugucuggaacccu

SEQ ID NO: 3123042 - RNA, 19 nt, Artificial Sequence
  Description of Artificial Sequence: Synthetic oligonucleotide
gacauggugcacaccaaaa

SEQ ID NO: 3123043 - RNA, 19 nt, Artificial Sequence
  Description of Artificial Sequence: Synthetic oligonucleotide
gacaagacaaugagacuua

SEQ ID NO: 3123044 - RNA, 19 nt, Artificial Sequence
  Description of Artificial Sequence: Synthetic oligonucleotide
caauagaguaagacacaaa

SEQ ID NO: 3123045 - RNA, 19 nt, Artificial Sequence
  Description of Artificial Sequence: Synthetic oligonucleotide
uucuucccucuuguaauuc

SEQ ID NO: 3123046 - RNA, 19 nt, Artificial Sequence
  Description of Artificial Sequence: Synthetic oligonucleotide
gaacugugccaaacgccug

SEQ ID NO: 3123047 - RNA, 19 nt, Artificial Sequence
  Description of Artificial Sequence: Synthetic oligonucleotide
cacaaaacuucuucccucu

SEQ ID NO: 3123048 - RNA, 19 nt, Artificial Sequence
  Description of Artificial Sequence: Synthetic oligonucleotide
cuggaacccugccucuccc

SEQ ID NO: 3123049 - RNA, 19 nt, Artificial Sequence
  Description of Artificial Sequence: Synthetic oligonucleotide
caagacaaugagacuuaaa

SEQ ID NO: 3123050 - RNA, 19 nt, Artificial Sequence
  Description of Artificial Sequence: Synthetic oligonucleotide
gcaauagaguaagacacaa

SEQ ID NO: 3123051 - RNA, 19 nt, Artificial Sequence
  Description of Artificial Sequence: Synthetic oligonucleotide
acaagacaaugagacuuaa

SEQ ID NO: 3123052 - RNA, 19 nt, Artificial Sequence
  Description of Artificial Sequence: Synthetic oligonucleotide
acaaaacuucuucccucuu

SEQ ID NO: 3123053 - RNA, 19 nt, Artificial Sequence
  Description of Artificial Sequence: Synthetic oligonucleotide
uugucaggguagacaugaa

SEQ ID NO: 3123054 - RNA, 19 nt, Artificial Sequence
  Description of Artificial Sequence: Synthetic oligonucleotide
uggaacccugccucucccu

SEQ ID NO: 3123055 - RNA, 19 nt, Artificial Sequence
  Description of Artificial Sequence: Synthetic oligonucleotide
gccucucccuuucaguagc

SEQ ID NO: 3123056 - RNA, 19 nt, Artificial Sequence
  Description of Artificial Sequence: Synthetic oligonucleotide
agacaugaacugugccaaa

SEQ ID NO: 3123057 - RNA, 19 nt, Artificial Sequence
  Description of Artificial Sequence: Synthetic oligonucleotide
caagguugacauggugcac

SEQ ID NO: 3123058 - RNA, 19 nt, Artificial Sequence
  Description of Artificial Sequence: Synthetic oligonucleotide
cuccuucaagguugacaug

SEQ ID NO: 3123059 - RNA, 19 nt, Artificial Sequence
  Description of Artificial Sequence: Synthetic oligonucleotide
cuaucaggagcuguuucaa

SEQ ID NO: 3123060 - RNA, 19 nt, Artificial Sequence
  Description of Artificial Sequence: Synthetic oligonucleotide
cugccucucccuuucagua

SEQ ID NO: 3123061 - RNA, 19 nt, Artificial Sequence
  Description of Artificial Sequence: Synthetic oligonucleotide
ggcuaucaggagcuguuuc

SEQ ID NO: 3123062 - RNA, 19 nt, Artificial Sequence
  Description of Artificial Sequence: Synthetic oligonucleotide
ccucuuguaauucauaauu

SEQ ID NO: 3123063 - RNA, 19 nt, Artificial Sequence
  Description of Artificial Sequence: Synthetic oligonucleotide
ggguagacaugaacugugc

SEQ ID NO: 3123064 - RNA, 19 nt, Artificial Sequence
  Description of Artificial Sequence: Synthetic oligonucleotide
caauaacuccuucaagguu

SEQ ID NO: 3123065 - RNA, 19 nt, Artificial Sequence
  Description of Artificial Sequence: Synthetic oligonucleotide
cagacaagacaaugagacu

SEQ ID NO: 3123066 - RNA, 19 nt, Artificial Sequence
  Description of Artificial Sequence: Synthetic oligonucleotide
ggugcacaccaaaaugauc

SEQ ID NO: 3123067 - RNA, 19 nt, Artificial Sequence
  Description of Artificial Sequence: Synthetic oligonucleotide
ucccuuucaguagcauuuu

SEQ ID NO: 3123068 - RNA, 19 nt, Artificial Sequence
  Description of Artificial Sequence: Synthetic oligonucleotide
gugccaaacgccuggcuau

SEQ ID NO: 3123069 - RNA, 19 nt, Artificial Sequence
  Description of Artificial Sequence: Synthetic oligonucleotide
ccaaacgccuggcuaucag

SEQ ID NO: 3123070 - RNA, 19 nt, Artificial Sequence
  Description of Artificial Sequence: Synthetic oligonucleotide
ugccaaacgccuggcuauc

SEQ ID NO: 3123071 - RNA, 19 nt, Artificial Sequence
  Description of Artificial Sequence: Synthetic oligonucleotide
ccuuucaguagcauuuugu

SEQ ID NO: 3123072 - RNA, 19 nt, Artificial Sequence
  Description of Artificial Sequence: Synthetic oligonucleotide
uggcuaucaggagcuguuu

SEQ ID NO: 3123073 - RNA, 19 nt, Artificial Sequence
  Description of Artificial Sequence: Synthetic oligonucleotide
cuucccucuuguaauucau

SEQ ID NO: 3123074 - RNA, 19 nt, Artificial Sequence
  Description of Artificial Sequence: Synthetic oligonucleotide
cuggcuaucaggagcuguu

SEQ ID NO: 3123075 - RNA, 19 nt, Artificial Sequence
  Description of Artificial Sequence: Synthetic oligonucleotide
caggguagacaugaacugu

SEQ ID NO: 3123076 - RNA, 19 nt, Artificial Sequence
  Description of Artificial Sequence: Synthetic oligonucleotide
uaacuccuucaagguugac

SEQ ID NO: 3123077 - RNA, 19 nt, Artificial Sequence
  Description of Artificial Sequence: Synthetic oligonucleotide
gcacaccaaaaugauccuc

SEQ ID NO: 3123078 - RNA, 19 nt, Artificial Sequence
  Description of Artificial Sequence: Synthetic oligonucleotide
cuacaacagacaagacaau

SEQ ID NO: 3123079 - RNA, 19 nt, Artificial Sequence
  Description of Artificial Sequence: Synthetic oligonucleotide
gucuggaacccugccucuc

SEQ ID NO: 3123080 - RNA, 19 nt, Artificial Sequence
  Description of Artificial Sequence: Synthetic oligonucleotide
cuucuucccucuuguaauu

SEQ ID NO: 3123081 - RNA, 19 nt, Artificial Sequence
  Description of Artificial Sequence: Synthetic oligonucleotide
ccaaaaugauccucagggu

SEQ ID NO: 3123082 - RNA, 19 nt, Artificial Sequence
  Description of Artificial Sequence: Synthetic oligonucleotide
gcauuuugucaggguagac

SEQ ID NO: 3123083 - RNA, 19 nt, Artificial Sequence
  Description of Artificial Sequence: Synthetic oligonucleotide
gguugacauggugcacacc

SEQ ID NO: 3123084 - RNA, 19 nt, Artificial Sequence
  Description of Artificial Sequence: Synthetic oligonucleotide
gaacccugccucucccuuu

SEQ ID NO: 3123085 - RNA, 19 nt, Artificial Sequence
  Description of Artificial Sequence: Synthetic oligonucleotide
gcuguuucaauaacuccuu

SEQ ID NO: 3123086 - RNA, 19 nt, Artificial Sequence
  Description of Artificial Sequence: Synthetic oligonucleotide
acccugccucucccuuuca

SEQ ID NO: 3123087 - RNA, 19 nt, Artificial Sequence
  Description of Artificial Sequence: Synthetic oligonucleotide
ccugccucucccuuucagu

SEQ ID NO: 3123088 - RNA, 19 nt, Artificial Sequence
  Description of Artificial Sequence: Synthetic oligonucleotide
cccucuuguaauucauaau

SEQ ID NO: 3123089 - RNA, 19 nt, Artificial Sequence
  Description of Artificial Sequence: Synthetic oligonucleotide
gccaaacgccuggcuauca

SEQ ID NO: 3123090 - RNA, 19 nt, Artificial Sequence
  Description of Artificial Sequence: Synthetic oligonucleotide
ccuucaagguugacauggu

SEQ ID NO: 3123091 - RNA, 19 nt, Artificial Sequence
  Description of Artificial Sequence: Synthetic oligonucleotide
ccucucccuuucaguagca

SEQ ID NO: 3123092 - RNA, 19 nt, Artificial Sequence
  Description of Artificial Sequence: Synthetic oligonucleotide
cucucccuuucaguagcau

SEQ ID NO: 3123093 - RNA, 19 nt, Artificial Sequence
  Description of Artificial Sequence: Synthetic oligonucleotide
gccuggcuaucaggagcug

SEQ ID NO: 3123094 - RNA, 19 nt, Artificial Sequence
  Description of Artificial Sequence: Synthetic oligonucleotide
cgccuggcuaucaggagcu

SEQ ID NO: 3123095 - RNA, 19 nt, Artificial Sequence
  Description of Artificial Sequence: Synthetic oligonucleotide
ccuggcuaucaggagcugu

SEQ ID NO: 3123096 - RNA, 19 nt, Artificial Sequence
  Description of Artificial Sequence: Synthetic oligonucleotide
aauucaagaaacacaaguc

SEQ ID NO: 3123097 - RNA, 19 nt, Artificial Sequence
  Description of Artificial Sequence: Synthetic oligonucleotide
auuagugacauccuucagg

SEQ ID NO: 3123098 - RNA, 19 nt, Artificial Sequence
  Description of Artificial Sequence: Synthetic oligonucleotide
caguauauuagugacaucc

SEQ ID NO: 3123099 - RNA, 19 nt, Artificial Sequence
  Description of Artificial Sequence: Synthetic oligonucleotide
uuagugacauccuucaggc

SEQ ID NO: 3123100 - RNA, 19 nt, Artificial Sequence
  Description of Artificial Sequence: Synthetic oligonucleotide
aaguguuggcucuuuauag

SEQ ID NO: 3123101 - RNA, 19 nt, Artificial Sequence
  Description of Artificial Sequence: Synthetic oligonucleotide
aaacacaagucugugaaag

SEQ ID NO: 3123102 - RNA, 19 nt, Artificial Sequence
  Description of Artificial Sequence: Synthetic oligonucleotide
uaggcagagacacugcugg

SEQ ID NO: 3123103 - RNA, 19 nt, Artificial Sequence
  Description of Artificial Sequence: Synthetic oligonucleotide
ucaggcuacaaccagguga

SEQ ID NO: 3123104 - RNA, 19 nt, Artificial Sequence
  Description of Artificial Sequence: Synthetic oligonucleotide
aaccaggugacucuucuuc

SEQ ID NO: 3123105 - RNA, 19 nt, Artificial Sequence
  Description of Artificial Sequence: Synthetic oligonucleotide
uauauuagugacauccuuc

SEQ ID NO: 3123106 - RNA, 19 nt, Artificial Sequence
  Description of Artificial Sequence: Synthetic oligonucleotide
ucuuaguuucgaaagcaag

SEQ ID NO: 3123107 - RNA, 19 nt, Artificial Sequence
  Description of Artificial Sequence: Synthetic oligonucleotide
cauccuucaggcuacaacc

SEQ ID NO: 3123108 - RNA, 19 nt, Artificial Sequence
  Description of Artificial Sequence: Synthetic oligonucleotide
uacaccugcgcuuaggcag

SEQ ID NO: 3123109 - RNA, 19 nt, Artificial Sequence
  Description of Artificial Sequence: Synthetic oligonucleotide
uucacuacaggaugcauca

SEQ ID NO: 3123110 - RNA, 19 nt, Artificial Sequence
  Description of Artificial Sequence: Synthetic oligonucleotide
agaaacacaagucugugaa

SEQ ID NO: 3123111 - RNA, 19 nt, Artificial Sequence
  Description of Artificial Sequence: Synthetic oligonucleotide
aacacaagucugugaaagg

SEQ ID NO: 3123112 - RNA, 19 nt, Artificial Sequence
  Description of Artificial Sequence: Synthetic oligonucleotide
ucaagaaacacaagucugu

SEQ ID NO: 3123113 - RNA, 19 nt, Artificial Sequence
  Description of Artificial Sequence: Synthetic oligonucleotide
gaauucaagaaacacaagu

SEQ ID NO: 3123114 - RNA, 19 nt, Artificial Sequence
  Description of Artificial Sequence: Synthetic oligonucleotide
aguacaccugcgcuuaggc

SEQ ID NO: 3123115 - RNA, 19 nt, Artificial Sequence
  Description of Artificial Sequence: Synthetic oligonucleotide
ucuucuuaguuucgaaagc

SEQ ID NO: 3123116 - RNA, 19 nt, Artificial Sequence
  Description of Artificial Sequence: Synthetic oligonucleotide
auauuagugacauccuuca

SEQ ID NO: 3123117 - RNA, 19 nt, Artificial Sequence
  Description of Artificial Sequence: Synthetic oligonucleotide
ugcaucaguauauuaguga

SEQ ID NO: 3123118 - RNA, 19 nt, Artificial Sequence
  Description of Artificial Sequence: Synthetic oligonucleotide
uuaguuucgaaagcaagug

SEQ ID NO: 3123119 - RNA, 19 nt, Artificial Sequence
  Description of Artificial Sequence: Synthetic oligonucleotide
agacagagaaaaguuuucc

SEQ ID NO: 3123120 - RNA, 19 nt, Artificial Sequence
  Description of Artificial Sequence: Synthetic oligonucleotide
uuucgaaagcaaguguugg

SEQ ID NO: 3123121 - RNA, 19 nt, Artificial Sequence
  Description of Artificial Sequence: Synthetic oligonucleotide
acauccuucaggcuacaac

SEQ ID NO: 3123122 - RNA, 19 nt, Artificial Sequence
  Description of Artificial Sequence: Synthetic oligonucleotide
ucuucaugccuucucggag

SEQ ID NO: 3123123 - RNA, 19 nt, Artificial Sequence
  Description of Artificial Sequence: Synthetic oligonucleotide
uuauagcuugugauggcag

SEQ ID NO: 3123124 - RNA, 19 nt, Artificial Sequence
  Description of Artificial Sequence: Synthetic oligonucleotide
agaaaaguuuuccuaauuu

SEQ ID NO: 3123125 - RNA, 19 nt, Artificial Sequence
  Description of Artificial Sequence: Synthetic oligonucleotide
ucaggugggauaucaguag

SEQ ID NO: 3123126 - RNA, 19 nt, Artificial Sequence
  Description of Artificial Sequence: Synthetic oligonucleotide
ucuucuucagucucaggug

SEQ ID NO: 3123127 - RNA, 19 nt, Artificial Sequence
  Description of Artificial Sequence: Synthetic oligonucleotide
acacaagucugugaaaggg

SEQ ID NO: 3123128 - RNA, 19 nt, Artificial Sequence
  Description of Artificial Sequence: Synthetic oligonucleotide
aagaaacacaagucuguga

SEQ ID NO: 3123129 - RNA, 19 nt, Artificial Sequence
  Description of Artificial Sequence: Synthetic oligonucleotide
cucuuuauagcuugugaug

SEQ ID NO: 3123130 - RNA, 19 nt, Artificial Sequence
  Description of Artificial Sequence: Synthetic oligonucleotide
uuucacuacaggaugcauc

SEQ ID NO: 3123131 - RNA, 19 nt, Artificial Sequence
  Description of Artificial Sequence: Synthetic oligonucleotide
ugugauggcaguacaccug

SEQ ID NO: 3123132 - RNA, 19 nt, Artificial Sequence
  Description of Artificial Sequence: Synthetic oligonucleotide
agugacauccuucaggcua

SEQ ID NO: 3123133 - RNA, 19 nt, Artificial Sequence
  Description of Artificial Sequence: Synthetic oligonucleotide
uacaggaugcaucaguaua

SEQ ID NO: 3123134 - RNA, 19 nt, Artificial Sequence
  Description of Artificial Sequence: Synthetic oligonucleotide
aucaguauauuagugacau

SEQ ID NO: 3123135 - RNA, 19 nt, Artificial Sequence
  Description of Artificial Sequence: Synthetic oligonucleotide
ugcgcuuaggcagagacac

SEQ ID NO: 3123136 - RNA, 19 nt, Artificial Sequence
  Description of Artificial Sequence: Synthetic oligonucleotide
uucucggagacagagaaaa

SEQ ID NO: 3123137 - RNA, 19 nt, Artificial Sequence
  Description of Artificial Sequence: Synthetic oligonucleotide
acagagaaaaguuuuccua

SEQ ID NO: 3123138 - RNA, 19 nt, Artificial Sequence
  Description of Artificial Sequence: Synthetic oligonucleotide
uucgaaagcaaguguuggc

SEQ ID NO: 3123139 - RNA, 19 nt, Artificial Sequence
  Description of Artificial Sequence: Synthetic oligonucleotide
ugucuucaugccuucucgg

SEQ ID NO: 3123140 - RNA, 19 nt, Artificial Sequence
  Description of Artificial Sequence: Synthetic oligonucleotide
uauuagugacauccuucag

SEQ ID NO: 3123141 - RNA, 19 nt, Artificial Sequence
  Description of Artificial Sequence: Synthetic oligonucleotide
cuugugauggcaguacacc

SEQ ID NO: 3123142 - RNA, 19 nt, Artificial Sequence
  Description of Artificial Sequence: Synthetic oligonucleotide
guuggcucuuuauagcuug

SEQ ID NO: 3123143 - RNA, 19 nt, Artificial Sequence
  Description of Artificial Sequence: Synthetic oligonucleotide
aggugacucuucuucaguc

SEQ ID NO: 3123144 - RNA, 19 nt, Artificial Sequence
  Description of Artificial Sequence: Synthetic oligonucleotide
caugccuucucggagacag

SEQ ID NO: 3123145 - RNA, 19 nt, Artificial Sequence
  Description of Artificial Sequence: Synthetic oligonucleotide
ggaugcaucaguauauuag

SEQ ID NO: 3123146 - RNA, 19 nt, Artificial Sequence
  Description of Artificial Sequence: Synthetic oligonucleotide
ugcugggcugucuucaugc

SEQ ID NO: 3123147 - RNA, 19 nt, Artificial Sequence
  Description of Artificial Sequence: Synthetic oligonucleotide
uaguuucgaaagcaagugu

SEQ ID NO: 3123148 - RNA, 19 nt, Artificial Sequence
  Description of Artificial Sequence: Synthetic oligonucleotide
gauggcaguacaccugcgc

SEQ ID NO: 3123149 - RNA, 19 nt, Artificial Sequence
  Description of Artificial Sequence: Synthetic oligonucleotide
cugucuucaugccuucucg

SEQ ID NO: 3123150 - RNA, 19 nt, Artificial Sequence
  Description of Artificial Sequence: Synthetic oligonucleotide
ucggagacagagaaaaguu

SEQ ID NO: 3123151 - RNA, 19 nt, Artificial Sequence
  Description of Artificial Sequence: Synthetic oligonucleotide
caggcuacaaccaggugac

SEQ ID NO: 3123152 - RNA, 19 nt, Artificial Sequence
  Description of Artificial Sequence: Synthetic oligonucleotide
acaagucugugaaaggguc

SEQ ID NO: 3123153 - RNA, 19 nt, Artificial Sequence
  Description of Artificial Sequence: Synthetic oligonucleotide
aaggguccccucuucuuag

SEQ ID NO: 3123154 - RNA, 19 nt, Artificial Sequence
  Description of Artificial Sequence: Synthetic oligonucleotide
uauagcuugugauggcagu

SEQ ID NO: 3123155 - RNA, 19 nt, Artificial Sequence
  Description of Artificial Sequence: Synthetic oligonucleotide
ucgaaagcaaguguuggcu

SEQ ID NO: 3123156 - RNA, 19 nt, Artificial Sequence
  Description of Artificial Sequence: Synthetic oligonucleotide
ucucaggugggauaucagu

SEQ ID NO: 3123157 - RNA, 19 nt, Artificial Sequence
  Description of Artificial Sequence: Synthetic oligonucleotide
uucuuaguuucgaaagcaa

SEQ ID NO: 3123158 - RNA, 19 nt, Artificial Sequence
  Description of Artificial Sequence: Synthetic oligonucleotide
uugugauggcaguacaccu

SEQ ID NO: 3123159 - RNA, 19 nt, Artificial Sequence
  Description of Artificial Sequence: Synthetic oligonucleotide
caagucugugaaagggucc

SEQ ID NO: 3123160 - RNA, 19 nt, Artificial Sequence
  Description of Artificial Sequence: Synthetic oligonucleotide
ugaaaggguccccucuucu

SEQ ID NO: 3123161 - RNA, 19 nt, Artificial Sequence
  Description of Artificial Sequence: Synthetic oligonucleotide
agagaaaaguuuuccuaau

SEQ ID NO: 3123162 - RNA, 19 nt, Artificial Sequence
  Description of Artificial Sequence: Synthetic oligonucleotide
gcaucaguauauuagugac

SEQ ID NO: 3123163 - RNA, 19 nt, Artificial Sequence
  Description of Artificial Sequence: Synthetic oligonucleotide
aaaggguccccucuucuua

SEQ ID NO: 3123164 - RNA, 19 nt, Artificial Sequence
  Description of Artificial Sequence: Synthetic oligonucleotide
gaaaaguuuuccuaauuuu

SEQ ID NO: 3123165 - RNA, 19 nt, Artificial Sequence
  Description of Artificial Sequence: Synthetic oligonucleotide
gugauggcaguacaccugc

SEQ ID NO: 3123166 - RNA, 19 nt, Artificial Sequence
  Description of Artificial Sequence: Synthetic oligonucleotide
auggcaguacaccugcgcu

SEQ ID NO: 3123167 - RNA, 19 nt, Artificial Sequence
  Description of Artificial Sequence: Synthetic oligonucleotide
cuuaguuucgaaagcaagu

SEQ ID NO: 3123168 - RNA, 19 nt, Artificial Sequence
  Description of Artificial Sequence: Synthetic oligonucleotide
cagagaaaaguuuuccuaa

SEQ ID NO: 3123169 - RNA, 19 nt, Artificial Sequence
  Description of Artificial Sequence: Synthetic oligonucleotide
guuucgaaagcaaguguug

SEQ ID NO: 3123170 - RNA, 19 nt, Artificial Sequence
  Description of Artificial Sequence: Synthetic oligonucleotide
caggugggauaucaguagg

SEQ ID NO: 3123171 - RNA, 19 nt, Artificial Sequence
  Description of Artificial Sequence: Synthetic oligonucleotide
ugacucuucuucagucuca

SEQ ID NO: 3123172 - RNA, 19 nt, Artificial Sequence
  Description of Artificial Sequence: Synthetic oligonucleotide
ugccuucucggagacagag

SEQ ID NO: 3123173 - RNA, 19 nt, Artificial Sequence
  Description of Artificial Sequence: Synthetic oligonucleotide
ucucggagacagagaaaag

SEQ ID NO: 3123174 - RNA, 19 nt, Artificial Sequence
  Description of Artificial Sequence: Synthetic oligonucleotide
caagaaacacaagucugug

SEQ ID NO: 3123175 - RNA, 19 nt, Artificial Sequence
  Description of Artificial Sequence: Synthetic oligonucleotide
aguuucgaaagcaaguguu

SEQ ID NO: 3123176 - RNA, 19 nt, Artificial Sequence
  Description of Artificial Sequence: Synthetic oligonucleotide
gacagagaaaaguuuuccu

SEQ ID NO: 3123177 - RNA, 19 nt, Artificial Sequence
  Description of Artificial Sequence: Synthetic oligonucleotide
aguauauuagugacauccu

SEQ ID NO: 3123178 - RNA, 19 nt, Artificial Sequence
  Description of Artificial Sequence: Synthetic oligonucleotide
cuucuuaguuucgaaagca

SEQ ID NO: 3123179 - RNA, 19 nt, Artificial Sequence
  Description of Artificial Sequence: Synthetic oligonucleotide
uucaugccuucucggagac

SEQ ID NO: 3123180 - RNA, 19 nt, Artificial Sequence
  Description of Artificial Sequence: Synthetic oligonucleotide
gaaagcaaguguuggcucu

SEQ ID NO: 3123181 - RNA, 19 nt, Artificial Sequence
  Description of Artificial Sequence: Synthetic oligonucleotide
ugggcugucuucaugccuu

SEQ ID NO: 3123182 - RNA, 19 nt, Artificial Sequence
  Description of Artificial Sequence: Synthetic oligonucleotide
ugugaaaggguccccucuu

SEQ ID NO: 3123183 - RNA, 19 nt, Artificial Sequence
  Description of Artificial Sequence: Synthetic oligonucleotide
ugauggcaguacaccugcg

SEQ ID NO: 3123184 - RNA, 19 nt, Artificial Sequence
  Description of Artificial Sequence: Synthetic oligonucleotide
ucagucucaggugggauau

SEQ ID NO: 3123185 - RNA, 19 nt, Artificial Sequence
  Description of Artificial Sequence: Synthetic oligonucleotide
gagacagagaaaaguuuuc

SEQ ID NO: 3123186 - RNA, 19 nt, Artificial Sequence
  Description of Artificial Sequence: Synthetic oligonucleotide
agaauucaagaaacacaag

SEQ ID NO: 3123187 - RNA, 19 nt, Artificial Sequence
  Description of Artificial Sequence: Synthetic oligonucleotide
uucagucucaggugggaua

SEQ ID NO: 3123188 - RNA, 19 nt, Artificial Sequence
  Description of Artificial Sequence: Synthetic oligonucleotide
gaaacacaagucugugaaa

SEQ ID NO: 3123189 - RNA, 19 nt, Artificial Sequence
  Description of Artificial Sequence: Synthetic oligonucleotide
accaggugacucuucuuca

SEQ ID NO: 3123190 - RNA, 19 nt, Artificial Sequence
  Description of Artificial Sequence: Synthetic oligonucleotide
caucaguauauuagugaca

SEQ ID NO: 3123191 - RNA, 19 nt, Artificial Sequence
  Description of Artificial Sequence: Synthetic oligonucleotide
gugacucuucuucagucuc

SEQ ID NO: 3123192 - RNA, 19 nt, Artificial Sequence
  Description of Artificial Sequence: Synthetic oligonucleotide
acaggaugcaucaguauau

SEQ ID NO: 3123193 - RNA, 19 nt, Artificial Sequence
  Description of Artificial Sequence: Synthetic oligonucleotide
uccccucuucuuaguuucg

SEQ ID NO: 3123194 - RNA, 19 nt, Artificial Sequence
  Description of Artificial Sequence: Synthetic oligonucleotide
cuucaugccuucucggaga

SEQ ID NO: 3123195 - RNA, 19 nt, Artificial Sequence
  Description of Artificial Sequence: Synthetic oligonucleotide
agucucaggugggauauca

SEQ ID NO: 3123196 - RNA, 19 nt, Artificial Sequence
  Description of Artificial Sequence: Synthetic oligonucleotide
ucugugaaaggguccccuc

SEQ ID NO: 3123197 - RNA, 19 nt, Artificial Sequence
  Description of Artificial Sequence: Synthetic oligonucleotide
uguuggcucuuuauagcuu

SEQ ID NO: 3123198 - RNA, 19 nt, Artificial Sequence
  Description of Artificial Sequence: Synthetic oligonucleotide
ggugggauaucaguaggag

SEQ ID NO: 3123199 - RNA, 19 nt, Artificial Sequence
  Description of Artificial Sequence: Synthetic oligonucleotide
uucaggcuacaaccaggug

SEQ ID NO: 3123200 - RNA, 19 nt, Artificial Sequence
  Description of Artificial Sequence: Synthetic oligonucleotide
agcuugugauggcaguaca

SEQ ID NO: 3123201 - RNA, 19 nt, Artificial Sequence
  Description of Artificial Sequence: Synthetic oligonucleotide
guccccucuucuuaguuuc

SEQ ID NO: 3123202 - RNA, 19 nt, Artificial Sequence
  Description of Artificial Sequence: Synthetic oligonucleotide
augcaucaguauauuagug

SEQ ID NO: 3123203 - RNA, 19 nt, Artificial Sequence
  Description of Artificial Sequence: Synthetic oligonucleotide
agucugugaaagggucccc

SEQ ID NO: 3123204 - RNA, 19 nt, Artificial Sequence
  Description of Artificial Sequence: Synthetic oligonucleotide
ccuucaggcuacaaccagg

SEQ ID NO: 3123205 - RNA, 19 nt, Artificial Sequence
  Description of Artificial Sequence: Synthetic oligonucleotide
cucaggugggauaucagua

SEQ ID NO: 3123206 - RNA, 19 nt, Artificial Sequence
  Description of Artificial Sequence: Synthetic oligonucleotide
acuacaggaugcaucagua

SEQ ID NO: 3123207 - RNA, 19 nt, Artificial Sequence
  Description of Artificial Sequence: Synthetic oligonucleotide
uuuucacuacaggaugcau

SEQ ID NO: 3123208 - RNA, 19 nt, Artificial Sequence
  Description of Artificial Sequence: Synthetic oligonucleotide
uagcuugugauggcaguac

SEQ ID NO: 3123209 - RNA, 19 nt, Artificial Sequence
  Description of Artificial Sequence: Synthetic oligonucleotide
ucaguauauuagugacauc

SEQ ID NO: 3123210 - RNA, 19 nt, Artificial Sequence
  Description of Artificial Sequence: Synthetic oligonucleotide
gucuucaugccuucucgga

SEQ ID NO: 3123211 - RNA, 19 nt, Artificial Sequence
  Description of Artificial Sequence: Synthetic oligonucleotide
uuggcucuuuauagcuugu

SEQ ID NO: 3123212 - RNA, 19 nt, Artificial Sequence
  Description of Artificial Sequence: Synthetic oligonucleotide
caaguguuggcucuuuaua

SEQ ID NO: 3123213 - RNA, 19 nt, Artificial Sequence
  Description of Artificial Sequence: Synthetic oligonucleotide
aggcagagacacugcuggg

SEQ ID NO: 3123214 - RNA, 19 nt, Artificial Sequence
  Description of Artificial Sequence: Synthetic oligonucleotide
aggaugcaucaguauauua

SEQ ID NO: 3123215 - RNA, 19 nt, Artificial Sequence
  Description of Artificial Sequence: Synthetic oligonucleotide
acacugcugggcugucuuc

SEQ ID NO: 3123216 - RNA, 19 nt, Artificial Sequence
  Description of Artificial Sequence: Synthetic oligonucleotide
guguuggcucuuuauagcu

SEQ ID NO: 3123217 - RNA, 19 nt, Artificial Sequence
  Description of Artificial Sequence: Synthetic oligonucleotide
gugacauccuucaggcuac

SEQ ID NO: 3123218 - RNA, 19 nt, Artificial Sequence
  Description of Artificial Sequence: Synthetic oligonucleotide
ggcucuuuauagcuuguga

SEQ ID NO: 3123219 - RNA, 19 nt, Artificial Sequence
  Description of Artificial Sequence: Synthetic oligonucleotide
guauauuagugacauccuu

SEQ ID NO: 3123220 - RNA, 19 nt, Artificial Sequence
  Description of Artificial Sequence: Synthetic oligonucleotide
uggcucuuuauagcuugug

SEQ ID NO: 3123221 - RNA, 19 nt, Artificial Sequence
  Description of Artificial Sequence: Synthetic oligonucleotide
ccugcgcuuaggcagagac

SEQ ID NO: 3123222 - RNA, 19 nt, Artificial Sequence
  Description of Artificial Sequence: Synthetic oligonucleotide
auagcuugugauggcagua

SEQ ID NO: 3123223 - RNA, 19 nt, Artificial Sequence
  Description of Artificial Sequence: Synthetic oligonucleotide
ucacuacaggaugcaucag

SEQ ID NO: 3123224 - RNA, 19 nt, Artificial Sequence
  Description of Artificial Sequence: Synthetic oligonucleotide
uagugacauccuucaggcu

SEQ ID NO: 3123225 - RNA, 19 nt, Artificial Sequence
  Description of Artificial Sequence: Synthetic oligonucleotide
guacaccugcgcuuaggca

SEQ ID NO: 3123226 - RNA, 19 nt, Artificial Sequence
  Description of Artificial Sequence: Synthetic oligonucleotide
cuucaggcuacaaccaggu

SEQ ID NO: 3123227 - RNA, 19 nt, Artificial Sequence
  Description of Artificial Sequence: Synthetic oligonucleotide
uggcaguacaccugcgcuu

SEQ ID NO: 3123228 - RNA, 19 nt, Artificial Sequence
  Description of Artificial Sequence: Synthetic oligonucleotide
caguacaccugcgcuuagg

SEQ ID NO: 3123229 - RNA, 19 nt, Artificial Sequence
  Description of Artificial Sequence: Synthetic oligonucleotide
gugaaaggguccccucuuc

SEQ ID NO: 3123230 - RNA, 19 nt, Artificial Sequence
  Description of Artificial Sequence: Synthetic oligonucleotide
cucggagacagagaaaagu

SEQ ID NO: 3123231 - RNA, 19 nt, Artificial Sequence
  Description of Artificial Sequence: Synthetic oligonucleotide
ggcagagacacugcugggc

SEQ ID NO: 3123232 - RNA, 19 nt, Artificial Sequence
  Description of Artificial Sequence: Synthetic oligonucleotide
cagagacacugcugggcug

SEQ ID NO: 3123233 - RNA, 19 nt, Artificial Sequence
  Description of Artificial Sequence: Synthetic oligonucleotide
cuuaggcagagacacugcu

SEQ ID NO: 3123234 - RNA, 19 nt, Artificial Sequence
  Description of Artificial Sequence: Synthetic oligonucleotide
auccuucaggcuacaacca

SEQ ID NO: 3123235 - RNA, 19 nt, Artificial Sequence
  Description of Artificial Sequence: Synthetic oligonucleotide
cacaagucugugaaagggu

SEQ ID NO: 3123236 - RNA, 19 nt, Artificial Sequence
  Description of Artificial Sequence: Synthetic oligonucleotide
aggugggauaucaguagga

SEQ ID NO: 3123237 - RNA, 19 nt, Artificial Sequence
  Description of Artificial Sequence: Synthetic oligonucleotide
gcucuuuauagcuugugau

SEQ ID NO: 3123238 - RNA, 19 nt, Artificial Sequence
  Description of Artificial Sequence: Synthetic oligonucleotide
gucucaggugggauaucag

SEQ ID NO: 3123239 - RNA, 19 nt, Artificial Sequence
  Description of Artificial Sequence: Synthetic oligonucleotide
cacuacaggaugcaucagu

SEQ ID NO: 3123240 - RNA, 19 nt, Artificial Sequence
  Description of Artificial Sequence: Synthetic oligonucleotide
ggcuacaaccaggugacuc

SEQ ID NO: 3123241 - RNA, 19 nt, Artificial Sequence
  Description of Artificial Sequence: Synthetic oligonucleotide
gcuacaaccaggugacucu

SEQ ID NO: 3123242 - RNA, 19 nt, Artificial Sequence
  Description of Artificial Sequence: Synthetic oligonucleotide
agcaaguguuggcucuuua

SEQ ID NO: 3123243 - RNA, 19 nt, Artificial Sequence
  Description of Artificial Sequence: Synthetic oligonucleotide
gcugucuucaugccuucuc

SEQ ID NO: 3123244 - RNA, 19 nt, Artificial Sequence
  Description of Artificial Sequence: Synthetic oligonucleotide
acugcugggcugucuucau

SEQ ID NO: 3123245 - RNA, 19 nt, Artificial Sequence
  Description of Artificial Sequence: Synthetic oligonucleotide
ggagacagagaaaaguuuu

SEQ ID NO: 3123246 - RNA, 19 nt, Artificial Sequence
  Description of Artificial Sequence: Synthetic oligonucleotide
gcuugugauggcaguacac

SEQ ID NO: 3123247 - RNA, 19 nt, Artificial Sequence
  Description of Artificial Sequence: Synthetic oligonucleotide
gacacugcugggcugucuu

SEQ ID NO: 3123248 - RNA, 19 nt, Artificial Sequence
  Description of Artificial Sequence: Synthetic oligonucleotide
cugcugggcugucuucaug

SEQ ID NO: 3123249 - RNA, 19 nt, Artificial Sequence
  Description of Artificial Sequence: Synthetic oligonucleotide
ggugacucuucuucagucu

SEQ ID NO: 3123250 - RNA, 19 nt, Artificial Sequence
  Description of Artificial Sequence: Synthetic oligonucleotide
cugcgcuuaggcagagaca

SEQ ID NO: 3123251 - RNA, 19 nt, Artificial Sequence
  Description of Artificial Sequence: Synthetic oligonucleotide
aagcaaguguuggcucuuu

SEQ ID NO: 3123252 - RNA, 19 nt, Artificial Sequence
  Description of Artificial Sequence: Synthetic oligonucleotide
aggguccccucuucuuagu

SEQ ID NO: 3123253 - RNA, 19 nt, Artificial Sequence
  Description of Artificial Sequence: Synthetic oligonucleotide
cuucucggagacagagaaa

SEQ ID NO: 3123254 - RNA, 19 nt, Artificial Sequence
  Description of Artificial Sequence: Synthetic oligonucleotide
acaccugcgcuuaggcaga

SEQ ID NO: 3123255 - RNA, 19 nt, Artificial Sequence
  Description of Artificial Sequence: Synthetic oligonucleotide
cgaaagcaaguguuggcuc

SEQ ID NO: 3123256 - RNA, 19 nt, Artificial Sequence
  Description of Artificial Sequence: Synthetic oligonucleotide
ccucuucuuaguuucgaaa

SEQ ID NO: 3123257 - RNA, 19 nt, Artificial Sequence
  Description of Artificial Sequence: Synthetic oligonucleotide
cugugaaaggguccccucu

SEQ ID NO: 3123258 - RNA, 19 nt, Artificial Sequence
  Description of Artificial Sequence: Synthetic oligonucleotide
gcuuaggcagagacacugc

SEQ ID NO: 3123259 - RNA, 19 nt, Artificial Sequence
  Description of Artificial Sequence: Synthetic oligonucleotide
ugacauccuucaggcuaca

SEQ ID NO: 3123260 - RNA, 19 nt, Artificial Sequence
  Description of Artificial Sequence: Synthetic oligonucleotide
ucaugccuucucggagaca

SEQ ID NO: 3123261 - RNA, 19 nt, Artificial Sequence
  Description of Artificial Sequence: Synthetic oligonucleotide
gcagagacacugcugggcu

SEQ ID NO: 3123262 - RNA, 19 nt, Artificial Sequence
  Description of Artificial Sequence: Synthetic oligonucleotide
cgcuuaggcagagacacug

SEQ ID NO: 3123263 - RNA, 19 nt, Artificial Sequence
  Description of Artificial Sequence: Synthetic oligonucleotide
cuacaggaugcaucaguau

SEQ ID NO: 3123264 - RNA, 19 nt, Artificial Sequence
  Description of Artificial Sequence: Synthetic oligonucleotide
gcaaguguuggcucuuuau

SEQ ID NO: 3123265 - RNA, 19 nt, Artificial Sequence
  Description of Artificial Sequence: Synthetic oligonucleotide
gucugugaaaggguccccu

SEQ ID NO: 3123266 - RNA, 19 nt, Artificial Sequence
  Description of Artificial Sequence: Synthetic oligonucleotide
caggugacucuucuucagu

SEQ ID NO: 3123267 - RNA, 19 nt, Artificial Sequence
  Description of Artificial Sequence: Synthetic oligonucleotide
gacauccuucaggcuacaa

SEQ ID NO: 3123268 - RNA, 19 nt, Artificial Sequence
  Description of Artificial Sequence: Synthetic oligonucleotide
ggcaguacaccugcgcuua

SEQ ID NO: 3123269 - RNA, 19 nt, Artificial Sequence
  Description of Artificial Sequence: Synthetic oligonucleotide
gcaguacaccugcgcuuag

SEQ ID NO: 3123270 - RNA, 19 nt, Artificial Sequence
  Description of Artificial Sequence: Synthetic oligonucleotide
cugggcugucuucaugccu

SEQ ID NO: 3123271 - RNA, 19 nt, Artificial Sequence
  Description of Artificial Sequence: Synthetic oligonucleotide
caccugcgcuuaggcagag

SEQ ID NO: 3123272 - RNA, 19 nt, Artificial Sequence
  Description of Artificial Sequence: Synthetic oligonucleotide
cccucuucuuaguuucgaa

SEQ ID NO: 3123273 - RNA, 19 nt, Artificial Sequence
  Description of Artificial Sequence: Synthetic oligonucleotide
cuucagucucaggugggau

SEQ ID NO: 3123274 - RNA, 19 nt, Artificial Sequence
  Description of Artificial Sequence: Synthetic oligonucleotide
augccuucucggagacaga

SEQ ID NO: 3123275 - RNA, 19 nt, Artificial Sequence
  Description of Artificial Sequence: Synthetic oligonucleotide
cagucucaggugggauauc

SEQ ID NO: 3123276 - RNA, 19 nt, Artificial Sequence
  Description of Artificial Sequence: Synthetic oligonucleotide
gguccccucuucuuaguuu

SEQ ID NO: 3123277 - RNA, 19 nt, Artificial Sequence
  Description of Artificial Sequence: Synthetic oligonucleotide
gggcugucuucaugccuuc

SEQ ID NO: 3123278 - RNA, 19 nt, Artificial Sequence
  Description of Artificial Sequence: Synthetic oligonucleotide
caggaugcaucaguauauu

SEQ ID NO: 3123279 - RNA, 19 nt, Artificial Sequence
  Description of Artificial Sequence: Synthetic oligonucleotide
accugcgcuuaggcagaga

SEQ ID NO: 3123280 - RNA, 19 nt, Artificial Sequence
  Description of Artificial Sequence: Synthetic oligonucleotide
caaccaggugacucuucuu

SEQ ID NO: 3123281 - RNA, 19 nt, Artificial Sequence
  Description of Artificial Sequence: Synthetic oligonucleotide
cggagacagagaaaaguuu

SEQ ID NO: 3123282 - RNA, 19 nt, Artificial Sequence
  Description of Artificial Sequence: Synthetic oligonucleotide
ccccucuucuuaguuucga

SEQ ID NO: 3123283 - RNA, 19 nt, Artificial Sequence
  Description of Artificial Sequence: Synthetic oligonucleotide
ggguccccucuucuuaguu

SEQ ID NO: 3123284 - RNA, 19 nt, Artificial Sequence
  Description of Artificial Sequence: Synthetic oligonucleotide
ggcugucuucaugccuucu

SEQ ID NO: 3123285 - RNA, 19 nt, Artificial Sequence
  Description of Artificial Sequence: Synthetic oligonucleotide
gcgcuuaggcagagacacu

SEQ ID NO: 3123286 - RNA, 19 nt, Artificial Sequence
  Description of Artificial Sequence: Synthetic oligonucleotide
aagccaagggcccagaacc

SEQ ID NO: 3123287 - RNA, 19 nt, Artificial Sequence
  Description of Artificial Sequence: Synthetic oligonucleotide
aaauuaggggaccauggcc

SEQ ID NO: 3123288 - RNA, 19 nt, Artificial Sequence
  Description of Artificial Sequence: Synthetic oligonucleotide
auucacaucggacacaggc

SEQ ID NO: 3123289 - RNA, 19 nt, Artificial Sequence
  Description of Artificial Sequence: Synthetic oligonucleotide
cuaaguuacagucacacag

SEQ ID NO: 3123290 - RNA, 19 nt, Artificial Sequence
  Description of Artificial Sequence: Synthetic oligonucleotide
guuacagucacacagugug

SEQ ID NO: 3123291 - RNA, 19 nt, Artificial Sequence
  Description of Artificial Sequence: Synthetic oligonucleotide
aagaagaacgagcugguug

SEQ ID NO: 3123292 - RNA, 19 nt, Artificial Sequence
  Description of Artificial Sequence: Synthetic oligonucleotide
gacuccuucagccacaugc

SEQ ID NO: 3123293 - RNA, 19 nt, Artificial Sequence
  Description of Artificial Sequence: Synthetic oligonucleotide
cacagucacauucacaucg

SEQ ID NO: 3123294 - RNA, 19 nt, Artificial Sequence
  Description of Artificial Sequence: Synthetic oligonucleotide
uguaacuccacaguuaacu

SEQ ID NO: 3123295 - RNA, 19 nt, Artificial Sequence
  Description of Artificial Sequence: Synthetic oligonucleotide
guuaacuccucugagaagc

SEQ ID NO: 3123296 - RNA, 19 nt, Artificial Sequence
  Description of Artificial Sequence: Synthetic oligonucleotide
cucacucucaguaugacuc

SEQ ID NO: 3123297 - RNA, 19 nt, Artificial Sequence
  Description of Artificial Sequence: Synthetic oligonucleotide
uguguaacuccacaguuaa

SEQ ID NO: 3123298 - RNA, 19 nt, Artificial Sequence
  Description of Artificial Sequence: Synthetic oligonucleotide
caguaugacuccuucagcc

SEQ ID NO: 3123299 - RNA, 19 nt, Artificial Sequence
  Description of Artificial Sequence: Synthetic oligonucleotide
uccucugagaagccaaggg

SEQ ID NO: 3123300 - RNA, 19 nt, Artificial Sequence
  Description of Artificial Sequence: Synthetic oligonucleotide
aaguuacagucacacagug

SEQ ID NO: 3123301 - RNA, 19 nt, Artificial Sequence
  Description of Artificial Sequence: Synthetic oligonucleotide
agaagaacgagcugguugu

SEQ ID NO: 3123302 - RNA, 19 nt, Artificial Sequence
  Description of Artificial Sequence: Synthetic oligonucleotide
aauuaggggaccauggcca

SEQ ID NO: 3123303 - RNA, 19 nt, Artificial Sequence
  Description of Artificial Sequence: Synthetic oligonucleotide
uuugcaccagccaucgucc

SEQ ID NO: 3123304 - RNA, 19 nt, Artificial Sequence
  Description of Artificial Sequence: Synthetic oligonucleotide
cucugagaagccaagggcc

SEQ ID NO: 3123305 - RNA, 19 nt, Artificial Sequence
  Description of Artificial Sequence: Synthetic oligonucleotide
agaaccuuaggagaugggg

SEQ ID NO: 3123306 - RNA, 19 nt, Artificial Sequence
  Description of Artificial Sequence: Synthetic oligonucleotide
aguguguguaacuccacag

SEQ ID NO: 3123307 - RNA, 19 nt, Artificial Sequence
  Description of Artificial Sequence: Synthetic oligonucleotide
aaccuuaggagauggggcu

SEQ ID NO: 3123308 - RNA, 19 nt, Artificial Sequence
  Description of Artificial Sequence: Synthetic oligonucleotide
uaaguuacagucacacagu

SEQ ID NO: 3123309 - RNA, 19 nt, Artificial Sequence
  Description of Artificial Sequence: Synthetic oligonucleotide
uaacuccacaguuaacucc

SEQ ID NO: 3123310 - RNA, 19 nt, Artificial Sequence
  Description of Artificial Sequence: Synthetic oligonucleotide
acacaguguguguaacucc

SEQ ID NO: 3123311 - RNA, 19 nt, Artificial Sequence
  Description of Artificial Sequence: Synthetic oligonucleotide
uaggagauggggcucuggg

SEQ ID NO: 3123312 - RNA, 19 nt, Artificial Sequence
  Description of Artificial Sequence: Synthetic oligonucleotide
accaggaagaagaacgagc

SEQ ID NO: 3123313 - RNA, 19 nt, Artificial Sequence
  Description of Artificial Sequence: Synthetic oligonucleotide
uucacaucggacacaggcc

SEQ ID NO: 3123314 - RNA, 19 nt, Artificial Sequence
  Description of Artificial Sequence: Synthetic oligonucleotide
gucacauucacaucggaca

SEQ ID NO: 3123315 - RNA, 19 nt, Artificial Sequence
  Description of Artificial Sequence: Synthetic oligonucleotide
ucacaucggacacaggcca

SEQ ID NO: 3123316 - RNA, 19 nt, Artificial Sequence
  Description of Artificial Sequence: Synthetic oligonucleotide
ucugagaagccaagggccc

SEQ ID NO: 3123317 - RNA, 19 nt, Artificial Sequence
  Description of Artificial Sequence: Synthetic oligonucleotide
ucacauucacaucggacac

SEQ ID NO: 3123318 - RNA, 19 nt, Artificial Sequence
  Description of Artificial Sequence: Synthetic oligonucleotide
agcugguugucuugugucc

SEQ ID NO: 3123319 - RNA, 19 nt, Artificial Sequence
  Description of Artificial Sequence: Synthetic oligonucleotide
uguguccucucuuugcacc

SEQ ID NO: 3123320 - RNA, 19 nt, Artificial Sequence
  Description of Artificial Sequence: Synthetic oligonucleotide
uguguguaacuccacaguu

SEQ ID NO: 3123321 - RNA, 19 nt, Artificial Sequence
  Description of Artificial Sequence: Synthetic oligonucleotide
ucaguaugacuccuucagc

SEQ ID NO: 3123322 - RNA, 19 nt, Artificial Sequence
  Description of Artificial Sequence: Synthetic oligonucleotide
ucuuguguccucucuuugc

SEQ ID NO: 3123323 - RNA, 19 nt, Artificial Sequence
  Description of Artificial Sequence: Synthetic oligonucleotide
acaguuaacuccucugaga

SEQ ID NO: 3123324 - RNA, 19 nt, Artificial Sequence
  Description of Artificial Sequence: Synthetic oligonucleotide
gaaccuuaggagauggggc

SEQ ID NO: 3123325 - RNA, 19 nt, Artificial Sequence
  Description of Artificial Sequence: Synthetic oligonucleotide
cuuugcaccagccaucguc

SEQ ID NO: 3123326 - RNA, 19 nt, Artificial Sequence
  Description of Artificial Sequence: Synthetic oligonucleotide
caaauuaggggaccauggc

SEQ ID NO: 3123327 - RNA, 19 nt, Artificial Sequence
  Description of Artificial Sequence: Synthetic oligonucleotide
aacuccacaguuaacuccu

SEQ ID NO: 3123328 - RNA, 19 nt, Artificial Sequence
  Description of Artificial Sequence: Synthetic oligonucleotide
cacgcuaaguuacagucac

SEQ ID NO: 3123329 - RNA, 19 nt, Artificial Sequence
  Description of Artificial Sequence: Synthetic oligonucleotide
agccacaugcuccaccagg

SEQ ID NO: 3123330 - RNA, 19 nt, Artificial Sequence
  Description of Artificial Sequence: Synthetic oligonucleotide
agucacauucacaucggac

SEQ ID NO: 3123331 - RNA, 19 nt, Artificial Sequence
  Description of Artificial Sequence: Synthetic oligonucleotide
auuaggggaccauggccac

SEQ ID NO: 3123332 - RNA, 19 nt, Artificial Sequence
  Description of Artificial Sequence: Synthetic oligonucleotide
uacagucacacagugugug

SEQ ID NO: 3123333 - RNA, 19 nt, Artificial Sequence
  Description of Artificial Sequence: Synthetic oligonucleotide
aguaugacuccuucagcca

SEQ ID NO: 3123334 - RNA, 19 nt, Artificial Sequence
  Description of Artificial Sequence: Synthetic oligonucleotide
cauggccacagucacauuc

SEQ ID NO: 3123335 - RNA, 19 nt, Artificial Sequence
  Description of Artificial Sequence: Synthetic oligonucleotide
uuaacuccucugagaagcc

SEQ ID NO: 3123336 - RNA, 19 nt, Artificial Sequence
  Description of Artificial Sequence: Synthetic oligonucleotide
uccaaauuaggggaccaug

SEQ ID NO: 3123337 - RNA, 19 nt, Artificial Sequence
  Description of Artificial Sequence: Synthetic oligonucleotide
ccaaauuaggggaccaugg

SEQ ID NO: 3123338 - RNA, 19 nt, Artificial Sequence
  Description of Artificial Sequence: Synthetic oligonucleotide
caucguccaaauuagggga

SEQ ID NO: 3123339 - RNA, 19 nt, Artificial Sequence
  Description of Artificial Sequence: Synthetic oligonucleotide
aguuaacuccucugagaag

SEQ ID NO: 3123340 - RNA, 19 nt, Artificial Sequence
  Description of Artificial Sequence: Synthetic oligonucleotide
cacaguuaacuccucugag

SEQ ID NO: 3123341 - RNA, 19 nt, Artificial Sequence
  Description of Artificial Sequence: Synthetic oligonucleotide
ccaucguccaaauuagggg

SEQ ID NO: 3123342 - RNA, 19 nt, Artificial Sequence
  Description of Artificial Sequence: Synthetic oligonucleotide
acaggccacgcuaaguuac

SEQ ID NO: 3123343 - RNA, 19 nt, Artificial Sequence
  Description of Artificial Sequence: Synthetic oligonucleotide
uaugacuccuucagccaca

SEQ ID NO: 3123344 - RNA, 19 nt, Artificial Sequence
  Description of Artificial Sequence: Synthetic oligonucleotide
uucagccacaugcuccacc

SEQ ID NO: 3123345 - RNA, 19 nt, Artificial Sequence
  Description of Artificial Sequence: Synthetic oligonucleotide
gaagccaagggcccagaac

SEQ ID NO: 3123346 - RNA, 19 nt, Artificial Sequence
  Description of Artificial Sequence: Synthetic oligonucleotide
cagccaucguccaaauuag

SEQ ID NO: 3123347 - RNA, 19 nt, Artificial Sequence
  Description of Artificial Sequence: Synthetic oligonucleotide
gagauggggcucugggagg

SEQ ID NO: 3123348 - RNA, 19 nt, Artificial Sequence
  Description of Artificial Sequence: Synthetic oligonucleotide
ucacucucaguaugacucc

SEQ ID NO: 3123349 - RNA, 19 nt, Artificial Sequence
  Description of Artificial Sequence: Synthetic oligonucleotide
guaacuccacaguuaacuc

SEQ ID NO: 3123350 - RNA, 19 nt, Artificial Sequence
  Description of Artificial Sequence: Synthetic oligonucleotide
ucucuuugcaccagccauc

SEQ ID NO: 3123351 - RNA, 19 nt, Artificial Sequence
  Description of Artificial Sequence: Synthetic oligonucleotide
cacaugcuccaccaggaag

SEQ ID NO: 3123352 - RNA, 19 nt, Artificial Sequence
  Description of Artificial Sequence: Synthetic oligonucleotide
guaugacuccuucagccac

SEQ ID NO: 3123353 - RNA, 19 nt, Artificial Sequence
  Description of Artificial Sequence: Synthetic oligonucleotide
gaggcagugagugacuuga

SEQ ID NO: 3123354 - RNA, 19 nt, Artificial Sequence
  Description of Artificial Sequence: Synthetic oligonucleotide
uuacagucacacagugugu

SEQ ID NO: 3123355 - RNA, 19 nt, Artificial Sequence
  Description of Artificial Sequence: Synthetic oligonucleotide
ucucacucucaguaugacu

SEQ ID NO: 3123356 - RNA, 19 nt, Artificial Sequence
  Description of Artificial Sequence: Synthetic oligonucleotide
uccucucuuugcaccagcc

SEQ ID NO: 3123357 - RNA, 19 nt, Artificial Sequence
  Description of Artificial Sequence: Synthetic oligonucleotide
cucuuugcaccagccaucg

SEQ ID NO: 3123358 - RNA, 19 nt, Artificial Sequence
  Description of Artificial Sequence: Synthetic oligonucleotide
acaugcuccaccaggaaga

SEQ ID NO: 3123359 - RNA, 19 nt, Artificial Sequence
  Description of Artificial Sequence: Synthetic oligonucleotide
caguuaacuccucugagaa

SEQ ID NO: 3123360 - RNA, 19 nt, Artificial Sequence
  Description of Artificial Sequence: Synthetic oligonucleotide
gcagugagugacuugaaga

SEQ ID NO: 3123361 - RNA, 19 nt, Artificial Sequence
  Description of Artificial Sequence: Synthetic oligonucleotide
cacaguguguguaacucca

SEQ ID NO: 3123362 - RNA, 19 nt, Artificial Sequence
  Description of Artificial Sequence: Synthetic oligonucleotide
aagaacgagcugguugucu

SEQ ID NO: 3123363 - RNA, 19 nt, Artificial Sequence
  Description of Artificial Sequence: Synthetic oligonucleotide
agggcccagaaccuuagga

SEQ ID NO: 3123364 - RNA, 19 nt, Artificial Sequence
  Description of Artificial Sequence: Synthetic oligonucleotide
uaggggaccauggccacag

SEQ ID NO: 3123365 - RNA, 19 nt, Artificial Sequence
  Description of Artificial Sequence: Synthetic oligonucleotide
gagcugguugucuuguguc

SEQ ID NO: 3123366 - RNA, 19 nt, Artificial Sequence
  Description of Artificial Sequence: Synthetic oligonucleotide
acacaggccacgcuaaguu

SEQ ID NO: 3123367 - RNA, 19 nt, Artificial Sequence
  Description of Artificial Sequence: Synthetic oligonucleotide
aucguccaaauuaggggac

SEQ ID NO: 3123368 - RNA, 19 nt, Artificial Sequence
  Description of Artificial Sequence: Synthetic oligonucleotide
cacacaguguguguaacuc

SEQ ID NO: 3123369 - RNA, 19 nt, Artificial Sequence
  Description of Artificial Sequence: Synthetic oligonucleotide
agaacgagcugguugucuu

SEQ ID NO: 3123370 - RNA, 19 nt, Artificial Sequence
  Description of Artificial Sequence: Synthetic oligonucleotide
gccaucguccaaauuaggg

SEQ ID NO: 3123371 - RNA, 19 nt, Artificial Sequence
  Description of Artificial Sequence: Synthetic oligonucleotide
cuuguguccucucuuugca

SEQ ID NO: 3123372 - RNA, 19 nt, Artificial Sequence
  Description of Artificial Sequence: Synthetic oligonucleotide
gaacgagcugguugucuug

SEQ ID NO: 3123373 - RNA, 19 nt, Artificial Sequence
  Description of Artificial Sequence: Synthetic oligonucleotide
uugucuuguguccucucuu

SEQ ID NO: 3123374 - RNA, 19 nt, Artificial Sequence
  Description of Artificial Sequence: Synthetic oligonucleotide
cucucaguaugacuccuuc

SEQ ID NO: 3123375 - RNA, 19 nt, Artificial Sequence
  Description of Artificial Sequence: Synthetic oligonucleotide
ugucuuguguccucucuuu

SEQ ID NO: 3123376 - RNA, 19 nt, Artificial Sequence
  Description of Artificial Sequence: Synthetic oligonucleotide
gccacgcuaaguuacaguc

SEQ ID NO: 3123377 - RNA, 19 nt, Artificial Sequence
  Description of Artificial Sequence: Synthetic oligonucleotide
ugagaagccaagggcccag

SEQ ID NO: 3123378 - RNA, 19 nt, Artificial Sequence
  Description of Artificial Sequence: Synthetic oligonucleotide
acagucacacagugugugu

SEQ ID NO: 3123379 - RNA, 19 nt, Artificial Sequence
  Description of Artificial Sequence: Synthetic oligonucleotide
accauggccacagucacau

SEQ ID NO: 3123380 - RNA, 19 nt, Artificial Sequence
  Description of Artificial Sequence: Synthetic oligonucleotide
acaucggacacaggccacg

SEQ ID NO: 3123381 - RNA, 19 nt, Artificial Sequence
  Description of Artificial Sequence: Synthetic oligonucleotide
aacuccucugagaagccaa

SEQ ID NO: 3123382 - RNA, 19 nt, Artificial Sequence
  Description of Artificial Sequence: Synthetic oligonucleotide
ccucugagaagccaagggc

SEQ ID NO: 3123383 - RNA, 19 nt, Artificial Sequence
  Description of Artificial Sequence: Synthetic oligonucleotide
cagaaccuuaggagauggg

SEQ ID NO: 3123384 - RNA, 19 nt, Artificial Sequence
  Description of Artificial Sequence: Synthetic oligonucleotide
ucguccaaauuaggggacc

SEQ ID NO: 3123385 - RNA, 19 nt, Artificial Sequence
  Description of Artificial Sequence: Synthetic oligonucleotide
ggcagugagugacuugaag

SEQ ID NO: 3123386 - RNA, 19 nt, Artificial Sequence
  Description of Artificial Sequence: Synthetic oligonucleotide
uuguguccucucuuugcac

SEQ ID NO: 3123387 - RNA, 19 nt, Artificial Sequence
  Description of Artificial Sequence: Synthetic oligonucleotide
caagggcccagaaccuuag

SEQ ID NO: 3123388 - RNA, 19 nt, Artificial Sequence
  Description of Artificial Sequence: Synthetic oligonucleotide
uaacuccucugagaagcca

SEQ ID NO: 3123389 - RNA, 19 nt, Artificial Sequence
  Description of Artificial Sequence: Synthetic oligonucleotide
acaguguguguaacuccac

SEQ ID NO: 3123390 - RNA, 19 nt, Artificial Sequence
  Description of Artificial Sequence: Synthetic oligonucleotide
aguuacagucacacagugu

SEQ ID NO: 3123391 - RNA, 19 nt, Artificial Sequence
  Description of Artificial Sequence: Synthetic oligonucleotide
accuuaggagauggggcuc

SEQ ID NO: 3123392 - RNA, 19 nt, Artificial Sequence
  Description of Artificial Sequence: Synthetic oligonucleotide
cuccucugagaagccaagg

SEQ ID NO: 3123393 - RNA, 19 nt, Artificial Sequence
  Description of Artificial Sequence: Synthetic oligonucleotide
ccagccaucguccaaauua

SEQ ID NO: 3123394 - RNA, 19 nt, Artificial Sequence
  Description of Artificial Sequence: Synthetic oligonucleotide
caccaggaagaagaacgag

SEQ ID NO: 3123395 - RNA, 19 nt, Artificial Sequence
  Description of Artificial Sequence: Synthetic oligonucleotide
ugcaccagccaucguccaa

SEQ ID NO: 3123396 - RNA, 19 nt, Artificial Sequence
  Description of Artificial Sequence: Synthetic oligonucleotide
uguccucucuuugcaccag

SEQ ID NO: 3123397 - RNA, 19 nt, Artificial Sequence
  Description of Artificial Sequence: Synthetic oligonucleotide
acuccuucagccacaugcu

SEQ ID NO: 3123398 - RNA, 19 nt, Artificial Sequence
  Description of Artificial Sequence: Synthetic oligonucleotide
ggaccauggccacagucac

SEQ ID NO: 3123399 - RNA, 19 nt, Artificial Sequence
  Description of Artificial Sequence: Synthetic oligonucleotide
ugggaggcagugagugacu

SEQ ID NO: 3123400 - RNA, 19 nt, Artificial Sequence
  Description of Artificial Sequence: Synthetic oligonucleotide
ccagaaccuuaggagaugg

SEQ ID NO: 3123401 - RNA, 19 nt, Artificial Sequence
  Description of Artificial Sequence: Synthetic oligonucleotide
caguguguguaacuccaca

SEQ ID NO: 3123402 - RNA, 19 nt, Artificial Sequence
  Description of Artificial Sequence: Synthetic oligonucleotide
guguguguaacuccacagu

SEQ ID NO: 3123403 - RNA, 19 nt, Artificial Sequence
  Description of Artificial Sequence: Synthetic oligonucleotide
ugguugucuuguguccucu

SEQ ID NO: 3123404 - RNA, 19 nt, Artificial Sequence
  Description of Artificial Sequence: Synthetic oligonucleotide
cacaucggacacaggccac

SEQ ID NO: 3123405 - RNA, 19 nt, Artificial Sequence
  Description of Artificial Sequence: Synthetic oligonucleotide
acuccucugagaagccaag

SEQ ID NO: 3123406 - RNA, 19 nt, Artificial Sequence
  Description of Artificial Sequence: Synthetic oligonucleotide
agaagccaagggcccagaa

SEQ ID NO: 3123407 - RNA, 19 nt, Artificial Sequence
  Description of Artificial Sequence: Synthetic oligonucleotide
guugucuuguguccucucu

SEQ ID NO: 3123408 - RNA, 19 nt, Artificial Sequence
  Description of Artificial Sequence: Synthetic oligonucleotide
cugguugucuuguguccuc

SEQ ID NO: 3123409 - RNA, 19 nt, Artificial Sequence
  Description of Artificial Sequence: Synthetic oligonucleotide
gucacacaguguguguaac

SEQ ID NO: 3123410 - RNA, 19 nt, Artificial Sequence
  Description of Artificial Sequence: Synthetic oligonucleotide
cucucuuugcaccagccau

SEQ ID NO: 3123411 - RNA, 19 nt, Artificial Sequence
  Description of Artificial Sequence: Synthetic oligonucleotide
gcuaaguuacagucacaca

SEQ ID NO: 3123412 - RNA, 19 nt, Artificial Sequence
  Description of Artificial Sequence: Synthetic oligonucleotide
guccucucuuugcaccagc

SEQ ID NO: 3123413 - RNA, 19 nt, Artificial Sequence
  Description of Artificial Sequence: Synthetic oligonucleotide
agccaucguccaaauuagg

SEQ ID NO: 3123414 - RNA, 19 nt, Artificial Sequence
  Description of Artificial Sequence: Synthetic oligonucleotide
uugcaccagccaucgucca

SEQ ID NO: 3123415 - RNA, 19 nt, Artificial Sequence
  Description of Artificial Sequence: Synthetic oligonucleotide
caucggacacaggccacgc

SEQ ID NO: 3123416 - RNA, 19 nt, Artificial Sequence
  Description of Artificial Sequence: Synthetic oligonucleotide
uuaggggaccauggccaca

SEQ ID NO: 3123417 - RNA, 19 nt, Artificial Sequence
  Description of Artificial Sequence: Synthetic oligonucleotide
cgcuaaguuacagucacac

SEQ ID NO: 3123418 - RNA, 19 nt, Artificial Sequence
  Description of Artificial Sequence: Synthetic oligonucleotide
acgagcugguugucuugug

SEQ ID NO: 3123419 - RNA, 19 nt, Artificial Sequence
  Description of Artificial Sequence: Synthetic oligonucleotide
gggaccauggccacaguca

SEQ ID NO: 3123420 - RNA, 19 nt, Artificial Sequence
  Description of Artificial Sequence: Synthetic oligonucleotide
ucuuugcaccagccaucgu

SEQ ID NO: 3123421 - RNA, 19 nt, Artificial Sequence
  Description of Artificial Sequence: Synthetic oligonucleotide
ccaggaagaagaacgagcu

SEQ ID NO: 3123422 - RNA, 19 nt, Artificial Sequence
  Description of Artificial Sequence: Synthetic oligonucleotide
aucggacacaggccacgcu

SEQ ID NO: 3123423 - RNA, 19 nt, Artificial Sequence
  Description of Artificial Sequence: Synthetic oligonucleotide
gaagaacgagcugguuguc

SEQ ID NO: 3123424 - RNA, 19 nt, Artificial Sequence
  Description of Artificial Sequence: Synthetic oligonucleotide
guguguaacuccacaguua

SEQ ID NO: 3123425 - RNA, 19 nt, Artificial Sequence
  Description of Artificial Sequence: Synthetic oligonucleotide
aggccacgcuaaguuacag

SEQ ID NO: 3123426 - RNA, 19 nt, Artificial Sequence
  Description of Artificial Sequence: Synthetic oligonucleotide
auggggcucugggaggcag

SEQ ID NO: 3123427 - RNA, 19 nt, Artificial Sequence
  Description of Artificial Sequence: Synthetic oligonucleotide
ugacuccuucagccacaug

SEQ ID NO: 3123428 - RNA, 19 nt, Artificial Sequence
  Description of Artificial Sequence: Synthetic oligonucleotide
ggaggcagugagugacuug

SEQ ID NO: 3123429 - RNA, 19 nt, Artificial Sequence
  Description of Artificial Sequence: Synthetic oligonucleotide
ccacaguuaacuccucuga

SEQ ID NO: 3123430 - RNA, 19 nt, Artificial Sequence
  Description of Artificial Sequence: Synthetic oligonucleotide
ggacacaggccacgcuaag

SEQ ID NO: 3123431 - RNA, 19 nt, Artificial Sequence
  Description of Artificial Sequence: Synthetic oligonucleotide
cagucacauucacaucgga

SEQ ID NO: 3123432 - RNA, 19 nt, Artificial Sequence
  Description of Artificial Sequence: Synthetic oligonucleotide
ggggaccauggccacaguc

SEQ ID NO: 3123433 - RNA, 19 nt, Artificial Sequence
  Description of Artificial Sequence: Synthetic oligonucleotide
ccuucagccacaugcucca

SEQ ID NO: 3123434 - RNA, 19 nt, Artificial Sequence
  Description of Artificial Sequence: Synthetic oligonucleotide
caggccacgcuaaguuaca

SEQ ID NO: 3123435 - RNA, 19 nt, Artificial Sequence
  Description of Artificial Sequence: Synthetic oligonucleotide
cacaggccacgcuaaguua

SEQ ID NO: 3123436 - RNA, 19 nt, Artificial Sequence
  Description of Artificial Sequence: Synthetic oligonucleotide
agccaagggcccagaaccu

SEQ ID NO: 3123437 - RNA, 19 nt, Artificial Sequence
  Description of Artificial Sequence: Synthetic oligonucleotide
cagccacaugcuccaccag

SEQ ID NO: 3123438 - RNA, 19 nt, Artificial Sequence
  Description of Artificial Sequence: Synthetic oligonucleotide
cugagaagccaagggccca

SEQ ID NO: 3123439 - RNA, 19 nt, Artificial Sequence
  Description of Artificial Sequence: Synthetic oligonucleotide
cagucacacagugugugua

SEQ ID NO: 3123440 - RNA, 19 nt, Artificial Sequence
  Description of Artificial Sequence: Synthetic oligonucleotide
gaccauggccacagucaca

SEQ ID NO: 3123441 - RNA, 19 nt, Artificial Sequence
  Description of Artificial Sequence: Synthetic oligonucleotide
gguugucuuguguccucuc

SEQ ID NO: 3123442 - RNA, 19 nt, Artificial Sequence
  Description of Artificial Sequence: Synthetic oligonucleotide
ccaccaggaagaagaacga

SEQ ID NO: 3123443 - RNA, 19 nt, Artificial Sequence
  Description of Artificial Sequence: Synthetic oligonucleotide
accagccaucguccaaauu

SEQ ID NO: 3123444 - RNA, 19 nt, Artificial Sequence
  Description of Artificial Sequence: Synthetic oligonucleotide
gccacaugcuccaccagga

SEQ ID NO: 3123445 - RNA, 19 nt, Artificial Sequence
  Description of Artificial Sequence: Synthetic oligonucleotide
ggaagaagaacgagcuggu

SEQ ID NO: 3123446 - RNA, 19 nt, Artificial Sequence
  Description of Artificial Sequence: Synthetic oligonucleotide
gagaagccaagggcccaga

SEQ ID NO: 3123447 - RNA, 19 nt, Artificial Sequence
  Description of Artificial Sequence: Synthetic oligonucleotide
ccacgcuaaguuacaguca

SEQ ID NO: 3123448 - RNA, 19 nt, Artificial Sequence
  Description of Artificial Sequence: Synthetic oligonucleotide
acucucaguaugacuccuu

SEQ ID NO: 3123449 - RNA, 19 nt, Artificial Sequence
  Description of Artificial Sequence: Synthetic oligonucleotide
acgcuaaguuacagucaca

SEQ ID NO: 3123450 - RNA, 19 nt, Artificial Sequence
  Description of Artificial Sequence: Synthetic oligonucleotide
gaagaagaacgagcugguu

SEQ ID NO: 3123451 - RNA, 19 nt, Artificial Sequence
  Description of Artificial Sequence: Synthetic oligonucleotide
ccacagucacauucacauc

SEQ ID NO: 3123452 - RNA, 19 nt, Artificial Sequence
  Description of Artificial Sequence: Synthetic oligonucleotide
caugcuccaccaggaagaa

SEQ ID NO: 3123453 - RNA, 19 nt, Artificial Sequence
  Description of Artificial Sequence: Synthetic oligonucleotide
cuucagccacaugcuccac

SEQ ID NO: 3123454 - RNA, 19 nt, Artificial Sequence
  Description of Artificial Sequence: Synthetic oligonucleotide
gcaccagccaucguccaaa

SEQ ID NO: 3123455 - RNA, 19 nt, Artificial Sequence
  Description of Artificial Sequence: Synthetic oligonucleotide
cccagaaccuuaggagaug

SEQ ID NO: 3123456 - RNA, 19 nt, Artificial Sequence
  Description of Artificial Sequence: Synthetic oligonucleotide
ccucucuuugcaccagcca

SEQ ID NO: 3123457 - RNA, 19 nt, Artificial Sequence
  Description of Artificial Sequence: Synthetic oligonucleotide
ggccacagucacauucaca

SEQ ID NO: 3123458 - RNA, 19 nt, Artificial Sequence
  Description of Artificial Sequence: Synthetic oligonucleotide
cacucucaguaugacuccu

SEQ ID NO: 3123459 - RNA, 19 nt, Artificial Sequence
  Description of Artificial Sequence: Synthetic oligonucleotide
ggccacgcuaaguuacagu

SEQ ID NO: 3123460 - RNA, 19 nt, Artificial Sequence
  Description of Artificial Sequence: Synthetic oligonucleotide
gcugguugucuuguguccu

SEQ ID NO: 3123461 - RNA, 19 nt, Artificial Sequence
  Description of Artificial Sequence: Synthetic oligonucleotide
aggcagugagugacuugaa

SEQ ID NO: 3123462 - RNA, 19 nt, Artificial Sequence
  Description of Artificial Sequence: Synthetic oligonucleotide
guccaaauuaggggaccau

SEQ ID NO: 3123463 - RNA, 19 nt, Artificial Sequence
  Description of Artificial Sequence: Synthetic oligonucleotide
ccaagggcccagaaccuua

SEQ ID NO: 3123464 - RNA, 19 nt, Artificial Sequence
  Description of Artificial Sequence: Synthetic oligonucleotide
cguccaaauuaggggacca

SEQ ID NO: 3123465 - RNA, 19 nt, Artificial Sequence
  Description of Artificial Sequence: Synthetic oligonucleotide
ccacaugcuccaccaggaa

SEQ ID NO: 3123466 - RNA, 19 nt, Artificial Sequence
  Description of Artificial Sequence: Synthetic oligonucleotide
cggacacaggccacgcuaa

SEQ ID NO: 3123467 - RNA, 19 nt, Artificial Sequence
  Description of Artificial Sequence: Synthetic oligonucleotide
ccuuaggagauggggcucu

SEQ ID NO: 3123468 - RNA, 19 nt, Artificial Sequence
  Description of Artificial Sequence: Synthetic oligonucleotide
caccagccaucguccaaau

SEQ ID NO: 3123469 - RNA, 19 nt, Artificial Sequence
  Description of Artificial Sequence: Synthetic oligonucleotide
cgagcugguugucuugugu

SEQ ID NO: 3123470 - RNA, 19 nt, Artificial Sequence
  Description of Artificial Sequence: Synthetic oligonucleotide
gggaggcagugagugacuu

SEQ ID NO: 3123471 - RNA, 19 nt, Artificial Sequence
  Description of Artificial Sequence: Synthetic oligonucleotide
gccaagggcccagaaccuu

SEQ ID NO: 3123472 - RNA, 19 nt, Artificial Sequence
  Description of Artificial Sequence: Synthetic oligonucleotide
ccauggccacagucacauu

SEQ ID NO: 3123473 - RNA, 19 nt, Artificial Sequence
  Description of Artificial Sequence: Synthetic oligonucleotide
auucuuggaacaaaggccc

SEQ ID NO: 3123474 - RNA, 19 nt, Artificial Sequence
  Description of Artificial Sequence: Synthetic oligonucleotide
aacaaaggcccacccgaac

SEQ ID NO: 3123475 - RNA, 19 nt, Artificial Sequence
  Description of Artificial Sequence: Synthetic oligonucleotide
uggaacaaaggcccacccg

SEQ ID NO: 3123476 - RNA, 19 nt, Artificial Sequence
  Description of Artificial Sequence: Synthetic oligonucleotide
acaaaggcccacccgaaca

SEQ ID NO: 3123477 - RNA, 19 nt, Artificial Sequence
  Description of Artificial Sequence: Synthetic oligonucleotide
aaaggcccacccgaacacc

SEQ ID NO: 3123478 - RNA, 19 nt, Artificial Sequence
  Description of Artificial Sequence: Synthetic oligonucleotide
uuggaacaaaggcccaccc

SEQ ID NO: 3123479 - RNA, 19 nt, Artificial Sequence
  Description of Artificial Sequence: Synthetic oligonucleotide
aaggcccacccgaacaccc

SEQ ID NO: 3123480 - RNA, 19 nt, Artificial Sequence
  Description of Artificial Sequence: Synthetic oligonucleotide
ggaacaaaggcccacccga

SEQ ID NO: 3123481 - RNA, 19 nt, Artificial Sequence
  Description of Artificial Sequence: Synthetic oligonucleotide
cuuggaacaaaggcccacc

SEQ ID NO: 3123482 - RNA, 19 nt, Artificial Sequence
  Description of Artificial Sequence: Synthetic oligonucleotide
uucuuggaacaaaggccca

SEQ ID NO: 3123483 - RNA, 19 nt, Artificial Sequence
  Description of Artificial Sequence: Synthetic oligonucleotide
caaaggcccacccgaacac

SEQ ID NO: 3123484 - RNA, 19 nt, Artificial Sequence
  Description of Artificial Sequence: Synthetic oligonucleotide
ucuuggaacaaaggcccac

SEQ ID NO: 3123485 - RNA, 19 nt, Artificial Sequence
  Description of Artificial Sequence: Synthetic oligonucleotide
gaacaaaggcccacccgaa

SEQ ID NO: 3123486 - RNA, 19 nt, Artificial Sequence
  Description of Artificial Sequence: Synthetic oligonucleotide
aggcccacccgaacacccg

SEQ ID NO: 3123487 - RNA, 19 nt, Artificial Sequence
  Description of Artificial Sequence: Synthetic oligonucleotide
ggcccacccgaacacccgc

SEQ ID NO: 3123488 - RNA, 19 nt, Artificial Sequence
  Description of Artificial Sequence: Synthetic oligonucleotide
aaaauaaucucucaggagc

SEQ ID NO: 3123489 - RNA, 19 nt, Artificial Sequence
  Description of Artificial Sequence: Synthetic oligonucleotide
aauaacucagaccaaauac

SEQ ID NO: 3123490 - RNA, 19 nt, Artificial Sequence
  Description of Artificial Sequence: Synthetic oligonucleotide
uuuaaaauaaucucucagg

SEQ ID NO: 3123491 - RNA, 19 nt, Artificial Sequence
  Description of Artificial Sequence: Synthetic oligonucleotide
uuaucuaaaauuuaaaaua

SEQ ID NO: 3123492 - RNA, 19 nt, Artificial Sequence
  Description of Artificial Sequence: Synthetic oligonucleotide
aaaauuuaaaauaaucucu

SEQ ID NO: 3123493 - RNA, 19 nt, Artificial Sequence
  Description of Artificial Sequence: Synthetic oligonucleotide
ucuaaaauuuaaaauaauc

SEQ ID NO: 3123494 - RNA, 19 nt, Artificial Sequence
  Description of Artificial Sequence: Synthetic oligonucleotide
uuaaaauaaucucucagga

SEQ ID NO: 3123495 - RNA, 19 nt, Artificial Sequence
  Description of Artificial Sequence: Synthetic oligonucleotide
acucagaccaaauacuucc

SEQ ID NO: 3123496 - RNA, 19 nt, Artificial Sequence
  Description of Artificial Sequence: Synthetic oligonucleotide
aaauuuaaaauaaucucuc

SEQ ID NO: 3123497 - RNA, 19 nt, Artificial Sequence
  Description of Artificial Sequence: Synthetic oligonucleotide
auuuaaaauaaucucucag

SEQ ID NO: 3123498 - RNA, 19 nt, Artificial Sequence
  Description of Artificial Sequence: Synthetic oligonucleotide
gaaagagcaaaucuaagug

SEQ ID NO: 3123499 - RNA, 19 nt, Artificial Sequence
  Description of Artificial Sequence: Synthetic oligonucleotide
uauucuacacaauuuaucu

SEQ ID NO: 3123500 - RNA, 19 nt, Artificial Sequence
  Description of Artificial Sequence: Synthetic oligonucleotide
uuuucucaaacuuugggca

SEQ ID NO: 3123501 - RNA, 19 nt, Artificial Sequence
  Description of Artificial Sequence: Synthetic oligonucleotide
aaaagagacuccuaaaaua

SEQ ID NO: 3123502 - RNA, 19 nt, Artificial Sequence
  Description of Artificial Sequence: Synthetic oligonucleotide
aauagguuccaguuuucuc

SEQ ID NO: 3123503 - RNA, 19 nt, Artificial Sequence
  Description of Artificial Sequence: Synthetic oligonucleotide
auuuaucuaaaauuuaaaa

SEQ ID NO: 3123504 - RNA, 19 nt, Artificial Sequence
  Description of Artificial Sequence: Synthetic oligonucleotide
auuauacagcuacacuucc

SEQ ID NO: 3123505 - RNA, 19 nt, Artificial Sequence
  Description of Artificial Sequence: Synthetic oligonucleotide
agguuaaaauaacucagac

SEQ ID NO: 3123506 - RNA, 19 nt, Artificial Sequence
  Description of Artificial Sequence: Synthetic oligonucleotide
uaaaauaaucucucaggag

SEQ ID NO: 3123507 - RNA, 19 nt, Artificial Sequence
  Description of Artificial Sequence: Synthetic oligonucleotide
uucuuuugccaaaagagac

SEQ ID NO: 3123508 - RNA, 19 nt, Artificial Sequence
  Description of Artificial Sequence: Synthetic oligonucleotide
aguuuucucaaacuuuggg

SEQ ID NO: 3123509 - RNA, 19 nt, Artificial Sequence
  Description of Artificial Sequence: Synthetic oligonucleotide
uaaaauagguuccaguuuu

SEQ ID NO: 3123510 - RNA, 19 nt, Artificial Sequence
  Description of Artificial Sequence: Synthetic oligonucleotide
aaaugaugcagguuaacau

SEQ ID NO: 3123511 - RNA, 19 nt, Artificial Sequence
  Description of Artificial Sequence: Synthetic oligonucleotide
uaaguggagguuaaaauaa

SEQ ID NO: 3123512 - RNA, 19 nt, Artificial Sequence
  Description of Artificial Sequence: Synthetic oligonucleotide
uucuacacaauuuaucuaa

SEQ ID NO: 3123513 - RNA, 19 nt, Artificial Sequence
  Description of Artificial Sequence: Synthetic oligonucleotide
agacuccuaaaauagguuc

SEQ ID NO: 3123514 - RNA, 19 nt, Artificial Sequence
  Description of Artificial Sequence: Synthetic oligonucleotide
guuaacauauucuacacaa

SEQ ID NO: 3123515 - RNA, 19 nt, Artificial Sequence
  Description of Artificial Sequence: Synthetic oligonucleotide
agaaagagcaaaucuaagu

SEQ ID NO: 3123516 - RNA, 19 nt, Artificial Sequence
  Description of Artificial Sequence: Synthetic oligonucleotide
uuuaacacgugcaugcuaa

SEQ ID NO: 3123517 - RNA, 19 nt, Artificial Sequence
  Description of Artificial Sequence: Synthetic oligonucleotide
cucuguauuauacagcuac

SEQ ID NO: 3123518 - RNA, 19 nt, Artificial Sequence
  Description of Artificial Sequence: Synthetic oligonucleotide
cuaaaauuuaaaauaaucu

SEQ ID NO: 3123519 - RNA, 19 nt, Artificial Sequence
  Description of Artificial Sequence: Synthetic oligonucleotide
uggagguuaaaauaacuca

SEQ ID NO: 3123520 - RNA, 19 nt, Artificial Sequence
  Description of Artificial Sequence: Synthetic oligonucleotide
uguauuauacagcuacacu

SEQ ID NO: 3123521 - RNA, 19 nt, Artificial Sequence
  Description of Artificial Sequence: Synthetic oligonucleotide
uacacaauuuaucuaaaau

SEQ ID NO: 3123522 - RNA, 19 nt, Artificial Sequence
  Description of Artificial Sequence: Synthetic oligonucleotide
guuuucucaaacuuugggc

SEQ ID NO: 3123523 - RNA, 19 nt, Artificial Sequence
  Description of Artificial Sequence: Synthetic oligonucleotide
uauuauacagcuacacuuc

SEQ ID NO: 3123524 - RNA, 19 nt, Artificial Sequence
  Description of Artificial Sequence: Synthetic oligonucleotide
aaugaugcagguuaacaua

SEQ ID NO: 3123525 - RNA, 19 nt, Artificial Sequence
  Description of Artificial Sequence: Synthetic oligonucleotide
agguuaacauauucuacac

SEQ ID NO: 3123526 - RNA, 19 nt, Artificial Sequence
  Description of Artificial Sequence: Synthetic oligonucleotide
aaaaugaugcagguuaaca

SEQ ID NO: 3123527 - RNA, 19 nt, Artificial Sequence
  Description of Artificial Sequence: Synthetic oligonucleotide
acacaauuuaucuaaaauu

SEQ ID NO: 3123528 - RNA, 19 nt, Artificial Sequence
  Description of Artificial Sequence: Synthetic oligonucleotide
ucuccucuguauuauacag

SEQ ID NO: 3123529 - RNA, 19 nt, Artificial Sequence
  Description of Artificial Sequence: Synthetic oligonucleotide
aauagaaagagcaaaucua

SEQ ID NO: 3123530 - RNA, 19 nt, Artificial Sequence
  Description of Artificial Sequence: Synthetic oligonucleotide
uagccagcugaauagaaag

SEQ ID NO: 3123531 - RNA, 19 nt, Artificial Sequence
  Description of Artificial Sequence: Synthetic oligonucleotide
uacagcuacacuuccaugu

SEQ ID NO: 3123532 - RNA, 19 nt, Artificial Sequence
  Description of Artificial Sequence: Synthetic oligonucleotide
uccucuguauuauacagcu

SEQ ID NO: 3123533 - RNA, 19 nt, Artificial Sequence
  Description of Artificial Sequence: Synthetic oligonucleotide
cucaggagcaucuagccag

SEQ ID NO: 3123534 - RNA, 19 nt, Artificial Sequence
  Description of Artificial Sequence: Synthetic oligonucleotide
ucuaaguggagguuaaaau

SEQ ID NO: 3123535 - RNA, 19 nt, Artificial Sequence
  Description of Artificial Sequence: Synthetic oligonucleotide
aaauaacucagaccaaaua

SEQ ID NO: 3123536 - RNA, 19 nt, Artificial Sequence
  Description of Artificial Sequence: Synthetic oligonucleotide
uagaaagagcaaaucuaag

SEQ ID NO: 3123537 - RNA, 19 nt, Artificial Sequence
  Description of Artificial Sequence: Synthetic oligonucleotide
uaaaauaacucagaccaaa

SEQ ID NO: 3123538 - RNA, 19 nt, Artificial Sequence
  Description of Artificial Sequence: Synthetic oligonucleotide
gaauagaaagagcaaaucu

SEQ ID NO: 3123539 - RNA, 19 nt, Artificial Sequence
  Description of Artificial Sequence: Synthetic oligonucleotide
uauacagcuacacuuccau

SEQ ID NO: 3123540 - RNA, 19 nt, Artificial Sequence
  Description of Artificial Sequence: Synthetic oligonucleotide
aauuuaucuaaaauuuaaa

SEQ ID NO: 3123541 - RNA, 19 nt, Artificial Sequence
  Description of Artificial Sequence: Synthetic oligonucleotide
ucuuuugccaaaagagacu

SEQ ID NO: 3123542 - RNA, 19 nt, Artificial Sequence
  Description of Artificial Sequence: Synthetic oligonucleotide
gagcaaaucuaaguggagg

SEQ ID NO: 3123543 - RNA, 19 nt, Artificial Sequence
  Description of Artificial Sequence: Synthetic oligonucleotide
acauauucuacacaauuua

SEQ ID NO: 3123544 - RNA, 19 nt, Artificial Sequence
  Description of Artificial Sequence: Synthetic oligonucleotide
gguuaaaauaacucagacc

SEQ ID NO: 3123545 - RNA, 19 nt, Artificial Sequence
  Description of Artificial Sequence: Synthetic oligonucleotide
aagagcaaaucuaagugga

SEQ ID NO: 3123546 - RNA, 19 nt, Artificial Sequence
  Description of Artificial Sequence: Synthetic oligonucleotide
agcaaaucuaaguggaggu

SEQ ID NO: 3123547 - RNA, 19 nt, Artificial Sequence
  Description of Artificial Sequence: Synthetic oligonucleotide
ucucucaggagcaucuagc

SEQ ID NO: 3123548 - RNA, 19 nt, Artificial Sequence
  Description of Artificial Sequence: Synthetic oligonucleotide
uaaucucucaggagcaucu

SEQ ID NO: 3123549 - RNA, 19 nt, Artificial Sequence
  Description of Artificial Sequence: Synthetic oligonucleotide
uuugccaaaagagacuccu

SEQ ID NO: 3123550 - RNA, 19 nt, Artificial Sequence
  Description of Artificial Sequence: Synthetic oligonucleotide
caucuagccagcugaauag

SEQ ID NO: 3123551 - RNA, 19 nt, Artificial Sequence
  Description of Artificial Sequence: Synthetic oligonucleotide
caauuuaucuaaaauuuaa

SEQ ID NO: 3123552 - RNA, 19 nt, Artificial Sequence
  Description of Artificial Sequence: Synthetic oligonucleotide
aaauaaucucucaggagca

SEQ ID NO: 3123553 - RNA, 19 nt, Artificial Sequence
  Description of Artificial Sequence: Synthetic oligonucleotide
gaugcagguuaacauauuc

SEQ ID NO: 3123554 - RNA, 19 nt, Artificial Sequence
  Description of Artificial Sequence: Synthetic oligonucleotide
uuucuccucuguauuauac

SEQ ID NO: 3123555 - RNA, 19 nt, Artificial Sequence
  Description of Artificial Sequence: Synthetic oligonucleotide
ugcagguuaacauauucua

SEQ ID NO: 3123556 - RNA, 19 nt, Artificial Sequence
  Description of Artificial Sequence: Synthetic oligonucleotide
ugggcaaccuaucauuucu

SEQ ID NO: 3123557 - RNA, 19 nt, Artificial Sequence
  Description of Artificial Sequence: Synthetic oligonucleotide
aacuuugggcaaccuauca

SEQ ID NO: 3123558 - RNA, 19 nt, Artificial Sequence
  Description of Artificial Sequence: Synthetic oligonucleotide
ucuguauuauacagcuaca

SEQ ID NO: 3123559 - RNA, 19 nt, Artificial Sequence
  Description of Artificial Sequence: Synthetic oligonucleotide
aaccuaucauuucuccucu

SEQ ID NO: 3123560 - RNA, 19 nt, Artificial Sequence
  Description of Artificial Sequence: Synthetic oligonucleotide
caaccuaucauuucuccuc

SEQ ID NO: 3123561 - RNA, 19 nt, Artificial Sequence
  Description of Artificial Sequence: Synthetic oligonucleotide
uacacuuccauguuauuuu

SEQ ID NO: 3123562 - RNA, 19 nt, Artificial Sequence
  Description of Artificial Sequence: Synthetic oligonucleotide
uccuaaaauagguuccagu

SEQ ID NO: 3123563 - RNA, 19 nt, Artificial Sequence
  Description of Artificial Sequence: Synthetic oligonucleotide
aagagacuccuaaaauagg

SEQ ID NO: 3123564 - RNA, 19 nt, Artificial Sequence
  Description of Artificial Sequence: Synthetic oligonucleotide
aaguggagguuaaaauaac

SEQ ID NO: 3123565 - RNA, 19 nt, Artificial Sequence
  Description of Artificial Sequence: Synthetic oligonucleotide
ugaauagaaagagcaaauc

SEQ ID NO: 3123566 - RNA, 19 nt, Artificial Sequence
  Description of Artificial Sequence: Synthetic oligonucleotide
ugccaaaagagacuccuaa

SEQ ID NO: 3123567 - RNA, 19 nt, Artificial Sequence
  Description of Artificial Sequence: Synthetic oligonucleotide
cagguuaacauauucuaca

SEQ ID NO: 3123568 - RNA, 19 nt, Artificial Sequence
  Description of Artificial Sequence: Synthetic oligonucleotide
uaacucagaccaaauacuu

SEQ ID NO: 3123569 - RNA, 19 nt, Artificial Sequence
  Description of Artificial Sequence: Synthetic oligonucleotide
aacucagaccaaauacuuc

SEQ ID NO: 3123570 - RNA, 19 nt, Artificial Sequence
  Description of Artificial Sequence: Synthetic oligonucleotide
cagcugaauagaaagagca

SEQ ID NO: 3123571 - RNA, 19 nt, Artificial Sequence
  Description of Artificial Sequence: Synthetic oligonucleotide
auaacucagaccaaauacu

SEQ ID NO: 3123572 - RNA, 19 nt, Artificial Sequence
  Description of Artificial Sequence: Synthetic oligonucleotide
aacauauucuacacaauuu

SEQ ID NO: 3123573 - RNA, 19 nt, Artificial Sequence
  Description of Artificial Sequence: Synthetic oligonucleotide
gacuccuaaaauagguucc

SEQ ID NO: 3123574 - RNA, 19 nt, Artificial Sequence
  Description of Artificial Sequence: Synthetic oligonucleotide
ucagaccaaauacuuccca

SEQ ID NO: 3123575 - RNA, 19 nt, Artificial Sequence
  Description of Artificial Sequence: Synthetic oligonucleotide
aaaauagguuccaguuuuc

SEQ ID NO: 3123576 - RNA, 19 nt, Artificial Sequence
  Description of Artificial Sequence: Synthetic oligonucleotide
guauuauacagcuacacuu

SEQ ID NO: 3123577 - RNA, 19 nt, Artificial Sequence
  Description of Artificial Sequence: Synthetic oligonucleotide
uuaacauauucuacacaau

SEQ ID NO: 3123578 - RNA, 19 nt, Artificial Sequence
  Description of Artificial Sequence: Synthetic oligonucleotide
cuaaguggagguuaaaaua

SEQ ID NO: 3123579 - RNA, 19 nt, Artificial Sequence
  Description of Artificial Sequence: Synthetic oligonucleotide
aaauagguuccaguuuucu

SEQ ID NO: 3123580 - RNA, 19 nt, Artificial Sequence
  Description of Artificial Sequence: Synthetic oligonucleotide
auagaaagagcaaaucuaa

SEQ ID NO: 3123581 - RNA, 19 nt, Artificial Sequence
  Description of Artificial Sequence: Synthetic oligonucleotide
cucucaggagcaucuagcc

SEQ ID NO: 3123582 - RNA, 19 nt, Artificial Sequence
  Description of Artificial Sequence: Synthetic oligonucleotide
cuuuugccaaaagagacuc

SEQ ID NO: 3123583 - RNA, 19 nt, Artificial Sequence
  Description of Artificial Sequence: Synthetic oligonucleotide
aaaauaacucagaccaaau

SEQ ID NO: 3123584 - RNA, 19 nt, Artificial Sequence
  Description of Artificial Sequence: Synthetic oligonucleotide
ucuacacaauuuaucuaaa

SEQ ID NO: 3123585 - RNA, 19 nt, Artificial Sequence
  Description of Artificial Sequence: Synthetic oligonucleotide
uccaguuuucucaaacuuu

SEQ ID NO: 3123586 - RNA, 19 nt, Artificial Sequence
  Description of Artificial Sequence: Synthetic oligonucleotide
uuccaguuuucucaaacuu

SEQ ID NO: 3123587 - RNA, 19 nt, Artificial Sequence
  Description of Artificial Sequence: Synthetic oligonucleotide
ucaaacuuugggcaaccua

SEQ ID NO: 3123588 - RNA, 19 nt, Artificial Sequence
  Description of Artificial Sequence: Synthetic oligonucleotide
aaacuuugggcaaccuauc

SEQ ID NO: 3123589 - RNA, 19 nt, Artificial Sequence
  Description of Artificial Sequence: Synthetic oligonucleotide
cacaauuuaucuaaaauuu

SEQ ID NO: 3123590 - RNA, 19 nt, Artificial Sequence
  Description of Artificial Sequence: Synthetic oligonucleotide
uuuuaacacgugcaugcua

SEQ ID NO: 3123591 - RNA, 19 nt, Artificial Sequence
  Description of Artificial Sequence: Synthetic oligonucleotide
agagacuccuaaaauaggu

SEQ ID NO: 3123592 - RNA, 19 nt, Artificial Sequence
  Description of Artificial Sequence: Synthetic oligonucleotide
uucuccucuguauuauaca

SEQ ID NO: 3123593 - RNA, 19 nt, Artificial Sequence
  Description of Artificial Sequence: Synthetic oligonucleotide
auaaucucucaggagcauc

SEQ ID NO: 3123594 - RNA, 19 nt, Artificial Sequence
  Description of Artificial Sequence: Synthetic oligonucleotide
uuucucaaacuuugggcaa

SEQ ID NO: 3123595 - RNA, 19 nt, Artificial Sequence
  Description of Artificial Sequence: Synthetic oligonucleotide
uuuugccaaaagagacucc

SEQ ID NO: 3123596 - RNA, 19 nt, Artificial Sequence
  Description of Artificial Sequence: Synthetic oligonucleotide
ucucaggagcaucuagcca

SEQ ID NO: 3123597 - RNA, 19 nt, Artificial Sequence
  Description of Artificial Sequence: Synthetic oligonucleotide
ucuagccagcugaauagaa

SEQ ID NO: 3123598 - RNA, 19 nt, Artificial Sequence
  Description of Artificial Sequence: Synthetic oligonucleotide
uuugggcaaccuaucauuu

SEQ ID NO: 3123599 - RNA, 19 nt, Artificial Sequence
  Description of Artificial Sequence: Synthetic oligonucleotide
aucucucaggagcaucuag

SEQ ID NO: 3123600 - RNA, 19 nt, Artificial Sequence
  Description of Artificial Sequence: Synthetic oligonucleotide
cuccucuguauuauacagc

SEQ ID NO: 3123601 - RNA, 19 nt, Artificial Sequence
  Description of Artificial Sequence: Synthetic oligonucleotide
cucagaccaaauacuuccc

SEQ ID NO: 3123602 - RNA, 19 nt, Artificial Sequence
  Description of Artificial Sequence: Synthetic oligonucleotide
gagguuaaaauaacucaga

SEQ ID NO: 3123603 - RNA, 19 nt, Artificial Sequence
  Description of Artificial Sequence: Synthetic oligonucleotide
caguuuucucaaacuuugg

SEQ ID NO: 3123604 - RNA, 19 nt, Artificial Sequence
  Description of Artificial Sequence: Synthetic oligonucleotide
ccaguuuucucaaacuuug

SEQ ID NO: 3123605 - RNA, 19 nt, Artificial Sequence
  Description of Artificial Sequence: Synthetic oligonucleotide
auucuacacaauuuaucua

SEQ ID NO: 3123606 - RNA, 19 nt, Artificial Sequence
  Description of Artificial Sequence: Synthetic oligonucleotide
ucauuucuccucuguauua

SEQ ID NO: 3123607 - RNA, 19 nt, Artificial Sequence
  Description of Artificial Sequence: Synthetic oligonucleotide
aaaucuaaguggagguuaa

SEQ ID NO: 3123608 - RNA, 19 nt, Artificial Sequence
  Description of Artificial Sequence: Synthetic oligonucleotide
guggagguuaaaauaacuc

SEQ ID NO: 3123609 - RNA, 19 nt, Artificial Sequence
  Description of Artificial Sequence: Synthetic oligonucleotide
ggagcaucuagccagcuga

SEQ ID NO: 3123610 - RNA, 19 nt, Artificial Sequence
  Description of Artificial Sequence: Synthetic oligonucleotide
acuuugggcaaccuaucau

SEQ ID NO: 3123611 - RNA, 19 nt, Artificial Sequence
  Description of Artificial Sequence: Synthetic oligonucleotide
caaacuuugggcaaccuau

SEQ ID NO: 3123612 - RNA, 19 nt, Artificial Sequence
  Description of Artificial Sequence: Synthetic oligonucleotide
ucaggagcaucuagccagc

SEQ ID NO: 3123613 - RNA, 19 nt, Artificial Sequence
  Description of Artificial Sequence: Synthetic oligonucleotide
aguggagguuaaaauaacu

SEQ ID NO: 3123614 - RNA, 19 nt, Artificial Sequence
  Description of Artificial Sequence: Synthetic oligonucleotide
aauaaucucucaggagcau

SEQ ID NO: 3123615 - RNA, 19 nt, Artificial Sequence
  Description of Artificial Sequence: Synthetic oligonucleotide
auacagcuacacuuccaug

SEQ ID NO: 3123616 - RNA, 19 nt, Artificial Sequence
  Description of Artificial Sequence: Synthetic oligonucleotide
acaauuuaucuaaaauuua

SEQ ID NO: 3123617 - RNA, 19 nt, Artificial Sequence
  Description of Artificial Sequence: Synthetic oligonucleotide
gguuccaguuuucucaaac

SEQ ID NO: 3123618 - RNA, 19 nt, Artificial Sequence
  Description of Artificial Sequence: Synthetic oligonucleotide
aucuaaguggagguuaaaa

SEQ ID NO: 3123619 - RNA, 19 nt, Artificial Sequence
  Description of Artificial Sequence: Synthetic oligonucleotide
uagguuccaguuuucucaa

SEQ ID NO: 3123620 - RNA, 19 nt, Artificial Sequence
  Description of Artificial Sequence: Synthetic oligonucleotide
ucucaaacuuugggcaacc

SEQ ID NO: 3123621 - RNA, 19 nt, Artificial Sequence
  Description of Artificial Sequence: Synthetic oligonucleotide
uucucaaacuuugggcaac

SEQ ID NO: 3123622 - RNA, 19 nt, Artificial Sequence
  Description of Artificial Sequence: Synthetic oligonucleotide
augaugcagguuaacauau

SEQ ID NO: 3123623 - RNA, 19 nt, Artificial Sequence
  Description of Artificial Sequence: Synthetic oligonucleotide
gccagcugaauagaaagag

SEQ ID NO: 3123624 - RNA, 19 nt, Artificial Sequence
  Description of Artificial Sequence: Synthetic oligonucleotide
acuccuaaaauagguucca

SEQ ID NO: 3123625 - RNA, 19 nt, Artificial Sequence
  Description of Artificial Sequence: Synthetic oligonucleotide
augcagguuaacauauucu

SEQ ID NO: 3123626 - RNA, 19 nt, Artificial Sequence
  Description of Artificial Sequence: Synthetic oligonucleotide
agagcaaaucuaaguggag

SEQ ID NO: 3123627 - RNA, 19 nt, Artificial Sequence
  Description of Artificial Sequence: Synthetic oligonucleotide
ggcaaccuaucauuucucc

SEQ ID NO: 3123628 - RNA, 19 nt, Artificial Sequence
  Description of Artificial Sequence: Synthetic oligonucleotide
gguuaacauauucuacaca

SEQ ID NO: 3123629 - RNA, 19 nt, Artificial Sequence
  Description of Artificial Sequence: Synthetic oligonucleotide
cuacacaauuuaucuaaaa

SEQ ID NO: 3123630 - RNA, 19 nt, Artificial Sequence
  Description of Artificial Sequence: Synthetic oligonucleotide
aggagcaucuagccagcug

SEQ ID NO: 3123631 - RNA, 19 nt, Artificial Sequence
  Description of Artificial Sequence: Synthetic oligonucleotide
uugggcaaccuaucauuuc

SEQ ID NO: 3123632 - RNA, 19 nt, Artificial Sequence
  Description of Artificial Sequence: Synthetic oligonucleotide
uaacacgugcaugcuaaaa

SEQ ID NO: 3123633 - RNA, 19 nt, Artificial Sequence
  Description of Artificial Sequence: Synthetic oligonucleotide
cauauucuacacaauuuau

SEQ ID NO: 3123634 - RNA, 19 nt, Artificial Sequence
  Description of Artificial Sequence: Synthetic oligonucleotide
acagcuacacuuccauguu

SEQ ID NO: 3123635 - RNA, 19 nt, Artificial Sequence
  Description of Artificial Sequence: Synthetic oligonucleotide
caaaucuaaguggagguua

SEQ ID NO: 3123636 - RNA, 19 nt, Artificial Sequence
  Description of Artificial Sequence: Synthetic oligonucleotide
cugaauagaaagagcaaau

SEQ ID NO: 3123637 - RNA, 19 nt, Artificial Sequence
  Description of Artificial Sequence: Synthetic oligonucleotide
uuaacacgugcaugcuaaa

SEQ ID NO: 3123638 - RNA, 19 nt, Artificial Sequence
  Description of Artificial Sequence: Synthetic oligonucleotide
gcugaauagaaagagcaaa

SEQ ID NO: 3123639 - RNA, 19 nt, Artificial Sequence
  Description of Artificial Sequence: Synthetic oligonucleotide
agcuacacuuccauguuau

SEQ ID NO: 3123640 - RNA, 19 nt, Artificial Sequence
  Description of Artificial Sequence: Synthetic oligonucleotide
cuagccagcugaauagaaa

SEQ ID NO: 3123641 - RNA, 19 nt, Artificial Sequence
  Description of Artificial Sequence: Synthetic oligonucleotide
auuucuccucuguauuaua

SEQ ID NO: 3123642 - RNA, 19 nt, Artificial Sequence
  Description of Artificial Sequence: Synthetic oligonucleotide
aaucuaaguggagguuaaa

SEQ ID NO: 3123643 - RNA, 19 nt, Artificial Sequence
  Description of Artificial Sequence: Synthetic oligonucleotide
uugccaaaagagacuccua

SEQ ID NO: 3123644 - RNA, 19 nt, Artificial Sequence
  Description of Artificial Sequence: Synthetic oligonucleotide
ugaugcagguuaacauauu

SEQ ID NO: 3123645 - RNA, 19 nt, Artificial Sequence
  Description of Artificial Sequence: Synthetic oligonucleotide
guuccaguuuucucaaacu

SEQ ID NO: 3123646 - RNA, 19 nt, Artificial Sequence
  Description of Artificial Sequence: Synthetic oligonucleotide
cuaucauuucuccucugua

SEQ ID NO: 3123647 - RNA, 19 nt, Artificial Sequence
  Description of Artificial Sequence: Synthetic oligonucleotide
cuccuaaaauagguuccag

SEQ ID NO: 3123648 - RNA, 19 nt, Artificial Sequence
  Description of Artificial Sequence: Synthetic oligonucleotide
cuaaaauagguuccaguuu

SEQ ID NO: 3123649 - RNA, 19 nt, Artificial Sequence
  Description of Artificial Sequence: Synthetic oligonucleotide
gcagguuaacauauucuac

SEQ ID NO: 3123650 - RNA, 19 nt, Artificial Sequence
  Description of Artificial Sequence: Synthetic oligonucleotide
cuuugggcaaccuaucauu

SEQ ID NO: 3123651 - RNA, 19 nt, Artificial Sequence
  Description of Artificial Sequence: Synthetic oligonucleotide
accuaucauuucuccucug

SEQ ID NO: 3123652 - RNA, 19 nt, Artificial Sequence
  Description of Artificial Sequence: Synthetic oligonucleotide
gcaucuagccagcugaaua

SEQ ID NO: 3123653 - RNA, 19 nt, Artificial Sequence
  Description of Artificial Sequence: Synthetic oligonucleotide
ccuaaaauagguuccaguu

SEQ ID NO: 3123654 - RNA, 19 nt, Artificial Sequence
  Description of Artificial Sequence: Synthetic oligonucleotide
aaucucucaggagcaucua

SEQ ID NO: 3123655 - RNA, 19 nt, Artificial Sequence
  Description of Artificial Sequence: Synthetic oligonucleotide
agccagcugaauagaaaga

SEQ ID NO: 3123656 - RNA, 19 nt, Artificial Sequence
  Description of Artificial Sequence: Synthetic oligonucleotide
gccaaaagagacuccuaaa

SEQ ID NO: 3123657 - RNA, 19 nt, Artificial Sequence
  Description of Artificial Sequence: Synthetic oligonucleotide
gagacuccuaaaauagguu

SEQ ID NO: 3123658 - RNA, 19 nt, Artificial Sequence
  Description of Artificial Sequence: Synthetic oligonucleotide
agcaucuagccagcugaau

SEQ ID NO: 3123659 - RNA, 19 nt, Artificial Sequence
  Description of Artificial Sequence: Synthetic oligonucleotide
gcaaccuaucauuucuccu

SEQ ID NO: 3123660 - RNA, 19 nt, Artificial Sequence
  Description of Artificial Sequence: Synthetic oligonucleotide
agguuccaguuuucucaaa

SEQ ID NO: 3123661 - RNA, 19 nt, Artificial Sequence
  Description of Artificial Sequence: Synthetic oligonucleotide
cauuucuccucuguauuau

SEQ ID NO: 3123662 - RNA, 19 nt, Artificial Sequence
  Description of Artificial Sequence: Synthetic oligonucleotide
gagcaucuagccagcugaa

SEQ ID NO: 3123663 - RNA, 19 nt, Artificial Sequence
  Description of Artificial Sequence: Synthetic oligonucleotide
cagcuacacuuccauguua

SEQ ID NO: 3123664 - RNA, 19 nt, Artificial Sequence
  Description of Artificial Sequence: Synthetic oligonucleotide
ccuaucauuucuccucugu

SEQ ID NO: 3123665 - RNA, 19 nt, Artificial Sequence
  Description of Artificial Sequence: Synthetic oligonucleotide
gggcaaccuaucauuucuc

SEQ ID NO: 3123666 - RNA, 19 nt, Artificial Sequence
  Description of Artificial Sequence: Synthetic oligonucleotide
cucaaacuuugggcaaccu

SEQ ID NO: 3123667 - RNA, 19 nt, Artificial Sequence
  Description of Artificial Sequence: Synthetic oligonucleotide
gcaaaucuaaguggagguu

SEQ ID NO: 3123668 - RNA, 19 nt, Artificial Sequence
  Description of Artificial Sequence: Synthetic oligonucleotide
ccucuguauuauacagcua

SEQ ID NO: 3123669 - RNA, 19 nt, Artificial Sequence
  Description of Artificial Sequence: Synthetic oligonucleotide
caggagcaucuagccagcu

SEQ ID NO: 3123670 - RNA, 19 nt, Artificial Sequence
  Description of Artificial Sequence: Synthetic oligonucleotide
aacagaauagauuaagggc

SEQ ID NO: 3123671 - RNA, 19 nt, Artificial Sequence
  Description of Artificial Sequence: Synthetic oligonucleotide
aaacagaauagauuaaggg

SEQ ID NO: 3123672 - RNA, 19 nt, Artificial Sequence
  Description of Artificial Sequence: Synthetic oligonucleotide
uguguuuucagcauccucc

SEQ ID NO: 3123673 - RNA, 19 nt, Artificial Sequence
  Description of Artificial Sequence: Synthetic oligonucleotide
ugugcuuaaucacaagagg

SEQ ID NO: 3123674 - RNA, 19 nt, Artificial Sequence
  Description of Artificial Sequence: Synthetic oligonucleotide
acagaauagauuaagggcg

SEQ ID NO: 3123675 - RNA, 19 nt, Artificial Sequence
  Description of Artificial Sequence: Synthetic oligonucleotide
aauagauuaagggcgguuc

SEQ ID NO: 3123676 - RNA, 19 nt, Artificial Sequence
  Description of Artificial Sequence: Synthetic oligonucleotide
uccaacaaggcacugacca

SEQ ID NO: 3123677 - RNA, 19 nt, Artificial Sequence
  Description of Artificial Sequence: Synthetic oligonucleotide
aucacaagaggacuuggcc

SEQ ID NO: 3123678 - RNA, 19 nt, Artificial Sequence
  Description of Artificial Sequence: Synthetic oligonucleotide
ucaaggacaaggcagggcu

SEQ ID NO: 3123679 - RNA, 19 nt, Artificial Sequence
  Description of Artificial Sequence: Synthetic oligonucleotide
uucuuagugugcuuaauca

SEQ ID NO: 3123680 - RNA, 19 nt, Artificial Sequence
  Description of Artificial Sequence: Synthetic oligonucleotide
caagucaucucucuggcgc

SEQ ID NO: 3123681 - RNA, 19 nt, Artificial Sequence
  Description of Artificial Sequence: Synthetic oligonucleotide
aaucacaagaggacuuggc

SEQ ID NO: 3123682 - RNA, 19 nt, Artificial Sequence
  Description of Artificial Sequence: Synthetic oligonucleotide
ugcuuaaucacaagaggac

SEQ ID NO: 3123683 - RNA, 19 nt, Artificial Sequence
  Description of Artificial Sequence: Synthetic oligonucleotide
ugaccauuuggucagcugu

SEQ ID NO: 3123684 - RNA, 19 nt, Artificial Sequence
  Description of Artificial Sequence: Synthetic oligonucleotide
auuuggucagcugucaagg

SEQ ID NO: 3123685 - RNA, 19 nt, Artificial Sequence
  Description of Artificial Sequence: Synthetic oligonucleotide
agugugcuuaaucacaaga

SEQ ID NO: 3123686 - RNA, 19 nt, Artificial Sequence
  Description of Artificial Sequence: Synthetic oligonucleotide
uucguuucugccuuccaag

SEQ ID NO: 3123687 - RNA, 19 nt, Artificial Sequence
  Description of Artificial Sequence: Synthetic oligonucleotide
ucacaagaggacuuggcca

SEQ ID NO: 3123688 - RNA, 19 nt, Artificial Sequence
  Description of Artificial Sequence: Synthetic oligonucleotide
uuaagggcgguucagcauc

SEQ ID NO: 3123689 - RNA, 19 nt, Artificial Sequence
  Description of Artificial Sequence: Synthetic oligonucleotide
cagaauagauuaagggcgg

SEQ ID NO: 3123690 - RNA, 19 nt, Artificial Sequence
  Description of Artificial Sequence: Synthetic oligonucleotide
aagaggacuuggccaaagg

SEQ ID NO: 3123691 - RNA, 19 nt, Artificial Sequence
  Description of Artificial Sequence: Synthetic oligonucleotide
ucuuagugugcuuaaucac

SEQ ID NO: 3123692 - RNA, 19 nt, Artificial Sequence
  Description of Artificial Sequence: Synthetic oligonucleotide
caaggcacugaccauuugg

SEQ ID NO: 3123693 - RNA, 19 nt, Artificial Sequence
  Description of Artificial Sequence: Synthetic oligonucleotide
uuagugugcuuaaucacaa

SEQ ID NO: 3123694 - RNA, 19 nt, Artificial Sequence
  Description of Artificial Sequence: Synthetic oligonucleotide
ucaugucuccugaaggccc

SEQ ID NO: 3123695 - RNA, 19 nt, Artificial Sequence
  Description of Artificial Sequence: Synthetic oligonucleotide
cugucaaggacaaggcagg

SEQ ID NO: 3123696 - RNA, 19 nt, Artificial Sequence
  Description of Artificial Sequence: Synthetic oligonucleotide
uuuucagcauccucccucc

SEQ ID NO: 3123697 - RNA, 19 nt, Artificial Sequence
  Description of Artificial Sequence: Synthetic oligonucleotide
uuaaucacaagaggacuug

SEQ ID NO: 3123698 - RNA, 19 nt, Artificial Sequence
  Description of Artificial Sequence: Synthetic oligonucleotide
cuuagugugcuuaaucaca

SEQ ID NO: 3123699 - RNA, 19 nt, Artificial Sequence
  Description of Artificial Sequence: Synthetic oligonucleotide
agauuaagggcgguucagc

SEQ ID NO: 3123700 - RNA, 19 nt, Artificial Sequence
  Description of Artificial Sequence: Synthetic oligonucleotide
cuccugaaggcccauuucg

SEQ ID NO: 3123701 - RNA, 19 nt, Artificial Sequence
  Description of Artificial Sequence: Synthetic oligonucleotide
cuuggccaaagguuggcgg

SEQ ID NO: 3123702 - RNA, 19 nt, Artificial Sequence
  Description of Artificial Sequence: Synthetic oligonucleotide
auagauuaagggcgguuca

SEQ ID NO: 3123703 - RNA, 19 nt, Artificial Sequence
  Description of Artificial Sequence: Synthetic oligonucleotide
uaaucacaagaggacuugg

SEQ ID NO: 3123704 - RNA, 19 nt, Artificial Sequence
  Description of Artificial Sequence: Synthetic oligonucleotide
gguucagcauccaacaagg

SEQ ID NO: 3123705 - RNA, 19 nt, Artificial Sequence
  Description of Artificial Sequence: Synthetic oligonucleotide
agggcuguucuucuuagug

SEQ ID NO: 3123706 - RNA, 19 nt, Artificial Sequence
  Description of Artificial Sequence: Synthetic oligonucleotide
ucugccuuccaagucaucu

SEQ ID NO: 3123707 - RNA, 19 nt, Artificial Sequence
  Description of Artificial Sequence: Synthetic oligonucleotide
aggcccauuucguuucugc

SEQ ID NO: 3123708 - RNA, 19 nt, Artificial Sequence
  Description of Artificial Sequence: Synthetic oligonucleotide
gauuaagggcgguucagca

SEQ ID NO: 3123709 - RNA, 19 nt, Artificial Sequence
  Description of Artificial Sequence: Synthetic oligonucleotide
cauuuggucagcugucaag

SEQ ID NO: 3123710 - RNA, 19 nt, Artificial Sequence
  Description of Artificial Sequence: Synthetic oligonucleotide
cauccaacaaggcacugac

SEQ ID NO: 3123711 - RNA, 19 nt, Artificial Sequence
  Description of Artificial Sequence: Synthetic oligonucleotide
guuucugccuuccaaguca

SEQ ID NO: 3123712 - RNA, 19 nt, Artificial Sequence
  Description of Artificial Sequence: Synthetic oligonucleotide
uuggucagcugucaaggac

SEQ ID NO: 3123713 - RNA, 19 nt, Artificial Sequence
  Description of Artificial Sequence: Synthetic oligonucleotide
uuucguuucugccuuccaa

SEQ ID NO: 3123714 - RNA, 19 nt, Artificial Sequence
  Description of Artificial Sequence: Synthetic oligonucleotide
cuucuuagugugcuuaauc

SEQ ID NO: 3123715 - RNA, 19 nt, Artificial Sequence
  Description of Artificial Sequence: Synthetic oligonucleotide
agaggacuuggccaaaggu

SEQ ID NO: 3123716 - RNA, 19 nt, Artificial Sequence
  Description of Artificial Sequence: Synthetic oligonucleotide
gugugcuuaaucacaagag

SEQ ID NO: 3123717 - RNA, 19 nt, Artificial Sequence
  Description of Artificial Sequence: Synthetic oligonucleotide
guuuucagcauccucccuc

SEQ ID NO: 3123718 - RNA, 19 nt, Artificial Sequence
  Description of Artificial Sequence: Synthetic oligonucleotide
uuggccaaagguuggcggc

SEQ ID NO: 3123719 - RNA, 19 nt, Artificial Sequence
  Description of Artificial Sequence: Synthetic oligonucleotide
aggacuuggccaaagguug

SEQ ID NO: 3123720 - RNA, 19 nt, Artificial Sequence
  Description of Artificial Sequence: Synthetic oligonucleotide
aagucaucucucuggcgcu

SEQ ID NO: 3123721 - RNA, 19 nt, Artificial Sequence
  Description of Artificial Sequence: Synthetic oligonucleotide
ugaaggcccauuucguuuc

SEQ ID NO: 3123722 - RNA, 19 nt, Artificial Sequence
  Description of Artificial Sequence: Synthetic oligonucleotide
uagauuaagggcgguucag

SEQ ID NO: 3123723 - RNA, 19 nt, Artificial Sequence
  Description of Artificial Sequence: Synthetic oligonucleotide
agcauccucccuccucucc

SEQ ID NO: 3123724 - RNA, 19 nt, Artificial Sequence
  Description of Artificial Sequence: Synthetic oligonucleotide
guguuuucagcauccuccc

SEQ ID NO: 3123725 - RNA, 19 nt, Artificial Sequence
  Description of Artificial Sequence: Synthetic oligonucleotide
aaggcacugaccauuuggu

SEQ ID NO: 3123726 - RNA, 19 nt, Artificial Sequence
  Description of Artificial Sequence: Synthetic oligonucleotide
gugcuuaaucacaagagga

SEQ ID NO: 3123727 - RNA, 19 nt, Artificial Sequence
  Description of Artificial Sequence: Synthetic oligonucleotide
gcugucaaggacaaggcag

SEQ ID NO: 3123728 - RNA, 19 nt, Artificial Sequence
  Description of Artificial Sequence: Synthetic oligonucleotide
agguuggcggcccucaugu

SEQ ID NO: 3123729 - RNA, 19 nt, Artificial Sequence
  Description of Artificial Sequence: Synthetic oligonucleotide
cuccucuccggucuuuucg

SEQ ID NO: 3123730 - RNA, 19 nt, Artificial Sequence
  Description of Artificial Sequence: Synthetic oligonucleotide
aaggcagggcuguucuucu

SEQ ID NO: 3123731 - RNA, 19 nt, Artificial Sequence
  Description of Artificial Sequence: Synthetic oligonucleotide
auuaagggcgguucagcau

SEQ ID NO: 3123732 - RNA, 19 nt, Artificial Sequence
  Description of Artificial Sequence: Synthetic oligonucleotide
uccugaaggcccauuucgu

SEQ ID NO: 3123733 - RNA, 19 nt, Artificial Sequence
  Description of Artificial Sequence: Synthetic oligonucleotide
uuuggucagcugucaagga

SEQ ID NO: 3123734 - RNA, 19 nt, Artificial Sequence
  Description of Artificial Sequence: Synthetic oligonucleotide
aagguuggcggcccucaug

SEQ ID NO: 3123735 - RNA, 19 nt, Artificial Sequence
  Description of Artificial Sequence: Synthetic oligonucleotide
aggcacugaccauuugguc

SEQ ID NO: 3123736 - RNA, 19 nt, Artificial Sequence
  Description of Artificial Sequence: Synthetic oligonucleotide
aaggacaaggcagggcugu

SEQ ID NO: 3123737 - RNA, 19 nt, Artificial Sequence
  Description of Artificial Sequence: Synthetic oligonucleotide
ucguuucugccuuccaagu

SEQ ID NO: 3123738 - RNA, 19 nt, Artificial Sequence
  Description of Artificial Sequence: Synthetic oligonucleotide
ugucaaggacaaggcaggg

SEQ ID NO: 3123739 - RNA, 19 nt, Artificial Sequence
  Description of Artificial Sequence: Synthetic oligonucleotide
ggcuguucuucuuagugug

SEQ ID NO: 3123740 - RNA, 19 nt, Artificial Sequence
  Description of Artificial Sequence: Synthetic oligonucleotide
cucaugucuccugaaggcc

SEQ ID NO: 3123741 - RNA, 19 nt, Artificial Sequence
  Description of Artificial Sequence: Synthetic oligonucleotide
ggcacugaccauuugguca

SEQ ID NO: 3123742 - RNA, 19 nt, Artificial Sequence
  Description of Artificial Sequence: Synthetic oligonucleotide
aucucucuggcgcuugugu

SEQ ID NO: 3123743 - RNA, 19 nt, Artificial Sequence
  Description of Artificial Sequence: Synthetic oligonucleotide
uagugugcuuaaucacaag

SEQ ID NO: 3123744 - RNA, 19 nt, Artificial Sequence
  Description of Artificial Sequence: Synthetic oligonucleotide
uucagcauccucccuccuc

SEQ ID NO: 3123745 - RNA, 19 nt, Artificial Sequence
  Description of Artificial Sequence: Synthetic oligonucleotide
cuuccaagucaucucucug

SEQ ID NO: 3123746 - RNA, 19 nt, Artificial Sequence
  Description of Artificial Sequence: Synthetic oligonucleotide
uaagggcgguucagcaucc

SEQ ID NO: 3123747 - RNA, 19 nt, Artificial Sequence
  Description of Artificial Sequence: Synthetic oligonucleotide
uucuucuuagugugcuuaa

SEQ ID NO: 3123748 - RNA, 19 nt, Artificial Sequence
  Description of Artificial Sequence: Synthetic oligonucleotide
ucuccugaaggcccauuuc

SEQ ID NO: 3123749 - RNA, 19 nt, Artificial Sequence
  Description of Artificial Sequence: Synthetic oligonucleotide
uggcgcuuguguuuucagc

SEQ ID NO: 3123750 - RNA, 19 nt, Artificial Sequence
  Description of Artificial Sequence: Synthetic oligonucleotide
uguuuucagcauccucccu

SEQ ID NO: 3123751 - RNA, 19 nt, Artificial Sequence
  Description of Artificial Sequence: Synthetic oligonucleotide
agcugucaaggacaaggca

SEQ ID NO: 3123752 - RNA, 19 nt, Artificial Sequence
  Description of Artificial Sequence: Synthetic oligonucleotide
gcacugaccauuuggucag

SEQ ID NO: 3123753 - RNA, 19 nt, Artificial Sequence
  Description of Artificial Sequence: Synthetic oligonucleotide
uuucugccuuccaagucau

SEQ ID NO: 3123754 - RNA, 19 nt, Artificial Sequence
  Description of Artificial Sequence: Synthetic oligonucleotide
acuuggccaaagguuggcg

SEQ ID NO: 3123755 - RNA, 19 nt, Artificial Sequence
  Description of Artificial Sequence: Synthetic oligonucleotide
cacaagaggacuuggccaa

SEQ ID NO: 3123756 - RNA, 19 nt, Artificial Sequence
  Description of Artificial Sequence: Synthetic oligonucleotide
ggcgcuuguguuuucagca

SEQ ID NO: 3123757 - RNA, 19 nt, Artificial Sequence
  Description of Artificial Sequence: Synthetic oligonucleotide
ccucaugucuccugaaggc

SEQ ID NO: 3123758 - RNA, 19 nt, Artificial Sequence
  Description of Artificial Sequence: Synthetic oligonucleotide
uccucuccggucuuuucgu

SEQ ID NO: 3123759 - RNA, 19 nt, Artificial Sequence
  Description of Artificial Sequence: Synthetic oligonucleotide
uuggcggcccucaugucuc

SEQ ID NO: 3123760 - RNA, 19 nt, Artificial Sequence
  Description of Artificial Sequence: Synthetic oligonucleotide
cauuucguuucugccuucc

SEQ ID NO: 3123761 - RNA, 19 nt, Artificial Sequence
  Description of Artificial Sequence: Synthetic oligonucleotide
auuucguuucugccuucca

SEQ ID NO: 3123762 - RNA, 19 nt, Artificial Sequence
  Description of Artificial Sequence: Synthetic oligonucleotide
auccaacaaggcacugacc

SEQ ID NO: 3123763 - RNA, 19 nt, Artificial Sequence
  Description of Artificial Sequence: Synthetic oligonucleotide
gacaaggcagggcuguucu

SEQ ID NO: 3123764 - RNA, 19 nt, Artificial Sequence
  Description of Artificial Sequence: Synthetic oligonucleotide
cuuaaucacaagaggacuu

SEQ ID NO: 3123765 - RNA, 19 nt, Artificial Sequence
  Description of Artificial Sequence: Synthetic oligonucleotide
cccucaugucuccugaagg

SEQ ID NO: 3123766 - RNA, 19 nt, Artificial Sequence
  Description of Artificial Sequence: Synthetic oligonucleotide
caaggcagggcuguucuuc

SEQ ID NO: 3123767 - RNA, 19 nt, Artificial Sequence
  Description of Artificial Sequence: Synthetic oligonucleotide
aaagguuggcggcccucau

SEQ ID NO: 3123768 - RNA, 19 nt, Artificial Sequence
  Description of Artificial Sequence: Synthetic oligonucleotide
ucucucuggcgcuuguguu

SEQ ID NO: 3123769 - RNA, 19 nt, Artificial Sequence
  Description of Artificial Sequence: Synthetic oligonucleotide
cauccucccuccucuccgg

SEQ ID NO: 3123770 - RNA, 19 nt, Artificial Sequence
  Description of Artificial Sequence: Synthetic oligonucleotide
ucuucuuagugugcuuaau

SEQ ID NO: 3123771 - RNA, 19 nt, Artificial Sequence
  Description of Artificial Sequence: Synthetic oligonucleotide
aacaaggcacugaccauuu

SEQ ID NO: 3123772 - RNA, 19 nt, Artificial Sequence
  Description of Artificial Sequence: Synthetic oligonucleotide
agaauagauuaagggcggu

SEQ ID NO: 3123773 - RNA, 19 nt, Artificial Sequence
  Description of Artificial Sequence: Synthetic oligonucleotide
ucuggcgcuuguguuuuca

SEQ ID NO: 3123774 - RNA, 19 nt, Artificial Sequence
  Description of Artificial Sequence: Synthetic oligonucleotide
gcuuguguuuucagcaucc

SEQ ID NO: 3123775 - RNA, 19 nt, Artificial Sequence
  Description of Artificial Sequence: Synthetic oligonucleotide
gucaaggacaaggcagggc

SEQ ID NO: 3123776 - RNA, 19 nt, Artificial Sequence
  Description of Artificial Sequence: Synthetic oligonucleotide
cugccuuccaagucaucuc

SEQ ID NO: 3123777 - RNA, 19 nt, Artificial Sequence
  Description of Artificial Sequence: Synthetic oligonucleotide
gaccauuuggucagcuguc

SEQ ID NO: 3123778 - RNA, 19 nt, Artificial Sequence
  Description of Artificial Sequence: Synthetic oligonucleotide
caagaggacuuggccaaag

SEQ ID NO: 3123779 - RNA, 19 nt, Artificial Sequence
  Description of Artificial Sequence: Synthetic oligonucleotide
ucaucucucuggcgcuugu

SEQ ID NO: 3123780 - RNA, 19 nt, Artificial Sequence
  Description of Artificial Sequence: Synthetic oligonucleotide
uggccaaagguuggcggcc

SEQ ID NO: 3123781 - RNA, 19 nt, Artificial Sequence
  Description of Artificial Sequence: Synthetic oligonucleotide
ggcgguucagcauccaaca

SEQ ID NO: 3123782 - RNA, 19 nt, Artificial Sequence
  Description of Artificial Sequence: Synthetic oligonucleotide
accauuuggucagcuguca

SEQ ID NO: 3123783 - RNA, 19 nt, Artificial Sequence
  Description of Artificial Sequence: Synthetic oligonucleotide
ggcccauuucguuucugcc

SEQ ID NO: 3123784 - RNA, 19 nt, Artificial Sequence
  Description of Artificial Sequence: Synthetic oligonucleotide
acaaggcacugaccauuug

SEQ ID NO: 3123785 - RNA, 19 nt, Artificial Sequence
  Description of Artificial Sequence: Synthetic oligonucleotide
cuggcgcuuguguuuucag

SEQ ID NO: 3123786 - RNA, 19 nt, Artificial Sequence
  Description of Artificial Sequence: Synthetic oligonucleotide
uuucagcauccucccuccu

SEQ ID NO: 3123787 - RNA, 19 nt, Artificial Sequence
  Description of Artificial Sequence: Synthetic oligonucleotide
caugucuccugaaggccca

SEQ ID NO: 3123788 - RNA, 19 nt, Artificial Sequence
  Description of Artificial Sequence: Synthetic oligonucleotide
gaggacuuggccaaagguu

SEQ ID NO: 3123789 - RNA, 19 nt, Artificial Sequence
  Description of Artificial Sequence: Synthetic oligonucleotide
guuggcggcccucaugucu

SEQ ID NO: 3123790 - RNA, 19 nt, Artificial Sequence
  Description of Artificial Sequence: Synthetic oligonucleotide
gcagggcuguucuucuuag

SEQ ID NO: 3123791 - RNA, 19 nt, Artificial Sequence
  Description of Artificial Sequence: Synthetic oligonucleotide
guucagcauccaacaaggc

SEQ ID NO: 3123792 - RNA, 19 nt, Artificial Sequence
  Description of Artificial Sequence: Synthetic oligonucleotide
acugaccauuuggucagcu

SEQ ID NO: 3123793 - RNA, 19 nt, Artificial Sequence
  Description of Artificial Sequence: Synthetic oligonucleotide
ucucuggcgcuuguguuuu

SEQ ID NO: 3123794 - RNA, 19 nt, Artificial Sequence
  Description of Artificial Sequence: Synthetic oligonucleotide
ggacuuggccaaagguugg

SEQ ID NO: 3123795 - RNA, 19 nt, Artificial Sequence
  Description of Artificial Sequence: Synthetic oligonucleotide
aaggcccauuucguuucug

SEQ ID NO: 3123796 - RNA, 19 nt, Artificial Sequence
  Description of Artificial Sequence: Synthetic oligonucleotide
cgguucagcauccaacaag

SEQ ID NO: 3123797 - RNA, 19 nt, Artificial Sequence
  Description of Artificial Sequence: Synthetic oligonucleotide
gcuuaaucacaagaggacu

SEQ ID NO: 3123798 - RNA, 19 nt, Artificial Sequence
  Description of Artificial Sequence: Synthetic oligonucleotide
gcccucaugucuccugaag

SEQ ID NO: 3123799 - RNA, 19 nt, Artificial Sequence
  Description of Artificial Sequence: Synthetic oligonucleotide
agggcgguucagcauccaa

SEQ ID NO: 3123800 - RNA, 19 nt, Artificial Sequence
  Description of Artificial Sequence: Synthetic oligonucleotide
caaagguuggcggcccuca

SEQ ID NO: 3123801 - RNA, 19 nt, Artificial Sequence
  Description of Artificial Sequence: Synthetic oligonucleotide
agcauccaacaaggcacug

SEQ ID NO: 3123802 - RNA, 19 nt, Artificial Sequence
  Description of Artificial Sequence: Synthetic oligonucleotide
uccucccuccucuccgguc

SEQ ID NO: 3123803 - RNA, 19 nt, Artificial Sequence
  Description of Artificial Sequence: Synthetic oligonucleotide
uucugccuuccaagucauc

SEQ ID NO: 3123804 - RNA, 19 nt, Artificial Sequence
  Description of Artificial Sequence: Synthetic oligonucleotide
cugaaggcccauuucguuu

SEQ ID NO: 3123805 - RNA, 19 nt, Artificial Sequence
  Description of Artificial Sequence: Synthetic oligonucleotide
gcuguucuucuuagugugc

SEQ ID NO: 3123806 - RNA, 19 nt, Artificial Sequence
  Description of Artificial Sequence: Synthetic oligonucleotide
caucucucuggcgcuugug

SEQ ID NO: 3123807 - RNA, 19 nt, Artificial Sequence
  Description of Artificial Sequence: Synthetic oligonucleotide
gggcgguucagcauccaac

SEQ ID NO: 3123808 - RNA, 19 nt, Artificial Sequence
  Description of Artificial Sequence: Synthetic oligonucleotide
gggcuguucuucuuagugu

SEQ ID NO: 3123809 - RNA, 19 nt, Artificial Sequence
  Description of Artificial Sequence: Synthetic oligonucleotide
gcauccaacaaggcacuga

SEQ ID NO: 3123810 - RNA, 19 nt, Artificial Sequence
  Description of Artificial Sequence: Synthetic oligonucleotide
aagggcgguucagcaucca

SEQ ID NO: 3123811 - RNA, 19 nt, Artificial Sequence
  Description of Artificial Sequence: Synthetic oligonucleotide
acaagaggacuuggccaaa

SEQ ID NO: 3123812 - RNA, 19 nt, Artificial Sequence
  Description of Artificial Sequence: Synthetic oligonucleotide
uggcggcccucaugucucc

SEQ ID NO: 3123813 - RNA, 19 nt, Artificial Sequence
  Description of Artificial Sequence: Synthetic oligonucleotide
gaaggcccauuucguuucu

SEQ ID NO: 3123814 - RNA, 19 nt, Artificial Sequence
  Description of Artificial Sequence: Synthetic oligonucleotide
gucuccugaaggcccauuu

SEQ ID NO: 3123815 - RNA, 19 nt, Artificial Sequence
  Description of Artificial Sequence: Synthetic oligonucleotide
caacaaggcacugaccauu

SEQ ID NO: 3123816 - RNA, 19 nt, Artificial Sequence
  Description of Artificial Sequence: Synthetic oligonucleotide
cagcauccaacaaggcacu

SEQ ID NO: 3123817 - RNA, 19 nt, Artificial Sequence
  Description of Artificial Sequence: Synthetic oligonucleotide
agucaucucucuggcgcuu

SEQ ID NO: 3123818 - RNA, 19 nt, Artificial Sequence
  Description of Artificial Sequence: Synthetic oligonucleotide
cguuucugccuuccaaguc

SEQ ID NO: 3123819 - RNA, 19 nt, Artificial Sequence
  Description of Artificial Sequence: Synthetic oligonucleotide
cacugaccauuuggucagc

SEQ ID NO: 3123820 - RNA, 19 nt, Artificial Sequence
  Description of Artificial Sequence: Synthetic oligonucleotide
ggcagggcuguucuucuua

SEQ ID NO: 3123821 - RNA, 19 nt, Artificial Sequence
  Description of Artificial Sequence: Synthetic oligonucleotide
cucucuggcgcuuguguuu

SEQ ID NO: 3123822 - RNA, 19 nt, Artificial Sequence
  Description of Artificial Sequence: Synthetic oligonucleotide
ugucuccugaaggcccauu

SEQ ID NO: 3123823 - RNA, 19 nt, Artificial Sequence
  Description of Artificial Sequence: Synthetic oligonucleotide
cuuguguuuucagcauccu

SEQ ID NO: 3123824 - RNA, 19 nt, Artificial Sequence
  Description of Artificial Sequence: Synthetic oligonucleotide
cucuccggucuuuucguau

SEQ ID NO: 3123825 - RNA, 19 nt, Artificial Sequence
  Description of Artificial Sequence: Synthetic oligonucleotide
ggccaaagguuggcggccc

SEQ ID NO: 3123826 - RNA, 19 nt, Artificial Sequence
  Description of Artificial Sequence: Synthetic oligonucleotide
ggacaaggcagggcuguuc

SEQ ID NO: 3123827 - RNA, 19 nt, Artificial Sequence
  Description of Artificial Sequence: Synthetic oligonucleotide
cgcuuguguuuucagcauc

SEQ ID NO: 3123828 - RNA, 19 nt, Artificial Sequence
  Description of Artificial Sequence: Synthetic oligonucleotide
gcggcccucaugucuccug

SEQ ID NO: 3123829 - RNA, 19 nt, Artificial Sequence
  Description of Artificial Sequence: Synthetic oligonucleotide
cucuggcgcuuguguuuuc

SEQ ID NO: 3123830 - RNA, 19 nt, Artificial Sequence
  Description of Artificial Sequence: Synthetic oligonucleotide
ccauuucguuucugccuuc

SEQ ID NO: 3123831 - RNA, 19 nt, Artificial Sequence
  Description of Artificial Sequence: Synthetic oligonucleotide
gcgguucagcauccaacaa

SEQ ID NO: 3123832 - RNA, 19 nt, Artificial Sequence
  Description of Artificial Sequence: Synthetic oligonucleotide
ccauuuggucagcugucaa

SEQ ID NO: 3123833 - RNA, 19 nt, Artificial Sequence
  Description of Artificial Sequence: Synthetic oligonucleotide
augucuccugaaggcccau

SEQ ID NO: 3123834 - RNA, 19 nt, Artificial Sequence
  Description of Artificial Sequence: Synthetic oligonucleotide
gccuuccaagucaucucuc

SEQ ID NO: 3123835 - RNA, 19 nt, Artificial Sequence
  Description of Artificial Sequence: Synthetic oligonucleotide
gguuggcggcccucauguc

SEQ ID NO: 3123836 - RNA, 19 nt, Artificial Sequence
  Description of Artificial Sequence: Synthetic oligonucleotide
cagggcuguucuucuuagu

SEQ ID NO: 3123837 - RNA, 19 nt, Artificial Sequence
  Description of Artificial Sequence: Synthetic oligonucleotide
ccuccucuccggucuuuuc

SEQ ID NO: 3123838 - RNA, 19 nt, Artificial Sequence
  Description of Artificial Sequence: Synthetic oligonucleotide
ccaaagguuggcggcccuc

SEQ ID NO: 3123839 - RNA, 19 nt, Artificial Sequence
  Description of Artificial Sequence: Synthetic oligonucleotide
gcgcuuguguuuucagcau

SEQ ID NO: 3123840 - RNA, 19 nt, Artificial Sequence
  Description of Artificial Sequence: Synthetic oligonucleotide
ucccuccucuccggucuuu

SEQ ID NO: 3123841 - RNA, 19 nt, Artificial Sequence
  Description of Artificial Sequence: Synthetic oligonucleotide
ccugaaggcccauuucguu

SEQ ID NO: 3123842 - RNA, 19 nt, Artificial Sequence
  Description of Artificial Sequence: Synthetic oligonucleotide
ccucccuccucuccggucu

SEQ ID NO: 3123843 - RNA, 19 nt, Artificial Sequence
  Description of Artificial Sequence: Synthetic oligonucleotide
ccucuccggucuuuucgua

SEQ ID NO: 3123844 - RNA, 19 nt, Artificial Sequence
  Description of Artificial Sequence: Synthetic oligonucleotide
gccaaagguuggcggcccu

SEQ ID NO: 3123845 - RNA, 19 nt, Artificial Sequence
  Description of Artificial Sequence: Synthetic oligonucleotide
cucccuccucuccggucuu

SEQ ID NO: 3123846 - RNA, 19 nt, Artificial Sequence
  Description of Artificial Sequence: Synthetic oligonucleotide
ggcggcccucaugucuccu

SEQ ID NO: 3123847 - RNA, 19 nt, Artificial Sequence
  Description of Artificial Sequence: Synthetic oligonucleotide
cccuccucuccggucuuuu

SEQ ID NO: 3123848 - RNA, 19 nt, Artificial Sequence
  Description of Artificial Sequence: Synthetic oligonucleotide
uaguagaagaugcaguugc

SEQ ID NO: 3123849 - RNA, 19 nt, Artificial Sequence
  Description of Artificial Sequence: Synthetic oligonucleotide
agaagaugcaguugcaggg

SEQ ID NO: 3123850 - RNA, 19 nt, Artificial Sequence
  Description of Artificial Sequence: Synthetic oligonucleotide
uccuguguaucucagagca

SEQ ID NO: 3123851 - RNA, 19 nt, Artificial Sequence
  Description of Artificial Sequence: Synthetic oligonucleotide
uagaagaugcaguugcagg

SEQ ID NO: 3123852 - RNA, 19 nt, Artificial Sequence
  Description of Artificial Sequence: Synthetic oligonucleotide
aaggaguugcugcuuggcc

SEQ ID NO: 3123853 - RNA, 19 nt, Artificial Sequence
  Description of Artificial Sequence: Synthetic oligonucleotide
uauugcacaggcuaguaga

SEQ ID NO: 3123854 - RNA, 19 nt, Artificial Sequence
  Description of Artificial Sequence: Synthetic oligonucleotide
uguaucucagagcaccucc

SEQ ID NO: 3123855 - RNA, 19 nt, Artificial Sequence
  Description of Artificial Sequence: Synthetic oligonucleotide
aggaguugcugcuuggccc

SEQ ID NO: 3123856 - RNA, 19 nt, Artificial Sequence
  Description of Artificial Sequence: Synthetic oligonucleotide
gaugagaaggcagagacca

SEQ ID NO: 3123857 - RNA, 19 nt, Artificial Sequence
  Description of Artificial Sequence: Synthetic oligonucleotide
acaggcuaguagaagaugc

SEQ ID NO: 3123858 - RNA, 19 nt, Artificial Sequence
  Description of Artificial Sequence: Synthetic oligonucleotide
agcuccucaccucauuucc

SEQ ID NO: 3123859 - RNA, 19 nt, Artificial Sequence
  Description of Artificial Sequence: Synthetic oligonucleotide
gaaggcagagaccaaggcc

SEQ ID NO: 3123860 - RNA, 19 nt, Artificial Sequence
  Description of Artificial Sequence: Synthetic oligonucleotide
agagaccaaggccacaagg

SEQ ID NO: 3123861 - RNA, 19 nt, Artificial Sequence
  Description of Artificial Sequence: Synthetic oligonucleotide
agaaggcagagaccaaggc

SEQ ID NO: 3123862 - RNA, 19 nt, Artificial Sequence
  Description of Artificial Sequence: Synthetic oligonucleotide
uuauugcacaggcuaguag

SEQ ID NO: 3123863 - RNA, 19 nt, Artificial Sequence
  Description of Artificial Sequence: Synthetic oligonucleotide
aaggcagagaccaaggcca

SEQ ID NO: 3123864 - RNA, 19 nt, Artificial Sequence
  Description of Artificial Sequence: Synthetic oligonucleotide
agccgcauagcucuugcgc

SEQ ID NO: 3123865 - RNA, 19 nt, Artificial Sequence
  Description of Artificial Sequence: Synthetic oligonucleotide
ugcacaggcuaguagaaga

SEQ ID NO: 3123866 - RNA, 19 nt, Artificial Sequence
  Description of Artificial Sequence: Synthetic oligonucleotide
ugcugcuuggcccugucag

SEQ ID NO: 3123867 - RNA, 19 nt, Artificial Sequence
  Description of Artificial Sequence: Synthetic oligonucleotide
gaagaugcaguugcagggg

SEQ ID NO: 3123868 - RNA, 19 nt, Artificial Sequence
  Description of Artificial Sequence: Synthetic oligonucleotide
cuguguaucucagagcacc

SEQ ID NO: 3123869 - RNA, 19 nt, Artificial Sequence
  Description of Artificial Sequence: Synthetic oligonucleotide
agcaccucccagcagccgc

SEQ ID NO: 3123870 - RNA, 19 nt, Artificial Sequence
  Description of Artificial Sequence: Synthetic oligonucleotide
agaccaaggccacaaggag

SEQ ID NO: 3123871 - RNA, 19 nt, Artificial Sequence
  Description of Artificial Sequence: Synthetic oligonucleotide
ucauuuccuguguaucuca

SEQ ID NO: 3123872 - RNA, 19 nt, Artificial Sequence
  Description of Artificial Sequence: Synthetic oligonucleotide
uuuuauugcacaggcuagu

SEQ ID NO: 3123873 - RNA, 19 nt, Artificial Sequence
  Description of Artificial Sequence: Synthetic oligonucleotide
ugccgagaugagaaggcag

SEQ ID NO: 3123874 - RNA, 19 nt, Artificial Sequence
  Description of Artificial Sequence: Synthetic oligonucleotide
gagaaggcagagaccaagg

SEQ ID NO: 3123875 - RNA, 19 nt, Artificial Sequence
  Description of Artificial Sequence: Synthetic oligonucleotide
uuugugggcuguuggugag

SEQ ID NO: 3123876 - RNA, 19 nt, Artificial Sequence
  Description of Artificial Sequence: Synthetic oligonucleotide
gccaggaaggucuuugugg

SEQ ID NO: 3123877 - RNA, 19 nt, Artificial Sequence
  Description of Artificial Sequence: Synthetic oligonucleotide
uguuggugagcuccucacc

SEQ ID NO: 3123878 - RNA, 19 nt, Artificial Sequence
  Description of Artificial Sequence: Synthetic oligonucleotide
acaaggaguugcugcuugg

SEQ ID NO: 3123879 - RNA, 19 nt, Artificial Sequence
  Description of Artificial Sequence: Synthetic oligonucleotide
agaugagaaggcagagacc

SEQ ID NO: 3123880 - RNA, 19 nt, Artificial Sequence
  Description of Artificial Sequence: Synthetic oligonucleotide
agcaggaggggcccugggc

SEQ ID NO: 3123881 - RNA, 19 nt, Artificial Sequence
  Description of Artificial Sequence: Synthetic oligonucleotide
guagaagaugcaguugcag

SEQ ID NO: 3123882 - RNA, 19 nt, Artificial Sequence
  Description of Artificial Sequence: Synthetic oligonucleotide
uguguaucucagagcaccu

SEQ ID NO: 3123883 - RNA, 19 nt, Artificial Sequence
  Description of Artificial Sequence: Synthetic oligonucleotide
gaugcaguugcaggggcag

SEQ ID NO: 3123884 - RNA, 19 nt, Artificial Sequence
  Description of Artificial Sequence: Synthetic oligonucleotide
ucagccaggaaggucuuug

SEQ ID NO: 3123885 - RNA, 19 nt, Artificial Sequence
  Description of Artificial Sequence: Synthetic oligonucleotide
ugcgcaguugcucccaguc

SEQ ID NO: 3123886 - RNA, 19 nt, Artificial Sequence
  Description of Artificial Sequence: Synthetic oligonucleotide
cauuuccuguguaucucag

SEQ ID NO: 3123887 - RNA, 19 nt, Artificial Sequence
  Description of Artificial Sequence: Synthetic oligonucleotide
gagaccaaggccacaagga

SEQ ID NO: 3123888 - RNA, 19 nt, Artificial Sequence
  Description of Artificial Sequence: Synthetic oligonucleotide
ccaggaaggucuuuguggg

SEQ ID NO: 3123889 - RNA, 19 nt, Artificial Sequence
  Description of Artificial Sequence: Synthetic oligonucleotide
agcugccgagaugagaagg

SEQ ID NO: 3123890 - RNA, 19 nt, Artificial Sequence
  Description of Artificial Sequence: Synthetic oligonucleotide
cuaguagaagaugcaguug

SEQ ID NO: 3123891 - RNA, 19 nt, Artificial Sequence
  Description of Artificial Sequence: Synthetic oligonucleotide
ggucuuugugggcuguugg

SEQ ID NO: 3123892 - RNA, 19 nt, Artificial Sequence
  Description of Artificial Sequence: Synthetic oligonucleotide
aggaaggucuuugugggcu

SEQ ID NO: 3123893 - RNA, 19 nt, Artificial Sequence
  Description of Artificial Sequence: Synthetic oligonucleotide
aggcuaguagaagaugcag

SEQ ID NO: 3123894 - RNA, 19 nt, Artificial Sequence
  Description of Artificial Sequence: Synthetic oligonucleotide
uuuauugcacaggcuagua

SEQ ID NO: 3123895 - RNA, 19 nt, Artificial Sequence
  Description of Artificial Sequence: Synthetic oligonucleotide
ugagcuccucaccucauuu

SEQ ID NO: 3123896 - RNA, 19 nt, Artificial Sequence
  Description of Artificial Sequence: Synthetic oligonucleotide
auuuccuguguaucucaga

SEQ ID NO: 3123897 - RNA, 19 nt, Artificial Sequence
  Description of Artificial Sequence: Synthetic oligonucleotide
cuuugugggcuguugguga

SEQ ID NO: 3123898 - RNA, 19 nt, Artificial Sequence
  Description of Artificial Sequence: Synthetic oligonucleotide
cacaaggaguugcugcuug

SEQ ID NO: 3123899 - RNA, 19 nt, Artificial Sequence
  Description of Artificial Sequence: Synthetic oligonucleotide
cuccucaccucauuuccug

SEQ ID NO: 3123900 - RNA, 19 nt, Artificial Sequence
  Description of Artificial Sequence: Synthetic oligonucleotide
ugcaguugcaggggcagca

SEQ ID NO: 3123901 - RNA, 19 nt, Artificial Sequence
  Description of Artificial Sequence: Synthetic oligonucleotide
uugcacaggcuaguagaag

SEQ ID NO: 3123902 - RNA, 19 nt, Artificial Sequence
  Description of Artificial Sequence: Synthetic oligonucleotide
agccaggaaggucuuugug

SEQ ID NO: 3123903 - RNA, 19 nt, Artificial Sequence
  Description of Artificial Sequence: Synthetic oligonucleotide
ggccacaaggaguugcugc

SEQ ID NO: 3123904 - RNA, 19 nt, Artificial Sequence
  Description of Artificial Sequence: Synthetic oligonucleotide
cucauuuccuguguaucuc

SEQ ID NO: 3123905 - RNA, 19 nt, Artificial Sequence
  Description of Artificial Sequence: Synthetic oligonucleotide
guuggugagcuccucaccu

SEQ ID NO: 3123906 - RNA, 19 nt, Artificial Sequence
  Description of Artificial Sequence: Synthetic oligonucleotide
ugugggcuguuggugagcu

SEQ ID NO: 3123907 - RNA, 19 nt, Artificial Sequence
  Description of Artificial Sequence: Synthetic oligonucleotide
guaucucagagcaccuccc

SEQ ID NO: 3123908 - RNA, 19 nt, Artificial Sequence
  Description of Artificial Sequence: Synthetic oligonucleotide
aggggcccugggcagcugc

SEQ ID NO: 3123909 - RNA, 19 nt, Artificial Sequence
  Description of Artificial Sequence: Synthetic oligonucleotide
caaggaguugcugcuuggc

SEQ ID NO: 3123910 - RNA, 19 nt, Artificial Sequence
  Description of Artificial Sequence: Synthetic oligonucleotide
aaggccacaaggaguugcu

SEQ ID NO: 3123911 - RNA, 19 nt, Artificial Sequence
  Description of Artificial Sequence: Synthetic oligonucleotide
ucaccucauuuccugugua

SEQ ID NO: 3123912 - RNA, 19 nt, Artificial Sequence
  Description of Artificial Sequence: Synthetic oligonucleotide
caguugcaggggcagcagg

SEQ ID NO: 3123913 - RNA, 19 nt, Artificial Sequence
  Description of Artificial Sequence: Synthetic oligonucleotide
uccucaccucauuuccugu

SEQ ID NO: 3123914 - RNA, 19 nt, Artificial Sequence
  Description of Artificial Sequence: Synthetic oligonucleotide
accaaggccacaaggaguu

SEQ ID NO: 3123915 - RNA, 19 nt, Artificial Sequence
  Description of Artificial Sequence: Synthetic oligonucleotide
gagcuccucaccucauuuc

SEQ ID NO: 3123916 - RNA, 19 nt, Artificial Sequence
  Description of Artificial Sequence: Synthetic oligonucleotide
caggaaggucuuugugggc

SEQ ID NO: 3123917 - RNA, 19 nt, Artificial Sequence
  Description of Artificial Sequence: Synthetic oligonucleotide
cucagagcaccucccagca

SEQ ID NO: 3123918 - RNA, 19 nt, Artificial Sequence
  Description of Artificial Sequence: Synthetic oligonucleotide
auugcacaggcuaguagaa

SEQ ID NO: 3123919 - RNA, 19 nt, Artificial Sequence
  Description of Artificial Sequence: Synthetic oligonucleotide
guugcaggggcagcaggag

SEQ ID NO: 3123920 - RNA, 19 nt, Artificial Sequence
  Description of Artificial Sequence: Synthetic oligonucleotide
cacaggcuaguagaagaug

SEQ ID NO: 3123921 - RNA, 19 nt, Artificial Sequence
  Description of Artificial Sequence: Synthetic oligonucleotide
caggcuaguagaagaugca

SEQ ID NO: 3123922 - RNA, 19 nt, Artificial Sequence
  Description of Artificial Sequence: Synthetic oligonucleotide
cucuugcgcaguugcuccc

SEQ ID NO: 3123923 - RNA, 19 nt, Artificial Sequence
  Description of Artificial Sequence: Synthetic oligonucleotide
augcaguugcaggggcagc

SEQ ID NO: 3123924 - RNA, 19 nt, Artificial Sequence
  Description of Artificial Sequence: Synthetic oligonucleotide
uugcugcuuggcccuguca

SEQ ID NO: 3123925 - RNA, 19 nt, Artificial Sequence
  Description of Artificial Sequence: Synthetic oligonucleotide
cauagcucuugcgcaguug

SEQ ID NO: 3123926 - RNA, 19 nt, Artificial Sequence
  Description of Artificial Sequence: Synthetic oligonucleotide
ccucccagcagccgcauag

SEQ ID NO: 3123927 - RNA, 19 nt, Artificial Sequence
  Description of Artificial Sequence: Synthetic oligonucleotide
ugcuuggcccugucagcca

SEQ ID NO: 3123928 - RNA, 19 nt, Artificial Sequence
  Description of Artificial Sequence: Synthetic oligonucleotide
gcuaguagaagaugcaguu

SEQ ID NO: 3123929 - RNA, 19 nt, Artificial Sequence
  Description of Artificial Sequence: Synthetic oligonucleotide
cagccgcauagcucuugcg

SEQ ID NO: 3123930 - RNA, 19 nt, Artificial Sequence
  Description of Artificial Sequence: Synthetic oligonucleotide
cagagaccaaggccacaag

SEQ ID NO: 3123931 - RNA, 19 nt, Artificial Sequence
  Description of Artificial Sequence: Synthetic oligonucleotide
caggaggggcccugggcag

SEQ ID NO: 3123932 - RNA, 19 nt, Artificial Sequence
  Description of Artificial Sequence: Synthetic oligonucleotide
ggaaggucuuugugggcug

SEQ ID NO: 3123933 - RNA, 19 nt, Artificial Sequence
  Description of Artificial Sequence: Synthetic oligonucleotide
aggcagagaccaaggccac

SEQ ID NO: 3123934 - RNA, 19 nt, Artificial Sequence
  Description of Artificial Sequence: Synthetic oligonucleotide
gaccaaggccacaaggagu

SEQ ID NO: 3123935 - RNA, 19 nt, Artificial Sequence
  Description of Artificial Sequence: Synthetic oligonucleotide
agaugcaguugcaggggca

SEQ ID NO: 3123936 - RNA, 19 nt, Artificial Sequence
  Description of Artificial Sequence: Synthetic oligonucleotide
gccgcauagcucuugcgca

SEQ ID NO: 3123937 - RNA, 19 nt, Artificial Sequence
  Description of Artificial Sequence: Synthetic oligonucleotide
uugugggcuguuggugagc

SEQ ID NO: 3123938 - RNA, 19 nt, Artificial Sequence
  Description of Artificial Sequence: Synthetic oligonucleotide
uuggcccugucagccagga

SEQ ID NO: 3123939 - RNA, 19 nt, Artificial Sequence
  Description of Artificial Sequence: Synthetic oligonucleotide
gcaggaggggcccugggca

SEQ ID NO: 3123940 - RNA, 19 nt, Artificial Sequence
  Description of Artificial Sequence: Synthetic oligonucleotide
gucuuugugggcuguuggu

SEQ ID NO: 3123941 - RNA, 19 nt, Artificial Sequence
  Description of Artificial Sequence: Synthetic oligonucleotide
cagcugccgagaugagaag

SEQ ID NO: 3123942 - RNA, 19 nt, Artificial Sequence
  Description of Artificial Sequence: Synthetic oligonucleotide
ugucagccaggaaggucuu

SEQ ID NO: 3123943 - RNA, 19 nt, Artificial Sequence
  Description of Artificial Sequence: Synthetic oligonucleotide
guguaucucagagcaccuc

SEQ ID NO: 3123944 - RNA, 19 nt, Artificial Sequence
  Description of Artificial Sequence: Synthetic oligonucleotide
gcagccgcauagcucuugc

SEQ ID NO: 3123945 - RNA, 19 nt, Artificial Sequence
  Description of Artificial Sequence: Synthetic oligonucleotide
gagcaccucccagcagccg

SEQ ID NO: 3123946 - RNA, 19 nt, Artificial Sequence
  Description of Artificial Sequence: Synthetic oligonucleotide
ccucaccucauuuccugug

SEQ ID NO: 3123947 - RNA, 19 nt, Artificial Sequence
  Description of Artificial Sequence: Synthetic oligonucleotide
gcuguuggugagcuccuca

SEQ ID NO: 3123948 - RNA, 19 nt, Artificial Sequence
  Description of Artificial Sequence: Synthetic oligonucleotide
uugcgcaguugcucccagu

SEQ ID NO: 3123949 - RNA, 19 nt, Artificial Sequence
  Description of Artificial Sequence: Synthetic oligonucleotide
cugggcagcugccgagaug

SEQ ID NO: 3123950 - RNA, 19 nt, Artificial Sequence
  Description of Artificial Sequence: Synthetic oligonucleotide
ggaguugcugcuuggcccu

SEQ ID NO: 3123951 - RNA, 19 nt, Artificial Sequence
  Description of Artificial Sequence: Synthetic oligonucleotide
agcagccgcauagcucuug

SEQ ID NO: 3123952 - RNA, 19 nt, Artificial Sequence
  Description of Artificial Sequence: Synthetic oligonucleotide
ccgcauagcucuugcgcag

SEQ ID NO: 3123953 - RNA, 19 nt, Artificial Sequence
  Description of Artificial Sequence: Synthetic oligonucleotide
cagcaggaggggcccuggg

SEQ ID NO: 3123954 - RNA, 19 nt, Artificial Sequence
  Description of Artificial Sequence: Synthetic oligonucleotide
ccuguguaucucagagcac

SEQ ID NO: 3123955 - RNA, 19 nt, Artificial Sequence
  Description of Artificial Sequence: Synthetic oligonucleotide
aguugcugcuuggcccugu

SEQ ID NO: 3123956 - RNA, 19 nt, Artificial Sequence
  Description of Artificial Sequence: Synthetic oligonucleotide
cccagcagccgcauagcuc

SEQ ID NO: 3123957 - RNA, 19 nt, Artificial Sequence
  Description of Artificial Sequence: Synthetic oligonucleotide
gaaggucuuugugggcugu

SEQ ID NO: 3123958 - RNA, 19 nt, Artificial Sequence
  Description of Artificial Sequence: Synthetic oligonucleotide
ccucauuuccuguguaucu

SEQ ID NO: 3123959 - RNA, 19 nt, Artificial Sequence
  Description of Artificial Sequence: Synthetic oligonucleotide
augagaaggcagagaccaa

SEQ ID NO: 3123960 - RNA, 19 nt, Artificial Sequence
  Description of Artificial Sequence: Synthetic oligonucleotide
caccucauuuccuguguau

SEQ ID NO: 3123961 - RNA, 19 nt, Artificial Sequence
  Description of Artificial Sequence: Synthetic oligonucleotide
ccugucagccaggaagguc

SEQ ID NO: 3123962 - RNA, 19 nt, Artificial Sequence
  Description of Artificial Sequence: Synthetic oligonucleotide
uggcccugucagccaggaa

SEQ ID NO: 3123963 - RNA, 19 nt, Artificial Sequence
  Description of Artificial Sequence: Synthetic oligonucleotide
gcccugggcagcugccgag

SEQ ID NO: 3123964 - RNA, 19 nt, Artificial Sequence
  Description of Artificial Sequence: Synthetic oligonucleotide
cagccaggaaggucuuugu

SEQ ID NO: 3123965 - RNA, 19 nt, Artificial Sequence
  Description of Artificial Sequence: Synthetic oligonucleotide
gugggcuguuggugagcuc

SEQ ID NO: 3123966 - RNA, 19 nt, Artificial Sequence
  Description of Artificial Sequence: Synthetic oligonucleotide
gggcccugggcagcugccg

SEQ ID NO: 3123967 - RNA, 19 nt, Artificial Sequence
  Description of Artificial Sequence: Synthetic oligonucleotide
gugagcuccucaccucauu

SEQ ID NO: 3123968 - RNA, 19 nt, Artificial Sequence
  Description of Artificial Sequence: Synthetic oligonucleotide
ggcccugggcagcugccga

SEQ ID NO: 3123969 - RNA, 19 nt, Artificial Sequence
  Description of Artificial Sequence: Synthetic oligonucleotide
accucccagcagccgcaua

SEQ ID NO: 3123970 - RNA, 19 nt, Artificial Sequence
  Description of Artificial Sequence: Synthetic oligonucleotide
ggcagagaccaaggccaca

SEQ ID NO: 3123971 - RNA, 19 nt, Artificial Sequence
  Description of Artificial Sequence: Synthetic oligonucleotide
gcacaggcuaguagaagau

SEQ ID NO: 3123972 - RNA, 19 nt, Artificial Sequence
  Description of Artificial Sequence: Synthetic oligonucleotide
gaggggcccugggcagcug

SEQ ID NO: 3123973 - RNA, 19 nt, Artificial Sequence
  Description of Artificial Sequence: Synthetic oligonucleotide
gcgcaguugcucccagucu

SEQ ID NO: 3123974 - RNA, 19 nt, Artificial Sequence
  Description of Artificial Sequence: Synthetic oligonucleotide
gcaccucccagcagccgca

SEQ ID NO: 3123975 - RNA, 19 nt, Artificial Sequence
  Description of Artificial Sequence: Synthetic oligonucleotide
ggggcccugggcagcugcc

SEQ ID NO: 3123976 - RNA, 19 nt, Artificial Sequence
  Description of Artificial Sequence: Synthetic oligonucleotide
ggcuguuggugagcuccuc

SEQ ID NO: 3123977 - RNA, 19 nt, Artificial Sequence
  Description of Artificial Sequence: Synthetic oligonucleotide
ccaaggccacaaggaguug

SEQ ID NO: 3123978 - RNA, 19 nt, Artificial Sequence
  Description of Artificial Sequence: Synthetic oligonucleotide
gcuccucaccucauuuccu

SEQ ID NO: 3123979 - RNA, 19 nt, Artificial Sequence
  Description of Artificial Sequence: Synthetic oligonucleotide
gcauagcucuugcgcaguu

SEQ ID NO: 3123980 - RNA, 19 nt, Artificial Sequence
  Description of Artificial Sequence: Synthetic oligonucleotide
cccugggcagcugccgaga

SEQ ID NO: 3123981 - RNA, 19 nt, Artificial Sequence
  Description of Artificial Sequence: Synthetic oligonucleotide
ccugggcagcugccgagau

SEQ ID NO: 3123982 - RNA, 19 nt, Artificial Sequence
  Description of Artificial Sequence: Synthetic oligonucleotide
cagcagccgcauagcucuu

SEQ ID NO: 3123983 - RNA, 19 nt, Artificial Sequence
  Description of Artificial Sequence: Synthetic oligonucleotide
ccacaaggaguugcugcuu

SEQ ID NO: 3123984 - RNA, 19 nt, Artificial Sequence
  Description of Artificial Sequence: Synthetic oligonucleotide
cgcauagcucuugcgcagu

SEQ ID NO: 3123985 - RNA, 19 nt, Artificial Sequence
  Description of Artificial Sequence: Synthetic oligonucleotide
caccucccagcagccgcau

SEQ ID NO: 3123986 - RNA, 19 nt, Artificial Sequence
  Description of Artificial Sequence: Synthetic oligonucleotide
cccugucagccaggaaggu

SEQ ID NO: 3123987 - RNA, 19 nt, Artificial Sequence
  Description of Artificial Sequence: Synthetic oligonucleotide
gaagcuacgugccuuaugg

SEQ ID NO: 3123988 - RNA, 19 nt, Artificial Sequence
  Description of Artificial Sequence: Synthetic oligonucleotide
agaauuucacauuuggcag

SEQ ID NO: 3123989 - RNA, 19 nt, Artificial Sequence
  Description of Artificial Sequence: Synthetic oligonucleotide
gaauuucacauuuggcagg

SEQ ID NO: 3123990 - RNA, 19 nt, Artificial Sequence
  Description of Artificial Sequence: Synthetic oligonucleotide
aauuucacauuuggcaggg

SEQ ID NO: 3123991 - RNA, 19 nt, Artificial Sequence
  Description of Artificial Sequence: Synthetic oligonucleotide
cagaauuucacauuuggca

SEQ ID NO: 3123992 - RNA, 19 nt, Artificial Sequence
  Description of Artificial Sequence: Synthetic oligonucleotide
uuucacauuuggcagggca

SEQ ID NO: 3123993 - RNA, 19 nt, Artificial Sequence
  Description of Artificial Sequence: Synthetic oligonucleotide
uauggggacagaagcaugc

SEQ ID NO: 3123994 - RNA, 19 nt, Artificial Sequence
  Description of Artificial Sequence: Synthetic oligonucleotide
uucacauuuggcagggcag

SEQ ID NO: 3123995 - RNA, 19 nt, Artificial Sequence
  Description of Artificial Sequence: Synthetic oligonucleotide
agcuacgugccuuaugggg

SEQ ID NO: 3123996 - RNA, 19 nt, Artificial Sequence
  Description of Artificial Sequence: Synthetic oligonucleotide
ggcagaauuucacauuugg

SEQ ID NO: 3123997 - RNA, 19 nt, Artificial Sequence
  Description of Artificial Sequence: Synthetic oligonucleotide
gaagggucuggacagcacc

SEQ ID NO: 3123998 - RNA, 19 nt, Artificial Sequence
  Description of Artificial Sequence: Synthetic oligonucleotide
uuggcagaauuucacauuu

SEQ ID NO: 3123999 - RNA, 19 nt, Artificial Sequence
  Description of Artificial Sequence: Synthetic oligonucleotide
ggggccaacaugcugaagg

SEQ ID NO: 3124000 - RNA, 19 nt, Artificial Sequence
  Description of Artificial Sequence: Synthetic oligonucleotide
ccauauagcagcuccagcc

SEQ ID NO: 3124001 - RNA, 19 nt, Artificial Sequence
  Description of Artificial Sequence: Synthetic oligonucleotide
agcaccggggcuuggggcc

SEQ ID NO: 3124002 - RNA, 19 nt, Artificial Sequence
  Description of Artificial Sequence: Synthetic oligonucleotide
acagaagcaugcccucccc

SEQ ID NO: 3124003 - RNA, 19 nt, Artificial Sequence
  Description of Artificial Sequence: Synthetic oligonucleotide
uuauggggacagaagcaug

SEQ ID NO: 3124004 - RNA, 19 nt, Artificial Sequence
  Description of Artificial Sequence: Synthetic oligonucleotide
aagcuacgugccuuauggg

SEQ ID NO: 3124005 - RNA, 19 nt, Artificial Sequence
  Description of Artificial Sequence: Synthetic oligonucleotide
caccaucuggcucaguggg

SEQ ID NO: 3124006 - RNA, 19 nt, Artificial Sequence
  Description of Artificial Sequence: Synthetic oligonucleotide
uauagcagcuccagccuga

SEQ ID NO: 3124007 - RNA, 19 nt, Artificial Sequence
  Description of Artificial Sequence: Synthetic oligonucleotide
acaugcugaaggcccggcc

SEQ ID NO: 3124008 - RNA, 19 nt, Artificial Sequence
  Description of Artificial Sequence: Synthetic oligonucleotide
ugccuuauggggacagaag

SEQ ID NO: 3124009 - RNA, 19 nt, Artificial Sequence
  Description of Artificial Sequence: Synthetic oligonucleotide
gacagaagcaugcccuccc

SEQ ID NO: 3124010 - RNA, 19 nt, Artificial Sequence
  Description of Artificial Sequence: Synthetic oligonucleotide
aacaugcugaaggcccggc

SEQ ID NO: 3124011 - RNA, 19 nt, Artificial Sequence
  Description of Artificial Sequence: Synthetic oligonucleotide
cuuggggccaacaugcuga

SEQ ID NO: 3124012 - RNA, 19 nt, Artificial Sequence
  Description of Artificial Sequence: Synthetic oligonucleotide
uuccuugagggcugggugc

SEQ ID NO: 3124013 - RNA, 19 nt, Artificial Sequence
  Description of Artificial Sequence: Synthetic oligonucleotide
aagggucuggacagcaccg

SEQ ID NO: 3124014 - RNA, 19 nt, Artificial Sequence
  Description of Artificial Sequence: Synthetic oligonucleotide
auauagcagcuccagccug

SEQ ID NO: 3124015 - RNA, 19 nt, Artificial Sequence
  Description of Artificial Sequence: Synthetic oligonucleotide
uggggacagaagcaugccc

SEQ ID NO: 3124016 - RNA, 19 nt, Artificial Sequence
  Description of Artificial Sequence: Synthetic oligonucleotide
ccugcaggaagcuacgugc

SEQ ID NO: 3124017 - RNA, 19 nt, Artificial Sequence
  Description of Artificial Sequence: Synthetic oligonucleotide
ugaaggcccggccuggaac

SEQ ID NO: 3124018 - RNA, 19 nt, Artificial Sequence
  Description of Artificial Sequence: Synthetic oligonucleotide
cugggugcccaccaucugg

SEQ ID NO: 3124019 - RNA, 19 nt, Artificial Sequence
  Description of Artificial Sequence: Synthetic oligonucleotide
gccuuauggggacagaagc

SEQ ID NO: 3124020 - RNA, 19 nt, Artificial Sequence
  Description of Artificial Sequence: Synthetic oligonucleotide
agggccugcaggaagcuac

SEQ ID NO: 3124021 - RNA, 19 nt, Artificial Sequence
  Description of Artificial Sequence: Synthetic oligonucleotide
cugcaggaagcuacgugcc

SEQ ID NO: 3124022 - RNA, 19 nt, Artificial Sequence
  Description of Artificial Sequence: Synthetic oligonucleotide
auggggacagaagcaugcc

SEQ ID NO: 3124023 - RNA, 19 nt, Artificial Sequence
  Description of Artificial Sequence: Synthetic oligonucleotide
uggcagaauuucacauuug

SEQ ID NO: 3124024 - RNA, 19 nt, Artificial Sequence
  Description of Artificial Sequence: Synthetic oligonucleotide
gucuggacagcaccggggc

SEQ ID NO: 3124025 - RNA, 19 nt, Artificial Sequence
  Description of Artificial Sequence: Synthetic oligonucleotide
acagcaccggggcuugggg

SEQ ID NO: 3124026 - RNA, 19 nt, Artificial Sequence
  Description of Artificial Sequence: Synthetic oligonucleotide
uugagggagaagggucugg

SEQ ID NO: 3124027 - RNA, 19 nt, Artificial Sequence
  Description of Artificial Sequence: Synthetic oligonucleotide
cuacgugccuuauggggac

SEQ ID NO: 3124028 - RNA, 19 nt, Artificial Sequence
  Description of Artificial Sequence: Synthetic oligonucleotide
gaaggcccggccuggaaca

SEQ ID NO: 3124029 - RNA, 19 nt, Artificial Sequence
  Description of Artificial Sequence: Synthetic oligonucleotide
ugcaggaagcuacgugccu

SEQ ID NO: 3124030 - RNA, 19 nt, Artificial Sequence
  Description of Artificial Sequence: Synthetic oligonucleotide
gccaacaugcugaaggccc

SEQ ID NO: 3124031 - RNA, 19 nt, Artificial Sequence
  Description of Artificial Sequence: Synthetic oligonucleotide
auuucacauuuggcagggc

SEQ ID NO: 3124032 - RNA, 19 nt, Artificial Sequence
  Description of Artificial Sequence: Synthetic oligonucleotide
augcugaaggcccggccug

SEQ ID NO: 3124033 - RNA, 19 nt, Artificial Sequence
  Description of Artificial Sequence: Synthetic oligonucleotide
agaagggucuggacagcac

SEQ ID NO: 3124034 - RNA, 19 nt, Artificial Sequence
  Description of Artificial Sequence: Synthetic oligonucleotide
gugcccaccaucuggcuca

SEQ ID NO: 3124035 - RNA, 19 nt, Artificial Sequence
  Description of Artificial Sequence: Synthetic oligonucleotide
uccuugagggcugggugcc

SEQ ID NO: 3124036 - RNA, 19 nt, Artificial Sequence
  Description of Artificial Sequence: Synthetic oligonucleotide
ucuggacagcaccggggcu

SEQ ID NO: 3124037 - RNA, 19 nt, Artificial Sequence
  Description of Artificial Sequence: Synthetic oligonucleotide
gacagcaccggggcuuggg

SEQ ID NO: 3124038 - RNA, 19 nt, Artificial Sequence
  Description of Artificial Sequence: Synthetic oligonucleotide
gggcuuggggccaacaugc

SEQ ID NO: 3124039 - RNA, 19 nt, Artificial Sequence
  Description of Artificial Sequence: Synthetic oligonucleotide
ugagcccuccacccuggga

SEQ ID NO: 3124040 - RNA, 19 nt, Artificial Sequence
  Description of Artificial Sequence: Synthetic oligonucleotide
ugcugaaggcccggccugg

SEQ ID NO: 3124041 - RNA, 19 nt, Artificial Sequence
  Description of Artificial Sequence: Synthetic oligonucleotide
gagaagggucuggacagca

SEQ ID NO: 3124042 - RNA, 19 nt, Artificial Sequence
  Description of Artificial Sequence: Synthetic oligonucleotide
cauauagcagcuccagccu

SEQ ID NO: 3124043 - RNA, 19 nt, Artificial Sequence
  Description of Artificial Sequence: Synthetic oligonucleotide
agggucuggacagcaccgg

SEQ ID NO: 3124044 - RNA, 19 nt, Artificial Sequence
  Description of Artificial Sequence: Synthetic oligonucleotide
gggccaacaugcugaaggc

SEQ ID NO: 3124045 - RNA, 19 nt, Artificial Sequence
  Description of Artificial Sequence: Synthetic oligonucleotide
caucuggcucagugggaag

SEQ ID NO: 3124046 - RNA, 19 nt, Artificial Sequence
  Description of Artificial Sequence: Synthetic oligonucleotide
gagcccuccacccugggau

SEQ ID NO: 3124047 - RNA, 19 nt, Artificial Sequence
  Description of Artificial Sequence: Synthetic oligonucleotide
ggucuggacagcaccgggg

SEQ ID NO: 3124048 - RNA, 19 nt, Artificial Sequence
  Description of Artificial Sequence: Synthetic oligonucleotide
ggggcuuggggccaacaug

SEQ ID NO: 3124049 - RNA, 19 nt, Artificial Sequence
  Description of Artificial Sequence: Synthetic oligonucleotide
cagcaccggggcuuggggc

SEQ ID NO: 3124050 - RNA, 19 nt, Artificial Sequence
  Description of Artificial Sequence: Synthetic oligonucleotide
ccaccaucuggcucagugg

SEQ ID NO: 3124051 - RNA, 19 nt, Artificial Sequence
  Description of Artificial Sequence: Synthetic oligonucleotide
ggaagcuacgugccuuaug

SEQ ID NO: 3124052 - RNA, 19 nt, Artificial Sequence
  Description of Artificial Sequence: Synthetic oligonucleotide
cauuuggcagggcagggcu

SEQ ID NO: 3124053 - RNA, 19 nt, Artificial Sequence
  Description of Artificial Sequence: Synthetic oligonucleotide
guuggcagaauuucacauu

SEQ ID NO: 3124054 - RNA, 19 nt, Artificial Sequence
  Description of Artificial Sequence: Synthetic oligonucleotide
ccuuauggggacagaagca

SEQ ID NO: 3124055 - RNA, 19 nt, Artificial Sequence
  Description of Artificial Sequence: Synthetic oligonucleotide
cuuauggggacagaagcau

SEQ ID NO: 3124056 - RNA, 19 nt, Artificial Sequence
  Description of Artificial Sequence: Synthetic oligonucleotide
uuggggccaacaugcugaa

SEQ ID NO: 3124057 - RNA, 19 nt, Artificial Sequence
  Description of Artificial Sequence: Synthetic oligonucleotide
ggcguuggcagaauuucac

SEQ ID NO: 3124058 - RNA, 19 nt, Artificial Sequence
  Description of Artificial Sequence: Synthetic oligonucleotide
uggacagcaccggggcuug

SEQ ID NO: 3124059 - RNA, 19 nt, Artificial Sequence
  Description of Artificial Sequence: Synthetic oligonucleotide
gcuacgugccuuaugggga

SEQ ID NO: 3124060 - RNA, 19 nt, Artificial Sequence
  Description of Artificial Sequence: Synthetic oligonucleotide
acgugccuuauggggacag

SEQ ID NO: 3124061 - RNA, 19 nt, Artificial Sequence
  Description of Artificial Sequence: Synthetic oligonucleotide
agcccuccacccugggaug

SEQ ID NO: 3124062 - RNA, 19 nt, Artificial Sequence
  Description of Artificial Sequence: Synthetic oligonucleotide
aaggcccggccuggaacag

SEQ ID NO: 3124063 - RNA, 19 nt, Artificial Sequence
  Description of Artificial Sequence: Synthetic oligonucleotide
ggcuugagggagaaggguc

SEQ ID NO: 3124064 - RNA, 19 nt, Artificial Sequence
  Description of Artificial Sequence: Synthetic oligonucleotide
gcuuggggccaacaugcug

SEQ ID NO: 3124065 - RNA, 19 nt, Artificial Sequence
  Description of Artificial Sequence: Synthetic oligonucleotide
cccauauagcagcuccagc

SEQ ID NO: 3124066 - RNA, 19 nt, Artificial Sequence
  Description of Artificial Sequence: Synthetic oligonucleotide
gccugcaggaagcuacgug

SEQ ID NO: 3124067 - RNA, 19 nt, Artificial Sequence
  Description of Artificial Sequence: Synthetic oligonucleotide
gugccuuauggggacagaa

SEQ ID NO: 3124068 - RNA, 19 nt, Artificial Sequence
  Description of Artificial Sequence: Synthetic oligonucleotide
agccugagcccuccacccu

SEQ ID NO: 3124069 - RNA, 19 nt, Artificial Sequence
  Description of Artificial Sequence: Synthetic oligonucleotide
ggugcccaccaucuggcuc

SEQ ID NO: 3124070 - RNA, 19 nt, Artificial Sequence
  Description of Artificial Sequence: Synthetic oligonucleotide
ggacagaagcaugcccucc

SEQ ID NO: 3124071 - RNA, 19 nt, Artificial Sequence
  Description of Artificial Sequence: Synthetic oligonucleotide
ggggcguuggcagaauuuc

SEQ ID NO: 3124072 - RNA, 19 nt, Artificial Sequence
  Description of Artificial Sequence: Synthetic oligonucleotide
gggacagaagcaugcccuc

SEQ ID NO: 3124073 - RNA, 19 nt, Artificial Sequence
  Description of Artificial Sequence: Synthetic oligonucleotide
gcguuggcagaauuucaca

SEQ ID NO: 3124074 - RNA, 19 nt, Artificial Sequence
  Description of Artificial Sequence: Synthetic oligonucleotide
ggccaacaugcugaaggcc

SEQ ID NO: 3124075 - RNA, 19 nt, Artificial Sequence
  Description of Artificial Sequence: Synthetic oligonucleotide
ccggccuggaacagggcag

SEQ ID NO: 3124076 - RNA, 19 nt, Artificial Sequence
  Description of Artificial Sequence: Synthetic oligonucleotide
uacgugccuuauggggaca

SEQ ID NO: 3124077 - RNA, 19 nt, Artificial Sequence
  Description of Artificial Sequence: Synthetic oligonucleotide
cugagcccuccacccuggg

SEQ ID NO: 3124078 - RNA, 19 nt, Artificial Sequence
  Description of Artificial Sequence: Synthetic oligonucleotide
uggcagggcagggcuugag

SEQ ID NO: 3124079 - RNA, 19 nt, Artificial Sequence
  Description of Artificial Sequence: Synthetic oligonucleotide
caggaagcuacgugccuua

SEQ ID NO: 3124080 - RNA, 19 nt, Artificial Sequence
  Description of Artificial Sequence: Synthetic oligonucleotide
ggggacagaagcaugcccu

SEQ ID NO: 3124081 - RNA, 19 nt, Artificial Sequence
  Description of Artificial Sequence: Synthetic oligonucleotide
gccugagcccuccacccug

SEQ ID NO: 3124082 - RNA, 19 nt, Artificial Sequence
  Description of Artificial Sequence: Synthetic oligonucleotide
uggggccaacaugcugaag

SEQ ID NO: 3124083 - RNA, 19 nt, Artificial Sequence
  Description of Artificial Sequence: Synthetic oligonucleotide
cuugagggcugggugccca

SEQ ID NO: 3124084 - RNA, 19 nt, Artificial Sequence
  Description of Artificial Sequence: Synthetic oligonucleotide
ccccauauagcagcuccag

SEQ ID NO: 3124085 - RNA, 19 nt, Artificial Sequence
  Description of Artificial Sequence: Synthetic oligonucleotide
ccugagcccuccacccugg

SEQ ID NO: 3124086 - RNA, 19 nt, Artificial Sequence
  Description of Artificial Sequence: Synthetic oligonucleotide
ggagaagggucuggacagc

SEQ ID NO: 3124087 - RNA, 19 nt, Artificial Sequence
  Description of Artificial Sequence: Synthetic oligonucleotide
agcuccagccugagcccuc

SEQ ID NO: 3124088 - RNA, 19 nt, Artificial Sequence
  Description of Artificial Sequence: Synthetic oligonucleotide
agggcugggugcccaccau

SEQ ID NO: 3124089 - RNA, 19 nt, Artificial Sequence
  Description of Artificial Sequence: Synthetic oligonucleotide
uuggcagggcagggcuuga

SEQ ID NO: 3124090 - RNA, 19 nt, Artificial Sequence
  Description of Artificial Sequence: Synthetic oligonucleotide
aggaagcuacgugccuuau

SEQ ID NO: 3124091 - RNA, 19 nt, Artificial Sequence
  Description of Artificial Sequence: Synthetic oligonucleotide
auuuggcagggcagggcuu

SEQ ID NO: 3124092 - RNA, 19 nt, Artificial Sequence
  Description of Artificial Sequence: Synthetic oligonucleotide
ugcccaccaucuggcucag

SEQ ID NO: 3124093 - RNA, 19 nt, Artificial Sequence
  Description of Artificial Sequence: Synthetic oligonucleotide
gcugggugcccaccaucug

SEQ ID NO: 3124094 - RNA, 19 nt, Artificial Sequence
  Description of Artificial Sequence: Synthetic oligonucleotide
gccuggaacagggcagggc

SEQ ID NO: 3124095 - RNA, 19 nt, Artificial Sequence
  Description of Artificial Sequence: Synthetic oligonucleotide
gcccuccacccugggaugg

SEQ ID NO: 3124096 - RNA, 19 nt, Artificial Sequence
  Description of Artificial Sequence: Synthetic oligonucleotide
gggcguuggcagaauuuca

SEQ ID NO: 3124097 - RNA, 19 nt, Artificial Sequence
  Description of Artificial Sequence: Synthetic oligonucleotide
cugaaggcccggccuggaa

SEQ ID NO: 3124098 - RNA, 19 nt, Artificial Sequence
  Description of Artificial Sequence: Synthetic oligonucleotide
gggguuccuugagggcugg

SEQ ID NO: 3124099 - RNA, 19 nt, Artificial Sequence
  Description of Artificial Sequence: Synthetic oligonucleotide
gguuccuugagggcugggu

SEQ ID NO: 3124100 - RNA, 19 nt, Artificial Sequence
  Description of Artificial Sequence: Synthetic oligonucleotide
ggccuggaacagggcaggg

SEQ ID NO: 3124101 - RNA, 19 nt, Artificial Sequence
  Description of Artificial Sequence: Synthetic oligonucleotide
gggcugggugcccaccauc

SEQ ID NO: 3124102 - RNA, 19 nt, Artificial Sequence
  Description of Artificial Sequence: Synthetic oligonucleotide
cccggccuggaacagggca

SEQ ID NO: 3124103 - RNA, 19 nt, Artificial Sequence
  Description of Artificial Sequence: Synthetic oligonucleotide
gcuccagccugagcccucc

SEQ ID NO: 3124104 - RNA, 19 nt, Artificial Sequence
  Description of Artificial Sequence: Synthetic oligonucleotide
ccuccacccugggaugggg

SEQ ID NO: 3124105 - RNA, 19 nt, Artificial Sequence
  Description of Artificial Sequence: Synthetic oligonucleotide
cguuggcagaauuucacau

SEQ ID NO: 3124106 - RNA, 19 nt, Artificial Sequence
  Description of Artificial Sequence: Synthetic oligonucleotide
cuggacagcaccggggcuu

SEQ ID NO: 3124107 - RNA, 19 nt, Artificial Sequence
  Description of Artificial Sequence: Synthetic oligonucleotide
ggcugggugcccaccaucu

SEQ ID NO: 3124108 - RNA, 19 nt, Artificial Sequence
  Description of Artificial Sequence: Synthetic oligonucleotide
gggcuugagggagaagggu

SEQ ID NO: 3124109 - RNA, 19 nt, Artificial Sequence
  Description of Artificial Sequence: Synthetic oligonucleotide
accggggcuuggggccaac

SEQ ID NO: 3124110 - RNA, 19 nt, Artificial Sequence
  Description of Artificial Sequence: Synthetic oligonucleotide
ggguuccuugagggcuggg

SEQ ID NO: 3124111 - RNA, 19 nt, Artificial Sequence
  Description of Artificial Sequence: Synthetic oligonucleotide
cggccuggaacagggcagg

SEQ ID NO: 3124112 - RNA, 19 nt, Artificial Sequence
  Description of Artificial Sequence: Synthetic oligonucleotide
gcaggaagcuacgugccuu

SEQ ID NO: 3124113 - RNA, 19 nt, Artificial Sequence
  Description of Artificial Sequence: Synthetic oligonucleotide
gcagggcuugagggagaag

SEQ ID NO: 3124114 - RNA, 19 nt, Artificial Sequence
  Description of Artificial Sequence: Synthetic oligonucleotide
ggacagcaccggggcuugg

SEQ ID NO: 3124115 - RNA, 19 nt, Artificial Sequence
  Description of Artificial Sequence: Synthetic oligonucleotide
ccuugagggcugggugccc

SEQ ID NO: 3124116 - RNA, 19 nt, Artificial Sequence
  Description of Artificial Sequence: Synthetic oligonucleotide
cuccagccugagcccucca

SEQ ID NO: 3124117 - RNA, 19 nt, Artificial Sequence
  Description of Artificial Sequence: Synthetic oligonucleotide
gcugaaggcccggccugga

SEQ ID NO: 3124118 - RNA, 19 nt, Artificial Sequence
  Description of Artificial Sequence: Synthetic oligonucleotide
cagcuccagccugagcccu

SEQ ID NO: 3124119 - RNA, 19 nt, Artificial Sequence
  Description of Artificial Sequence: Synthetic oligonucleotide
cagggccugcaggaagcua

SEQ ID NO: 3124120 - RNA, 19 nt, Artificial Sequence
  Description of Artificial Sequence: Synthetic oligonucleotide
gggugcccaccaucuggcu

SEQ ID NO: 3124121 - RNA, 19 nt, Artificial Sequence
  Description of Artificial Sequence: Synthetic oligonucleotide
gcaccggggcuuggggcca

SEQ ID NO: 3124122 - RNA, 19 nt, Artificial Sequence
  Description of Artificial Sequence: Synthetic oligonucleotide
ggcuuggggccaacaugcu

SEQ ID NO: 3124123 - RNA, 19 nt, Artificial Sequence
  Description of Artificial Sequence: Synthetic oligonucleotide
ggccugcaggaagcuacgu

SEQ ID NO: 3124124 - RNA, 19 nt, Artificial Sequence
  Description of Artificial Sequence: Synthetic oligonucleotide
gcccggccuggaacagggc

SEQ ID NO: 3124125 - RNA, 19 nt, Artificial Sequence
  Description of Artificial Sequence: Synthetic oligonucleotide
cgugccuuauggggacaga

SEQ ID NO: 3124126 - RNA, 19 nt, Artificial Sequence
  Description of Artificial Sequence: Synthetic oligonucleotide
caccggggcuuggggccaa

SEQ ID NO: 3124127 - RNA, 19 nt, Artificial Sequence
  Description of Artificial Sequence: Synthetic oligonucleotide
ccggggcuuggggccaaca

SEQ ID NO: 3124128 - RNA, 19 nt, Artificial Sequence
  Description of Artificial Sequence: Synthetic oligonucleotide
cggggcuuggggccaacau

SEQ ID NO: 3124129 - RNA, 19 nt, Artificial Sequence
  Description of Artificial Sequence: Synthetic oligonucleotide
gcccaccaucuggcucagu

SEQ ID NO: 3124130 - RNA, 19 nt, Artificial Sequence
  Description of Artificial Sequence: Synthetic oligonucleotide
aucaauuccggcuuccugc

SEQ ID NO: 3124131 - RNA, 19 nt, Artificial Sequence
  Description of Artificial Sequence: Synthetic oligonucleotide
aauuccggcuuccugcggg

SEQ ID NO: 3124132 - RNA, 19 nt, Artificial Sequence
  Description of Artificial Sequence: Synthetic oligonucleotide
uguccuaugcaguuccugg

SEQ ID NO: 3124133 - RNA, 19 nt, Artificial Sequence
  Description of Artificial Sequence: Synthetic oligonucleotide
cuucugagaguuuucuggg

SEQ ID NO: 3124134 - RNA, 19 nt, Artificial Sequence
  Description of Artificial Sequence: Synthetic oligonucleotide
ucguucauggcgaaagucu

SEQ ID NO: 3124135 - RNA, 19 nt, Artificial Sequence
  Description of Artificial Sequence: Synthetic oligonucleotide
ucaauuccggcuuccugcg

SEQ ID NO: 3124136 - RNA, 19 nt, Artificial Sequence
  Description of Artificial Sequence: Synthetic oligonucleotide
ucugagaguuuucuggguc

SEQ ID NO: 3124137 - RNA, 19 nt, Artificial Sequence
  Description of Artificial Sequence: Synthetic oligonucleotide
uccuaugcaguuccugggc

SEQ ID NO: 3124138 - RNA, 19 nt, Artificial Sequence
  Description of Artificial Sequence: Synthetic oligonucleotide
aucucguucauggcgaaag

SEQ ID NO: 3124139 - RNA, 19 nt, Artificial Sequence
  Description of Artificial Sequence: Synthetic oligonucleotide
gaucaauuccggcuuccug

SEQ ID NO: 3124140 - RNA, 19 nt, Artificial Sequence
  Description of Artificial Sequence: Synthetic oligonucleotide
ugcucgcaggaucaauucc

SEQ ID NO: 3124141 - RNA, 19 nt, Artificial Sequence
  Description of Artificial Sequence: Synthetic oligonucleotide
guccuaugcaguuccuggg

SEQ ID NO: 3124142 - RNA, 19 nt, Artificial Sequence
  Description of Artificial Sequence: Synthetic oligonucleotide
cuaugcaguuccugggccc

SEQ ID NO: 3124143 - RNA, 19 nt, Artificial Sequence
  Description of Artificial Sequence: Synthetic oligonucleotide
ucugcucgcaggaucaauu

SEQ ID NO: 3124144 - RNA, 19 nt, Artificial Sequence
  Description of Artificial Sequence: Synthetic oligonucleotide
cucgcaggaucaauuccgg

SEQ ID NO: 3124145 - RNA, 19 nt, Artificial Sequence
  Description of Artificial Sequence: Synthetic oligonucleotide
aggaucaauuccggcuucc

SEQ ID NO: 3124146 - RNA, 19 nt, Artificial Sequence
  Description of Artificial Sequence: Synthetic oligonucleotide
uucugagaguuuucugggu

SEQ ID NO: 3124147 - RNA, 19 nt, Artificial Sequence
  Description of Artificial Sequence: Synthetic oligonucleotide
aggcguaggggucacugug

SEQ ID NO: 3124148 - RNA, 19 nt, Artificial Sequence
  Description of Artificial Sequence: Synthetic oligonucleotide
ucucguucauggcgaaagu

SEQ ID NO: 3124149 - RNA, 19 nt, Artificial Sequence
  Description of Artificial Sequence: Synthetic oligonucleotide
auuccggcuuccugcgggg

SEQ ID NO: 3124150 - RNA, 19 nt, Artificial Sequence
  Description of Artificial Sequence: Synthetic oligonucleotide
gcucgcaggaucaauuccg

SEQ ID NO: 3124151 - RNA, 19 nt, Artificial Sequence
  Description of Artificial Sequence: Synthetic oligonucleotide
uggggcuccacccgccagc

SEQ ID NO: 3124152 - RNA, 19 nt, Artificial Sequence
  Description of Artificial Sequence: Synthetic oligonucleotide
ugagaguuuucugggucaa

SEQ ID NO: 3124153 - RNA, 19 nt, Artificial Sequence
  Description of Artificial Sequence: Synthetic oligonucleotide
cugcucgcaggaucaauuc

SEQ ID NO: 3124154 - RNA, 19 nt, Artificial Sequence
  Description of Artificial Sequence: Synthetic oligonucleotide
cucguucauggcgaaaguc

SEQ ID NO: 3124155 - RNA, 19 nt, Artificial Sequence
  Description of Artificial Sequence: Synthetic oligonucleotide
guaggggucacugugugcu

SEQ ID NO: 3124156 - RNA, 19 nt, Artificial Sequence
  Description of Artificial Sequence: Synthetic oligonucleotide
ucuggggcuccacccgcca

SEQ ID NO: 3124157 - RNA, 19 nt, Artificial Sequence
  Description of Artificial Sequence: Synthetic oligonucleotide
caauuccggcuuccugcgg

SEQ ID NO: 3124158 - RNA, 19 nt, Artificial Sequence
  Description of Artificial Sequence: Synthetic oligonucleotide
cacccgccagccaccagcc

SEQ ID NO: 3124159 - RNA, 19 nt, Artificial Sequence
  Description of Artificial Sequence: Synthetic oligonucleotide
cguucauggcgaaagucug

SEQ ID NO: 3124160 - RNA, 19 nt, Artificial Sequence
  Description of Artificial Sequence: Synthetic oligonucleotide
ggcuccacccgccagccac

SEQ ID NO: 3124161 - RNA, 19 nt, Artificial Sequence
  Description of Artificial Sequence: Synthetic oligonucleotide
cucuggggcuccacccgcc

SEQ ID NO: 3124162 - RNA, 19 nt, Artificial Sequence
  Description of Artificial Sequence: Synthetic oligonucleotide
aggggucacugugugcucu

SEQ ID NO: 3124163 - RNA, 19 nt, Artificial Sequence
  Description of Artificial Sequence: Synthetic oligonucleotide
cccgccagccaccagcccg

SEQ ID NO: 3124164 - RNA, 19 nt, Artificial Sequence
  Description of Artificial Sequence: Synthetic oligonucleotide
ccacccgccagccaccagc

SEQ ID NO: 3124165 - RNA, 19 nt, Artificial Sequence
  Description of Artificial Sequence: Synthetic oligonucleotide
acccgccagccaccagccc

SEQ ID NO: 3124166 - RNA, 19 nt, Artificial Sequence
  Description of Artificial Sequence: Synthetic oligonucleotide
uaggggucacugugugcuc

SEQ ID NO: 3124167 - RNA, 19 nt, Artificial Sequence
  Description of Artificial Sequence: Synthetic oligonucleotide
gcguaggggucacugugug

SEQ ID NO: 3124168 - RNA, 19 nt, Artificial Sequence
  Description of Artificial Sequence: Synthetic oligonucleotide
cacugugugcucuggggcu

SEQ ID NO: 3124169 - RNA, 19 nt, Artificial Sequence
  Description of Artificial Sequence: Synthetic oligonucleotide
uccacccgccagccaccag

SEQ ID NO: 3124170 - RNA, 19 nt, Artificial Sequence
  Description of Artificial Sequence: Synthetic oligonucleotide
cuggggcuccacccgccag

SEQ ID NO: 3124171 - RNA, 19 nt, Artificial Sequence
  Description of Artificial Sequence: Synthetic oligonucleotide
gagaguuuucugggucaaa

SEQ ID NO: 3124172 - RNA, 19 nt, Artificial Sequence
  Description of Artificial Sequence: Synthetic oligonucleotide
guucauggcgaaagucugu

SEQ ID NO: 3124173 - RNA, 19 nt, Artificial Sequence
  Description of Artificial Sequence: Synthetic oligonucleotide
gcucuggggcuccacccgc

SEQ ID NO: 3124174 - RNA, 19 nt, Artificial Sequence
  Description of Artificial Sequence: Synthetic oligonucleotide
ggggucacugugugcucug

SEQ ID NO: 3124175 - RNA, 19 nt, Artificial Sequence
  Description of Artificial Sequence: Synthetic oligonucleotide
gggucacugugugcucugg

SEQ ID NO: 3124176 - RNA, 19 nt, Artificial Sequence
  Description of Artificial Sequence: Synthetic oligonucleotide
cguaggggucacugugugc

SEQ ID NO: 3124177 - RNA, 19 nt, Artificial Sequence
  Description of Artificial Sequence: Synthetic oligonucleotide
ccgccagccaccagcccgc

SEQ ID NO: 3124178 - RNA, 19 nt, Artificial Sequence
  Description of Artificial Sequence: Synthetic oligonucleotide
ccaccagcccgcccucugc

SEQ ID NO: 3124179 - RNA, 19 nt, Artificial Sequence
  Description of Artificial Sequence: Synthetic oligonucleotide
ggggcuccacccgccagcc

SEQ ID NO: 3124180 - RNA, 19 nt, Artificial Sequence
  Description of Artificial Sequence: Synthetic oligonucleotide
gccaccagcccgcccucug

SEQ ID NO: 3124181 - RNA, 19 nt, Artificial Sequence
  Description of Artificial Sequence: Synthetic oligonucleotide
caggcguaggggucacugu

SEQ ID NO: 3124182 - RNA, 19 nt, Artificial Sequence
  Description of Artificial Sequence: Synthetic oligonucleotide
ggaucaauuccggcuuccu

SEQ ID NO: 3124183 - RNA, 19 nt, Artificial Sequence
  Description of Artificial Sequence: Synthetic oligonucleotide
gugugcucuggggcuccac

SEQ ID NO: 3124184 - RNA, 19 nt, Artificial Sequence
  Description of Artificial Sequence: Synthetic oligonucleotide
gcuccacccgccagccacc

SEQ ID NO: 3124185 - RNA, 19 nt, Artificial Sequence
  Description of Artificial Sequence: Synthetic oligonucleotide
ggcguaggggucacugugu

SEQ ID NO: 3124186 - RNA, 19 nt, Artificial Sequence
  Description of Artificial Sequence: Synthetic oligonucleotide
agccaccagcccgcccucu

SEQ ID NO: 3124187 - RNA, 19 nt, Artificial Sequence
  Description of Artificial Sequence: Synthetic oligonucleotide
caccagcccgcccucugcu

SEQ ID NO: 3124188 - RNA, 19 nt, Artificial Sequence
  Description of Artificial Sequence: Synthetic oligonucleotide
cuccacccgccagccacca

SEQ ID NO: 3124189 - RNA, 19 nt, Artificial Sequence
  Description of Artificial Sequence: Synthetic oligonucleotide
gccagccaccagcccgccc

SEQ ID NO: 3124190 - RNA, 19 nt, Artificial Sequence
  Description of Artificial Sequence: Synthetic oligonucleotide
cucugcucgcaggaucaau

SEQ ID NO: 3124191 - RNA, 19 nt, Artificial Sequence
  Description of Artificial Sequence: Synthetic oligonucleotide
cgccaccuucaucucguuc

SEQ ID NO: 3124192 - RNA, 19 nt, Artificial Sequence
  Description of Artificial Sequence: Synthetic oligonucleotide
gggcuccacccgccagcca

SEQ ID NO: 3124193 - RNA, 19 nt, Artificial Sequence
  Description of Artificial Sequence: Synthetic oligonucleotide
ccucugcucgcaggaucaa

SEQ ID NO: 3124194 - RNA, 19 nt, Artificial Sequence
  Description of Artificial Sequence: Synthetic oligonucleotide
gcgccagcgccaccuucau

SEQ ID NO: 3124195 - RNA, 19 nt, Artificial Sequence
  Description of Artificial Sequence: Synthetic oligonucleotide
cgccagccaccagcccgcc

SEQ ID NO: 3124196 - RNA, 19 nt, Artificial Sequence
  Description of Artificial Sequence: Synthetic oligonucleotide
gcgccaccuucaucucguu

SEQ ID NO: 3124197 - RNA, 19 nt, Artificial Sequence
  Description of Artificial Sequence: Synthetic oligonucleotide
uugucuucgaaguuggccc

SEQ ID NO: 3124198 - RNA, 19 nt, Artificial Sequence
  Description of Artificial Sequence: Synthetic oligonucleotide
ucaggaagcuccgugaggg

SEQ ID NO: 3124199 - RNA, 19 nt, Artificial Sequence
  Description of Artificial Sequence: Synthetic oligonucleotide
agggcuggcagccaguccc

SEQ ID NO: 3124200 - RNA, 19 nt, Artificial Sequence
  Description of Artificial Sequence: Synthetic oligonucleotide
aaguuggcccuucauuggg

SEQ ID NO: 3124201 - RNA, 19 nt, Artificial Sequence
  Description of Artificial Sequence: Synthetic oligonucleotide
ucggcgaaaguccagucag

SEQ ID NO: 3124202 - RNA, 19 nt, Artificial Sequence
  Description of Artificial Sequence: Synthetic oligonucleotide
ucuugugucagcaguacaa

SEQ ID NO: 3124203 - RNA, 19 nt, Artificial Sequence
  Description of Artificial Sequence: Synthetic oligonucleotide
ugugucagcaguacaacuc

SEQ ID NO: 3124204 - RNA, 19 nt, Artificial Sequence
  Description of Artificial Sequence: Synthetic oligonucleotide
gaaguuggcccuucauugg

SEQ ID NO: 3124205 - RNA, 19 nt, Artificial Sequence
  Description of Artificial Sequence: Synthetic oligonucleotide
ucagcaguacaacucgucu

SEQ ID NO: 3124206 - RNA, 19 nt, Artificial Sequence
  Description of Artificial Sequence: Synthetic oligonucleotide
agcaguacaacucgucuug

SEQ ID NO: 3124207 - RNA, 19 nt, Artificial Sequence
  Description of Artificial Sequence: Synthetic oligonucleotide
uacaacucgucuugcaagc

SEQ ID NO: 3124208 - RNA, 19 nt, Artificial Sequence
  Description of Artificial Sequence: Synthetic oligonucleotide
ucgucuugcaagcuucucc

SEQ ID NO: 3124209 - RNA, 19 nt, Artificial Sequence
  Description of Artificial Sequence: Synthetic oligonucleotide
gugucagcaguacaacucg

SEQ ID NO: 3124210 - RNA, 19 nt, Artificial Sequence
  Description of Artificial Sequence: Synthetic oligonucleotide
ucuugcaagcuucucccgc

SEQ ID NO: 3124211 - RNA, 19 nt, Artificial Sequence
  Description of Artificial Sequence: Synthetic oligonucleotide
guacaacucgucuugcaag

SEQ ID NO: 3124212 - RNA, 19 nt, Artificial Sequence
  Description of Artificial Sequence: Synthetic oligonucleotide
aacucgucuugcaagcuuc

SEQ ID NO: 3124213 - RNA, 19 nt, Artificial Sequence
  Description of Artificial Sequence: Synthetic oligonucleotide
cuugucuucgaaguuggcc

SEQ ID NO: 3124214 - RNA, 19 nt, Artificial Sequence
  Description of Artificial Sequence: Synthetic oligonucleotide
gaaaguccagucaggaagc

SEQ ID NO: 3124215 - RNA, 19 nt, Artificial Sequence
  Description of Artificial Sequence: Synthetic oligonucleotide
aagcuucucccgcugagcu

SEQ ID NO: 3124216 - RNA, 19 nt, Artificial Sequence
  Description of Artificial Sequence: Synthetic oligonucleotide
acggccaucggcgaaaguc

SEQ ID NO: 3124217 - RNA, 19 nt, Artificial Sequence
  Description of Artificial Sequence: Synthetic oligonucleotide
uccauuucuugugucagca

SEQ ID NO: 3124218 - RNA, 19 nt, Artificial Sequence
  Description of Artificial Sequence: Synthetic oligonucleotide
aguacaacucgucuugcaa

SEQ ID NO: 3124219 - RNA, 19 nt, Artificial Sequence
  Description of Artificial Sequence: Synthetic oligonucleotide
ugcagugcaaccuccggac

SEQ ID NO: 3124220 - RNA, 19 nt, Artificial Sequence
  Description of Artificial Sequence: Synthetic oligonucleotide
agccagaagggcuggcagc

SEQ ID NO: 3124221 - RNA, 19 nt, Artificial Sequence
  Description of Artificial Sequence: Synthetic oligonucleotide
aagggcuggcagccagucc

SEQ ID NO: 3124222 - RNA, 19 nt, Artificial Sequence
  Description of Artificial Sequence: Synthetic oligonucleotide
agucaggaagcuccgugag

SEQ ID NO: 3124223 - RNA, 19 nt, Artificial Sequence
  Description of Artificial Sequence: Synthetic oligonucleotide
aggaagcuccgugaggggc

SEQ ID NO: 3124224 - RNA, 19 nt, Artificial Sequence
  Description of Artificial Sequence: Synthetic oligonucleotide
ugcuguagucgccacuggc

SEQ ID NO: 3124225 - RNA, 19 nt, Artificial Sequence
  Description of Artificial Sequence: Synthetic oligonucleotide
uagccagaagggcuggcag

SEQ ID NO: 3124226 - RNA, 19 nt, Artificial Sequence
  Description of Artificial Sequence: Synthetic oligonucleotide
acugcagugcaaccuccgg

SEQ ID NO: 3124227 - RNA, 19 nt, Artificial Sequence
  Description of Artificial Sequence: Synthetic oligonucleotide
agcaggacggccaucggcg

SEQ ID NO: 3124228 - RNA, 19 nt, Artificial Sequence
  Description of Artificial Sequence: Synthetic oligonucleotide
ucgaaguuggcccuucauu

SEQ ID NO: 3124229 - RNA, 19 nt, Artificial Sequence
  Description of Artificial Sequence: Synthetic oligonucleotide
uugugucagcaguacaacu

SEQ ID NO: 3124230 - RNA, 19 nt, Artificial Sequence
  Description of Artificial Sequence: Synthetic oligonucleotide
acacugcacagccgagucc

SEQ ID NO: 3124231 - RNA, 19 nt, Artificial Sequence
  Description of Artificial Sequence: Synthetic oligonucleotide
uucuugugucagcaguaca

SEQ ID NO: 3124232 - RNA, 19 nt, Artificial Sequence
  Description of Artificial Sequence: Synthetic oligonucleotide
cgaaaguccagucaggaag

SEQ ID NO: 3124233 - RNA, 19 nt, Artificial Sequence
  Description of Artificial Sequence: Synthetic oligonucleotide
acagccgaguccccagcgc

SEQ ID NO: 3124234 - RNA, 19 nt, Artificial Sequence
  Description of Artificial Sequence: Synthetic oligonucleotide
gagcuugucuucgaaguug

SEQ ID NO: 3124235 - RNA, 19 nt, Artificial Sequence
  Description of Artificial Sequence: Synthetic oligonucleotide
cuggcugccggcccgagcc

SEQ ID NO: 3124236 - RNA, 19 nt, Artificial Sequence
  Description of Artificial Sequence: Synthetic oligonucleotide
aaccuccggacacugcaca

SEQ ID NO: 3124237 - RNA, 19 nt, Artificial Sequence
  Description of Artificial Sequence: Synthetic oligonucleotide
uguagucgccacuggcugc

SEQ ID NO: 3124238 - RNA, 19 nt, Artificial Sequence
  Description of Artificial Sequence: Synthetic oligonucleotide
gacacugcacagccgaguc

SEQ ID NO: 3124239 - RNA, 19 nt, Artificial Sequence
  Description of Artificial Sequence: Synthetic oligonucleotide
aaguccagucaggaagcuc

SEQ ID NO: 3124240 - RNA, 19 nt, Artificial Sequence
  Description of Artificial Sequence: Synthetic oligonucleotide
cacugcacagccgaguccc

SEQ ID NO: 3124241 - RNA, 19 nt, Artificial Sequence
  Description of Artificial Sequence: Synthetic oligonucleotide
agcuugucuucgaaguugg

SEQ ID NO: 3124242 - RNA, 19 nt, Artificial Sequence
  Description of Artificial Sequence: Synthetic oligonucleotide
uuucuugugucagcaguac

SEQ ID NO: 3124243 - RNA, 19 nt, Artificial Sequence
  Description of Artificial Sequence: Synthetic oligonucleotide
ggggcccauagccagaagg

SEQ ID NO: 3124244 - RNA, 19 nt, Artificial Sequence
  Description of Artificial Sequence: Synthetic oligonucleotide
gugaggggcccauagccag

SEQ ID NO: 3124245 - RNA, 19 nt, Artificial Sequence
  Description of Artificial Sequence: Synthetic oligonucleotide
gucaggaagcuccgugagg

SEQ ID NO: 3124246 - RNA, 19 nt, Artificial Sequence
  Description of Artificial Sequence: Synthetic oligonucleotide
aucggcgaaaguccaguca

SEQ ID NO: 3124247 - RNA, 19 nt, Artificial Sequence
  Description of Artificial Sequence: Synthetic oligonucleotide
ugucuucgaaguuggcccu

SEQ ID NO: 3124248 - RNA, 19 nt, Artificial Sequence
  Description of Artificial Sequence: Synthetic oligonucleotide
cuugugucagcaguacaac

SEQ ID NO: 3124249 - RNA, 19 nt, Artificial Sequence
  Description of Artificial Sequence: Synthetic oligonucleotide
cuguagucgccacuggcug

SEQ ID NO: 3124250 - RNA, 19 nt, Artificial Sequence
  Description of Artificial Sequence: Synthetic oligonucleotide
ugagcuugucuucgaaguu

SEQ ID NO: 3124251 - RNA, 19 nt, Artificial Sequence
  Description of Artificial Sequence: Synthetic oligonucleotide
ugucagcaguacaacucgu

SEQ ID NO: 3124252 - RNA, 19 nt, Artificial Sequence
  Description of Artificial Sequence: Synthetic oligonucleotide
ucucccgcugagcuugucu

SEQ ID NO: 3124253 - RNA, 19 nt, Artificial Sequence
  Description of Artificial Sequence: Synthetic oligonucleotide
uucgaaguuggcccuucau

SEQ ID NO: 3124254 - RNA, 19 nt, Artificial Sequence
  Description of Artificial Sequence: Synthetic oligonucleotide
gucuugcaagcuucucccg

SEQ ID NO: 3124255 - RNA, 19 nt, Artificial Sequence
  Description of Artificial Sequence: Synthetic oligonucleotide
cacugcagugcaaccuccg

SEQ ID NO: 3124256 - RNA, 19 nt, Artificial Sequence
  Description of Artificial Sequence: Synthetic oligonucleotide
uccgugaggggcccauagc

SEQ ID NO: 3124257 - RNA, 19 nt, Artificial Sequence
  Description of Artificial Sequence: Synthetic oligonucleotide
cagugcaaccuccggacac

SEQ ID NO: 3124258 - RNA, 19 nt, Artificial Sequence
  Description of Artificial Sequence: Synthetic oligonucleotide
cgaaguuggcccuucauug

SEQ ID NO: 3124259 - RNA, 19 nt, Artificial Sequence
  Description of Artificial Sequence: Synthetic oligonucleotide
ugcaagcuucucccgcuga

SEQ ID NO: 3124260 - RNA, 19 nt, Artificial Sequence
  Description of Artificial Sequence: Synthetic oligonucleotide
aaaguccagucaggaagcu

SEQ ID NO: 3124261 - RNA, 19 nt, Artificial Sequence
  Description of Artificial Sequence: Synthetic oligonucleotide
uugcaagcuucucccgcug

SEQ ID NO: 3124262 - RNA, 19 nt, Artificial Sequence
  Description of Artificial Sequence: Synthetic oligonucleotide
cauuucuugugucagcagu

SEQ ID NO: 3124263 - RNA, 19 nt, Artificial Sequence
  Description of Artificial Sequence: Synthetic oligonucleotide
uccggacacugcacagccg

SEQ ID NO: 3124264 - RNA, 19 nt, Artificial Sequence
  Description of Artificial Sequence: Synthetic oligonucleotide
cugagcuugucuucgaagu

SEQ ID NO: 3124265 - RNA, 19 nt, Artificial Sequence
  Description of Artificial Sequence: Synthetic oligonucleotide
cagucccugcuguagucgc

SEQ ID NO: 3124266 - RNA, 19 nt, Artificial Sequence
  Description of Artificial Sequence: Synthetic oligonucleotide
acuggcugccggcccgagc

SEQ ID NO: 3124267 - RNA, 19 nt, Artificial Sequence
  Description of Artificial Sequence: Synthetic oligonucleotide
aguuggcccuucauugggg

SEQ ID NO: 3124268 - RNA, 19 nt, Artificial Sequence
  Description of Artificial Sequence: Synthetic oligonucleotide
auuucuugugucagcagua

SEQ ID NO: 3124269 - RNA, 19 nt, Artificial Sequence
  Description of Artificial Sequence: Synthetic oligonucleotide
accuccggacacugcacag

SEQ ID NO: 3124270 - RNA, 19 nt, Artificial Sequence
  Description of Artificial Sequence: Synthetic oligonucleotide
cacagccgaguccccagcg

SEQ ID NO: 3124271 - RNA, 19 nt, Artificial Sequence
  Description of Artificial Sequence: Synthetic oligonucleotide
guagucgccacuggcugcc

SEQ ID NO: 3124272 - RNA, 19 nt, Artificial Sequence
  Description of Artificial Sequence: Synthetic oligonucleotide
gggagcaggacggccaucg

SEQ ID NO: 3124273 - RNA, 19 nt, Artificial Sequence
  Description of Artificial Sequence: Synthetic oligonucleotide
cagccgaguccccagcgcc

SEQ ID NO: 3124274 - RNA, 19 nt, Artificial Sequence
  Description of Artificial Sequence: Synthetic oligonucleotide
ugcaaccuccggacacugc

SEQ ID NO: 3124275 - RNA, 19 nt, Artificial Sequence
  Description of Artificial Sequence: Synthetic oligonucleotide
auagccagaagggcuggca

SEQ ID NO: 3124276 - RNA, 19 nt, Artificial Sequence
  Description of Artificial Sequence: Synthetic oligonucleotide
cgucuugcaagcuucuccc

SEQ ID NO: 3124277 - RNA, 19 nt, Artificial Sequence
  Description of Artificial Sequence: Synthetic oligonucleotide
cuccgugaggggcccauag

SEQ ID NO: 3124278 - RNA, 19 nt, Artificial Sequence
  Description of Artificial Sequence: Synthetic oligonucleotide
agccgcggcacugcagugc

SEQ ID NO: 3124279 - RNA, 19 nt, Artificial Sequence
  Description of Artificial Sequence: Synthetic oligonucleotide
gggcccauagccagaaggg

SEQ ID NO: 3124280 - RNA, 19 nt, Artificial Sequence
  Description of Artificial Sequence: Synthetic oligonucleotide
cagucaggaagcuccguga

SEQ ID NO: 3124281 - RNA, 19 nt, Artificial Sequence
  Description of Artificial Sequence: Synthetic oligonucleotide
caggaagcuccgugagggg

SEQ ID NO: 3124282 - RNA, 19 nt, Artificial Sequence
  Description of Artificial Sequence: Synthetic oligonucleotide
agucccugcuguagucgcc

SEQ ID NO: 3124283 - RNA, 19 nt, Artificial Sequence
  Description of Artificial Sequence: Synthetic oligonucleotide
agugcaaccuccggacacu

SEQ ID NO: 3124284 - RNA, 19 nt, Artificial Sequence
  Description of Artificial Sequence: Synthetic oligonucleotide
agucgccacuggcugccgg

SEQ ID NO: 3124285 - RNA, 19 nt, Artificial Sequence
  Description of Artificial Sequence: Synthetic oligonucleotide
ccgugaggggcccauagcc

SEQ ID NO: 3124286 - RNA, 19 nt, Artificial Sequence
  Description of Artificial Sequence: Synthetic oligonucleotide
caaccuccggacacugcac

SEQ ID NO: 3124287 - RNA, 19 nt, Artificial Sequence
  Description of Artificial Sequence: Synthetic oligonucleotide
agccagucccugcuguagu

SEQ ID NO: 3124288 - RNA, 19 nt, Artificial Sequence
  Description of Artificial Sequence: Synthetic oligonucleotide
gcaagcuucucccgcugag

SEQ ID NO: 3124289 - RNA, 19 nt, Artificial Sequence
  Description of Artificial Sequence: Synthetic oligonucleotide
gucagcaguacaacucguc

SEQ ID NO: 3124290 - RNA, 19 nt, Artificial Sequence
  Description of Artificial Sequence: Synthetic oligonucleotide
cccauagccagaagggcug

SEQ ID NO: 3124291 - RNA, 19 nt, Artificial Sequence
  Description of Artificial Sequence: Synthetic oligonucleotide
acaacucgucuugcaagcu

SEQ ID NO: 3124292 - RNA, 19 nt, Artificial Sequence
  Description of Artificial Sequence: Synthetic oligonucleotide
gucgccacuggcugccggc

SEQ ID NO: 3124293 - RNA, 19 nt, Artificial Sequence
  Description of Artificial Sequence: Synthetic oligonucleotide
caguacaacucgucuugca

SEQ ID NO: 3124294 - RNA, 19 nt, Artificial Sequence
  Description of Artificial Sequence: Synthetic oligonucleotide
gaagcuccgugaggggccc

SEQ ID NO: 3124295 - RNA, 19 nt, Artificial Sequence
  Description of Artificial Sequence: Synthetic oligonucleotide
caucggcgaaaguccaguc

SEQ ID NO: 3124296 - RNA, 19 nt, Artificial Sequence
  Description of Artificial Sequence: Synthetic oligonucleotide
ucuucgaaguuggcccuuc

SEQ ID NO: 3124297 - RNA, 19 nt, Artificial Sequence
  Description of Artificial Sequence: Synthetic oligonucleotide
cugcagugcaaccuccgga

SEQ ID NO: 3124298 - RNA, 19 nt, Artificial Sequence
  Description of Artificial Sequence: Synthetic oligonucleotide
cugcuguagucgccacugg

SEQ ID NO: 3124299 - RNA, 19 nt, Artificial Sequence
  Description of Artificial Sequence: Synthetic oligonucleotide
gaagggcuggcagccaguc

SEQ ID NO: 3124300 - RNA, 19 nt, Artificial Sequence
  Description of Artificial Sequence: Synthetic oligonucleotide
ggcacugcagugcaaccuc

SEQ ID NO: 3124301 - RNA, 19 nt, Artificial Sequence
  Description of Artificial Sequence: Synthetic oligonucleotide
guccagucaggaagcuccg

SEQ ID NO: 3124302 - RNA, 19 nt, Artificial Sequence
  Description of Artificial Sequence: Synthetic oligonucleotide
ccagucaggaagcuccgug

SEQ ID NO: 3124303 - RNA, 19 nt, Artificial Sequence
  Description of Artificial Sequence: Synthetic oligonucleotide
ggaagcuccgugaggggcc

SEQ ID NO: 3124304 - RNA, 19 nt, Artificial Sequence
  Description of Artificial Sequence: Synthetic oligonucleotide
uggcugccggcccgagccg

SEQ ID NO: 3124305 - RNA, 19 nt, Artificial Sequence
  Description of Artificial Sequence: Synthetic oligonucleotide
acugcacagccgagucccc

SEQ ID NO: 3124306 - RNA, 19 nt, Artificial Sequence
  Description of Artificial Sequence: Synthetic oligonucleotide
cauagccagaagggcuggc

SEQ ID NO: 3124307 - RNA, 19 nt, Artificial Sequence
  Description of Artificial Sequence: Synthetic oligonucleotide
cagccagucccugcuguag

SEQ ID NO: 3124308 - RNA, 19 nt, Artificial Sequence
  Description of Artificial Sequence: Synthetic oligonucleotide
ucccgcugagcuugucuuc

SEQ ID NO: 3124309 - RNA, 19 nt, Artificial Sequence
  Description of Artificial Sequence: Synthetic oligonucleotide
uggcagccagucccugcug

SEQ ID NO: 3124310 - RNA, 19 nt, Artificial Sequence
  Description of Artificial Sequence: Synthetic oligonucleotide
ccauuucuugugucagcag

SEQ ID NO: 3124311 - RNA, 19 nt, Artificial Sequence
  Description of Artificial Sequence: Synthetic oligonucleotide
ggcgaaaguccagucagga

SEQ ID NO: 3124312 - RNA, 19 nt, Artificial Sequence
  Description of Artificial Sequence: Synthetic oligonucleotide
uccagucaggaagcuccgu

SEQ ID NO: 3124313 - RNA, 19 nt, Artificial Sequence
  Description of Artificial Sequence: Synthetic oligonucleotide
ggcccauagccagaagggc

SEQ ID NO: 3124314 - RNA, 19 nt, Artificial Sequence
  Description of Artificial Sequence: Synthetic oligonucleotide
gccacuggcugccggcccg

SEQ ID NO: 3124315 - RNA, 19 nt, Artificial Sequence
  Description of Artificial Sequence: Synthetic oligonucleotide
ucgccacuggcugccggcc

SEQ ID NO: 3124316 - RNA, 19 nt, Artificial Sequence
  Description of Artificial Sequence: Synthetic oligonucleotide
cggccaucggcgaaagucc

SEQ ID NO: 3124317 - RNA, 19 nt, Artificial Sequence
  Description of Artificial Sequence: Synthetic oligonucleotide
agcuucucccgcugagcuu

SEQ ID NO: 3124318 - RNA, 19 nt, Artificial Sequence
  Description of Artificial Sequence: Synthetic oligonucleotide
ggagcaggacggccaucgg

SEQ ID NO: 3124319 - RNA, 19 nt, Artificial Sequence
  Description of Artificial Sequence: Synthetic oligonucleotide
acucgucuugcaagcuucu

SEQ ID NO: 3124320 - RNA, 19 nt, Artificial Sequence
  Description of Artificial Sequence: Synthetic oligonucleotide
cccgcugagcuugucuucg

SEQ ID NO: 3124321 - RNA, 19 nt, Artificial Sequence
  Description of Artificial Sequence: Synthetic oligonucleotide
cucgucuugcaagcuucuc

SEQ ID NO: 3124322 - RNA, 19 nt, Artificial Sequence
  Description of Artificial Sequence: Synthetic oligonucleotide
gagccgcggcacugcagug

SEQ ID NO: 3124323 - RNA, 19 nt, Artificial Sequence
  Description of Artificial Sequence: Synthetic oligonucleotide
gcaguacaacucgucuugc

SEQ ID NO: 3124324 - RNA, 19 nt, Artificial Sequence
  Description of Artificial Sequence: Synthetic oligonucleotide
aggacggccaucggcgaaa

SEQ ID NO: 3124325 - RNA, 19 nt, Artificial Sequence
  Description of Artificial Sequence: Synthetic oligonucleotide
cuucgaaguuggcccuuca

SEQ ID NO: 3124326 - RNA, 19 nt, Artificial Sequence
  Description of Artificial Sequence: Synthetic oligonucleotide
ccagucccugcuguagucg

SEQ ID NO: 3124327 - RNA, 19 nt, Artificial Sequence
  Description of Artificial Sequence: Synthetic oligonucleotide
gugcaaccuccggacacug

SEQ ID NO: 3124328 - RNA, 19 nt, Artificial Sequence
  Description of Artificial Sequence: Synthetic oligonucleotide
ucccugcuguagucgccac

SEQ ID NO: 3124329 - RNA, 19 nt, Artificial Sequence
  Description of Artificial Sequence: Synthetic oligonucleotide
uagucgccacuggcugccg

SEQ ID NO: 3124330 - RNA, 19 nt, Artificial Sequence
  Description of Artificial Sequence: Synthetic oligonucleotide
gucccugcuguagucgcca

SEQ ID NO: 3124331 - RNA, 19 nt, Artificial Sequence
  Description of Artificial Sequence: Synthetic oligonucleotide
gcuggcagccagucccugc

SEQ ID NO: 3124332 - RNA, 19 nt, Artificial Sequence
  Description of Artificial Sequence: Synthetic oligonucleotide
agaagggcuggcagccagu

SEQ ID NO: 3124333 - RNA, 19 nt, Artificial Sequence
  Description of Artificial Sequence: Synthetic oligonucleotide
ccggacacugcacagccga

SEQ ID NO: 3124334 - RNA, 19 nt, Artificial Sequence
  Description of Artificial Sequence: Synthetic oligonucleotide
gaggggcccauagccagaa

SEQ ID NO: 3124335 - RNA, 19 nt, Artificial Sequence
  Description of Artificial Sequence: Synthetic oligonucleotide
gcgaaaguccagucaggaa

SEQ ID NO: 3124336 - RNA, 19 nt, Artificial Sequence
  Description of Artificial Sequence: Synthetic oligonucleotide
cagcaguacaacucgucuu

SEQ ID NO: 3124337 - RNA, 19 nt, Artificial Sequence
  Description of Artificial Sequence: Synthetic oligonucleotide
cuggcagccagucccugcu

SEQ ID NO: 3124338 - RNA, 19 nt, Artificial Sequence
  Description of Artificial Sequence: Synthetic oligonucleotide
gcggcacugcagugcaacc

SEQ ID NO: 3124339 - RNA, 19 nt, Artificial Sequence
  Description of Artificial Sequence: Synthetic oligonucleotide
gcuguagucgccacuggcu

SEQ ID NO: 3124340 - RNA, 19 nt, Artificial Sequence
  Description of Artificial Sequence: Synthetic oligonucleotide
ccauagccagaagggcugg

SEQ ID NO: 3124341 - RNA, 19 nt, Artificial Sequence
  Description of Artificial Sequence: Synthetic oligonucleotide
gcacugcagugcaaccucc

SEQ ID NO: 3124342 - RNA, 19 nt, Artificial Sequence
  Description of Artificial Sequence: Synthetic oligonucleotide
gccagucccugcuguaguc

SEQ ID NO: 3124343 - RNA, 19 nt, Artificial Sequence
  Description of Artificial Sequence: Synthetic oligonucleotide
gcagugcaaccuccggaca

SEQ ID NO: 3124344 - RNA, 19 nt, Artificial Sequence
  Description of Artificial Sequence: Synthetic oligonucleotide
aguccccagcgccgccaug

SEQ ID NO: 3124345 - RNA, 19 nt, Artificial Sequence
  Description of Artificial Sequence: Synthetic oligonucleotide
ccuccggacacugcacagc

SEQ ID NO: 3124346 - RNA, 19 nt, Artificial Sequence
  Description of Artificial Sequence: Synthetic oligonucleotide
gcacagccgaguccccagc

SEQ ID NO: 3124347 - RNA, 19 nt, Artificial Sequence
  Description of Artificial Sequence: Synthetic oligonucleotide
caacucgucuugcaagcuu

SEQ ID NO: 3124348 - RNA, 19 nt, Artificial Sequence
  Description of Artificial Sequence: Synthetic oligonucleotide
gccaucggcgaaaguccag

SEQ ID NO: 3124349 - RNA, 19 nt, Artificial Sequence
  Description of Artificial Sequence: Synthetic oligonucleotide
cggcgaaaguccagucagg

SEQ ID NO: 3124350 - RNA, 19 nt, Artificial Sequence
  Description of Artificial Sequence: Synthetic oligonucleotide
cucccgcugagcuugucuu

SEQ ID NO: 3124351 - RNA, 19 nt, Artificial Sequence
  Description of Artificial Sequence: Synthetic oligonucleotide
gcuugucuucgaaguuggc

SEQ ID NO: 3124352 - RNA, 19 nt, Artificial Sequence
  Description of Artificial Sequence: Synthetic oligonucleotide
gccgcggcacugcagugca

SEQ ID NO: 3124353 - RNA, 19 nt, Artificial Sequence
  Description of Artificial Sequence: Synthetic oligonucleotide
agcuccgugaggggcccau

SEQ ID NO: 3124354 - RNA, 19 nt, Artificial Sequence
  Description of Artificial Sequence: Synthetic oligonucleotide
gcccauagccagaagggcu

SEQ ID NO: 3124355 - RNA, 19 nt, Artificial Sequence
  Description of Artificial Sequence: Synthetic oligonucleotide
ggacggccaucggcgaaag

SEQ ID NO: 3124356 - RNA, 19 nt, Artificial Sequence
  Description of Artificial Sequence: Synthetic oligonucleotide
caggacggccaucggcgaa

SEQ ID NO: 3124357 - RNA, 19 nt, Artificial Sequence
  Description of Artificial Sequence: Synthetic oligonucleotide
gcaggacggccaucggcga

SEQ ID NO: 3124358 - RNA, 19 nt, Artificial Sequence
  Description of Artificial Sequence: Synthetic oligonucleotide
cugccggcccgagccgcgg

SEQ ID NO: 3124359 - RNA, 19 nt, Artificial Sequence
  Description of Artificial Sequence: Synthetic oligonucleotide
ggccaucggcgaaagucca

SEQ ID NO: 3124360 - RNA, 19 nt, Artificial Sequence
  Description of Artificial Sequence: Synthetic oligonucleotide
ggcagccagucccugcugu

SEQ ID NO: 3124361 - RNA, 19 nt, Artificial Sequence
  Description of Artificial Sequence: Synthetic oligonucleotide
uucucccgcugagcuuguc

SEQ ID NO: 3124362 - RNA, 19 nt, Artificial Sequence
  Description of Artificial Sequence: Synthetic oligonucleotide
cgcggcacugcagugcaac

SEQ ID NO: 3124363 - RNA, 19 nt, Artificial Sequence
  Description of Artificial Sequence: Synthetic oligonucleotide
gcugccggcccgagccgcg

SEQ ID NO: 3124364 - RNA, 19 nt, Artificial Sequence
  Description of Artificial Sequence: Synthetic oligonucleotide
cacuggcugccggcccgag

SEQ ID NO: 3124365 - RNA, 19 nt, Artificial Sequence
  Description of Artificial Sequence: Synthetic oligonucleotide
gaguccccagcgccgccau

SEQ ID NO: 3124366 - RNA, 19 nt, Artificial Sequence
  Description of Artificial Sequence: Synthetic oligonucleotide
ccgagccgcggcacugcag

SEQ ID NO: 3124367 - RNA, 19 nt, Artificial Sequence
  Description of Artificial Sequence: Synthetic oligonucleotide
gacggccaucggcgaaagu

SEQ ID NO: 3124368 - RNA, 19 nt, Artificial Sequence
  Description of Artificial Sequence: Synthetic oligonucleotide
ggcccgagccgcggcacug

SEQ ID NO: 3124369 - RNA, 19 nt, Artificial Sequence
  Description of Artificial Sequence: Synthetic oligonucleotide
ccaucggcgaaaguccagu

SEQ ID NO: 3124370 - RNA, 19 nt, Artificial Sequence
  Description of Artificial Sequence: Synthetic oligonucleotide
cuucucccgcugagcuugu

SEQ ID NO: 3124371 - RNA, 19 nt, Artificial Sequence
  Description of Artificial Sequence: Synthetic oligonucleotide
gucuucgaaguuggcccuu

SEQ ID NO: 3124372 - RNA, 19 nt, Artificial Sequence
  Description of Artificial Sequence: Synthetic oligonucleotide
gcccgagccgcggcacugc

SEQ ID NO: 3124373 - RNA, 19 nt, Artificial Sequence
  Description of Artificial Sequence: Synthetic oligonucleotide
cgagccgcggcacugcagu

SEQ ID NO: 3124374 - RNA, 19 nt, Artificial Sequence
  Description of Artificial Sequence: Synthetic oligonucleotide
cgccacuggcugccggccc

SEQ ID NO: 3124375 - RNA, 19 nt, Artificial Sequence
  Description of Artificial Sequence: Synthetic oligonucleotide
gccggcccgagccgcggca

SEQ ID NO: 3124376 - RNA, 19 nt, Artificial Sequence
  Description of Artificial Sequence: Synthetic oligonucleotide
ccgcugagcuugucuucga

SEQ ID NO: 3124377 - RNA, 19 nt, Artificial Sequence
  Description of Artificial Sequence: Synthetic oligonucleotide
ccagaagggcuggcagcca

SEQ ID NO: 3124378 - RNA, 19 nt, Artificial Sequence
  Description of Artificial Sequence: Synthetic oligonucleotide
cgcugagcuugucuucgaa

SEQ ID NO: 3124379 - RNA, 19 nt, Artificial Sequence
  Description of Artificial Sequence: Synthetic oligonucleotide
ggggagcaggacggccauc

SEQ ID NO: 3124380 - RNA, 19 nt, Artificial Sequence
  Description of Artificial Sequence: Synthetic oligonucleotide
cccgagccgcggcacugca

SEQ ID NO: 3124381 - RNA, 19 nt, Artificial Sequence
  Description of Artificial Sequence: Synthetic oligonucleotide
ccggcccgagccgcggcac

SEQ ID NO: 3124382 - RNA, 19 nt, Artificial Sequence
  Description of Artificial Sequence: Synthetic oligonucleotide
cccugcuguagucgccacu

SEQ ID NO: 3124383 - RNA, 19 nt, Artificial Sequence
  Description of Artificial Sequence: Synthetic oligonucleotide
gggcuggcagccagucccu

SEQ ID NO: 3124384 - RNA, 19 nt, Artificial Sequence
  Description of Artificial Sequence: Synthetic oligonucleotide
cgaguccccagcgccgcca

SEQ ID NO: 3124385 - RNA, 19 nt, Artificial Sequence
  Description of Artificial Sequence: Synthetic oligonucleotide
cggcacugcagugcaaccu

SEQ ID NO: 3124386 - RNA, 19 nt, Artificial Sequence
  Description of Artificial Sequence: Synthetic oligonucleotide
gcuccgugaggggcccaua

SEQ ID NO: 3124387 - RNA, 19 nt, Artificial Sequence
  Description of Artificial Sequence: Synthetic oligonucleotide
ccacuggcugccggcccga

SEQ ID NO: 3124388 - RNA, 19 nt, Artificial Sequence
  Description of Artificial Sequence: Synthetic oligonucleotide
ccgcggcacugcagugcaa

SEQ ID NO: 3124389 - RNA, 19 nt, Artificial Sequence
  Description of Artificial Sequence: Synthetic oligonucleotide
cggcccgagccgcggcacu

SEQ ID NO: 3124390 - RNA, 19 nt, Artificial Sequence
  Description of Artificial Sequence: Synthetic oligonucleotide
auuuucaacauacaaauuc

SEQ ID NO: 3124391 - RNA, 19 nt, Artificial Sequence
  Description of Artificial Sequence: Synthetic oligonucleotide
uacaaauucuucaccaugg

SEQ ID NO: 3124392 - RNA, 19 nt, Artificial Sequence
  Description of Artificial Sequence: Synthetic oligonucleotide
uguucagucauuuccaaag

SEQ ID NO: 3124393 - RNA, 19 nt, Artificial Sequence
  Description of Artificial Sequence: Synthetic oligonucleotide
ucaacauacaaauucuuca

SEQ ID NO: 3124394 - RNA, 19 nt, Artificial Sequence
  Description of Artificial Sequence: Synthetic oligonucleotide
aaagcuuucaacaacugug

SEQ ID NO: 3124395 - RNA, 19 nt, Artificial Sequence
  Description of Artificial Sequence: Synthetic oligonucleotide
uuuucaacauacaaauucu

SEQ ID NO: 3124396 - RNA, 19 nt, Artificial Sequence
  Description of Artificial Sequence: Synthetic oligonucleotide
aucuguuuuguauucuugc

SEQ ID NO: 3124397 - RNA, 19 nt, Artificial Sequence
  Description of Artificial Sequence: Synthetic oligonucleotide
acaacugugcauuuucaac

SEQ ID NO: 3124398 - RNA, 19 nt, Artificial Sequence
  Description of Artificial Sequence: Synthetic oligonucleotide
uuucucuugaagaagugcu

SEQ ID NO: 3124399 - RNA, 19 nt, Artificial Sequence
  Description of Artificial Sequence: Synthetic oligonucleotide
uuuguauucuugcagaguu

SEQ ID NO: 3124400 - RNA, 19 nt, Artificial Sequence
  Description of Artificial Sequence: Synthetic oligonucleotide
ugcauuuucaacauacaaa

SEQ ID NO: 3124401 - RNA, 19 nt, Artificial Sequence
  Description of Artificial Sequence: Synthetic oligonucleotide
uguuuuguauucuugcaga

SEQ ID NO: 3124402 - RNA, 19 nt, Artificial Sequence
  Description of Artificial Sequence: Synthetic oligonucleotide
uugaagaagugcuugcugc

SEQ ID NO: 3124403 - RNA, 19 nt, Artificial Sequence
  Description of Artificial Sequence: Synthetic oligonucleotide
aaauucuucaccauggcau

SEQ ID NO: 3124404 - RNA, 19 nt, Artificial Sequence
  Description of Artificial Sequence: Synthetic oligonucleotide
aagcuuucaacaacugugc

SEQ ID NO: 3124405 - RNA, 19 nt, Artificial Sequence
  Description of Artificial Sequence: Synthetic oligonucleotide
uguucuuugagcugauuca

SEQ ID NO: 3124406 - RNA, 19 nt, Artificial Sequence
  Description of Artificial Sequence: Synthetic oligonucleotide
acaaauucuucaccauggc

SEQ ID NO: 3124407 - RNA, 19 nt, Artificial Sequence
  Description of Artificial Sequence: Synthetic oligonucleotide
agguaauuuucuucucugc

SEQ ID NO: 3124408 - RNA, 19 nt, Artificial Sequence
  Description of Artificial Sequence: Synthetic oligonucleotide
uucaacauacaaauucuuc

SEQ ID NO: 3124409 - RNA, 19 nt, Artificial Sequence
  Description of Artificial Sequence: Synthetic oligonucleotide
uuugagcugauucacuuuc

SEQ ID NO: 3124410 - RNA, 19 nt, Artificial Sequence
  Description of Artificial Sequence: Synthetic oligonucleotide
uccaaagcuuucaacaacu

SEQ ID NO: 3124411 - RNA, 19 nt, Artificial Sequence
  Description of Artificial Sequence: Synthetic oligonucleotide
uaggagguaauuuucuucu

SEQ ID NO: 3124412 - RNA, 19 nt, Artificial Sequence
  Description of Artificial Sequence: Synthetic oligonucleotide
auacaaauucuucaccaug

SEQ ID NO: 3124413 - RNA, 19 nt, Artificial Sequence
  Description of Artificial Sequence: Synthetic oligonucleotide
ucaacaacugugcauuuuc

SEQ ID NO: 3124414 - RNA, 19 nt, Artificial Sequence
  Description of Artificial Sequence: Synthetic oligonucleotide
uuguucuuugagcugauuc

SEQ ID NO: 3124415 - RNA, 19 nt, Artificial Sequence
  Description of Artificial Sequence: Synthetic oligonucleotide
uucacuuucucuugaagaa

SEQ ID NO: 3124416 - RNA, 19 nt, Artificial Sequence
  Description of Artificial Sequence: Synthetic oligonucleotide
ugcagaguuguucuuugag

SEQ ID NO: 3124417 - RNA, 19 nt, Artificial Sequence
  Description of Artificial Sequence: Synthetic oligonucleotide
caacauacaaauucuucac

SEQ ID NO: 3124418 - RNA, 19 nt, Artificial Sequence
  Description of Artificial Sequence: Synthetic oligonucleotide
ucuguuuuguauucuugca

SEQ ID NO: 3124419 - RNA, 19 nt, Artificial Sequence
  Description of Artificial Sequence: Synthetic oligonucleotide
gagguaauuuucuucucug

SEQ ID NO: 3124420 - RNA, 19 nt, Artificial Sequence
  Description of Artificial Sequence: Synthetic oligonucleotide
agguguagaagccaguggu

SEQ ID NO: 3124421 - RNA, 19 nt, Artificial Sequence
  Description of Artificial Sequence: Synthetic oligonucleotide
auucuugcagaguuguucu

SEQ ID NO: 3124422 - RNA, 19 nt, Artificial Sequence
  Description of Artificial Sequence: Synthetic oligonucleotide
uguauucuugcagaguugu

SEQ ID NO: 3124423 - RNA, 19 nt, Artificial Sequence
  Description of Artificial Sequence: Synthetic oligonucleotide
uucagucauuuccaaagcu

SEQ ID NO: 3124424 - RNA, 19 nt, Artificial Sequence
  Description of Artificial Sequence: Synthetic oligonucleotide
cuguuuuguauucuugcag

SEQ ID NO: 3124425 - RNA, 19 nt, Artificial Sequence
  Description of Artificial Sequence: Synthetic oligonucleotide
guuuuguauucuugcagag

SEQ ID NO: 3124426 - RNA, 19 nt, Artificial Sequence
  Description of Artificial Sequence: Synthetic oligonucleotide
uauucuugcagaguuguuc

SEQ ID NO: 3124427 - RNA, 19 nt, Artificial Sequence
  Description of Artificial Sequence: Synthetic oligonucleotide
aacaacugugcauuuucaa

SEQ ID NO: 3124428 - RNA, 19 nt, Artificial Sequence
  Description of Artificial Sequence: Synthetic oligonucleotide
ucagucauuuccaaagcuu

SEQ ID NO: 3124429 - RNA, 19 nt, Artificial Sequence
  Description of Artificial Sequence: Synthetic oligonucleotide
uuccaaagcuuucaacaac

SEQ ID NO: 3124430 - RNA, 19 nt, Artificial Sequence
  Description of Artificial Sequence: Synthetic oligonucleotide
ugugcauuuucaacauaca

SEQ ID NO: 3124431 - RNA, 19 nt, Artificial Sequence
  Description of Artificial Sequence: Synthetic oligonucleotide
cuaggagguaauuuucuuc

SEQ ID NO: 3124432 - RNA, 19 nt, Artificial Sequence
  Description of Artificial Sequence: Synthetic oligonucleotide
gagguguagaagccagugg

SEQ ID NO: 3124433 - RNA, 19 nt, Artificial Sequence
  Description of Artificial Sequence: Synthetic oligonucleotide
ucucuugaagaagugcuug

SEQ ID NO: 3124434 - RNA, 19 nt, Artificial Sequence
  Description of Artificial Sequence: Synthetic oligonucleotide
cuucucugcuguuuucugg

SEQ ID NO: 3124435 - RNA, 19 nt, Artificial Sequence
  Description of Artificial Sequence: Synthetic oligonucleotide
cuuucucuugaagaagugc

SEQ ID NO: 3124436 - RNA, 19 nt, Artificial Sequence
  Description of Artificial Sequence: Synthetic oligonucleotide
ugaagaagugcuugcugcu

SEQ ID NO: 3124437 - RNA, 19 nt, Artificial Sequence
  Description of Artificial Sequence: Synthetic oligonucleotide
ugggcuggcgaucuucucc

SEQ ID NO: 3124438 - RNA, 19 nt, Artificial Sequence
  Description of Artificial Sequence: Synthetic oligonucleotide
uuucaacauacaaauucuu

SEQ ID NO: 3124439 - RNA, 19 nt, Artificial Sequence
  Description of Artificial Sequence: Synthetic oligonucleotide
uuguauucuugcagaguug

SEQ ID NO: 3124440 - RNA, 19 nt, Artificial Sequence
  Description of Artificial Sequence: Synthetic oligonucleotide
aguuccugacaaugguggg

SEQ ID NO: 3124441 - RNA, 19 nt, Artificial Sequence
  Description of Artificial Sequence: Synthetic oligonucleotide
uucaccauggcaucuguuu

SEQ ID NO: 3124442 - RNA, 19 nt, Artificial Sequence
  Description of Artificial Sequence: Synthetic oligonucleotide
ucacuuucucuugaagaag

SEQ ID NO: 3124443 - RNA, 19 nt, Artificial Sequence
  Description of Artificial Sequence: Synthetic oligonucleotide
guucagucauuuccaaagc

SEQ ID NO: 3124444 - RNA, 19 nt, Artificial Sequence
  Description of Artificial Sequence: Synthetic oligonucleotide
uuuuguauucuugcagagu

SEQ ID NO: 3124445 - RNA, 19 nt, Artificial Sequence
  Description of Artificial Sequence: Synthetic oligonucleotide
cuugcagaguuguucuuug

SEQ ID NO: 3124446 - RNA, 19 nt, Artificial Sequence
  Description of Artificial Sequence: Synthetic oligonucleotide
agaguuguucuuugagcug

SEQ ID NO: 3124447 - RNA, 19 nt, Artificial Sequence
  Description of Artificial Sequence: Synthetic oligonucleotide
ucugcuguuuucuggcgcu

SEQ ID NO: 3124448 - RNA, 19 nt, Artificial Sequence
  Description of Artificial Sequence: Synthetic oligonucleotide
caucuguuuuguauucuug

SEQ ID NO: 3124449 - RNA, 19 nt, Artificial Sequence
  Description of Artificial Sequence: Synthetic oligonucleotide
uguagaagccaguggugcu

SEQ ID NO: 3124450 - RNA, 19 nt, Artificial Sequence
  Description of Artificial Sequence: Synthetic oligonucleotide
uuuucuggcgcuguucagu

SEQ ID NO: 3124451 - RNA, 19 nt, Artificial Sequence
  Description of Artificial Sequence: Synthetic oligonucleotide
ugccaaguuccugacaaug

SEQ ID NO: 3124452 - RNA, 19 nt, Artificial Sequence
  Description of Artificial Sequence: Synthetic oligonucleotide
ugagcugauucacuuucuc

SEQ ID NO: 3124453 - RNA, 19 nt, Artificial Sequence
  Description of Artificial Sequence: Synthetic oligonucleotide
ucuucucugcuguuuucug

SEQ ID NO: 3124454 - RNA, 19 nt, Artificial Sequence
  Description of Artificial Sequence: Synthetic oligonucleotide
ucuugaagaagugcuugcu

SEQ ID NO: 3124455 - RNA, 19 nt, Artificial Sequence
  Description of Artificial Sequence: Synthetic oligonucleotide
ucucugcuguuuucuggcg

SEQ ID NO: 3124456 - RNA, 19 nt, Artificial Sequence
  Description of Artificial Sequence: Synthetic oligonucleotide
ucuggcgcuguucagucau

SEQ ID NO: 3124457 - RNA, 19 nt, Artificial Sequence
  Description of Artificial Sequence: Synthetic oligonucleotide
aauggugggcuggcgaucu

SEQ ID NO: 3124458 - RNA, 19 nt, Artificial Sequence
  Description of Artificial Sequence: Synthetic oligonucleotide
gaguuguucuuugagcuga

SEQ ID NO: 3124459 - RNA, 19 nt, Artificial Sequence
  Description of Artificial Sequence: Synthetic oligonucleotide
ucuaggagguaauuuucuu

SEQ ID NO: 3124460 - RNA, 19 nt, Artificial Sequence
  Description of Artificial Sequence: Synthetic oligonucleotide
uuccugacaauggugggcu

SEQ ID NO: 3124461 - RNA, 19 nt, Artificial Sequence
  Description of Artificial Sequence: Synthetic oligonucleotide
auggcaucuguuuuguauu

SEQ ID NO: 3124462 - RNA, 19 nt, Artificial Sequence
  Description of Artificial Sequence: Synthetic oligonucleotide
uagaagccaguggugcugg

SEQ ID NO: 3124463 - RNA, 19 nt, Artificial Sequence
  Description of Artificial Sequence: Synthetic oligonucleotide
agucauuuccaaagcuuuc

SEQ ID NO: 3124464 - RNA, 19 nt, Artificial Sequence
  Description of Artificial Sequence: Synthetic oligonucleotide
gcagaguuguucuuugagc

SEQ ID NO: 3124465 - RNA, 19 nt, Artificial Sequence
  Description of Artificial Sequence: Synthetic oligonucleotide
caaauucuucaccauggca

SEQ ID NO: 3124466 - RNA, 19 nt, Artificial Sequence
  Description of Artificial Sequence: Synthetic oligonucleotide
uuucuggcgcuguucaguc

SEQ ID NO: 3124467 - RNA, 19 nt, Artificial Sequence
  Description of Artificial Sequence: Synthetic oligonucleotide
gugcauuuucaacauacaa

SEQ ID NO: 3124468 - RNA, 19 nt, Artificial Sequence
  Description of Artificial Sequence: Synthetic oligonucleotide
ucaccauggcaucuguuuu

SEQ ID NO: 3124469 - RNA, 19 nt, Artificial Sequence
  Description of Artificial Sequence: Synthetic oligonucleotide
ugauucacuuucucuugaa

SEQ ID NO: 3124470 - RNA, 19 nt, Artificial Sequence
  Description of Artificial Sequence: Synthetic oligonucleotide
uucucuugaagaagugcuu

SEQ ID NO: 3124471 - RNA, 19 nt, Artificial Sequence
  Description of Artificial Sequence: Synthetic oligonucleotide
uugagcugauucacuuucu

SEQ ID NO: 3124472 - RNA, 19 nt, Artificial Sequence
  Description of Artificial Sequence: Synthetic oligonucleotide
ggugcuggugccaaguucc

SEQ ID NO: 3124473 - RNA, 19 nt, Artificial Sequence
  Description of Artificial Sequence: Synthetic oligonucleotide
acaauggugggcuggcgau

SEQ ID NO: 3124474 - RNA, 19 nt, Artificial Sequence
  Description of Artificial Sequence: Synthetic oligonucleotide
agcuuucaacaacugugca

SEQ ID NO: 3124475 - RNA, 19 nt, Artificial Sequence
  Description of Artificial Sequence: Synthetic oligonucleotide
cagaguuguucuuugagcu

SEQ ID NO: 3124476 - RNA, 19 nt, Artificial Sequence
  Description of Artificial Sequence: Synthetic oligonucleotide
agccaguggugcuggugcc

SEQ ID NO: 3124477 - RNA, 19 nt, Artificial Sequence
  Description of Artificial Sequence: Synthetic oligonucleotide
cucugcuguuuucuggcgc

SEQ ID NO: 3124478 - RNA, 19 nt, Artificial Sequence
  Description of Artificial Sequence: Synthetic oligonucleotide
ggugccaaguuccugacaa

SEQ ID NO: 3124479 - RNA, 19 nt, Artificial Sequence
  Description of Artificial Sequence: Synthetic oligonucleotide
guuccugacaauggugggc

SEQ ID NO: 3124480 - RNA, 19 nt, Artificial Sequence
  Description of Artificial Sequence: Synthetic oligonucleotide
gcgcuguucagucauuucc

SEQ ID NO: 3124481 - RNA, 19 nt, Artificial Sequence
  Description of Artificial Sequence: Synthetic oligonucleotide
gcugauucacuuucucuug

SEQ ID NO: 3124482 - RNA, 19 nt, Artificial Sequence
  Description of Artificial Sequence: Synthetic oligonucleotide
ucuugcagaguuguucuuu

SEQ ID NO: 3124483 - RNA, 19 nt, Artificial Sequence
  Description of Artificial Sequence: Synthetic oligonucleotide
gguaauuuucuucucugcu

SEQ ID NO: 3124484 - RNA, 19 nt, Artificial Sequence
  Description of Artificial Sequence: Synthetic oligonucleotide
uggugcuggugccaaguuc

SEQ ID NO: 3124485 - RNA, 19 nt, Artificial Sequence
  Description of Artificial Sequence: Synthetic oligonucleotide
uggcgaucuucuccucuag

SEQ ID NO: 3124486 - RNA, 19 nt, Artificial Sequence
  Description of Artificial Sequence: Synthetic oligonucleotide
agaagugcuugcugcugga

SEQ ID NO: 3124487 - RNA, 19 nt, Artificial Sequence
  Description of Artificial Sequence: Synthetic oligonucleotide
uugcagaguuguucuuuga

SEQ ID NO: 3124488 - RNA, 19 nt, Artificial Sequence
  Description of Artificial Sequence: Synthetic oligonucleotide
uucuccucuaggagguaau

SEQ ID NO: 3124489 - RNA, 19 nt, Artificial Sequence
  Description of Artificial Sequence: Synthetic oligonucleotide
caacaacugugcauuuuca

SEQ ID NO: 3124490 - RNA, 19 nt, Artificial Sequence
  Description of Artificial Sequence: Synthetic oligonucleotide
cauggcaucuguuuuguau

SEQ ID NO: 3124491 - RNA, 19 nt, Artificial Sequence
  Description of Artificial Sequence: Synthetic oligonucleotide
gccaaguuccugacaaugg

SEQ ID NO: 3124492 - RNA, 19 nt, Artificial Sequence
  Description of Artificial Sequence: Synthetic oligonucleotide
ugacaauggugggcuggcg

SEQ ID NO: 3124493 - RNA, 19 nt, Artificial Sequence
  Description of Artificial Sequence: Synthetic oligonucleotide
cacuuucucuugaagaagu

SEQ ID NO: 3124494 - RNA, 19 nt, Artificial Sequence
  Description of Artificial Sequence: Synthetic oligonucleotide
acuuucucuugaagaagug

SEQ ID NO: 3124495 - RNA, 19 nt, Artificial Sequence
  Description of Artificial Sequence: Synthetic oligonucleotide
gagcugauucacuuucucu

SEQ ID NO: 3124496 - RNA, 19 nt, Artificial Sequence
  Description of Artificial Sequence: Synthetic oligonucleotide
cugauucacuuucucuuga

SEQ ID NO: 3124497 - RNA, 19 nt, Artificial Sequence
  Description of Artificial Sequence: Synthetic oligonucleotide
ggagguguagaagccagug

SEQ ID NO: 3124498 - RNA, 19 nt, Artificial Sequence
  Description of Artificial Sequence: Synthetic oligonucleotide
aguggugcuggugccaagu

SEQ ID NO: 3124499 - RNA, 19 nt, Artificial Sequence
  Description of Artificial Sequence: Synthetic oligonucleotide
gcuggugccaaguuccuga

SEQ ID NO: 3124500 - RNA, 19 nt, Artificial Sequence
  Description of Artificial Sequence: Synthetic oligonucleotide
caaagcuuucaacaacugu

SEQ ID NO: 3124501 - RNA, 19 nt, Artificial Sequence
  Description of Artificial Sequence: Synthetic oligonucleotide
auucuucaccauggcaucu

SEQ ID NO: 3124502 - RNA, 19 nt, Artificial Sequence
  Description of Artificial Sequence: Synthetic oligonucleotide
ggcgaucuucuccucuagg

SEQ ID NO: 3124503 - RNA, 19 nt, Artificial Sequence
  Description of Artificial Sequence: Synthetic oligonucleotide
uggugccaaguuccugaca

SEQ ID NO: 3124504 - RNA, 19 nt, Artificial Sequence
  Description of Artificial Sequence: Synthetic oligonucleotide
cauacaaauucuucaccau

SEQ ID NO: 3124505 - RNA, 19 nt, Artificial Sequence
  Description of Artificial Sequence: Synthetic oligonucleotide
cuggugccaaguuccugac

SEQ ID NO: 3124506 - RNA, 19 nt, Artificial Sequence
  Description of Artificial Sequence: Synthetic oligonucleotide
cucuaggagguaauuuucu

SEQ ID NO: 3124507 - RNA, 19 nt, Artificial Sequence
  Description of Artificial Sequence: Synthetic oligonucleotide
ccucuaggagguaauuuuc

SEQ ID NO: 3124508 - RNA, 19 nt, Artificial Sequence
  Description of Artificial Sequence: Synthetic oligonucleotide
acugugcauuuucaacaua

SEQ ID NO: 3124509 - RNA, 19 nt, Artificial Sequence
  Description of Artificial Sequence: Synthetic oligonucleotide
ugcuguuuucuggcgcugu

SEQ ID NO: 3124510 - RNA, 19 nt, Artificial Sequence
  Description of Artificial Sequence: Synthetic oligonucleotide
uucuggcgcuguucaguca

SEQ ID NO: 3124511 - RNA, 19 nt, Artificial Sequence
  Description of Artificial Sequence: Synthetic oligonucleotide
cuguucagucauuuccaaa

SEQ ID NO: 3124512 - RNA, 19 nt, Artificial Sequence
  Description of Artificial Sequence: Synthetic oligonucleotide
ccaaagcuuucaacaacug

SEQ ID NO: 3124513 - RNA, 19 nt, Artificial Sequence
  Description of Artificial Sequence: Synthetic oligonucleotide
uucuugcagaguuguucuu

SEQ ID NO: 3124514 - RNA, 19 nt, Artificial Sequence
  Description of Artificial Sequence: Synthetic oligonucleotide
uccugacaauggugggcug

SEQ ID NO: 3124515 - RNA, 19 nt, Artificial Sequence
  Description of Artificial Sequence: Synthetic oligonucleotide
ccugacaauggugggcugg

SEQ ID NO: 3124516 - RNA, 19 nt, Artificial Sequence
  Description of Artificial Sequence: Synthetic oligonucleotide
ugcuggugccaaguuccug

SEQ ID NO: 3124517 - RNA, 19 nt, Artificial Sequence
  Description of Artificial Sequence: Synthetic oligonucleotide
ucuccucuaggagguaauu

SEQ ID NO: 3124518 - RNA, 19 nt, Artificial Sequence
  Description of Artificial Sequence: Synthetic oligonucleotide
uggugggcuggcgaucuuc

SEQ ID NO: 3124519 - RNA, 19 nt, Artificial Sequence
  Description of Artificial Sequence: Synthetic oligonucleotide
gcuuucaacaacugugcau

SEQ ID NO: 3124520 - RNA, 19 nt, Artificial Sequence
  Description of Artificial Sequence: Synthetic oligonucleotide
caauggugggcuggcgauc

SEQ ID NO: 3124521 - RNA, 19 nt, Artificial Sequence
  Description of Artificial Sequence: Synthetic oligonucleotide
cuucuccucuaggagguaa

SEQ ID NO: 3124522 - RNA, 19 nt, Artificial Sequence
  Description of Artificial Sequence: Synthetic oligonucleotide
gcuguucagucauuuccaa

SEQ ID NO: 3124523 - RNA, 19 nt, Artificial Sequence
  Description of Artificial Sequence: Synthetic oligonucleotide
cuuugagcugauucacuuu

SEQ ID NO: 3124524 - RNA, 19 nt, Artificial Sequence
  Description of Artificial Sequence: Synthetic oligonucleotide
uggcgcuguucagucauuu

SEQ ID NO: 3124525 - RNA, 19 nt, Artificial Sequence
  Description of Artificial Sequence: Synthetic oligonucleotide
aggagguguagaagccagu

SEQ ID NO: 3124526 - RNA, 19 nt, Artificial Sequence
  Description of Artificial Sequence: Synthetic oligonucleotide
aguuguucuuugagcugau

SEQ ID NO: 3124527 - RNA, 19 nt, Artificial Sequence
  Description of Artificial Sequence: Synthetic oligonucleotide
caguggugcuggugccaag

SEQ ID NO: 3124528 - RNA, 19 nt, Artificial Sequence
  Description of Artificial Sequence: Synthetic oligonucleotide
ucuucuccucuaggaggua

SEQ ID NO: 3124529 - RNA, 19 nt, Artificial Sequence
  Description of Artificial Sequence: Synthetic oligonucleotide
ccaaguuccugacaauggu

SEQ ID NO: 3124530 - RNA, 19 nt, Artificial Sequence
  Description of Artificial Sequence: Synthetic oligonucleotide
cgcuguucagucauuucca

SEQ ID NO: 3124531 - RNA, 19 nt, Artificial Sequence
  Description of Artificial Sequence: Synthetic oligonucleotide
gugggcuggcgaucuucuc

SEQ ID NO: 3124532 - RNA, 19 nt, Artificial Sequence
  Description of Artificial Sequence: Synthetic oligonucleotide
gggcuggcgaucuucuccu

SEQ ID NO: 3124533 - RNA, 19 nt, Artificial Sequence
  Description of Artificial Sequence: Synthetic oligonucleotide
gcuggcgaucuucuccucu

SEQ ID NO: 3124534 - RNA, 19 nt, Artificial Sequence
  Description of Artificial Sequence: Synthetic oligonucleotide
ggcaucuguuuuguauucu

SEQ ID NO: 3124535 - RNA, 19 nt, Artificial Sequence
  Description of Artificial Sequence: Synthetic oligonucleotide
cuccucuaggagguaauuu

SEQ ID NO: 3124536 - RNA, 19 nt, Artificial Sequence
  Description of Artificial Sequence: Synthetic oligonucleotide
gugccaaguuccugacaau

SEQ ID NO: 3124537 - RNA, 19 nt, Artificial Sequence
  Description of Artificial Sequence: Synthetic oligonucleotide
guauucuugcagaguuguu

SEQ ID NO: 3124538 - RNA, 19 nt, Artificial Sequence
  Description of Artificial Sequence: Synthetic oligonucleotide
auggugggcuggcgaucuu

SEQ ID NO: 3124539 - RNA, 19 nt, Artificial Sequence
  Description of Artificial Sequence: Synthetic oligonucleotide
ggugggcuggcgaucuucu

SEQ ID NO: 3124540 - RNA, 19 nt, Artificial Sequence
  Description of Artificial Sequence: Synthetic oligonucleotide
guuguucuuugagcugauu

SEQ ID NO: 3124541 - RNA, 19 nt, Artificial Sequence
  Description of Artificial Sequence: Synthetic oligonucleotide
gcuguuuucuggcgcuguu

SEQ ID NO: 3124542 - RNA, 19 nt, Artificial Sequence
  Description of Artificial Sequence: Synthetic oligonucleotide
ccaguggugcuggugccaa

SEQ ID NO: 3124543 - RNA, 19 nt, Artificial Sequence
  Description of Artificial Sequence: Synthetic oligonucleotide
cuggcgcuguucagucauu

SEQ ID NO: 3124544 - RNA, 19 nt, Artificial Sequence
  Description of Artificial Sequence: Synthetic oligonucleotide
ccauggcaucuguuuugua

SEQ ID NO: 3124545 - RNA, 19 nt, Artificial Sequence
  Description of Artificial Sequence: Synthetic oligonucleotide
uauauuguuacucauauug

SEQ ID NO: 3124546 - RNA, 19 nt, Artificial Sequence
  Description of Artificial Sequence: Synthetic oligonucleotide
auauauaguauuuauuucc

SEQ ID NO: 3124547 - RNA, 19 nt, Artificial Sequence
  Description of Artificial Sequence: Synthetic oligonucleotide
aauaauuauaguuuauuag

SEQ ID NO: 3124548 - RNA, 19 nt, Artificial Sequence
  Description of Artificial Sequence: Synthetic oligonucleotide
ucauacaaaauaauuauag

SEQ ID NO: 3124549 - RNA, 19 nt, Artificial Sequence
  Description of Artificial Sequence: Synthetic oligonucleotide
auauuuguuauauuguuac

SEQ ID NO: 3124550 - RNA, 19 nt, Artificial Sequence
  Description of Artificial Sequence: Synthetic oligonucleotide
aaauagaacaucuggagcu

SEQ ID NO: 3124551 - RNA, 19 nt, Artificial Sequence
  Description of Artificial Sequence: Synthetic oligonucleotide
aaucauacaaaauaauuau

SEQ ID NO: 3124552 - RNA, 19 nt, Artificial Sequence
  Description of Artificial Sequence: Synthetic oligonucleotide
auaauuauaguuuauuaga

SEQ ID NO: 3124553 - RNA, 19 nt, Artificial Sequence
  Description of Artificial Sequence: Synthetic oligonucleotide
uuuauuuccacauuauucu

SEQ ID NO: 3124554 - RNA, 19 nt, Artificial Sequence
  Description of Artificial Sequence: Synthetic oligonucleotide
uauaguuuauuagaaauag

SEQ ID NO: 3124555 - RNA, 19 nt, Artificial Sequence
  Description of Artificial Sequence: Synthetic oligonucleotide
cuaguuguaagaaucauac

SEQ ID NO: 3124556 - RNA, 19 nt, Artificial Sequence
  Description of Artificial Sequence: Synthetic oligonucleotide
uacaaaauaauuauaguuu

SEQ ID NO: 3124557 - RNA, 19 nt, Artificial Sequence
  Description of Artificial Sequence: Synthetic oligonucleotide
auuauaguuuauuagaaau

SEQ ID NO: 3124558 - RNA, 19 nt, Artificial Sequence
  Description of Artificial Sequence: Synthetic oligonucleotide
uauuagaaauagaacaucu

SEQ ID NO: 3124559 - RNA, 19 nt, Artificial Sequence
  Description of Artificial Sequence: Synthetic oligonucleotide
agaaauagaacaucuggag

SEQ ID NO: 3124560 - RNA, 19 nt, Artificial Sequence
  Description of Artificial Sequence: Synthetic oligonucleotide
auuauucugaauuaugccu

SEQ ID NO: 3124561 - RNA, 19 nt, Artificial Sequence
  Description of Artificial Sequence: Synthetic oligonucleotide
uaagauuuguuuaauauuu

SEQ ID NO: 3124562 - RNA, 19 nt, Artificial Sequence
  Description of Artificial Sequence: Synthetic oligonucleotide
ugaauuaugccuagaaucu

SEQ ID NO: 3124563 - RNA, 19 nt, Artificial Sequence
  Description of Artificial Sequence: Synthetic oligonucleotide
uuaaaguuauguuuuguug

SEQ ID NO: 3124564 - RNA, 19 nt, Artificial Sequence
  Description of Artificial Sequence: Synthetic oligonucleotide
aguuguaagaaucauacaa

SEQ ID NO: 3124565 - RNA, 19 nt, Artificial Sequence
  Description of Artificial Sequence: Synthetic oligonucleotide
aaauaauuauaguuuauua

SEQ ID NO: 3124566 - RNA, 19 nt, Artificial Sequence
  Description of Artificial Sequence: Synthetic oligonucleotide
auuuauuuccacauuauuc

SEQ ID NO: 3124567 - RNA, 19 nt, Artificial Sequence
  Description of Artificial Sequence: Synthetic oligonucleotide
uauaguauuuauuuccaca

SEQ ID NO: 3124568 - RNA, 19 nt, Artificial Sequence
  Description of Artificial Sequence: Synthetic oligonucleotide
auuaagauuuguuuaauau

SEQ ID NO: 3124569 - RNA, 19 nt, Artificial Sequence
  Description of Artificial Sequence: Synthetic oligonucleotide
uaugccuagaaucuaguug

SEQ ID NO: 3124570 - RNA, 19 nt, Artificial Sequence
  Description of Artificial Sequence: Synthetic oligonucleotide
cugaauuaugccuagaauc

SEQ ID NO: 3124571 - RNA, 19 nt, Artificial Sequence
  Description of Artificial Sequence: Synthetic oligonucleotide
auacaaaauaauuauaguu

SEQ ID NO: 3124572 - RNA, 19 nt, Artificial Sequence
  Description of Artificial Sequence: Synthetic oligonucleotide
acauuauucugaauuaugc

SEQ ID NO: 3124573 - RNA, 19 nt, Artificial Sequence
  Description of Artificial Sequence: Synthetic oligonucleotide
uuuguuauauuguuacuca

SEQ ID NO: 3124574 - RNA, 19 nt, Artificial Sequence
  Description of Artificial Sequence: Synthetic oligonucleotide
auuuguuauauuguuacuc

SEQ ID NO: 3124575 - RNA, 19 nt, Artificial Sequence
  Description of Artificial Sequence: Synthetic oligonucleotide
gaaauagaacaucuggagc

SEQ ID NO: 3124576 - RNA, 19 nt, Artificial Sequence
  Description of Artificial Sequence: Synthetic oligonucleotide
ucuggagcuaaaauagggg

SEQ ID NO: 3124577 - RNA, 19 nt, Artificial Sequence
  Description of Artificial Sequence: Synthetic oligonucleotide
uauuauauauaguauuuau

SEQ ID NO: 3124578 - RNA, 19 nt, Artificial Sequence
  Description of Artificial Sequence: Synthetic oligonucleotide
guaagaaucauacaaaaua

SEQ ID NO: 3124579 - RNA, 19 nt, Artificial Sequence
  Description of Artificial Sequence: Synthetic oligonucleotide
auugguauuaaaguuaugu

SEQ ID NO: 3124580 - RNA, 19 nt, Artificial Sequence
  Description of Artificial Sequence: Synthetic oligonucleotide
aauuauaguuuauuagaaa

SEQ ID NO: 3124581 - RNA, 19 nt, Artificial Sequence
  Description of Artificial Sequence: Synthetic oligonucleotide
aacaucuggagcuaaaaua

SEQ ID NO: 3124582 - RNA, 19 nt, Artificial Sequence
  Description of Artificial Sequence: Synthetic oligonucleotide
uuuguuuaauauuuguuau

SEQ ID NO: 3124583 - RNA, 19 nt, Artificial Sequence
  Description of Artificial Sequence: Synthetic oligonucleotide
uauauauaguauuuauuuc

SEQ ID NO: 3124584 - RNA, 19 nt, Artificial Sequence
  Description of Artificial Sequence: Synthetic oligonucleotide
cauuauucugaauuaugcc

SEQ ID NO: 3124585 - RNA, 19 nt, Artificial Sequence
  Description of Artificial Sequence: Synthetic oligonucleotide
auaguauuuauuuccacau

SEQ ID NO: 3124586 - RNA, 19 nt, Artificial Sequence
  Description of Artificial Sequence: Synthetic oligonucleotide
uguuuaauauuuguuauau

SEQ ID NO: 3124587 - RNA, 19 nt, Artificial Sequence
  Description of Artificial Sequence: Synthetic oligonucleotide
auauaguauuuauuuccac

SEQ ID NO: 3124588 - RNA, 19 nt, Artificial Sequence
  Description of Artificial Sequence: Synthetic oligonucleotide
agaaagcccagucucaaag

SEQ ID NO: 3124589 - RNA, 19 nt, Artificial Sequence
  Description of Artificial Sequence: Synthetic oligonucleotide
augccuagaaucuaguugu

SEQ ID NO: 3124590 - RNA, 19 nt, Artificial Sequence
  Description of Artificial Sequence: Synthetic oligonucleotide
acucauauugguauuaaag

SEQ ID NO: 3124591 - RNA, 19 nt, Artificial Sequence
  Description of Artificial Sequence: Synthetic oligonucleotide
aauuaugccuagaaucuag

SEQ ID NO: 3124592 - RNA, 19 nt, Artificial Sequence
  Description of Artificial Sequence: Synthetic oligonucleotide
uuaagauuuguuuaauauu

SEQ ID NO: 3124593 - RNA, 19 nt, Artificial Sequence
  Description of Artificial Sequence: Synthetic oligonucleotide
ugguauuaaaguuauguuu

SEQ ID NO: 3124594 - RNA, 19 nt, Artificial Sequence
  Description of Artificial Sequence: Synthetic oligonucleotide
ugccaugcuauuaagauuu

SEQ ID NO: 3124595 - RNA, 19 nt, Artificial Sequence
  Description of Artificial Sequence: Synthetic oligonucleotide
ucauauugguauuaaaguu

SEQ ID NO: 3124596 - RNA, 19 nt, Artificial Sequence
  Description of Artificial Sequence: Synthetic oligonucleotide
gaaucuaguuguaagaauc

SEQ ID NO: 3124597 - RNA, 19 nt, Artificial Sequence
  Description of Artificial Sequence: Synthetic oligonucleotide
uuauucugaauuaugccua

SEQ ID NO: 3124598 - RNA, 19 nt, Artificial Sequence
  Description of Artificial Sequence: Synthetic oligonucleotide
ucuuccgccagaaagccca

SEQ ID NO: 3124599 - RNA, 19 nt, Artificial Sequence
  Description of Artificial Sequence: Synthetic oligonucleotide
uuguaagaaucauacaaaa

SEQ ID NO: 3124600 - RNA, 19 nt, Artificial Sequence
  Description of Artificial Sequence: Synthetic oligonucleotide
uaauauuuguuauauuguu

SEQ ID NO: 3124601 - RNA, 19 nt, Artificial Sequence
  Description of Artificial Sequence: Synthetic oligonucleotide
uauuuccacauuauucuga

SEQ ID NO: 3124602 - RNA, 19 nt, Artificial Sequence
  Description of Artificial Sequence: Synthetic oligonucleotide
acaucuggagcuaaaauag

SEQ ID NO: 3124603 - RNA, 19 nt, Artificial Sequence
  Description of Artificial Sequence: Synthetic oligonucleotide
agauuuguuuaauauuugu

SEQ ID NO: 3124604 - RNA, 19 nt, Artificial Sequence
  Description of Artificial Sequence: Synthetic oligonucleotide
aaagcccagucucaaagcu

SEQ ID NO: 3124605 - RNA, 19 nt, Artificial Sequence
  Description of Artificial Sequence: Synthetic oligonucleotide
ugcuauuaagauuuguuua

SEQ ID NO: 3124606 - RNA, 19 nt, Artificial Sequence
  Description of Artificial Sequence: Synthetic oligonucleotide
gaaucauacaaaauaauua

SEQ ID NO: 3124607 - RNA, 19 nt, Artificial Sequence
  Description of Artificial Sequence: Synthetic oligonucleotide
auuaaaguuauguuuuguu

SEQ ID NO: 3124608 - RNA, 19 nt, Artificial Sequence
  Description of Artificial Sequence: Synthetic oligonucleotide
uguaagaaucauacaaaau

SEQ ID NO: 3124609 - RNA, 19 nt, Artificial Sequence
  Description of Artificial Sequence: Synthetic oligonucleotide
uguuauauuguuacucaua

SEQ ID NO: 3124610 - RNA, 19 nt, Artificial Sequence
  Description of Artificial Sequence: Synthetic oligonucleotide
uuauuuccacauuauucug

SEQ ID NO: 3124611 - RNA, 19 nt, Artificial Sequence
  Description of Artificial Sequence: Synthetic oligonucleotide
uucugaauuaugccuagaa

SEQ ID NO: 3124612 - RNA, 19 nt, Artificial Sequence
  Description of Artificial Sequence: Synthetic oligonucleotide
ucugaauuaugccuagaau

SEQ ID NO: 3124613 - RNA, 19 nt, Artificial Sequence
  Description of Artificial Sequence: Synthetic oligonucleotide
auauuguuacucauauugg

SEQ ID NO: 3124614 - RNA, 19 nt, Artificial Sequence
  Description of Artificial Sequence: Synthetic oligonucleotide
uauucugaauuaugccuag

SEQ ID NO: 3124615 - RNA, 19 nt, Artificial Sequence
  Description of Artificial Sequence: Synthetic oligonucleotide
ucuaguuguaagaaucaua

SEQ ID NO: 3124616 - RNA, 19 nt, Artificial Sequence
  Description of Artificial Sequence: Synthetic oligonucleotide
uuauuagaaauagaacauc

SEQ ID NO: 3124617 - RNA, 19 nt, Artificial Sequence
  Description of Artificial Sequence: Synthetic oligonucleotide
aagcucuuccuugccaugc

SEQ ID NO: 3124618 - RNA, 19 nt, Artificial Sequence
  Description of Artificial Sequence: Synthetic oligonucleotide
uauuuauuuccacauuauu

SEQ ID NO: 3124619 - RNA, 19 nt, Artificial Sequence
  Description of Artificial Sequence: Synthetic oligonucleotide
uauuaagauuuguuuaaua

SEQ ID NO: 3124620 - RNA, 19 nt, Artificial Sequence
  Description of Artificial Sequence: Synthetic oligonucleotide
cauauugguauuaaaguua

SEQ ID NO: 3124621 - RNA, 19 nt, Artificial Sequence
  Description of Artificial Sequence: Synthetic oligonucleotide
aaucuaguuguaagaauca

SEQ ID NO: 3124622 - RNA, 19 nt, Artificial Sequence
  Description of Artificial Sequence: Synthetic oligonucleotide
agaaucauacaaaauaauu

SEQ ID NO: 3124623 - RNA, 19 nt, Artificial Sequence
  Description of Artificial Sequence: Synthetic oligonucleotide
uauuuguuauauuguuacu

SEQ ID NO: 3124624 - RNA, 19 nt, Artificial Sequence
  Description of Artificial Sequence: Synthetic oligonucleotide
aucuggagcuaaaauaggg

SEQ ID NO: 3124625 - RNA, 19 nt, Artificial Sequence
  Description of Artificial Sequence: Synthetic oligonucleotide
uauuaaaguuauguuuugu

SEQ ID NO: 3124626 - RNA, 19 nt, Artificial Sequence
  Description of Artificial Sequence: Synthetic oligonucleotide
cuagaaucuaguuguaaga

SEQ ID NO: 3124627 - RNA, 19 nt, Artificial Sequence
  Description of Artificial Sequence: Synthetic oligonucleotide
aagauuuguuuaauauuug

SEQ ID NO: 3124628 - RNA, 19 nt, Artificial Sequence
  Description of Artificial Sequence: Synthetic oligonucleotide
guauuaaaguuauguuuug

SEQ ID NO: 3124629 - RNA, 19 nt, Artificial Sequence
  Description of Artificial Sequence: Synthetic oligonucleotide
uugguauuaaaguuauguu

SEQ ID NO: 3124630 - RNA, 19 nt, Artificial Sequence
  Description of Artificial Sequence: Synthetic oligonucleotide
uagaaucuaguuguaagaa

SEQ ID NO: 3124631 - RNA, 19 nt, Artificial Sequence
  Description of Artificial Sequence: Synthetic oligonucleotide
augcuauuaagauuuguuu

SEQ ID NO: 3124632 - RNA, 19 nt, Artificial Sequence
  Description of Artificial Sequence: Synthetic oligonucleotide
uccacauuauucugaauua

SEQ ID NO: 3124633 - RNA, 19 nt, Artificial Sequence
  Description of Artificial Sequence: Synthetic oligonucleotide
guuauauuguuacucauau

SEQ ID NO: 3124634 - RNA, 19 nt, Artificial Sequence
  Description of Artificial Sequence: Synthetic oligonucleotide
agcccagucucaaagcugc

SEQ ID NO: 3124635 - RNA, 19 nt, Artificial Sequence
  Description of Artificial Sequence: Synthetic oligonucleotide
uuguuuaauauuuguuaua

SEQ ID NO: 3124636 - RNA, 19 nt, Artificial Sequence
  Description of Artificial Sequence: Synthetic oligonucleotide
aagaaucauacaaaauaau

SEQ ID NO: 3124637 - RNA, 19 nt, Artificial Sequence
  Description of Artificial Sequence: Synthetic oligonucleotide
agaaucuaguuguaagaau

SEQ ID NO: 3124638 - RNA, 19 nt, Artificial Sequence
  Description of Artificial Sequence: Synthetic oligonucleotide
cucauauugguauuaaagu

SEQ ID NO: 3124639 - RNA, 19 nt, Artificial Sequence
  Description of Artificial Sequence: Synthetic oligonucleotide
caucuggagcuaaaauagg

SEQ ID NO: 3124640 - RNA, 19 nt, Artificial Sequence
  Description of Artificial Sequence: Synthetic oligonucleotide
ccuagaaucuaguuguaag

SEQ ID NO: 3124641 - RNA, 19 nt, Artificial Sequence
  Description of Artificial Sequence: Synthetic oligonucleotide
uuccuugccaugcuauuaa

SEQ ID NO: 3124642 - RNA, 19 nt, Artificial Sequence
  Description of Artificial Sequence: Synthetic oligonucleotide
auauugguauuaaaguuau

SEQ ID NO: 3124643 - RNA, 19 nt, Artificial Sequence
  Description of Artificial Sequence: Synthetic oligonucleotide
cugucaagcucuuccuugc

SEQ ID NO: 3124644 - RNA, 19 nt, Artificial Sequence
  Description of Artificial Sequence: Synthetic oligonucleotide
guuguaagaaucauacaaa

SEQ ID NO: 3124645 - RNA, 19 nt, Artificial Sequence
  Description of Artificial Sequence: Synthetic oligonucleotide
ucaagcucuuccuugccau

SEQ ID NO: 3124646 - RNA, 19 nt, Artificial Sequence
  Description of Artificial Sequence: Synthetic oligonucleotide
uaguuguaagaaucauaca

SEQ ID NO: 3124647 - RNA, 19 nt, Artificial Sequence
  Description of Artificial Sequence: Synthetic oligonucleotide
uauugguauuaaaguuaug

SEQ ID NO: 3124648 - RNA, 19 nt, Artificial Sequence
  Description of Artificial Sequence: Synthetic oligonucleotide
gcugcugucaagcucuucc

SEQ ID NO: 3124649 - RNA, 19 nt, Artificial Sequence
  Description of Artificial Sequence: Synthetic oligonucleotide
gcuauuaagauuuguuuaa

SEQ ID NO: 3124650 - RNA, 19 nt, Artificial Sequence
  Description of Artificial Sequence: Synthetic oligonucleotide
ugucuuccgccagaaagcc

SEQ ID NO: 3124651 - RNA, 19 nt, Artificial Sequence
  Description of Artificial Sequence: Synthetic oligonucleotide
aauagaacaucuggagcua

SEQ ID NO: 3124652 - RNA, 19 nt, Artificial Sequence
  Description of Artificial Sequence: Synthetic oligonucleotide
ugucaagcucuuccuugcc

SEQ ID NO: 3124653 - RNA, 19 nt, Artificial Sequence
  Description of Artificial Sequence: Synthetic oligonucleotide
auaguuuauuagaaauaga

SEQ ID NO: 3124654 - RNA, 19 nt, Artificial Sequence
  Description of Artificial Sequence: Synthetic oligonucleotide
uacucauauugguauuaaa

SEQ ID NO: 3124655 - RNA, 19 nt, Artificial Sequence
  Description of Artificial Sequence: Synthetic oligonucleotide
uuauauuguuacucauauu

SEQ ID NO: 3124656 - RNA, 19 nt, Artificial Sequence
  Description of Artificial Sequence: Synthetic oligonucleotide
uguuacucauauugguauu

SEQ ID NO: 3124657 - RNA, 19 nt, Artificial Sequence
  Description of Artificial Sequence: Synthetic oligonucleotide
uuaugccuagaaucuaguu

SEQ ID NO: 3124658 - RNA, 19 nt, Artificial Sequence
  Description of Artificial Sequence: Synthetic oligonucleotide
auuguuacucauauuggua

SEQ ID NO: 3124659 - RNA, 19 nt, Artificial Sequence
  Description of Artificial Sequence: Synthetic oligonucleotide
uccgccagaaagcccaguc

SEQ ID NO: 3124660 - RNA, 19 nt, Artificial Sequence
  Description of Artificial Sequence: Synthetic oligonucleotide
uuacucauauugguauuaa

SEQ ID NO: 3124661 - RNA, 19 nt, Artificial Sequence
  Description of Artificial Sequence: Synthetic oligonucleotide
uccuugccaugcuauuaag

SEQ ID NO: 3124662 - RNA, 19 nt, Artificial Sequence
  Description of Artificial Sequence: Synthetic oligonucleotide
cuugccaugcuauuaagau

SEQ ID NO: 3124663 - RNA, 19 nt, Artificial Sequence
  Description of Artificial Sequence: Synthetic oligonucleotide
uagaacaucuggagcuaaa

SEQ ID NO: 3124664 - RNA, 19 nt, Artificial Sequence
  Description of Artificial Sequence: Synthetic oligonucleotide
uucuccugucuuccgccag

SEQ ID NO: 3124665 - RNA, 19 nt, Artificial Sequence
  Description of Artificial Sequence: Synthetic oligonucleotide
uugccaugcuauuaagauu

SEQ ID NO: 3124666 - RNA, 19 nt, Artificial Sequence
  Description of Artificial Sequence: Synthetic oligonucleotide
guauuauauauaguauuua

SEQ ID NO: 3124667 - RNA, 19 nt, Artificial Sequence
  Description of Artificial Sequence: Synthetic oligonucleotide
gauuuguuuaauauuuguu

SEQ ID NO: 3124668 - RNA, 19 nt, Artificial Sequence
  Description of Artificial Sequence: Synthetic oligonucleotide
ucuccugucuuccgccaga

SEQ ID NO: 3124669 - RNA, 19 nt, Artificial Sequence
  Description of Artificial Sequence: Synthetic oligonucleotide
gcugucaagcucuuccuug

SEQ ID NO: 3124670 - RNA, 19 nt, Artificial Sequence
  Description of Artificial Sequence: Synthetic oligonucleotide
agucucaaagcugcuguca

SEQ ID NO: 3124671 - RNA, 19 nt, Artificial Sequence
  Description of Artificial Sequence: Synthetic oligonucleotide
auuaugccuagaaucuagu

SEQ ID NO: 3124672 - RNA, 19 nt, Artificial Sequence
  Description of Artificial Sequence: Synthetic oligonucleotide
agaacaucuggagcuaaaa

SEQ ID NO: 3124673 - RNA, 19 nt, Artificial Sequence
  Description of Artificial Sequence: Synthetic oligonucleotide
caugcuauuaagauuuguu

SEQ ID NO: 3124674 - RNA, 19 nt, Artificial Sequence
  Description of Artificial Sequence: Synthetic oligonucleotide
gguauuaaaguuauguuuu

SEQ ID NO: 3124675 - RNA, 19 nt, Artificial Sequence
  Description of Artificial Sequence: Synthetic oligonucleotide
aagcccagucucaaagcug

SEQ ID NO: 3124676 - RNA, 19 nt, Artificial Sequence
  Description of Artificial Sequence: Synthetic oligonucleotide
gaacaucuggagcuaaaau

SEQ ID NO: 3124677 - RNA, 19 nt, Artificial Sequence
  Description of Artificial Sequence: Synthetic oligonucleotide
aucuaguuguaagaaucau

SEQ ID NO: 3124678 - RNA, 19 nt, Artificial Sequence
  Description of Artificial Sequence: Synthetic oligonucleotide
ggauucuccugucuuccgc

SEQ ID NO: 3124679 - RNA, 19 nt, Artificial Sequence
  Description of Artificial Sequence: Synthetic oligonucleotide
guuacucauauugguauua

SEQ ID NO: 3124680 - RNA, 19 nt, Artificial Sequence
  Description of Artificial Sequence: Synthetic oligonucleotide
gucaagcucuuccuugcca

SEQ ID NO: 3124681 - RNA, 19 nt, Artificial Sequence
  Description of Artificial Sequence: Synthetic oligonucleotide
gaauuaugccuagaaucua

SEQ ID NO: 3124682 - RNA, 19 nt, Artificial Sequence
  Description of Artificial Sequence: Synthetic oligonucleotide
ugcugucaagcucuuccuu

SEQ ID NO: 3124683 - RNA, 19 nt, Artificial Sequence
  Description of Artificial Sequence: Synthetic oligonucleotide
agcucuuccuugccaugcu

SEQ ID NO: 3124684 - RNA, 19 nt, Artificial Sequence
  Description of Artificial Sequence: Synthetic oligonucleotide
auagaacaucuggagcuaa

SEQ ID NO: 3124685 - RNA, 19 nt, Artificial Sequence
  Description of Artificial Sequence: Synthetic oligonucleotide
cagucucaaagcugcuguc

SEQ ID NO: 3124686 - RNA, 19 nt, Artificial Sequence
  Description of Artificial Sequence: Synthetic oligonucleotide
auucugaauuaugccuaga

SEQ ID NO: 3124687 - RNA, 19 nt, Artificial Sequence
  Description of Artificial Sequence: Synthetic oligonucleotide
guuuaauauuuguuauauu

SEQ ID NO: 3124688 - RNA, 19 nt, Artificial Sequence
  Description of Artificial Sequence: Synthetic oligonucleotide
ugccuagaaucuaguugua

SEQ ID NO: 3124689 - RNA, 19 nt, Artificial Sequence
  Description of Artificial Sequence: Synthetic oligonucleotide
cuuccgccagaaagcccag

SEQ ID NO: 3124690 - RNA, 19 nt, Artificial Sequence
  Description of Artificial Sequence: Synthetic oligonucleotide
cuauuaagauuuguuuaau

SEQ ID NO: 3124691 - RNA, 19 nt, Artificial Sequence
  Description of Artificial Sequence: Synthetic oligonucleotide
cuuccuugccaugcuauua

SEQ ID NO: 3124692 - RNA, 19 nt, Artificial Sequence
  Description of Artificial Sequence: Synthetic oligonucleotide
ccuugccaugcuauuaaga

SEQ ID NO: 3124693 - RNA, 19 nt, Artificial Sequence
  Description of Artificial Sequence: Synthetic oligonucleotide
gucuuccgccagaaagccc

SEQ ID NO: 3124694 - RNA, 19 nt, Artificial Sequence
  Description of Artificial Sequence: Synthetic oligonucleotide
cagaaagcccagucucaaa

SEQ ID NO: 3124695 - RNA, 19 nt, Artificial Sequence
  Description of Artificial Sequence: Synthetic oligonucleotide
agcugcugucaagcucuuc

SEQ ID NO: 3124696 - RNA, 19 nt, Artificial Sequence
  Description of Artificial Sequence: Synthetic oligonucleotide
cgccagaaagcccagucuc

SEQ ID NO: 3124697 - RNA, 19 nt, Artificial Sequence
  Description of Artificial Sequence: Synthetic oligonucleotide
cugcugucaagcucuuccu

SEQ ID NO: 3124698 - RNA, 19 nt, Artificial Sequence
  Description of Artificial Sequence: Synthetic oligonucleotide
ccagucucaaagcugcugu

SEQ ID NO: 3124699 - RNA, 19 nt, Artificial Sequence
  Description of Artificial Sequence: Synthetic oligonucleotide
uuccgccagaaagcccagu

SEQ ID NO: 3124700 - RNA, 19 nt, Artificial Sequence
  Description of Artificial Sequence: Synthetic oligonucleotide
gccagaaagcccagucuca

SEQ ID NO: 3124701 - RNA, 19 nt, Artificial Sequence
  Description of Artificial Sequence: Synthetic oligonucleotide
cccagucucaaagcugcug

SEQ ID NO: 3124702 - RNA, 19 nt, Artificial Sequence
  Description of Artificial Sequence: Synthetic oligonucleotide
gccuagaaucuaguuguaa

SEQ ID NO: 3124703 - RNA, 19 nt, Artificial Sequence
  Description of Artificial Sequence: Synthetic oligonucleotide
ccagaaagcccagucucaa

SEQ ID NO: 3124704 - RNA, 19 nt, Artificial Sequence
  Description of Artificial Sequence: Synthetic oligonucleotide
gcucuuccuugccaugcua

SEQ ID NO: 3124705 - RNA, 19 nt, Artificial Sequence
  Description of Artificial Sequence: Synthetic oligonucleotide
ccacauuauucugaauuau

SEQ ID NO: 3124706 - RNA, 19 nt, Artificial Sequence
  Description of Artificial Sequence: Synthetic oligonucleotide
ccaugcuauuaagauuugu

SEQ ID NO: 3124707 - RNA, 19 nt, Artificial Sequence
  Description of Artificial Sequence: Synthetic oligonucleotide
ccgccagaaagcccagucu

SEQ ID NO: 3124708 - RNA, 19 nt, Artificial Sequence
  Description of Artificial Sequence: Synthetic oligonucleotide
gcccagucucaaagcugcu

SEQ ID NO: 3124709 - RNA, 19 nt, Artificial Sequence
  Description of Artificial Sequence: Synthetic oligonucleotide
ucuuguuuagcccagaaga

SEQ ID NO: 3124710 - RNA, 19 nt, Artificial Sequence
  Description of Artificial Sequence: Synthetic oligonucleotide
acugacaucaguuaaggag

SEQ ID NO: 3124711 - RNA, 19 nt, Artificial Sequence
  Description of Artificial Sequence: Synthetic oligonucleotide
ucaguuaaggagauggcgg

SEQ ID NO: 3124712 - RNA, 19 nt, Artificial Sequence
  Description of Artificial Sequence: Synthetic oligonucleotide
gucacagcgaaccagauag

SEQ ID NO: 3124713 - RNA, 19 nt, Artificial Sequence
  Description of Artificial Sequence: Synthetic oligonucleotide
uuuacauuucauuuugugu

SEQ ID NO: 3124714 - RNA, 19 nt, Artificial Sequence
  Description of Artificial Sequence: Synthetic oligonucleotide
acaucaguuaaggagaugg

SEQ ID NO: 3124715 - RNA, 19 nt, Artificial Sequence
  Description of Artificial Sequence: Synthetic oligonucleotide
gaaucucagggucacagcg

SEQ ID NO: 3124716 - RNA, 19 nt, Artificial Sequence
  Description of Artificial Sequence: Synthetic oligonucleotide
uuuguguucuuguuuagcc

SEQ ID NO: 3124717 - RNA, 19 nt, Artificial Sequence
  Description of Artificial Sequence: Synthetic oligonucleotide
uguuuagcccagaagaucu

SEQ ID NO: 3124718 - RNA, 19 nt, Artificial Sequence
  Description of Artificial Sequence: Synthetic oligonucleotide
agauaggcucuccagaagg

SEQ ID NO: 3124719 - RNA, 19 nt, Artificial Sequence
  Description of Artificial Sequence: Synthetic oligonucleotide
cauuuuacauuucauuuug

SEQ ID NO: 3124720 - RNA, 19 nt, Artificial Sequence
  Description of Artificial Sequence: Synthetic oligonucleotide
uucuucuucugucaguagc

SEQ ID NO: 3124721 - RNA, 19 nt, Artificial Sequence
  Description of Artificial Sequence: Synthetic oligonucleotide
uccauuuuacauuucauuu

SEQ ID NO: 3124722 - RNA, 19 nt, Artificial Sequence
  Description of Artificial Sequence: Synthetic oligonucleotide
acuggaugcugauugcagc

SEQ ID NO: 3124723 - RNA, 19 nt, Artificial Sequence
  Description of Artificial Sequence: Synthetic oligonucleotide
uguguucuuguuuagccca

SEQ ID NO: 3124724 - RNA, 19 nt, Artificial Sequence
  Description of Artificial Sequence: Synthetic oligonucleotide
gaucuucacacgcuggcgg

SEQ ID NO: 3124725 - RNA, 19 nt, Artificial Sequence
  Description of Artificial Sequence: Synthetic oligonucleotide
ucuucuucugucaguagca

SEQ ID NO: 3124726 - RNA, 19 nt, Artificial Sequence
  Description of Artificial Sequence: Synthetic oligonucleotide
ugugcuuguccucacgcag

SEQ ID NO: 3124727 - RNA, 19 nt, Artificial Sequence
  Description of Artificial Sequence: Synthetic oligonucleotide
aucaguuaaggagauggcg

SEQ ID NO: 3124728 - RNA, 19 nt, Artificial Sequence
  Description of Artificial Sequence: Synthetic oligonucleotide
uucuuguuuagcccagaag

SEQ ID NO: 3124729 - RNA, 19 nt, Artificial Sequence
  Description of Artificial Sequence: Synthetic oligonucleotide
aaccagauaggcucuccag

SEQ ID NO: 3124730 - RNA, 19 nt, Artificial Sequence
  Description of Artificial Sequence: Synthetic oligonucleotide
ucuccagaaggacuggaug

SEQ ID NO: 3124731 - RNA, 19 nt, Artificial Sequence
  Description of Artificial Sequence: Synthetic oligonucleotide
uccuccauuuuacauuuca

SEQ ID NO: 3124732 - RNA, 19 nt, Artificial Sequence
  Description of Artificial Sequence: Synthetic oligonucleotide
agaagaucuucacacgcug

SEQ ID NO: 3124733 - RNA, 19 nt, Artificial Sequence
  Description of Artificial Sequence: Synthetic oligonucleotide
cuccagaaggacuggaugc

SEQ ID NO: 3124734 - RNA, 19 nt, Artificial Sequence
  Description of Artificial Sequence: Synthetic oligonucleotide
gaugugcuuguccucacgc

SEQ ID NO: 3124735 - RNA, 19 nt, Artificial Sequence
  Description of Artificial Sequence: Synthetic oligonucleotide
ucugucaguagcagggaga

SEQ ID NO: 3124736 - RNA, 19 nt, Artificial Sequence
  Description of Artificial Sequence: Synthetic oligonucleotide
uuguguucuuguuuagccc

SEQ ID NO: 3124737 - RNA, 19 nt, Artificial Sequence
  Description of Artificial Sequence: Synthetic oligonucleotide
ucauuuuguguucuuguuu

SEQ ID NO: 3124738 - RNA, 19 nt, Artificial Sequence
  Description of Artificial Sequence: Synthetic oligonucleotide
gagauggcggcacuggggc

SEQ ID NO: 3124739 - RNA, 19 nt, Artificial Sequence
  Description of Artificial Sequence: Synthetic oligonucleotide
uuuuguguucuuguuuagc

SEQ ID NO: 3124740 - RNA, 19 nt, Artificial Sequence
  Description of Artificial Sequence: Synthetic oligonucleotide
uuagcccagaagaucuuca

SEQ ID NO: 3124741 - RNA, 19 nt, Artificial Sequence
  Description of Artificial Sequence: Synthetic oligonucleotide
uacauuucauuuuguguuc

SEQ ID NO: 3124742 - RNA, 19 nt, Artificial Sequence
  Description of Artificial Sequence: Synthetic oligonucleotide
auugcagcuuucuucuucu

SEQ ID NO: 3124743 - RNA, 19 nt, Artificial Sequence
  Description of Artificial Sequence: Synthetic oligonucleotide
uucugucaguagcagggag

SEQ ID NO: 3124744 - RNA, 19 nt, Artificial Sequence
  Description of Artificial Sequence: Synthetic oligonucleotide
cagcgaaccagauaggcuc

SEQ ID NO: 3124745 - RNA, 19 nt, Artificial Sequence
  Description of Artificial Sequence: Synthetic oligonucleotide
cucagggucacagcgaacc

SEQ ID NO: 3124746 - RNA, 19 nt, Artificial Sequence
  Description of Artificial Sequence: Synthetic oligonucleotide
caguuaaggagauggcggc

SEQ ID NO: 3124747 - RNA, 19 nt, Artificial Sequence
  Description of Artificial Sequence: Synthetic oligonucleotide
gaagaucuucacacgcugg

SEQ ID NO: 3124748 - RNA, 19 nt, Artificial Sequence
  Description of Artificial Sequence: Synthetic oligonucleotide
aggacuggaugcugauugc

SEQ ID NO: 3124749 - RNA, 19 nt, Artificial Sequence
  Description of Artificial Sequence: Synthetic oligonucleotide
auuuuguguucuuguuuag

SEQ ID NO: 3124750 - RNA, 19 nt, Artificial Sequence
  Description of Artificial Sequence: Synthetic oligonucleotide
aaggagauggcggcacugg

SEQ ID NO: 3124751 - RNA, 19 nt, Artificial Sequence
  Description of Artificial Sequence: Synthetic oligonucleotide
gauugcagcuuucuucuuc

SEQ ID NO: 3124752 - RNA, 19 nt, Artificial Sequence
  Description of Artificial Sequence: Synthetic oligonucleotide
cuuguccucacgcagcuuc

SEQ ID NO: 3124753 - RNA, 19 nt, Artificial Sequence
  Description of Artificial Sequence: Synthetic oligonucleotide
agcaggcacuuccucgucc

SEQ ID NO: 3124754 - RNA, 19 nt, Artificial Sequence
  Description of Artificial Sequence: Synthetic oligonucleotide
cagcuccugaaucucaggg

SEQ ID NO: 3124755 - RNA, 19 nt, Artificial Sequence
  Description of Artificial Sequence: Synthetic oligonucleotide
cauuuuguguucuuguuua

SEQ ID NO: 3124756 - RNA, 19 nt, Artificial Sequence
  Description of Artificial Sequence: Synthetic oligonucleotide
ugaaucucagggucacagc

SEQ ID NO: 3124757 - RNA, 19 nt, Artificial Sequence
  Description of Artificial Sequence: Synthetic oligonucleotide
caucaguuaaggagauggc

SEQ ID NO: 3124758 - RNA, 19 nt, Artificial Sequence
  Description of Artificial Sequence: Synthetic oligonucleotide
accagauaggcucuccaga

SEQ ID NO: 3124759 - RNA, 19 nt, Artificial Sequence
  Description of Artificial Sequence: Synthetic oligonucleotide
uucauuuuguguucuuguu

SEQ ID NO: 3124760 - RNA, 19 nt, Artificial Sequence
  Description of Artificial Sequence: Synthetic oligonucleotide
auaggcucuccagaaggac

SEQ ID NO: 3124761 - RNA, 19 nt, Artificial Sequence
  Description of Artificial Sequence: Synthetic oligonucleotide
ucacgcagcuucuucugcc

SEQ ID NO: 3124762 - RNA, 19 nt, Artificial Sequence
  Description of Artificial Sequence: Synthetic oligonucleotide
uccucguccuccauuuuac

SEQ ID NO: 3124763 - RNA, 19 nt, Artificial Sequence
  Description of Artificial Sequence: Synthetic oligonucleotide
agaucuucacacgcuggcg

SEQ ID NO: 3124764 - RNA, 19 nt, Artificial Sequence
  Description of Artificial Sequence: Synthetic oligonucleotide
ucacagcgaaccagauagg

SEQ ID NO: 3124765 - RNA, 19 nt, Artificial Sequence
  Description of Artificial Sequence: Synthetic oligonucleotide
uuguuuagcccagaagauc

SEQ ID NO: 3124766 - RNA, 19 nt, Artificial Sequence
  Description of Artificial Sequence: Synthetic oligonucleotide
gcugauugcagcuuucuuc

SEQ ID NO: 3124767 - RNA, 19 nt, Artificial Sequence
  Description of Artificial Sequence: Synthetic oligonucleotide
cugucaguagcagggagag

SEQ ID NO: 3124768 - RNA, 19 nt, Artificial Sequence
  Description of Artificial Sequence: Synthetic oligonucleotide
cacagcgaaccagauaggc

SEQ ID NO: 3124769 - RNA, 19 nt, Artificial Sequence
  Description of Artificial Sequence: Synthetic oligonucleotide
uuaaggagauggcggcacu

SEQ ID NO: 3124770 - RNA, 19 nt, Artificial Sequence
  Description of Artificial Sequence: Synthetic oligonucleotide
gacuggaugcugauugcag

SEQ ID NO: 3124771 - RNA, 19 nt, Artificial Sequence
  Description of Artificial Sequence: Synthetic oligonucleotide
ucguccuccauuuuacauu

SEQ ID NO: 3124772 - RNA, 19 nt, Artificial Sequence
  Description of Artificial Sequence: Synthetic oligonucleotide
ugacaucaguuaaggagau

SEQ ID NO: 3124773 - RNA, 19 nt, Artificial Sequence
  Description of Artificial Sequence: Synthetic oligonucleotide
aggagauggcggcacuggg

SEQ ID NO: 3124774 - RNA, 19 nt, Artificial Sequence
  Description of Artificial Sequence: Synthetic oligonucleotide
gcccagaagaucuucacac

SEQ ID NO: 3124775 - RNA, 19 nt, Artificial Sequence
  Description of Artificial Sequence: Synthetic oligonucleotide
uggcggaugugcuuguccu

SEQ ID NO: 3124776 - RNA, 19 nt, Artificial Sequence
  Description of Artificial Sequence: Synthetic oligonucleotide
ccagaagaucuucacacgc

SEQ ID NO: 3124777 - RNA, 19 nt, Artificial Sequence
  Description of Artificial Sequence: Synthetic oligonucleotide
ugcuuguccucacgcagcu

SEQ ID NO: 3124778 - RNA, 19 nt, Artificial Sequence
  Description of Artificial Sequence: Synthetic oligonucleotide
agcuccugaaucucagggu

SEQ ID NO: 3124779 - RNA, 19 nt, Artificial Sequence
  Description of Artificial Sequence: Synthetic oligonucleotide
gauggcggcacuggggcag

SEQ ID NO: 3124780 - RNA, 19 nt, Artificial Sequence
  Description of Artificial Sequence: Synthetic oligonucleotide
aaucucagggucacagcga

SEQ ID NO: 3124781 - RNA, 19 nt, Artificial Sequence
  Description of Artificial Sequence: Synthetic oligonucleotide
uuuagcccagaagaucuuc

SEQ ID NO: 3124782 - RNA, 19 nt, Artificial Sequence
  Description of Artificial Sequence: Synthetic oligonucleotide
guuaaggagauggcggcac

SEQ ID NO: 3124783 - RNA, 19 nt, Artificial Sequence
  Description of Artificial Sequence: Synthetic oligonucleotide
ggcagcaggcacuuccucg

SEQ ID NO: 3124784 - RNA, 19 nt, Artificial Sequence
  Description of Artificial Sequence: Synthetic oligonucleotide
uccagaaggacuggaugcu

SEQ ID NO: 3124785 - RNA, 19 nt, Artificial Sequence
  Description of Artificial Sequence: Synthetic oligonucleotide
uuccucguccuccauuuua

SEQ ID NO: 3124786 - RNA, 19 nt, Artificial Sequence
  Description of Artificial Sequence: Synthetic oligonucleotide
cugauugcagcuuucuucu

SEQ ID NO: 3124787 - RNA, 19 nt, Artificial Sequence
  Description of Artificial Sequence: Synthetic oligonucleotide
ucagggucacagcgaacca

SEQ ID NO: 3124788 - RNA, 19 nt, Artificial Sequence
  Description of Artificial Sequence: Synthetic oligonucleotide
agcccagaagaucuucaca

SEQ ID NO: 3124789 - RNA, 19 nt, Artificial Sequence
  Description of Artificial Sequence: Synthetic oligonucleotide
uaaggagauggcggcacug

SEQ ID NO: 3124790 - RNA, 19 nt, Artificial Sequence
  Description of Artificial Sequence: Synthetic oligonucleotide
acauuucauuuuguguucu

SEQ ID NO: 3124791 - RNA, 19 nt, Artificial Sequence
  Description of Artificial Sequence: Synthetic oligonucleotide
uagcccagaagaucuucac

SEQ ID NO: 3124792 - RNA, 19 nt, Artificial Sequence
  Description of Artificial Sequence: Synthetic oligonucleotide
aucuucacacgcuggcgga

SEQ ID NO: 3124793 - RNA, 19 nt, Artificial Sequence
  Description of Artificial Sequence: Synthetic oligonucleotide
cagauaggcucuccagaag

SEQ ID NO: 3124794 - RNA, 19 nt, Artificial Sequence
  Description of Artificial Sequence: Synthetic oligonucleotide
uucacacgcuggcggaugu

SEQ ID NO: 3124795 - RNA, 19 nt, Artificial Sequence
  Description of Artificial Sequence: Synthetic oligonucleotide
cuucuucugucaguagcag

SEQ ID NO: 3124796 - RNA, 19 nt, Artificial Sequence
  Description of Artificial Sequence: Synthetic oligonucleotide
auuuuacauuucauuuugu

SEQ ID NO: 3124797 - RNA, 19 nt, Artificial Sequence
  Description of Artificial Sequence: Synthetic oligonucleotide
augugcuuguccucacgca

SEQ ID NO: 3124798 - RNA, 19 nt, Artificial Sequence
  Description of Artificial Sequence: Synthetic oligonucleotide
agaaggacuggaugcugau

SEQ ID NO: 3124799 - RNA, 19 nt, Artificial Sequence
  Description of Artificial Sequence: Synthetic oligonucleotide
ugccgcagcuccugaaucu

SEQ ID NO: 3124800 - RNA, 19 nt, Artificial Sequence
  Description of Artificial Sequence: Synthetic oligonucleotide
acgcagcuucuucugccac

SEQ ID NO: 3124801 - RNA, 19 nt, Artificial Sequence
  Description of Artificial Sequence: Synthetic oligonucleotide
gauaggcucuccagaagga

SEQ ID NO: 3124802 - RNA, 19 nt, Artificial Sequence
  Description of Artificial Sequence: Synthetic oligonucleotide
uccugaaucucagggucac

SEQ ID NO: 3124803 - RNA, 19 nt, Artificial Sequence
  Description of Artificial Sequence: Synthetic oligonucleotide
cuuucuucuucugucagua

SEQ ID NO: 3124804 - RNA, 19 nt, Artificial Sequence
  Description of Artificial Sequence: Synthetic oligonucleotide
uuguccucacgcagcuucu

SEQ ID NO: 3124805 - RNA, 19 nt, Artificial Sequence
  Description of Artificial Sequence: Synthetic oligonucleotide
gcuccugaaucucaggguc

SEQ ID NO: 3124806 - RNA, 19 nt, Artificial Sequence
  Description of Artificial Sequence: Synthetic oligonucleotide
gcuucuucugccacugccg

SEQ ID NO: 3124807 - RNA, 19 nt, Artificial Sequence
  Description of Artificial Sequence: Synthetic oligonucleotide
aguuaaggagauggcggca

SEQ ID NO: 3124808 - RNA, 19 nt, Artificial Sequence
  Description of Artificial Sequence: Synthetic oligonucleotide
ugcugauugcagcuuucuu

SEQ ID NO: 3124809 - RNA, 19 nt, Artificial Sequence
  Description of Artificial Sequence: Synthetic oligonucleotide
acagcgaaccagauaggcu

SEQ ID NO: 3124810 - RNA, 19 nt, Artificial Sequence
  Description of Artificial Sequence: Synthetic oligonucleotide
cagaaggacuggaugcuga

SEQ ID NO: 3124811 - RNA, 19 nt, Artificial Sequence
  Description of Artificial Sequence: Synthetic oligonucleotide
aggcucuccagaaggacug

SEQ ID NO: 3124812 - RNA, 19 nt, Artificial Sequence
  Description of Artificial Sequence: Synthetic oligonucleotide
cugccacugccgcagcucc

SEQ ID NO: 3124813 - RNA, 19 nt, Artificial Sequence
  Description of Artificial Sequence: Synthetic oligonucleotide
acugccgcagcuccugaau

SEQ ID NO: 3124814 - RNA, 19 nt, Artificial Sequence
  Description of Artificial Sequence: Synthetic oligonucleotide
cccagaagaucuucacacg

SEQ ID NO: 3124815 - RNA, 19 nt, Artificial Sequence
  Description of Artificial Sequence: Synthetic oligonucleotide
uguucuuguuuagcccaga

SEQ ID NO: 3124816 - RNA, 19 nt, Artificial Sequence
  Description of Artificial Sequence: Synthetic oligonucleotide
cuuguuuagcccagaagau

SEQ ID NO: 3124817 - RNA, 19 nt, Artificial Sequence
  Description of Artificial Sequence: Synthetic oligonucleotide
ggaugugcuuguccucacg

SEQ ID NO: 3124818 - RNA, 19 nt, Artificial Sequence
  Description of Artificial Sequence: Synthetic oligonucleotide
gacaucaguuaaggagaug

SEQ ID NO: 3124819 - RNA, 19 nt, Artificial Sequence
  Description of Artificial Sequence: Synthetic oligonucleotide
ggagauggcggcacugggg

SEQ ID NO: 3124820 - RNA, 19 nt, Artificial Sequence
  Description of Artificial Sequence: Synthetic oligonucleotide
gaugcugauugcagcuuuc

SEQ ID NO: 3124821 - RNA, 19 nt, Artificial Sequence
  Description of Artificial Sequence: Synthetic oligonucleotide
cagggucacagcgaaccag

SEQ ID NO: 3124822 - RNA, 19 nt, Artificial Sequence
  Description of Artificial Sequence: Synthetic oligonucleotide
cuccauuuuacauuucauu

SEQ ID NO: 3124823 - RNA, 19 nt, Artificial Sequence
  Description of Artificial Sequence: Synthetic oligonucleotide
agggucacagcgaaccaga

SEQ ID NO: 3124824 - RNA, 19 nt, Artificial Sequence
  Description of Artificial Sequence: Synthetic oligonucleotide
guguucuuguuuagcccag

SEQ ID NO: 3124825 - RNA, 19 nt, Artificial Sequence
  Description of Artificial Sequence: Synthetic oligonucleotide
uugcagcuuucuucuucug

SEQ ID NO: 3124826 - RNA, 19 nt, Artificial Sequence
  Description of Artificial Sequence: Synthetic oligonucleotide
cagcuuucuucuucuguca

SEQ ID NO: 3124827 - RNA, 19 nt, Artificial Sequence
  Description of Artificial Sequence: Synthetic oligonucleotide
ucugccacugccgcagcuc

SEQ ID NO: 3124828 - RNA, 19 nt, Artificial Sequence
  Description of Artificial Sequence: Synthetic oligonucleotide
gugcuuguccucacgcagc

SEQ ID NO: 3124829 - RNA, 19 nt, Artificial Sequence
  Description of Artificial Sequence: Synthetic oligonucleotide
augcugauugcagcuuucu

SEQ ID NO: 3124830 - RNA, 19 nt, Artificial Sequence
  Description of Artificial Sequence: Synthetic oligonucleotide
cuccugaaucucaggguca

SEQ ID NO: 3124831 - RNA, 19 nt, Artificial Sequence
  Description of Artificial Sequence: Synthetic oligonucleotide
cuggaugcugauugcagcu

SEQ ID NO: 3124832 - RNA, 19 nt, Artificial Sequence
  Description of Artificial Sequence: Synthetic oligonucleotide
cagaagaucuucacacgcu

SEQ ID NO: 3124833 - RNA, 19 nt, Artificial Sequence
  Description of Artificial Sequence: Synthetic oligonucleotide
cuucacacgcuggcggaug

SEQ ID NO: 3124834 - RNA, 19 nt, Artificial Sequence
  Description of Artificial Sequence: Synthetic oligonucleotide
acgcuggcggaugugcuug

SEQ ID NO: 3124835 - RNA, 19 nt, Artificial Sequence
  Description of Artificial Sequence: Synthetic oligonucleotide
cugccgcagcuccugaauc

SEQ ID NO: 3124836 - RNA, 19 nt, Artificial Sequence
  Description of Artificial Sequence: Synthetic oligonucleotide
agcgaaccagauaggcucu

SEQ ID NO: 3124837 - RNA, 19 nt, Artificial Sequence
  Description of Artificial Sequence: Synthetic oligonucleotide
gcggcacuggggcagcagg

SEQ ID NO: 3124838 - RNA, 19 nt, Artificial Sequence
  Description of Artificial Sequence: Synthetic oligonucleotide
ucuucacacgcuggcggau

SEQ ID NO: 3124839 - RNA, 19 nt, Artificial Sequence
  Description of Artificial Sequence: Synthetic oligonucleotide
ugauugcagcuuucuucuu

SEQ ID NO: 3124840 - RNA, 19 nt, Artificial Sequence
  Description of Artificial Sequence: Synthetic oligonucleotide
agauggcggcacuggggca

SEQ ID NO: 3124841 - RNA, 19 nt, Artificial Sequence
  Description of Artificial Sequence: Synthetic oligonucleotide
uggaugcugauugcagcuu

SEQ ID NO: 3124842 - RNA, 19 nt, Artificial Sequence
  Description of Artificial Sequence: Synthetic oligonucleotide
cacgcagcuucuucugcca

SEQ ID NO: 3124843 - RNA, 19 nt, Artificial Sequence
  Description of Artificial Sequence: Synthetic oligonucleotide
ccagauaggcucuccagaa

SEQ ID NO: 3124844 - RNA, 19 nt, Artificial Sequence
  Description of Artificial Sequence: Synthetic oligonucleotide
auggcggcacuggggcagc

SEQ ID NO: 3124845 - RNA, 19 nt, Artificial Sequence
  Description of Artificial Sequence: Synthetic oligonucleotide
cucguccuccauuuuacau

SEQ ID NO: 3124846 - RNA, 19 nt, Artificial Sequence
  Description of Artificial Sequence: Synthetic oligonucleotide
ucacacgcuggcggaugug

SEQ ID NO: 3124847 - RNA, 19 nt, Artificial Sequence
  Description of Artificial Sequence: Synthetic oligonucleotide
cuucugucaguagcaggga

SEQ ID NO: 3124848 - RNA, 19 nt, Artificial Sequence
  Description of Artificial Sequence: Synthetic oligonucleotide
ggacuggaugcugauugca

SEQ ID NO: 3124849 - RNA, 19 nt, Artificial Sequence
  Description of Artificial Sequence: Synthetic oligonucleotide
ccauuuuacauuucauuuu

SEQ ID NO: 3124850 - RNA, 19 nt, Artificial Sequence
  Description of Artificial Sequence: Synthetic oligonucleotide
acacgcuggcggaugugcu

SEQ ID NO: 3124851 - RNA, 19 nt, Artificial Sequence
  Description of Artificial Sequence: Synthetic oligonucleotide
gcggaugugcuuguccuca

SEQ ID NO: 3124852 - RNA, 19 nt, Artificial Sequence
  Description of Artificial Sequence: Synthetic oligonucleotide
ggucacagcgaaccagaua

SEQ ID NO: 3124853 - RNA, 19 nt, Artificial Sequence
  Description of Artificial Sequence: Synthetic oligonucleotide
uguccucacgcagcuucuu

SEQ ID NO: 3124854 - RNA, 19 nt, Artificial Sequence
  Description of Artificial Sequence: Synthetic oligonucleotide
cgcagcuccugaaucucag

SEQ ID NO: 3124855 - RNA, 19 nt, Artificial Sequence
  Description of Artificial Sequence: Synthetic oligonucleotide
cauuucauuuuguguucuu

SEQ ID NO: 3124856 - RNA, 19 nt, Artificial Sequence
  Description of Artificial Sequence: Synthetic oligonucleotide
cagcaggcacuuccucguc

SEQ ID NO: 3124857 - RNA, 19 nt, Artificial Sequence
  Description of Artificial Sequence: Synthetic oligonucleotide
ccagaaggacuggaugcug

SEQ ID NO: 3124858 - RNA, 19 nt, Artificial Sequence
  Description of Artificial Sequence: Synthetic oligonucleotide
ggcggaugugcuuguccuc

SEQ ID NO: 3124859 - RNA, 19 nt, Artificial Sequence
  Description of Artificial Sequence: Synthetic oligonucleotide
gaaggacuggaugcugauu

SEQ ID NO: 3124860 - RNA, 19 nt, Artificial Sequence
  Description of Artificial Sequence: Synthetic oligonucleotide
cacuggggcagcaggcacu

SEQ ID NO: 3124861 - RNA, 19 nt, Artificial Sequence
  Description of Artificial Sequence: Synthetic oligonucleotide
ggaugcugauugcagcuuu

SEQ ID NO: 3124862 - RNA, 19 nt, Artificial Sequence
  Description of Artificial Sequence: Synthetic oligonucleotide
cgaaccagauaggcucucc

SEQ ID NO: 3124863 - RNA, 19 nt, Artificial Sequence
  Description of Artificial Sequence: Synthetic oligonucleotide
cacugccgcagcuccugaa

SEQ ID NO: 3124864 - RNA, 19 nt, Artificial Sequence
  Description of Artificial Sequence: Synthetic oligonucleotide
guccuccauuuuacauuuc

SEQ ID NO: 3124865 - RNA, 19 nt, Artificial Sequence
  Description of Artificial Sequence: Synthetic oligonucleotide
ccuccauuuuacauuucau

SEQ ID NO: 3124866 - RNA, 19 nt, Artificial Sequence
  Description of Artificial Sequence: Synthetic oligonucleotide
guuuagcccagaagaucuu

SEQ ID NO: 3124867 - RNA, 19 nt, Artificial Sequence
  Description of Artificial Sequence: Synthetic oligonucleotide
ggcggcacuggggcagcag

SEQ ID NO: 3124868 - RNA, 19 nt, Artificial Sequence
  Description of Artificial Sequence: Synthetic oligonucleotide
cacuuccucguccuccauu

SEQ ID NO: 3124869 - RNA, 19 nt, Artificial Sequence
  Description of Artificial Sequence: Synthetic oligonucleotide
uggcggcacuggggcagca

SEQ ID NO: 3124870 - RNA, 19 nt, Artificial Sequence
  Description of Artificial Sequence: Synthetic oligonucleotide
cacgcuggcggaugugcuu

SEQ ID NO: 3124871 - RNA, 19 nt, Artificial Sequence
  Description of Artificial Sequence: Synthetic oligonucleotide
cguccuccauuuuacauuu

SEQ ID NO: 3124872 - RNA, 19 nt, Artificial Sequence
  Description of Artificial Sequence: Synthetic oligonucleotide
cggaugugcuuguccucac

SEQ ID NO: 3124873 - RNA, 19 nt, Artificial Sequence
  Description of Artificial Sequence: Synthetic oligonucleotide
gcgaaccagauaggcucuc

SEQ ID NO: 3124874 - RNA, 19 nt, Artificial Sequence
  Description of Artificial Sequence: Synthetic oligonucleotide
gcuggcggaugugcuuguc

SEQ ID NO: 3124875 - RNA, 19 nt, Artificial Sequence
  Description of Artificial Sequence: Synthetic oligonucleotide
ggggcagcaggcacuuccu

SEQ ID NO: 3124876 - RNA, 19 nt, Artificial Sequence
  Description of Artificial Sequence: Synthetic oligonucleotide
ccugaaucucagggucaca

SEQ ID NO: 3124877 - RNA, 19 nt, Artificial Sequence
  Description of Artificial Sequence: Synthetic oligonucleotide
gggucacagcgaaccagau

SEQ ID NO: 3124878 - RNA, 19 nt, Artificial Sequence
  Description of Artificial Sequence: Synthetic oligonucleotide
cgcuggcggaugugcuugu

SEQ ID NO: 3124879 - RNA, 19 nt, Artificial Sequence
  Description of Artificial Sequence: Synthetic oligonucleotide
acugacaucaugcaguagc

SEQ ID NO: 3124880 - RNA, 19 nt, Artificial Sequence
  Description of Artificial Sequence: Synthetic oligonucleotide
ugaagugggaaacugccag

SEQ ID NO: 3124881 - RNA, 19 nt, Artificial Sequence
  Description of Artificial Sequence: Synthetic oligonucleotide
ucgggaguagucuucacgg

SEQ ID NO: 3124882 - RNA, 19 nt, Artificial Sequence
  Description of Artificial Sequence: Synthetic oligonucleotide
ucaugcaguagccuccucg

SEQ ID NO: 3124883 - RNA, 19 nt, Artificial Sequence
  Description of Artificial Sequence: Synthetic oligonucleotide
agugcaaucagggccaggc

SEQ ID NO: 3124884 - RNA, 19 nt, Artificial Sequence
  Description of Artificial Sequence: Synthetic oligonucleotide
aagugcuccagcaucaagg

SEQ ID NO: 3124885 - RNA, 19 nt, Artificial Sequence
  Description of Artificial Sequence: Synthetic oligonucleotide
ugggugacugacaucaugc

SEQ ID NO: 3124886 - RNA, 19 nt, Artificial Sequence
  Description of Artificial Sequence: Synthetic oligonucleotide
caggcaaugacgcagugcc

SEQ ID NO: 3124887 - RNA, 19 nt, Artificial Sequence
  Description of Artificial Sequence: Synthetic oligonucleotide
acaggaucccuccagaaga

SEQ ID NO: 3124888 - RNA, 19 nt, Artificial Sequence
  Description of Artificial Sequence: Synthetic oligonucleotide
gaggagaugauggggaagg

SEQ ID NO: 3124889 - RNA, 19 nt, Artificial Sequence
  Description of Artificial Sequence: Synthetic oligonucleotide
aaugacgcagugccacgcg

SEQ ID NO: 3124890 - RNA, 19 nt, Artificial Sequence
  Description of Artificial Sequence: Synthetic oligonucleotide
gaaacugccaggaguacag

SEQ ID NO: 3124891 - RNA, 19 nt, Artificial Sequence
  Description of Artificial Sequence: Synthetic oligonucleotide
uacaggaucccuccagaag

SEQ ID NO: 3124892 - RNA, 19 nt, Artificial Sequence
  Description of Artificial Sequence: Synthetic oligonucleotide
cauugaagugggaaacugc

SEQ ID NO: 3124893 - RNA, 19 nt, Artificial Sequence
  Description of Artificial Sequence: Synthetic oligonucleotide
gacaucaugcaguagccuc

SEQ ID NO: 3124894 - RNA, 19 nt, Artificial Sequence
  Description of Artificial Sequence: Synthetic oligonucleotide
aucagggccaggcaaugac

SEQ ID NO: 3124895 - RNA, 19 nt, Artificial Sequence
  Description of Artificial Sequence: Synthetic oligonucleotide
gaagugggaaacugccagg

SEQ ID NO: 3124896 - RNA, 19 nt, Artificial Sequence
  Description of Artificial Sequence: Synthetic oligonucleotide
caugcaguagccuccucgg

SEQ ID NO: 3124897 - RNA, 19 nt, Artificial Sequence
  Description of Artificial Sequence: Synthetic oligonucleotide
agcucaggcauugaagugg

SEQ ID NO: 3124898 - RNA, 19 nt, Artificial Sequence
  Description of Artificial Sequence: Synthetic oligonucleotide
ucagggccaggcaaugacg

SEQ ID NO: 3124899 - RNA, 19 nt, Artificial Sequence
  Description of Artificial Sequence: Synthetic oligonucleotide
ugcuccagcaucaaggcuu

SEQ ID NO: 3124900 - RNA, 19 nt, Artificial Sequence
  Description of Artificial Sequence: Synthetic oligonucleotide
acaucaugcaguagccucc

SEQ ID NO: 3124901 - RNA, 19 nt, Artificial Sequence
  Description of Artificial Sequence: Synthetic oligonucleotide
cugacaucaugcaguagcc

SEQ ID NO: 3124902 - RNA, 19 nt, Artificial Sequence
  Description of Artificial Sequence: Synthetic oligonucleotide
gucgacagugcaaucaggg

SEQ ID NO: 3124903 - RNA, 19 nt, Artificial Sequence
  Description of Artificial Sequence: Synthetic oligonucleotide
ugcaaucagggccaggcaa

SEQ ID NO: 3124904 - RNA, 19 nt, Artificial Sequence
  Description of Artificial Sequence: Synthetic oligonucleotide
ugcaguagccuccucggga

SEQ ID NO: 3124905 - RNA, 19 nt, Artificial Sequence
  Description of Artificial Sequence: Synthetic oligonucleotide
aggcauugaagugggaaac

SEQ ID NO: 3124906 - RNA, 19 nt, Artificial Sequence
  Description of Artificial Sequence: Synthetic oligonucleotide
ugggaaacugccaggagua

SEQ ID NO: 3124907 - RNA, 19 nt, Artificial Sequence
  Description of Artificial Sequence: Synthetic oligonucleotide
gaguacaggaucccuccag

SEQ ID NO: 3124908 - RNA, 19 nt, Artificial Sequence
  Description of Artificial Sequence: Synthetic oligonucleotide
uugaagugggaaacugcca

SEQ ID NO: 3124909 - RNA, 19 nt, Artificial Sequence
  Description of Artificial Sequence: Synthetic oligonucleotide
cucgggaguagucuucacg

SEQ ID NO: 3124910 - RNA, 19 nt, Artificial Sequence
  Description of Artificial Sequence: Synthetic oligonucleotide
augacgcagugccacgcgc

SEQ ID NO: 3124911 - RNA, 19 nt, Artificial Sequence
  Description of Artificial Sequence: Synthetic oligonucleotide
ugccaggaguacaggaucc

SEQ ID NO: 3124912 - RNA, 19 nt, Artificial Sequence
  Description of Artificial Sequence: Synthetic oligonucleotide
ucgacagugcaaucagggc

SEQ ID NO: 3124913 - RNA, 19 nt, Artificial Sequence
  Description of Artificial Sequence: Synthetic oligonucleotide
gaucccuccagaagaagug

SEQ ID NO: 3124914 - RNA, 19 nt, Artificial Sequence
  Description of Artificial Sequence: Synthetic oligonucleotide
aagugggaaacugccagga

SEQ ID NO: 3124915 - RNA, 19 nt, Artificial Sequence
  Description of Artificial Sequence: Synthetic oligonucleotide
aagaagugcuccagcauca

SEQ ID NO: 3124916 - RNA, 19 nt, Artificial Sequence
  Description of Artificial Sequence: Synthetic oligonucleotide
uccagaagaagugcuccag

SEQ ID NO: 3124917 - RNA, 19 nt, Artificial Sequence
  Description of Artificial Sequence: Synthetic oligonucleotide
aucccuccagaagaagugc

SEQ ID NO: 3124918 - RNA, 19 nt, Artificial Sequence
  Description of Artificial Sequence: Synthetic oligonucleotide
gaagugcuccagcaucaag

SEQ ID NO: 3124919 - RNA, 19 nt, Artificial Sequence
  Description of Artificial Sequence: Synthetic oligonucleotide
ggugacugacaucaugcag

SEQ ID NO: 3124920 - RNA, 19 nt, Artificial Sequence
  Description of Artificial Sequence: Synthetic oligonucleotide
acguggugaugucuaggac

SEQ ID NO: 3124921 - RNA, 19 nt, Artificial Sequence
  Description of Artificial Sequence: Synthetic oligonucleotide
gacagugcaaucagggcca

SEQ ID NO: 3124922 - RNA, 19 nt, Artificial Sequence
  Description of Artificial Sequence: Synthetic oligonucleotide
cagggccaggcaaugacgc

SEQ ID NO: 3124923 - RNA, 19 nt, Artificial Sequence
  Description of Artificial Sequence: Synthetic oligonucleotide
ucuucacggaguccccagc

SEQ ID NO: 3124924 - RNA, 19 nt, Artificial Sequence
  Description of Artificial Sequence: Synthetic oligonucleotide
ugacgcagugccacgcgcc

SEQ ID NO: 3124925 - RNA, 19 nt, Artificial Sequence
  Description of Artificial Sequence: Synthetic oligonucleotide
ggugaugucuaggacgggg

SEQ ID NO: 3124926 - RNA, 19 nt, Artificial Sequence
  Description of Artificial Sequence: Synthetic oligonucleotide
gacgcagugccacgcgccg

SEQ ID NO: 3124927 - RNA, 19 nt, Artificial Sequence
  Description of Artificial Sequence: Synthetic oligonucleotide
aaacugccaggaguacagg

SEQ ID NO: 3124928 - RNA, 19 nt, Artificial Sequence
  Description of Artificial Sequence: Synthetic oligonucleotide
cagaagaagugcuccagca

SEQ ID NO: 3124929 - RNA, 19 nt, Artificial Sequence
  Description of Artificial Sequence: Synthetic oligonucleotide
ugacugacaucaugcagua

SEQ ID NO: 3124930 - RNA, 19 nt, Artificial Sequence
  Description of Artificial Sequence: Synthetic oligonucleotide
ugauggggaaggcccacgu

SEQ ID NO: 3124931 - RNA, 19 nt, Artificial Sequence
  Description of Artificial Sequence: Synthetic oligonucleotide
gggaguagucuucacggag

SEQ ID NO: 3124932 - RNA, 19 nt, Artificial Sequence
  Description of Artificial Sequence: Synthetic oligonucleotide
gaguagucuucacggaguc

SEQ ID NO: 3124933 - RNA, 19 nt, Artificial Sequence
  Description of Artificial Sequence: Synthetic oligonucleotide
ucccuccagaagaagugcu

SEQ ID NO: 3124934 - RNA, 19 nt, Artificial Sequence
  Description of Artificial Sequence: Synthetic oligonucleotide
aaggcccacguggugaugu

SEQ ID NO: 3124935 - RNA, 19 nt, Artificial Sequence
  Description of Artificial Sequence: Synthetic oligonucleotide
ugauggggaggagaugaug

SEQ ID NO: 3124936 - RNA, 19 nt, Artificial Sequence
  Description of Artificial Sequence: Synthetic oligonucleotide
gauggggaaggcccacgug

SEQ ID NO: 3124937 - RNA, 19 nt, Artificial Sequence
  Description of Artificial Sequence: Synthetic oligonucleotide
gugggugacugacaucaug

SEQ ID NO: 3124938 - RNA, 19 nt, Artificial Sequence
  Description of Artificial Sequence: Synthetic oligonucleotide
augcaguagccuccucggg

SEQ ID NO: 3124939 - RNA, 19 nt, Artificial Sequence
  Description of Artificial Sequence: Synthetic oligonucleotide
caggaguacaggaucccuc

SEQ ID NO: 3124940 - RNA, 19 nt, Artificial Sequence
  Description of Artificial Sequence: Synthetic oligonucleotide
uagucuucacggagucccc

SEQ ID NO: 3124941 - RNA, 19 nt, Artificial Sequence
  Description of Artificial Sequence: Synthetic oligonucleotide
cacguggugaugucuagga

SEQ ID NO: 3124942 - RNA, 19 nt, Artificial Sequence
  Description of Artificial Sequence: Synthetic oligonucleotide
gugacugacaucaugcagu

SEQ ID NO: 3124943 - RNA, 19 nt, Artificial Sequence
  Description of Artificial Sequence: Synthetic oligonucleotide
cugccaggaguacaggauc

SEQ ID NO: 3124944 - RNA, 19 nt, Artificial Sequence
  Description of Artificial Sequence: Synthetic oligonucleotide
gucuucacggaguccccag

SEQ ID NO: 3124945 - RNA, 19 nt, Artificial Sequence
  Description of Artificial Sequence: Synthetic oligonucleotide
cgacagugcaaucagggcc

SEQ ID NO: 3124946 - RNA, 19 nt, Artificial Sequence
  Description of Artificial Sequence: Synthetic oligonucleotide
uucacggaguccccagcuc

SEQ ID NO: 3124947 - RNA, 19 nt, Artificial Sequence
  Description of Artificial Sequence: Synthetic oligonucleotide
caaugacgcagugccacgc

SEQ ID NO: 3124948 - RNA, 19 nt, Artificial Sequence
  Description of Artificial Sequence: Synthetic oligonucleotide
gcaguagccuccucgggag

SEQ ID NO: 3124949 - RNA, 19 nt, Artificial Sequence
  Description of Artificial Sequence: Synthetic oligonucleotide
ugacaucaugcaguagccu

SEQ ID NO: 3124950 - RNA, 19 nt, Artificial Sequence
  Description of Artificial Sequence: Synthetic oligonucleotide
aaucagggccaggcaauga

SEQ ID NO: 3124951 - RNA, 19 nt, Artificial Sequence
  Description of Artificial Sequence: Synthetic oligonucleotide
gugggaaacugccaggagu

SEQ ID NO: 3124952 - RNA, 19 nt, Artificial Sequence
  Description of Artificial Sequence: Synthetic oligonucleotide
cagcucaggcauugaagug

SEQ ID NO: 3124953 - RNA, 19 nt, Artificial Sequence
  Description of Artificial Sequence: Synthetic oligonucleotide
agugccacgcgccggcaga

SEQ ID NO: 3124954 - RNA, 19 nt, Artificial Sequence
  Description of Artificial Sequence: Synthetic oligonucleotide
ggagaugauggggaaggcc

SEQ ID NO: 3124955 - RNA, 19 nt, Artificial Sequence
  Description of Artificial Sequence: Synthetic oligonucleotide
ggcaaugacgcagugccac

SEQ ID NO: 3124956 - RNA, 19 nt, Artificial Sequence
  Description of Artificial Sequence: Synthetic oligonucleotide
gcaaugacgcagugccacg

SEQ ID NO: 3124957 - RNA, 19 nt, Artificial Sequence
  Description of Artificial Sequence: Synthetic oligonucleotide
gcauugaagugggaaacug

SEQ ID NO: 3124958 - RNA, 19 nt, Artificial Sequence
  Description of Artificial Sequence: Synthetic oligonucleotide
uccucgggaguagucuuca

SEQ ID NO: 3124959 - RNA, 19 nt, Artificial Sequence
  Description of Artificial Sequence: Synthetic oligonucleotide
agagcgcugggugggugac

SEQ ID NO: 3124960 - RNA, 19 nt, Artificial Sequence
  Description of Artificial Sequence: Synthetic oligonucleotide
agcgcugggugggugacug

SEQ ID NO: 3124961 - RNA, 19 nt, Artificial Sequence
  Description of Artificial Sequence: Synthetic oligonucleotide
ccagaagaagugcuccagc

SEQ ID NO: 3124962 - RNA, 19 nt, Artificial Sequence
  Description of Artificial Sequence: Synthetic oligonucleotide
aucaugcaguagccuccuc

SEQ ID NO: 3124963 - RNA, 19 nt, Artificial Sequence
  Description of Artificial Sequence: Synthetic oligonucleotide
gcucaggcauugaaguggg

SEQ ID NO: 3124964 - RNA, 19 nt, Artificial Sequence
  Description of Artificial Sequence: Synthetic oligonucleotide
cccagcucaggcauugaag

SEQ ID NO: 3124965 - RNA, 19 nt, Artificial Sequence
  Description of Artificial Sequence: Synthetic oligonucleotide
guacaggaucccuccagaa

SEQ ID NO: 3124966 - RNA, 19 nt, Artificial Sequence
  Description of Artificial Sequence: Synthetic oligonucleotide
cuccagaagaagugcucca

SEQ ID NO: 3124967 - RNA, 19 nt, Artificial Sequence
  Description of Artificial Sequence: Synthetic oligonucleotide
ggggcagccgucgacagug

SEQ ID NO: 3124968 - RNA, 19 nt, Artificial Sequence
  Description of Artificial Sequence: Synthetic oligonucleotide
agaugauggggaaggccca

SEQ ID NO: 3124969 - RNA, 19 nt, Artificial Sequence
  Description of Artificial Sequence: Synthetic oligonucleotide
aggaucccuccagaagaag

SEQ ID NO: 3124970 - RNA, 19 nt, Artificial Sequence
  Description of Artificial Sequence: Synthetic oligonucleotide
gacugacaucaugcaguag

SEQ ID NO: 3124971 - RNA, 19 nt, Artificial Sequence
  Description of Artificial Sequence: Synthetic oligonucleotide
ggaggagaugauggggaag

SEQ ID NO: 3124972 - RNA, 19 nt, Artificial Sequence
  Description of Artificial Sequence: Synthetic oligonucleotide
uggugaugucuaggacggg

SEQ ID NO: 3124973 - RNA, 19 nt, Artificial Sequence
  Description of Artificial Sequence: Synthetic oligonucleotide
guagccuccucgggaguag

SEQ ID NO: 3124974 - RNA, 19 nt, Artificial Sequence
  Description of Artificial Sequence: Synthetic oligonucleotide
cuccucgggaguagucuuc

SEQ ID NO: 3124975 - RNA, 19 nt, Artificial Sequence
  Description of Artificial Sequence: Synthetic oligonucleotide
ggaaacugccaggaguaca

SEQ ID NO: 3124976 - RNA, 19 nt, Artificial Sequence
  Description of Artificial Sequence: Synthetic oligonucleotide
agucuucacggagucccca

SEQ ID NO: 3124977 - RNA, 19 nt, Artificial Sequence
  Description of Artificial Sequence: Synthetic oligonucleotide
aggcccacguggugauguc

SEQ ID NO: 3124978 - RNA, 19 nt, Artificial Sequence
  Description of Artificial Sequence: Synthetic oligonucleotide
agccgucgacagugcaauc

SEQ ID NO: 3124979 - RNA, 19 nt, Artificial Sequence
  Description of Artificial Sequence: Synthetic oligonucleotide
gaguccccagcucaggcau

SEQ ID NO: 3124980 - RNA, 19 nt, Artificial Sequence
  Description of Artificial Sequence: Synthetic oligonucleotide
aguagccuccucgggagua

SEQ ID NO: 3124981 - RNA, 19 nt, Artificial Sequence
  Description of Artificial Sequence: Synthetic oligonucleotide
ggggaggagaugaugggga

SEQ ID NO: 3124982 - RNA, 19 nt, Artificial Sequence
  Description of Artificial Sequence: Synthetic oligonucleotide
ccgucgacagugcaaucag

SEQ ID NO: 3124983 - RNA, 19 nt, Artificial Sequence
  Description of Artificial Sequence: Synthetic oligonucleotide
gugcaaucagggccaggca

SEQ ID NO: 3124984 - RNA, 19 nt, Artificial Sequence
  Description of Artificial Sequence: Synthetic oligonucleotide
gggugacugacaucaugca

SEQ ID NO: 3124985 - RNA, 19 nt, Artificial Sequence
  Description of Artificial Sequence: Synthetic oligonucleotide
guccccagcucaggcauug

SEQ ID NO: 3124986 - RNA, 19 nt, Artificial Sequence
  Description of Artificial Sequence: Synthetic oligonucleotide
gccggcagagcgcugggug

SEQ ID NO: 3124987 - RNA, 19 nt, Artificial Sequence
  Description of Artificial Sequence: Synthetic oligonucleotide
acagugcaaucagggccag

SEQ ID NO: 3124988 - RNA, 19 nt, Artificial Sequence
  Description of Artificial Sequence: Synthetic oligonucleotide
caggaucccuccagaagaa

SEQ ID NO: 3124989 - RNA, 19 nt, Artificial Sequence
  Description of Artificial Sequence: Synthetic oligonucleotide
agaagugcuccagcaucaa

SEQ ID NO: 3124990 - RNA, 19 nt, Artificial Sequence
  Description of Artificial Sequence: Synthetic oligonucleotide
ccagcucaggcauugaagu

SEQ ID NO: 3124991 - RNA, 19 nt, Artificial Sequence
  Description of Artificial Sequence: Synthetic oligonucleotide
cuucacggaguccccagcu

SEQ ID NO: 3124992 - RNA, 19 nt, Artificial Sequence
  Description of Artificial Sequence: Synthetic oligonucleotide
ccggcagagcgcugggugg

SEQ ID NO: 3124993 - RNA, 19 nt, Artificial Sequence
  Description of Artificial Sequence: Synthetic oligonucleotide
cagagcgcuggguggguga

SEQ ID NO: 3124994 - RNA, 19 nt, Artificial Sequence
  Description of Artificial Sequence: Synthetic oligonucleotide
ccaggcaaugacgcagugc

SEQ ID NO: 3124995 - RNA, 19 nt, Artificial Sequence
  Description of Artificial Sequence: Synthetic oligonucleotide
agccuccucgggaguaguc

SEQ ID NO: 3124996 - RNA, 19 nt, Artificial Sequence
  Description of Artificial Sequence: Synthetic oligonucleotide
cagugccacgcgccggcag

SEQ ID NO: 3124997 - RNA, 19 nt, Artificial Sequence
  Description of Artificial Sequence: Synthetic oligonucleotide
gccgucgacagugcaauca

SEQ ID NO: 3124998 - RNA, 19 nt, Artificial Sequence
  Description of Artificial Sequence: Synthetic oligonucleotide
acgcagugccacgcgccgg

SEQ ID NO: 3124999 - RNA, 19 nt, Artificial Sequence
  Description of Artificial Sequence: Synthetic oligonucleotide
cugggugggugacugacau

SEQ ID NO: 3125000 - RNA, 19 nt, Artificial Sequence
  Description of Artificial Sequence: Synthetic oligonucleotide
ggaguagucuucacggagu

SEQ ID NO: 3125001 - RNA, 19 nt, Artificial Sequence
  Description of Artificial Sequence: Synthetic oligonucleotide
ggaucccuccagaagaagu

SEQ ID NO: 3125002 - RNA, 19 nt, Artificial Sequence
  Description of Artificial Sequence: Synthetic oligonucleotide
gaaggcccacguggugaug

SEQ ID NO: 3125003 - RNA, 19 nt, Artificial Sequence
  Description of Artificial Sequence: Synthetic oligonucleotide
cccuccagaagaagugcuc

SEQ ID NO: 3125004 - RNA, 19 nt, Artificial Sequence
  Description of Artificial Sequence: Synthetic oligonucleotide
cgucgacagugcaaucagg

SEQ ID NO: 3125005 - RNA, 19 nt, Artificial Sequence
  Description of Artificial Sequence: Synthetic oligonucleotide
ccacguggugaugucuagg

SEQ ID NO: 3125006 - RNA, 19 nt, Artificial Sequence
  Description of Artificial Sequence: Synthetic oligonucleotide
uagccuccucgggaguagu

SEQ ID NO: 3125007 - RNA, 19 nt, Artificial Sequence
  Description of Artificial Sequence: Synthetic oligonucleotide
gggaggagaugauggggaa

SEQ ID NO: 3125008 - RNA, 19 nt, Artificial Sequence
  Description of Artificial Sequence: Synthetic oligonucleotide
cagugcaaucagggccagg

SEQ ID NO: 3125009 - RNA, 19 nt, Artificial Sequence
  Description of Artificial Sequence: Synthetic oligonucleotide
gccaggaguacaggauccc

SEQ ID NO: 3125010 - RNA, 19 nt, Artificial Sequence
  Description of Artificial Sequence: Synthetic oligonucleotide
aggcaaugacgcagugcca

SEQ ID NO: 3125011 - RNA, 19 nt, Artificial Sequence
  Description of Artificial Sequence: Synthetic oligonucleotide
cccacguggugaugucuag

SEQ ID NO: 3125012 - RNA, 19 nt, Artificial Sequence
  Description of Artificial Sequence: Synthetic oligonucleotide
gugccacgcgccggcagag

SEQ ID NO: 3125013 - RNA, 19 nt, Artificial Sequence
  Description of Artificial Sequence: Synthetic oligonucleotide
gggaaacugccaggaguac

SEQ ID NO: 3125014 - RNA, 19 nt, Artificial Sequence
  Description of Artificial Sequence: Synthetic oligonucleotide
cucaggcauugaaguggga

SEQ ID NO: 3125015 - RNA, 19 nt, Artificial Sequence
  Description of Artificial Sequence: Synthetic oligonucleotide
gugcuccagcaucaaggcu

SEQ ID NO: 3125016 - RNA, 19 nt, Artificial Sequence
  Description of Artificial Sequence: Synthetic oligonucleotide
ggcauugaagugggaaacu

SEQ ID NO: 3125017 - RNA, 19 nt, Artificial Sequence
  Description of Artificial Sequence: Synthetic oligonucleotide
gccaggcaaugacgcagug

SEQ ID NO: 3125018 - RNA, 19 nt, Artificial Sequence
  Description of Artificial Sequence: Synthetic oligonucleotide
caucaugcaguagccuccu

SEQ ID NO: 3125019 - RNA, 19 nt, Artificial Sequence
  Description of Artificial Sequence: Synthetic oligonucleotide
gcuccagcaucaaggcuuc

SEQ ID NO: 3125020 - RNA, 19 nt, Artificial Sequence
  Description of Artificial Sequence: Synthetic oligonucleotide
ggcagccgucgacagugca

SEQ ID NO: 3125021 - RNA, 19 nt, Artificial Sequence
  Description of Artificial Sequence: Synthetic oligonucleotide
cagccgucgacagugcaau

SEQ ID NO: 3125022 - RNA, 19 nt, Artificial Sequence
  Description of Artificial Sequence: Synthetic oligonucleotide
gcaaucagggccaggcaau

SEQ ID NO: 3125023 - RNA, 19 nt, Artificial Sequence
  Description of Artificial Sequence: Synthetic oligonucleotide
gcagccgucgacagugcaa

SEQ ID NO: 3125024 - RNA, 19 nt, Artificial Sequence
  Description of Artificial Sequence: Synthetic oligonucleotide
ccucgggaguagucuucac

SEQ ID NO: 3125025 - RNA, 19 nt, Artificial Sequence
  Description of Artificial Sequence: Synthetic oligonucleotide
gcugggugggugacugaca

SEQ ID NO: 3125026 - RNA, 19 nt, Artificial Sequence
  Description of Artificial Sequence: Synthetic oligonucleotide
gcgccggcagagcgcuggg

SEQ ID NO: 3125027 - RNA, 19 nt, Artificial Sequence
  Description of Artificial Sequence: Synthetic oligonucleotide
aguccccagcucaggcauu

SEQ ID NO: 3125028 - RNA, 19 nt, Artificial Sequence
  Description of Artificial Sequence: Synthetic oligonucleotide
cgcgccggcagagcgcugg

SEQ ID NO: 3125029 - RNA, 19 nt, Artificial Sequence
  Description of Artificial Sequence: Synthetic oligonucleotide
gccuccucgggaguagucu

SEQ ID NO: 3125030 - RNA, 19 nt, Artificial Sequence
  Description of Artificial Sequence: Synthetic oligonucleotide
gcccacguggugaugucua

SEQ ID NO: 3125031 - RNA, 19 nt, Artificial Sequence
  Description of Artificial Sequence: Synthetic oligonucleotide
cgggaguagucuucacgga

SEQ ID NO: 3125032 - RNA, 19 nt, Artificial Sequence
  Description of Artificial Sequence: Synthetic oligonucleotide
caguagccuccucgggagu

SEQ ID NO: 3125033 - RNA, 19 nt, Artificial Sequence
  Description of Artificial Sequence: Synthetic oligonucleotide
ggccaggcaaugacgcagu

SEQ ID NO: 3125034 - RNA, 19 nt, Artificial Sequence
  Description of Artificial Sequence: Synthetic oligonucleotide
gggcagccgucgacagugc

SEQ ID NO: 3125035 - RNA, 19 nt, Artificial Sequence
  Description of Artificial Sequence: Synthetic oligonucleotide
ccaggaguacaggaucccu

SEQ ID NO: 3125036 - RNA, 19 nt, Artificial Sequence
  Description of Artificial Sequence: Synthetic oligonucleotide
gagcgcugggugggugacu

SEQ ID NO: 3125037 - RNA, 19 nt, Artificial Sequence
  Description of Artificial Sequence: Synthetic oligonucleotide
ggcccacguggugaugucu

SEQ ID NO: 3125038 - RNA, 19 nt, Artificial Sequence
  Description of Artificial Sequence: Synthetic oligonucleotide
ccuccucgggaguagucuu

SEQ ID NO: 3125039 - RNA, 19 nt, Artificial Sequence
  Description of Artificial Sequence: Synthetic oligonucleotide
gcagugccacgcgccggca

SEQ ID NO: 3125040 - RNA, 19 nt, Artificial Sequence
  Description of Artificial Sequence: Synthetic oligonucleotide
gcgcugggugggugacuga

SEQ ID NO: 3125041 - RNA, 19 nt, Artificial Sequence
  Description of Artificial Sequence: Synthetic oligonucleotide
ggugggugacugacaucau

SEQ ID NO: 3125042 - RNA, 19 nt, Artificial Sequence
  Description of Artificial Sequence: Synthetic oligonucleotide
ggcagagcgcugggugggu

SEQ ID NO: 3125043 - RNA, 19 nt, Artificial Sequence
  Description of Artificial Sequence: Synthetic oligonucleotide
acgcgccggcagagcgcug

SEQ ID NO: 3125044 - RNA, 19 nt, Artificial Sequence
  Description of Artificial Sequence: Synthetic oligonucleotide
cgccggcagagcgcugggu

SEQ ID NO: 3125045 - RNA, 19 nt, Artificial Sequence
  Description of Artificial Sequence: Synthetic oligonucleotide
aauuaagacuaaaacaacc

SEQ ID NO: 3125046 - RNA, 19 nt, Artificial Sequence
  Description of Artificial Sequence: Synthetic oligonucleotide
aaaauuaagacuaaaacaa

SEQ ID NO: 3125047 - RNA, 19 nt, Artificial Sequence
  Description of Artificial Sequence: Synthetic oligonucleotide
acuaaaacaaccccuaaac

SEQ ID NO: 3125048 - RNA, 19 nt, Artificial Sequence
  Description of Artificial Sequence: Synthetic oligonucleotide
uaaacaguaacacuacccc

SEQ ID NO: 3125049 - RNA, 19 nt, Artificial Sequence
  Description of Artificial Sequence: Synthetic oligonucleotide
auuaagacuaaaacaaccc

SEQ ID NO: 3125050 - RNA, 19 nt, Artificial Sequence
  Description of Artificial Sequence: Synthetic oligonucleotide
aucaaggucauauggauuc

SEQ ID NO: 3125051 - RNA, 19 nt, Artificial Sequence
  Description of Artificial Sequence: Synthetic oligonucleotide
ucucgaaugagaaugcucc

SEQ ID NO: 3125052 - RNA, 19 nt, Artificial Sequence
  Description of Artificial Sequence: Synthetic oligonucleotide
aagcaucaaggucauaugg

SEQ ID NO: 3125053 - RNA, 19 nt, Artificial Sequence
  Description of Artificial Sequence: Synthetic oligonucleotide
uuaagacuaaaacaacccc

SEQ ID NO: 3125054 - RNA, 19 nt, Artificial Sequence
  Description of Artificial Sequence: Synthetic oligonucleotide
aaugagaaugcuccaagca

SEQ ID NO: 3125055 - RNA, 19 nt, Artificial Sequence
  Description of Artificial Sequence: Synthetic oligonucleotide
uagaaaggaaaauuaagac

SEQ ID NO: 3125056 - RNA, 19 nt, Artificial Sequence
  Description of Artificial Sequence: Synthetic oligonucleotide
cuaaacaguaacacuaccc

SEQ ID NO: 3125057 - RNA, 19 nt, Artificial Sequence
  Description of Artificial Sequence: Synthetic oligonucleotide
aaauuaagacuaaaacaac

SEQ ID NO: 3125058 - RNA, 19 nt, Artificial Sequence
  Description of Artificial Sequence: Synthetic oligonucleotide
aaugcuccaagcaucaagg

SEQ ID NO: 3125059 - RNA, 19 nt, Artificial Sequence
  Description of Artificial Sequence: Synthetic oligonucleotide
uaagacuaaaacaaccccu

SEQ ID NO: 3125060 - RNA, 19 nt, Artificial Sequence
  Description of Artificial Sequence: Synthetic oligonucleotide
gaaaggaaaauuaagacua

SEQ ID NO: 3125061 - RNA, 19 nt, Artificial Sequence
  Description of Artificial Sequence: Synthetic oligonucleotide
cuagaaaggaaaauuaaga

SEQ ID NO: 3125062 - RNA, 19 nt, Artificial Sequence
  Description of Artificial Sequence: Synthetic oligonucleotide
aaccccuaaacaguaacac

SEQ ID NO: 3125063 - RNA, 19 nt, Artificial Sequence
  Description of Artificial Sequence: Synthetic oligonucleotide
aaaacaaccccuaaacagu

SEQ ID NO: 3125064 - RNA, 19 nt, Artificial Sequence
  Description of Artificial Sequence: Synthetic oligonucleotide
uucucugggacauacucag

SEQ ID NO: 3125065 - RNA, 19 nt, Artificial Sequence
  Description of Artificial Sequence: Synthetic oligonucleotide
auacucagcugccugcucc

SEQ ID NO: 3125066 - RNA, 19 nt, Artificial Sequence
  Description of Artificial Sequence: Synthetic oligonucleotide
acaaccccuaaacaguaac

SEQ ID NO: 3125067 - RNA, 19 nt, Artificial Sequence
  Description of Artificial Sequence: Synthetic oligonucleotide
gcaaugggaagcuagaaag

SEQ ID NO: 3125068 - RNA, 19 nt, Artificial Sequence
  Description of Artificial Sequence: Synthetic oligonucleotide
gaaugcuccaagcaucaag

SEQ ID NO: 3125069 - RNA, 19 nt, Artificial Sequence
  Description of Artificial Sequence: Synthetic oligonucleotide
aaugggaagcuagaaagga

SEQ ID NO: 3125070 - RNA, 19 nt, Artificial Sequence
  Description of Artificial Sequence: Synthetic oligonucleotide
ugagaaugcuccaagcauc

SEQ ID NO: 3125071 - RNA, 19 nt, Artificial Sequence
  Description of Artificial Sequence: Synthetic oligonucleotide
acagcguacucacuggccg

SEQ ID NO: 3125072 - RNA, 19 nt, Artificial Sequence
  Description of Artificial Sequence: Synthetic oligonucleotide
gaaugagaaugcuccaagc

SEQ ID NO: 3125073 - RNA, 19 nt, Artificial Sequence
  Description of Artificial Sequence: Synthetic oligonucleotide
ugggaagcuagaaaggaaa

SEQ ID NO: 3125074 - RNA, 19 nt, Artificial Sequence
  Description of Artificial Sequence: Synthetic oligonucleotide
uucuaauuucuuuuccgcu

SEQ ID NO: 3125075 - RNA, 19 nt, Artificial Sequence
  Description of Artificial Sequence: Synthetic oligonucleotide
ugccucucgaaugagaaug

SEQ ID NO: 3125076 - RNA, 19 nt, Artificial Sequence
  Description of Artificial Sequence: Synthetic oligonucleotide
guuacagcguacucacugg

SEQ ID NO: 3125077 - RNA, 19 nt, Artificial Sequence
  Description of Artificial Sequence: Synthetic oligonucleotide
ucuaauuucuuuuccgcuu

SEQ ID NO: 3125078 - RNA, 19 nt, Artificial Sequence
  Description of Artificial Sequence: Synthetic oligonucleotide
caaugggaagcuagaaagg

SEQ ID NO: 3125079 - RNA, 19 nt, Artificial Sequence
  Description of Artificial Sequence: Synthetic oligonucleotide
uauggauucucuucuaauu

SEQ ID NO: 3125080 - RNA, 19 nt, Artificial Sequence
  Description of Artificial Sequence: Synthetic oligonucleotide
uucucuucuaauuucuuuu

SEQ ID NO: 3125081 - RNA, 19 nt, Artificial Sequence
  Description of Artificial Sequence: Synthetic oligonucleotide
ugugccucucgaaugagaa

SEQ ID NO: 3125082 - RNA, 19 nt, Artificial Sequence
  Description of Artificial Sequence: Synthetic oligonucleotide
augagaaugcuccaagcau

SEQ ID NO: 3125083 - RNA, 19 nt, Artificial Sequence
  Description of Artificial Sequence: Synthetic oligonucleotide
uuacagcguacucacuggc

SEQ ID NO: 3125084 - RNA, 19 nt, Artificial Sequence
  Description of Artificial Sequence: Synthetic oligonucleotide
gguuacagcguacucacug

SEQ ID NO: 3125085 - RNA, 19 nt, Artificial Sequence
  Description of Artificial Sequence: Synthetic oligonucleotide
cugggacauacucagcugc

SEQ ID NO: 3125086 - RNA, 19 nt, Artificial Sequence
  Description of Artificial Sequence: Synthetic oligonucleotide
ucucuucuaauuucuuuuc

SEQ ID NO: 3125087 - RNA, 19 nt, Artificial Sequence
  Description of Artificial Sequence: Synthetic oligonucleotide
gcuagaaaggaaaauuaag

SEQ ID NO: 3125088 - RNA, 19 nt, Artificial Sequence
  Description of Artificial Sequence: Synthetic oligonucleotide
ugcgucuccugacauggcc

SEQ ID NO: 3125089 - RNA, 19 nt, Artificial Sequence
  Description of Artificial Sequence: Synthetic oligonucleotide
aagcuagaaaggaaaauua

SEQ ID NO: 3125090 - RNA, 19 nt, Artificial Sequence
  Description of Artificial Sequence: Synthetic oligonucleotide
aagacuaaaacaaccccua

SEQ ID NO: 3125091 - RNA, 19 nt, Artificial Sequence
  Description of Artificial Sequence: Synthetic oligonucleotide
ucagcugccugcuccgcgg

SEQ ID NO: 3125092 - RNA, 19 nt, Artificial Sequence
  Description of Artificial Sequence: Synthetic oligonucleotide
gacuaaaacaaccccuaaa

SEQ ID NO: 3125093 - RNA, 19 nt, Artificial Sequence
  Description of Artificial Sequence: Synthetic oligonucleotide
auauggauucucuucuaau

SEQ ID NO: 3125094 - RNA, 19 nt, Artificial Sequence
  Description of Artificial Sequence: Synthetic oligonucleotide
uacagcguacucacuggcc

SEQ ID NO: 3125095 - RNA, 19 nt, Artificial Sequence
  Description of Artificial Sequence: Synthetic oligonucleotide
ucugggacauacucagcug

SEQ ID NO: 3125096 - RNA, 19 nt, Artificial Sequence
  Description of Artificial Sequence: Synthetic oligonucleotide
caagcaucaaggucauaug

SEQ ID NO: 3125097 - RNA, 19 nt, Artificial Sequence
  Description of Artificial Sequence: Synthetic oligonucleotide
ugggacauacucagcugcc

SEQ ID NO: 3125098 - RNA, 19 nt, Artificial Sequence
  Description of Artificial Sequence: Synthetic oligonucleotide
aaggucauauggauucucu

SEQ ID NO: 3125099 - RNA, 19 nt, Artificial Sequence
  Description of Artificial Sequence: Synthetic oligonucleotide
ggucauauggauucucuuc

SEQ ID NO: 3125100 - RNA, 19 nt, Artificial Sequence
  Description of Artificial Sequence: Synthetic oligonucleotide
cucucgaaugagaaugcuc

SEQ ID NO: 3125101 - RNA, 19 nt, Artificial Sequence
  Description of Artificial Sequence: Synthetic oligonucleotide
gucauauggauucucuucu

SEQ ID NO: 3125102 - RNA, 19 nt, Artificial Sequence
  Description of Artificial Sequence: Synthetic oligonucleotide
gaagcuagaaaggaaaauu

SEQ ID NO: 3125103 - RNA, 19 nt, Artificial Sequence
  Description of Artificial Sequence: Synthetic oligonucleotide
accccuaaacaguaacacu

SEQ ID NO: 3125104 - RNA, 19 nt, Artificial Sequence
  Description of Artificial Sequence: Synthetic oligonucleotide
agcaucaaggucauaugga

SEQ ID NO: 3125105 - RNA, 19 nt, Artificial Sequence
  Description of Artificial Sequence: Synthetic oligonucleotide
aaacaaccccuaaacagua

SEQ ID NO: 3125106 - RNA, 19 nt, Artificial Sequence
  Description of Artificial Sequence: Synthetic oligonucleotide
uaauuucuuuuccgcuuuc

SEQ ID NO: 3125107 - RNA, 19 nt, Artificial Sequence
  Description of Artificial Sequence: Synthetic oligonucleotide
uuccgcuuucuucaccuuc

SEQ ID NO: 3125108 - RNA, 19 nt, Artificial Sequence
  Description of Artificial Sequence: Synthetic oligonucleotide
gagaaugcuccaagcauca

SEQ ID NO: 3125109 - RNA, 19 nt, Artificial Sequence
  Description of Artificial Sequence: Synthetic oligonucleotide
agcuagaaaggaaaauuaa

SEQ ID NO: 3125110 - RNA, 19 nt, Artificial Sequence
  Description of Artificial Sequence: Synthetic oligonucleotide
ucgaaugagaaugcuccaa

SEQ ID NO: 3125111 - RNA, 19 nt, Artificial Sequence
  Description of Artificial Sequence: Synthetic oligonucleotide
cuuuuccgcuuucuucacc

SEQ ID NO: 3125112 - RNA, 19 nt, Artificial Sequence
  Description of Artificial Sequence: Synthetic oligonucleotide
ucauauggauucucuucua

SEQ ID NO: 3125113 - RNA, 19 nt, Artificial Sequence
  Description of Artificial Sequence: Synthetic oligonucleotide
agcguacucacuggccggc

SEQ ID NO: 3125114 - RNA, 19 nt, Artificial Sequence
  Description of Artificial Sequence: Synthetic oligonucleotide
agacuaaaacaaccccuaa

SEQ ID NO: 3125115 - RNA, 19 nt, Artificial Sequence
  Description of Artificial Sequence: Synthetic oligonucleotide
gggguuacagcguacucac

SEQ ID NO: 3125116 - RNA, 19 nt, Artificial Sequence
  Description of Artificial Sequence: Synthetic oligonucleotide
ucuccugacauggccucag

SEQ ID NO: 3125117 - RNA, 19 nt, Artificial Sequence
  Description of Artificial Sequence: Synthetic oligonucleotide
ucucugggacauacucagc

SEQ ID NO: 3125118 - RNA, 19 nt, Artificial Sequence
  Description of Artificial Sequence: Synthetic oligonucleotide
cuggccggcaaugggaagc

SEQ ID NO: 3125119 - RNA, 19 nt, Artificial Sequence
  Description of Artificial Sequence: Synthetic oligonucleotide
cauauggauucucuucuaa

SEQ ID NO: 3125120 - RNA, 19 nt, Artificial Sequence
  Description of Artificial Sequence: Synthetic oligonucleotide
ccuaaacaguaacacuacc

SEQ ID NO: 3125121 - RNA, 19 nt, Artificial Sequence
  Description of Artificial Sequence: Synthetic oligonucleotide
caaccccuaaacaguaaca

SEQ ID NO: 3125122 - RNA, 19 nt, Artificial Sequence
  Description of Artificial Sequence: Synthetic oligonucleotide
ucaaggucauauggauucu

SEQ ID NO: 3125123 - RNA, 19 nt, Artificial Sequence
  Description of Artificial Sequence: Synthetic oligonucleotide
cagcguacucacuggccgg

SEQ ID NO: 3125124 - RNA, 19 nt, Artificial Sequence
  Description of Artificial Sequence: Synthetic oligonucleotide
aggucauauggauucucuu

SEQ ID NO: 3125125 - RNA, 19 nt, Artificial Sequence
  Description of Artificial Sequence: Synthetic oligonucleotide
cucagcugccugcuccgcg

SEQ ID NO: 3125126 - RNA, 19 nt, Artificial Sequence
  Description of Artificial Sequence: Synthetic oligonucleotide
acucacuggccggcaaugg

SEQ ID NO: 3125127 - RNA, 19 nt, Artificial Sequence
  Description of Artificial Sequence: Synthetic oligonucleotide
augcuccaagcaucaaggu

SEQ ID NO: 3125128 - RNA, 19 nt, Artificial Sequence
  Description of Artificial Sequence: Synthetic oligonucleotide
acauacucagcugccugcu

SEQ ID NO: 3125129 - RNA, 19 nt, Artificial Sequence
  Description of Artificial Sequence: Synthetic oligonucleotide
cgaaugagaaugcuccaag

SEQ ID NO: 3125130 - RNA, 19 nt, Artificial Sequence
  Description of Artificial Sequence: Synthetic oligonucleotide
cccuaaacaguaacacuac

SEQ ID NO: 3125131 - RNA, 19 nt, Artificial Sequence
  Description of Artificial Sequence: Synthetic oligonucleotide
cucgaaugagaaugcucca

SEQ ID NO: 3125132 - RNA, 19 nt, Artificial Sequence
  Description of Artificial Sequence: Synthetic oligonucleotide
caaggucauauggauucuc

SEQ ID NO: 3125133 - RNA, 19 nt, Artificial Sequence
  Description of Artificial Sequence: Synthetic oligonucleotide
ccccuaaacaguaacacua

SEQ ID NO: 3125134 - RNA, 19 nt, Artificial Sequence
  Description of Artificial Sequence: Synthetic oligonucleotide
aacaaccccuaaacaguaa

SEQ ID NO: 3125135 - RNA, 19 nt, Artificial Sequence
  Description of Artificial Sequence: Synthetic oligonucleotide
caccuucucugggacauac

SEQ ID NO: 3125136 - RNA, 19 nt, Artificial Sequence
  Description of Artificial Sequence: Synthetic oligonucleotide
augggaagcuagaaaggaa

SEQ ID NO: 3125137 - RNA, 19 nt, Artificial Sequence
  Description of Artificial Sequence: Synthetic oligonucleotide
acuggccggcaaugggaag

SEQ ID NO: 3125138 - RNA, 19 nt, Artificial Sequence
  Description of Artificial Sequence: Synthetic oligonucleotide
acucagcugccugcuccgc

SEQ ID NO: 3125139 - RNA, 19 nt, Artificial Sequence
  Description of Artificial Sequence: Synthetic oligonucleotide
cuaauuucuuuuccgcuuu

SEQ ID NO: 3125140 - RNA, 19 nt, Artificial Sequence
  Description of Artificial Sequence: Synthetic oligonucleotide
cuccugacauggccucagg

SEQ ID NO: 3125141 - RNA, 19 nt, Artificial Sequence
  Description of Artificial Sequence: Synthetic oligonucleotide
cuucaccuucucugggaca

SEQ ID NO: 3125142 - RNA, 19 nt, Artificial Sequence
  Description of Artificial Sequence: Synthetic oligonucleotide
gccggcaaugggaagcuag

SEQ ID NO: 3125143 - RNA, 19 nt, Artificial Sequence
  Description of Artificial Sequence: Synthetic oligonucleotide
gcaucaaggucauauggau

SEQ ID NO: 3125144 - RNA, 19 nt, Artificial Sequence
  Description of Artificial Sequence: Synthetic oligonucleotide
uccgcggcugcgucuccug

SEQ ID NO: 3125145 - RNA, 19 nt, Artificial Sequence
  Description of Artificial Sequence: Synthetic oligonucleotide
ggauucucuucuaauuucu

SEQ ID NO: 3125146 - RNA, 19 nt, Artificial Sequence
  Description of Artificial Sequence: Synthetic oligonucleotide
uggccggcaaugggaagcu

SEQ ID NO: 3125147 - RNA, 19 nt, Artificial Sequence
  Description of Artificial Sequence: Synthetic oligonucleotide
cagcacagccagagccgcc

SEQ ID NO: 3125148 - RNA, 19 nt, Artificial Sequence
  Description of Artificial Sequence: Synthetic oligonucleotide
cugcgucuccugacauggc

SEQ ID NO: 3125149 - RNA, 19 nt, Artificial Sequence
  Description of Artificial Sequence: Synthetic oligonucleotide
caucaaggucauauggauu

SEQ ID NO: 3125150 - RNA, 19 nt, Artificial Sequence
  Description of Artificial Sequence: Synthetic oligonucleotide
cacuggccggcaaugggaa

SEQ ID NO: 3125151 - RNA, 19 nt, Artificial Sequence
  Description of Artificial Sequence: Synthetic oligonucleotide
ugcuccgcggcugcgucuc

SEQ ID NO: 3125152 - RNA, 19 nt, Artificial Sequence
  Description of Artificial Sequence: Synthetic oligonucleotide
cugccugcuccgcggcugc

SEQ ID NO: 3125153 - RNA, 19 nt, Artificial Sequence
  Description of Artificial Sequence: Synthetic oligonucleotide
gggaagcuagaaaggaaaa

SEQ ID NO: 3125154 - RNA, 19 nt, Artificial Sequence
  Description of Artificial Sequence: Synthetic oligonucleotide
ccaagcaucaaggucauau

SEQ ID NO: 3125155 - RNA, 19 nt, Artificial Sequence
  Description of Artificial Sequence: Synthetic oligonucleotide
gccucucgaaugagaaugc

SEQ ID NO: 3125156 - RNA, 19 nt, Artificial Sequence
  Description of Artificial Sequence: Synthetic oligonucleotide
agaaugcuccaagcaucaa

SEQ ID NO: 3125157 - RNA, 19 nt, Artificial Sequence
  Description of Artificial Sequence: Synthetic oligonucleotide
ggcugcgucuccugacaug

SEQ ID NO: 3125158 - RNA, 19 nt, Artificial Sequence
  Description of Artificial Sequence: Synthetic oligonucleotide
ggaagcuagaaaggaaaau

SEQ ID NO: 3125159 - RNA, 19 nt, Artificial Sequence
  Description of Artificial Sequence: Synthetic oligonucleotide
cagcugccugcuccgcggc

SEQ ID NO: 3125160 - RNA, 19 nt, Artificial Sequence
  Description of Artificial Sequence: Synthetic oligonucleotide
agcugccugcuccgcggcu

SEQ ID NO: 3125161 - RNA, 19 nt, Artificial Sequence
  Description of Artificial Sequence: Synthetic oligonucleotide
accuucucugggacauacu

SEQ ID NO: 3125162 - RNA, 19 nt, Artificial Sequence
  Description of Artificial Sequence: Synthetic oligonucleotide
guacucacuggccggcaau

SEQ ID NO: 3125163 - RNA, 19 nt, Artificial Sequence
  Description of Artificial Sequence: Synthetic oligonucleotide
ugccugcuccgcggcugcg

SEQ ID NO: 3125164 - RNA, 19 nt, Artificial Sequence
  Description of Artificial Sequence: Synthetic oligonucleotide
ccggcaaugggaagcuaga

SEQ ID NO: 3125165 - RNA, 19 nt, Artificial Sequence
  Description of Artificial Sequence: Synthetic oligonucleotide
gucuccugacauggccuca

SEQ ID NO: 3125166 - RNA, 19 nt, Artificial Sequence
  Description of Artificial Sequence: Synthetic oligonucleotide
gcugccugcuccgcggcug

SEQ ID NO: 3125167 - RNA, 19 nt, Artificial Sequence
  Description of Artificial Sequence: Synthetic oligonucleotide
ucaccuucucugggacaua

SEQ ID NO: 3125168 - RNA, 19 nt, Artificial Sequence
  Description of Artificial Sequence: Synthetic oligonucleotide
gcggcugcgucuccugaca

SEQ ID NO: 3125169 - RNA, 19 nt, Artificial Sequence
  Description of Artificial Sequence: Synthetic oligonucleotide
cuccaagcaucaaggucau

SEQ ID NO: 3125170 - RNA, 19 nt, Artificial Sequence
  Description of Artificial Sequence: Synthetic oligonucleotide
cgucuccugacauggccuc

SEQ ID NO: 3125171 - RNA, 19 nt, Artificial Sequence
  Description of Artificial Sequence: Synthetic oligonucleotide
gugccucucgaaugagaau

SEQ ID NO: 3125172 - RNA, 19 nt, Artificial Sequence
  Description of Artificial Sequence: Synthetic oligonucleotide
uccaagcaucaaggucaua

SEQ ID NO: 3125173 - RNA, 19 nt, Artificial Sequence
  Description of Artificial Sequence: Synthetic oligonucleotide
ccugcuccgcggcugcguc

SEQ ID NO: 3125174 - RNA, 19 nt, Artificial Sequence
  Description of Artificial Sequence: Synthetic oligonucleotide
ccgcuuucuucaccuucuc

SEQ ID NO: 3125175 - RNA, 19 nt, Artificial Sequence
  Description of Artificial Sequence: Synthetic oligonucleotide
gcgucuccugacauggccu

SEQ ID NO: 3125176 - RNA, 19 nt, Artificial Sequence
  Description of Artificial Sequence: Synthetic oligonucleotide
cgcggcugcgucuccugac

SEQ ID NO: 3125177 - RNA, 19 nt, Artificial Sequence
  Description of Artificial Sequence: Synthetic oligonucleotide
gcguacucacuggccggca

SEQ ID NO: 3125178 - RNA, 19 nt, Artificial Sequence
  Description of Artificial Sequence: Synthetic oligonucleotide
cugcuccgcggcugcgucu

SEQ ID NO: 3125179 - RNA, 19 nt, Artificial Sequence
  Description of Artificial Sequence: Synthetic oligonucleotide
cguacucacuggccggcaa

SEQ ID NO: 3125180 - RNA, 19 nt, Artificial Sequence
  Description of Artificial Sequence: Synthetic oligonucleotide
ccucucgaaugagaaugcu

SEQ ID NO: 3125181 - RNA, 19 nt, Artificial Sequence
  Description of Artificial Sequence: Synthetic oligonucleotide
gcuccgcggcugcgucucc

SEQ ID NO: 3125182 - RNA, 19 nt, Artificial Sequence
  Description of Artificial Sequence: Synthetic oligonucleotide
ggguuacagcguacucacu

SEQ ID NO: 3125183 - RNA, 19 nt, Artificial Sequence
  Description of Artificial Sequence: Synthetic oligonucleotide
cuccgcggcugcgucuccu

SEQ ID NO: 3125184 - RNA, 19 nt, Artificial Sequence
  Description of Artificial Sequence: Synthetic oligonucleotide
ccgcggcugcgucuccuga

SEQ ID NO: 3125185 - RNA, 19 nt, Artificial Sequence
  Description of Artificial Sequence: Synthetic oligonucleotide
gccugcuccgcggcugcgu

SEQ ID NO: 3125186 - RNA, 19 nt, Artificial Sequence
  Description of Artificial Sequence: Synthetic oligonucleotide
ggccggcaaugggaagcua

SEQ ID NO: 3125187 - RNA, 19 nt, Artificial Sequence
  Description of Artificial Sequence: Synthetic oligonucleotide
cggcugcgucuccugacau

SEQ ID NO: 3125188 - RNA, 19 nt, Artificial Sequence
  Description of Artificial Sequence: Synthetic oligonucleotide
aacacugauauucugugcc

SEQ ID NO: 3125189 - RNA, 19 nt, Artificial Sequence
  Description of Artificial Sequence: Synthetic oligonucleotide
ugucuuuugacucacgucc

SEQ ID NO: 3125190 - RNA, 19 nt, Artificial Sequence
  Description of Artificial Sequence: Synthetic oligonucleotide
ucagcuaugauuguugucg

SEQ ID NO: 3125191 - RNA, 19 nt, Artificial Sequence
  Description of Artificial Sequence: Synthetic oligonucleotide
cauguauucaccauagucc

SEQ ID NO: 3125192 - RNA, 19 nt, Artificial Sequence
  Description of Artificial Sequence: Synthetic oligonucleotide
uucccuuccacaaauaugc

SEQ ID NO: 3125193 - RNA, 19 nt, Artificial Sequence
  Description of Artificial Sequence: Synthetic oligonucleotide
uaugccacaucucugaggc

SEQ ID NO: 3125194 - RNA, 19 nt, Artificial Sequence
  Description of Artificial Sequence: Synthetic oligonucleotide
aaacacugauauucugugc

SEQ ID NO: 3125195 - RNA, 19 nt, Artificial Sequence
  Description of Artificial Sequence: Synthetic oligonucleotide
auuguugucgcuugccgcc

SEQ ID NO: 3125196 - RNA, 19 nt, Artificial Sequence
  Description of Artificial Sequence: Synthetic oligonucleotide
uugccagagaaaauaauug

SEQ ID NO: 3125197 - RNA, 19 nt, Artificial Sequence
  Description of Artificial Sequence: Synthetic oligonucleotide
uuugguauacuucacuguc

SEQ ID NO: 3125198 - RNA, 19 nt, Artificial Sequence
  Description of Artificial Sequence: Synthetic oligonucleotide
uuaucagcuaugauuguug

SEQ ID NO: 3125199 - RNA, 19 nt, Artificial Sequence
  Description of Artificial Sequence: Synthetic oligonucleotide
gauauucugugccauguug

SEQ ID NO: 3125200 - RNA, 19 nt, Artificial Sequence
  Description of Artificial Sequence: Synthetic oligonucleotide
uucaccauaguccacuuuc

SEQ ID NO: 3125201 - RNA, 19 nt, Artificial Sequence
  Description of Artificial Sequence: Synthetic oligonucleotide
uuuucuacauacugguaug

SEQ ID NO: 3125202 - RNA, 19 nt, Artificial Sequence
  Description of Artificial Sequence: Synthetic oligonucleotide
ugauuguugucgcuugccg

SEQ ID NO: 3125203 - RNA, 19 nt, Artificial Sequence
  Description of Artificial Sequence: Synthetic oligonucleotide
uuuauccauguauucacca

SEQ ID NO: 3125204 - RNA, 19 nt, Artificial Sequence
  Description of Artificial Sequence: Synthetic oligonucleotide
ucuacauacugguaugcca

SEQ ID NO: 3125205 - RNA, 19 nt, Artificial Sequence
  Description of Artificial Sequence: Synthetic oligonucleotide
uuuuauccauguauucacc

SEQ ID NO: 3125206 - RNA, 19 nt, Artificial Sequence
  Description of Artificial Sequence: Synthetic oligonucleotide
cauuugguauacuucacug

SEQ ID NO: 3125207 - RNA, 19 nt, Artificial Sequence
  Description of Artificial Sequence: Synthetic oligonucleotide
uuuguugccagagaaaaua

SEQ ID NO: 3125208 - RNA, 19 nt, Artificial Sequence
  Description of Artificial Sequence: Synthetic oligonucleotide
uuucccuuccacaaauaug

SEQ ID NO: 3125209 - RNA, 19 nt, Artificial Sequence
  Description of Artificial Sequence: Synthetic oligonucleotide
cuucacugucuccugaucg

SEQ ID NO: 3125210 - RNA, 19 nt, Artificial Sequence
  Description of Artificial Sequence: Synthetic oligonucleotide
cuacauacugguaugccac

SEQ ID NO: 3125211 - RNA, 19 nt, Artificial Sequence
  Description of Artificial Sequence: Synthetic oligonucleotide
ugccagagaaaauaauugu

SEQ ID NO: 3125212 - RNA, 19 nt, Artificial Sequence
  Description of Artificial Sequence: Synthetic oligonucleotide
gauuguugucgcuugccgc

SEQ ID NO: 3125213 - RNA, 19 nt, Artificial Sequence
  Description of Artificial Sequence: Synthetic oligonucleotide
ucuccugaucgccacaucu

SEQ ID NO: 3125214 - RNA, 19 nt, Artificial Sequence
  Description of Artificial Sequence: Synthetic oligonucleotide
auuugguauacuucacugu

SEQ ID NO: 3125215 - RNA, 19 nt, Artificial Sequence
  Description of Artificial Sequence: Synthetic oligonucleotide
uccacaaauaugcgagccc

SEQ ID NO: 3125216 - RNA, 19 nt, Artificial Sequence
  Description of Artificial Sequence: Synthetic oligonucleotide
uccacuuucccuuccacaa

SEQ ID NO: 3125217 - RNA, 19 nt, Artificial Sequence
  Description of Artificial Sequence: Synthetic oligonucleotide
caucucugaggccuggucg

SEQ ID NO: 3125218 - RNA, 19 nt, Artificial Sequence
  Description of Artificial Sequence: Synthetic oligonucleotide
uauccauguauucaccaua

SEQ ID NO: 3125219 - RNA, 19 nt, Artificial Sequence
  Description of Artificial Sequence: Synthetic oligonucleotide
ugguauacuucacugucuc

SEQ ID NO: 3125220 - RNA, 19 nt, Artificial Sequence
  Description of Artificial Sequence: Synthetic oligonucleotide
uaugauuguugucgcuugc

SEQ ID NO: 3125221 - RNA, 19 nt, Artificial Sequence
  Description of Artificial Sequence: Synthetic oligonucleotide
uauacuucacugucuccug

SEQ ID NO: 3125222 - RNA, 19 nt, Artificial Sequence
  Description of Artificial Sequence: Synthetic oligonucleotide
ugguaugccacaucucuga

SEQ ID NO: 3125223 - RNA, 19 nt, Artificial Sequence
  Description of Artificial Sequence: Synthetic oligonucleotide
augauuguugucgcuugcc

SEQ ID NO: 3125224 - RNA, 19 nt, Artificial Sequence
  Description of Artificial Sequence: Synthetic oligonucleotide
uucacugucuccugaucgc

SEQ ID NO: 3125225 - RNA, 19 nt, Artificial Sequence
  Description of Artificial Sequence: Synthetic oligonucleotide
uugguauacuucacugucu

SEQ ID NO: 3125226 - RNA, 19 nt, Artificial Sequence
  Description of Artificial Sequence: Synthetic oligonucleotide
auaguccacuuucccuucc

SEQ ID NO: 3125227 - RNA, 19 nt, Artificial Sequence
  Description of Artificial Sequence: Synthetic oligonucleotide
ucaccauaguccacuuucc

SEQ ID NO: 3125228 - RNA, 19 nt, Artificial Sequence
  Description of Artificial Sequence: Synthetic oligonucleotide
uuccacaaauaugcgagcc

SEQ ID NO: 3125229 - RNA, 19 nt, Artificial Sequence
  Description of Artificial Sequence: Synthetic oligonucleotide
acugucuccugaucgccac

SEQ ID NO: 3125230 - RNA, 19 nt, Artificial Sequence
  Description of Artificial Sequence: Synthetic oligonucleotide
ucauuuguugccagagaaa

SEQ ID NO: 3125231 - RNA, 19 nt, Artificial Sequence
  Description of Artificial Sequence: Synthetic oligonucleotide
aucgccacaucucauuugu

SEQ ID NO: 3125232 - RNA, 19 nt, Artificial Sequence
  Description of Artificial Sequence: Synthetic oligonucleotide
ucuuuugacucacgucccc

SEQ ID NO: 3125233 - RNA, 19 nt, Artificial Sequence
  Description of Artificial Sequence: Synthetic oligonucleotide
cuaugauuguugucgcuug

SEQ ID NO: 3125234 - RNA, 19 nt, Artificial Sequence
  Description of Artificial Sequence: Synthetic oligonucleotide
uuucuacauacugguaugc

SEQ ID NO: 3125235 - RNA, 19 nt, Artificial Sequence
  Description of Artificial Sequence: Synthetic oligonucleotide
uccugaucgccacaucuca

SEQ ID NO: 3125236 - RNA, 19 nt, Artificial Sequence
  Description of Artificial Sequence: Synthetic oligonucleotide
ggucgaaacacugauauuc

SEQ ID NO: 3125237 - RNA, 19 nt, Artificial Sequence
  Description of Artificial Sequence: Synthetic oligonucleotide
uuauccauguauucaccau

SEQ ID NO: 3125238 - RNA, 19 nt, Artificial Sequence
  Description of Artificial Sequence: Synthetic oligonucleotide
uaucagcuaugauuguugu

SEQ ID NO: 3125239 - RNA, 19 nt, Artificial Sequence
  Description of Artificial Sequence: Synthetic oligonucleotide
accauaguccacuuucccu

SEQ ID NO: 3125240 - RNA, 19 nt, Artificial Sequence
  Description of Artificial Sequence: Synthetic oligonucleotide
aucagcuaugauuguuguc

SEQ ID NO: 3125241 - RNA, 19 nt, Artificial Sequence
  Description of Artificial Sequence: Synthetic oligonucleotide
ucgaaacacugauauucug

SEQ ID NO: 3125242 - RNA, 19 nt, Artificial Sequence
  Description of Artificial Sequence: Synthetic oligonucleotide
ugccauguugucuuuugac

SEQ ID NO: 3125243 - RNA, 19 nt, Artificial Sequence
  Description of Artificial Sequence: Synthetic oligonucleotide
aucucauuuguugccagag

SEQ ID NO: 3125244 - RNA, 19 nt, Artificial Sequence
  Description of Artificial Sequence: Synthetic oligonucleotide
uuguugccagagaaaauaa

SEQ ID NO: 3125245 - RNA, 19 nt, Artificial Sequence
  Description of Artificial Sequence: Synthetic oligonucleotide
ucucauuuguugccagaga

SEQ ID NO: 3125246 - RNA, 19 nt, Artificial Sequence
  Description of Artificial Sequence: Synthetic oligonucleotide
acugauauucugugccaug

SEQ ID NO: 3125247 - RNA, 19 nt, Artificial Sequence
  Description of Artificial Sequence: Synthetic oligonucleotide
uguugucuuuugacucacg

SEQ ID NO: 3125248 - RNA, 19 nt, Artificial Sequence
  Description of Artificial Sequence: Synthetic oligonucleotide
uucuacauacugguaugcc

SEQ ID NO: 3125249 - RNA, 19 nt, Artificial Sequence
  Description of Artificial Sequence: Synthetic oligonucleotide
uauucugugccauguuguc

SEQ ID NO: 3125250 - RNA, 19 nt, Artificial Sequence
  Description of Artificial Sequence: Synthetic oligonucleotide
uucugugccauguugucuu

SEQ ID NO: 3125251 - RNA, 19 nt, Artificial Sequence
  Description of Artificial Sequence: Synthetic oligonucleotide
acuucacugucuccugauc

SEQ ID NO: 3125252 - RNA, 19 nt, Artificial Sequence
  Description of Artificial Sequence: Synthetic oligonucleotide
ugccacaucucugaggccu

SEQ ID NO: 3125253 - RNA, 19 nt, Artificial Sequence
  Description of Artificial Sequence: Synthetic oligonucleotide
uugucuuuugacucacguc

SEQ ID NO: 3125254 - RNA, 19 nt, Artificial Sequence
  Description of Artificial Sequence: Synthetic oligonucleotide
cucauuuguugccagagaa

SEQ ID NO: 3125255 - RNA, 19 nt, Artificial Sequence
  Description of Artificial Sequence: Synthetic oligonucleotide
auccauguauucaccauag

SEQ ID NO: 3125256 - RNA, 19 nt, Artificial Sequence
  Description of Artificial Sequence: Synthetic oligonucleotide
ucccuuccacaaauaugcg

SEQ ID NO: 3125257 - RNA, 19 nt, Artificial Sequence
  Description of Artificial Sequence: Synthetic oligonucleotide
acaucucauuuguugccag

SEQ ID NO: 3125258 - RNA, 19 nt, Artificial Sequence
  Description of Artificial Sequence: Synthetic oligonucleotide
cuuccacaaauaugcgagc

SEQ ID NO: 3125259 - RNA, 19 nt, Artificial Sequence
  Description of Artificial Sequence: Synthetic oligonucleotide
auauucugugccauguugu

SEQ ID NO: 3125260 - RNA, 19 nt, Artificial Sequence
  Description of Artificial Sequence: Synthetic oligonucleotide
uguauucaccauaguccac

SEQ ID NO: 3125261 - RNA, 19 nt, Artificial Sequence
  Description of Artificial Sequence: Synthetic oligonucleotide
cauuuguugccagagaaaa

SEQ ID NO: 3125262 - RNA, 19 nt, Artificial Sequence
  Description of Artificial Sequence: Synthetic oligonucleotide
ccauguauucaccauaguc

SEQ ID NO: 3125263 - RNA, 19 nt, Artificial Sequence
  Description of Artificial Sequence: Synthetic oligonucleotide
uacauacugguaugccaca

SEQ ID NO: 3125264 - RNA, 19 nt, Artificial Sequence
  Description of Artificial Sequence: Synthetic oligonucleotide
auguugucuuuugacucac

SEQ ID NO: 3125265 - RNA, 19 nt, Artificial Sequence
  Description of Artificial Sequence: Synthetic oligonucleotide
acacugauauucugugcca

SEQ ID NO: 3125266 - RNA, 19 nt, Artificial Sequence
  Description of Artificial Sequence: Synthetic oligonucleotide
aucucugaggccuggucga

SEQ ID NO: 3125267 - RNA, 19 nt, Artificial Sequence
  Description of Artificial Sequence: Synthetic oligonucleotide
gaucgccacaucucauuug

SEQ ID NO: 3125268 - RNA, 19 nt, Artificial Sequence
  Description of Artificial Sequence: Synthetic oligonucleotide
ugaggccuggucgaaacac

SEQ ID NO: 3125269 - RNA, 19 nt, Artificial Sequence
  Description of Artificial Sequence: Synthetic oligonucleotide
gccacaucucauuuguugc

SEQ ID NO: 3125270 - RNA, 19 nt, Artificial Sequence
  Description of Artificial Sequence: Synthetic oligonucleotide
ugaucgccacaucucauuu

SEQ ID NO: 3125271 - RNA, 19 nt, Artificial Sequence
  Description of Artificial Sequence: Synthetic oligonucleotide
cagcuaugauuguugucgc

SEQ ID NO: 3125272 - RNA, 19 nt, Artificial Sequence
  Description of Artificial Sequence: Synthetic oligonucleotide
auacuucacugucuccuga

SEQ ID NO: 3125273 - RNA, 19 nt, Artificial Sequence
  Description of Artificial Sequence: Synthetic oligonucleotide
cugguaugccacaucucug

SEQ ID NO: 3125274 - RNA, 19 nt, Artificial Sequence
  Description of Artificial Sequence: Synthetic oligonucleotide
guauacuucacugucuccu

SEQ ID NO: 3125275 - RNA, 19 nt, Artificial Sequence
  Description of Artificial Sequence: Synthetic oligonucleotide
ugauauucugugccauguu

SEQ ID NO: 3125276 - RNA, 19 nt, Artificial Sequence
  Description of Artificial Sequence: Synthetic oligonucleotide
uccauguauucaccauagu

SEQ ID NO: 3125277 - RNA, 19 nt, Artificial Sequence
  Description of Artificial Sequence: Synthetic oligonucleotide
ucacugucuccugaucgcc

SEQ ID NO: 3125278 - RNA, 19 nt, Artificial Sequence
  Description of Artificial Sequence: Synthetic oligonucleotide
guugucuuuugacucacgu

SEQ ID NO: 3125279 - RNA, 19 nt, Artificial Sequence
  Description of Artificial Sequence: Synthetic oligonucleotide
ccauguugucuuuugacuc

SEQ ID NO: 3125280 - RNA, 19 nt, Artificial Sequence
  Description of Artificial Sequence: Synthetic oligonucleotide
uaguccacuuucccuucca

SEQ ID NO: 3125281 - RNA, 19 nt, Artificial Sequence
  Description of Artificial Sequence: Synthetic oligonucleotide
cauacugguaugccacauc

SEQ ID NO: 3125282 - RNA, 19 nt, Artificial Sequence
  Description of Artificial Sequence: Synthetic oligonucleotide
uacuucacugucuccugau

SEQ ID NO: 3125283 - RNA, 19 nt, Artificial Sequence
  Description of Artificial Sequence: Synthetic oligonucleotide
cuggucgaaacacugauau

SEQ ID NO: 3125284 - RNA, 19 nt, Artificial Sequence
  Description of Artificial Sequence: Synthetic oligonucleotide
auucugugccauguugucu

SEQ ID NO: 3125285 - RNA, 19 nt, Artificial Sequence
  Description of Artificial Sequence: Synthetic oligonucleotide
agcuaugauuguugucgcu

SEQ ID NO: 3125286 - RNA, 19 nt, Artificial Sequence
  Description of Artificial Sequence: Synthetic oligonucleotide
gucuuuugacucacguccc

SEQ ID NO: 3125287 - RNA, 19 nt, Artificial Sequence
  Description of Artificial Sequence: Synthetic oligonucleotide
augccacaucucugaggcc

SEQ ID NO: 3125288 - RNA, 19 nt, Artificial Sequence
  Description of Artificial Sequence: Synthetic oligonucleotide
ccacaaauaugcgagcccc

SEQ ID NO: 3125289 - RNA, 19 nt, Artificial Sequence
  Description of Artificial Sequence: Synthetic oligonucleotide
cuccugaucgccacaucuc

SEQ ID NO: 3125290 - RNA, 19 nt, Artificial Sequence
  Description of Artificial Sequence: Synthetic oligonucleotide
gguauacuucacugucucc

SEQ ID NO: 3125291 - RNA, 19 nt, Artificial Sequence
  Description of Artificial Sequence: Synthetic oligonucleotide
uauucaccauaguccacuu

SEQ ID NO: 3125292 - RNA, 19 nt, Artificial Sequence
  Description of Artificial Sequence: Synthetic oligonucleotide
guauucaccauaguccacu

SEQ ID NO: 3125293 - RNA, 19 nt, Artificial Sequence
  Description of Artificial Sequence: Synthetic oligonucleotide
guugccagagaaaauaauu

SEQ ID NO: 3125294 - RNA, 19 nt, Artificial Sequence
  Description of Artificial Sequence: Synthetic oligonucleotide
ccacaucucauuuguugcc

SEQ ID NO: 3125295 - RNA, 19 nt, Artificial Sequence
  Description of Artificial Sequence: Synthetic oligonucleotide
guccacuuucccuuccaca

SEQ ID NO: 3125296 - RNA, 19 nt, Artificial Sequence
  Description of Artificial Sequence: Synthetic oligonucleotide
ugucgcuugccgccucaca

SEQ ID NO: 3125297 - RNA, 19 nt, Artificial Sequence
  Description of Artificial Sequence: Synthetic oligonucleotide
ugccgccucacauuauuuu

SEQ ID NO: 3125298 - RNA, 19 nt, Artificial Sequence
  Description of Artificial Sequence: Synthetic oligonucleotide
ugucuccugaucgccacau

SEQ ID NO: 3125299 - RNA, 19 nt, Artificial Sequence
  Description of Artificial Sequence: Synthetic oligonucleotide
auuuguugccagagaaaau

SEQ ID NO: 3125300 - RNA, 19 nt, Artificial Sequence
  Description of Artificial Sequence: Synthetic oligonucleotide
ccccauuugguauacuuca

SEQ ID NO: 3125301 - RNA, 19 nt, Artificial Sequence
  Description of Artificial Sequence: Synthetic oligonucleotide
caucucauuuguugccaga

SEQ ID NO: 3125302 - RNA, 19 nt, Artificial Sequence
  Description of Artificial Sequence: Synthetic oligonucleotide
acauacugguaugccacau

SEQ ID NO: 3125303 - RNA, 19 nt, Artificial Sequence
  Description of Artificial Sequence: Synthetic oligonucleotide
cacaucucauuuguugcca

SEQ ID NO: 3125304 - RNA, 19 nt, Artificial Sequence
  Description of Artificial Sequence: Synthetic oligonucleotide
auucaccauaguccacuuu

SEQ ID NO: 3125305 - RNA, 19 nt, Artificial Sequence
  Description of Artificial Sequence: Synthetic oligonucleotide
uggucgaaacacugauauu

SEQ ID NO: 3125306 - RNA, 19 nt, Artificial Sequence
  Description of Artificial Sequence: Synthetic oligonucleotide
uugccgccucacauuauuu

SEQ ID NO: 3125307 - RNA, 19 nt, Artificial Sequence
  Description of Artificial Sequence: Synthetic oligonucleotide
cuuucccuuccacaaauau

SEQ ID NO: 3125308 - RNA, 19 nt, Artificial Sequence
  Description of Artificial Sequence: Synthetic oligonucleotide
aggccuggucgaaacacug

SEQ ID NO: 3125309 - RNA, 19 nt, Artificial Sequence
  Description of Artificial Sequence: Synthetic oligonucleotide
uuguugucgcuugccgccu

SEQ ID NO: 3125310 - RNA, 19 nt, Artificial Sequence
  Description of Artificial Sequence: Synthetic oligonucleotide
uguugucgcuugccgccuc

SEQ ID NO: 3125311 - RNA, 19 nt, Artificial Sequence
  Description of Artificial Sequence: Synthetic oligonucleotide
gugccauguugucuuuuga

SEQ ID NO: 3125312 - RNA, 19 nt, Artificial Sequence
  Description of Artificial Sequence: Synthetic oligonucleotide
gucgaaacacugauauucu

SEQ ID NO: 3125313 - RNA, 19 nt, Artificial Sequence
  Description of Artificial Sequence: Synthetic oligonucleotide
gccauguugucuuuugacu

SEQ ID NO: 3125314 - RNA, 19 nt, Artificial Sequence
  Description of Artificial Sequence: Synthetic oligonucleotide
cgccacaucucauuuguug

SEQ ID NO: 3125315 - RNA, 19 nt, Artificial Sequence
  Description of Artificial Sequence: Synthetic oligonucleotide
ucgcuugccgccucacauu

SEQ ID NO: 3125316 - RNA, 19 nt, Artificial Sequence
  Description of Artificial Sequence: Synthetic oligonucleotide
cccauuugguauacuucac

SEQ ID NO: 3125317 - RNA, 19 nt, Artificial Sequence
  Description of Artificial Sequence: Synthetic oligonucleotide
cacugucuccugaucgcca

SEQ ID NO: 3125318 - RNA, 19 nt, Artificial Sequence
  Description of Artificial Sequence: Synthetic oligonucleotide
ucugugccauguugucuuu

SEQ ID NO: 3125319 - RNA, 19 nt, Artificial Sequence
  Description of Artificial Sequence: Synthetic oligonucleotide
gucgcuugccgccucacau

SEQ ID NO: 3125320 - RNA, 19 nt, Artificial Sequence
  Description of Artificial Sequence: Synthetic oligonucleotide
guugucgcuugccgccuca

SEQ ID NO: 3125321 - RNA, 19 nt, Artificial Sequence
  Description of Artificial Sequence: Synthetic oligonucleotide
ucucugaggccuggucgaa

SEQ ID NO: 3125322 - RNA, 19 nt, Artificial Sequence
  Description of Artificial Sequence: Synthetic oligonucleotide
cccuuccacaaauaugcga

SEQ ID NO: 3125323 - RNA, 19 nt, Artificial Sequence
  Description of Artificial Sequence: Synthetic oligonucleotide
ucgccacaucucauuuguu

SEQ ID NO: 3125324 - RNA, 19 nt, Artificial Sequence
  Description of Artificial Sequence: Synthetic oligonucleotide
cgaaacacugauauucugu

SEQ ID NO: 3125325 - RNA, 19 nt, Artificial Sequence
  Description of Artificial Sequence: Synthetic oligonucleotide
uugucgcuugccgccucac

SEQ ID NO: 3125326 - RNA, 19 nt, Artificial Sequence
  Description of Artificial Sequence: Synthetic oligonucleotide
cugaucgccacaucucauu

SEQ ID NO: 3125327 - RNA, 19 nt, Artificial Sequence
  Description of Artificial Sequence: Synthetic oligonucleotide
cuugccgccucacauuauu

SEQ ID NO: 3125328 - RNA, 19 nt, Artificial Sequence
  Description of Artificial Sequence: Synthetic oligonucleotide
gcuaugauuguugucgcuu

SEQ ID NO: 3125329 - RNA, 19 nt, Artificial Sequence
  Description of Artificial Sequence: Synthetic oligonucleotide
gaggccuggucgaaacacu

SEQ ID NO: 3125330 - RNA, 19 nt, Artificial Sequence
  Description of Artificial Sequence: Synthetic oligonucleotide
ccauuugguauacuucacu

SEQ ID NO: 3125331 - RNA, 19 nt, Artificial Sequence
  Description of Artificial Sequence: Synthetic oligonucleotide
ccauaguccacuuucccuu

SEQ ID NO: 3125332 - RNA, 19 nt, Artificial Sequence
  Description of Artificial Sequence: Synthetic oligonucleotide
cugucuccugaucgccaca

SEQ ID NO: 3125333 - RNA, 19 nt, Artificial Sequence
  Description of Artificial Sequence: Synthetic oligonucleotide
gccuggucgaaacacugau

SEQ ID NO: 3125334 - RNA, 19 nt, Artificial Sequence
  Description of Artificial Sequence: Synthetic oligonucleotide
cacugauauucugugccau

SEQ ID NO: 3125335 - RNA, 19 nt, Artificial Sequence
  Description of Artificial Sequence: Synthetic oligonucleotide
gccacaucucugaggccug

SEQ ID NO: 3125336 - RNA, 19 nt, Artificial Sequence
  Description of Artificial Sequence: Synthetic oligonucleotide
ggccuggucgaaacacuga

SEQ ID NO: 3125337 - RNA, 19 nt, Artificial Sequence
  Description of Artificial Sequence: Synthetic oligonucleotide
ccuggucgaaacacugaua

SEQ ID NO: 3125338 - RNA, 19 nt, Artificial Sequence
  Description of Artificial Sequence: Synthetic oligonucleotide
cucugaggccuggucgaaa

SEQ ID NO: 3125339 - RNA, 19 nt, Artificial Sequence
  Description of Artificial Sequence: Synthetic oligonucleotide
ccacuuucccuuccacaaa

SEQ ID NO: 3125340 - RNA, 19 nt, Artificial Sequence
  Description of Artificial Sequence: Synthetic oligonucleotide
cacaucucugaggccuggu

SEQ ID NO: 3125341 - RNA, 19 nt, Artificial Sequence
  Description of Artificial Sequence: Synthetic oligonucleotide
ccugaucgccacaucucau

SEQ ID NO: 3125342 - RNA, 19 nt, Artificial Sequence
  Description of Artificial Sequence: Synthetic oligonucleotide
cgcuugccgccucacauua

SEQ ID NO: 3125343 - RNA, 19 nt, Artificial Sequence
  Description of Artificial Sequence: Synthetic oligonucleotide
cugugccauguugucuuuu

SEQ ID NO: 3125344 - RNA, 19 nt, Artificial Sequence
  Description of Artificial Sequence: Synthetic oligonucleotide
gcuugccgccucacauuau

SEQ ID NO: 3125345 - RNA, 19 nt, Artificial Sequence
  Description of Artificial Sequence: Synthetic oligonucleotide
cauucacagaaauagaucg

SEQ ID NO: 3125346 - RNA, 19 nt, Artificial Sequence
  Description of Artificial Sequence: Synthetic oligonucleotide
aaagaaaggagaaaugguc

SEQ ID NO: 3125347 - RNA, 19 nt, Artificial Sequence
  Description of Artificial Sequence: Synthetic oligonucleotide
aaauggucauguuaucugg

SEQ ID NO: 3125348 - RNA, 19 nt, Artificial Sequence
  Description of Artificial Sequence: Synthetic oligonucleotide
uuugcuaauguugagucgg

SEQ ID NO: 3125349 - RNA, 19 nt, Artificial Sequence
  Description of Artificial Sequence: Synthetic oligonucleotide
aaauccgugggugacuucc

SEQ ID NO: 3125350 - RNA, 19 nt, Artificial Sequence
  Description of Artificial Sequence: Synthetic oligonucleotide
acagaaauagaucggaucu

SEQ ID NO: 3125351 - RNA, 19 nt, Artificial Sequence
  Description of Artificial Sequence: Synthetic oligonucleotide
agaucggaucuccaaaucc

SEQ ID NO: 3125352 - RNA, 19 nt, Artificial Sequence
  Description of Artificial Sequence: Synthetic oligonucleotide
agaaauagaucggaucucc

SEQ ID NO: 3125353 - RNA, 19 nt, Artificial Sequence
  Description of Artificial Sequence: Synthetic oligonucleotide
accguguugaccuugguag

SEQ ID NO: 3125354 - RNA, 19 nt, Artificial Sequence
  Description of Artificial Sequence: Synthetic oligonucleotide
uaguuguuugcuaauguug

SEQ ID NO: 3125355 - RNA, 19 nt, Artificial Sequence
  Description of Artificial Sequence: Synthetic oligonucleotide
gaaauggucauguuaucug

SEQ ID NO: 3125356 - RNA, 19 nt, Artificial Sequence
  Description of Artificial Sequence: Synthetic oligonucleotide
ucuguggguccaaagaaag

SEQ ID NO: 3125357 - RNA, 19 nt, Artificial Sequence
  Description of Artificial Sequence: Synthetic oligonucleotide
agacuuuugugucuguggg

SEQ ID NO: 3125358 - RNA, 19 nt, Artificial Sequence
  Description of Artificial Sequence: Synthetic oligonucleotide
cauguuaucuggacuacgg

SEQ ID NO: 3125359 - RNA, 19 nt, Artificial Sequence
  Description of Artificial Sequence: Synthetic oligonucleotide
aauagaucggaucuccaaa

SEQ ID NO: 3125360 - RNA, 19 nt, Artificial Sequence
  Description of Artificial Sequence: Synthetic oligonucleotide
aaaggagaaauggucaugu

SEQ ID NO: 3125361 - RNA, 19 nt, Artificial Sequence
  Description of Artificial Sequence: Synthetic oligonucleotide
gagacuuuugugucugugg

SEQ ID NO: 3125362 - RNA, 19 nt, Artificial Sequence
  Description of Artificial Sequence: Synthetic oligonucleotide
uguuugcuaauguugaguc

SEQ ID NO: 3125363 - RNA, 19 nt, Artificial Sequence
  Description of Artificial Sequence: Synthetic oligonucleotide
uguuaucuggacuacgggu

SEQ ID NO: 3125364 - RNA, 19 nt, Artificial Sequence
  Description of Artificial Sequence: Synthetic oligonucleotide
uggaaugacugauaccugc

SEQ ID NO: 3125365 - RNA, 19 nt, Artificial Sequence
  Description of Artificial Sequence: Synthetic oligonucleotide
aagaaaggagaaaugguca

SEQ ID NO: 3125366 - RNA, 19 nt, Artificial Sequence
  Description of Artificial Sequence: Synthetic oligonucleotide
aaauagaucggaucuccaa

SEQ ID NO: 3125367 - RNA, 19 nt, Artificial Sequence
  Description of Artificial Sequence: Synthetic oligonucleotide
uccaaagaaaggagaaaug

SEQ ID NO: 3125368 - RNA, 19 nt, Artificial Sequence
  Description of Artificial Sequence: Synthetic oligonucleotide
gaucggaucuccaaauccg

SEQ ID NO: 3125369 - RNA, 19 nt, Artificial Sequence
  Description of Artificial Sequence: Synthetic oligonucleotide
uguggguccaaagaaagga

SEQ ID NO: 3125370 - RNA, 19 nt, Artificial Sequence
  Description of Artificial Sequence: Synthetic oligonucleotide
uuuguucaguaguuguuug

SEQ ID NO: 3125371 - RNA, 19 nt, Artificial Sequence
  Description of Artificial Sequence: Synthetic oligonucleotide
uucaguaguuguuugcuaa

SEQ ID NO: 3125372 - RNA, 19 nt, Artificial Sequence
  Description of Artificial Sequence: Synthetic oligonucleotide
aguaguuguuugcuaaugu

SEQ ID NO: 3125373 - RNA, 19 nt, Artificial Sequence
  Description of Artificial Sequence: Synthetic oligonucleotide
uucacagaaauagaucgga

SEQ ID NO: 3125374 - RNA, 19 nt, Artificial Sequence
  Description of Artificial Sequence: Synthetic oligonucleotide
ugacuuccuggaaugacug

SEQ ID NO: 3125375 - RNA, 19 nt, Artificial Sequence
  Description of Artificial Sequence: Synthetic oligonucleotide
accugagagacuuuugugu

SEQ ID NO: 3125376 - RNA, 19 nt, Artificial Sequence
  Description of Artificial Sequence: Synthetic oligonucleotide
ucugugcuuggugacaccg

SEQ ID NO: 3125377 - RNA, 19 nt, Artificial Sequence
  Description of Artificial Sequence: Synthetic oligonucleotide
auguuaucuggacuacggg

SEQ ID NO: 3125378 - RNA, 19 nt, Artificial Sequence
  Description of Artificial Sequence: Synthetic oligonucleotide
aaugacugauaccugcguu

SEQ ID NO: 3125379 - RNA, 19 nt, Artificial Sequence
  Description of Artificial Sequence: Synthetic oligonucleotide
ugucuguggguccaaagaa

SEQ ID NO: 3125380 - RNA, 19 nt, Artificial Sequence
  Description of Artificial Sequence: Synthetic oligonucleotide
ugauaccugcguuuguacc

SEQ ID NO: 3125381 - RNA, 19 nt, Artificial Sequence
  Description of Artificial Sequence: Synthetic oligonucleotide
uggacuacgggugaagucu

SEQ ID NO: 3125382 - RNA, 19 nt, Artificial Sequence
  Description of Artificial Sequence: Synthetic oligonucleotide
ugugcuuggugacaccgug

SEQ ID NO: 3125383 - RNA, 19 nt, Artificial Sequence
  Description of Artificial Sequence: Synthetic oligonucleotide
guuugcuaauguugagucg

SEQ ID NO: 3125384 - RNA, 19 nt, Artificial Sequence
  Description of Artificial Sequence: Synthetic oligonucleotide
ccaaagaaaggagaaaugg

SEQ ID NO: 3125385 - RNA, 19 nt, Artificial Sequence
  Description of Artificial Sequence: Synthetic oligonucleotide
uuccuggaaugacugauac

SEQ ID NO: 3125386 - RNA, 19 nt, Artificial Sequence
  Description of Artificial Sequence: Synthetic oligonucleotide
cacagaaauagaucggauc

SEQ ID NO: 3125387 - RNA, 19 nt, Artificial Sequence
  Description of Artificial Sequence: Synthetic oligonucleotide
guuaucuggacuacgggug

SEQ ID NO: 3125388 - RNA, 19 nt, Artificial Sequence
  Description of Artificial Sequence: Synthetic oligonucleotide
uaauguugagucgggacug

SEQ ID NO: 3125389 - RNA, 19 nt, Artificial Sequence
  Description of Artificial Sequence: Synthetic oligonucleotide
agaaauggucauguuaucu

SEQ ID NO: 3125390 - RNA, 19 nt, Artificial Sequence
  Description of Artificial Sequence: Synthetic oligonucleotide
uacgggugaagucugugcu

SEQ ID NO: 3125391 - RNA, 19 nt, Artificial Sequence
  Description of Artificial Sequence: Synthetic oligonucleotide
uggguccaaagaaaggaga

SEQ ID NO: 3125392 - RNA, 19 nt, Artificial Sequence
  Description of Artificial Sequence: Synthetic oligonucleotide
uguucaguaguuguuugcu

SEQ ID NO: 3125393 - RNA, 19 nt, Artificial Sequence
  Description of Artificial Sequence: Synthetic oligonucleotide
uugaccuugguagcagugg

SEQ ID NO: 3125394 - RNA, 19 nt, Artificial Sequence
  Description of Artificial Sequence: Synthetic oligonucleotide
uuaucuggacuacggguga

SEQ ID NO: 3125395 - RNA, 19 nt, Artificial Sequence
  Description of Artificial Sequence: Synthetic oligonucleotide
guugagucgggacuggcug

SEQ ID NO: 3125396 - RNA, 19 nt, Artificial Sequence
  Description of Artificial Sequence: Synthetic oligonucleotide
aguggacgcauucacagaa

SEQ ID NO: 3125397 - RNA, 19 nt, Artificial Sequence
  Description of Artificial Sequence: Synthetic oligonucleotide
agaaaggagaaauggucau

SEQ ID NO: 3125398 - RNA, 19 nt, Artificial Sequence
  Description of Artificial Sequence: Synthetic oligonucleotide
ucauguuaucuggacuacg

SEQ ID NO: 3125399 - RNA, 19 nt, Artificial Sequence
  Description of Artificial Sequence: Synthetic oligonucleotide
aguuguuugcuaauguuga

SEQ ID NO: 3125400 - RNA, 19 nt, Artificial Sequence
  Description of Artificial Sequence: Synthetic oligonucleotide
auagaucggaucuccaaau

SEQ ID NO: 3125401 - RNA, 19 nt, Artificial Sequence
  Description of Artificial Sequence: Synthetic oligonucleotide
uugcuaauguugagucggg

SEQ ID NO: 3125402 - RNA, 19 nt, Artificial Sequence
  Description of Artificial Sequence: Synthetic oligonucleotide
aauguugagucgggacugg

SEQ ID NO: 3125403 - RNA, 19 nt, Artificial Sequence
  Description of Artificial Sequence: Synthetic oligonucleotide
auucacagaaauagaucgg

SEQ ID NO: 3125404 - RNA, 19 nt, Artificial Sequence
  Description of Artificial Sequence: Synthetic oligonucleotide
ugagagacuuuugugucug

SEQ ID NO: 3125405 - RNA, 19 nt, Artificial Sequence
  Description of Artificial Sequence: Synthetic oligonucleotide
uggucauguuaucuggacu

SEQ ID NO: 3125406 - RNA, 19 nt, Artificial Sequence
  Description of Artificial Sequence: Synthetic oligonucleotide
aggagaaauggucauguua

SEQ ID NO: 3125407 - RNA, 19 nt, Artificial Sequence
  Description of Artificial Sequence: Synthetic oligonucleotide
uuguuugcuaauguugagu

SEQ ID NO: 3125408 - RNA, 19 nt, Artificial Sequence
  Description of Artificial Sequence: Synthetic oligonucleotide
ugggugacuuccuggaaug

SEQ ID NO: 3125409 - RNA, 19 nt, Artificial Sequence
  Description of Artificial Sequence: Synthetic oligonucleotide
accuugguagcaguggacg

SEQ ID NO: 3125410 - RNA, 19 nt, Artificial Sequence
  Description of Artificial Sequence: Synthetic oligonucleotide
ugugucuguggguccaaag

SEQ ID NO: 3125411 - RNA, 19 nt, Artificial Sequence
  Description of Artificial Sequence: Synthetic oligonucleotide
uugguuuuguucaguaguu

SEQ ID NO: 3125412 - RNA, 19 nt, Artificial Sequence
  Description of Artificial Sequence: Synthetic oligonucleotide
guuguuugcuaauguugag

SEQ ID NO: 3125413 - RNA, 19 nt, Artificial Sequence
  Description of Artificial Sequence: Synthetic oligonucleotide
uugagucgggacuggcugg

SEQ ID NO: 3125414 - RNA, 19 nt, Artificial Sequence
  Description of Artificial Sequence: Synthetic oligonucleotide
uuuuguucaguaguuguuu

SEQ ID NO: 3125415 - RNA, 19 nt, Artificial Sequence
  Description of Artificial Sequence: Synthetic oligonucleotide
gaaaggagaaauggucaug

SEQ ID NO: 3125416 - RNA, 19 nt, Artificial Sequence
  Description of Artificial Sequence: Synthetic oligonucleotide
uccgugggugacuuccugg

SEQ ID NO: 3125417 - RNA, 19 nt, Artificial Sequence
  Description of Artificial Sequence: Synthetic oligonucleotide
cuggcugggcaccugagag

SEQ ID NO: 3125418 - RNA, 19 nt, Artificial Sequence
  Description of Artificial Sequence: Synthetic oligonucleotide
uguugagucgggacuggcu

SEQ ID NO: 3125419 - RNA, 19 nt, Artificial Sequence
  Description of Artificial Sequence: Synthetic oligonucleotide
cuacgggugaagucugugc

SEQ ID NO: 3125420 - RNA, 19 nt, Artificial Sequence
  Description of Artificial Sequence: Synthetic oligonucleotide
cuuggugacaccguguuga

SEQ ID NO: 3125421 - RNA, 19 nt, Artificial Sequence
  Description of Artificial Sequence: Synthetic oligonucleotide
ucacagaaauagaucggau

SEQ ID NO: 3125422 - RNA, 19 nt, Artificial Sequence
  Description of Artificial Sequence: Synthetic oligonucleotide
agucugugcuuggugacac

SEQ ID NO: 3125423 - RNA, 19 nt, Artificial Sequence
  Description of Artificial Sequence: Synthetic oligonucleotide
gcaguggacgcauucacag

SEQ ID NO: 3125424 - RNA, 19 nt, Artificial Sequence
  Description of Artificial Sequence: Synthetic oligonucleotide
ggaucuccaaauccguggg

SEQ ID NO: 3125425 - RNA, 19 nt, Artificial Sequence
  Description of Artificial Sequence: Synthetic oligonucleotide
ucuccaaauccguggguga

SEQ ID NO: 3125426 - RNA, 19 nt, Artificial Sequence
  Description of Artificial Sequence: Synthetic oligonucleotide
ugacugauaccugcguuug

SEQ ID NO: 3125427 - RNA, 19 nt, Artificial Sequence
  Description of Artificial Sequence: Synthetic oligonucleotide
uggacgcauucacagaaau

SEQ ID NO: 3125428 - RNA, 19 nt, Artificial Sequence
  Description of Artificial Sequence: Synthetic oligonucleotide
ucggaucuccaaauccgug

SEQ ID NO: 3125429 - RNA, 19 nt, Artificial Sequence
  Description of Artificial Sequence: Synthetic oligonucleotide
cuguggguccaaagaaagg

SEQ ID NO: 3125430 - RNA, 19 nt, Artificial Sequence
  Description of Artificial Sequence: Synthetic oligonucleotide
cuugguuuuguucaguagu

SEQ ID NO: 3125431 - RNA, 19 nt, Artificial Sequence
  Description of Artificial Sequence: Synthetic oligonucleotide
aucuccaaauccgugggug

SEQ ID NO: 3125432 - RNA, 19 nt, Artificial Sequence
  Description of Artificial Sequence: Synthetic oligonucleotide
cuuuugugucugugggucc

SEQ ID NO: 3125433 - RNA, 19 nt, Artificial Sequence
  Description of Artificial Sequence: Synthetic oligonucleotide
uagcaguggacgcauucac

SEQ ID NO: 3125434 - RNA, 19 nt, Artificial Sequence
  Description of Artificial Sequence: Synthetic oligonucleotide
augacugauaccugcguuu

SEQ ID NO: 3125435 - RNA, 19 nt, Artificial Sequence
  Description of Artificial Sequence: Synthetic oligonucleotide
uagaucggaucuccaaauc

SEQ ID NO: 3125436 - RNA, 19 nt, Artificial Sequence
  Description of Artificial Sequence: Synthetic oligonucleotide
uuuugugucugugggucca

SEQ ID NO: 3125437 - RNA, 19 nt, Artificial Sequence
  Description of Artificial Sequence: Synthetic oligonucleotide
gacgcuugguuuuguucag

SEQ ID NO: 3125438 - RNA, 19 nt, Artificial Sequence
  Description of Artificial Sequence: Synthetic oligonucleotide
ucaguaguuguuugcuaau

SEQ ID NO: 3125439 - RNA, 19 nt, Artificial Sequence
  Description of Artificial Sequence: Synthetic oligonucleotide
uccuggaaugacugauacc

SEQ ID NO: 3125440 - RNA, 19 nt, Artificial Sequence
  Description of Artificial Sequence: Synthetic oligonucleotide
caaagaaaggagaaauggu

SEQ ID NO: 3125441 - RNA, 19 nt, Artificial Sequence
  Description of Artificial Sequence: Synthetic oligonucleotide
ugguuuuguucaguaguug

SEQ ID NO: 3125442 - RNA, 19 nt, Artificial Sequence
  Description of Artificial Sequence: Synthetic oligonucleotide
gcuaauguugagucgggac

SEQ ID NO: 3125443 - RNA, 19 nt, Artificial Sequence
  Description of Artificial Sequence: Synthetic oligonucleotide
cugauaccugcguuuguac

SEQ ID NO: 3125444 - RNA, 19 nt, Artificial Sequence
  Description of Artificial Sequence: Synthetic oligonucleotide
ggaaugacugauaccugcg

SEQ ID NO: 3125445 - RNA, 19 nt, Artificial Sequence
  Description of Artificial Sequence: Synthetic oligonucleotide
gugaagucugugcuuggug

SEQ ID NO: 3125446 - RNA, 19 nt, Artificial Sequence
  Description of Artificial Sequence: Synthetic oligonucleotide
gagaaauggucauguuauc

SEQ ID NO: 3125447 - RNA, 19 nt, Artificial Sequence
  Description of Artificial Sequence: Synthetic oligonucleotide
ugcuuggugacaccguguu

SEQ ID NO: 3125448 - RNA, 19 nt, Artificial Sequence
  Description of Artificial Sequence: Synthetic oligonucleotide
cuaauguugagucgggacu

SEQ ID NO: 3125449 - RNA, 19 nt, Artificial Sequence
  Description of Artificial Sequence: Synthetic oligonucleotide
ugagucgggacuggcuggg

SEQ ID NO: 3125450 - RNA, 19 nt, Artificial Sequence
  Description of Artificial Sequence: Synthetic oligonucleotide
caccugagagacuuuugug

SEQ ID NO: 3125451 - RNA, 19 nt, Artificial Sequence
  Description of Artificial Sequence: Synthetic oligonucleotide
gugucuguggguccaaaga

SEQ ID NO: 3125452 - RNA, 19 nt, Artificial Sequence
  Description of Artificial Sequence: Synthetic oligonucleotide
agagacuuuugugucugug

SEQ ID NO: 3125453 - RNA, 19 nt, Artificial Sequence
  Description of Artificial Sequence: Synthetic oligonucleotide
ggacgcuugguuuuguuca

SEQ ID NO: 3125454 - RNA, 19 nt, Artificial Sequence
  Description of Artificial Sequence: Synthetic oligonucleotide
uguugaccuugguagcagu

SEQ ID NO: 3125455 - RNA, 19 nt, Artificial Sequence
  Description of Artificial Sequence: Synthetic oligonucleotide
ggugacaccguguugaccu

SEQ ID NO: 3125456 - RNA, 19 nt, Artificial Sequence
  Description of Artificial Sequence: Synthetic oligonucleotide
gacaccguguugaccuugg

SEQ ID NO: 3125457 - RNA, 19 nt, Artificial Sequence
  Description of Artificial Sequence: Synthetic oligonucleotide
ggucauguuaucuggacua

SEQ ID NO: 3125458 - RNA, 19 nt, Artificial Sequence
  Description of Artificial Sequence: Synthetic oligonucleotide
ucuggacuacgggugaagu

SEQ ID NO: 3125459 - RNA, 19 nt, Artificial Sequence
  Description of Artificial Sequence: Synthetic oligonucleotide
aagucugugcuuggugaca

SEQ ID NO: 3125460 - RNA, 19 nt, Artificial Sequence
  Description of Artificial Sequence: Synthetic oligonucleotide
aaggagaaauggucauguu

SEQ ID NO: 3125461 - RNA, 19 nt, Artificial Sequence
  Description of Artificial Sequence: Synthetic oligonucleotide
guggguccaaagaaaggag

SEQ ID NO: 3125462 - RNA, 19 nt, Artificial Sequence
  Description of Artificial Sequence: Synthetic oligonucleotide
auguugagucgggacuggc

SEQ ID NO: 3125463 - RNA, 19 nt, Artificial Sequence
  Description of Artificial Sequence: Synthetic oligonucleotide
gaaauagaucggaucucca

SEQ ID NO: 3125464 - RNA, 19 nt, Artificial Sequence
  Description of Artificial Sequence: Synthetic oligonucleotide
cuggaaugacugauaccug

SEQ ID NO: 3125465 - RNA, 19 nt, Artificial Sequence
  Description of Artificial Sequence: Synthetic oligonucleotide
caguaguuguuugcuaaug

SEQ ID NO: 3125466 - RNA, 19 nt, Artificial Sequence
  Description of Artificial Sequence: Synthetic oligonucleotide
cuggacuacgggugaaguc

SEQ ID NO: 3125467 - RNA, 19 nt, Artificial Sequence
  Description of Artificial Sequence: Synthetic oligonucleotide
acugauaccugcguuugua

SEQ ID NO: 3125468 - RNA, 19 nt, Artificial Sequence
  Description of Artificial Sequence: Synthetic oligonucleotide
gcuugguuuuguucaguag

SEQ ID NO: 3125469 - RNA, 19 nt, Artificial Sequence
  Description of Artificial Sequence: Synthetic oligonucleotide
cagaaauagaucggaucuc

SEQ ID NO: 3125470 - RNA, 19 nt, Artificial Sequence
  Description of Artificial Sequence: Synthetic oligonucleotide
guugaccuugguagcagug

SEQ ID NO: 3125471 - RNA, 19 nt, Artificial Sequence
  Description of Artificial Sequence: Synthetic oligonucleotide
gguuuuguucaguaguugu

SEQ ID NO: 3125472 - RNA, 19 nt, Artificial Sequence
  Description of Artificial Sequence: Synthetic oligonucleotide
ccugagagacuuuuguguc

SEQ ID NO: 3125473 - RNA, 19 nt, Artificial Sequence
  Description of Artificial Sequence: Synthetic oligonucleotide
ugcuaauguugagucggga

SEQ ID NO: 3125474 - RNA, 19 nt, Artificial Sequence
  Description of Artificial Sequence: Synthetic oligonucleotide
gaaugacugauaccugcgu

SEQ ID NO: 3125475 - RNA, 19 nt, Artificial Sequence
  Description of Artificial Sequence: Synthetic oligonucleotide
ggagaaauggucauguuau

SEQ ID NO: 3125476 - RNA, 19 nt, Artificial Sequence
  Description of Artificial Sequence: Synthetic oligonucleotide
guccaaagaaaggagaaau

SEQ ID NO: 3125477 - RNA, 19 nt, Artificial Sequence
  Description of Artificial Sequence: Synthetic oligonucleotide
uuggugacaccguguugac

SEQ ID NO: 3125478 - RNA, 19 nt, Artificial Sequence
  Description of Artificial Sequence: Synthetic oligonucleotide
acuacgggugaagucugug

SEQ ID NO: 3125479 - RNA, 19 nt, Artificial Sequence
  Description of Artificial Sequence: Synthetic oligonucleotide
acuggcugggcaccugaga

SEQ ID NO: 3125480 - RNA, 19 nt, Artificial Sequence
  Description of Artificial Sequence: Synthetic oligonucleotide
uccaaauccgugggugacu

SEQ ID NO: 3125481 - RNA, 19 nt, Artificial Sequence
  Description of Artificial Sequence: Synthetic oligonucleotide
agucgggacuggcugggca

SEQ ID NO: 3125482 - RNA, 19 nt, Artificial Sequence
  Description of Artificial Sequence: Synthetic oligonucleotide
guaguuguuugcuaauguu

SEQ ID NO: 3125483 - RNA, 19 nt, Artificial Sequence
  Description of Artificial Sequence: Synthetic oligonucleotide
guguugaccuugguagcag

SEQ ID NO: 3125484 - RNA, 19 nt, Artificial Sequence
  Description of Artificial Sequence: Synthetic oligonucleotide
uugguagcaguggacgcau

SEQ ID NO: 3125485 - RNA, 19 nt, Artificial Sequence
  Description of Artificial Sequence: Synthetic oligonucleotide
cggaucuccaaauccgugg

SEQ ID NO: 3125486 - RNA, 19 nt, Artificial Sequence
  Description of Artificial Sequence: Synthetic oligonucleotide
guagcaguggacgcauuca

SEQ ID NO: 3125487 - RNA, 19 nt, Artificial Sequence
  Description of Artificial Sequence: Synthetic oligonucleotide
gucauguuaucuggacuac

SEQ ID NO: 3125488 - RNA, 19 nt, Artificial Sequence
  Description of Artificial Sequence: Synthetic oligonucleotide
ccuggaaugacugauaccu

SEQ ID NO: 3125489 - RNA, 19 nt, Artificial Sequence
  Description of Artificial Sequence: Synthetic oligonucleotide
gguagcaguggacgcauuc

SEQ ID NO: 3125490 - RNA, 19 nt, Artificial Sequence
  Description of Artificial Sequence: Synthetic oligonucleotide
cuugguagcaguggacgca

SEQ ID NO: 3125491 - RNA, 19 nt, Artificial Sequence
  Description of Artificial Sequence: Synthetic oligonucleotide
aucuggacuacgggugaag

SEQ ID NO: 3125492 - RNA, 19 nt, Artificial Sequence
  Description of Artificial Sequence: Synthetic oligonucleotide
gcauucacagaaauagauc

SEQ ID NO: 3125493 - RNA, 19 nt, Artificial Sequence
  Description of Artificial Sequence: Synthetic oligonucleotide
gacuuccuggaaugacuga

SEQ ID NO: 3125494 - RNA, 19 nt, Artificial Sequence
  Description of Artificial Sequence: Synthetic oligonucleotide
cuccaaauccgugggugac

SEQ ID NO: 3125495 - RNA, 19 nt, Artificial Sequence
  Description of Artificial Sequence: Synthetic oligonucleotide
ugacaccguguugaccuug

SEQ ID NO: 3125496 - RNA, 19 nt, Artificial Sequence
  Description of Artificial Sequence: Synthetic oligonucleotide
gacuuuugugucugugggu

SEQ ID NO: 3125497 - RNA, 19 nt, Artificial Sequence
  Description of Artificial Sequence: Synthetic oligonucleotide
aucggaucuccaaauccgu

SEQ ID NO: 3125498 - RNA, 19 nt, Artificial Sequence
  Description of Artificial Sequence: Synthetic oligonucleotide
guucaguaguuguuugcua

SEQ ID NO: 3125499 - RNA, 19 nt, Artificial Sequence
  Description of Artificial Sequence: Synthetic oligonucleotide
gucgggacuggcugggcac

SEQ ID NO: 3125500 - RNA, 19 nt, Artificial Sequence
  Description of Artificial Sequence: Synthetic oligonucleotide
auccgugggugacuuccug

SEQ ID NO: 3125501 - RNA, 19 nt, Artificial Sequence
  Description of Artificial Sequence: Synthetic oligonucleotide
aauccgugggugacuuccu

SEQ ID NO: 3125502 - RNA, 19 nt, Artificial Sequence
  Description of Artificial Sequence: Synthetic oligonucleotide
uggugacaccguguugacc

SEQ ID NO: 3125503 - RNA, 19 nt, Artificial Sequence
  Description of Artificial Sequence: Synthetic oligonucleotide
gaccuugguagcaguggac

SEQ ID NO: 3125504 - RNA, 19 nt, Artificial Sequence
  Description of Artificial Sequence: Synthetic oligonucleotide
ccuugguagcaguggacgc

SEQ ID NO: 3125505 - RNA, 19 nt, Artificial Sequence
  Description of Artificial Sequence: Synthetic oligonucleotide
ggugacuuccuggaaugac

SEQ ID NO: 3125506 - RNA, 19 nt, Artificial Sequence
  Description of Artificial Sequence: Synthetic oligonucleotide
agcaguggacgcauucaca

SEQ ID NO: 3125507 - RNA, 19 nt, Artificial Sequence
  Description of Artificial Sequence: Synthetic oligonucleotide
acgcauucacagaaauaga

SEQ ID NO: 3125508 - RNA, 19 nt, Artificial Sequence
  Description of Artificial Sequence: Synthetic oligonucleotide
cuuccuggaaugacugaua

SEQ ID NO: 3125509 - RNA, 19 nt, Artificial Sequence
  Description of Artificial Sequence: Synthetic oligonucleotide
uaucuggacuacgggugaa

SEQ ID NO: 3125510 - RNA, 19 nt, Artificial Sequence
  Description of Artificial Sequence: Synthetic oligonucleotide
gggacgcuugguuuuguuc

SEQ ID NO: 3125511 - RNA, 19 nt, Artificial Sequence
  Description of Artificial Sequence: Synthetic oligonucleotide
acgggugaagucugugcuu

SEQ ID NO: 3125512 - RNA, 19 nt, Artificial Sequence
  Description of Artificial Sequence: Synthetic oligonucleotide
ggcugggcaccugagagac

SEQ ID NO: 3125513 - RNA, 19 nt, Artificial Sequence
  Description of Artificial Sequence: Synthetic oligonucleotide
gucuguggguccaaagaaa

SEQ ID NO: 3125514 - RNA, 19 nt, Artificial Sequence
  Description of Artificial Sequence: Synthetic oligonucleotide
ucgggacuggcugggcacc

SEQ ID NO: 3125515 - RNA, 19 nt, Artificial Sequence
  Description of Artificial Sequence: Synthetic oligonucleotide
cugagagacuuuugugucu

SEQ ID NO: 3125516 - RNA, 19 nt, Artificial Sequence
  Description of Artificial Sequence: Synthetic oligonucleotide
gucugugcuuggugacacc

SEQ ID NO: 3125517 - RNA, 19 nt, Artificial Sequence
  Description of Artificial Sequence: Synthetic oligonucleotide
gggugaagucugugcuugg

SEQ ID NO: 3125518 - RNA, 19 nt, Artificial Sequence
  Description of Artificial Sequence: Synthetic oligonucleotide
uuugugucuguggguccaa

SEQ ID NO: 3125519 - RNA, 19 nt, Artificial Sequence
  Description of Artificial Sequence: Synthetic oligonucleotide
guuuuguucaguaguuguu

SEQ ID NO: 3125520 - RNA, 19 nt, Artificial Sequence
  Description of Artificial Sequence: Synthetic oligonucleotide
gugggugacuuccuggaau

SEQ ID NO: 3125521 - RNA, 19 nt, Artificial Sequence
  Description of Artificial Sequence: Synthetic oligonucleotide
caguggacgcauucacaga

SEQ ID NO: 3125522 - RNA, 19 nt, Artificial Sequence
  Description of Artificial Sequence: Synthetic oligonucleotide
ccguguugaccuugguagc

SEQ ID NO: 3125523 - RNA, 19 nt, Artificial Sequence
  Description of Artificial Sequence: Synthetic oligonucleotide
ugggacgcuugguuuuguu

SEQ ID NO: 3125524 - RNA, 19 nt, Artificial Sequence
  Description of Artificial Sequence: Synthetic oligonucleotide
caaauccgugggugacuuc

SEQ ID NO: 3125525 - RNA, 19 nt, Artificial Sequence
  Description of Artificial Sequence: Synthetic oligonucleotide
gcaccugagagacuuuugu

SEQ ID NO: 3125526 - RNA, 19 nt, Artificial Sequence
  Description of Artificial Sequence: Synthetic oligonucleotide
gguccaaagaaaggagaaa

SEQ ID NO: 3125527 - RNA, 19 nt, Artificial Sequence
  Description of Artificial Sequence: Synthetic oligonucleotide
caccguguugaccuuggua

SEQ ID NO: 3125528 - RNA, 19 nt, Artificial Sequence
  Description of Artificial Sequence: Synthetic oligonucleotide
acaccguguugaccuuggu

SEQ ID NO: 3125529 - RNA, 19 nt, Artificial Sequence
  Description of Artificial Sequence: Synthetic oligonucleotide
uugugucuguggguccaaa

SEQ ID NO: 3125530 - RNA, 19 nt, Artificial Sequence
  Description of Artificial Sequence: Synthetic oligonucleotide
gcuuggugacaccguguug

SEQ ID NO: 3125531 - RNA, 19 nt, Artificial Sequence
  Description of Artificial Sequence: Synthetic oligonucleotide
ggacuacgggugaagucug

SEQ ID NO: 3125532 - RNA, 19 nt, Artificial Sequence
  Description of Artificial Sequence: Synthetic oligonucleotide
gacugauaccugcguuugu

SEQ ID NO: 3125533 - RNA, 19 nt, Artificial Sequence
  Description of Artificial Sequence: Synthetic oligonucleotide
acgcuugguuuuguucagu

SEQ ID NO: 3125534 - RNA, 19 nt, Artificial Sequence
  Description of Artificial Sequence: Synthetic oligonucleotide
ggcaccugagagacuuuug

SEQ ID NO: 3125535 - RNA, 19 nt, Artificial Sequence
  Description of Artificial Sequence: Synthetic oligonucleotide
gagagacuuuugugucugu

SEQ ID NO: 3125536 - RNA, 19 nt, Artificial Sequence
  Description of Artificial Sequence: Synthetic oligonucleotide
ugguagcaguggacgcauu

SEQ ID NO: 3125537 - RNA, 19 nt, Artificial Sequence
  Description of Artificial Sequence: Synthetic oligonucleotide
gagucgggacuggcugggc

SEQ ID NO: 3125538 - RNA, 19 nt, Artificial Sequence
  Description of Artificial Sequence: Synthetic oligonucleotide
cgcauucacagaaauagau

SEQ ID NO: 3125539 - RNA, 19 nt, Artificial Sequence
  Description of Artificial Sequence: Synthetic oligonucleotide
guggacgcauucacagaaa

SEQ ID NO: 3125540 - RNA, 19 nt, Artificial Sequence
  Description of Artificial Sequence: Synthetic oligonucleotide
ugggcaccugagagacuuu

SEQ ID NO: 3125541 - RNA, 19 nt, Artificial Sequence
  Description of Artificial Sequence: Synthetic oligonucleotide
cugggcaccugagagacuu

SEQ ID NO: 3125542 - RNA, 19 nt, Artificial Sequence
  Description of Artificial Sequence: Synthetic oligonucleotide
ccgugggugacuuccugga

SEQ ID NO: 3125543 - RNA, 19 nt, Artificial Sequence
  Description of Artificial Sequence: Synthetic oligonucleotide
ggacgcauucacagaaaua

SEQ ID NO: 3125544 - RNA, 19 nt, Artificial Sequence
  Description of Artificial Sequence: Synthetic oligonucleotide
cugugcuuggugacaccgu

SEQ ID NO: 3125545 - RNA, 19 nt, Artificial Sequence
  Description of Artificial Sequence: Synthetic oligonucleotide
ggugaagucugugcuuggu

SEQ ID NO: 3125546 - RNA, 19 nt, Artificial Sequence
  Description of Artificial Sequence: Synthetic oligonucleotide
gacuacgggugaagucugu

SEQ ID NO: 3125547 - RNA, 19 nt, Artificial Sequence
  Description of Artificial Sequence: Synthetic oligonucleotide
gugcuuggugacaccgugu

SEQ ID NO: 3125548 - RNA, 19 nt, Artificial Sequence
  Description of Artificial Sequence: Synthetic oligonucleotide
gggugacuuccuggaauga

SEQ ID NO: 3125549 - RNA, 19 nt, Artificial Sequence
  Description of Artificial Sequence: Synthetic oligonucleotide
cguguugaccuugguagca

SEQ ID NO: 3125550 - RNA, 19 nt, Artificial Sequence
  Description of Artificial Sequence: Synthetic oligonucleotide
cgcuugguuuuguucagua

SEQ ID NO: 3125551 - RNA, 19 nt, Artificial Sequence
  Description of Artificial Sequence: Synthetic oligonucleotide
gggacuggcugggcaccug

SEQ ID NO: 3125552 - RNA, 19 nt, Artificial Sequence
  Description of Artificial Sequence: Synthetic oligonucleotide
gugacaccguguugaccuu

SEQ ID NO: 3125553 - RNA, 19 nt, Artificial Sequence
  Description of Artificial Sequence: Synthetic oligonucleotide
ccaaauccgugggugacuu

SEQ ID NO: 3125554 - RNA, 19 nt, Artificial Sequence
  Description of Artificial Sequence: Synthetic oligonucleotide
gggcaccugagagacuuuu

SEQ ID NO: 3125555 - RNA, 19 nt, Artificial Sequence
  Description of Artificial Sequence: Synthetic oligonucleotide
cgugggugacuuccuggaa

SEQ ID NO: 3125556 - RNA, 19 nt, Artificial Sequence
  Description of Artificial Sequence: Synthetic oligonucleotide
gcugggcaccugagagacu

SEQ ID NO: 3125557 - RNA, 19 nt, Artificial Sequence
  Description of Artificial Sequence: Synthetic oligonucleotide
cgggacuggcugggcaccu

SEQ ID NO: 3125558 - RNA, 19 nt, Artificial Sequence
  Description of Artificial Sequence: Synthetic oligonucleotide
uuuaauaagagaaugcccg

SEQ ID NO: 3125559 - RNA, 19 nt, Artificial Sequence
  Description of Artificial Sequence: Synthetic oligonucleotide
aauaagagaaugcccgucc

SEQ ID NO: 3125560 - RNA, 19 nt, Artificial Sequence
  Description of Artificial Sequence: Synthetic oligonucleotide
  modified_base (6)..(6): a, c, u, g, unknown or other
uuguunuuuaauaagagaa

SEQ ID NO: 3125561 - RNA, 19 nt, Artificial Sequence
  Description of Artificial Sequence: Synthetic oligonucleotide
  modified_base (10)..(10): a, c, u, g, unknown or other
uguuuuguunuuuaauaag

SEQ ID NO: 3125562 - RNA, 19 nt, Artificial Sequence
  Description of Artificial Sequence: Synthetic oligonucleotide
  modified_base (3)..(3): a, c, u, g, unknown or other
uunuuuaauaagagaaugc

SEQ ID NO: 3125563 - RNA, 19 nt, Artificial Sequence
  Description of Artificial Sequence: Synthetic oligonucleotide
  modified_base (8)..(8): a, c, u, g, unknown or other
uuuuguunuuuaauaagag

SEQ ID NO: 3125564 - RNA, 19 nt, Artificial Sequence
  Description of Artificial Sequence: Synthetic oligonucleotide
  modified_base (2)..(2): a, c, u, g, unknown or other
unuuuaauaagagaaugcc

SEQ ID NO: 3125565 - RNA, 19 nt, Artificial Sequence
  Description of Artificial Sequence: Synthetic oligonucleotide
  modified_base (7)..(7): a, c, u, g, unknown or other
uuuguunuuuaauaagaga

SEQ ID NO: 3125566 - RNA, 19 nt, Artificial Sequence
  Description of Artificial Sequence: Synthetic oligonucleotide
agcugauccaaguuaaccc

SEQ ID NO: 3125567 - RNA, 19 nt, Artificial Sequence
  Description of Artificial Sequence: Synthetic oligonucleotide
  modified_base (4)..(4): a, c, u, g, unknown or other
guunuuuaauaagagaaug

SEQ ID NO: 3125568 - RNA, 19 nt, Artificial Sequence
  Description of Artificial Sequence: Synthetic oligonucleotide
aaucucaucagcucucuug

SEQ ID NO: 3125569 - RNA, 19 nt, Artificial Sequence
  Description of Artificial Sequence: Synthetic oligonucleotide
guccacagaauucacaugg

SEQ ID NO: 3125570 - RNA, 19 nt, Artificial Sequence
  Description of Artificial Sequence: Synthetic oligonucleotide
  modified_base (12)..(12): a, c, u, g, unknown or other
uuuguuuuguunuuuaaua

SEQ ID NO: 3125571 - RNA, 19 nt, Artificial Sequence
  Description of Artificial Sequence: Synthetic oligonucleotide
agaauucacauggaaaucg

SEQ ID NO: 3125572 - RNA, 19 nt, Artificial Sequence
  Description of Artificial Sequence: Synthetic oligonucleotide
ucagaaaaucucaucagcu

SEQ ID NO: 3125573 - RNA, 19 nt, Artificial Sequence
  Description of Artificial Sequence: Synthetic oligonucleotide
uugucuucagcuuugcugc

SEQ ID NO: 3125574 - RNA, 19 nt, Artificial Sequence
  Description of Artificial Sequence: Synthetic oligonucleotide
aacccguccaaccaucugg

SEQ ID NO: 3125575 - RNA, 19 nt, Artificial Sequence
  Description of Artificial Sequence: Synthetic oligonucleotide
acagaauucacauggaaau

SEQ ID NO: 3125576 - RNA, 19 nt, Artificial Sequence
  Description of Artificial Sequence: Synthetic oligonucleotide
cauuucgucauccuugucc

SEQ ID NO: 3125577 - RNA, 19 nt, Artificial Sequence
  Description of Artificial Sequence: Synthetic oligonucleotide
  modified_base (5)..(5): a, c, u, g, unknown or other
uguunuuuaauaagagaau

SEQ ID NO: 3125578 - RNA, 19 nt, Artificial Sequence
  Description of Artificial Sequence: Synthetic oligonucleotide
agaaaaucucaucagcucu

SEQ ID NO: 3125579 - RNA, 19 nt, Artificial Sequence
  Description of Artificial Sequence: Synthetic oligonucleotide
uggaaaucgcuucucagug

SEQ ID NO: 3125580 - RNA, 19 nt, Artificial Sequence
  Description of Artificial Sequence: Synthetic oligonucleotide
cuugucuucagcuuugcug

SEQ ID NO: 3125581 - RNA, 19 nt, Artificial Sequence
  Description of Artificial Sequence: Synthetic oligonucleotide
  modified_base (13)..(13): a, c, u, g, unknown or other
uuuuguuuuguunuuuaau

SEQ ID NO: 3125582 - RNA, 19 nt, Artificial Sequence
  Description of Artificial Sequence: Synthetic oligonucleotide
agcuuugcugcucauuucg

SEQ ID NO: 3125583 - RNA, 19 nt, Artificial Sequence
  Description of Artificial Sequence: Synthetic oligonucleotide
ucaguguucacaccagccc

SEQ ID NO: 3125584 - RNA, 19 nt, Artificial Sequence
  Description of Artificial Sequence: Synthetic oligonucleotide
uuugcugcucauuucguca

SEQ ID NO: 3125585 - RNA, 19 nt, Artificial Sequence
  Description of Artificial Sequence: Synthetic oligonucleotide
caaguuaacccguccaacc

SEQ ID NO: 3125586 - RNA, 19 nt, Artificial Sequence
  Description of Artificial Sequence: Synthetic oligonucleotide
aaguuaacccguccaacca

SEQ ID NO: 3125587 - RNA, 19 nt, Artificial Sequence
  Description of Artificial Sequence: Synthetic oligonucleotide
gucagaaaaucucaucagc

SEQ ID NO: 3125588 - RNA, 19 nt, Artificial Sequence
  Description of Artificial Sequence: Synthetic oligonucleotide
uggccucugacaaucaggc

SEQ ID NO: 3125589 - RNA, 19 nt, Artificial Sequence
  Description of Artificial Sequence: Synthetic oligonucleotide
  modified_base (9)..(9): a, c, u, g, unknown or other
guuuuguunuuuaauaaga

SEQ ID NO: 3125590 - RNA, 19 nt, Artificial Sequence
  Description of Artificial Sequence: Synthetic oligonucleotide
uuaauaagagaaugcccgu

SEQ ID NO: 3125591 - RNA, 19 nt, Artificial Sequence
  Description of Artificial Sequence: Synthetic oligonucleotide
auuucgucauccuuguccu

SEQ ID NO: 3125592 - RNA, 19 nt, Artificial Sequence
  Description of Artificial Sequence: Synthetic oligonucleotide
uucacauggaaaucgcuuc

SEQ ID NO: 3125593 - RNA, 19 nt, Artificial Sequence
  Description of Artificial Sequence: Synthetic oligonucleotide
auccuuguccucaucaucg

SEQ ID NO: 3125594 - RNA, 19 nt, Artificial Sequence
  Description of Artificial Sequence: Synthetic oligonucleotide
ucagcuuugcugcucauuu

SEQ ID NO: 3125595 - RNA, 19 nt, Artificial Sequence
  Description of Artificial Sequence: Synthetic oligonucleotide
cucaguguucacaccagcc

SEQ ID NO: 3125596 - RNA, 19 nt, Artificial Sequence
  Description of Artificial Sequence: Synthetic oligonucleotide
gcugauccaaguuaacccg

SEQ ID NO: 3125597 - RNA, 19 nt, Artificial Sequence
  Description of Artificial Sequence: Synthetic oligonucleotide
aucucaucagcucucuugu

SEQ ID NO: 3125598 - RNA, 19 nt, Artificial Sequence
  Description of Artificial Sequence: Synthetic oligonucleotide
ucaucaucgcugcuggaac

SEQ ID NO: 3125599 - RNA, 19 nt, Artificial Sequence
  Description of Artificial Sequence: Synthetic oligonucleotide
aaucgcuucucaguguuca

SEQ ID NO: 3125600 - RNA, 19 nt, Artificial Sequence
  Description of Artificial Sequence: Synthetic oligonucleotide
cauggaaaucgcuucucag

SEQ ID NO: 3125601 - RNA, 19 nt, Artificial Sequence
  Description of Artificial Sequence: Synthetic oligonucleotide
aagagaaugcccguccaca

SEQ ID NO: 3125602 - RNA, 19 nt, Artificial Sequence
  Description of Artificial Sequence: Synthetic oligonucleotide
cuuuuccuucaucuguucc

SEQ ID NO: 3125603 - RNA, 19 nt, Artificial Sequence
  Description of Artificial Sequence: Synthetic oligonucleotide
cagaaaaucucaucagcuc

SEQ ID NO: 3125604 - RNA, 19 nt, Artificial Sequence
  Description of Artificial Sequence: Synthetic oligonucleotide
agagaaugcccguccacag

SEQ ID NO: 3125605 - RNA, 19 nt, Artificial Sequence
  Description of Artificial Sequence: Synthetic oligonucleotide
uccagcugauccaaguuaa

SEQ ID NO: 3125606 - RNA, 19 nt, Artificial Sequence
  Description of Artificial Sequence: Synthetic oligonucleotide
gaauucacauggaaaucgc

SEQ ID NO: 3125607 - RNA, 19 nt, Artificial Sequence
  Description of Artificial Sequence: Synthetic oligonucleotide
agcucucuugucuucagcu

SEQ ID NO: 3125608 - RNA, 19 nt, Artificial Sequence
  Description of Artificial Sequence: Synthetic oligonucleotide
guucacaccagccccucgg

SEQ ID NO: 3125609 - RNA, 19 nt, Artificial Sequence
  Description of Artificial Sequence: Synthetic oligonucleotide
uucucaguguucacaccag

SEQ ID NO: 3125610 - RNA, 19 nt, Artificial Sequence
  Description of Artificial Sequence: Synthetic oligonucleotide
ucucuugucuucagcuuug

SEQ ID NO: 3125611 - RNA, 19 nt, Artificial Sequence
  Description of Artificial Sequence: Synthetic oligonucleotide
uccaaguuaacccguccaa

SEQ ID NO: 3125612 - RNA, 19 nt, Artificial Sequence
  Description of Artificial Sequence: Synthetic oligonucleotide
uguuccagcugauccaagu

SEQ ID NO: 3125613 - RNA, 19 nt, Artificial Sequence
  Description of Artificial Sequence: Synthetic oligonucleotide
cuggccucugacaaucagg

SEQ ID NO: 3125614 - RNA, 19 nt, Artificial Sequence
  Description of Artificial Sequence: Synthetic oligonucleotide
aaaaucucaucagcucucu

SEQ ID NO: 3125615 - RNA, 19 nt, Artificial Sequence
  Description of Artificial Sequence: Synthetic oligonucleotide
uaagagaaugcccguccac

SEQ ID NO: 3125616 - RNA, 19 nt, Artificial Sequence
  Description of Artificial Sequence: Synthetic oligonucleotide
agaaugcccguccacagaa

SEQ ID NO: 3125617 - RNA, 19 nt, Artificial Sequence
  Description of Artificial Sequence: Synthetic oligonucleotide
gauccaaguuaacccgucc

SEQ ID NO: 3125618 - RNA, 19 nt, Artificial Sequence
  Description of Artificial Sequence: Synthetic oligonucleotide
aaugcccguccacagaauu

SEQ ID NO: 3125619 - RNA, 19 nt, Artificial Sequence
  Description of Artificial Sequence: Synthetic oligonucleotide
ucucaguguucacaccagc

SEQ ID NO: 3125620 - RNA, 19 nt, Artificial Sequence
  Description of Artificial Sequence: Synthetic oligonucleotide
auaagagaaugcccgucca

SEQ ID NO: 3125621 - RNA, 19 nt, Artificial Sequence
  Description of Artificial Sequence: Synthetic oligonucleotide
aauucacauggaaaucgcu

SEQ ID NO: 3125622 - RNA, 19 nt, Artificial Sequence
  Description of Artificial Sequence: Synthetic oligonucleotide
ggucagaaaaucucaucag

SEQ ID NO: 3125623 - RNA, 19 nt, Artificial Sequence
  Description of Artificial Sequence: Synthetic oligonucleotide
ucuggccucugacaaucag

SEQ ID NO: 3125624 - RNA, 19 nt, Artificial Sequence
  Description of Artificial Sequence: Synthetic oligonucleotide
cuucucaguguucacacca

SEQ ID NO: 3125625 - RNA, 19 nt, Artificial Sequence
  Description of Artificial Sequence: Synthetic oligonucleotide
gaaaaucucaucagcucuc

SEQ ID NO: 3125626 - RNA, 19 nt, Artificial Sequence
  Description of Artificial Sequence: Synthetic oligonucleotide
auccaaguuaacccgucca

SEQ ID NO: 3125627 - RNA, 19 nt, Artificial Sequence
  Description of Artificial Sequence: Synthetic oligonucleotide
uuccagcugauccaaguua

SEQ ID NO: 3125628 - RNA, 19 nt, Artificial Sequence
  Description of Artificial Sequence: Synthetic oligonucleotide
uaauaagagaaugcccguc

SEQ ID NO: 3125629 - RNA, 19 nt, Artificial Sequence
  Description of Artificial Sequence: Synthetic oligonucleotide
accaucuggccucugacaa

SEQ ID NO: 3125630 - RNA, 19 nt, Artificial Sequence
  Description of Artificial Sequence: Synthetic oligonucleotide
uuaacccguccaaccaucu

SEQ ID NO: 3125631 - RNA, 19 nt, Artificial Sequence
  Description of Artificial Sequence: Synthetic oligonucleotide
uguucacaccagccccucg

SEQ ID NO: 3125632 - RNA, 19 nt, Artificial Sequence
  Description of Artificial Sequence: Synthetic oligonucleotide
cagcugauccaaguuaacc

SEQ ID NO: 3125633 - RNA, 19 nt, Artificial Sequence
  Description of Artificial Sequence: Synthetic oligonucleotide
ugauccaaguuaacccguc

SEQ ID NO: 3125634 - RNA, 19 nt, Artificial Sequence
  Description of Artificial Sequence: Synthetic oligonucleotide
aguuaacccguccaaccau

SEQ ID NO: 3125635 - RNA, 19 nt, Artificial Sequence
  Description of Artificial Sequence: Synthetic oligonucleotide
cuuugcugcucauuucguc

SEQ ID NO: 3125636 - RNA, 19 nt, Artificial Sequence
  Description of Artificial Sequence: Synthetic oligonucleotide
ucggucagaaaaucucauc

SEQ ID NO: 3125637 - RNA, 19 nt, Artificial Sequence
  Description of Artificial Sequence: Synthetic oligonucleotide
ugcccguccacagaauuca

SEQ ID NO: 3125638 - RNA, 19 nt, Artificial Sequence
  Description of Artificial Sequence: Synthetic oligonucleotide
ucuugucuucagcuuugcu

SEQ ID NO: 3125639 - RNA, 19 nt, Artificial Sequence
  Description of Artificial Sequence: Synthetic oligonucleotide
aaaucgcuucucaguguuc

SEQ ID NO: 3125640 - RNA, 19 nt, Artificial Sequence
  Description of Artificial Sequence: Synthetic oligonucleotide
aucgcugcuggaacucucc

SEQ ID NO: 3125641 - RNA, 19 nt, Artificial Sequence
  Description of Artificial Sequence: Synthetic oligonucleotide
aucgcuucucaguguucac

SEQ ID NO: 3125642 - RNA, 19 nt, Artificial Sequence
  Description of Artificial Sequence: Synthetic oligonucleotide
auucacauggaaaucgcuu

SEQ ID NO: 3125643 - RNA, 19 nt, Artificial Sequence
  Description of Artificial Sequence: Synthetic oligonucleotide
aucaucgcugcuggaacuc

SEQ ID NO: 3125644 - RNA, 19 nt, Artificial Sequence
  Description of Artificial Sequence: Synthetic oligonucleotide
uccuuguccucaucaucgc

SEQ ID NO: 3125645 - RNA, 19 nt, Artificial Sequence
  Description of Artificial Sequence: Synthetic oligonucleotide
uaacccguccaaccaucug

SEQ ID NO: 3125646 - RNA, 19 nt, Artificial Sequence
  Description of Artificial Sequence: Synthetic oligonucleotide
gcucauuucgucauccuug

SEQ ID NO: 3125647 - RNA, 19 nt, Artificial Sequence
  Description of Artificial Sequence: Synthetic oligonucleotide
cauccuuguccucaucauc

SEQ ID NO: 3125648 - RNA, 19 nt, Artificial Sequence
  Description of Artificial Sequence: Synthetic oligonucleotide
caaccaucuggccucugac

SEQ ID NO: 3125649 - RNA, 19 nt, Artificial Sequence
  Description of Artificial Sequence: Synthetic oligonucleotide
cagaauucacauggaaauc

SEQ ID NO: 3125650 - RNA, 19 nt, Artificial Sequence
  Description of Artificial Sequence: Synthetic oligonucleotide
acccguccaaccaucuggc

SEQ ID NO: 3125651 - RNA, 19 nt, Artificial Sequence
  Description of Artificial Sequence: Synthetic oligonucleotide
aaaucucaucagcucucuu

SEQ ID NO: 3125652 - RNA, 19 nt, Artificial Sequence
  Description of Artificial Sequence: Synthetic oligonucleotide
uggaacucuccaucuuuuc

SEQ ID NO: 3125653 - RNA, 19 nt, Artificial Sequence
  Description of Artificial Sequence: Synthetic oligonucleotide
gaaaucgcuucucaguguu

SEQ ID NO: 3125654 - RNA, 19 nt, Artificial Sequence
  Description of Artificial Sequence: Synthetic oligonucleotide
uucacaccagccccucggu

SEQ ID NO: 3125655 - RNA, 19 nt, Artificial Sequence
  Description of Artificial Sequence: Synthetic oligonucleotide
caucuuuuccuucaucugu

SEQ ID NO: 3125656 - RNA, 19 nt, Artificial Sequence
  Description of Artificial Sequence: Synthetic oligonucleotide
caucuggccucugacaauc

SEQ ID NO: 3125657 - RNA, 19 nt, Artificial Sequence
  Description of Artificial Sequence: Synthetic oligonucleotide
ucgcuucucaguguucaca

SEQ ID NO: 3125658 - RNA, 19 nt, Artificial Sequence
  Description of Artificial Sequence: Synthetic oligonucleotide
uugcugcucauuucgucau

SEQ ID NO: 3125659 - RNA, 19 nt, Artificial Sequence
  Description of Artificial Sequence: Synthetic oligonucleotide
gagaaugcccguccacaga

SEQ ID NO: 3125660 - RNA, 19 nt, Artificial Sequence
  Description of Artificial Sequence: Synthetic oligonucleotide
gcugcuggaacucuccauc

SEQ ID NO: 3125661 - RNA, 19 nt, Artificial Sequence
  Description of Artificial Sequence: Synthetic oligonucleotide
uucaucuguuccagcugau

SEQ ID NO: 3125662 - RNA, 19 nt, Artificial Sequence
  Description of Artificial Sequence: Synthetic oligonucleotide
guuaacccguccaaccauc

SEQ ID NO: 3125663 - RNA, 19 nt, Artificial Sequence
  Description of Artificial Sequence: Synthetic oligonucleotide
ugucuucagcuuugcugcu

SEQ ID NO: 3125664 - RNA, 19 nt, Artificial Sequence
  Description of Artificial Sequence: Synthetic oligonucleotide
augcccguccacagaauuc

SEQ ID NO: 3125665 - RNA, 19 nt, Artificial Sequence
  Description of Artificial Sequence: Synthetic oligonucleotide
ucucaucagcucucuuguc

SEQ ID NO: 3125666 - RNA, 19 nt, Artificial Sequence
  Description of Artificial Sequence: Synthetic oligonucleotide
aguguucacaccagccccu

SEQ ID NO: 3125667 - RNA, 19 nt, Artificial Sequence
  Description of Artificial Sequence: Synthetic oligonucleotide
ucauuucgucauccuuguc

SEQ ID NO: 3125668 - RNA, 19 nt, Artificial Sequence
  Description of Artificial Sequence: Synthetic oligonucleotide
ucacaccagccccucgguc

SEQ ID NO: 3125669 - RNA, 19 nt, Artificial Sequence
  Description of Artificial Sequence: Synthetic oligonucleotide
ugcuggaacucuccaucuu

SEQ ID NO: 3125670 - RNA, 19 nt, Artificial Sequence
  Description of Artificial Sequence: Synthetic oligonucleotide
cagcucucuugucuucagc

SEQ ID NO: 3125671 - RNA, 19 nt, Artificial Sequence
  Description of Artificial Sequence: Synthetic oligonucleotide
cacauggaaaucgcuucuc

SEQ ID NO: 3125672 - RNA, 19 nt, Artificial Sequence
  Description of Artificial Sequence: Synthetic oligonucleotide
ugcugcucauuucgucauc

SEQ ID NO: 3125673 - RNA, 19 nt, Artificial Sequence
  Description of Artificial Sequence: Synthetic oligonucleotide
cccucggucagaaaaucuc

SEQ ID NO: 3125674 - RNA, 19 nt, Artificial Sequence
  Description of Artificial Sequence: Synthetic oligonucleotide
cagcuuugcugcucauuuc

SEQ ID NO: 3125675 - RNA, 19 nt, Artificial Sequence
  Description of Artificial Sequence: Synthetic oligonucleotide
uucagcuuugcugcucauu

SEQ ID NO: 3125676 - RNA, 19 nt, Artificial Sequence
  Description of Artificial Sequence: Synthetic oligonucleotide
cggucagaaaaucucauca

SEQ ID NO: 3125677 - RNA, 19 nt, Artificial Sequence
  Description of Artificial Sequence: Synthetic oligonucleotide
cucuugucuucagcuuugc

SEQ ID NO: 3125678 - RNA, 19 nt, Artificial Sequence
  Description of Artificial Sequence: Synthetic oligonucleotide
cuguuccagcugauccaag

SEQ ID NO: 3125679 - RNA, 19 nt, Artificial Sequence
  Description of Artificial Sequence: Synthetic oligonucleotide
cagccccucggucagaaaa

SEQ ID NO: 3125680 - RNA, 19 nt, Artificial Sequence
  Description of Artificial Sequence: Synthetic oligonucleotide
ccaaguuaacccguccaac

SEQ ID NO: 3125681 - RNA, 19 nt, Artificial Sequence
  Description of Artificial Sequence: Synthetic oligonucleotide
cugauccaaguuaacccgu

SEQ ID NO: 3125682 - RNA, 19 nt, Artificial Sequence
  Description of Artificial Sequence: Synthetic oligonucleotide
ccucggucagaaaaucuca

SEQ ID NO: 3125683 - RNA, 19 nt, Artificial Sequence
  Description of Artificial Sequence: Synthetic oligonucleotide
caucaucgcugcuggaacu

SEQ ID NO: 3125684 - RNA, 19 nt, Artificial Sequence
  Description of Artificial Sequence: Synthetic oligonucleotide
cucucuugucuucagcuuu

SEQ ID NO: 3125685 - RNA, 19 nt, Artificial Sequence
  Description of Artificial Sequence: Synthetic oligonucleotide
guuccagcugauccaaguu

SEQ ID NO: 3125686 - RNA, 19 nt, Artificial Sequence
  Description of Artificial Sequence: Synthetic oligonucleotide
cucggucagaaaaucucau

SEQ ID NO: 3125687 - RNA, 19 nt, Artificial Sequence
  Description of Artificial Sequence: Synthetic oligonucleotide
ggaaaucgcuucucagugu

SEQ ID NO: 3125688 - RNA, 19 nt, Artificial Sequence
  Description of Artificial Sequence: Synthetic oligonucleotide
cugcuggaacucuccaucu

SEQ ID NO: 3125689 - RNA, 19 nt, Artificial Sequence
  Description of Artificial Sequence: Synthetic oligonucleotide
agccccucggucagaaaau

SEQ ID NO: 3125690 - RNA, 19 nt, Artificial Sequence
  Description of Artificial Sequence: Synthetic oligonucleotide
ccacagaauucacauggaa

SEQ ID NO: 3125691 - RNA, 19 nt, Artificial Sequence
  Description of Artificial Sequence: Synthetic oligonucleotide
cuggaacucuccaucuuuu

SEQ ID NO: 3125692 - RNA, 19 nt, Artificial Sequence
  Description of Artificial Sequence: Synthetic oligonucleotide
guguucacaccagccccuc

SEQ ID NO: 3125693 - RNA, 19 nt, Artificial Sequence
  Description of Artificial Sequence: Synthetic oligonucleotide
cguccacagaauucacaug

SEQ ID NO: 3125694 - RNA, 19 nt, Artificial Sequence
  Description of Artificial Sequence: Synthetic oligonucleotide
gcuggaacucuccaucuuu

SEQ ID NO: 3125695 - RNA, 19 nt, Artificial Sequence
  Description of Artificial Sequence: Synthetic oligonucleotide
ccaaccaucuggccucuga

SEQ ID NO: 3125696 - RNA, 19 nt, Artificial Sequence
  Description of Artificial Sequence: Synthetic oligonucleotide
accagccccucggucagaa

SEQ ID NO: 3125697 - RNA, 19 nt, Artificial Sequence
  Description of Artificial Sequence: Synthetic oligonucleotide
aucuggccucugacaauca

SEQ ID NO: 3125698 - RNA, 19 nt, Artificial Sequence
  Description of Artificial Sequence: Synthetic oligonucleotide
uccaaccaucuggccucug

SEQ ID NO: 3125699 - RNA, 19 nt, Artificial Sequence
  Description of Artificial Sequence: Synthetic oligonucleotide
ccguccacagaauucacau

SEQ ID NO: 3125700 - RNA, 19 nt, Artificial Sequence
  Description of Artificial Sequence: Synthetic oligonucleotide
cccguccaaccaucuggcc

SEQ ID NO: 3125701 - RNA, 19 nt, Artificial Sequence
  Description of Artificial Sequence: Synthetic oligonucleotide
ccguccaaccaucuggccu

SEQ ID NO: 3125702 - RNA, 19 nt, Artificial Sequence
  Description of Artificial Sequence: Synthetic oligonucleotide
gaaugcccguccacagaau

SEQ ID NO: 3125703 - RNA, 19 nt, Artificial Sequence
  Description of Artificial Sequence: Synthetic oligonucleotide
gcucucuugucuucagcuu

SEQ ID NO: 3125704 - RNA, 19 nt, Artificial Sequence
  Description of Artificial Sequence: Synthetic oligonucleotide
gccccucggucagaaaauc

SEQ ID NO: 3125705 - RNA, 19 nt, Artificial Sequence
  Description of Artificial Sequence: Synthetic oligonucleotide
gcuuugcugcucauuucgu

SEQ ID NO: 3125706 - RNA, 19 nt, Artificial Sequence
  Description of Artificial Sequence: Synthetic oligonucleotide
ggccucugacaaucaggcu

SEQ ID NO: 3125707 - RNA, 19 nt, Artificial Sequence
  Description of Artificial Sequence: Synthetic oligonucleotide
cuucagcuuugcugcucau

SEQ ID NO: 3125708 - RNA, 19 nt, Artificial Sequence
  Description of Artificial Sequence: Synthetic oligonucleotide
ccuuguccucaucaucgcu

SEQ ID NO: 3125709 - RNA, 19 nt, Artificial Sequence
  Description of Artificial Sequence: Synthetic oligonucleotide
ccucaucaucgcugcugga

SEQ ID NO: 3125710 - RNA, 19 nt, Artificial Sequence
  Description of Artificial Sequence: Synthetic oligonucleotide
ccccucggucagaaaaucu

SEQ ID NO: 3125711 - RNA, 19 nt, Artificial Sequence
  Description of Artificial Sequence: Synthetic oligonucleotide
guccaaccaucuggccucu

SEQ ID NO: 3125712 - RNA, 19 nt, Artificial Sequence
  Description of Artificial Sequence: Synthetic oligonucleotide
ccaucuggccucugacaau

SEQ ID NO: 3125713 - RNA, 19 nt, Artificial Sequence
  Description of Artificial Sequence: Synthetic oligonucleotide
caccagccccucggucaga

SEQ ID NO: 3125714 - RNA, 19 nt, Artificial Sequence
  Description of Artificial Sequence: Synthetic oligonucleotide
cgcugcuggaacucuccau

SEQ ID NO: 3125715 - RNA, 19 nt, Artificial Sequence
  Description of Artificial Sequence: Synthetic oligonucleotide
ccagccccucggucagaaa

SEQ ID NO: 3125716 - RNA, 19 nt, Artificial Sequence
  Description of Artificial Sequence: Synthetic oligonucleotide
  modified_base (1)..(1): a, c, u, g, unknown or other
nuuuaauaagagaaugccc

SEQ ID NO: 3125717 - RNA, 19 nt, Artificial Sequence
  Description of Artificial Sequence: Synthetic oligonucleotide
uauauauauauauauaaac

SEQ ID NO: 3125718 - RNA, 19 nt, Artificial Sequence
  Description of Artificial Sequence: Synthetic oligonucleotide
uauauauauauauauauaa

SEQ ID NO: 3125719 - RNA, 19 nt, Artificial Sequence
  Description of Artificial Sequence: Synthetic oligonucleotide
uauauauauauaaacauau

SEQ ID NO: 3125720 - RNA, 19 nt, Artificial Sequence
  Description of Artificial Sequence: Synthetic oligonucleotide
auacaaaauaaugagaacg

SEQ ID NO: 3125721 - RNA, 19 nt, Artificial Sequence
  Description of Artificial Sequence: Synthetic oligonucleotide
aauacaaaauaaugagaac

SEQ ID NO: 3125722 - RNA, 19 nt, Artificial Sequence
  Description of Artificial Sequence: Synthetic oligonucleotide
aagcuuuucccaaagaucc

SEQ ID NO: 3125723 - RNA, 19 nt, Artificial Sequence
  Description of Artificial Sequence: Synthetic oligonucleotide
uauauauauauauaaacau

SEQ ID NO: 3125724 - RNA, 19 nt, Artificial Sequence
  Description of Artificial Sequence: Synthetic oligonucleotide
auauauuucuguuaguuug

SEQ ID NO: 3125725 - RNA, 19 nt, Artificial Sequence
  Description of Artificial Sequence: Synthetic oligonucleotide
aaagaucaaacacuccacg

SEQ ID NO: 3125726 - RNA, 19 nt, Artificial Sequence
  Description of Artificial Sequence: Synthetic oligonucleotide
uauaucaugugucuuuagg

SEQ ID NO: 3125727 - RNA, 19 nt, Artificial Sequence
  Description of Artificial Sequence: Synthetic oligonucleotide
acauauauauuucuguuag

SEQ ID NO: 3125728 - RNA, 19 nt, Artificial Sequence
  Description of Artificial Sequence: Synthetic oligonucleotide
auuucuguuaguuugccag

SEQ ID NO: 3125729 - RNA, 19 nt, Artificial Sequence
  Description of Artificial Sequence: Synthetic oligonucleotide
aaugcagucauugggaguc

SEQ ID NO: 3125730 - RNA, 19 nt, Artificial Sequence
  Description of Artificial Sequence: Synthetic oligonucleotide
aagaucaaacacuccacgg

SEQ ID NO: 3125731 - RNA, 19 nt, Artificial Sequence
  Description of Artificial Sequence: Synthetic oligonucleotide
ucaugugucuuuaggaccg

SEQ ID NO: 3125732 - RNA, 19 nt, Artificial Sequence
  Description of Artificial Sequence: Synthetic oligonucleotide
uaaacauauauauuucugu

SEQ ID NO: 3125733 - RNA, 19 nt, Artificial Sequence
  Description of Artificial Sequence: Synthetic oligonucleotide
aucaugugucuuuaggacc

SEQ ID NO: 3125734 - RNA, 19 nt, Artificial Sequence
  Description of Artificial Sequence: Synthetic oligonucleotide
auauauauauauauaaaca

SEQ ID NO: 3125735 - RNA, 19 nt, Artificial Sequence
  Description of Artificial Sequence: Synthetic oligonucleotide
agaucaaacacuccacggg

SEQ ID NO: 3125736 - RNA, 19 nt, Artificial Sequence
  Description of Artificial Sequence: Synthetic oligonucleotide
ugauuaugaagcuuuuccc

SEQ ID NO: 3125737 - RNA, 19 nt, Artificial Sequence
  Description of Artificial Sequence: Synthetic oligonucleotide
aaacauauauauuucuguu

SEQ ID NO: 3125738 - RNA, 19 nt, Artificial Sequence
  Description of Artificial Sequence: Synthetic oligonucleotide
uauauuucuguuaguuugc

SEQ ID NO: 3125739 - RNA, 19 nt, Artificial Sequence
  Description of Artificial Sequence: Synthetic oligonucleotide
uaugugauuaugaagcuuu

SEQ ID NO: 3125740 - RNA, 19 nt, Artificial Sequence
  Description of Artificial Sequence: Synthetic oligonucleotide
uuuucccaaagauccaggg

SEQ ID NO: 3125741 - RNA, 19 nt, Artificial Sequence
  Description of Artificial Sequence: Synthetic oligonucleotide
gauuaugaagcuuuuccca

SEQ ID NO: 3125742 - RNA, 19 nt, Artificial Sequence
  Description of Artificial Sequence: Synthetic oligonucleotide
aacauauauauuucuguua

SEQ ID NO: 3125743 - RNA, 19 nt, Artificial Sequence
  Description of Artificial Sequence: Synthetic oligonucleotide
auaucaugugucuuuagga

SEQ ID NO: 3125744 - RNA, 19 nt, Artificial Sequence
  Description of Artificial Sequence: Synthetic oligonucleotide
uaugaagcuuuucccaaag

SEQ ID NO: 3125745 - RNA, 19 nt, Artificial Sequence
  Description of Artificial Sequence: Synthetic oligonucleotide
agucauugggagucgaggg

SEQ ID NO: 3125746 - RNA, 19 nt, Artificial Sequence
  Description of Artificial Sequence: Synthetic oligonucleotide
uaucaugugucuuuaggac

SEQ ID NO: 3125747 - RNA, 19 nt, Artificial Sequence
  Description of Artificial Sequence: Synthetic oligonucleotide
uucccaaagauccagggau

SEQ ID NO: 3125748 - RNA, 19 nt, Artificial Sequence
  Description of Artificial Sequence: Synthetic oligonucleotide
uguccuuauaucauguguc

SEQ ID NO: 3125749 - RNA, 19 nt, Artificial Sequence
  Description of Artificial Sequence: Synthetic oligonucleotide
agagguguguccuuauauc

SEQ ID NO: 3125750 - RNA, 19 nt, Artificial Sequence
  Description of Artificial Sequence: Synthetic oligonucleotide
uuucuguuaguuugccagg

SEQ ID NO: 3125751 - RNA, 19 nt, Artificial Sequence
  Description of Artificial Sequence: Synthetic oligonucleotide
auaaacauauauauuucug

SEQ ID NO: 3125752 - RNA, 19 nt, Artificial Sequence
  Description of Artificial Sequence: Synthetic oligonucleotide
ucaaacacuccacgggucc

SEQ ID NO: 3125753 - RNA, 19 nt, Artificial Sequence
  Description of Artificial Sequence: Synthetic oligonucleotide
uguuaguuugccagggaca

SEQ ID NO: 3125754 - RNA, 19 nt, Artificial Sequence
  Description of Artificial Sequence: Synthetic oligonucleotide
ccguaugugauuaugaagc

SEQ ID NO: 3125755 - RNA, 19 nt, Artificial Sequence
  Description of Artificial Sequence: Synthetic oligonucleotide
uggccaaagaucaaacacu

SEQ ID NO: 3125756 - RNA, 19 nt, Artificial Sequence
  Description of Artificial Sequence: Synthetic oligonucleotide
ugucuuuaggaccguaugu

SEQ ID NO: 3125757 - RNA, 19 nt, Artificial Sequence
  Description of Artificial Sequence: Synthetic oligonucleotide
cuggccaaagaucaaacac

SEQ ID NO: 3125758 - RNA, 19 nt, Artificial Sequence
  Description of Artificial Sequence: Synthetic oligonucleotide
uauauauuucuguuaguuu

SEQ ID NO: 3125759 - RNA, 19 nt, Artificial Sequence
  Description of Artificial Sequence: Synthetic oligonucleotide
aagagguguguccuuauau

SEQ ID NO: 3125760 - RNA, 19 nt, Artificial Sequence
  Description of Artificial Sequence: Synthetic oligonucleotide
auauauauuucuguuaguu

SEQ ID NO: 3125761 - RNA, 19 nt, Artificial Sequence
  Description of Artificial Sequence: Synthetic oligonucleotide
accguaugugauuaugaag

SEQ ID NO: 3125762 - RNA, 19 nt, Artificial Sequence
  Description of Artificial Sequence: Synthetic oligonucleotide
ugacgagugcucaauaaaa

SEQ ID NO: 3125763 - RNA, 19 nt, Artificial Sequence
  Description of Artificial Sequence: Synthetic oligonucleotide
auuaugaagcuuuucccaa

SEQ ID NO: 3125764 - RNA, 19 nt, Artificial Sequence
  Description of Artificial Sequence: Synthetic oligonucleotide
auauuucuguuaguuugcc

SEQ ID NO: 3125765 - RNA, 19 nt, Artificial Sequence
  Description of Artificial Sequence: Synthetic oligonucleotide
caaagaucaaacacuccac

SEQ ID NO: 3125766 - RNA, 19 nt, Artificial Sequence
  Description of Artificial Sequence: Synthetic oligonucleotide
ucuuuaggaccguauguga

SEQ ID NO: 3125767 - RNA, 19 nt, Artificial Sequence
  Description of Artificial Sequence: Synthetic oligonucleotide
aaagauccagggaugggag

SEQ ID NO: 3125768 - RNA, 19 nt, Artificial Sequence
  Description of Artificial Sequence: Synthetic oligonucleotide
auauauauauauauauaaa

SEQ ID NO: 3125769 - RNA, 19 nt, Artificial Sequence
  Description of Artificial Sequence: Synthetic oligonucleotide
guaaugcagucauugggag

SEQ ID NO: 3125770 - RNA, 19 nt, Artificial Sequence
  Description of Artificial Sequence: Synthetic oligonucleotide
uggguaaugcagucauugg

SEQ ID NO: 3125771 - RNA, 19 nt, Artificial Sequence
  Description of Artificial Sequence: Synthetic oligonucleotide
auauauauauauaaacaua

SEQ ID NO: 3125772 - RNA, 19 nt, Artificial Sequence
  Description of Artificial Sequence: Synthetic oligonucleotide
uuucccaaagauccaggga

SEQ ID NO: 3125773 - RNA, 19 nt, Artificial Sequence
  Description of Artificial Sequence: Synthetic oligonucleotide
uucuguuaguuugccaggg

SEQ ID NO: 3125774 - RNA, 19 nt, Artificial Sequence
  Description of Artificial Sequence: Synthetic oligonucleotide
aaacacuccacgggucccc

SEQ ID NO: 3125775 - RNA, 19 nt, Artificial Sequence
  Description of Artificial Sequence: Synthetic oligonucleotide
gagguguguccuuauauca

SEQ ID NO: 3125776 - RNA, 19 nt, Artificial Sequence
  Description of Artificial Sequence: Synthetic oligonucleotide
ggguaaugcagucauuggg

SEQ ID NO: 3125777 - RNA, 19 nt, Artificial Sequence
  Description of Artificial Sequence: Synthetic oligonucleotide
cuuuucccaaagauccagg

SEQ ID NO: 3125778 - RNA, 19 nt, Artificial Sequence
  Description of Artificial Sequence: Synthetic oligonucleotide
uuauaucaugugucuuuag

SEQ ID NO: 3125779 - RNA, 19 nt, Artificial Sequence
  Description of Artificial Sequence: Synthetic oligonucleotide
auauauauauauauauaua

SEQ ID NO: 3125780 - RNA, 19 nt, Artificial Sequence
  Description of Artificial Sequence: Synthetic oligonucleotide
uaguuugccagggacagac

SEQ ID NO: 3125781 - RNA, 19 nt, Artificial Sequence
  Description of Artificial Sequence: Synthetic oligonucleotide
gucauugggagucgagggg

SEQ ID NO: 3125782 - RNA, 19 nt, Artificial Sequence
  Description of Artificial Sequence: Synthetic oligonucleotide
guuugccagggacagacug

SEQ ID NO: 3125783 - RNA, 19 nt, Artificial Sequence
  Description of Artificial Sequence: Synthetic oligonucleotide
uauuucuguuaguuugcca

SEQ ID NO: 3125784 - RNA, 19 nt, Artificial Sequence
  Description of Artificial Sequence: Synthetic oligonucleotide
uccacggguccccaagagg

SEQ ID NO: 3125785 - RNA, 19 nt, Artificial Sequence
  Description of Artificial Sequence: Synthetic oligonucleotide
cuguuaguuugccagggac

SEQ ID NO: 3125786 - RNA, 19 nt, Artificial Sequence
  Description of Artificial Sequence: Synthetic oligonucleotide
guggguaaugcagucauug

SEQ ID NO: 3125787 - RNA, 19 nt, Artificial Sequence
  Description of Artificial Sequence: Synthetic oligonucleotide
ugugucuuuaggaccguau

SEQ ID NO: 3125788 - RNA, 19 nt, Artificial Sequence
  Description of Artificial Sequence: Synthetic oligonucleotide
uguguccuuauaucaugug

SEQ ID NO: 3125789 - RNA, 19 nt, Artificial Sequence
  Description of Artificial Sequence: Synthetic oligonucleotide
uuaugaagcuuuucccaaa

SEQ ID NO: 3125790 - RNA, 19 nt, Artificial Sequence
  Description of Artificial Sequence: Synthetic oligonucleotide
gucuuuaggaccguaugug

SEQ ID NO: 3125791 - RNA, 19 nt, Artificial Sequence
  Description of Artificial Sequence: Synthetic oligonucleotide
uuuaggaccguaugugauu

SEQ ID NO: 3125792 - RNA, 19 nt, Artificial Sequence
  Description of Artificial Sequence: Synthetic oligonucleotide
gugucuuuaggaccguaug

SEQ ID NO: 3125793 - RNA, 19 nt, Artificial Sequence
  Description of Artificial Sequence: Synthetic oligonucleotide
ucccaaagauccagggaug

SEQ ID NO: 3125794 - RNA, 19 nt, Artificial Sequence
  Description of Artificial Sequence: Synthetic oligonucleotide
ucuguuaguuugccaggga

SEQ ID NO: 3125795 - RNA, 19 nt, Artificial Sequence
  Description of Artificial Sequence: Synthetic oligonucleotide
augacgagugcucaauaaa

SEQ ID NO: 3125796 - RNA, 19 nt, Artificial Sequence
  Description of Artificial Sequence: Synthetic oligonucleotide
gaucaaacacuccacgggu

SEQ ID NO: 3125797 - RNA, 19 nt, Artificial Sequence
  Description of Artificial Sequence: Synthetic oligonucleotide
uaaugcagucauugggagu

SEQ ID NO: 3125798 - RNA, 19 nt, Artificial Sequence
  Description of Artificial Sequence: Synthetic oligonucleotide
acuggccaaagaucaaaca

SEQ ID NO: 3125799 - RNA, 19 nt, Artificial Sequence
  Description of Artificial Sequence: Synthetic oligonucleotide
gagugcucaauaaaauaca

SEQ ID NO: 3125800 - RNA, 19 nt, Artificial Sequence
  Description of Artificial Sequence: Synthetic oligonucleotide
aagauccagggaugggagu

SEQ ID NO: 3125801 - RNA, 19 nt, Artificial Sequence
  Description of Artificial Sequence: Synthetic oligonucleotide
cagucauugggagucgagg

SEQ ID NO: 3125802 - RNA, 19 nt, Artificial Sequence
  Description of Artificial Sequence: Synthetic oligonucleotide
acgagugcucaauaaaaua

SEQ ID NO: 3125803 - RNA, 19 nt, Artificial Sequence
  Description of Artificial Sequence: Synthetic oligonucleotide
aacaugacgagugcucaau

SEQ ID NO: 3125804 - RNA, 19 nt, Artificial Sequence
  Description of Artificial Sequence: Synthetic oligonucleotide
agauccagggaugggagug

SEQ ID NO: 3125805 - RNA, 19 nt, Artificial Sequence
  Description of Artificial Sequence: Synthetic oligonucleotide
ccaaagaucaaacacucca

SEQ ID NO: 3125806 - RNA, 19 nt, Artificial Sequence
  Description of Artificial Sequence: Synthetic oligonucleotide
uuaggaccguaugugauua

SEQ ID NO: 3125807 - RNA, 19 nt, Artificial Sequence
  Description of Artificial Sequence: Synthetic oligonucleotide
ugugauuaugaagcuuuuc

SEQ ID NO: 3125808 - RNA, 19 nt, Artificial Sequence
  Description of Artificial Sequence: Synthetic oligonucleotide
cgagugcucaauaaaauac

SEQ ID NO: 3125809 - RNA, 19 nt, Artificial Sequence
  Description of Artificial Sequence: Synthetic oligonucleotide
gguguguccuuauaucaug

SEQ ID NO: 3125810 - RNA, 19 nt, Artificial Sequence
  Description of Artificial Sequence: Synthetic oligonucleotide
ugggcguggguaaugcagu

SEQ ID NO: 3125811 - RNA, 19 nt, Artificial Sequence
  Description of Artificial Sequence: Synthetic oligonucleotide
gaccguaugugauuaugaa

SEQ ID NO: 3125812 - RNA, 19 nt, Artificial Sequence
  Description of Artificial Sequence: Synthetic oligonucleotide
gguaaugcagucauuggga

SEQ ID NO: 3125813 - RNA, 19 nt, Artificial Sequence
  Description of Artificial Sequence: Synthetic oligonucleotide
agugcucaauaaaauacaa

SEQ ID NO: 3125814 - RNA, 19 nt, Artificial Sequence
  Description of Artificial Sequence: Synthetic oligonucleotide
aucaaacacuccacggguc

SEQ ID NO: 3125815 - RNA, 19 nt, Artificial Sequence
  Description of Artificial Sequence: Synthetic oligonucleotide
gauccagggaugggagugg

SEQ ID NO: 3125816 - RNA, 19 nt, Artificial Sequence
  Description of Artificial Sequence: Synthetic oligonucleotide
gugggcguggguaaugcag

SEQ ID NO: 3125817 - RNA, 19 nt, Artificial Sequence
  Description of Artificial Sequence: Synthetic oligonucleotide
guccccaagaggugugucc

SEQ ID NO: 3125818 - RNA, 19 nt, Artificial Sequence
  Description of Artificial Sequence: Synthetic oligonucleotide
gacuggccaaagaucaaac

SEQ ID NO: 3125819 - RNA, 19 nt, Artificial Sequence
  Description of Artificial Sequence: Synthetic oligonucleotide
aggaccguaugugauuaug

SEQ ID NO: 3125820 - RNA, 19 nt, Artificial Sequence
  Description of Artificial Sequence: Synthetic oligonucleotide
caugacgagugcucaauaa

SEQ ID NO: 3125821 - RNA, 19 nt, Artificial Sequence
  Description of Artificial Sequence: Synthetic oligonucleotide
guguccuuauaucaugugu

SEQ ID NO: 3125822 - RNA, 19 nt, Artificial Sequence
  Description of Artificial Sequence: Synthetic oligonucleotide
uccccaagagguguguccu

SEQ ID NO: 3125823 - RNA, 19 nt, Artificial Sequence
  Description of Artificial Sequence: Synthetic oligonucleotide
caaacacuccacggguccc

SEQ ID NO: 3125824 - RNA, 19 nt, Artificial Sequence
  Description of Artificial Sequence: Synthetic oligonucleotide
guccuuauaucaugugucu

SEQ ID NO: 3125825 - RNA, 19 nt, Artificial Sequence
  Description of Artificial Sequence: Synthetic oligonucleotide
agacuggccaaagaucaaa

SEQ ID NO: 3125826 - RNA, 19 nt, Artificial Sequence
  Description of Artificial Sequence: Synthetic oligonucleotide
gaacaugacgagugcucaa

SEQ ID NO: 3125827 - RNA, 19 nt, Artificial Sequence
  Description of Artificial Sequence: Synthetic oligonucleotide
uccuuauaucaugugucuu

SEQ ID NO: 3125828 - RNA, 19 nt, Artificial Sequence
  Description of Artificial Sequence: Synthetic oligonucleotide
gagugggcguggguaaugc

SEQ ID NO: 3125829 - RNA, 19 nt, Artificial Sequence
  Description of Artificial Sequence: Synthetic oligonucleotide
cacuccacggguccccaag

SEQ ID NO: 3125830 - RNA, 19 nt, Artificial Sequence
  Description of Artificial Sequence: Synthetic oligonucleotide
ugggagugggcguggguaa

SEQ ID NO: 3125831 - RNA, 19 nt, Artificial Sequence
  Description of Artificial Sequence: Synthetic oligonucleotide
acaugacgagugcucaaua

SEQ ID NO: 3125832 - RNA, 19 nt, Artificial Sequence
  Description of Artificial Sequence: Synthetic oligonucleotide
uccagggaugggagugggc

SEQ ID NO: 3125833 - RNA, 19 nt, Artificial Sequence
  Description of Artificial Sequence: Synthetic oligonucleotide
ggccaaagaucaaacacuc

SEQ ID NO: 3125834 - RNA, 19 nt, Artificial Sequence
  Description of Artificial Sequence: Synthetic oligonucleotide
uuaguuugccagggacaga

SEQ ID NO: 3125835 - RNA, 19 nt, Artificial Sequence
  Description of Artificial Sequence: Synthetic oligonucleotide
cauauauauuucuguuagu

SEQ ID NO: 3125836 - RNA, 19 nt, Artificial Sequence
  Description of Artificial Sequence: Synthetic oligonucleotide
auccagggaugggaguggg

SEQ ID NO: 3125837 - RNA, 19 nt, Artificial Sequence
  Description of Artificial Sequence: Synthetic oligonucleotide
cuuuaggaccguaugugau

SEQ ID NO: 3125838 - RNA, 19 nt, Artificial Sequence
  Description of Artificial Sequence: Synthetic oligonucleotide
acuccacggguccccaaga

SEQ ID NO: 3125839 - RNA, 19 nt, Artificial Sequence
  Description of Artificial Sequence: Synthetic oligonucleotide
cuccacggguccccaagag

SEQ ID NO: 3125840 - RNA, 19 nt, Artificial Sequence
  Description of Artificial Sequence: Synthetic oligonucleotide
ggaacaugacgagugcuca

SEQ ID NO: 3125841 - RNA, 19 nt, Artificial Sequence
  Description of Artificial Sequence: Synthetic oligonucleotide
gugcucaauaaaauacaaa

SEQ ID NO: 3125842 - RNA, 19 nt, Artificial Sequence
  Description of Artificial Sequence: Synthetic oligonucleotide
agugggcguggguaaugca

SEQ ID NO: 3125843 - RNA, 19 nt, Artificial Sequence
  Description of Artificial Sequence: Synthetic oligonucleotide
agggacagacuggccaaag

SEQ ID NO: 3125844 - RNA, 19 nt, Artificial Sequence
  Description of Artificial Sequence: Synthetic oligonucleotide
ugcagucauugggagucga

SEQ ID NO: 3125845 - RNA, 19 nt, Artificial Sequence
  Description of Artificial Sequence: Synthetic oligonucleotide
aacacuccacgggucccca

SEQ ID NO: 3125846 - RNA, 19 nt, Artificial Sequence
  Description of Artificial Sequence: Synthetic oligonucleotide
cccaaagauccagggaugg

SEQ ID NO: 3125847 - RNA, 19 nt, Artificial Sequence
  Description of Artificial Sequence: Synthetic oligonucleotide
augggagugggcgugggua

SEQ ID NO: 3125848 - RNA, 19 nt, Artificial Sequence
  Description of Artificial Sequence: Synthetic oligonucleotide
agguguguccuuauaucau

SEQ ID NO: 3125849 - RNA, 19 nt, Artificial Sequence
  Description of Artificial Sequence: Synthetic oligonucleotide
gacgagugcucaauaaaau

SEQ ID NO: 3125850 - RNA, 19 nt, Artificial Sequence
  Description of Artificial Sequence: Synthetic oligonucleotide
gccagggacagacuggcca

SEQ ID NO: 3125851 - RNA, 19 nt, Artificial Sequence
  Description of Artificial Sequence: Synthetic oligonucleotide
ggccggaacaugacgagug

SEQ ID NO: 3125852 - RNA, 19 nt, Artificial Sequence
  Description of Artificial Sequence: Synthetic oligonucleotide
augcagucauugggagucg

SEQ ID NO: 3125853 - RNA, 19 nt, Artificial Sequence
  Description of Artificial Sequence: Synthetic oligonucleotide
ugccagggacagacuggcc

SEQ ID NO: 3125854 - RNA, 19 nt, Artificial Sequence
  Description of Artificial Sequence: Synthetic oligonucleotide
ggaccguaugugauuauga

SEQ ID NO: 3125855 - RNA, 19 nt, Artificial Sequence
  Description of Artificial Sequence: Synthetic oligonucleotide
agcuuuucccaaagaucca

SEQ ID NO: 3125856 - RNA, 19 nt, Artificial Sequence
  Description of Artificial Sequence: Synthetic oligonucleotide
acggguccccaagaggugu

SEQ ID NO: 3125857 - RNA, 19 nt, Artificial Sequence
  Description of Artificial Sequence: Synthetic oligonucleotide
cacggguccccaagaggug

SEQ ID NO: 3125858 - RNA, 19 nt, Artificial Sequence
  Description of Artificial Sequence: Synthetic oligonucleotide
gcucaauaaaauacaaaau

SEQ ID NO: 3125859 - RNA, 19 nt, Artificial Sequence
  Description of Artificial Sequence: Synthetic oligonucleotide
ggggccggaacaugacgag

SEQ ID NO: 3125860 - RNA, 19 nt, Artificial Sequence
  Description of Artificial Sequence: Synthetic oligonucleotide
uaggaccguaugugauuau

SEQ ID NO: 3125861 - RNA, 19 nt, Artificial Sequence
  Description of Artificial Sequence: Synthetic oligonucleotide
gccaaagaucaaacacucc

SEQ ID NO: 3125862 - RNA, 19 nt, Artificial Sequence
  Description of Artificial Sequence: Synthetic oligonucleotide
gccggaacaugacgagugc

SEQ ID NO: 3125863 - RNA, 19 nt, Artificial Sequence
  Description of Artificial Sequence: Synthetic oligonucleotide
augugauuaugaagcuuuu

SEQ ID NO: 3125864 - RNA, 19 nt, Artificial Sequence
  Description of Artificial Sequence: Synthetic oligonucleotide
cggaacaugacgagugcuc

SEQ ID NO: 3125865 - RNA, 19 nt, Artificial Sequence
  Description of Artificial Sequence: Synthetic oligonucleotide
guguguccuuauaucaugu

SEQ ID NO: 3125866 - RNA, 19 nt, Artificial Sequence
  Description of Artificial Sequence: Synthetic oligonucleotide
gggacagacuggccaaaga

SEQ ID NO: 3125867 - RNA, 19 nt, Artificial Sequence
  Description of Artificial Sequence: Synthetic oligonucleotide
caagagguguguccuuaua

SEQ ID NO: 3125868 - RNA, 19 nt, Artificial Sequence
  Description of Artificial Sequence: Synthetic oligonucleotide
gcagucauugggagucgag

SEQ ID NO: 3125869 - RNA, 19 nt, Artificial Sequence
  Description of Artificial Sequence: Synthetic oligonucleotide
guaugugauuaugaagcuu

SEQ ID NO: 3125870 - RNA, 19 nt, Artificial Sequence
  Description of Artificial Sequence: Synthetic oligonucleotide
ccuuauaucaugugucuuu

SEQ ID NO: 3125871 - RNA, 19 nt, Artificial Sequence
  Description of Artificial Sequence: Synthetic oligonucleotide
aguuugccagggacagacu

SEQ ID NO: 3125872 - RNA, 19 nt, Artificial Sequence
  Description of Artificial Sequence: Synthetic oligonucleotide
gaugggagugggcgugggu

SEQ ID NO: 3125873 - RNA, 19 nt, Artificial Sequence
  Description of Artificial Sequence: Synthetic oligonucleotide
ggagugggcguggguaaug

SEQ ID NO: 3125874 - RNA, 19 nt, Artificial Sequence
  Description of Artificial Sequence: Synthetic oligonucleotide
ccacggguccccaagaggu

SEQ ID NO: 3125875 - RNA, 19 nt, Artificial Sequence
  Description of Artificial Sequence: Synthetic oligonucleotide
augugucuuuaggaccgua

SEQ ID NO: 3125876 - RNA, 19 nt, Artificial Sequence
  Description of Artificial Sequence: Synthetic oligonucleotide
gggaugggagugggcgugg

SEQ ID NO: 3125877 - RNA, 19 nt, Artificial Sequence
  Description of Artificial Sequence: Synthetic oligonucleotide
gggcguggguaaugcaguc

SEQ ID NO: 3125878 - RNA, 19 nt, Artificial Sequence
  Description of Artificial Sequence: Synthetic oligonucleotide
gcguggguaaugcagucau

SEQ ID NO: 3125879 - RNA, 19 nt, Artificial Sequence
  Description of Artificial Sequence: Synthetic oligonucleotide
acacuccacggguccccaa

SEQ ID NO: 3125880 - RNA, 19 nt, Artificial Sequence
  Description of Artificial Sequence: Synthetic oligonucleotide
ccagggacagacuggccaa

SEQ ID NO: 3125881 - RNA, 19 nt, Artificial Sequence
  Description of Artificial Sequence: Synthetic oligonucleotide
ggcguggguaaugcaguca

SEQ ID NO: 3125882 - RNA, 19 nt, Artificial Sequence
  Description of Artificial Sequence: Synthetic oligonucleotide
cguaugugauuaugaagcu

SEQ ID NO: 3125883 - RNA, 19 nt, Artificial Sequence
  Description of Artificial Sequence: Synthetic oligonucleotide
gguccccaagagguguguc

SEQ ID NO: 3125884 - RNA, 19 nt, Artificial Sequence
  Description of Artificial Sequence: Synthetic oligonucleotide
caugugucuuuaggaccgu

SEQ ID NO: 3125885 - RNA, 19 nt, Artificial Sequence
  Description of Artificial Sequence: Synthetic oligonucleotide
cccaagagguguguccuua

SEQ ID NO: 3125886 - RNA, 19 nt, Artificial Sequence
  Description of Artificial Sequence: Synthetic oligonucleotide
gggccggaacaugacgagu

SEQ ID NO: 3125887 - RNA, 19 nt, Artificial Sequence
  Description of Artificial Sequence: Synthetic oligonucleotide
ccaagagguguguccuuau

SEQ ID NO: 3125888 - RNA, 19 nt, Artificial Sequence
  Description of Artificial Sequence: Synthetic oligonucleotide
ccggaacaugacgagugcu

SEQ ID NO: 3125889 - RNA, 19 nt, Artificial Sequence
  Description of Artificial Sequence: Synthetic oligonucleotide
ggguccccaagaggugugu

SEQ ID NO: 3125890 - RNA, 19 nt, Artificial Sequence
  Description of Artificial Sequence: Synthetic oligonucleotide
gggagugggcguggguaau

SEQ ID NO: 3125891 - RNA, 19 nt, Artificial Sequence
  Description of Artificial Sequence: Synthetic oligonucleotide
cguggguaaugcagucauu

SEQ ID NO: 3125892 - RNA, 19 nt, Artificial Sequence
  Description of Artificial Sequence: Synthetic oligonucleotide
ccccaagagguguguccuu

SEQ ID NO: 3125893 - RNA, 19 nt, Artificial Sequence
  Description of Artificial Sequence: Synthetic oligonucleotide
auaccuugugcuuggagcc

SEQ ID NO: 3125894 - RNA, 19 nt, Artificial Sequence
  Description of Artificial Sequence: Synthetic oligonucleotide
gauaccuugugcuuggagc

SEQ ID NO: 3125895 - RNA, 19 nt, Artificial Sequence
  Description of Artificial Sequence: Synthetic oligonucleotide
uucuucacagacuugaggu

SEQ ID NO: 3125896 - RNA, 19 nt, Artificial Sequence
  Description of Artificial Sequence: Synthetic oligonucleotide
acagacuugagguuggcuc

SEQ ID NO: 3125897 - RNA, 19 nt, Artificial Sequence
  Description of Artificial Sequence: Synthetic oligonucleotide
ucagcugagacacggaccc

SEQ ID NO: 3125898 - RNA, 19 nt, Artificial Sequence
  Description of Artificial Sequence: Synthetic oligonucleotide
uuucuucacagacuugagg

SEQ ID NO: 3125899 - RNA, 19 nt, Artificial Sequence
  Description of Artificial Sequence: Synthetic oligonucleotide
ucuacugugaguuggggac

SEQ ID NO: 3125900 - RNA, 19 nt, Artificial Sequence
  Description of Artificial Sequence: Synthetic oligonucleotide
aaucucuacugugaguugg

SEQ ID NO: 3125901 - RNA, 19 nt, Artificial Sequence
  Description of Artificial Sequence: Synthetic oligonucleotide
ucgaacaucuucuugcggc

SEQ ID NO: 3125902 - RNA, 19 nt, Artificial Sequence
  Description of Artificial Sequence: Synthetic oligonucleotide
ugaguuggggacuuggcag

SEQ ID NO: 3125903 - RNA, 19 nt, Artificial Sequence
  Description of Artificial Sequence: Synthetic oligonucleotide
uuccaugccagacauggcc

SEQ ID NO: 3125904 - RNA, 19 nt, Artificial Sequence
  Description of Artificial Sequence: Synthetic oligonucleotide
ucuuucuucacagacuuga

SEQ ID NO: 3125905 - RNA, 19 nt, Artificial Sequence
  Description of Artificial Sequence: Synthetic oligonucleotide
ugugcuuggagcccaguag

SEQ ID NO: 3125906 - RNA, 19 nt, Artificial Sequence
  Description of Artificial Sequence: Synthetic oligonucleotide
ugugucuucuuucuucaca

SEQ ID NO: 3125907 - RNA, 19 nt, Artificial Sequence
  Description of Artificial Sequence: Synthetic oligonucleotide
auggcgucagcugagacac

SEQ ID NO: 3125908 - RNA, 19 nt, Artificial Sequence
  Description of Artificial Sequence: Synthetic oligonucleotide
caaucucccaccuccacgg

SEQ ID NO: 3125909 - RNA, 19 nt, Artificial Sequence
  Description of Artificial Sequence: Synthetic oligonucleotide
ucuuccuccaaucucccac

SEQ ID NO: 3125910 - RNA, 19 nt, Artificial Sequence
  Description of Artificial Sequence: Synthetic oligonucleotide
uccauggauaccuugugcu

SEQ ID NO: 3125911 - RNA, 19 nt, Artificial Sequence
  Description of Artificial Sequence: Synthetic oligonucleotide
uucacagacuugagguugg

SEQ ID NO: 3125912 - RNA, 19 nt, Artificial Sequence
  Description of Artificial Sequence: Synthetic oligonucleotide
gagguuggcucguaggucc

SEQ ID NO: 3125913 - RNA, 19 nt, Artificial Sequence
  Description of Artificial Sequence: Synthetic oligonucleotide
cauacagcaagccaaucuc

SEQ ID NO: 3125914 - RNA, 19 nt, Artificial Sequence
  Description of Artificial Sequence: Synthetic oligonucleotide
acagcaagccaaucucuac

SEQ ID NO: 3125915 - RNA, 19 nt, Artificial Sequence
  Description of Artificial Sequence: Synthetic oligonucleotide
cuugagguuggcucguagg

SEQ ID NO: 3125916 - RNA, 19 nt, Artificial Sequence
  Description of Artificial Sequence: Synthetic oligonucleotide
ucugugucuucuuucuuca

SEQ ID NO: 3125917 - RNA, 19 nt, Artificial Sequence
  Description of Artificial Sequence: Synthetic oligonucleotide
cagacuugagguuggcucg

SEQ ID NO: 3125918 - RNA, 19 nt, Artificial Sequence
  Description of Artificial Sequence: Synthetic oligonucleotide
uugagguuggcucguaggu

SEQ ID NO: 3125919 - RNA, 19 nt, Artificial Sequence
  Description of Artificial Sequence: Synthetic oligonucleotide
uagggcucggagcauggcg

SEQ ID NO: 3125920 - RNA, 19 nt, Artificial Sequence
  Description of Artificial Sequence: Synthetic oligonucleotide
caucgaacaucuucuugcg

SEQ ID NO: 3125921 - RNA, 19 nt, Artificial Sequence
  Description of Artificial Sequence: Synthetic oligonucleotide
agugccauacagcaagcca

SEQ ID NO: 3125922 - RNA, 19 nt, Artificial Sequence
  Description of Artificial Sequence: Synthetic oligonucleotide
gcaucgaacaucuucuugc

SEQ ID NO: 3125923 - RNA, 19 nt, Artificial Sequence
  Description of Artificial Sequence: Synthetic oligonucleotide
auggauaccuugugcuugg

SEQ ID NO: 3125924 - RNA, 19 nt, Artificial Sequence
  Description of Artificial Sequence: Synthetic oligonucleotide
gugcuuggagcccaguagg

SEQ ID NO: 3125925 - RNA, 19 nt, Artificial Sequence
  Description of Artificial Sequence: Synthetic oligonucleotide
caagccaaucucuacugug

SEQ ID NO: 3125926 - RNA, 19 nt, Artificial Sequence
  Description of Artificial Sequence: Synthetic oligonucleotide
ugcuuggagcccaguaggg

SEQ ID NO: 3125927 - RNA, 19 nt, Artificial Sequence
  Description of Artificial Sequence: Synthetic oligonucleotide
ugugaguuggggacuuggc

SEQ ID NO: 3125928 - RNA, 19 nt, Artificial Sequence
  Description of Artificial Sequence: Synthetic oligonucleotide
agcaagccaaucucuacug

SEQ ID NO: 3125929 - RNA, 19 nt, Artificial Sequence
  Description of Artificial Sequence: Synthetic oligonucleotide
ucucccaccuccacgggcc

SEQ ID NO: 3125930 - RNA, 19 nt, Artificial Sequence
  Description of Artificial Sequence: Synthetic oligonucleotide
uuggcucguagguccaugg

SEQ ID NO: 3125931 - RNA, 19 nt, Artificial Sequence
  Description of Artificial Sequence: Synthetic oligonucleotide
gacuuggcagcaucgaaca

SEQ ID NO: 3125932 - RNA, 19 nt, Artificial Sequence
  Description of Artificial Sequence: Synthetic oligonucleotide
cuucuugcggccuuccaug

SEQ ID NO: 3125933 - RNA, 19 nt, Artificial Sequence
  Description of Artificial Sequence: Synthetic oligonucleotide
uggggacuuggcagcaucg

SEQ ID NO: 3125934 - RNA, 19 nt, Artificial Sequence
  Description of Artificial Sequence: Synthetic oligonucleotide
cuucacagacuugagguug

SEQ ID NO: 3125935 - RNA, 19 nt, Artificial Sequence
  Description of Artificial Sequence: Synthetic oligonucleotide
ucuucuugcggccuuccau

SEQ ID NO: 3125936 - RNA, 19 nt, Artificial Sequence
  Description of Artificial Sequence: Synthetic oligonucleotide
aucucccaccuccacgggc

SEQ ID NO: 3125937 - RNA, 19 nt, Artificial Sequence
  Description of Artificial Sequence: Synthetic oligonucleotide
aucgaacaucuucuugcgg

SEQ ID NO: 3125938 - RNA, 19 nt, Artificial Sequence
  Description of Artificial Sequence: Synthetic oligonucleotide
auggccuccaccauucuuc

SEQ ID NO: 3125939 - RNA, 19 nt, Artificial Sequence
  Description of Artificial Sequence: Synthetic oligonucleotide
agcaucgaacaucuucuug

SEQ ID NO: 3125940 - RNA, 19 nt, Artificial Sequence
  Description of Artificial Sequence: Synthetic oligonucleotide
uccaugccagacauggccu

SEQ ID NO: 3125941 - RNA, 19 nt, Artificial Sequence
  Description of Artificial Sequence: Synthetic oligonucleotide
gaguuggggacuuggcagc

SEQ ID NO: 3125942 - RNA, 19 nt, Artificial Sequence
  Description of Artificial Sequence: Synthetic oligonucleotide
aagccaaucucuacuguga

SEQ ID NO: 3125943 - RNA, 19 nt, Artificial Sequence
  Description of Artificial Sequence: Synthetic oligonucleotide
agccaaucucuacugugag

SEQ ID NO: 3125944 - RNA, 19 nt, Artificial Sequence
  Description of Artificial Sequence: Synthetic oligonucleotide
cauggauaccuugugcuug

SEQ ID NO: 3125945 - RNA, 19 nt, Artificial Sequence
  Description of Artificial Sequence: Synthetic oligonucleotide
accauucuuccuccaaucu

SEQ ID NO: 3125946 - RNA, 19 nt, Artificial Sequence
  Description of Artificial Sequence: Synthetic oligonucleotide
aaucucccaccuccacggg

SEQ ID NO: 3125947 - RNA, 19 nt, Artificial Sequence
  Description of Artificial Sequence: Synthetic oligonucleotide
cuuccuccaaucucccacc

SEQ ID NO: 3125948 - RNA, 19 nt, Artificial Sequence
  Description of Artificial Sequence: Synthetic oligonucleotide
ccuuccaugccagacaugg

SEQ ID NO: 3125949 - RNA, 19 nt, Artificial Sequence
  Description of Artificial Sequence: Synthetic oligonucleotide
uacagcaagccaaucucua

SEQ ID NO: 3125950 - RNA, 19 nt, Artificial Sequence
  Description of Artificial Sequence: Synthetic oligonucleotide
ucucuacugugaguugggg

SEQ ID NO: 3125951 - RNA, 19 nt, Artificial Sequence
  Description of Artificial Sequence: Synthetic oligonucleotide
cucguagguccauggauac

SEQ ID NO: 3125952 - RNA, 19 nt, Artificial Sequence
  Description of Artificial Sequence: Synthetic oligonucleotide
guccauggauaccuugugc

SEQ ID NO: 3125953 - RNA, 19 nt, Artificial Sequence
  Description of Artificial Sequence: Synthetic oligonucleotide
uucuuucuucacagacuug

SEQ ID NO: 3125954 - RNA, 19 nt, Artificial Sequence
  Description of Artificial Sequence: Synthetic oligonucleotide
acuugagguuggcucguag

SEQ ID NO: 3125955 - RNA, 19 nt, Artificial Sequence
  Description of Artificial Sequence: Synthetic oligonucleotide
uagguccauggauaccuug

SEQ ID NO: 3125956 - RNA, 19 nt, Artificial Sequence
  Description of Artificial Sequence: Synthetic oligonucleotide
ccuccaaucucccaccucc

SEQ ID NO: 3125957 - RNA, 19 nt, Artificial Sequence
  Description of Artificial Sequence: Synthetic oligonucleotide
uucuugcggccuuccaugc

SEQ ID NO: 3125958 - RNA, 19 nt, Artificial Sequence
  Description of Artificial Sequence: Synthetic oligonucleotide
aacaucuucuugcggccuu

SEQ ID NO: 3125959 - RNA, 19 nt, Artificial Sequence
  Description of Artificial Sequence: Synthetic oligonucleotide
ugucuucuuucuucacaga

SEQ ID NO: 3125960 - RNA, 19 nt, Artificial Sequence
  Description of Artificial Sequence: Synthetic oligonucleotide
uccaccauucuuccuccaa

SEQ ID NO: 3125961 - RNA, 19 nt, Artificial Sequence
  Description of Artificial Sequence: Synthetic oligonucleotide
gugaguuggggacuuggca

SEQ ID NO: 3125962 - RNA, 19 nt, Artificial Sequence
  Description of Artificial Sequence: Synthetic oligonucleotide
agcccaguagggcucggag

SEQ ID NO: 3125963 - RNA, 19 nt, Artificial Sequence
  Description of Artificial Sequence: Synthetic oligonucleotide
caccauucuuccuccaauc

SEQ ID NO: 3125964 - RNA, 19 nt, Artificial Sequence
  Description of Artificial Sequence: Synthetic oligonucleotide
ugccauacagcaagccaau

SEQ ID NO: 3125965 - RNA, 19 nt, Artificial Sequence
  Description of Artificial Sequence: Synthetic oligonucleotide
uccaaucucccaccuccac

SEQ ID NO: 3125966 - RNA, 19 nt, Artificial Sequence
  Description of Artificial Sequence: Synthetic oligonucleotide
ucuugcggccuuccaugcc

SEQ ID NO: 3125967 - RNA, 19 nt, Artificial Sequence
  Description of Artificial Sequence: Synthetic oligonucleotide
cugugaguuggggacuugg

SEQ ID NO: 3125968 - RNA, 19 nt, Artificial Sequence
  Description of Artificial Sequence: Synthetic oligonucleotide
aucucuacugugaguuggg

SEQ ID NO: 3125969 - RNA, 19 nt, Artificial Sequence
  Description of Artificial Sequence: Synthetic oligonucleotide
gacauggccuccaccauuc

SEQ ID NO: 3125970 - RNA, 19 nt, Artificial Sequence
  Description of Artificial Sequence: Synthetic oligonucleotide
cauggcgucagcugagaca

SEQ ID NO: 3125971 - RNA, 19 nt, Artificial Sequence
  Description of Artificial Sequence: Synthetic oligonucleotide
caaucucuacugugaguug

SEQ ID NO: 3125972 - RNA, 19 nt, Artificial Sequence
  Description of Artificial Sequence: Synthetic oligonucleotide
uggccuccaccauucuucc

SEQ ID NO: 3125973 - RNA, 19 nt, Artificial Sequence
  Description of Artificial Sequence: Synthetic oligonucleotide
auacagcaagccaaucucu

SEQ ID NO: 3125974 - RNA, 19 nt, Artificial Sequence
  Description of Artificial Sequence: Synthetic oligonucleotide
cucuacugugaguugggga

SEQ ID NO: 3125975 - RNA, 19 nt, Artificial Sequence
  Description of Artificial Sequence: Synthetic oligonucleotide
cuuccaugccagacauggc

SEQ ID NO: 3125976 - RNA, 19 nt, Artificial Sequence
  Description of Artificial Sequence: Synthetic oligonucleotide
cuugcggccuuccaugcca

SEQ ID NO: 3125977 - RNA, 19 nt, Artificial Sequence
  Description of Artificial Sequence: Synthetic oligonucleotide
ugagguuggcucguagguc

SEQ ID NO: 3125978 - RNA, 19 nt, Artificial Sequence
  Description of Artificial Sequence: Synthetic oligonucleotide
ccaaucucccaccuccacg

SEQ ID NO: 3125979 - RNA, 19 nt, Artificial Sequence
  Description of Artificial Sequence: Synthetic oligonucleotide
gugccauacagcaagccaa

SEQ ID NO: 3125980 - RNA, 19 nt, Artificial Sequence
  Description of Artificial Sequence: Synthetic oligonucleotide
ggagcauggcgucagcuga

SEQ ID NO: 3125981 - RNA, 19 nt, Artificial Sequence
  Description of Artificial Sequence: Synthetic oligonucleotide
ggcgucagcugagacacgg

SEQ ID NO: 3125982 - RNA, 19 nt, Artificial Sequence
  Description of Artificial Sequence: Synthetic oligonucleotide
gagugccauacagcaagcc

SEQ ID NO: 3125983 - RNA, 19 nt, Artificial Sequence
  Description of Artificial Sequence: Synthetic oligonucleotide
uuccuccaaucucccaccu

SEQ ID NO: 3125984 - RNA, 19 nt, Artificial Sequence
  Description of Artificial Sequence: Synthetic oligonucleotide
aguagggcucggagcaugg

SEQ ID NO: 3125985 - RNA, 19 nt, Artificial Sequence
  Description of Artificial Sequence: Synthetic oligonucleotide
uggcucguagguccaugga

SEQ ID NO: 3125986 - RNA, 19 nt, Artificial Sequence
  Description of Artificial Sequence: Synthetic oligonucleotide
agacauggccuccaccauu

SEQ ID NO: 3125987 - RNA, 19 nt, Artificial Sequence
  Description of Artificial Sequence: Synthetic oligonucleotide
agguccauggauaccuugu

SEQ ID NO: 3125988 - RNA, 19 nt, Artificial Sequence
  Description of Artificial Sequence: Synthetic oligonucleotide
ggauaccuugugcuuggag

SEQ ID NO: 3125989 - RNA, 19 nt, Artificial Sequence
  Description of Artificial Sequence: Synthetic oligonucleotide
acaucuucuugcggccuuc

SEQ ID NO: 3125990 - RNA, 19 nt, Artificial Sequence
  Description of Artificial Sequence: Synthetic oligonucleotide
ccagacauggccuccacca

SEQ ID NO: 3125991 - RNA, 19 nt, Artificial Sequence
  Description of Artificial Sequence: Synthetic oligonucleotide
uugcggccuuccaugccag

SEQ ID NO: 3125992 - RNA, 19 nt, Artificial Sequence
  Description of Artificial Sequence: Synthetic oligonucleotide
cuuggagcccaguagggcu

SEQ ID NO: 3125993 - RNA, 19 nt, Artificial Sequence
  Description of Artificial Sequence: Synthetic oligonucleotide
uaccuugugcuuggagccc

SEQ ID NO: 3125994 - RNA, 19 nt, Artificial Sequence
  Description of Artificial Sequence: Synthetic oligonucleotide
gguccauggauaccuugug

SEQ ID NO: 3125995 - RNA, 19 nt, Artificial Sequence
  Description of Artificial Sequence: Synthetic oligonucleotide
caugccagacauggccucc

SEQ ID NO: 3125996 - RNA, 19 nt, Artificial Sequence
  Description of Artificial Sequence: Synthetic oligonucleotide
uggagcccaguagggcucg

SEQ ID NO: 3125997 - RNA, 19 nt, Artificial Sequence
  Description of Artificial Sequence: Synthetic oligonucleotide
ucguagguccauggauacc

SEQ ID NO: 3125998 - RNA, 19 nt, Artificial Sequence
  Description of Artificial Sequence: Synthetic oligonucleotide
gagcauggcgucagcugag

SEQ ID NO: 3125999 - RNA, 19 nt, Artificial Sequence
  Description of Artificial Sequence: Synthetic oligonucleotide
uccuccaaucucccaccuc

SEQ ID NO: 3126000 - RNA, 19 nt, Artificial Sequence
  Description of Artificial Sequence: Synthetic oligonucleotide
cugugucuucuuucuucac

SEQ ID NO: 3126001 - RNA, 19 nt, Artificial Sequence
  Description of Artificial Sequence: Synthetic oligonucleotide
gccuccaccauucuuccuc

SEQ ID NO: 3126002 - RNA, 19 nt, Artificial Sequence
  Description of Artificial Sequence: Synthetic oligonucleotide
uccacgggccgcuccuucu

SEQ ID NO: 3126003 - RNA, 19 nt, Artificial Sequence
  Description of Artificial Sequence: Synthetic oligonucleotide
ucacagacuugagguuggc

SEQ ID NO: 3126004 - RNA, 19 nt, Artificial Sequence
  Description of Artificial Sequence: Synthetic oligonucleotide
ucggagcauggcgucagcu

SEQ ID NO: 3126005 - RNA, 19 nt, Artificial Sequence
  Description of Artificial Sequence: Synthetic oligonucleotide
agggcucggagcauggcgu

SEQ ID NO: 3126006 - RNA, 19 nt, Artificial Sequence
  Description of Artificial Sequence: Synthetic oligonucleotide
cgaacaucuucuugcggcc

SEQ ID NO: 3126007 - RNA, 19 nt, Artificial Sequence
  Description of Artificial Sequence: Synthetic oligonucleotide
caucuucuugcggccuucc

SEQ ID NO: 3126008 - RNA, 19 nt, Artificial Sequence
  Description of Artificial Sequence: Synthetic oligonucleotide
acuuggcagcaucgaacau

SEQ ID NO: 3126009 - RNA, 19 nt, Artificial Sequence
  Description of Artificial Sequence: Synthetic oligonucleotide
guuggcucguagguccaug

SEQ ID NO: 3126010 - RNA, 19 nt, Artificial Sequence
  Description of Artificial Sequence: Synthetic oligonucleotide
accuccacgggccgcuccu

SEQ ID NO: 3126011 - RNA, 19 nt, Artificial Sequence
  Description of Artificial Sequence: Synthetic oligonucleotide
ugccagacauggccuccac

SEQ ID NO: 3126012 - RNA, 19 nt, Artificial Sequence
  Description of Artificial Sequence: Synthetic oligonucleotide
agacuugagguuggcucgu

SEQ ID NO: 3126013 - RNA, 19 nt, Artificial Sequence
  Description of Artificial Sequence: Synthetic oligonucleotide
cagcaagccaaucucuacu

SEQ ID NO: 3126014 - RNA, 19 nt, Artificial Sequence
  Description of Artificial Sequence: Synthetic oligonucleotide
accuugugcuuggagccca

SEQ ID NO: 3126015 - RNA, 19 nt, Artificial Sequence
  Description of Artificial Sequence: Synthetic oligonucleotide
uggcgucagcugagacacg

SEQ ID NO: 3126016 - RNA, 19 nt, Artificial Sequence
  Description of Artificial Sequence: Synthetic oligonucleotide
cccaguagggcucggagca

SEQ ID NO: 3126017 - RNA, 19 nt, Artificial Sequence
  Description of Artificial Sequence: Synthetic oligonucleotide
gcagcaucgaacaucuucu

SEQ ID NO: 3126018 - RNA, 19 nt, Artificial Sequence
  Description of Artificial Sequence: Synthetic oligonucleotide
caguagggcucggagcaug

SEQ ID NO: 3126019 - RNA, 19 nt, Artificial Sequence
  Description of Artificial Sequence: Synthetic oligonucleotide
ccuccaccauucuuccucc

SEQ ID NO: 3126020 - RNA, 19 nt, Artificial Sequence
  Description of Artificial Sequence: Synthetic oligonucleotide
gcccaguagggcucggagc

SEQ ID NO: 3126021 - RNA, 19 nt, Artificial Sequence
  Description of Artificial Sequence: Synthetic oligonucleotide
gcuuggagcccaguagggc

SEQ ID NO: 3126022 - RNA, 19 nt, Artificial Sequence
  Description of Artificial Sequence: Synthetic oligonucleotide
cuccaaucucccaccucca

SEQ ID NO: 3126023 - RNA, 19 nt, Artificial Sequence
  Description of Artificial Sequence: Synthetic oligonucleotide
acauggccuccaccauucu

SEQ ID NO: 3126024 - RNA, 19 nt, Artificial Sequence
  Description of Artificial Sequence: Synthetic oligonucleotide
agcauggcgucagcugaga

SEQ ID NO: 3126025 - RNA, 19 nt, Artificial Sequence
  Description of Artificial Sequence: Synthetic oligonucleotide
cucccaccuccacgggccg

SEQ ID NO: 3126026 - RNA, 19 nt, Artificial Sequence
  Description of Artificial Sequence: Synthetic oligonucleotide
acgggccgcuccuucucug

SEQ ID NO: 3126027 - RNA, 19 nt, Artificial Sequence
  Description of Artificial Sequence: Synthetic oligonucleotide
uggauaccuugugcuugga

SEQ ID NO: 3126028 - RNA, 19 nt, Artificial Sequence
  Description of Artificial Sequence: Synthetic oligonucleotide
cucggagcauggcgucagc

SEQ ID NO: 3126029 - RNA, 19 nt, Artificial Sequence
  Description of Artificial Sequence: Synthetic oligonucleotide
augccagacauggccucca

SEQ ID NO: 3126030 - RNA, 19 nt, Artificial Sequence
  Description of Artificial Sequence: Synthetic oligonucleotide
acugugaguuggggacuug

SEQ ID NO: 3126031 - RNA, 19 nt, Artificial Sequence
  Description of Artificial Sequence: Synthetic oligonucleotide
gaacaucuucuugcggccu

SEQ ID NO: 3126032 - RNA, 19 nt, Artificial Sequence
  Description of Artificial Sequence: Synthetic oligonucleotide
guagggcucggagcauggc

SEQ ID NO: 3126033 - RNA, 19 nt, Artificial Sequence
  Description of Artificial Sequence: Synthetic oligonucleotide
ccauacagcaagccaaucu

SEQ ID NO: 3126034 - RNA, 19 nt, Artificial Sequence
  Description of Artificial Sequence: Synthetic oligonucleotide
gccagacauggccuccacc

SEQ ID NO: 3126035 - RNA, 19 nt, Artificial Sequence
  Description of Artificial Sequence: Synthetic oligonucleotide
cgucagcugagacacggac

SEQ ID NO: 3126036 - RNA, 19 nt, Artificial Sequence
  Description of Artificial Sequence: Synthetic oligonucleotide
ugcggccuuccaugccaga

SEQ ID NO: 3126037 - RNA, 19 nt, Artificial Sequence
  Description of Artificial Sequence: Synthetic oligonucleotide
cagcugagacacggacccg

SEQ ID NO: 3126038 - RNA, 19 nt, Artificial Sequence
  Description of Artificial Sequence: Synthetic oligonucleotide
ccaaucucuacugugaguu

SEQ ID NO: 3126039 - RNA, 19 nt, Artificial Sequence
  Description of Artificial Sequence: Synthetic oligonucleotide
caccuccacgggccgcucc

SEQ ID NO: 3126040 - RNA, 19 nt, Artificial Sequence
  Description of Artificial Sequence: Synthetic oligonucleotide
gcucguagguccauggaua

SEQ ID NO: 3126041 - RNA, 19 nt, Artificial Sequence
  Description of Artificial Sequence: Synthetic oligonucleotide
gcucggagcauggcgucag

SEQ ID NO: 3126042 - RNA, 19 nt, Artificial Sequence
  Description of Artificial Sequence: Synthetic oligonucleotide
gcauggcgucagcugagac

SEQ ID NO: 3126043 - RNA, 19 nt, Artificial Sequence
  Description of Artificial Sequence: Synthetic oligonucleotide
cuccacgggccgcuccuuc

SEQ ID NO: 3126044 - RNA, 19 nt, Artificial Sequence
  Description of Artificial Sequence: Synthetic oligonucleotide
ggcucguagguccauggau

SEQ ID NO: 3126045 - RNA, 19 nt, Artificial Sequence
  Description of Artificial Sequence: Synthetic oligonucleotide
ccaugccagacauggccuc

SEQ ID NO: 3126046 - RNA, 19 nt, Artificial Sequence
  Description of Artificial Sequence: Synthetic oligonucleotide
cggagcauggcgucagcug

SEQ ID NO: 3126047 - RNA, 19 nt, Artificial Sequence
  Description of Artificial Sequence: Synthetic oligonucleotide
agguuggcucguaggucca

SEQ ID NO: 3126048 - RNA, 19 nt, Artificial Sequence
  Description of Artificial Sequence: Synthetic oligonucleotide
ucccaccuccacgggccgc

SEQ ID NO: 3126049 - RNA, 19 nt, Artificial Sequence
  Description of Artificial Sequence: Synthetic oligonucleotide
gccgcuccuucucuguguc

SEQ ID NO: 3126050 - RNA, 19 nt, Artificial Sequence
  Description of Artificial Sequence: Synthetic oligonucleotide
gcggccuuccaugccagac

SEQ ID NO: 3126051 - RNA, 19 nt, Artificial Sequence
  Description of Artificial Sequence: Synthetic oligonucleotide
gcaagccaaucucuacugu

SEQ ID NO: 3126052 - RNA, 19 nt, Artificial Sequence
  Description of Artificial Sequence: Synthetic oligonucleotide
cuacugugaguuggggacu

SEQ ID NO: 3126053 - RNA, 19 nt, Artificial Sequence
  Description of Artificial Sequence: Synthetic oligonucleotide
cuccaccauucuuccucca

SEQ ID NO: 3126054 - RNA, 19 nt, Artificial Sequence
  Description of Artificial Sequence: Synthetic oligonucleotide
gagcccaguagggcucgga

SEQ ID NO: 3126055 - RNA, 19 nt, Artificial Sequence
  Description of Artificial Sequence: Synthetic oligonucleotide
gccaaucucuacugugagu

SEQ ID NO: 3126056 - RNA, 19 nt, Artificial Sequence
  Description of Artificial Sequence: Synthetic oligonucleotide
ccuugugcuuggagcccag

SEQ ID NO: 3126057 - RNA, 19 nt, Artificial Sequence
  Description of Artificial Sequence: Synthetic oligonucleotide
gggccgcuccuucucugug

SEQ ID NO: 3126058 - RNA, 19 nt, Artificial Sequence
  Description of Artificial Sequence: Synthetic oligonucleotide
cguagguccauggauaccu

SEQ ID NO: 3126059 - RNA, 19 nt, Artificial Sequence
  Description of Artificial Sequence: Synthetic oligonucleotide
ggggacuuggcagcaucga

SEQ ID NO: 3126060 - RNA, 19 nt, Artificial Sequence
  Description of Artificial Sequence: Synthetic oligonucleotide
gacuugagguuggcucgua

SEQ ID NO: 3126061 - RNA, 19 nt, Artificial Sequence
  Description of Artificial Sequence: Synthetic oligonucleotide
cacagacuugagguuggcu

SEQ ID NO: 3126062 - RNA, 19 nt, Artificial Sequence
  Description of Artificial Sequence: Synthetic oligonucleotide
cauggccuccaccauucuu

SEQ ID NO: 3126063 - RNA, 19 nt, Artificial Sequence
  Description of Artificial Sequence: Synthetic oligonucleotide
gggcucggagcauggcguc

SEQ ID NO: 3126064 - RNA, 19 nt, Artificial Sequence
  Description of Artificial Sequence: Synthetic oligonucleotide
gccauacagcaagccaauc

SEQ ID NO: 3126065 - RNA, 19 nt, Artificial Sequence
  Description of Artificial Sequence: Synthetic oligonucleotide
cagacauggccuccaccau

SEQ ID NO: 3126066 - RNA, 19 nt, Artificial Sequence
  Description of Artificial Sequence: Synthetic oligonucleotide
cagcaucgaacaucuucuu

SEQ ID NO: 3126067 - RNA, 19 nt, Artificial Sequence
  Description of Artificial Sequence: Synthetic oligonucleotide
ggagcccaguagggcucgg

SEQ ID NO: 3126068 - RNA, 19 nt, Artificial Sequence
  Description of Artificial Sequence: Synthetic oligonucleotide
ccaccauucuuccuccaau

SEQ ID NO: 3126069 - RNA, 19 nt, Artificial Sequence
  Description of Artificial Sequence: Synthetic oligonucleotide
ggcucggagcauggcguca

SEQ ID NO: 3126070 - RNA, 19 nt, Artificial Sequence
  Description of Artificial Sequence: Synthetic oligonucleotide
ccacgggccgcuccuucuc

SEQ ID NO: 3126071 - RNA, 19 nt, Artificial Sequence
  Description of Artificial Sequence: Synthetic oligonucleotide
ccauggauaccuugugcuu

SEQ ID NO: 3126072 - RNA, 19 nt, Artificial Sequence
  Description of Artificial Sequence: Synthetic oligonucleotide
guagguccauggauaccuu

SEQ ID NO: 3126073 - RNA, 19 nt, Artificial Sequence
  Description of Artificial Sequence: Synthetic oligonucleotide
cacgggccgcuccuucucu

SEQ ID NO: 3126074 - RNA, 19 nt, Artificial Sequence
  Description of Artificial Sequence: Synthetic oligonucleotide
guuggggacuuggcagcau

SEQ ID NO: 3126075 - RNA, 19 nt, Artificial Sequence
  Description of Artificial Sequence: Synthetic oligonucleotide
gcgucagcugagacacgga

SEQ ID NO: 3126076 - RNA, 19 nt, Artificial Sequence
  Description of Artificial Sequence: Synthetic oligonucleotide
ggccuccaccauucuuccu

SEQ ID NO: 3126077 - RNA, 19 nt, Artificial Sequence
  Description of Artificial Sequence: Synthetic oligonucleotide
gguuggcucguagguccau

SEQ ID NO: 3126078 - RNA, 19 nt, Artificial Sequence
  Description of Artificial Sequence: Synthetic oligonucleotide
ccaccuccacgggccgcuc

SEQ ID NO: 3126079 - RNA, 19 nt, Artificial Sequence
  Description of Artificial Sequence: Synthetic oligonucleotide
cgggccgcuccuucucugu

SEQ ID NO: 3126080 - RNA, 19 nt, Artificial Sequence
  Description of Artificial Sequence: Synthetic oligonucleotide
ccaguagggcucggagcau

SEQ ID NO: 3126081 - RNA, 19 nt, Artificial Sequence
  Description of Artificial Sequence: Synthetic oligonucleotide
ccuccacgggccgcuccuu

SEQ ID NO: 3126082 - RNA, 19 nt, Artificial Sequence
  Description of Artificial Sequence: Synthetic oligonucleotide
aaagaucugaaucuuauac

SEQ ID NO: 3126083 - RNA, 19 nt, Artificial Sequence
  Description of Artificial Sequence: Synthetic oligonucleotide
ugaaauugcuccaugaugg

SEQ ID NO: 3126084 - RNA, 19 nt, Artificial Sequence
  Description of Artificial Sequence: Synthetic oligonucleotide
aaagucacccuuuucaaag

SEQ ID NO: 3126085 - RNA, 19 nt, Artificial Sequence
  Description of Artificial Sequence: Synthetic oligonucleotide
ucauggaaaauccaggcgc

SEQ ID NO: 3126086 - RNA, 19 nt, Artificial Sequence
  Description of Artificial Sequence: Synthetic oligonucleotide
aucugaaucuuauacuggc

SEQ ID NO: 3126087 - RNA, 19 nt, Artificial Sequence
  Description of Artificial Sequence: Synthetic oligonucleotide
agauguugcaccccaaucg

SEQ ID NO: 3126088 - RNA, 19 nt, Artificial Sequence
  Description of Artificial Sequence: Synthetic oligonucleotide
acuaaagucacccuuuuca

SEQ ID NO: 3126089 - RNA, 19 nt, Artificial Sequence
  Description of Artificial Sequence: Synthetic oligonucleotide
ucuaguaccuuacaggagu

SEQ ID NO: 3126090 - RNA, 19 nt, Artificial Sequence
  Description of Artificial Sequence: Synthetic oligonucleotide
agaucugaaucuuauacug

SEQ ID NO: 3126091 - RNA, 19 nt, Artificial Sequence
  Description of Artificial Sequence: Synthetic oligonucleotide
cuuuucaaagaucugaauc

SEQ ID NO: 3126092 - RNA, 19 nt, Artificial Sequence
  Description of Artificial Sequence: Synthetic oligonucleotide
uguuucaugcauuuggcca

SEQ ID NO: 3126093 - RNA, 19 nt, Artificial Sequence
  Description of Artificial Sequence: Synthetic oligonucleotide
aagaucugaaucuuauacu

SEQ ID NO: 3126094 - RNA, 19 nt, Artificial Sequence
  Description of Artificial Sequence: Synthetic oligonucleotide
ucacccuuuucaaagaucu

SEQ ID NO: 3126095 - RNA, 19 nt, Artificial Sequence
  Description of Artificial Sequence: Synthetic oligonucleotide
ucgcaugugaaauugcucc

SEQ ID NO: 3126096 - RNA, 19 nt, Artificial Sequence
  Description of Artificial Sequence: Synthetic oligonucleotide
cuucuuguccagaagauac

SEQ ID NO: 3126097 - RNA, 19 nt, Artificial Sequence
  Description of Artificial Sequence: Synthetic oligonucleotide
aauugcuccaugauggaag

SEQ ID NO: 3126098 - RNA, 19 nt, Artificial Sequence
  Description of Artificial Sequence: Synthetic oligonucleotide
acaggaguugaucucucgc

SEQ ID NO: 3126099 - RNA, 19 nt, Artificial Sequence
  Description of Artificial Sequence: Synthetic oligonucleotide
aaauccaggcgccuucuag

SEQ ID NO: 3126100 - RNA, 19 nt, Artificial Sequence
  Description of Artificial Sequence: Synthetic oligonucleotide
ucaaagaucugaaucuuau

SEQ ID NO: 3126101 - RNA, 19 nt, Artificial Sequence
  Description of Artificial Sequence: Synthetic oligonucleotide
uagcucauggaaaauccag

SEQ ID NO: 3126102 - RNA, 19 nt, Artificial Sequence
  Description of Artificial Sequence: Synthetic oligonucleotide
ugcauuuggccacuaaagu

SEQ ID NO: 3126103 - RNA, 19 nt, Artificial Sequence
  Description of Artificial Sequence: Synthetic oligonucleotide
guaguuggguagcucaugg

SEQ ID NO: 3126104 - RNA, 19 nt, Artificial Sequence
  Description of Artificial Sequence: Synthetic oligonucleotide
ucugaaucuuauacuggcc

SEQ ID NO: 3126105 - RNA, 19 nt, Artificial Sequence
  Description of Artificial Sequence: Synthetic oligonucleotide
auugcuccaugauggaagg

SEQ ID NO: 3126106 - RNA, 19 nt, Artificial Sequence
  Description of Artificial Sequence: Synthetic oligonucleotide
gugaaauugcuccaugaug

SEQ ID NO: 3126107 - RNA, 19 nt, Artificial Sequence
  Description of Artificial Sequence: Synthetic oligonucleotide
cauuuggccacuaaaguca

SEQ ID NO: 3126108 - RNA, 19 nt, Artificial Sequence
  Description of Artificial Sequence: Synthetic oligonucleotide
uguugcaccccaaucgaug

SEQ ID NO: 3126109 - RNA, 19 nt, Artificial Sequence
  Description of Artificial Sequence: Synthetic oligonucleotide
ugugaaauugcuccaugau

SEQ ID NO: 3126110 - RNA, 19 nt, Artificial Sequence
  Description of Artificial Sequence: Synthetic oligonucleotide
cuucuaguaccuuacagga

SEQ ID NO: 3126111 - RNA, 19 nt, Artificial Sequence
  Description of Artificial Sequence: Synthetic oligonucleotide
gaucugaaucuuauacugg

SEQ ID NO: 3126112 - RNA, 19 nt, Artificial Sequence
  Description of Artificial Sequence: Synthetic oligonucleotide
aauccaggcgccuucuagu

SEQ ID NO: 3126113 - RNA, 19 nt, Artificial Sequence
  Description of Artificial Sequence: Synthetic oligonucleotide
uuggccacuaaagucaccc

SEQ ID NO: 3126114 - RNA, 19 nt, Artificial Sequence
  Description of Artificial Sequence: Synthetic oligonucleotide
ucuucuguuguuucaugca

SEQ ID NO: 3126115 - RNA, 19 nt, Artificial Sequence
  Description of Artificial Sequence: Synthetic oligonucleotide
cucauggaaaauccaggcg

SEQ ID NO: 3126116 - RNA, 19 nt, Artificial Sequence
  Description of Artificial Sequence: Synthetic oligonucleotide
guugcaccccaaucgaugg

SEQ ID NO: 3126117 - RNA, 19 nt, Artificial Sequence
  Description of Artificial Sequence: Synthetic oligonucleotide
cauggaaaauccaggcgcc

SEQ ID NO: 3126118 - RNA, 19 nt, Artificial Sequence
  Description of Artificial Sequence: Synthetic oligonucleotide
aagauacugucugccacgg

SEQ ID NO: 3126119 - RNA, 19 nt, Artificial Sequence
  Description of Artificial Sequence: Synthetic oligonucleotide
uuguccagaagauacuguc

SEQ ID NO: 3126120 - RNA, 19 nt, Artificial Sequence
  Description of Artificial Sequence: Synthetic oligonucleotide
uucuaguaccuuacaggag

SEQ ID NO: 3126121 - RNA, 19 nt, Artificial Sequence
  Description of Artificial Sequence: Synthetic oligonucleotide
gaaucuuauacuggccucc

SEQ ID NO: 3126122 - RNA, 19 nt, Artificial Sequence
  Description of Artificial Sequence: Synthetic oligonucleotide
uuguuucaugcauuuggcc

SEQ ID NO: 3126123 - RNA, 19 nt, Artificial Sequence
  Description of Artificial Sequence: Synthetic oligonucleotide
ucucgcaugugaaauugcu

SEQ ID NO: 3126124 - RNA, 19 nt, Artificial Sequence
  Description of Artificial Sequence: Synthetic oligonucleotide
guuucaugcauuuggccac

SEQ ID NO: 3126125 - RNA, 19 nt, Artificial Sequence
  Description of Artificial Sequence: Synthetic oligonucleotide
ccuucuaguaccuuacagg

SEQ ID NO: 3126126 - RNA, 19 nt, Artificial Sequence
  Description of Artificial Sequence: Synthetic oligonucleotide
ugcuccaugauggaagggc

SEQ ID NO: 3126127 - RNA, 19 nt, Artificial Sequence
  Description of Artificial Sequence: Synthetic oligonucleotide
gauacugucugccacggua

SEQ ID NO: 3126128 - RNA, 19 nt, Artificial Sequence
  Description of Artificial Sequence: Synthetic oligonucleotide
guccagaagauacugucug

SEQ ID NO: 3126129 - RNA, 19 nt, Artificial Sequence
  Description of Artificial Sequence: Synthetic oligonucleotide
uguccagaagauacugucu

SEQ ID NO: 3126130 - RNA, 19 nt, Artificial Sequence
  Description of Artificial Sequence: Synthetic oligonucleotide
uggaagggcagucuucugu

SEQ ID NO: 3126131 - RNA, 19 nt, Artificial Sequence
  Description of Artificial Sequence: Synthetic oligonucleotide
aguuggguagcucauggaa

SEQ ID NO: 3126132 - RNA, 19 nt, Artificial Sequence
  Description of Artificial Sequence: Synthetic oligonucleotide
uauuccuucuuguccagaa

SEQ ID NO: 3126133 - RNA, 19 nt, Artificial Sequence
  Description of Artificial Sequence: Synthetic oligonucleotide
ugaaucuuauacuggccuc

SEQ ID NO: 3126134 - RNA, 19 nt, Artificial Sequence
  Description of Artificial Sequence: Synthetic oligonucleotide
aagggcagucuucuguugu

SEQ ID NO: 3126135 - RNA, 19 nt, Artificial Sequence
  Description of Artificial Sequence: Synthetic oligonucleotide
gauguugcaccccaaucga

SEQ ID NO: 3126136 - RNA, 19 nt, Artificial Sequence
  Description of Artificial Sequence: Synthetic oligonucleotide
gagcaggagauguugcacc

SEQ ID NO: 3126137 - RNA, 19 nt, Artificial Sequence
  Description of Artificial Sequence: Synthetic oligonucleotide
accuuacaggaguugaucu

SEQ ID NO: 3126138 - RNA, 19 nt, Artificial Sequence
  Description of Artificial Sequence: Synthetic oligonucleotide
gucuucuguuguuucaugc

SEQ ID NO: 3126139 - RNA, 19 nt, Artificial Sequence
  Description of Artificial Sequence: Synthetic oligonucleotide
uuggguagcucauggaaaa

SEQ ID NO: 3126140 - RNA, 19 nt, Artificial Sequence
  Description of Artificial Sequence: Synthetic oligonucleotide
uacaggaguugaucucucg

SEQ ID NO: 3126141 - RNA, 19 nt, Artificial Sequence
  Description of Artificial Sequence: Synthetic oligonucleotide
augugaaauugcuccauga

SEQ ID NO: 3126142 - RNA, 19 nt, Artificial Sequence
  Description of Artificial Sequence: Synthetic oligonucleotide
aagucacccuuuucaaaga

SEQ ID NO: 3126143 - RNA, 19 nt, Artificial Sequence
  Description of Artificial Sequence: Synthetic oligonucleotide
guuguuucaugcauuuggc

SEQ ID NO: 3126144 - RNA, 19 nt, Artificial Sequence
  Description of Artificial Sequence: Synthetic oligonucleotide
ucucucgcaugugaaauug

SEQ ID NO: 3126145 - RNA, 19 nt, Artificial Sequence
  Description of Artificial Sequence: Synthetic oligonucleotide
augcauuuggccacuaaag

SEQ ID NO: 3126146 - RNA, 19 nt, Artificial Sequence
  Description of Artificial Sequence: Synthetic oligonucleotide
uucaaagaucugaaucuua

SEQ ID NO: 3126147 - RNA, 19 nt, Artificial Sequence
  Description of Artificial Sequence: Synthetic oligonucleotide
agcucauggaaaauccagg

SEQ ID NO: 3126148 - RNA, 19 nt, Artificial Sequence
  Description of Artificial Sequence: Synthetic oligonucleotide
uccagaagauacugucugc

SEQ ID NO: 3126149 - RNA, 19 nt, Artificial Sequence
  Description of Artificial Sequence: Synthetic oligonucleotide
aguaccuuacaggaguuga

SEQ ID NO: 3126150 - RNA, 19 nt, Artificial Sequence
  Description of Artificial Sequence: Synthetic oligonucleotide
aaucgauggcuuccgguau

SEQ ID NO: 3126151 - RNA, 19 nt, Artificial Sequence
  Description of Artificial Sequence: Synthetic oligonucleotide
uugaucucucgcaugugaa

SEQ ID NO: 3126152 - RNA, 19 nt, Artificial Sequence
  Description of Artificial Sequence: Synthetic oligonucleotide
ugucugccacgguaguugg

SEQ ID NO: 3126153 - RNA, 19 nt, Artificial Sequence
  Description of Artificial Sequence: Synthetic oligonucleotide
uucuuguccagaagauacu

SEQ ID NO: 3126154 - RNA, 19 nt, Artificial Sequence
  Description of Artificial Sequence: Synthetic oligonucleotide
acccuuuucaaagaucuga

SEQ ID NO: 3126155 - RNA, 19 nt, Artificial Sequence
  Description of Artificial Sequence: Synthetic oligonucleotide
auuccuucuuguccagaag

SEQ ID NO: 3126156 - RNA, 19 nt, Artificial Sequence
  Description of Artificial Sequence: Synthetic oligonucleotide
gagauguugcaccccaauc

SEQ ID NO: 3126157 - RNA, 19 nt, Artificial Sequence
  Description of Artificial Sequence: Synthetic oligonucleotide
guugaucucucgcauguga

SEQ ID NO: 3126158 - RNA, 19 nt, Artificial Sequence
  Description of Artificial Sequence: Synthetic oligonucleotide
gguagcucauggaaaaucc

SEQ ID NO: 3126159 - RNA, 19 nt, Artificial Sequence
  Description of Artificial Sequence: Synthetic oligonucleotide
accccaaucgauggcuucc

SEQ ID NO: 3126160 - RNA, 19 nt, Artificial Sequence
  Description of Artificial Sequence: Synthetic oligonucleotide
gcucauggaaaauccaggc

SEQ ID NO: 3126161 - RNA, 19 nt, Artificial Sequence
  Description of Artificial Sequence: Synthetic oligonucleotide
gaaauugcuccaugaugga

SEQ ID NO: 3126162 - RNA, 19 nt, Artificial Sequence
  Description of Artificial Sequence: Synthetic oligonucleotide
aaauugcuccaugauggaa

SEQ ID NO: 3126163 - RNA, 19 nt, Artificial Sequence
  Description of Artificial Sequence: Synthetic oligonucleotide
caugugaaauugcuccaug

SEQ ID NO: 3126164 - RNA, 19 nt, Artificial Sequence
  Description of Artificial Sequence: Synthetic oligonucleotide
auuuggccacuaaagucac

SEQ ID NO: 3126165 - RNA, 19 nt, Artificial Sequence
  Description of Artificial Sequence: Synthetic oligonucleotide
ucugccacgguaguugggu

SEQ ID NO: 3126166 - RNA, 19 nt, Artificial Sequence
  Description of Artificial Sequence: Synthetic oligonucleotide
ugccacgguaguuggguag

SEQ ID NO: 3126167 - RNA, 19 nt, Artificial Sequence
  Description of Artificial Sequence: Synthetic oligonucleotide
uuucaaagaucugaaucuu

SEQ ID NO: 3126168 - RNA, 19 nt, Artificial Sequence
  Description of Artificial Sequence: Synthetic oligonucleotide
cuaaagucacccuuuucaa

SEQ ID NO: 3126169 - RNA, 19 nt, Artificial Sequence
  Description of Artificial Sequence: Synthetic oligonucleotide
ugaucucucgcaugugaaa

SEQ ID NO: 3126170 - RNA, 19 nt, Artificial Sequence
  Description of Artificial Sequence: Synthetic oligonucleotide
uucuguuguuucaugcauu

SEQ ID NO: 3126171 - RNA, 19 nt, Artificial Sequence
  Description of Artificial Sequence: Synthetic oligonucleotide
cuuccgguauuccuucuug

SEQ ID NO: 3126172 - RNA, 19 nt, Artificial Sequence
  Description of Artificial Sequence: Synthetic oligonucleotide
gcauuuggccacuaaaguc

SEQ ID NO: 3126173 - RNA, 19 nt, Artificial Sequence
  Description of Artificial Sequence: Synthetic oligonucleotide
uccgguauuccuucuuguc

SEQ ID NO: 3126174 - RNA, 19 nt, Artificial Sequence
  Description of Artificial Sequence: Synthetic oligonucleotide
cucgcaugugaaauugcuc

SEQ ID NO: 3126175 - RNA, 19 nt, Artificial Sequence
  Description of Artificial Sequence: Synthetic oligonucleotide
aggaguugaucucucgcau

SEQ ID NO: 3126176 - RNA, 19 nt, Artificial Sequence
  Description of Artificial Sequence: Synthetic oligonucleotide
auacugucugccacgguag

SEQ ID NO: 3126177 - RNA, 19 nt, Artificial Sequence
  Description of Artificial Sequence: Synthetic oligonucleotide
caugcauuuggccacuaaa

SEQ ID NO: 3126178 - RNA, 19 nt, Artificial Sequence
  Description of Artificial Sequence: Synthetic oligonucleotide
gaguugaucucucgcaugu

SEQ ID NO: 3126179 - RNA, 19 nt, Artificial Sequence
  Description of Artificial Sequence: Synthetic oligonucleotide
uaccuuacaggaguugauc

SEQ ID NO: 3126180 - RNA, 19 nt, Artificial Sequence
  Description of Artificial Sequence: Synthetic oligonucleotide
uuacaggaguugaucucuc

SEQ ID NO: 3126181 - RNA, 19 nt, Artificial Sequence
  Description of Artificial Sequence: Synthetic oligonucleotide
cugucugccacgguaguug

SEQ ID NO: 3126182 - RNA, 19 nt, Artificial Sequence
  Description of Artificial Sequence: Synthetic oligonucleotide
uuccgguauuccuucuugu

SEQ ID NO: 3126183 - RNA, 19 nt, Artificial Sequence
  Description of Artificial Sequence: Synthetic oligonucleotide
ugcaccccaaucgauggcu

SEQ ID NO: 3126184 - RNA, 19 nt, Artificial Sequence
  Description of Artificial Sequence: Synthetic oligonucleotide
agucacccuuuucaaagau

SEQ ID NO: 3126185 - RNA, 19 nt, Artificial Sequence
  Description of Artificial Sequence: Synthetic oligonucleotide
acgagcaggagauguugca

SEQ ID NO: 3126186 - RNA, 19 nt, Artificial Sequence
  Description of Artificial Sequence: Synthetic oligonucleotide
cugaaucuuauacuggccu

SEQ ID NO: 3126187 - RNA, 19 nt, Artificial Sequence
  Description of Artificial Sequence: Synthetic oligonucleotide
uuuggccacuaaagucacc

SEQ ID NO: 3126188 - RNA, 19 nt, Artificial Sequence
  Description of Artificial Sequence: Synthetic oligonucleotide
augauggaagggcagucuu

SEQ ID NO: 3126189 - RNA, 19 nt, Artificial Sequence
  Description of Artificial Sequence: Synthetic oligonucleotide
caggaguugaucucucgca

SEQ ID NO: 3126190 - RNA, 19 nt, Artificial Sequence
  Description of Artificial Sequence: Synthetic oligonucleotide
uaguuggguagcucaugga

SEQ ID NO: 3126191 - RNA, 19 nt, Artificial Sequence
  Description of Artificial Sequence: Synthetic oligonucleotide
cucucgcaugugaaauugc

SEQ ID NO: 3126192 - RNA, 19 nt, Artificial Sequence
  Description of Artificial Sequence: Synthetic oligonucleotide
gccuucuaguaccuuacag

SEQ ID NO: 3126193 - RNA, 19 nt, Artificial Sequence
  Description of Artificial Sequence: Synthetic oligonucleotide
ucaugcauuuggccacuaa

SEQ ID NO: 3126194 - RNA, 19 nt, Artificial Sequence
  Description of Artificial Sequence: Synthetic oligonucleotide
gacgagcaggagauguugc

SEQ ID NO: 3126195 - RNA, 19 nt, Artificial Sequence
  Description of Artificial Sequence: Synthetic oligonucleotide
caaucgauggcuuccggua

SEQ ID NO: 3126196 - RNA, 19 nt, Artificial Sequence
  Description of Artificial Sequence: Synthetic oligonucleotide
gauggcuuccgguauuccu

SEQ ID NO: 3126197 - RNA, 19 nt, Artificial Sequence
  Description of Artificial Sequence: Synthetic oligonucleotide
ccgguauuccuucuugucc

SEQ ID NO: 3126198 - RNA, 19 nt, Artificial Sequence
  Description of Artificial Sequence: Synthetic oligonucleotide
cagaagauacugucugcca

SEQ ID NO: 3126199 - RNA, 19 nt, Artificial Sequence
  Description of Artificial Sequence: Synthetic oligonucleotide
gauggaagggcagucuucu

SEQ ID NO: 3126200 - RNA, 19 nt, Artificial Sequence
  Description of Artificial Sequence: Synthetic oligonucleotide
uugcaccccaaucgauggc

SEQ ID NO: 3126201 - RNA, 19 nt, Artificial Sequence
  Description of Artificial Sequence: Synthetic oligonucleotide
aaaauccaggcgccuucua

SEQ ID NO: 3126202 - RNA, 19 nt, Artificial Sequence
  Description of Artificial Sequence: Synthetic oligonucleotide
uaguaccuuacaggaguug

SEQ ID NO: 3126203 - RNA, 19 nt, Artificial Sequence
  Description of Artificial Sequence: Synthetic oligonucleotide
ccagaagauacugucugcc

SEQ ID NO: 3126204 - RNA, 19 nt, Artificial Sequence
  Description of Artificial Sequence: Synthetic oligonucleotide
ggaguugaucucucgcaug

SEQ ID NO: 3126205 - RNA, 19 nt, Artificial Sequence
  Description of Artificial Sequence: Synthetic oligonucleotide
uacugucugccacgguagu

SEQ ID NO: 3126206 - RNA, 19 nt, Artificial Sequence
  Description of Artificial Sequence: Synthetic oligonucleotide
uccaggcgccuucuaguac

SEQ ID NO: 3126207 - RNA, 19 nt, Artificial Sequence
  Description of Artificial Sequence: Synthetic oligonucleotide
ggaaaauccaggcgccuuc

SEQ ID NO: 3126208 - RNA, 19 nt, Artificial Sequence
  Description of Artificial Sequence: Synthetic oligonucleotide
ccaggcgccuucuaguacc

SEQ ID NO: 3126209 - RNA, 19 nt, Artificial Sequence
  Description of Artificial Sequence: Synthetic oligonucleotide
cuuacaggaguugaucucu

SEQ ID NO: 3126210 - RNA, 19 nt, Artificial Sequence
  Description of Artificial Sequence: Synthetic oligonucleotide
guuggguagcucauggaaa

SEQ ID NO: 3126211 - RNA, 19 nt, Artificial Sequence
  Description of Artificial Sequence: Synthetic oligonucleotide
gguauuccuucuuguccag

SEQ ID NO: 3126212 - RNA, 19 nt, Artificial Sequence
  Description of Artificial Sequence: Synthetic oligonucleotide
caaagaucugaaucuuaua

SEQ ID NO: 3126213 - RNA, 19 nt, Artificial Sequence
  Description of Artificial Sequence: Synthetic oligonucleotide
aucucucgcaugugaaauu

SEQ ID NO: 3126214 - RNA, 19 nt, Artificial Sequence
  Description of Artificial Sequence: Synthetic oligonucleotide
uugcuccaugauggaaggg

SEQ ID NO: 3126215 - RNA, 19 nt, Artificial Sequence
  Description of Artificial Sequence: Synthetic oligonucleotide
guagcucauggaaaaucca

SEQ ID NO: 3126216 - RNA, 19 nt, Artificial Sequence
  Description of Artificial Sequence: Synthetic oligonucleotide
uggcuuccgguauuccuuc

SEQ ID NO: 3126217 - RNA, 19 nt, Artificial Sequence
  Description of Artificial Sequence: Synthetic oligonucleotide
caggagauguugcacccca

SEQ ID NO: 3126218 - RNA, 19 nt, Artificial Sequence
  Description of Artificial Sequence: Synthetic oligonucleotide
uggacgagcaggagauguu

SEQ ID NO: 3126219 - RNA, 19 nt, Artificial Sequence
  Description of Artificial Sequence: Synthetic oligonucleotide
gaucucucgcaugugaaau

SEQ ID NO: 3126220 - RNA, 19 nt, Artificial Sequence
  Description of Artificial Sequence: Synthetic oligonucleotide
cacccuuuucaaagaucug

SEQ ID NO: 3126221 - RNA, 19 nt, Artificial Sequence
  Description of Artificial Sequence: Synthetic oligonucleotide
auggaagggcagucuucug

SEQ ID NO: 3126222 - RNA, 19 nt, Artificial Sequence
  Description of Artificial Sequence: Synthetic oligonucleotide
uggccacuaaagucacccu

SEQ ID NO: 3126223 - RNA, 19 nt, Artificial Sequence
  Description of Artificial Sequence: Synthetic oligonucleotide
gacuggacgagcaggagau

SEQ ID NO: 3126224 - RNA, 19 nt, Artificial Sequence
  Description of Artificial Sequence: Synthetic oligonucleotide
aguugaucucucgcaugug

SEQ ID NO: 3126225 - RNA, 19 nt, Artificial Sequence
  Description of Artificial Sequence: Synthetic oligonucleotide
ccuuacaggaguugaucuc

SEQ ID NO: 3126226 - RNA, 19 nt, Artificial Sequence
  Description of Artificial Sequence: Synthetic oligonucleotide
auccaggcgccuucuagua

SEQ ID NO: 3126227 - RNA, 19 nt, Artificial Sequence
  Description of Artificial Sequence: Synthetic oligonucleotide
aucgauggcuuccgguauu

SEQ ID NO: 3126228 - RNA, 19 nt, Artificial Sequence
  Description of Artificial Sequence: Synthetic oligonucleotide
cuuguccagaagauacugu

SEQ ID NO: 3126229 - RNA, 19 nt, Artificial Sequence
  Description of Artificial Sequence: Synthetic oligonucleotide
auggcuuccgguauuccuu

SEQ ID NO: 3126230 - RNA, 19 nt, Artificial Sequence
  Description of Artificial Sequence: Synthetic oligonucleotide
cuucuguuguuucaugcau

SEQ ID NO: 3126231 - RNA, 19 nt, Artificial Sequence
  Description of Artificial Sequence: Synthetic oligonucleotide
ucgauggcuuccgguauuc

SEQ ID NO: 3126232 - RNA, 19 nt, Artificial Sequence
  Description of Artificial Sequence: Synthetic oligonucleotide
agauacugucugccacggu

SEQ ID NO: 3126233 - RNA, 19 nt, Artificial Sequence
  Description of Artificial Sequence: Synthetic oligonucleotide
ggacgagcaggagauguug

SEQ ID NO: 3126234 - RNA, 19 nt, Artificial Sequence
  Description of Artificial Sequence: Synthetic oligonucleotide
gguaguuggguagcucaug

SEQ ID NO: 3126235 - RNA, 19 nt, Artificial Sequence
  Description of Artificial Sequence: Synthetic oligonucleotide
agggcagucuucuguuguu

SEQ ID NO: 3126236 - RNA, 19 nt, Artificial Sequence
  Description of Artificial Sequence: Synthetic oligonucleotide
gaaaauccaggcgccuucu

SEQ ID NO: 3126237 - RNA, 19 nt, Artificial Sequence
  Description of Artificial Sequence: Synthetic oligonucleotide
ggguagcucauggaaaauc

SEQ ID NO: 3126238 - RNA, 19 nt, Artificial Sequence
  Description of Artificial Sequence: Synthetic oligonucleotide
caccccaaucgauggcuuc

SEQ ID NO: 3126239 - RNA, 19 nt, Artificial Sequence
  Description of Artificial Sequence: Synthetic oligonucleotide
uggguagcucauggaaaau

SEQ ID NO: 3126240 - RNA, 19 nt, Artificial Sequence
  Description of Artificial Sequence: Synthetic oligonucleotide
cccuuuucaaagaucugaa

SEQ ID NO: 3126241 - RNA, 19 nt, Artificial Sequence
  Description of Artificial Sequence: Synthetic oligonucleotide
guauuccuucuuguccaga

SEQ ID NO: 3126242 - RNA, 19 nt, Artificial Sequence
  Description of Artificial Sequence: Synthetic oligonucleotide
acugucugccacgguaguu

SEQ ID NO: 3126243 - RNA, 19 nt, Artificial Sequence
  Description of Artificial Sequence: Synthetic oligonucleotide
cuggacgagcaggagaugu

SEQ ID NO: 3126244 - RNA, 19 nt, Artificial Sequence
  Description of Artificial Sequence: Synthetic oligonucleotide
cgguauuccuucuugucca

SEQ ID NO: 3126245 - RNA, 19 nt, Artificial Sequence
  Description of Artificial Sequence: Synthetic oligonucleotide
acuggacgagcaggagaug

SEQ ID NO: 3126246 - RNA, 19 nt, Artificial Sequence
  Description of Artificial Sequence: Synthetic oligonucleotide
cacgguaguuggguagcuc

SEQ ID NO: 3126247 - RNA, 19 nt, Artificial Sequence
  Description of Artificial Sequence: Synthetic oligonucleotide
caugauggaagggcagucu

SEQ ID NO: 3126248 - RNA, 19 nt, Artificial Sequence
  Description of Artificial Sequence: Synthetic oligonucleotide
auguugcaccccaaucgau

SEQ ID NO: 3126249 - RNA, 19 nt, Artificial Sequence
  Description of Artificial Sequence: Synthetic oligonucleotide
ggcgccuucuaguaccuua

SEQ ID NO: 3126250 - RNA, 19 nt, Artificial Sequence
  Description of Artificial Sequence: Synthetic oligonucleotide
gcuccaugauggaagggca

SEQ ID NO: 3126251 - RNA, 19 nt, Artificial Sequence
  Description of Artificial Sequence: Synthetic oligonucleotide
gccacgguaguuggguagc

SEQ ID NO: 3126252 - RNA, 19 nt, Artificial Sequence
  Description of Artificial Sequence: Synthetic oligonucleotide
cuaguaccuuacaggaguu

SEQ ID NO: 3126253 - RNA, 19 nt, Artificial Sequence
  Description of Artificial Sequence: Synthetic oligonucleotide
cccaaucgauggcuuccgg

SEQ ID NO: 3126254 - RNA, 19 nt, Artificial Sequence
  Description of Artificial Sequence: Synthetic oligonucleotide
ggagauguugcaccccaau

SEQ ID NO: 3126255 - RNA, 19 nt, Artificial Sequence
  Description of Artificial Sequence: Synthetic oligonucleotide
ccaugauggaagggcaguc

SEQ ID NO: 3126256 - RNA, 19 nt, Artificial Sequence
  Description of Artificial Sequence: Synthetic oligonucleotide
guaccuuacaggaguugau

SEQ ID NO: 3126257 - RNA, 19 nt, Artificial Sequence
  Description of Artificial Sequence: Synthetic oligonucleotide
gcgccuucuaguaccuuac

SEQ ID NO: 3126258 - RNA, 19 nt, Artificial Sequence
  Description of Artificial Sequence: Synthetic oligonucleotide
cgagcaggagauguugcac

SEQ ID NO: 3126259 - RNA, 19 nt, Artificial Sequence
  Description of Artificial Sequence: Synthetic oligonucleotide
ccccaaucgauggcuuccg

SEQ ID NO: 3126260 - RNA, 19 nt, Artificial Sequence
  Description of Artificial Sequence: Synthetic oligonucleotide
ggccacuaaagucacccuu

SEQ ID NO: 3126261 - RNA, 19 nt, Artificial Sequence
  Description of Artificial Sequence: Synthetic oligonucleotide
aggagauguugcaccccaa

SEQ ID NO: 3126262 - RNA, 19 nt, Artificial Sequence
  Description of Artificial Sequence: Synthetic oligonucleotide
cgcaugugaaauugcucca

SEQ ID NO: 3126263 - RNA, 19 nt, Artificial Sequence
  Description of Artificial Sequence: Synthetic oligonucleotide
ccaaucgauggcuuccggu

SEQ ID NO: 3126264 - RNA, 19 nt, Artificial Sequence
  Description of Artificial Sequence: Synthetic oligonucleotide
cugccacgguaguugggua

SEQ ID NO: 3126265 - RNA, 19 nt, Artificial Sequence
  Description of Artificial Sequence: Synthetic oligonucleotide
ccuuuucaaagaucugaau

SEQ ID NO: 3126266 - RNA, 19 nt, Artificial Sequence
  Description of Artificial Sequence: Synthetic oligonucleotide
gccacuaaagucacccuuu

SEQ ID NO: 3126267 - RNA, 19 nt, Artificial Sequence
  Description of Artificial Sequence: Synthetic oligonucleotide
ccuucuuguccagaagaua

SEQ ID NO: 3126268 - RNA, 19 nt, Artificial Sequence
  Description of Artificial Sequence: Synthetic oligonucleotide
gcaugugaaauugcuccau

SEQ ID NO: 3126269 - RNA, 19 nt, Artificial Sequence
  Description of Artificial Sequence: Synthetic oligonucleotide
caggcgccuucuaguaccu

SEQ ID NO: 3126270 - RNA, 19 nt, Artificial Sequence
  Description of Artificial Sequence: Synthetic oligonucleotide
cgauggcuuccgguauucc

SEQ ID NO: 3126271 - RNA, 19 nt, Artificial Sequence
  Description of Artificial Sequence: Synthetic oligonucleotide
ggcuuccgguauuccuucu

SEQ ID NO: 3126272 - RNA, 19 nt, Artificial Sequence
  Description of Artificial Sequence: Synthetic oligonucleotide
aggcgccuucuaguaccuu

SEQ ID NO: 3126273 - RNA, 19 nt, Artificial Sequence
  Description of Artificial Sequence: Synthetic oligonucleotide
ccacuaaagucacccuuuu

SEQ ID NO: 3126274 - RNA, 19 nt, Artificial Sequence
  Description of Artificial Sequence: Synthetic oligonucleotide
gggcagucuucuguuguuu

SEQ ID NO: 3126275 - RNA, 19 nt, Artificial Sequence
  Description of Artificial Sequence: Synthetic oligonucleotide
cgguaguuggguagcucau

SEQ ID NO: 3126276 - RNA, 19 nt, Artificial Sequence
  Description of Artificial Sequence: Synthetic oligonucleotide
gcaccccaaucgauggcuu

SEQ ID NO: 3126277 - RNA, 19 nt, Artificial Sequence
  Description of Artificial Sequence: Synthetic oligonucleotide
ccacgguaguuggguagcu

SEQ ID NO: 3126278 - RNA, 19 nt, Artificial Sequence
  Description of Artificial Sequence: Synthetic oligonucleotide
auuaugaauacuaaguugg

SEQ ID NO: 3126279 - RNA, 19 nt, Artificial Sequence
  Description of Artificial Sequence: Synthetic oligonucleotide
acaugaaagauucuggaac

SEQ ID NO: 3126280 - RNA, 19 nt, Artificial Sequence
  Description of Artificial Sequence: Synthetic oligonucleotide
uaucaaagcagacaucagg

SEQ ID NO: 3126281 - RNA, 19 nt, Artificial Sequence
  Description of Artificial Sequence: Synthetic oligonucleotide
aucacaaggaucuggaccg

SEQ ID NO: 3126282 - RNA, 19 nt, Artificial Sequence
  Description of Artificial Sequence: Synthetic oligonucleotide
uuuuccacaugaaagauuc

SEQ ID NO: 3126283 - RNA, 19 nt, Artificial Sequence
  Description of Artificial Sequence: Synthetic oligonucleotide
augaauacuaaguuggugu

SEQ ID NO: 3126284 - RNA, 19 nt, Artificial Sequence
  Description of Artificial Sequence: Synthetic oligonucleotide
uaucacaaggaucuggacc

SEQ ID NO: 3126285 - RNA, 19 nt, Artificial Sequence
  Description of Artificial Sequence: Synthetic oligonucleotide
uugcuuuccaccauuauga

SEQ ID NO: 3126286 - RNA, 19 nt, Artificial Sequence
  Description of Artificial Sequence: Synthetic oligonucleotide
uuugcuuuccaccauuaug

SEQ ID NO: 3126287 - RNA, 19 nt, Artificial Sequence
  Description of Artificial Sequence: Synthetic oligonucleotide
aaccauaucacaaggaucu

SEQ ID NO: 3126288 - RNA, 19 nt, Artificial Sequence
  Description of Artificial Sequence: Synthetic oligonucleotide
gacauuguuaucaaagcag

SEQ ID NO: 3126289 - RNA, 19 nt, Artificial Sequence
  Description of Artificial Sequence: Synthetic oligonucleotide
uccacaugaaagauucugg

SEQ ID NO: 3126290 - RNA, 19 nt, Artificial Sequence
  Description of Artificial Sequence: Synthetic oligonucleotide
uuguuaucaaagcagacau

SEQ ID NO: 3126291 - RNA, 19 nt, Artificial Sequence
  Description of Artificial Sequence: Synthetic oligonucleotide
acuaaguugguguucauga

SEQ ID NO: 3126292 - RNA, 19 nt, Artificial Sequence
  Description of Artificial Sequence: Synthetic oligonucleotide
uuaaccauaucacaaggau

SEQ ID NO: 3126293 - RNA, 19 nt, Artificial Sequence
  Description of Artificial Sequence: Synthetic oligonucleotide
cauuaugaauacuaaguug

SEQ ID NO: 3126294 - RNA, 19 nt, Artificial Sequence
  Description of Artificial Sequence: Synthetic oligonucleotide
ucuggaacaguucccacag

SEQ ID NO: 3126295 - RNA, 19 nt, Artificial Sequence
  Description of Artificial Sequence: Synthetic oligonucleotide
aauacuaaguugguguuca

SEQ ID NO: 3126296 - RNA, 19 nt, Artificial Sequence
  Description of Artificial Sequence: Synthetic oligonucleotide
uccaccauuaugaauacua

SEQ ID NO: 3126297 - RNA, 19 nt, Artificial Sequence
  Description of Artificial Sequence: Synthetic oligonucleotide
ucugcuugcaugagcagcc

SEQ ID NO: 3126298 - RNA, 19 nt, Artificial Sequence
  Description of Artificial Sequence: Synthetic oligonucleotide
cuuuccaccauuaugaaua

SEQ ID NO: 3126299 - RNA, 19 nt, Artificial Sequence
  Description of Artificial Sequence: Synthetic oligonucleotide
ugcuuaaccauaucacaag

SEQ ID NO: 3126300 - RNA, 19 nt, Artificial Sequence
  Description of Artificial Sequence: Synthetic oligonucleotide
aauccuuaccaggacauug

SEQ ID NO: 3126301 - RNA, 19 nt, Artificial Sequence
  Description of Artificial Sequence: Synthetic oligonucleotide
caaagcagacaucaggccc

SEQ ID NO: 3126302 - RNA, 19 nt, Artificial Sequence
  Description of Artificial Sequence: Synthetic oligonucleotide
uaaguugguguucaugagu

SEQ ID NO: 3126303 - RNA, 19 nt, Artificial Sequence
  Description of Artificial Sequence: Synthetic oligonucleotide
accauuaugaauacuaagu

SEQ ID NO: 3126304 - RNA, 19 nt, Artificial Sequence
  Description of Artificial Sequence: Synthetic oligonucleotide
ugucacuuugcuuuccacc

SEQ ID NO: 3126305 - RNA, 19 nt, Artificial Sequence
  Description of Artificial Sequence: Synthetic oligonucleotide
gacaucaggcccuuuucgg

SEQ ID NO: 3126306 - RNA, 19 nt, Artificial Sequence
  Description of Artificial Sequence: Synthetic oligonucleotide
uugcuuaaccauaucacaa

SEQ ID NO: 3126307 - RNA, 19 nt, Artificial Sequence
  Description of Artificial Sequence: Synthetic oligonucleotide
auuguuaucaaagcagaca

SEQ ID NO: 3126308 - RNA, 19 nt, Artificial Sequence
  Description of Artificial Sequence: Synthetic oligonucleotide
uaugaauacuaaguuggug

SEQ ID NO: 3126309 - RNA, 19 nt, Artificial Sequence
  Description of Artificial Sequence: Synthetic oligonucleotide
uuaucaaagcagacaucag

SEQ ID NO: 3126310 - RNA, 19 nt, Artificial Sequence
  Description of Artificial Sequence: Synthetic oligonucleotide
uaaccauaucacaaggauc

SEQ ID NO: 3126311 - RNA, 19 nt, Artificial Sequence
  Description of Artificial Sequence: Synthetic oligonucleotide
ucaaagcagacaucaggcc

SEQ ID NO: 3126312 - RNA, 19 nt, Artificial Sequence
  Description of Artificial Sequence: Synthetic oligonucleotide
uuaugaauacuaaguuggu

SEQ ID NO: 3126313 - RNA, 19 nt, Artificial Sequence
  Description of Artificial Sequence: Synthetic oligonucleotide
ugucacagggacaugucac

SEQ ID NO: 3126314 - RNA, 19 nt, Artificial Sequence
  Description of Artificial Sequence: Synthetic oligonucleotide
agccgugugucacagggac

SEQ ID NO: 3126315 - RNA, 19 nt, Artificial Sequence
  Description of Artificial Sequence: Synthetic oligonucleotide
uggaacaguucccacaguc

SEQ ID NO: 3126316 - RNA, 19 nt, Artificial Sequence
  Description of Artificial Sequence: Synthetic oligonucleotide
agaagucugcucugcuugc

SEQ ID NO: 3126317 - RNA, 19 nt, Artificial Sequence
  Description of Artificial Sequence: Synthetic oligonucleotide
agacaucaggcccuuuucg

SEQ ID NO: 3126318 - RNA, 19 nt, Artificial Sequence
  Description of Artificial Sequence: Synthetic oligonucleotide
uuccacaugaaagauucug

SEQ ID NO: 3126319 - RNA, 19 nt, Artificial Sequence
  Description of Artificial Sequence: Synthetic oligonucleotide
auaucacaaggaucuggac

SEQ ID NO: 3126320 - RNA, 19 nt, Artificial Sequence
  Description of Artificial Sequence: Synthetic oligonucleotide
guugcuuaaccauaucaca

SEQ ID NO: 3126321 - RNA, 19 nt, Artificial Sequence
  Description of Artificial Sequence: Synthetic oligonucleotide
uaccaggacauuguuauca

SEQ ID NO: 3126322 - RNA, 19 nt, Artificial Sequence
  Description of Artificial Sequence: Synthetic oligonucleotide
caugaaagauucuggaaca

SEQ ID NO: 3126323 - RNA, 19 nt, Artificial Sequence
  Description of Artificial Sequence: Synthetic oligonucleotide
caccauuaugaauacuaag

SEQ ID NO: 3126324 - RNA, 19 nt, Artificial Sequence
  Description of Artificial Sequence: Synthetic oligonucleotide
accgucagaagucugcucu

SEQ ID NO: 3126325 - RNA, 19 nt, Artificial Sequence
  Description of Artificial Sequence: Synthetic oligonucleotide
aaagcagacaucaggcccu

SEQ ID NO: 3126326 - RNA, 19 nt, Artificial Sequence
  Description of Artificial Sequence: Synthetic oligonucleotide
guaucuggguugcuuaacc

SEQ ID NO: 3126327 - RNA, 19 nt, Artificial Sequence
  Description of Artificial Sequence: Synthetic oligonucleotide
uucuggaacaguucccaca

SEQ ID NO: 3126328 - RNA, 19 nt, Artificial Sequence
  Description of Artificial Sequence: Synthetic oligonucleotide
cauaucacaaggaucugga

SEQ ID NO: 3126329 - RNA, 19 nt, Artificial Sequence
  Description of Artificial Sequence: Synthetic oligonucleotide
acagggacaugucacuuug

SEQ ID NO: 3126330 - RNA, 19 nt, Artificial Sequence
  Description of Artificial Sequence: Synthetic oligonucleotide
cuuuucgguaucuggguug

SEQ ID NO: 3126331 - RNA, 19 nt, Artificial Sequence
  Description of Artificial Sequence: Synthetic oligonucleotide
gcuuaaccauaucacaagg

SEQ ID NO: 3126332 - RNA, 19 nt, Artificial Sequence
  Description of Artificial Sequence: Synthetic oligonucleotide
ugaauacuaaguugguguu

SEQ ID NO: 3126333 - RNA, 19 nt, Artificial Sequence
  Description of Artificial Sequence: Synthetic oligonucleotide
cuaaguugguguucaugag

SEQ ID NO: 3126334 - RNA, 19 nt, Artificial Sequence
  Description of Artificial Sequence: Synthetic oligonucleotide
uggaccgucagaagucugc

SEQ ID NO: 3126335 - RNA, 19 nt, Artificial Sequence
  Description of Artificial Sequence: Synthetic oligonucleotide
gucacuuugcuuuccacca

SEQ ID NO: 3126336 - RNA, 19 nt, Artificial Sequence
  Description of Artificial Sequence: Synthetic oligonucleotide
cauuguuaucaaagcagac

SEQ ID NO: 3126337 - RNA, 19 nt, Artificial Sequence
  Description of Artificial Sequence: Synthetic oligonucleotide
aguucccacaguccaggac

SEQ ID NO: 3126338 - RNA, 19 nt, Artificial Sequence
  Description of Artificial Sequence: Synthetic oligonucleotide
cagaagucugcucugcuug

SEQ ID NO: 3126339 - RNA, 19 nt, Artificial Sequence
  Description of Artificial Sequence: Synthetic oligonucleotide
agauucuggaacaguuccc

SEQ ID NO: 3126340 - RNA, 19 nt, Artificial Sequence
  Description of Artificial Sequence: Synthetic oligonucleotide
auucuggaacaguucccac

SEQ ID NO: 3126341 - RNA, 19 nt, Artificial Sequence
  Description of Artificial Sequence: Synthetic oligonucleotide
ugcaugagcagccgugugu

SEQ ID NO: 3126342 - RNA, 19 nt, Artificial Sequence
  Description of Artificial Sequence: Synthetic oligonucleotide
uaucuggguugcuuaacca

SEQ ID NO: 3126343 - RNA, 19 nt, Artificial Sequence
  Description of Artificial Sequence: Synthetic oligonucleotide
acauuguuaucaaagcaga

SEQ ID NO: 3126344 - RNA, 19 nt, Artificial Sequence
  Description of Artificial Sequence: Synthetic oligonucleotide
cuuaccaggacauuguuau

SEQ ID NO: 3126345 - RNA, 19 nt, Artificial Sequence
  Description of Artificial Sequence: Synthetic oligonucleotide
ugaaagauucuggaacagu

SEQ ID NO: 3126346 - RNA, 19 nt, Artificial Sequence
  Description of Artificial Sequence: Synthetic oligonucleotide
cuuaaccauaucacaagga

SEQ ID NO: 3126347 - RNA, 19 nt, Artificial Sequence
  Description of Artificial Sequence: Synthetic oligonucleotide
ucuggguugcuuaaccaua

SEQ ID NO: 3126348 - RNA, 19 nt, Artificial Sequence
  Description of Artificial Sequence: Synthetic oligonucleotide
uuuucgguaucuggguugc

SEQ ID NO: 3126349 - RNA, 19 nt, Artificial Sequence
  Description of Artificial Sequence: Synthetic oligonucleotide
uguuaucaaagcagacauc

SEQ ID NO: 3126350 - RNA, 19 nt, Artificial Sequence
  Description of Artificial Sequence: Synthetic oligonucleotide
aaguugguguucaugaguu

SEQ ID NO: 3126351 - RNA, 19 nt, Artificial Sequence
  Description of Artificial Sequence: Synthetic oligonucleotide
gauucuggaacaguuccca

SEQ ID NO: 3126352 - RNA, 19 nt, Artificial Sequence
  Description of Artificial Sequence: Synthetic oligonucleotide
agggacaugucacuuugcu

SEQ ID NO: 3126353 - RNA, 19 nt, Artificial Sequence
  Description of Artificial Sequence: Synthetic oligonucleotide
gcagccgugugucacaggg

SEQ ID NO: 3126354 - RNA, 19 nt, Artificial Sequence
  Description of Artificial Sequence: Synthetic oligonucleotide
uuuccaccauuaugaauac

SEQ ID NO: 3126355 - RNA, 19 nt, Artificial Sequence
  Description of Artificial Sequence: Synthetic oligonucleotide
acaucaggcccuuuucggu

SEQ ID NO: 3126356 - RNA, 19 nt, Artificial Sequence
  Description of Artificial Sequence: Synthetic oligonucleotide
augagcagccgugugucac

SEQ ID NO: 3126357 - RNA, 19 nt, Artificial Sequence
  Description of Artificial Sequence: Synthetic oligonucleotide
augaaagauucuggaacag

SEQ ID NO: 3126358 - RNA, 19 nt, Artificial Sequence
  Description of Artificial Sequence: Synthetic oligonucleotide
gaucuggaccgucagaagu

SEQ ID NO: 3126359 - RNA, 19 nt, Artificial Sequence
  Description of Artificial Sequence: Synthetic oligonucleotide
aaggaucuggaccgucaga

SEQ ID NO: 3126360 - RNA, 19 nt, Artificial Sequence
  Description of Artificial Sequence: Synthetic oligonucleotide
aucuggguugcuuaaccau

SEQ ID NO: 3126361 - RNA, 19 nt, Artificial Sequence
  Description of Artificial Sequence: Synthetic oligonucleotide
aucuggaccgucagaaguc

SEQ ID NO: 3126362 - RNA, 19 nt, Artificial Sequence
  Description of Artificial Sequence: Synthetic oligonucleotide
gaauacuaaguugguguuc

SEQ ID NO: 3126363 - RNA, 19 nt, Artificial Sequence
  Description of Artificial Sequence: Synthetic oligonucleotide
cucugcuugcaugagcagc

SEQ ID NO: 3126364 - RNA, 19 nt, Artificial Sequence
  Description of Artificial Sequence: Synthetic oligonucleotide
gguugcuuaaccauaucac

SEQ ID NO: 3126365 - RNA, 19 nt, Artificial Sequence
  Description of Artificial Sequence: Synthetic oligonucleotide
ugugucacagggacauguc

SEQ ID NO: 3126366 - RNA, 19 nt, Artificial Sequence
  Description of Artificial Sequence: Synthetic oligonucleotide
acaugucacuuugcuuucc

SEQ ID NO: 3126367 - RNA, 19 nt, Artificial Sequence
  Description of Artificial Sequence: Synthetic oligonucleotide
agucugcucugcuugcaug

SEQ ID NO: 3126368 - RNA, 19 nt, Artificial Sequence
  Description of Artificial Sequence: Synthetic oligonucleotide
aggaucuggaccgucagaa

SEQ ID NO: 3126369 - RNA, 19 nt, Artificial Sequence
  Description of Artificial Sequence: Synthetic oligonucleotide
caaggaucuggaccgucag

SEQ ID NO: 3126370 - RNA, 19 nt, Artificial Sequence
  Description of Artificial Sequence: Synthetic oligonucleotide
gacaugucacuuugcuuuc

SEQ ID NO: 3126371 - RNA, 19 nt, Artificial Sequence
  Description of Artificial Sequence: Synthetic oligonucleotide
ucagaagucugcucugcuu

SEQ ID NO: 3126372 - RNA, 19 nt, Artificial Sequence
  Description of Artificial Sequence: Synthetic oligonucleotide
gaaagauucuggaacaguu

SEQ ID NO: 3126373 - RNA, 19 nt, Artificial Sequence
  Description of Artificial Sequence: Synthetic oligonucleotide
aagucugcucugcuugcau

SEQ ID NO: 3126374 - RNA, 19 nt, Artificial Sequence
  Description of Artificial Sequence: Synthetic oligonucleotide
uuuccacaugaaagauucu

SEQ ID NO: 3126375 - RNA, 19 nt, Artificial Sequence
  Description of Artificial Sequence: Synthetic oligonucleotide
ucgguaucuggguugcuua

SEQ ID NO: 3126376 - RNA, 19 nt, Artificial Sequence
  Description of Artificial Sequence: Synthetic oligonucleotide
cacaugaaagauucuggaa

SEQ ID NO: 3126377 - RNA, 19 nt, Artificial Sequence
  Description of Artificial Sequence: Synthetic oligonucleotide
ggguugcuuaaccauauca

SEQ ID NO: 3126378 - RNA, 19 nt, Artificial Sequence
  Description of Artificial Sequence: Synthetic oligonucleotide
ugagcagccgugugucaca

SEQ ID NO: 3126379 - RNA, 19 nt, Artificial Sequence
  Description of Artificial Sequence: Synthetic oligonucleotide
uugcaugagcagccgugug

SEQ ID NO: 3126380 - RNA, 19 nt, Artificial Sequence
  Description of Artificial Sequence: Synthetic oligonucleotide
uucccacaguccaggacac

SEQ ID NO: 3126381 - RNA, 19 nt, Artificial Sequence
  Description of Artificial Sequence: Synthetic oligonucleotide
ggcccuuuucgguaucugg

SEQ ID NO: 3126382 - RNA, 19 nt, Artificial Sequence
  Description of Artificial Sequence: Synthetic oligonucleotide
ucuggaccgucagaagucu

SEQ ID NO: 3126383 - RNA, 19 nt, Artificial Sequence
  Description of Artificial Sequence: Synthetic oligonucleotide
ugcuuuccaccauuaugaa

SEQ ID NO: 3126384 - RNA, 19 nt, Artificial Sequence
  Description of Artificial Sequence: Synthetic oligonucleotide
ggacaugucacuuugcuuu

SEQ ID NO: 3126385 - RNA, 19 nt, Artificial Sequence
  Description of Artificial Sequence: Synthetic oligonucleotide
cagacaucaggcccuuuuc

SEQ ID NO: 3126386 - RNA, 19 nt, Artificial Sequence
  Description of Artificial Sequence: Synthetic oligonucleotide
ucacuuugcuuuccaccau

SEQ ID NO: 3126387 - RNA, 19 nt, Artificial Sequence
  Description of Artificial Sequence: Synthetic oligonucleotide
ggaacaguucccacagucc

SEQ ID NO: 3126388 - RNA, 19 nt, Artificial Sequence
  Description of Artificial Sequence: Synthetic oligonucleotide
gacaccacugaaugauuua

SEQ ID NO: 3126389 - RNA, 19 nt, Artificial Sequence
  Description of Artificial Sequence: Synthetic oligonucleotide
aguccaggacaccacugaa

SEQ ID NO: 3126390 - RNA, 19 nt, Artificial Sequence
  Description of Artificial Sequence: Synthetic oligonucleotide
gugucacagggacauguca

SEQ ID NO: 3126391 - RNA, 19 nt, Artificial Sequence
  Description of Artificial Sequence: Synthetic oligonucleotide
ugcuugcaugagcagccgu

SEQ ID NO: 3126392 - RNA, 19 nt, Artificial Sequence
  Description of Artificial Sequence: Synthetic oligonucleotide
ccauaucacaaggaucugg

SEQ ID NO: 3126393 - RNA, 19 nt, Artificial Sequence
  Description of Artificial Sequence: Synthetic oligonucleotide
uccuuaccaggacauuguu

SEQ ID NO: 3126394 - RNA, 19 nt, Artificial Sequence
  Description of Artificial Sequence: Synthetic oligonucleotide
uuaccaggacauuguuauc

SEQ ID NO: 3126395 - RNA, 19 nt, Artificial Sequence
  Description of Artificial Sequence: Synthetic oligonucleotide
acaaggaucuggaccguca

SEQ ID NO: 3126396 - RNA, 19 nt, Artificial Sequence
  Description of Artificial Sequence: Synthetic oligonucleotide
gcccuuuucgguaucuggg

SEQ ID NO: 3126397 - RNA, 19 nt, Artificial Sequence
  Description of Artificial Sequence: Synthetic oligonucleotide
auccuuaccaggacauugu

SEQ ID NO: 3126398 - RNA, 19 nt, Artificial Sequence
  Description of Artificial Sequence: Synthetic oligonucleotide
cugcucugcuugcaugagc

SEQ ID NO: 3126399 - RNA, 19 nt, Artificial Sequence
  Description of Artificial Sequence: Synthetic oligonucleotide
uucgguaucuggguugcuu

SEQ ID NO: 3126400 - RNA, 19 nt, Artificial Sequence
  Description of Artificial Sequence: Synthetic oligonucleotide
caugucacuuugcuuucca

SEQ ID NO: 3126401 - RNA, 19 nt, Artificial Sequence
  Description of Artificial Sequence: Synthetic oligonucleotide
uggguugcuuaaccauauc

SEQ ID NO: 3126402 - RNA, 19 nt, Artificial Sequence
  Description of Artificial Sequence: Synthetic oligonucleotide
cagggacaugucacuuugc

SEQ ID NO: 3126403 - RNA, 19 nt, Artificial Sequence
  Description of Artificial Sequence: Synthetic oligonucleotide
ggaucuggaccgucagaag

SEQ ID NO: 3126404 - RNA, 19 nt, Artificial Sequence
  Description of Artificial Sequence: Synthetic oligonucleotide
ccacaugaaagauucugga

SEQ ID NO: 3126405 - RNA, 19 nt, Artificial Sequence
  Description of Artificial Sequence: Synthetic oligonucleotide
aguugguguucaugaguuu

SEQ ID NO: 3126406 - RNA, 19 nt, Artificial Sequence
  Description of Artificial Sequence: Synthetic oligonucleotide
acaguccaggacaccacug

SEQ ID NO: 3126407 - RNA, 19 nt, Artificial Sequence
  Description of Artificial Sequence: Synthetic oligonucleotide
caguccaggacaccacuga

SEQ ID NO: 3126408 - RNA, 19 nt, Artificial Sequence
  Description of Artificial Sequence: Synthetic oligonucleotide
gaagucugcucugcuugca

SEQ ID NO: 3126409 - RNA, 19 nt, Artificial Sequence
  Description of Artificial Sequence: Synthetic oligonucleotide
ucacagggacaugucacuu

SEQ ID NO: 3126410 - RNA, 19 nt, Artificial Sequence
  Description of Artificial Sequence: Synthetic oligonucleotide
auacuaaguugguguucau

SEQ ID NO: 3126411 - RNA, 19 nt, Artificial Sequence
  Description of Artificial Sequence: Synthetic oligonucleotide
gagcagccgugugucacag

SEQ ID NO: 3126412 - RNA, 19 nt, Artificial Sequence
  Description of Artificial Sequence: Synthetic oligonucleotide
accauaucacaaggaucug

SEQ ID NO: 3126413 - RNA, 19 nt, Artificial Sequence
  Description of Artificial Sequence: Synthetic oligonucleotide
gaccgucagaagucugcuc

SEQ ID NO: 3126414 - RNA, 19 nt, Artificial Sequence
  Description of Artificial Sequence: Synthetic oligonucleotide
gcuugcaugagcagccgug

SEQ ID NO: 3126415 - RNA, 19 nt, Artificial Sequence
  Description of Artificial Sequence: Synthetic oligonucleotide
guugguguucaugaguuuu

SEQ ID NO: 3126416 - RNA, 19 nt, Artificial Sequence
  Description of Artificial Sequence: Synthetic oligonucleotide
uuccaccauuaugaauacu

SEQ ID NO: 3126417 - RNA, 19 nt, Artificial Sequence
  Description of Artificial Sequence: Synthetic oligonucleotide
caucaggcccuuuucggua

SEQ ID NO: 3126418 - RNA, 19 nt, Artificial Sequence
  Description of Artificial Sequence: Synthetic oligonucleotide
cuggaccgucagaagucug

SEQ ID NO: 3126419 - RNA, 19 nt, Artificial Sequence
  Description of Artificial Sequence: Synthetic oligonucleotide
cugcuugcaugagcagccg

SEQ ID NO: 3126420 - RNA, 19 nt, Artificial Sequence
  Description of Artificial Sequence: Synthetic oligonucleotide
agcagccgugugucacagg

SEQ ID NO: 3126421 - RNA, 19 nt, Artificial Sequence
  Description of Artificial Sequence: Synthetic oligonucleotide
ucaggcccuuuucgguauc

SEQ ID NO: 3126422 - RNA, 19 nt, Artificial Sequence
  Description of Artificial Sequence: Synthetic oligonucleotide
ucacaaggaucuggaccgu

SEQ ID NO: 3126423 - RNA, 19 nt, Artificial Sequence
  Description of Artificial Sequence: Synthetic oligonucleotide
gguaucuggguugcuuaac

SEQ ID NO: 3126424 - RNA, 19 nt, Artificial Sequence
  Description of Artificial Sequence: Synthetic oligonucleotide
acuuugcuuuccaccauua

SEQ ID NO: 3126425 - RNA, 19 nt, Artificial Sequence
  Description of Artificial Sequence: Synthetic oligonucleotide
gugugucacagggacaugu

SEQ ID NO: 3126426 - RNA, 19 nt, Artificial Sequence
  Description of Artificial Sequence: Synthetic oligonucleotide
caggacaccacugaaugau

SEQ ID NO: 3126427 - RNA, 19 nt, Artificial Sequence
  Description of Artificial Sequence: Synthetic oligonucleotide
cacaaggaucuggaccguc

SEQ ID NO: 3126428 - RNA, 19 nt, Artificial Sequence
  Description of Artificial Sequence: Synthetic oligonucleotide
gcaugagcagccguguguc

SEQ ID NO: 3126429 - RNA, 19 nt, Artificial Sequence
  Description of Artificial Sequence: Synthetic oligonucleotide
ccauuaugaauacuaaguu

SEQ ID NO: 3126430 - RNA, 19 nt, Artificial Sequence
  Description of Artificial Sequence: Synthetic oligonucleotide
cuggguugcuuaaccauau

SEQ ID NO: 3126431 - RNA, 19 nt, Artificial Sequence
  Description of Artificial Sequence: Synthetic oligonucleotide
caugagcagccguguguca

SEQ ID NO: 3126432 - RNA, 19 nt, Artificial Sequence
  Description of Artificial Sequence: Synthetic oligonucleotide
ccaccauuaugaauacuaa

SEQ ID NO: 3126433 - RNA, 19 nt, Artificial Sequence
  Description of Artificial Sequence: Synthetic oligonucleotide
gcucugcuugcaugagcag

SEQ ID NO: 3126434 - RNA, 19 nt, Artificial Sequence
  Description of Artificial Sequence: Synthetic oligonucleotide
ucccacaguccaggacacc

SEQ ID NO: 3126435 - RNA, 19 nt, Artificial Sequence
  Description of Artificial Sequence: Synthetic oligonucleotide
aggcccuuuucgguaucug

SEQ ID NO: 3126436 - RNA, 19 nt, Artificial Sequence
  Description of Artificial Sequence: Synthetic oligonucleotide
cuugcaugagcagccgugu

SEQ ID NO: 3126437 - RNA, 19 nt, Artificial Sequence
  Description of Artificial Sequence: Synthetic oligonucleotide
uuucgguaucuggguugcu

SEQ ID NO: 3126438 - RNA, 19 nt, Artificial Sequence
  Description of Artificial Sequence: Synthetic oligonucleotide
cacaguccaggacaccacu

SEQ ID NO: 3126439 - RNA, 19 nt, Artificial Sequence
  Description of Artificial Sequence: Synthetic oligonucleotide
aggacaccacugaaugauu

SEQ ID NO: 3126440 - RNA, 19 nt, Artificial Sequence
  Description of Artificial Sequence: Synthetic oligonucleotide
caguucccacaguccagga

SEQ ID NO: 3126441 - RNA, 19 nt, Artificial Sequence
  Description of Artificial Sequence: Synthetic oligonucleotide
ccgucagaagucugcucug

SEQ ID NO: 3126442 - RNA, 19 nt, Artificial Sequence
  Description of Artificial Sequence: Synthetic oligonucleotide
ccuuaccaggacauuguua

SEQ ID NO: 3126443 - RNA, 19 nt, Artificial Sequence
  Description of Artificial Sequence: Synthetic oligonucleotide
cccacaguccaggacacca

SEQ ID NO: 3126444 - RNA, 19 nt, Artificial Sequence
  Description of Artificial Sequence: Synthetic oligonucleotide
cagccgugugucacaggga

SEQ ID NO: 3126445 - RNA, 19 nt, Artificial Sequence
  Description of Artificial Sequence: Synthetic oligonucleotide
gcuuuccaccauuaugaau

SEQ ID NO: 3126446 - RNA, 19 nt, Artificial Sequence
  Description of Artificial Sequence: Synthetic oligonucleotide
gcagacaucaggcccuuuu

SEQ ID NO: 3126447 - RNA, 19 nt, Artificial Sequence
  Description of Artificial Sequence: Synthetic oligonucleotide
ccaggacaccacugaauga

SEQ ID NO: 3126448 - RNA, 19 nt, Artificial Sequence
  Description of Artificial Sequence: Synthetic oligonucleotide
cacuuugcuuuccaccauu

SEQ ID NO: 3126449 - RNA, 19 nt, Artificial Sequence
  Description of Artificial Sequence: Synthetic oligonucleotide
cacagggacaugucacuuu

SEQ ID NO: 3126450 - RNA, 19 nt, Artificial Sequence
  Description of Artificial Sequence: Synthetic oligonucleotide
guccaggacaccacugaau

SEQ ID NO: 3126451 - RNA, 19 nt, Artificial Sequence
  Description of Artificial Sequence: Synthetic oligonucleotide
gggacaugucacuuugcuu

SEQ ID NO: 3126452 - RNA, 19 nt, Artificial Sequence
  Description of Artificial Sequence: Synthetic oligonucleotide
cccuuuucgguaucugggu

SEQ ID NO: 3126453 - RNA, 19 nt, Artificial Sequence
  Description of Artificial Sequence: Synthetic oligonucleotide
ggaccgucagaagucugcu

SEQ ID NO: 3126454 - RNA, 19 nt, Artificial Sequence
  Description of Artificial Sequence: Synthetic oligonucleotide
cuggaacaguucccacagu

SEQ ID NO: 3126455 - RNA, 19 nt, Artificial Sequence
  Description of Artificial Sequence: Synthetic oligonucleotide
ccgugugucacagggacau

SEQ ID NO: 3126456 - RNA, 19 nt, Artificial Sequence
  Description of Artificial Sequence: Synthetic oligonucleotide
gccgugugucacagggaca

SEQ ID NO: 3126457 - RNA, 19 nt, Artificial Sequence
  Description of Artificial Sequence: Synthetic oligonucleotide
ccuuuucgguaucuggguu

SEQ ID NO: 3126458 - RNA, 19 nt, Artificial Sequence
  Description of Artificial Sequence: Synthetic oligonucleotide
caggcccuuuucgguaucu

SEQ ID NO: 3126459 - RNA, 19 nt, Artificial Sequence
  Description of Artificial Sequence: Synthetic oligonucleotide
cgguaucuggguugcuuaa

SEQ ID NO: 3126460 - RNA, 19 nt, Artificial Sequence
  Description of Artificial Sequence: Synthetic oligonucleotide
cgugugucacagggacaug

SEQ ID NO: 3126461 - RNA, 19 nt, Artificial Sequence
  Description of Artificial Sequence: Synthetic oligonucleotide
uuugaguuuauucugauug

SEQ ID NO: 3126462 - RNA, 19 nt, Artificial Sequence
  Description of Artificial Sequence: Synthetic oligonucleotide
acauaguugauucagugcc

SEQ ID NO: 3126463 - RNA, 19 nt, Artificial Sequence
  Description of Artificial Sequence: Synthetic oligonucleotide
uugguuucuggauaaaccg

SEQ ID NO: 3126464 - RNA, 19 nt, Artificial Sequence
  Description of Artificial Sequence: Synthetic oligonucleotide
augaagacauaguugauuc

SEQ ID NO: 3126465 - RNA, 19 nt, Artificial Sequence
  Description of Artificial Sequence: Synthetic oligonucleotide
aauaaaacauguaauauuu

SEQ ID NO: 3126466 - RNA, 19 nt, Artificial Sequence
  Description of Artificial Sequence: Synthetic oligonucleotide
cuugguuucuggauaaacc

SEQ ID NO: 3126467 - RNA, 19 nt, Artificial Sequence
  Description of Artificial Sequence: Synthetic oligonucleotide
uuauuuucuugguuucugg

SEQ ID NO: 3126468 - RNA, 19 nt, Artificial Sequence
  Description of Artificial Sequence: Synthetic oligonucleotide
gaagacauaguugauucag

SEQ ID NO: 3126469 - RNA, 19 nt, Artificial Sequence
  Description of Artificial Sequence: Synthetic oligonucleotide
gauaaaccgcccuuugggg

SEQ ID NO: 3126470 - RNA, 19 nt, Artificial Sequence
  Description of Artificial Sequence: Synthetic oligonucleotide
gagaauaaaacauguaaua

SEQ ID NO: 3126471 - RNA, 19 nt, Artificial Sequence
  Description of Artificial Sequence: Synthetic oligonucleotide
aguugauucagugcccucc

SEQ ID NO: 3126472 - RNA, 19 nt, Artificial Sequence
  Description of Artificial Sequence: Synthetic oligonucleotide
gacauaguugauucagugc

SEQ ID NO: 3126473 - RNA, 19 nt, Artificial Sequence
  Description of Artificial Sequence: Synthetic oligonucleotide
agacauaguugauucagug

SEQ ID NO: 3126474 - RNA, 19 nt, Artificial Sequence
  Description of Artificial Sequence: Synthetic oligonucleotide
ucguaaugaagacauaguu

SEQ ID NO: 3126475 - RNA, 19 nt, Artificial Sequence
  Description of Artificial Sequence: Synthetic oligonucleotide
uggauaaaccgcccuuugg

SEQ ID NO: 3126476 - RNA, 19 nt, Artificial Sequence
  Description of Artificial Sequence: Synthetic oligonucleotide
uuuucuugguuucuggaua

SEQ ID NO: 3126477 - RNA, 19 nt, Artificial Sequence
  Description of Artificial Sequence: Synthetic oligonucleotide
agaauaaaacauguaauau

SEQ ID NO: 3126478 - RNA, 19 nt, Artificial Sequence
  Description of Artificial Sequence: Synthetic oligonucleotide
gaugggagaauaaaacaug

SEQ ID NO: 3126479 - RNA, 19 nt, Artificial Sequence
  Description of Artificial Sequence: Synthetic oligonucleotide
ggauaaaccgcccuuuggg

SEQ ID NO: 3126480 - RNA, 19 nt, Artificial Sequence
  Description of Artificial Sequence: Synthetic oligonucleotide
uauuuucuugguuucugga

SEQ ID NO: 3126481 - RNA, 19 nt, Artificial Sequence
  Description of Artificial Sequence: Synthetic oligonucleotide
aaugaagacauaguugauu

SEQ ID NO: 3126482 - RNA, 19 nt, Artificial Sequence
  Description of Artificial Sequence: Synthetic oligonucleotide
gaguggauggguuucuccc

SEQ ID NO: 3126483 - RNA, 19 nt, Artificial Sequence
  Description of Artificial Sequence: Synthetic oligonucleotide
ugguuucuggauaaaccgc

SEQ ID NO: 3126484 - RNA, 19 nt, Artificial Sequence
  Description of Artificial Sequence: Synthetic oligonucleotide
auggguuucucccuuugag

SEQ ID NO: 3126485 - RNA, 19 nt, Artificial Sequence
  Description of Artificial Sequence: Synthetic oligonucleotide
uugaguuuauucugauuga

SEQ ID NO: 3126486 - RNA, 19 nt, Artificial Sequence
  Description of Artificial Sequence: Synthetic oligonucleotide
ucuggggaccuccugaggu

SEQ ID NO: 3126487 - RNA, 19 nt, Artificial Sequence
  Description of Artificial Sequence: Synthetic oligonucleotide
gaauaaaacauguaauauu

SEQ ID NO: 3126488 - RNA, 19 nt, Artificial Sequence
  Description of Artificial Sequence: Synthetic oligonucleotide
ucucccuuugaguuuauuc

SEQ ID NO: 3126489 - RNA, 19 nt, Artificial Sequence
  Description of Artificial Sequence: Synthetic oligonucleotide
ucccuuugaguuuauucug

SEQ ID NO: 3126490 - RNA, 19 nt, Artificial Sequence
  Description of Artificial Sequence: Synthetic oligonucleotide
cauaguugauucagugccc

SEQ ID NO: 3126491 - RNA, 19 nt, Artificial Sequence
  Description of Artificial Sequence: Synthetic oligonucleotide
uuucuugguuucuggauaa

SEQ ID NO: 3126492 - RNA, 19 nt, Artificial Sequence
  Description of Artificial Sequence: Synthetic oligonucleotide
gggagaauaaaacauguaa

SEQ ID NO: 3126493 - RNA, 19 nt, Artificial Sequence
  Description of Artificial Sequence: Synthetic oligonucleotide
auaaaccgcccuuugggga

SEQ ID NO: 3126494 - RNA, 19 nt, Artificial Sequence
  Description of Artificial Sequence: Synthetic oligonucleotide
ugaagacauaguugauuca

SEQ ID NO: 3126495 - RNA, 19 nt, Artificial Sequence
  Description of Artificial Sequence: Synthetic oligonucleotide
uuucuggauaaaccgcccu

SEQ ID NO: 3126496 - RNA, 19 nt, Artificial Sequence
  Description of Artificial Sequence: Synthetic oligonucleotide
uggggaugggagaauaaaa

SEQ ID NO: 3126497 - RNA, 19 nt, Artificial Sequence
  Description of Artificial Sequence: Synthetic oligonucleotide
ugaguggauggguuucucc

SEQ ID NO: 3126498 - RNA, 19 nt, Artificial Sequence
  Description of Artificial Sequence: Synthetic oligonucleotide
uggccugccugccugguag

SEQ ID NO: 3126499 - RNA, 19 nt, Artificial Sequence
  Description of Artificial Sequence: Synthetic oligonucleotide
ucuugguuucuggauaaac

SEQ ID NO: 3126500 - RNA, 19 nt, Artificial Sequence
  Description of Artificial Sequence: Synthetic oligonucleotide
uggguuucucccuuugagu

SEQ ID NO: 3126501 - RNA, 19 nt, Artificial Sequence
  Description of Artificial Sequence: Synthetic oligonucleotide
guugauucagugcccuccc

SEQ ID NO: 3126502 - RNA, 19 nt, Artificial Sequence
  Description of Artificial Sequence: Synthetic oligonucleotide
uuugcggugggcagggguc

SEQ ID NO: 3126503 - RNA, 19 nt, Artificial Sequence
  Description of Artificial Sequence: Synthetic oligonucleotide
ugaguuuauucugauugau

SEQ ID NO: 3126504 - RNA, 19 nt, Artificial Sequence
  Description of Artificial Sequence: Synthetic oligonucleotide
uaaugaagacauaguugau

SEQ ID NO: 3126505 - RNA, 19 nt, Artificial Sequence
  Description of Artificial Sequence: Synthetic oligonucleotide
augggagaauaaaacaugu

SEQ ID NO: 3126506 - RNA, 19 nt, Artificial Sequence
  Description of Artificial Sequence: Synthetic oligonucleotide
aagacauaguugauucagu

SEQ ID NO: 3126507 - RNA, 19 nt, Artificial Sequence
  Description of Artificial Sequence: Synthetic oligonucleotide
cguaaugaagacauaguug

SEQ ID NO: 3126508 - RNA, 19 nt, Artificial Sequence
  Description of Artificial Sequence: Synthetic oligonucleotide
ugggagaauaaaacaugua

SEQ ID NO: 3126509 - RNA, 19 nt, Artificial Sequence
  Description of Artificial Sequence: Synthetic oligonucleotide
ugggcugcuggccugccug

SEQ ID NO: 3126510 - RNA, 19 nt, Artificial Sequence
  Description of Artificial Sequence: Synthetic oligonucleotide
uaaaccgcccuuuggggau

SEQ ID NO: 3126511 - RNA, 19 nt, Artificial Sequence
  Description of Artificial Sequence: Synthetic oligonucleotide
ccugguagugaguggaugg

SEQ ID NO: 3126512 - RNA, 19 nt, Artificial Sequence
  Description of Artificial Sequence: Synthetic oligonucleotide
auaguugauucagugcccu

SEQ ID NO: 3126513 - RNA, 19 nt, Artificial Sequence
  Description of Artificial Sequence: Synthetic oligonucleotide
gguuucuggauaaaccgcc

SEQ ID NO: 3126514 - RNA, 19 nt, Artificial Sequence
  Description of Artificial Sequence: Synthetic oligonucleotide
ugaccuccccuguuugcgg

SEQ ID NO: 3126515 - RNA, 19 nt, Artificial Sequence
  Description of Artificial Sequence: Synthetic oligonucleotide
uuuggggaugggagaauaa

SEQ ID NO: 3126516 - RNA, 19 nt, Artificial Sequence
  Description of Artificial Sequence: Synthetic oligonucleotide
aguggauggguuucucccu

SEQ ID NO: 3126517 - RNA, 19 nt, Artificial Sequence
  Description of Artificial Sequence: Synthetic oligonucleotide
uucuggauaaaccgcccuu

SEQ ID NO: 3126518 - RNA, 19 nt, Artificial Sequence
  Description of Artificial Sequence: Synthetic oligonucleotide
gggaugggagaauaaaaca

SEQ ID NO: 3126519 - RNA, 19 nt, Artificial Sequence
  Description of Artificial Sequence: Synthetic oligonucleotide
gugggcaggggucucuggg

SEQ ID NO: 3126520 - RNA, 19 nt, Artificial Sequence
  Description of Artificial Sequence: Synthetic oligonucleotide
cucccuuugaguuuauucu

SEQ ID NO: 3126521 - RNA, 19 nt, Artificial Sequence
  Description of Artificial Sequence: Synthetic oligonucleotide
cugaccuccccuguuugcg

SEQ ID NO: 3126522 - RNA, 19 nt, Artificial Sequence
  Description of Artificial Sequence: Synthetic oligonucleotide
cugguagugaguggauggg

SEQ ID NO: 3126523 - RNA, 19 nt, Artificial Sequence
  Description of Artificial Sequence: Synthetic oligonucleotide
uuggggaugggagaauaaa

SEQ ID NO: 3126524 - RNA, 19 nt, Artificial Sequence
  Description of Artificial Sequence: Synthetic oligonucleotide
cugccugccugguagugag

SEQ ID NO: 3126525 - RNA, 19 nt, Artificial Sequence
  Description of Artificial Sequence: Synthetic oligonucleotide
cuggauaaaccgcccuuug

SEQ ID NO: 3126526 - RNA, 19 nt, Artificial Sequence
  Description of Artificial Sequence: Synthetic oligonucleotide
gauggguuucucccuuuga

SEQ ID NO: 3126527 - RNA, 19 nt, Artificial Sequence
  Description of Artificial Sequence: Synthetic oligonucleotide
ucuggauaaaccgcccuuu

SEQ ID NO: 3126528 - RNA, 19 nt, Artificial Sequence
  Description of Artificial Sequence: Synthetic oligonucleotide
guuucuggauaaaccgccc

SEQ ID NO: 3126529 - RNA, 19 nt, Artificial Sequence
  Description of Artificial Sequence: Synthetic oligonucleotide
uugauucagugcccuccca

SEQ ID NO: 3126530 - RNA, 19 nt, Artificial Sequence
  Description of Artificial Sequence: Synthetic oligonucleotide
ggggaugggagaauaaaac

SEQ ID NO: 3126531 - RNA, 19 nt, Artificial Sequence
  Description of Artificial Sequence: Synthetic oligonucleotide
auaaaacauguaauauuuu

SEQ ID NO: 3126532 - RNA, 19 nt, Artificial Sequence
  Description of Artificial Sequence: Synthetic oligonucleotide
cugagguggaggugggcug

SEQ ID NO: 3126533 - RNA, 19 nt, Artificial Sequence
  Description of Artificial Sequence: Synthetic oligonucleotide
uagugaguggauggguuuc

SEQ ID NO: 3126534 - RNA, 19 nt, Artificial Sequence
  Description of Artificial Sequence: Synthetic oligonucleotide
ugguagugaguggaugggu

SEQ ID NO: 3126535 - RNA, 19 nt, Artificial Sequence
  Description of Artificial Sequence: Synthetic oligonucleotide
cuguuugcggugggcaggg

SEQ ID NO: 3126536 - RNA, 19 nt, Artificial Sequence
  Description of Artificial Sequence: Synthetic oligonucleotide
gucucuggggaccuccuga

SEQ ID NO: 3126537 - RNA, 19 nt, Artificial Sequence
  Description of Artificial Sequence: Synthetic oligonucleotide
ggagaauaaaacauguaau

SEQ ID NO: 3126538 - RNA, 19 nt, Artificial Sequence
  Description of Artificial Sequence: Synthetic oligonucleotide
cucguaaugaagacauagu

SEQ ID NO: 3126539 - RNA, 19 nt, Artificial Sequence
  Description of Artificial Sequence: Synthetic oligonucleotide
guggaggugggcugcuggc

SEQ ID NO: 3126540 - RNA, 19 nt, Artificial Sequence
  Description of Artificial Sequence: Synthetic oligonucleotide
agugaguggauggguuucu

SEQ ID NO: 3126541 - RNA, 19 nt, Artificial Sequence
  Description of Artificial Sequence: Synthetic oligonucleotide
uaguugauucagugcccuc

SEQ ID NO: 3126542 - RNA, 19 nt, Artificial Sequence
  Description of Artificial Sequence: Synthetic oligonucleotide
guuucucccuuugaguuua

SEQ ID NO: 3126543 - RNA, 19 nt, Artificial Sequence
  Description of Artificial Sequence: Synthetic oligonucleotide
cucuggggaccuccugagg

SEQ ID NO: 3126544 - RNA, 19 nt, Artificial Sequence
  Description of Artificial Sequence: Synthetic oligonucleotide
ugcuggccugccugccugg

SEQ ID NO: 3126545 - RNA, 19 nt, Artificial Sequence
  Description of Artificial Sequence: Synthetic oligonucleotide
aaaccgcccuuuggggaug

SEQ ID NO: 3126546 - RNA, 19 nt, Artificial Sequence
  Description of Artificial Sequence: Synthetic oligonucleotide
ggaugggagaauaaaacau

SEQ ID NO: 3126547 - RNA, 19 nt, Artificial Sequence
  Description of Artificial Sequence: Synthetic oligonucleotide
ucccugaccuccccuguuu

SEQ ID NO: 3126548 - RNA, 19 nt, Artificial Sequence
  Description of Artificial Sequence: Synthetic oligonucleotide
aaccgcccuuuggggaugg

SEQ ID NO: 3126549 - RNA, 19 nt, Artificial Sequence
  Description of Artificial Sequence: Synthetic oligonucleotide
aggugggcugcuggccugc

SEQ ID NO: 3126550 - RNA, 19 nt, Artificial Sequence
  Description of Artificial Sequence: Synthetic oligonucleotide
cugccugguagugagugga

SEQ ID NO: 3126551 - RNA, 19 nt, Artificial Sequence
  Description of Artificial Sequence: Synthetic oligonucleotide
ugccugguagugaguggau

SEQ ID NO: 3126552 - RNA, 19 nt, Artificial Sequence
  Description of Artificial Sequence: Synthetic oligonucleotide
uucuugguuucuggauaaa

SEQ ID NO: 3126553 - RNA, 19 nt, Artificial Sequence
  Description of Artificial Sequence: Synthetic oligonucleotide
cugcuggccugccugccug

SEQ ID NO: 3126554 - RNA, 19 nt, Artificial Sequence
  Description of Artificial Sequence: Synthetic oligonucleotide
guagugaguggauggguuu

SEQ ID NO: 3126555 - RNA, 19 nt, Artificial Sequence
  Description of Artificial Sequence: Synthetic oligonucleotide
uggauggguuucucccuuu

SEQ ID NO: 3126556 - RNA, 19 nt, Artificial Sequence
  Description of Artificial Sequence: Synthetic oligonucleotide
guuugcggugggcaggggu

SEQ ID NO: 3126557 - RNA, 19 nt, Artificial Sequence
  Description of Artificial Sequence: Synthetic oligonucleotide
ccuguuugcggugggcagg

SEQ ID NO: 3126558 - RNA, 19 nt, Artificial Sequence
  Description of Artificial Sequence: Synthetic oligonucleotide
cuuuggggaugggagaaua

SEQ ID NO: 3126559 - RNA, 19 nt, Artificial Sequence
  Description of Artificial Sequence: Synthetic oligonucleotide
uguuugcggugggcagggg

SEQ ID NO: 3126560 - RNA, 19 nt, Artificial Sequence
  Description of Artificial Sequence: Synthetic oligonucleotide
cuuugaguuuauucugauu

SEQ ID NO: 3126561 - RNA, 19 nt, Artificial Sequence
  Description of Artificial Sequence: Synthetic oligonucleotide
ggguuucucccuuugaguu

SEQ ID NO: 3126562 - RNA, 19 nt, Artificial Sequence
  Description of Artificial Sequence: Synthetic oligonucleotide
ggaccuccugagguggagg

SEQ ID NO: 3126563 - RNA, 19 nt, Artificial Sequence
  Description of Artificial Sequence: Synthetic oligonucleotide
cgcccuuuggggaugggag

SEQ ID NO: 3126564 - RNA, 19 nt, Artificial Sequence
  Description of Artificial Sequence: Synthetic oligonucleotide
cccuuugaguuuauucuga

SEQ ID NO: 3126565 - RNA, 19 nt, Artificial Sequence
  Description of Artificial Sequence: Synthetic oligonucleotide
uugcggugggcaggggucu

SEQ ID NO: 3126566 - RNA, 19 nt, Artificial Sequence
  Description of Artificial Sequence: Synthetic oligonucleotide
uccccuguuugcggugggc

SEQ ID NO: 3126567 - RNA, 19 nt, Artificial Sequence
  Description of Artificial Sequence: Synthetic oligonucleotide
ccugccugguagugagugg

SEQ ID NO: 3126568 - RNA, 19 nt, Artificial Sequence
  Description of Artificial Sequence: Synthetic oligonucleotide
ggugggcaggggucucugg

SEQ ID NO: 3126569 - RNA, 19 nt, Artificial Sequence
  Description of Artificial Sequence: Synthetic oligonucleotide
cagccccucccugaccucc

SEQ ID NO: 3126570 - RNA, 19 nt, Artificial Sequence
  Description of Artificial Sequence: Synthetic oligonucleotide
agugcccucccagccccuc

SEQ ID NO: 3126571 - RNA, 19 nt, Artificial Sequence
  Description of Artificial Sequence: Synthetic oligonucleotide
uuucucccuuugaguuuau

SEQ ID NO: 3126572 - RNA, 19 nt, Artificial Sequence
  Description of Artificial Sequence: Synthetic oligonucleotide
ccugaccuccccuguuugc

SEQ ID NO: 3126573 - RNA, 19 nt, Artificial Sequence
  Description of Artificial Sequence: Synthetic oligonucleotide
cuccccuguuugcgguggg

SEQ ID NO: 3126574 - RNA, 19 nt, Artificial Sequence
  Description of Artificial Sequence: Synthetic oligonucleotide
gccugccugguagugagug

SEQ ID NO: 3126575 - RNA, 19 nt, Artificial Sequence
  Description of Artificial Sequence: Synthetic oligonucleotide
agccccucccugaccuccc

SEQ ID NO: 3126576 - RNA, 19 nt, Artificial Sequence
  Description of Artificial Sequence: Synthetic oligonucleotide
cccuguuugcggugggcag

SEQ ID NO: 3126577 - RNA, 19 nt, Artificial Sequence
  Description of Artificial Sequence: Synthetic oligonucleotide
ugccugccugguagugagu

SEQ ID NO: 3126578 - RNA, 19 nt, Artificial Sequence
  Description of Artificial Sequence: Synthetic oligonucleotide
gaccuccccuguuugcggu

SEQ ID NO: 3126579 - RNA, 19 nt, Artificial Sequence
  Description of Artificial Sequence: Synthetic oligonucleotide
gugaguggauggguuucuc

SEQ ID NO: 3126580 - RNA, 19 nt, Artificial Sequence
  Description of Artificial Sequence: Synthetic oligonucleotide
ggucucuggggaccuccug

SEQ ID NO: 3126581 - RNA, 19 nt, Artificial Sequence
  Description of Artificial Sequence: Synthetic oligonucleotide
uucucccuuugaguuuauu

SEQ ID NO: 3126582 - RNA, 19 nt, Artificial Sequence
  Description of Artificial Sequence: Synthetic oligonucleotide
gugcccucccagccccucc

SEQ ID NO: 3126583 - RNA, 19 nt, Artificial Sequence
  Description of Artificial Sequence: Synthetic oligonucleotide
gccugguagugaguggaug

SEQ ID NO: 3126584 - RNA, 19 nt, Artificial Sequence
  Description of Artificial Sequence: Synthetic oligonucleotide
ggggucucuggggaccucc

SEQ ID NO: 3126585 - RNA, 19 nt, Artificial Sequence
  Description of Artificial Sequence: Synthetic oligonucleotide
gggcaggggucucugggga

SEQ ID NO: 3126586 - RNA, 19 nt, Artificial Sequence
  Description of Artificial Sequence: Synthetic oligonucleotide
gcccuuuggggaugggaga

SEQ ID NO: 3126587 - RNA, 19 nt, Artificial Sequence
  Description of Artificial Sequence: Synthetic oligonucleotide
ggcaggggucucuggggac

SEQ ID NO: 3126588 - RNA, 19 nt, Artificial Sequence
  Description of Artificial Sequence: Synthetic oligonucleotide
gggaccuccugagguggag

SEQ ID NO: 3126589 - RNA, 19 nt, Artificial Sequence
  Description of Artificial Sequence: Synthetic oligonucleotide
gguagugaguggauggguu

SEQ ID NO: 3126590 - RNA, 19 nt, Artificial Sequence
  Description of Artificial Sequence: Synthetic oligonucleotide
gguuucucccuuugaguuu

SEQ ID NO: 3126591 - RNA, 19 nt, Artificial Sequence
  Description of Artificial Sequence: Synthetic oligonucleotide
ccuccccuguuugcggugg

SEQ ID NO: 3126592 - RNA, 19 nt, Artificial Sequence
  Description of Artificial Sequence: Synthetic oligonucleotide
gggcugcuggccugccugc

SEQ ID NO: 3126593 - RNA, 19 nt, Artificial Sequence
  Description of Artificial Sequence: Synthetic oligonucleotide
cccugaccuccccuguuug

SEQ ID NO: 3126594 - RNA, 19 nt, Artificial Sequence
  Description of Artificial Sequence: Synthetic oligonucleotide
ugcggugggcaggggucuc

SEQ ID NO: 3126595 - RNA, 19 nt, Artificial Sequence
  Description of Artificial Sequence: Synthetic oligonucleotide
ccuuugaguuuauucugau

SEQ ID NO: 3126596 - RNA, 19 nt, Artificial Sequence
  Description of Artificial Sequence: Synthetic oligonucleotide
accgcccuuuggggauggg

SEQ ID NO: 3126597 - RNA, 19 nt, Artificial Sequence
  Description of Artificial Sequence: Synthetic oligonucleotide
ccucccagccccucccuga

SEQ ID NO: 3126598 - RNA, 19 nt, Artificial Sequence
  Description of Artificial Sequence: Synthetic oligonucleotide
cccuuuggggaugggagaa

SEQ ID NO: 3126599 - RNA, 19 nt, Artificial Sequence
  Description of Artificial Sequence: Synthetic oligonucleotide
ccugagguggaggugggcu

SEQ ID NO: 3126600 - RNA, 19 nt, Artificial Sequence
  Description of Artificial Sequence: Synthetic oligonucleotide
gccugccugccugguagug

SEQ ID NO: 3126601 - RNA, 19 nt, Artificial Sequence
  Description of Artificial Sequence: Synthetic oligonucleotide
gagguggaggugggcugcu

SEQ ID NO: 3126602 - RNA, 19 nt, Artificial Sequence
  Description of Artificial Sequence: Synthetic oligonucleotide
cuggccugccugccuggua

SEQ ID NO: 3126603 - RNA, 19 nt, Artificial Sequence
  Description of Artificial Sequence: Synthetic oligonucleotide
ccugccugccugguaguga

SEQ ID NO: 3126604 - RNA, 19 nt, Artificial Sequence
  Description of Artificial Sequence: Synthetic oligonucleotide
ggugggcugcuggccugcc

SEQ ID NO: 3126605 - RNA, 19 nt, Artificial Sequence
  Description of Artificial Sequence: Synthetic oligonucleotide
gcugcuggccugccugccu

SEQ ID NO: 3126606 - RNA, 19 nt, Artificial Sequence
  Description of Artificial Sequence: Synthetic oligonucleotide
cucccugaccuccccuguu

SEQ ID NO: 3126607 - RNA, 19 nt, Artificial Sequence
  Description of Artificial Sequence: Synthetic oligonucleotide
ggggaccuccugaggugga

SEQ ID NO: 3126608 - RNA, 19 nt, Artificial Sequence
  Description of Artificial Sequence: Synthetic oligonucleotide
ccagccccucccugaccuc

SEQ ID NO: 3126609 - RNA, 19 nt, Artificial Sequence
  Description of Artificial Sequence: Synthetic oligonucleotide
ccgcccuuuggggauggga

SEQ ID NO: 3126610 - RNA, 19 nt, Artificial Sequence
  Description of Artificial Sequence: Synthetic oligonucleotide
ggccugccugccugguagu

SEQ ID NO: 3126611 - RNA, 19 nt, Artificial Sequence
  Description of Artificial Sequence: Synthetic oligonucleotide
gggucucuggggaccuccu

SEQ ID NO: 3126612 - RNA, 19 nt, Artificial Sequence
  Description of Artificial Sequence: Synthetic oligonucleotide
ccucccugaccuccccugu

SEQ ID NO: 3126613 - RNA, 19 nt, Artificial Sequence
  Description of Artificial Sequence: Synthetic oligonucleotide
cagugcccucccagccccu

SEQ ID NO: 3126614 - RNA, 19 nt, Artificial Sequence
  Description of Artificial Sequence: Synthetic oligonucleotide
cggugggcaggggucucug

SEQ ID NO: 3126615 - RNA, 19 nt, Artificial Sequence
  Description of Artificial Sequence: Synthetic oligonucleotide
gcuggccugccugccuggu

SEQ ID NO: 3126616 - RNA, 19 nt, Artificial Sequence
  Description of Artificial Sequence: Synthetic oligonucleotide
ccuuuggggaugggagaau

SEQ ID NO: 3126617 - RNA, 19 nt, Artificial Sequence
  Description of Artificial Sequence: Synthetic oligonucleotide
gcggugggcaggggucucu

SEQ ID NO: 3126618 - RNA, 19 nt, Artificial Sequence
  Description of Artificial Sequence: Synthetic oligonucleotide
aaggcuaacagcagcaagc

SEQ ID NO: 3126619 - RNA, 19 nt, Artificial Sequence
  Description of Artificial Sequence: Synthetic oligonucleotide
uuccauggagugcuggugg

SEQ ID NO: 3126620 - RNA, 19 nt, Artificial Sequence
  Description of Artificial Sequence: Synthetic oligonucleotide
acggugacaucccucaggg

SEQ ID NO: 3126621 - RNA, 19 nt, Artificial Sequence
  Description of Artificial Sequence: Synthetic oligonucleotide
uacggugacaucccucagg

SEQ ID NO: 3126622 - RNA, 19 nt, Artificial Sequence
  Description of Artificial Sequence: Synthetic oligonucleotide
agcgugaggcagcuuagcc

SEQ ID NO: 3126623 - RNA, 19 nt, Artificial Sequence
  Description of Artificial Sequence: Synthetic oligonucleotide
uguguaccaggcuggauug

SEQ ID NO: 3126624 - RNA, 19 nt, Artificial Sequence
  Description of Artificial Sequence: Synthetic oligonucleotide
uucguguuuccauggagug

SEQ ID NO: 3126625 - RNA, 19 nt, Artificial Sequence
  Description of Artificial Sequence: Synthetic oligonucleotide
aggaccaaggcuaacagca

SEQ ID NO: 3126626 - RNA, 19 nt, Artificial Sequence
  Description of Artificial Sequence: Synthetic oligonucleotide
agcagcaagcacaggagcc

SEQ ID NO: 3126627 - RNA, 19 nt, Artificial Sequence
  Description of Artificial Sequence: Synthetic oligonucleotide
cuuggcaccuccauccagc

SEQ ID NO: 3126628 - RNA, 19 nt, Artificial Sequence
  Description of Artificial Sequence: Synthetic oligonucleotide
ucggcuggaagcuccuggg

SEQ ID NO: 3126629 - RNA, 19 nt, Artificial Sequence
  Description of Artificial Sequence: Synthetic oligonucleotide
uccagcgugaggcagcuua

SEQ ID NO: 3126630 - RNA, 19 nt, Artificial Sequence
  Description of Artificial Sequence: Synthetic oligonucleotide
aggacuuggcaccuccauc

SEQ ID NO: 3126631 - RNA, 19 nt, Artificial Sequence
  Description of Artificial Sequence: Synthetic oligonucleotide
ggacuuggcaccuccaucc

SEQ ID NO: 3126632 - RNA, 19 nt, Artificial Sequence
  Description of Artificial Sequence: Synthetic oligonucleotide
gaccaaggcuaacagcagc

SEQ ID NO: 3126633 - RNA, 19 nt, Artificial Sequence
  Description of Artificial Sequence: Synthetic oligonucleotide
acaggccugaucccacggc

SEQ ID NO: 3126634 - RNA, 19 nt, Artificial Sequence
  Description of Artificial Sequence: Synthetic oligonucleotide
cucagggcuacccuccucc

SEQ ID NO: 3126635 - RNA, 19 nt, Artificial Sequence
  Description of Artificial Sequence: Synthetic oligonucleotide
uguuuccauggagugcugg

SEQ ID NO: 3126636 - RNA, 19 nt, Artificial Sequence
  Description of Artificial Sequence: Synthetic oligonucleotide
uccauggagugcugguggg

SEQ ID NO: 3126637 - RNA, 19 nt, Artificial Sequence
  Description of Artificial Sequence: Synthetic oligonucleotide
gcuggauugaugucagggg

SEQ ID NO: 3126638 - RNA, 19 nt, Artificial Sequence
  Description of Artificial Sequence: Synthetic oligonucleotide
gaucccacggccuguguac

SEQ ID NO: 3126639 - RNA, 19 nt, Artificial Sequence
  Description of Artificial Sequence: Synthetic oligonucleotide
gagaggacuuggcaccucc

SEQ ID NO: 3126640 - RNA, 19 nt, Artificial Sequence
  Description of Artificial Sequence: Synthetic oligonucleotide
ugcuggugggcucggcugg

SEQ ID NO: 3126641 - RNA, 19 nt, Artificial Sequence
  Description of Artificial Sequence: Synthetic oligonucleotide
ggcaccuccauccagcgug

SEQ ID NO: 3126642 - RNA, 19 nt, Artificial Sequence
  Description of Artificial Sequence: Synthetic oligonucleotide
gaggaccaaggcuaacagc

SEQ ID NO: 3126643 - RNA, 19 nt, Artificial Sequence
  Description of Artificial Sequence: Synthetic oligonucleotide
uuggcaccuccauccagcg

SEQ ID NO: 3126644 - RNA, 19 nt, Artificial Sequence
  Description of Artificial Sequence: Synthetic oligonucleotide
acaucccucagggcuaccc

SEQ ID NO: 3126645 - RNA, 19 nt, Artificial Sequence
  Description of Artificial Sequence: Synthetic oligonucleotide
uuuccauggagugcuggug

SEQ ID NO: 3126646 - RNA, 19 nt, Artificial Sequence
  Description of Artificial Sequence: Synthetic oligonucleotide
ugaugucagggguucgugu

SEQ ID NO: 3126647 - RNA, 19 nt, Artificial Sequence
  Description of Artificial Sequence: Synthetic oligonucleotide
gcuaacagcagcaagcaca

SEQ ID NO: 3126648 - RNA, 19 nt, Artificial Sequence
  Description of Artificial Sequence: Synthetic oligonucleotide
ggcuggauugaugucaggg

SEQ ID NO: 3126649 - RNA, 19 nt, Artificial Sequence
  Description of Artificial Sequence: Synthetic oligonucleotide
agggguucguguuuccaug

SEQ ID NO: 3126650 - RNA, 19 nt, Artificial Sequence
  Description of Artificial Sequence: Synthetic oligonucleotide
uggauugaugucagggguu

SEQ ID NO: 3126651 - RNA, 19 nt, Artificial Sequence
  Description of Artificial Sequence: Synthetic oligonucleotide
cucggcuggaagcuccugg

SEQ ID NO: 3126652 - RNA, 19 nt, Artificial Sequence
  Description of Artificial Sequence: Synthetic oligonucleotide
uggagugcuggugggcucg

SEQ ID NO: 3126653 - RNA, 19 nt, Artificial Sequence
  Description of Artificial Sequence: Synthetic oligonucleotide
gauugaugucagggguucg

SEQ ID NO: 3126654 - RNA, 19 nt, Artificial Sequence
  Description of Artificial Sequence: Synthetic oligonucleotide
uuagccggcaccgcaggcc

SEQ ID NO: 3126655 - RNA, 19 nt, Artificial Sequence
  Description of Artificial Sequence: Synthetic oligonucleotide
gguacggugacaucccuca

SEQ ID NO: 3126656 - RNA, 19 nt, Artificial Sequence
  Description of Artificial Sequence: Synthetic oligonucleotide
ugccgaagcggcccacagg

SEQ ID NO: 3126657 - RNA, 19 nt, Artificial Sequence
  Description of Artificial Sequence: Synthetic oligonucleotide
gcuggaagcuccugggagg

SEQ ID NO: 3126658 - RNA, 19 nt, Artificial Sequence
  Description of Artificial Sequence: Synthetic oligonucleotide
ggugacaucccucagggcu

SEQ ID NO: 3126659 - RNA, 19 nt, Artificial Sequence
  Description of Artificial Sequence: Synthetic oligonucleotide
aggcagcuuagccggcacc

SEQ ID NO: 3126660 - RNA, 19 nt, Artificial Sequence
  Description of Artificial Sequence: Synthetic oligonucleotide
caggcuggauugaugucag

SEQ ID NO: 3126661 - RNA, 19 nt, Artificial Sequence
  Description of Artificial Sequence: Synthetic oligonucleotide
accuccauccagcgugagg

SEQ ID NO: 3126662 - RNA, 19 nt, Artificial Sequence
  Description of Artificial Sequence: Synthetic oligonucleotide
gguucguguuuccauggag

SEQ ID NO: 3126663 - RNA, 19 nt, Artificial Sequence
  Description of Artificial Sequence: Synthetic oligonucleotide
cgugaggcagcuuagccgg

SEQ ID NO: 3126664 - RNA, 19 nt, Artificial Sequence
  Description of Artificial Sequence: Synthetic oligonucleotide
auugaugucagggguucgu

SEQ ID NO: 3126665 - RNA, 19 nt, Artificial Sequence
  Description of Artificial Sequence: Synthetic oligonucleotide
acuuggcaccuccauccag

SEQ ID NO: 3126666 - RNA, 19 nt, Artificial Sequence
  Description of Artificial Sequence: Synthetic oligonucleotide
ucguguuuccauggagugc

SEQ ID NO: 3126667 - RNA, 19 nt, Artificial Sequence
  Description of Artificial Sequence: Synthetic oligonucleotide
uugaugucagggguucgug

SEQ ID NO: 3126668 - RNA, 19 nt, Artificial Sequence
  Description of Artificial Sequence: Synthetic oligonucleotide
caggccugaucccacggcc

SEQ ID NO: 3126669 - RNA, 19 nt, Artificial Sequence
  Description of Artificial Sequence: Synthetic oligonucleotide
cagcagcaagcacaggagc

SEQ ID NO: 3126670 - RNA, 19 nt, Artificial Sequence
  Description of Artificial Sequence: Synthetic oligonucleotide
gccgaagcggcccacaggc

SEQ ID NO: 3126671 - RNA, 19 nt, Artificial Sequence
  Description of Artificial Sequence: Synthetic oligonucleotide
uccauccagcgugaggcag

SEQ ID NO: 3126672 - RNA, 19 nt, Artificial Sequence
  Description of Artificial Sequence: Synthetic oligonucleotide
ccuccauccagcgugaggc

SEQ ID NO: 3126673 - RNA, 19 nt, Artificial Sequence
  Description of Artificial Sequence: Synthetic oligonucleotide
gcgugaggcagcuuagccg

SEQ ID NO: 3126674 - RNA, 19 nt, Artificial Sequence
  Description of Artificial Sequence: Synthetic oligonucleotide
auggagugcuggugggcuc

SEQ ID NO: 3126675 - RNA, 19 nt, Artificial Sequence
  Description of Artificial Sequence: Synthetic oligonucleotide
ggcuggaagcuccugggag

SEQ ID NO: 3126676 - RNA, 19 nt, Artificial Sequence
  Description of Artificial Sequence: Synthetic oligonucleotide
accaaggcuaacagcagca

SEQ ID NO: 3126677 - RNA, 19 nt, Artificial Sequence
  Description of Artificial Sequence: Synthetic oligonucleotide
gccagguacggugacaucc

SEQ ID NO: 3126678 - RNA, 19 nt, Artificial Sequence
  Description of Artificial Sequence: Synthetic oligonucleotide
uguaccaggcuggauugau

SEQ ID NO: 3126679 - RNA, 19 nt, Artificial Sequence
  Description of Artificial Sequence: Synthetic oligonucleotide
ggcaccgcaggccagguac

SEQ ID NO: 3126680 - RNA, 19 nt, Artificial Sequence
  Description of Artificial Sequence: Synthetic oligonucleotide
uagccggcaccgcaggcca

SEQ ID NO: 3126681 - RNA, 19 nt, Artificial Sequence
  Description of Artificial Sequence: Synthetic oligonucleotide
gggguucguguuuccaugg

SEQ ID NO: 3126682 - RNA, 19 nt, Artificial Sequence
  Description of Artificial Sequence: Synthetic oligonucleotide
aggcuaacagcagcaagca

SEQ ID NO: 3126683 - RNA, 19 nt, Artificial Sequence
  Description of Artificial Sequence: Synthetic oligonucleotide
cacaggccugaucccacgg

SEQ ID NO: 3126684 - RNA, 19 nt, Artificial Sequence
  Description of Artificial Sequence: Synthetic oligonucleotide
aucccacggccuguguacc

SEQ ID NO: 3126685 - RNA, 19 nt, Artificial Sequence
  Description of Artificial Sequence: Synthetic oligonucleotide
ggcagcuuagccggcaccg

SEQ ID NO: 3126686 - RNA, 19 nt, Artificial Sequence
  Description of Artificial Sequence: Synthetic oligonucleotide
ucagggguucguguuucca

SEQ ID NO: 3126687 - RNA, 19 nt, Artificial Sequence
  Description of Artificial Sequence: Synthetic oligonucleotide
cuggauugaugucaggggu

SEQ ID NO: 3126688 - RNA, 19 nt, Artificial Sequence
  Description of Artificial Sequence: Synthetic oligonucleotide
gcaagcacaggagccaugc

SEQ ID NO: 3126689 - RNA, 19 nt, Artificial Sequence
  Description of Artificial Sequence: Synthetic oligonucleotide
ugucagggguucguguuuc

SEQ ID NO: 3126690 - RNA, 19 nt, Artificial Sequence
  Description of Artificial Sequence: Synthetic oligonucleotide
cuuagccggcaccgcaggc

SEQ ID NO: 3126691 - RNA, 19 nt, Artificial Sequence
  Description of Artificial Sequence: Synthetic oligonucleotide
gaugucagggguucguguu

SEQ ID NO: 3126692 - RNA, 19 nt, Artificial Sequence
  Description of Artificial Sequence: Synthetic oligonucleotide
cacggccuguguaccaggc

SEQ ID NO: 3126693 - RNA, 19 nt, Artificial Sequence
  Description of Artificial Sequence: Synthetic oligonucleotide
gugcuggugggcucggcug

SEQ ID NO: 3126694 - RNA, 19 nt, Artificial Sequence
  Description of Artificial Sequence: Synthetic oligonucleotide
caagcacaggagccaugcc

SEQ ID NO: 3126695 - RNA, 19 nt, Artificial Sequence
  Description of Artificial Sequence: Synthetic oligonucleotide
ggaagcuccugggaggacc

SEQ ID NO: 3126696 - RNA, 19 nt, Artificial Sequence
  Description of Artificial Sequence: Synthetic oligonucleotide
ugaggcagcuuagccggca

SEQ ID NO: 3126697 - RNA, 19 nt, Artificial Sequence
  Description of Artificial Sequence: Synthetic oligonucleotide
agguacggugacaucccuc

SEQ ID NO: 3126698 - RNA, 19 nt, Artificial Sequence
  Description of Artificial Sequence: Synthetic oligonucleotide
gaagcuccugggaggacca

SEQ ID NO: 3126699 - RNA, 19 nt, Artificial Sequence
  Description of Artificial Sequence: Synthetic oligonucleotide
gaagcggcccacaggccug

SEQ ID NO: 3126700 - RNA, 19 nt, Artificial Sequence
  Description of Artificial Sequence: Synthetic oligonucleotide
ucagggcuacccuccuccu

SEQ ID NO: 3126701 - RNA, 19 nt, Artificial Sequence
  Description of Artificial Sequence: Synthetic oligonucleotide
guucguguuuccauggagu

SEQ ID NO: 3126702 - RNA, 19 nt, Artificial Sequence
  Description of Artificial Sequence: Synthetic oligonucleotide
gaggcagcuuagccggcac

SEQ ID NO: 3126703 - RNA, 19 nt, Artificial Sequence
  Description of Artificial Sequence: Synthetic oligonucleotide
uaacagcagcaagcacagg

SEQ ID NO: 3126704 - RNA, 19 nt, Artificial Sequence
  Description of Artificial Sequence: Synthetic oligonucleotide
agcuuagccggcaccgcag

SEQ ID NO: 3126705 - RNA, 19 nt, Artificial Sequence
  Description of Artificial Sequence: Synthetic oligonucleotide
guacggugacaucccucag

SEQ ID NO: 3126706 - RNA, 19 nt, Artificial Sequence
  Description of Artificial Sequence: Synthetic oligonucleotide
gacuuggcaccuccaucca

SEQ ID NO: 3126707 - RNA, 19 nt, Artificial Sequence
  Description of Artificial Sequence: Synthetic oligonucleotide
ccagguacggugacauccc

SEQ ID NO: 3126708 - RNA, 19 nt, Artificial Sequence
  Description of Artificial Sequence: Synthetic oligonucleotide
agcuccugggaggaccaag

SEQ ID NO: 3126709 - RNA, 19 nt, Artificial Sequence
  Description of Artificial Sequence: Synthetic oligonucleotide
augucagggguucguguuu

SEQ ID NO: 3126710 - RNA, 19 nt, Artificial Sequence
  Description of Artificial Sequence: Synthetic oligonucleotide
aggcuggauugaugucagg

SEQ ID NO: 3126711 - RNA, 19 nt, Artificial Sequence
  Description of Artificial Sequence: Synthetic oligonucleotide
ggauugaugucagggguuc

SEQ ID NO: 3126712 - RNA, 19 nt, Artificial Sequence
  Description of Artificial Sequence: Synthetic oligonucleotide
guaccaggcuggauugaug

SEQ ID NO: 3126713 - RNA, 19 nt, Artificial Sequence
  Description of Artificial Sequence: Synthetic oligonucleotide
aggccagguacggugacau

SEQ ID NO: 3126714 - RNA, 19 nt, Artificial Sequence
  Description of Artificial Sequence: Synthetic oligonucleotide
gcuuagccggcaccgcagg

SEQ ID NO: 3126715 - RNA, 19 nt, Artificial Sequence
  Description of Artificial Sequence: Synthetic oligonucleotide
cggcccacaggccugaucc

SEQ ID NO: 3126716 - RNA, 19 nt, Artificial Sequence
  Description of Artificial Sequence: Synthetic oligonucleotide
ugacaucccucagggcuac

SEQ ID NO: 3126717 - RNA, 19 nt, Artificial Sequence
  Description of Artificial Sequence: Synthetic oligonucleotide
cuguguaccaggcuggauu

SEQ ID NO: 3126718 - RNA, 19 nt, Artificial Sequence
  Description of Artificial Sequence: Synthetic oligonucleotide
cugccgaagcggcccacag

SEQ ID NO: 3126719 - RNA, 19 nt, Artificial Sequence
  Description of Artificial Sequence: Synthetic oligonucleotide
ucccacggccuguguacca

SEQ ID NO: 3126720 - RNA, 19 nt, Artificial Sequence
  Description of Artificial Sequence: Synthetic oligonucleotide
gucagggguucguguuucc

SEQ ID NO: 3126721 - RNA, 19 nt, Artificial Sequence
  Description of Artificial Sequence: Synthetic oligonucleotide
acggccuguguaccaggcu

SEQ ID NO: 3126722 - RNA, 19 nt, Artificial Sequence
  Description of Artificial Sequence: Synthetic oligonucleotide
uggcaccuccauccagcgu

SEQ ID NO: 3126723 - RNA, 19 nt, Artificial Sequence
  Description of Artificial Sequence: Synthetic oligonucleotide
ccauccagcgugaggcagc

SEQ ID NO: 3126724 - RNA, 19 nt, Artificial Sequence
  Description of Artificial Sequence: Synthetic oligonucleotide
ggaccaaggcuaacagcag

SEQ ID NO: 3126725 - RNA, 19 nt, Artificial Sequence
  Description of Artificial Sequence: Synthetic oligonucleotide
gggaggaccaaggcuaaca

SEQ ID NO: 3126726 - RNA, 19 nt, Artificial Sequence
  Description of Artificial Sequence: Synthetic oligonucleotide
cuggaagcuccugggagga

SEQ ID NO: 3126727 - RNA, 19 nt, Artificial Sequence
  Description of Artificial Sequence: Synthetic oligonucleotide
gaggacuuggcaccuccau

SEQ ID NO: 3126728 - RNA, 19 nt, Artificial Sequence
  Description of Artificial Sequence: Synthetic oligonucleotide
cagggcuacccuccuccug

SEQ ID NO: 3126729 - RNA, 19 nt, Artificial Sequence
  Description of Artificial Sequence: Synthetic oligonucleotide
gcuacccuccuccugccga

SEQ ID NO: 3126730 - RNA, 19 nt, Artificial Sequence
  Description of Artificial Sequence: Synthetic oligonucleotide
caccgcaggccagguacgg

SEQ ID NO: 3126731 - RNA, 19 nt, Artificial Sequence
  Description of Artificial Sequence: Synthetic oligonucleotide
cagcuuagccggcaccgca

SEQ ID NO: 3126732 - RNA, 19 nt, Artificial Sequence
  Description of Artificial Sequence: Synthetic oligonucleotide
cagcgugaggcagcuuagc

SEQ ID NO: 3126733 - RNA, 19 nt, Artificial Sequence
  Description of Artificial Sequence: Synthetic oligonucleotide
agaggacuuggcaccucca

SEQ ID NO: 3126734 - RNA, 19 nt, Artificial Sequence
  Description of Artificial Sequence: Synthetic oligonucleotide
ugagaggacuuggcaccuc

SEQ ID NO: 3126735 - RNA, 19 nt, Artificial Sequence
  Description of Artificial Sequence: Synthetic oligonucleotide
ggccugaucccacggccug

SEQ ID NO: 3126736 - RNA, 19 nt, Artificial Sequence
  Description of Artificial Sequence: Synthetic oligonucleotide
ccagcgugaggcagcuuag

SEQ ID NO: 3126737 - RNA, 19 nt, Artificial Sequence
  Description of Artificial Sequence: Synthetic oligonucleotide
gugacaucccucagggcua

SEQ ID NO: 3126738 - RNA, 19 nt, Artificial Sequence
  Description of Artificial Sequence: Synthetic oligonucleotide
cccuccuccugccgaagcg

SEQ ID NO: 3126739 - RNA, 19 nt, Artificial Sequence
  Description of Artificial Sequence: Synthetic oligonucleotide
uacccuccuccugccgaag

SEQ ID NO: 3126740 - RNA, 19 nt, Artificial Sequence
  Description of Artificial Sequence: Synthetic oligonucleotide
agcaagcacaggagccaug

SEQ ID NO: 3126741 - RNA, 19 nt, Artificial Sequence
  Description of Artificial Sequence: Synthetic oligonucleotide
cauggagugcuggugggcu

SEQ ID NO: 3126742 - RNA, 19 nt, Artificial Sequence
  Description of Artificial Sequence: Synthetic oligonucleotide
ccgcaggccagguacggug

SEQ ID NO: 3126743 - RNA, 19 nt, Artificial Sequence
  Description of Artificial Sequence: Synthetic oligonucleotide
aggccugaucccacggccu

SEQ ID NO: 3126744 - RNA, 19 nt, Artificial Sequence
  Description of Artificial Sequence: Synthetic oligonucleotide
ccacaggccugaucccacg

SEQ ID NO: 3126745 - RNA, 19 nt, Artificial Sequence
  Description of Artificial Sequence: Synthetic oligonucleotide
ggcuacccuccuccugccg

SEQ ID NO: 3126746 - RNA, 19 nt, Artificial Sequence
  Description of Artificial Sequence: Synthetic oligonucleotide
aagcggcccacaggccuga

SEQ ID NO: 3126747 - RNA, 19 nt, Artificial Sequence
  Description of Artificial Sequence: Synthetic oligonucleotide
cuacccuccuccugccgaa

SEQ ID NO: 3126748 - RNA, 19 nt, Artificial Sequence
  Description of Artificial Sequence: Synthetic oligonucleotide
cuccauccagcgugaggca

SEQ ID NO: 3126749 - RNA, 19 nt, Artificial Sequence
  Description of Artificial Sequence: Synthetic oligonucleotide
uggaagcuccugggaggac

SEQ ID NO: 3126750 - RNA, 19 nt, Artificial Sequence
  Description of Artificial Sequence: Synthetic oligonucleotide
ggguucguguuuccaugga

SEQ ID NO: 3126751 - RNA, 19 nt, Artificial Sequence
  Description of Artificial Sequence: Synthetic oligonucleotide
ccuccugccgaagcggccc

SEQ ID NO: 3126752 - RNA, 19 nt, Artificial Sequence
  Description of Artificial Sequence: Synthetic oligonucleotide
guguuuccauggagugcug

SEQ ID NO: 3126753 - RNA, 19 nt, Artificial Sequence
  Description of Artificial Sequence: Synthetic oligonucleotide
cagggguucguguuuccau

SEQ ID NO: 3126754 - RNA, 19 nt, Artificial Sequence
  Description of Artificial Sequence: Synthetic oligonucleotide
ugggcucggcuggaagcuc

SEQ ID NO: 3126755 - RNA, 19 nt, Artificial Sequence
  Description of Artificial Sequence: Synthetic oligonucleotide
cccacaggccugaucccac

SEQ ID NO: 3126756 - RNA, 19 nt, Artificial Sequence
  Description of Artificial Sequence: Synthetic oligonucleotide
accgcaggccagguacggu

SEQ ID NO: 3126757 - RNA, 19 nt, Artificial Sequence
  Description of Artificial Sequence: Synthetic oligonucleotide
caucccucagggcuacccu

SEQ ID NO: 3126758 - RNA, 19 nt, Artificial Sequence
  Description of Artificial Sequence: Synthetic oligonucleotide
gggcucggcuggaagcucc

SEQ ID NO: 3126759 - RNA, 19 nt, Artificial Sequence
  Description of Artificial Sequence: Synthetic oligonucleotide
gagugcuggugggcucggc

SEQ ID NO: 3126760 - RNA, 19 nt, Artificial Sequence
  Description of Artificial Sequence: Synthetic oligonucleotide
ccacggccuguguaccagg

SEQ ID NO: 3126761 - RNA, 19 nt, Artificial Sequence
  Description of Artificial Sequence: Synthetic oligonucleotide
gugaggcagcuuagccggc

SEQ ID NO: 3126762 - RNA, 19 nt, Artificial Sequence
  Description of Artificial Sequence: Synthetic oligonucleotide
ccauggagugcuggugggc

SEQ ID NO: 3126763 - RNA, 19 nt, Artificial Sequence
  Description of Artificial Sequence: Synthetic oligonucleotide
gcaccgcaggccagguacg

SEQ ID NO: 3126764 - RNA, 19 nt, Artificial Sequence
  Description of Artificial Sequence: Synthetic oligonucleotide
guguaccaggcuggauuga

SEQ ID NO: 3126765 - RNA, 19 nt, Artificial Sequence
  Description of Artificial Sequence: Synthetic oligonucleotide
cguguuuccauggagugcu

SEQ ID NO: 3126766 - RNA, 19 nt, Artificial Sequence
  Description of Artificial Sequence: Synthetic oligonucleotide
gcagcuuagccggcaccgc

SEQ ID NO: 3126767 - RNA, 19 nt, Artificial Sequence
  Description of Artificial Sequence: Synthetic oligonucleotide
gugggcucggcuggaagcu

SEQ ID NO: 3126768 - RNA, 19 nt, Artificial Sequence
  Description of Artificial Sequence: Synthetic oligonucleotide
gccggcaccgcaggccagg

SEQ ID NO: 3126769 - RNA, 19 nt, Artificial Sequence
  Description of Artificial Sequence: Synthetic oligonucleotide
uccugccgaagcggcccac

SEQ ID NO: 3126770 - RNA, 19 nt, Artificial Sequence
  Description of Artificial Sequence: Synthetic oligonucleotide
ccgaagcggcccacaggcc

SEQ ID NO: 3126771 - RNA, 19 nt, Artificial Sequence
  Description of Artificial Sequence: Synthetic oligonucleotide
cccacggccuguguaccag

SEQ ID NO: 3126772 - RNA, 19 nt, Artificial Sequence
  Description of Artificial Sequence: Synthetic oligonucleotide
caccuccauccagcgugag

SEQ ID NO: 3126773 - RNA, 19 nt, Artificial Sequence
  Description of Artificial Sequence: Synthetic oligonucleotide
cuccugccgaagcggccca

SEQ ID NO: 3126774 - RNA, 19 nt, Artificial Sequence
  Description of Artificial Sequence: Synthetic oligonucleotide
cauccagcgugaggcagcu

SEQ ID NO: 3126775 - RNA, 19 nt, Artificial Sequence
  Description of Artificial Sequence: Synthetic oligonucleotide
cagguacggugacaucccu

SEQ ID NO: 3126776 - RNA, 19 nt, Artificial Sequence
  Description of Artificial Sequence: Synthetic oligonucleotide
ggccagguacggugacauc

SEQ ID NO: 3126777 - RNA, 19 nt, Artificial Sequence
  Description of Artificial Sequence: Synthetic oligonucleotide
ccaaggcuaacagcagcaa

SEQ ID NO: 3126778 - RNA, 19 nt, Artificial Sequence
  Description of Artificial Sequence: Synthetic oligonucleotide
cggugacaucccucagggc

SEQ ID NO: 3126779 - RNA, 19 nt, Artificial Sequence
  Description of Artificial Sequence: Synthetic oligonucleotide
agccggcaccgcaggccag

SEQ ID NO: 3126780 - RNA, 19 nt, Artificial Sequence
  Description of Artificial Sequence: Synthetic oligonucleotide
ccucagggcuacccuccuc

SEQ ID NO: 3126781 - RNA, 19 nt, Artificial Sequence
  Description of Artificial Sequence: Synthetic oligonucleotide
gccuguguaccaggcugga

SEQ ID NO: 3126782 - RNA, 19 nt, Artificial Sequence
  Description of Artificial Sequence: Synthetic oligonucleotide
gcggcccacaggccugauc

SEQ ID NO: 3126783 - RNA, 19 nt, Artificial Sequence
  Description of Artificial Sequence: Synthetic oligonucleotide
gcucggcuggaagcuccug

SEQ ID NO: 3126784 - RNA, 19 nt, Artificial Sequence
  Description of Artificial Sequence: Synthetic oligonucleotide
gcuggugggcucggcugga

SEQ ID NO: 3126785 - RNA, 19 nt, Artificial Sequence
  Description of Artificial Sequence: Synthetic oligonucleotide
cuggugggcucggcuggaa

SEQ ID NO: 3126786 - RNA, 19 nt, Artificial Sequence
  Description of Artificial Sequence: Synthetic oligonucleotide
ccugccgaagcggcccaca

SEQ ID NO: 3126787 - RNA, 19 nt, Artificial Sequence
  Description of Artificial Sequence: Synthetic oligonucleotide
auccagcgugaggcagcuu

SEQ ID NO: 3126788 - RNA, 19 nt, Artificial Sequence
  Description of Artificial Sequence: Synthetic oligonucleotide
cggcuggaagcuccuggga

SEQ ID NO: 3126789 - RNA, 19 nt, Artificial Sequence
  Description of Artificial Sequence: Synthetic oligonucleotide
agcggcccacaggccugau

SEQ ID NO: 3126790 - RNA, 19 nt, Artificial Sequence
  Description of Artificial Sequence: Synthetic oligonucleotide
gccugaucccacggccugu

SEQ ID NO: 3126791 - RNA, 19 nt, Artificial Sequence
  Description of Artificial Sequence: Synthetic oligonucleotide
ggcucggcuggaagcuccu

SEQ ID NO: 3126792 - RNA, 19 nt, Artificial Sequence
  Description of Artificial Sequence: Synthetic oligonucleotide
ccuguguaccaggcuggau

SEQ ID NO: 3126793 - RNA, 19 nt, Artificial Sequence
  Description of Artificial Sequence: Synthetic oligonucleotide
ccggcaccgcaggccaggu

SEQ ID NO: 3126794 - RNA, 19 nt, Artificial Sequence
  Description of Artificial Sequence: Synthetic oligonucleotide
cggcaccgcaggccaggua

SEQ ID NO: 3126795 - RNA, 19 nt, Artificial Sequence
  Description of Artificial Sequence: Synthetic oligonucleotide
uauacauggaagcagaaug

SEQ ID NO: 3126796 - RNA, 19 nt, Artificial Sequence
  Description of Artificial Sequence: Synthetic oligonucleotide
aaaccaaaccaaccaagac

SEQ ID NO: 3126797 - RNA, 19 nt, Artificial Sequence
  Description of Artificial Sequence: Synthetic oligonucleotide
aaccaaaccaaccaagaca

SEQ ID NO: 3126798 - RNA, 19 nt, Artificial Sequence
  Description of Artificial Sequence: Synthetic oligonucleotide
uauacauaauuaauaaaua

SEQ ID NO: 3126799 - RNA, 19 nt, Artificial Sequence
  Description of Artificial Sequence: Synthetic oligonucleotide
uuguauacauaauuaauaa

SEQ ID NO: 3126800 - RNA, 19 nt, Artificial Sequence
  Description of Artificial Sequence: Synthetic oligonucleotide
agagguuaagagcacuggc

SEQ ID NO: 3126801 - RNA, 19 nt, Artificial Sequence
  Description of Artificial Sequence: Synthetic oligonucleotide
ugcagauauacauggaagc

SEQ ID NO: 3126802 - RNA, 19 nt, Artificial Sequence
  Description of Artificial Sequence: Synthetic oligonucleotide
aaccaaaccaaaccaacca

SEQ ID NO: 3126803 - RNA, 19 nt, Artificial Sequence
  Description of Artificial Sequence: Synthetic oligonucleotide
uguuguauacauaauuaau

SEQ ID NO: 3126804 - RNA, 19 nt, Artificial Sequence
  Description of Artificial Sequence: Synthetic oligonucleotide
uguauacauaauuaauaaa

SEQ ID NO: 3126805 - RNA, 19 nt, Artificial Sequence
  Description of Artificial Sequence: Synthetic oligonucleotide
aaccaaccaagacaaaccu

SEQ ID NO: 3126806 - RNA, 19 nt, Artificial Sequence
  Description of Artificial Sequence: Synthetic oligonucleotide
gacaaaccuggagagaugg

SEQ ID NO: 3126807 - RNA, 19 nt, Artificial Sequence
  Description of Artificial Sequence: Synthetic oligonucleotide
ggugugcagauauacaugg

SEQ ID NO: 3126808 - RNA, 19 nt, Artificial Sequence
  Description of Artificial Sequence: Synthetic oligonucleotide
aaccaagacaaaccuggag

SEQ ID NO: 3126809 - RNA, 19 nt, Artificial Sequence
  Description of Artificial Sequence: Synthetic oligonucleotide
ucuucuggugugcagauau

SEQ ID NO: 3126810 - RNA, 19 nt, Artificial Sequence
  Description of Artificial Sequence: Synthetic oligonucleotide
aagacaaaccuggagagau

SEQ ID NO: 3126811 - RNA, 19 nt, Artificial Sequence
  Description of Artificial Sequence: Synthetic oligonucleotide
ccaaccaagacaaaccugg

SEQ ID NO: 3126812 - RNA, 19 nt, Artificial Sequence
  Description of Artificial Sequence: Synthetic oligonucleotide
agcagaauguuguauacau

SEQ ID NO: 3126813 - RNA, 19 nt, Artificial Sequence
  Description of Artificial Sequence: Synthetic oligonucleotide
cagaauguuguauacauaa

SEQ ID NO: 3126814 - RNA, 19 nt, Artificial Sequence
  Description of Artificial Sequence: Synthetic oligonucleotide
gaagcagaauguuguauac

SEQ ID NO: 3126815 - RNA, 19 nt, Artificial Sequence
  Description of Artificial Sequence: Synthetic oligonucleotide
ucagagguuaagagcacug

SEQ ID NO: 3126816 - RNA, 19 nt, Artificial Sequence
  Description of Artificial Sequence: Synthetic oligonucleotide
aucugguucccucuucugg

SEQ ID NO: 3126817 - RNA, 19 nt, Artificial Sequence
  Description of Artificial Sequence: Synthetic oligonucleotide
caaaccaaccaagacaaac

SEQ ID NO: 3126818 - RNA, 19 nt, Artificial Sequence
  Description of Artificial Sequence: Synthetic oligonucleotide
accaccauccguuaugaga

SEQ ID NO: 3126819 - RNA, 19 nt, Artificial Sequence
  Description of Artificial Sequence: Synthetic oligonucleotide
aaaccuggagagauggcuc

SEQ ID NO: 3126820 - RNA, 19 nt, Artificial Sequence
  Description of Artificial Sequence: Synthetic oligonucleotide
guuguauacauaauuaaua

SEQ ID NO: 3126821 - RNA, 19 nt, Artificial Sequence
  Description of Artificial Sequence: Synthetic oligonucleotide
uggugugcagauauacaug

SEQ ID NO: 3126822 - RNA, 19 nt, Artificial Sequence
  Description of Artificial Sequence: Synthetic oligonucleotide
ucuggugugcagauauaca

SEQ ID NO: 3126823 - RNA, 19 nt, Artificial Sequence
  Description of Artificial Sequence: Synthetic oligonucleotide
cagauauacauggaagcag

SEQ ID NO: 3126824 - RNA, 19 nt, Artificial Sequence
  Description of Artificial Sequence: Synthetic oligonucleotide
ucugguucccucuucuggu

SEQ ID NO: 3126825 - RNA, 19 nt, Artificial Sequence
  Description of Artificial Sequence: Synthetic oligonucleotide
gaauguuguauacauaauu

SEQ ID NO: 3126826 - RNA, 19 nt, Artificial Sequence
  Description of Artificial Sequence: Synthetic oligonucleotide
agauauacauggaagcaga

SEQ ID NO: 3126827 - RNA, 19 nt, Artificial Sequence
  Description of Artificial Sequence: Synthetic oligonucleotide
accaaaccaaccaagacaa

SEQ ID NO: 3126828 - RNA, 19 nt, Artificial Sequence
  Description of Artificial Sequence: Synthetic oligonucleotide
aaccuggagagauggcuca

SEQ ID NO: 3126829 - RNA, 19 nt, Artificial Sequence
  Description of Artificial Sequence: Synthetic oligonucleotide
uucuggugugcagauauac

SEQ ID NO: 3126830 - RNA, 19 nt, Artificial Sequence
  Description of Artificial Sequence: Synthetic oligonucleotide
cauggaagcagaauguugu

SEQ ID NO: 3126831 - RNA, 19 nt, Artificial Sequence
  Description of Artificial Sequence: Synthetic oligonucleotide
aagcagaauguuguauaca

SEQ ID NO: 3126832 - RNA, 19 nt, Artificial Sequence
  Description of Artificial Sequence: Synthetic oligonucleotide
ccaagacaaaccuggagag

SEQ ID NO: 3126833 - RNA, 19 nt, Artificial Sequence
  Description of Artificial Sequence: Synthetic oligonucleotide
cucaccaccauccguuaug

SEQ ID NO: 3126834 - RNA, 19 nt, Artificial Sequence
  Description of Artificial Sequence: Synthetic oligonucleotide
cagagguuaagagcacugg

SEQ ID NO: 3126835 - RNA, 19 nt, Artificial Sequence
  Description of Artificial Sequence: Synthetic oligonucleotide
ccaaaccaaaccaaccaag

SEQ ID NO: 3126836 - RNA, 19 nt, Artificial Sequence
  Description of Artificial Sequence: Synthetic oligonucleotide
auauacauggaagcagaau

SEQ ID NO: 3126837 - RNA, 19 nt, Artificial Sequence
  Description of Artificial Sequence: Synthetic oligonucleotide
uggcucaccaccauccguu

SEQ ID NO: 3126838 - RNA, 19 nt, Artificial Sequence
  Description of Artificial Sequence: Synthetic oligonucleotide
ucaccaccauccguuauga

SEQ ID NO: 3126839 - RNA, 19 nt, Artificial Sequence
  Description of Artificial Sequence: Synthetic oligonucleotide
uggaagcagaauguuguau

SEQ ID NO: 3126840 - RNA, 19 nt, Artificial Sequence
  Description of Artificial Sequence: Synthetic oligonucleotide
acaaaccuggagagauggc

SEQ ID NO: 3126841 - RNA, 19 nt, Artificial Sequence
  Description of Artificial Sequence: Synthetic oligonucleotide
ggaagcagaauguuguaua

SEQ ID NO: 3126842 - RNA, 19 nt, Artificial Sequence
  Description of Artificial Sequence: Synthetic oligonucleotide
ugguucccucuucuggugu

SEQ ID NO: 3126843 - RNA, 19 nt, Artificial Sequence
  Description of Artificial Sequence: Synthetic oligonucleotide
gauauacauggaagcagaa

SEQ ID NO: 3126844 - RNA, 19 nt, Artificial Sequence
  Description of Artificial Sequence: Synthetic oligonucleotide
agaauguuguauacauaau

SEQ ID NO: 3126845 - RNA, 19 nt, Artificial Sequence
  Description of Artificial Sequence: Synthetic oligonucleotide
cuggugugcagauauacau

SEQ ID NO: 3126846 - RNA, 19 nt, Artificial Sequence
  Description of Artificial Sequence: Synthetic oligonucleotide
gcagauauacauggaagca

SEQ ID NO: 3126847 - RNA, 19 nt, Artificial Sequence
  Description of Artificial Sequence: Synthetic oligonucleotide
accaaccaagacaaaccug

SEQ ID NO: 3126848 - RNA, 19 nt, Artificial Sequence
  Description of Artificial Sequence: Synthetic oligonucleotide
auggaagcagaauguugua

SEQ ID NO: 3126849 - RNA, 19 nt, Artificial Sequence
  Description of Artificial Sequence: Synthetic oligonucleotide
cugguucccucuucuggug

SEQ ID NO: 3126850 - RNA, 19 nt, Artificial Sequence
  Description of Artificial Sequence: Synthetic oligonucleotide
caaaccuggagagauggcu

SEQ ID NO: 3126851 - RNA, 19 nt, Artificial Sequence
  Description of Artificial Sequence: Synthetic oligonucleotide
caaccaagacaaaccugga

SEQ ID NO: 3126852 - RNA, 19 nt, Artificial Sequence
  Description of Artificial Sequence: Synthetic oligonucleotide
agacaaaccuggagagaug

SEQ ID NO: 3126853 - RNA, 19 nt, Artificial Sequence
  Description of Artificial Sequence: Synthetic oligonucleotide
gguucccucuucuggugug

SEQ ID NO: 3126854 - RNA, 19 nt, Artificial Sequence
  Description of Artificial Sequence: Synthetic oligonucleotide
uucccucuucuggugugca

SEQ ID NO: 3126855 - RNA, 19 nt, Artificial Sequence
  Description of Artificial Sequence: Synthetic oligonucleotide
guucccucuucuggugugc

SEQ ID NO: 3126856 - RNA, 19 nt, Artificial Sequence
  Description of Artificial Sequence: Synthetic oligonucleotide
caccaccauccguuaugag

SEQ ID NO: 3126857 - RNA, 19 nt, Artificial Sequence
  Description of Artificial Sequence: Synthetic oligonucleotide
ccaccauccguuaugagau

SEQ ID NO: 3126858 - RNA, 19 nt, Artificial Sequence
  Description of Artificial Sequence: Synthetic oligonucleotide
gugugcagauauacaugga

SEQ ID NO: 3126859 - RNA, 19 nt, Artificial Sequence
  Description of Artificial Sequence: Synthetic oligonucleotide
cuucuggugugcagauaua

SEQ ID NO: 3126860 - RNA, 19 nt, Artificial Sequence
  Description of Artificial Sequence: Synthetic oligonucleotide
gcagaauguuguauacaua

SEQ ID NO: 3126861 - RNA, 19 nt, Artificial Sequence
  Description of Artificial Sequence: Synthetic oligonucleotide
ggcucaccaccauccguua

SEQ ID NO: 3126862 - RNA, 19 nt, Artificial Sequence
  Description of Artificial Sequence: Synthetic oligonucleotide
cucuucuggugugcagaua

SEQ ID NO: 3126863 - RNA, 19 nt, Artificial Sequence
  Description of Artificial Sequence: Synthetic oligonucleotide
gcucaccaccauccguuau

SEQ ID NO: 3126864 - RNA, 19 nt, Artificial Sequence
  Description of Artificial Sequence: Synthetic oligonucleotide
aauuggucaaguucaacac

SEQ ID NO: 3126865 - RNA, 19 nt, Artificial Sequence
  Description of Artificial Sequence: Synthetic oligonucleotide
auguagaugugauugauac

SEQ ID NO: 3126866 - RNA, 19 nt, Artificial Sequence
  Description of Artificial Sequence: Synthetic oligonucleotide
cuuaucuucacacucacag

SEQ ID NO: 3126867 - RNA, 19 nt, Artificial Sequence
  Description of Artificial Sequence: Synthetic oligonucleotide
aagaaauugccucaggcca

SEQ ID NO: 3126868 - RNA, 19 nt, Artificial Sequence
  Description of Artificial Sequence: Synthetic oligonucleotide
aguucucuuaucuucacac

SEQ ID NO: 3126869 - RNA, 19 nt, Artificial Sequence
  Description of Artificial Sequence: Synthetic oligonucleotide
gacaguuucacaauggcgg

SEQ ID NO: 3126870 - RNA, 19 nt, Artificial Sequence
  Description of Artificial Sequence: Synthetic oligonucleotide
aguuauucaaauugaguuc

SEQ ID NO: 3126871 - RNA, 19 nt, Artificial Sequence
  Description of Artificial Sequence: Synthetic oligonucleotide
cugaaaagugacuugaggc

SEQ ID NO: 3126872 - RNA, 19 nt, Artificial Sequence
  Description of Artificial Sequence: Synthetic oligonucleotide
aaauugaguucucuuaucu

SEQ ID NO: 3126873 - RNA, 19 nt, Artificial Sequence
  Description of Artificial Sequence: Synthetic oligonucleotide
uucaaaacugaaaagugac

SEQ ID NO: 3126874 - RNA, 19 nt, Artificial Sequence
  Description of Artificial Sequence: Synthetic oligonucleotide
uaugcaauuggucaaguuc

SEQ ID NO: 3126875 - RNA, 19 nt, Artificial Sequence
  Description of Artificial Sequence: Synthetic oligonucleotide
accaucaagaaauugccuc

SEQ ID NO: 3126876 - RNA, 19 nt, Artificial Sequence
  Description of Artificial Sequence: Synthetic oligonucleotide
ucaagaaauugccucaggc

SEQ ID NO: 3126877 - RNA, 19 nt, Artificial Sequence
  Description of Artificial Sequence: Synthetic oligonucleotide
ugucaauugcuucaaaacu

SEQ ID NO: 3126878 - RNA, 19 nt, Artificial Sequence
  Description of Artificial Sequence: Synthetic oligonucleotide
aacacugucaauugcuuca

SEQ ID NO: 3126879 - RNA, 19 nt, Artificial Sequence
  Description of Artificial Sequence: Synthetic oligonucleotide
ucuucacacucacagaacc

SEQ ID NO: 3126880 - RNA, 19 nt, Artificial Sequence
  Description of Artificial Sequence: Synthetic oligonucleotide
ugaaaagugacuugaggcu

SEQ ID NO: 3126881 - RNA, 19 nt, Artificial Sequence
  Description of Artificial Sequence: Synthetic oligonucleotide
acugaaaagugacuugagg

SEQ ID NO: 3126882 - RNA, 19 nt, Artificial Sequence
  Description of Artificial Sequence: Synthetic oligonucleotide
ugacaguuucacaauggcg

SEQ ID NO: 3126883 - RNA, 19 nt, Artificial Sequence
  Description of Artificial Sequence: Synthetic oligonucleotide
uuggucaaguucaacacug

SEQ ID NO: 3126884 - RNA, 19 nt, Artificial Sequence
  Description of Artificial Sequence: Synthetic oligonucleotide
ucaauugcuucaaaacuga

SEQ ID NO: 3126885 - RNA, 19 nt, Artificial Sequence
  Description of Artificial Sequence: Synthetic oligonucleotide
caagaaauugccucaggcc

SEQ ID NO: 3126886 - RNA, 19 nt, Artificial Sequence
  Description of Artificial Sequence: Synthetic oligonucleotide
uucaacacugucaauugcu

SEQ ID NO: 3126887 - RNA, 19 nt, Artificial Sequence
  Description of Artificial Sequence: Synthetic oligonucleotide
ggagcaguuauucaaauug

SEQ ID NO: 3126888 - RNA, 19 nt, Artificial Sequence
  Description of Artificial Sequence: Synthetic oligonucleotide
ucaaauugaguucucuuau

SEQ ID NO: 3126889 - RNA, 19 nt, Artificial Sequence
  Description of Artificial Sequence: Synthetic oligonucleotide
aauccuuaugcaauugguc

SEQ ID NO: 3126890 - RNA, 19 nt, Artificial Sequence
  Description of Artificial Sequence: Synthetic oligonucleotide
ugugauugauaccuggggu

SEQ ID NO: 3126891 - RNA, 19 nt, Artificial Sequence
  Description of Artificial Sequence: Synthetic oligonucleotide
auugccucaggccagcauc

SEQ ID NO: 3126892 - RNA, 19 nt, Artificial Sequence
  Description of Artificial Sequence: Synthetic oligonucleotide
aaaagugacuugaggcugc

SEQ ID NO: 3126893 - RNA, 19 nt, Artificial Sequence
  Description of Artificial Sequence: Synthetic oligonucleotide
auccuuaugcaauugguca

SEQ ID NO: 3126894 - RNA, 19 nt, Artificial Sequence
  Description of Artificial Sequence: Synthetic oligonucleotide
agaugugauugauaccugg

SEQ ID NO: 3126895 - RNA, 19 nt, Artificial Sequence
  Description of Artificial Sequence: Synthetic oligonucleotide
uuucacaauggcgggaucg

SEQ ID NO: 3126896 - RNA, 19 nt, Artificial Sequence
  Description of Artificial Sequence: Synthetic oligonucleotide
augugauugauaccugggg

SEQ ID NO: 3126897 - RNA, 19 nt, Artificial Sequence
  Description of Artificial Sequence: Synthetic oligonucleotide
uaauccuuaugcaauuggu

SEQ ID NO: 3126898 - RNA, 19 nt, Artificial Sequence
  Description of Artificial Sequence: Synthetic oligonucleotide
cuaauccuuaugcaauugg

SEQ ID NO: 3126899 - RNA, 19 nt, Artificial Sequence
  Description of Artificial Sequence: Synthetic oligonucleotide
aggccagcaucacuaaucc

SEQ ID NO: 3126900 - RNA, 19 nt, Artificial Sequence
  Description of Artificial Sequence: Synthetic oligonucleotide
uucaaauugaguucucuua

SEQ ID NO: 3126901 - RNA, 19 nt, Artificial Sequence
  Description of Artificial Sequence: Synthetic oligonucleotide
gaaccaucaagaaauugcc

SEQ ID NO: 3126902 - RNA, 19 nt, Artificial Sequence
  Description of Artificial Sequence: Synthetic oligonucleotide
cugucaauugcuucaaaac

SEQ ID NO: 3126903 - RNA, 19 nt, Artificial Sequence
  Description of Artificial Sequence: Synthetic oligonucleotide
agugacuugaggcugcugu

SEQ ID NO: 3126904 - RNA, 19 nt, Artificial Sequence
  Description of Artificial Sequence: Synthetic oligonucleotide
aguucaacacugucaauug

SEQ ID NO: 3126905 - RNA, 19 nt, Artificial Sequence
  Description of Artificial Sequence: Synthetic oligonucleotide
ucacuaauccuuaugcaau

SEQ ID NO: 3126906 - RNA, 19 nt, Artificial Sequence
  Description of Artificial Sequence: Synthetic oligonucleotide
gaugugauugauaccuggg

SEQ ID NO: 3126907 - RNA, 19 nt, Artificial Sequence
  Description of Artificial Sequence: Synthetic oligonucleotide
aaguucaacacugucaauu

SEQ ID NO: 3126908 - RNA, 19 nt, Artificial Sequence
  Description of Artificial Sequence: Synthetic oligonucleotide
uugcaguccaccauguaga

SEQ ID NO: 3126909 - RNA, 19 nt, Artificial Sequence
  Description of Artificial Sequence: Synthetic oligonucleotide
ugucuugcaguccaccaug

SEQ ID NO: 3126910 - RNA, 19 nt, Artificial Sequence
  Description of Artificial Sequence: Synthetic oligonucleotide
gaaaagugacuugaggcug

SEQ ID NO: 3126911 - RNA, 19 nt, Artificial Sequence
  Description of Artificial Sequence: Synthetic oligonucleotide
gucaauugcuucaaaacug

SEQ ID NO: 3126912 - RNA, 19 nt, Artificial Sequence
  Description of Artificial Sequence: Synthetic oligonucleotide
caauuggucaaguucaaca

SEQ ID NO: 3126913 - RNA, 19 nt, Artificial Sequence
  Description of Artificial Sequence: Synthetic oligonucleotide
acaguuucacaauggcggg

SEQ ID NO: 3126914 - RNA, 19 nt, Artificial Sequence
  Description of Artificial Sequence: Synthetic oligonucleotide
uccuguuagugucuugcag

SEQ ID NO: 3126915 - RNA, 19 nt, Artificial Sequence
  Description of Artificial Sequence: Synthetic oligonucleotide
cuucaaaacugaaaaguga

SEQ ID NO: 3126916 - RNA, 19 nt, Artificial Sequence
  Description of Artificial Sequence: Synthetic oligonucleotide
uugcuucaaaacugaaaag

SEQ ID NO: 3126917 - RNA, 19 nt, Artificial Sequence
  Description of Artificial Sequence: Synthetic oligonucleotide
uguagaugugauugauacc

SEQ ID NO: 3126918 - RNA, 19 nt, Artificial Sequence
  Description of Artificial Sequence: Synthetic oligonucleotide
gaggcugcuguccuguuag

SEQ ID NO: 3126919 - RNA, 19 nt, Artificial Sequence
  Description of Artificial Sequence: Synthetic oligonucleotide
ucacagaaccaucaagaaa

SEQ ID NO: 3126920 - RNA, 19 nt, Artificial Sequence
  Description of Artificial Sequence: Synthetic oligonucleotide
caccauguagaugugauug

SEQ ID NO: 3126921 - RNA, 19 nt, Artificial Sequence
  Description of Artificial Sequence: Synthetic oligonucleotide
uguccuguuagugucuugc

SEQ ID NO: 3126922 - RNA, 19 nt, Artificial Sequence
  Description of Artificial Sequence: Synthetic oligonucleotide
guagaugugauugauaccu

SEQ ID NO: 3126923 - RNA, 19 nt, Artificial Sequence
  Description of Artificial Sequence: Synthetic oligonucleotide
acugucaauugcuucaaaa

SEQ ID NO: 3126924 - RNA, 19 nt, Artificial Sequence
  Description of Artificial Sequence: Synthetic oligonucleotide
gcaucacuaauccuuaugc

SEQ ID NO: 3126925 - RNA, 19 nt, Artificial Sequence
  Description of Artificial Sequence: Synthetic oligonucleotide
uuaucuucacacucacaga

SEQ ID NO: 3126926 - RNA, 19 nt, Artificial Sequence
  Description of Artificial Sequence: Synthetic oligonucleotide
ggcgggaucgcccacaagg

SEQ ID NO: 3126927 - RNA, 19 nt, Artificial Sequence
  Description of Artificial Sequence: Synthetic oligonucleotide
auuggucaaguucaacacu

SEQ ID NO: 3126928 - RNA, 19 nt, Artificial Sequence
  Description of Artificial Sequence: Synthetic oligonucleotide
aucaagaaauugccucagg

SEQ ID NO: 3126929 - RNA, 19 nt, Artificial Sequence
  Description of Artificial Sequence: Synthetic oligonucleotide
agcaucacuaauccuuaug

SEQ ID NO: 3126930 - RNA, 19 nt, Artificial Sequence
  Description of Artificial Sequence: Synthetic oligonucleotide
augcaauuggucaaguuca

SEQ ID NO: 3126931 - RNA, 19 nt, Artificial Sequence
  Description of Artificial Sequence: Synthetic oligonucleotide
uccaccauguagaugugau

SEQ ID NO: 3126932 - RNA, 19 nt, Artificial Sequence
  Description of Artificial Sequence: Synthetic oligonucleotide
auucaaauugaguucucuu

SEQ ID NO: 3126933 - RNA, 19 nt, Artificial Sequence
  Description of Artificial Sequence: Synthetic oligonucleotide
uccuuaugcaauuggucaa

SEQ ID NO: 3126934 - RNA, 19 nt, Artificial Sequence
  Description of Artificial Sequence: Synthetic oligonucleotide
aacugaaaagugacuugag

SEQ ID NO: 3126935 - RNA, 19 nt, Artificial Sequence
  Description of Artificial Sequence: Synthetic oligonucleotide
guuauucaaauugaguucu

SEQ ID NO: 3126936 - RNA, 19 nt, Artificial Sequence
  Description of Artificial Sequence: Synthetic oligonucleotide
caguuauucaaauugaguu

SEQ ID NO: 3126937 - RNA, 19 nt, Artificial Sequence
  Description of Artificial Sequence: Synthetic oligonucleotide
cacaauggcgggaucgccc

SEQ ID NO: 3126938 - RNA, 19 nt, Artificial Sequence
  Description of Artificial Sequence: Synthetic oligonucleotide
caaauugaguucucuuauc

SEQ ID NO: 3126939 - RNA, 19 nt, Artificial Sequence
  Description of Artificial Sequence: Synthetic oligonucleotide
agcaguuauucaaauugag

SEQ ID NO: 3126940 - RNA, 19 nt, Artificial Sequence
  Description of Artificial Sequence: Synthetic oligonucleotide
caguccaccauguagaugu

SEQ ID NO: 3126941 - RNA, 19 nt, Artificial Sequence
  Description of Artificial Sequence: Synthetic oligonucleotide
agugucuugcaguccacca

SEQ ID NO: 3126942 - RNA, 19 nt, Artificial Sequence
  Description of Artificial Sequence: Synthetic oligonucleotide
uagaugugauugauaccug

SEQ ID NO: 3126943 - RNA, 19 nt, Artificial Sequence
  Description of Artificial Sequence: Synthetic oligonucleotide
guucaacacugucaauugc

SEQ ID NO: 3126944 - RNA, 19 nt, Artificial Sequence
  Description of Artificial Sequence: Synthetic oligonucleotide
ucuuaucuucacacucaca

SEQ ID NO: 3126945 - RNA, 19 nt, Artificial Sequence
  Description of Artificial Sequence: Synthetic oligonucleotide
gucaaguucaacacuguca

SEQ ID NO: 3126946 - RNA, 19 nt, Artificial Sequence
  Description of Artificial Sequence: Synthetic oligonucleotide
ucaacacugucaauugcuu

SEQ ID NO: 3126947 - RNA, 19 nt, Artificial Sequence
  Description of Artificial Sequence: Synthetic oligonucleotide
cacucacagaaccaucaag

SEQ ID NO: 3126948 - RNA, 19 nt, Artificial Sequence
  Description of Artificial Sequence: Synthetic oligonucleotide
ugauugauaccugggguaa

SEQ ID NO: 3126949 - RNA, 19 nt, Artificial Sequence
  Description of Artificial Sequence: Synthetic oligonucleotide
cuguuagugucuugcaguc

SEQ ID NO: 3126950 - RNA, 19 nt, Artificial Sequence
  Description of Artificial Sequence: Synthetic oligonucleotide
caggccagcaucacuaauc

SEQ ID NO: 3126951 - RNA, 19 nt, Artificial Sequence
  Description of Artificial Sequence: Synthetic oligonucleotide
uuauucaaauugaguucuc

SEQ ID NO: 3126952 - RNA, 19 nt, Artificial Sequence
  Description of Artificial Sequence: Synthetic oligonucleotide
gcuucaaaacugaaaagug

SEQ ID NO: 3126953 - RNA, 19 nt, Artificial Sequence
  Description of Artificial Sequence: Synthetic oligonucleotide
uucacacucacagaaccau

SEQ ID NO: 3126954 - RNA, 19 nt, Artificial Sequence
  Description of Artificial Sequence: Synthetic oligonucleotide
caagggagcaguuauucaa

SEQ ID NO: 3126955 - RNA, 19 nt, Artificial Sequence
  Description of Artificial Sequence: Synthetic oligonucleotide
ugacuugaggcugcugucc

SEQ ID NO: 3126956 - RNA, 19 nt, Artificial Sequence
  Description of Artificial Sequence: Synthetic oligonucleotide
agaaauugccucaggccag

SEQ ID NO: 3126957 - RNA, 19 nt, Artificial Sequence
  Description of Artificial Sequence: Synthetic oligonucleotide
cucugacaguuucacaaug

SEQ ID NO: 3126958 - RNA, 19 nt, Artificial Sequence
  Description of Artificial Sequence: Synthetic oligonucleotide
acaagggagcaguuauuca

SEQ ID NO: 3126959 - RNA, 19 nt, Artificial Sequence
  Description of Artificial Sequence: Synthetic oligonucleotide
cacacucacagaaccauca

SEQ ID NO: 3126960 - RNA, 19 nt, Artificial Sequence
  Description of Artificial Sequence: Synthetic oligonucleotide
acuaauccuuaugcaauug

SEQ ID NO: 3126961 - RNA, 19 nt, Artificial Sequence
  Description of Artificial Sequence: Synthetic oligonucleotide
uucacaauggcgggaucgc

SEQ ID NO: 3126962 - RNA, 19 nt, Artificial Sequence
  Description of Artificial Sequence: Synthetic oligonucleotide
accauguagaugugauuga

SEQ ID NO: 3126963 - RNA, 19 nt, Artificial Sequence
  Description of Artificial Sequence: Synthetic oligonucleotide
acaauggcgggaucgccca

SEQ ID NO: 3126964 - RNA, 19 nt, Artificial Sequence
  Description of Artificial Sequence: Synthetic oligonucleotide
aaccaucaagaaauugccu

SEQ ID NO: 3126965 - RNA, 19 nt, Artificial Sequence
  Description of Artificial Sequence: Synthetic oligonucleotide
uugccucaggccagcauca

SEQ ID NO: 3126966 - RNA, 19 nt, Artificial Sequence
  Description of Artificial Sequence: Synthetic oligonucleotide
caucaagaaauugccucag

SEQ ID NO: 3126967 - RNA, 19 nt, Artificial Sequence
  Description of Artificial Sequence: Synthetic oligonucleotide
aucuucacacucacagaac

SEQ ID NO: 3126968 - RNA, 19 nt, Artificial Sequence
  Description of Artificial Sequence: Synthetic oligonucleotide
aauugccucaggccagcau

SEQ ID NO: 3126969 - RNA, 19 nt, Artificial Sequence
  Description of Artificial Sequence: Synthetic oligonucleotide
uuaugcaauuggucaaguu

SEQ ID NO: 3126970 - RNA, 19 nt, Artificial Sequence
  Description of Artificial Sequence: Synthetic oligonucleotide
ugcaauuggucaaguucaa

SEQ ID NO: 3126971 - RNA, 19 nt, Artificial Sequence
  Description of Artificial Sequence: Synthetic oligonucleotide
caacacugucaauugcuuc

SEQ ID NO: 3126972 - RNA, 19 nt, Artificial Sequence
  Description of Artificial Sequence: Synthetic oligonucleotide
gaaauugccucaggccagc

SEQ ID NO: 3126973 - RNA, 19 nt, Artificial Sequence
  Description of Artificial Sequence: Synthetic oligonucleotide
cacaagggagcaguuauuc

SEQ ID NO: 3126974 - RNA, 19 nt, Artificial Sequence
  Description of Artificial Sequence: Synthetic oligonucleotide
gagcaguuauucaaauuga

SEQ ID NO: 3126975 - RNA, 19 nt, Artificial Sequence
  Description of Artificial Sequence: Synthetic oligonucleotide
ucacacucacagaaccauc

SEQ ID NO: 3126976 - RNA, 19 nt, Artificial Sequence
  Description of Artificial Sequence: Synthetic oligonucleotide
uggucaaguucaacacugu

SEQ ID NO: 3126977 - RNA, 19 nt, Artificial Sequence
  Description of Artificial Sequence: Synthetic oligonucleotide
gugauugauaccuggggua

SEQ ID NO: 3126978 - RNA, 19 nt, Artificial Sequence
  Description of Artificial Sequence: Synthetic oligonucleotide
uguuagugucuugcagucc

SEQ ID NO: 3126979 - RNA, 19 nt, Artificial Sequence
  Description of Artificial Sequence: Synthetic oligonucleotide
aguuucacaauggcgggau

SEQ ID NO: 3126980 - RNA, 19 nt, Artificial Sequence
  Description of Artificial Sequence: Synthetic oligonucleotide
aagggagcaguuauucaaa

SEQ ID NO: 3126981 - RNA, 19 nt, Artificial Sequence
  Description of Artificial Sequence: Synthetic oligonucleotide
cucacagaaccaucaagaa

SEQ ID NO: 3126982 - RNA, 19 nt, Artificial Sequence
  Description of Artificial Sequence: Synthetic oligonucleotide
cuucacacucacagaacca

SEQ ID NO: 3126983 - RNA, 19 nt, Artificial Sequence
  Description of Artificial Sequence: Synthetic oligonucleotide
aauggcgggaucgcccaca

SEQ ID NO: 3126984 - RNA, 19 nt, Artificial Sequence
  Description of Artificial Sequence: Synthetic oligonucleotide
uagugucuugcaguccacc

SEQ ID NO: 3126985 - RNA, 19 nt, Artificial Sequence
  Description of Artificial Sequence: Synthetic oligonucleotide
cagaaccaucaagaaauug

SEQ ID NO: 3126986 - RNA, 19 nt, Artificial Sequence
  Description of Artificial Sequence: Synthetic oligonucleotide
uugauaccugggguaauuc

SEQ ID NO: 3126987 - RNA, 19 nt, Artificial Sequence
  Description of Artificial Sequence: Synthetic oligonucleotide
agggagcaguuauucaaau

SEQ ID NO: 3126988 - RNA, 19 nt, Artificial Sequence
  Description of Artificial Sequence: Synthetic oligonucleotide
ucacaauggcgggaucgcc

SEQ ID NO: 3126989 - RNA, 19 nt, Artificial Sequence
  Description of Artificial Sequence: Synthetic oligonucleotide
auugauaccugggguaauu

SEQ ID NO: 3126990 - RNA, 19 nt, Artificial Sequence
  Description of Artificial Sequence: Synthetic oligonucleotide
ucgcccacaagggagcagu

SEQ ID NO: 3126991 - RNA, 19 nt, Artificial Sequence
  Description of Artificial Sequence: Synthetic oligonucleotide
cauguagaugugauugaua

SEQ ID NO: 3126992 - RNA, 19 nt, Artificial Sequence
  Description of Artificial Sequence: Synthetic oligonucleotide
gggaucgcccacaagggag

SEQ ID NO: 3126993 - RNA, 19 nt, Artificial Sequence
  Description of Artificial Sequence: Synthetic oligonucleotide
acacucacagaaccaucaa

SEQ ID NO: 3126994 - RNA, 19 nt, Artificial Sequence
  Description of Artificial Sequence: Synthetic oligonucleotide
gugacuugaggcugcuguc

SEQ ID NO: 3126995 - RNA, 19 nt, Artificial Sequence
  Description of Artificial Sequence: Synthetic oligonucleotide
ggucaaguucaacacuguc

SEQ ID NO: 3126996 - RNA, 19 nt, Artificial Sequence
  Description of Artificial Sequence: Synthetic oligonucleotide
ucuugcaguccaccaugua

SEQ ID NO: 3126997 - RNA, 19 nt, Artificial Sequence
  Description of Artificial Sequence: Synthetic oligonucleotide
ccaucaagaaauugccuca

SEQ ID NO: 3126998 - RNA, 19 nt, Artificial Sequence
  Description of Artificial Sequence: Synthetic oligonucleotide
guucucuuaucuucacacu

SEQ ID NO: 3126999 - RNA, 19 nt, Artificial Sequence
  Description of Artificial Sequence: Synthetic oligonucleotide
aaauugccucaggccagca

SEQ ID NO: 3127000 - RNA, 19 nt, Artificial Sequence
  Description of Artificial Sequence: Synthetic oligonucleotide
caauugcuucaaaacugaa

SEQ ID NO: 3127001 - RNA, 19 nt, Artificial Sequence
  Description of Artificial Sequence: Synthetic oligonucleotide
ccuuaugcaauuggucaag

SEQ ID NO: 3127002 - RNA, 19 nt, Artificial Sequence
  Description of Artificial Sequence: Synthetic oligonucleotide
aagugacuugaggcugcug

SEQ ID NO: 3127003 - RNA, 19 nt, Artificial Sequence
  Description of Artificial Sequence: Synthetic oligonucleotide
guuucacaauggcgggauc

SEQ ID NO: 3127004 - RNA, 19 nt, Artificial Sequence
  Description of Artificial Sequence: Synthetic oligonucleotide
gcaguuauucaaauugagu

SEQ ID NO: 3127005 - RNA, 19 nt, Artificial Sequence
  Description of Artificial Sequence: Synthetic oligonucleotide
ggaucgcccacaagggagc

SEQ ID NO: 3127006 - RNA, 19 nt, Artificial Sequence
  Description of Artificial Sequence: Synthetic oligonucleotide
ccuguuagugucuugcagu

SEQ ID NO: 3127007 - RNA, 19 nt, Artificial Sequence
  Description of Artificial Sequence: Synthetic oligonucleotide
cgcucugacaguuucacaa

SEQ ID NO: 3127008 - RNA, 19 nt, Artificial Sequence
  Description of Artificial Sequence: Synthetic oligonucleotide
gcgggaucgcccacaaggg

SEQ ID NO: 3127009 - RNA, 19 nt, Artificial Sequence
  Description of Artificial Sequence: Synthetic oligonucleotide
acagaaccaucaagaaauu

SEQ ID NO: 3127010 - RNA, 19 nt, Artificial Sequence
  Description of Artificial Sequence: Synthetic oligonucleotide
auggcgggaucgcccacaa

SEQ ID NO: 3127011 - RNA, 19 nt, Artificial Sequence
  Description of Artificial Sequence: Synthetic oligonucleotide
uggcgggaucgcccacaag

SEQ ID NO: 3127012 - RNA, 19 nt, Artificial Sequence
  Description of Artificial Sequence: Synthetic oligonucleotide
cacuaauccuuaugcaauu

SEQ ID NO: 3127013 - RNA, 19 nt, Artificial Sequence
  Description of Artificial Sequence: Synthetic oligonucleotide
gaucgcccacaagggagca

SEQ ID NO: 3127014 - RNA, 19 nt, Artificial Sequence
  Description of Artificial Sequence: Synthetic oligonucleotide
gugucuugcaguccaccau

SEQ ID NO: 3127015 - RNA, 19 nt, Artificial Sequence
  Description of Artificial Sequence: Synthetic oligonucleotide
cuuaugcaauuggucaagu

SEQ ID NO: 3127016 - RNA, 19 nt, Artificial Sequence
  Description of Artificial Sequence: Synthetic oligonucleotide
aucgcccacaagggagcag

SEQ ID NO: 3127017 - RNA, 19 nt, Artificial Sequence
  Description of Artificial Sequence: Synthetic oligonucleotide
caguuucacaauggcggga

SEQ ID NO: 3127018 - RNA, 19 nt, Artificial Sequence
  Description of Artificial Sequence: Synthetic oligonucleotide
gccagcaucacuaauccuu

SEQ ID NO: 3127019 - RNA, 19 nt, Artificial Sequence
  Description of Artificial Sequence: Synthetic oligonucleotide
guccaccauguagauguga

SEQ ID NO: 3127020 - RNA, 19 nt, Artificial Sequence
  Description of Artificial Sequence: Synthetic oligonucleotide
cucaggccagcaucacuaa

SEQ ID NO: 3127021 - RNA, 19 nt, Artificial Sequence
  Description of Artificial Sequence: Synthetic oligonucleotide
caauggcgggaucgcccac

SEQ ID NO: 3127022 - RNA, 19 nt, Artificial Sequence
  Description of Artificial Sequence: Synthetic oligonucleotide
aguccaccauguagaugug

SEQ ID NO: 3127023 - RNA, 19 nt, Artificial Sequence
  Description of Artificial Sequence: Synthetic oligonucleotide
gauugauaccugggguaau

SEQ ID NO: 3127024 - RNA, 19 nt, Artificial Sequence
  Description of Artificial Sequence: Synthetic oligonucleotide
ccagcaucacuaauccuua

SEQ ID NO: 3127025 - RNA, 19 nt, Artificial Sequence
  Description of Artificial Sequence: Synthetic oligonucleotide
gcaguccaccauguagaug

SEQ ID NO: 3127026 - RNA, 19 nt, Artificial Sequence
  Description of Artificial Sequence: Synthetic oligonucleotide
cacugucaauugcuucaaa

SEQ ID NO: 3127027 - RNA, 19 nt, Artificial Sequence
  Description of Artificial Sequence: Synthetic oligonucleotide
caaguucaacacugucaau

SEQ ID NO: 3127028 - RNA, 19 nt, Artificial Sequence
  Description of Artificial Sequence: Synthetic oligonucleotide
gggagcaguuauucaaauu

SEQ ID NO: 3127029 - RNA, 19 nt, Artificial Sequence
  Description of Artificial Sequence: Synthetic oligonucleotide
cagcaucacuaauccuuau

SEQ ID NO: 3127030 - RNA, 19 nt, Artificial Sequence
  Description of Artificial Sequence: Synthetic oligonucleotide
ccauguagaugugauugau

SEQ ID NO: 3127031 - RNA, 19 nt, Artificial Sequence
  Description of Artificial Sequence: Synthetic oligonucleotide
ggccagcaucacuaauccu

SEQ ID NO: 3127032 - RNA, 19 nt, Artificial Sequence
  Description of Artificial Sequence: Synthetic oligonucleotide
gcccacaagggagcaguua

SEQ ID NO: 3127033 - RNA, 19 nt, Artificial Sequence
  Description of Artificial Sequence: Synthetic oligonucleotide
cgggaucgcccacaaggga

SEQ ID NO: 3127034 - RNA, 19 nt, Artificial Sequence
  Description of Artificial Sequence: Synthetic oligonucleotide
ccaccauguagaugugauu

SEQ ID NO: 3127035 - RNA, 19 nt, Artificial Sequence
  Description of Artificial Sequence: Synthetic oligonucleotide
gcuguccuguuagugucuu

SEQ ID NO: 3127036 - RNA, 19 nt, Artificial Sequence
  Description of Artificial Sequence: Synthetic oligonucleotide
ccacaagggagcaguuauu

SEQ ID NO: 3127037 - RNA, 19 nt, Artificial Sequence
  Description of Artificial Sequence: Synthetic oligonucleotide
cgcccacaagggagcaguu

SEQ ID NO: 3127038 - RNA, 19 nt, Artificial Sequence
  Description of Artificial Sequence: Synthetic oligonucleotide
agaaguacuacacaaguac

SEQ ID NO: 3127039 - RNA, 19 nt, Artificial Sequence
  Description of Artificial Sequence: Synthetic oligonucleotide
uaaccuugaauacacaucu

SEQ ID NO: 3127040 - RNA, 19 nt, Artificial Sequence
  Description of Artificial Sequence: Synthetic oligonucleotide
cauaguauggcaugcaugc

SEQ ID NO: 3127041 - RNA, 19 nt, Artificial Sequence
  Description of Artificial Sequence: Synthetic oligonucleotide
acaaguacagccucagacc

SEQ ID NO: 3127042 - RNA, 19 nt, Artificial Sequence
  Description of Artificial Sequence: Synthetic oligonucleotide
uucaagauggguagguugg

SEQ ID NO: 3127043 - RNA, 19 nt, Artificial Sequence
  Description of Artificial Sequence: Synthetic oligonucleotide
accuugaauacacaucugc

SEQ ID NO: 3127044 - RNA, 19 nt, Artificial Sequence
  Description of Artificial Sequence: Synthetic oligonucleotide
uugaauacacaucugccca

SEQ ID NO: 3127045 - RNA, 19 nt, Artificial Sequence
  Description of Artificial Sequence: Synthetic oligonucleotide
cuugaauacacaucugccc

SEQ ID NO: 3127046 - RNA, 19 nt, Artificial Sequence
  Description of Artificial Sequence: Synthetic oligonucleotide
ugagaaguacuacacaagu

SEQ ID NO: 3127047 - RNA, 19 nt, Artificial Sequence
  Description of Artificial Sequence: Synthetic oligonucleotide
acagccucagaccaugagc

SEQ ID NO: 3127048 - RNA, 19 nt, Artificial Sequence
  Description of Artificial Sequence: Synthetic oligonucleotide
aguacuacacaaguacagc

SEQ ID NO: 3127049 - RNA, 19 nt, Artificial Sequence
  Description of Artificial Sequence: Synthetic oligonucleotide
uaguauggcaugcaugccc

SEQ ID NO: 3127050 - RNA, 19 nt, Artificial Sequence
  Description of Artificial Sequence: Synthetic oligonucleotide
acuacacaaguacagccuc

SEQ ID NO: 3127051 - RNA, 19 nt, Artificial Sequence
  Description of Artificial Sequence: Synthetic oligonucleotide
agauggguagguuggcugc

SEQ ID NO: 3127052 - RNA, 19 nt, Artificial Sequence
  Description of Artificial Sequence: Synthetic oligonucleotide
uacacaucugcccauagua

SEQ ID NO: 3127053 - RNA, 19 nt, Artificial Sequence
  Description of Artificial Sequence: Synthetic oligonucleotide
auucaagauggguagguug

SEQ ID NO: 3127054 - RNA, 19 nt, Artificial Sequence
  Description of Artificial Sequence: Synthetic oligonucleotide
aaguacuacacaaguacag

SEQ ID NO: 3127055 - RNA, 19 nt, Artificial Sequence
  Description of Artificial Sequence: Synthetic oligonucleotide
cacaaguacagccucagac

SEQ ID NO: 3127056 - RNA, 19 nt, Artificial Sequence
  Description of Artificial Sequence: Synthetic oligonucleotide
ugcccuugcacucaugccc

SEQ ID NO: 3127057 - RNA, 19 nt, Artificial Sequence
  Description of Artificial Sequence: Synthetic oligonucleotide
guacuacacaaguacagcc

SEQ ID NO: 3127058 - RNA, 19 nt, Artificial Sequence
  Description of Artificial Sequence: Synthetic oligonucleotide
ugggaauucaagaugggua

SEQ ID NO: 3127059 - RNA, 19 nt, Artificial Sequence
  Description of Artificial Sequence: Synthetic oligonucleotide
uguccaugggaauucaaga

SEQ ID NO: 3127060 - RNA, 19 nt, Artificial Sequence
  Description of Artificial Sequence: Synthetic oligonucleotide
gacauaaccuugaauacac

SEQ ID NO: 3127061 - RNA, 19 nt, Artificial Sequence
  Description of Artificial Sequence: Synthetic oligonucleotide
auaaccuugaauacacauc

SEQ ID NO: 3127062 - RNA, 19 nt, Artificial Sequence
  Description of Artificial Sequence: Synthetic oligonucleotide
ugcccauguucacacaggg

SEQ ID NO: 3127063 - RNA, 19 nt, Artificial Sequence
  Description of Artificial Sequence: Synthetic oligonucleotide
uacuacacaaguacagccu

SEQ ID NO: 3127064 - RNA, 19 nt, Artificial Sequence
  Description of Artificial Sequence: Synthetic oligonucleotide
ugagcagagcuguccaugg

SEQ ID NO: 3127065 - RNA, 19 nt, Artificial Sequence
  Description of Artificial Sequence: Synthetic oligonucleotide
uguacaaggcugccuuggg

SEQ ID NO: 3127066 - RNA, 19 nt, Artificial Sequence
  Description of Artificial Sequence: Synthetic oligonucleotide
uaccccaagggcaugguca

SEQ ID NO: 3127067 - RNA, 19 nt, Artificial Sequence
  Description of Artificial Sequence: Synthetic oligonucleotide
gcagacauaaccuugaaua

SEQ ID NO: 3127068 - RNA, 19 nt, Artificial Sequence
  Description of Artificial Sequence: Synthetic oligonucleotide
gggaauucaagauggguag

SEQ ID NO: 3127069 - RNA, 19 nt, Artificial Sequence
  Description of Artificial Sequence: Synthetic oligonucleotide
ucagaccaugagcagagcu

SEQ ID NO: 3127070 - RNA, 19 nt, Artificial Sequence
  Description of Artificial Sequence: Synthetic oligonucleotide
cagacauaaccuugaauac

SEQ ID NO: 3127071 - RNA, 19 nt, Artificial Sequence
  Description of Artificial Sequence: Synthetic oligonucleotide
auggcaugcaugcccuugc

SEQ ID NO: 3127072 - RNA, 19 nt, Artificial Sequence
  Description of Artificial Sequence: Synthetic oligonucleotide
guacccucgacacugguac

SEQ ID NO: 3127073 - RNA, 19 nt, Artificial Sequence
  Description of Artificial Sequence: Synthetic oligonucleotide
uuggcugccuguacaaggc

SEQ ID NO: 3127074 - RNA, 19 nt, Artificial Sequence
  Description of Artificial Sequence: Synthetic oligonucleotide
cuguccaugggaauucaag

SEQ ID NO: 3127075 - RNA, 19 nt, Artificial Sequence
  Description of Artificial Sequence: Synthetic oligonucleotide
ccaugggaauucaagaugg

SEQ ID NO: 3127076 - RNA, 19 nt, Artificial Sequence
  Description of Artificial Sequence: Synthetic oligonucleotide
aaggcugccuuggggaggc

SEQ ID NO: 3127077 - RNA, 19 nt, Artificial Sequence
  Description of Artificial Sequence: Synthetic oligonucleotide
caugcccuugcacucaugc

SEQ ID NO: 3127078 - RNA, 19 nt, Artificial Sequence
  Description of Artificial Sequence: Synthetic oligonucleotide
cacaucugcccauaguaug

SEQ ID NO: 3127079 - RNA, 19 nt, Artificial Sequence
  Description of Artificial Sequence: Synthetic oligonucleotide
acaucugcccauaguaugg

SEQ ID NO: 3127080 - RNA, 19 nt, Artificial Sequence
  Description of Artificial Sequence: Synthetic oligonucleotide
caugcccauguucacacag

SEQ ID NO: 3127081 - RNA, 19 nt, Artificial Sequence
  Description of Artificial Sequence: Synthetic oligonucleotide
ugcacucaugcccauguuc

SEQ ID NO: 3127082 - RNA, 19 nt, Artificial Sequence
  Description of Artificial Sequence: Synthetic oligonucleotide
cuggguguacccucgacac

SEQ ID NO: 3127083 - RNA, 19 nt, Artificial Sequence
  Description of Artificial Sequence: Synthetic oligonucleotide
auaguauggcaugcaugcc

SEQ ID NO: 3127084 - RNA, 19 nt, Artificial Sequence
  Description of Artificial Sequence: Synthetic oligonucleotide
cucaugcccauguucacac

SEQ ID NO: 3127085 - RNA, 19 nt, Artificial Sequence
  Description of Artificial Sequence: Synthetic oligonucleotide
cagaccaugagcagagcug

SEQ ID NO: 3127086 - RNA, 19 nt, Artificial Sequence
  Description of Artificial Sequence: Synthetic oligonucleotide
gaaguacuacacaaguaca

SEQ ID NO: 3127087 - RNA, 19 nt, Artificial Sequence
  Description of Artificial Sequence: Synthetic oligonucleotide
agacauaaccuugaauaca

SEQ ID NO: 3127088 - RNA, 19 nt, Artificial Sequence
  Description of Artificial Sequence: Synthetic oligonucleotide
ucugcccauaguauggcau

SEQ ID NO: 3127089 - RNA, 19 nt, Artificial Sequence
  Description of Artificial Sequence: Synthetic oligonucleotide
guacaaggcugccuugggg

SEQ ID NO: 3127090 - RNA, 19 nt, Artificial Sequence
  Description of Artificial Sequence: Synthetic oligonucleotide
augcccuugcacucaugcc

SEQ ID NO: 3127091 - RNA, 19 nt, Artificial Sequence
  Description of Artificial Sequence: Synthetic oligonucleotide
acuggguguacccucgaca

SEQ ID NO: 3127092 - RNA, 19 nt, Artificial Sequence
  Description of Artificial Sequence: Synthetic oligonucleotide
ggugagaaguacuacacaa

SEQ ID NO: 3127093 - RNA, 19 nt, Artificial Sequence
  Description of Artificial Sequence: Synthetic oligonucleotide
uacagccucagaccaugag

SEQ ID NO: 3127094 - RNA, 19 nt, Artificial Sequence
  Description of Artificial Sequence: Synthetic oligonucleotide
agggcauggucacaccuag

SEQ ID NO: 3127095 - RNA, 19 nt, Artificial Sequence
  Description of Artificial Sequence: Synthetic oligonucleotide
ccuugaauacacaucugcc

SEQ ID NO: 3127096 - RNA, 19 nt, Artificial Sequence
  Description of Artificial Sequence: Synthetic oligonucleotide
caugggaauucaagauggg

SEQ ID NO: 3127097 - RNA, 19 nt, Artificial Sequence
  Description of Artificial Sequence: Synthetic oligonucleotide
caaguacagccucagacca

SEQ ID NO: 3127098 - RNA, 19 nt, Artificial Sequence
  Description of Artificial Sequence: Synthetic oligonucleotide
agcagagcuguccauggga

SEQ ID NO: 3127099 - RNA, 19 nt, Artificial Sequence
  Description of Artificial Sequence: Synthetic oligonucleotide
gugagaaguacuacacaag

SEQ ID NO: 3127100 - RNA, 19 nt, Artificial Sequence
  Description of Artificial Sequence: Synthetic oligonucleotide
aguacagccucagaccaug

SEQ ID NO: 3127101 - RNA, 19 nt, Artificial Sequence
  Description of Artificial Sequence: Synthetic oligonucleotide
accccaagggcauggucac

SEQ ID NO: 3127102 - RNA, 19 nt, Artificial Sequence
  Description of Artificial Sequence: Synthetic oligonucleotide
guucacacuggguguaccc

SEQ ID NO: 3127103 - RNA, 19 nt, Artificial Sequence
  Description of Artificial Sequence: Synthetic oligonucleotide
acacaggguucacacuggg

SEQ ID NO: 3127104 - RNA, 19 nt, Artificial Sequence
  Description of Artificial Sequence: Synthetic oligonucleotide
ugaauacacaucugcccau

SEQ ID NO: 3127105 - RNA, 19 nt, Artificial Sequence
  Description of Artificial Sequence: Synthetic oligonucleotide
acccucgacacugguaccc

SEQ ID NO: 3127106 - RNA, 19 nt, Artificial Sequence
  Description of Artificial Sequence: Synthetic oligonucleotide
caugcaugcccuugcacuc

SEQ ID NO: 3127107 - RNA, 19 nt, Artificial Sequence
  Description of Artificial Sequence: Synthetic oligonucleotide
cacacuggguguacccucg

SEQ ID NO: 3127108 - RNA, 19 nt, Artificial Sequence
  Description of Artificial Sequence: Synthetic oligonucleotide
cagccucagaccaugagca

SEQ ID NO: 3127109 - RNA, 19 nt, Artificial Sequence
  Description of Artificial Sequence: Synthetic oligonucleotide
auacacaucugcccauagu

SEQ ID NO: 3127110 - RNA, 19 nt, Artificial Sequence
  Description of Artificial Sequence: Synthetic oligonucleotide
aauucaagauggguagguu

SEQ ID NO: 3127111 - RNA, 19 nt, Artificial Sequence
  Description of Artificial Sequence: Synthetic oligonucleotide
cacacaggguucacacugg

SEQ ID NO: 3127112 - RNA, 19 nt, Artificial Sequence
  Description of Artificial Sequence: Synthetic oligonucleotide
cuguacaaggcugccuugg

SEQ ID NO: 3127113 - RNA, 19 nt, Artificial Sequence
  Description of Artificial Sequence: Synthetic oligonucleotide
ucgacacugguaccccaag

SEQ ID NO: 3127114 - RNA, 19 nt, Artificial Sequence
  Description of Artificial Sequence: Synthetic oligonucleotide
agaccaugagcagagcugu

SEQ ID NO: 3127115 - RNA, 19 nt, Artificial Sequence
  Description of Artificial Sequence: Synthetic oligonucleotide
augggaauucaagaugggu

SEQ ID NO: 3127116 - RNA, 19 nt, Artificial Sequence
  Description of Artificial Sequence: Synthetic oligonucleotide
uguacccucgacacuggua

SEQ ID NO: 3127117 - RNA, 19 nt, Artificial Sequence
  Description of Artificial Sequence: Synthetic oligonucleotide
aguauggcaugcaugcccu

SEQ ID NO: 3127118 - RNA, 19 nt, Artificial Sequence
  Description of Artificial Sequence: Synthetic oligonucleotide
cugcccauaguauggcaug

SEQ ID NO: 3127119 - RNA, 19 nt, Artificial Sequence
  Description of Artificial Sequence: Synthetic oligonucleotide
gagcagagcuguccauggg

SEQ ID NO: 3127120 - RNA, 19 nt, Artificial Sequence
  Description of Artificial Sequence: Synthetic oligonucleotide
ucaagauggguagguuggc

SEQ ID NO: 3127121 - RNA, 19 nt, Artificial Sequence
  Description of Artificial Sequence: Synthetic oligonucleotide
uguucacacaggguucaca

SEQ ID NO: 3127122 - RNA, 19 nt, Artificial Sequence
  Description of Artificial Sequence: Synthetic oligonucleotide
cauaaccuugaauacacau

SEQ ID NO: 3127123 - RNA, 19 nt, Artificial Sequence
  Description of Artificial Sequence: Synthetic oligonucleotide
augagcagagcuguccaug

SEQ ID NO: 3127124 - RNA, 19 nt, Artificial Sequence
  Description of Artificial Sequence: Synthetic oligonucleotide
uucacacuggguguacccu

SEQ ID NO: 3127125 - RNA, 19 nt, Artificial Sequence
  Description of Artificial Sequence: Synthetic oligonucleotide
ucacacuggguguacccuc

SEQ ID NO: 3127126 - RNA, 19 nt, Artificial Sequence
  Description of Artificial Sequence: Synthetic oligonucleotide
ugguaccccaagggcaugg

SEQ ID NO: 3127127 - RNA, 19 nt, Artificial Sequence
  Description of Artificial Sequence: Synthetic oligonucleotide
ugcccauaguauggcaugc

SEQ ID NO: 3127128 - RNA, 19 nt, Artificial Sequence
  Description of Artificial Sequence: Synthetic oligonucleotide
aaccuugaauacacaucug

SEQ ID NO: 3127129 - RNA, 19 nt, Artificial Sequence
  Description of Artificial Sequence: Synthetic oligonucleotide
gaauucaagauggguaggu

SEQ ID NO: 3127130 - RNA, 19 nt, Artificial Sequence
  Description of Artificial Sequence: Synthetic oligonucleotide
ggaauucaagauggguagg

SEQ ID NO: 3127131 - RNA, 19 nt, Artificial Sequence
  Description of Artificial Sequence: Synthetic oligonucleotide
gauggguagguuggcugcc

SEQ ID NO: 3127132 - RNA, 19 nt, Artificial Sequence
  Description of Artificial Sequence: Synthetic oligonucleotide
ccauaguauggcaugcaug

SEQ ID NO: 3127133 - RNA, 19 nt, Artificial Sequence
  Description of Artificial Sequence: Synthetic oligonucleotide
gagaaguacuacacaagua

SEQ ID NO: 3127134 - RNA, 19 nt, Artificial Sequence
  Description of Artificial Sequence: Synthetic oligonucleotide
agagcuguccaugggaauu

SEQ ID NO: 3127135 - RNA, 19 nt, Artificial Sequence
  Description of Artificial Sequence: Synthetic oligonucleotide
ccucagaccaugagcagag

SEQ ID NO: 3127136 - RNA, 19 nt, Artificial Sequence
  Description of Artificial Sequence: Synthetic oligonucleotide
ggcauggucacaccuagaa

SEQ ID NO: 3127137 - RNA, 19 nt, Artificial Sequence
  Description of Artificial Sequence: Synthetic oligonucleotide
ggguguacccucgacacug

SEQ ID NO: 3127138 - RNA, 19 nt, Artificial Sequence
  Description of Artificial Sequence: Synthetic oligonucleotide
acucaugcccauguucaca

SEQ ID NO: 3127139 - RNA, 19 nt, Artificial Sequence
  Description of Artificial Sequence: Synthetic oligonucleotide
caucugcccauaguauggc

SEQ ID NO: 3127140 - RNA, 19 nt, Artificial Sequence
  Description of Artificial Sequence: Synthetic oligonucleotide
agccucagaccaugagcag

SEQ ID NO: 3127141 - RNA, 19 nt, Artificial Sequence
  Description of Artificial Sequence: Synthetic oligonucleotide
uggcaugcaugcccuugca

SEQ ID NO: 3127142 - RNA, 19 nt, Artificial Sequence
  Description of Artificial Sequence: Synthetic oligonucleotide
gcauggucacaccuagaag

SEQ ID NO: 3127143 - RNA, 19 nt, Artificial Sequence
  Description of Artificial Sequence: Synthetic oligonucleotide
augcccauguucacacagg

SEQ ID NO: 3127144 - RNA, 19 nt, Artificial Sequence
  Description of Artificial Sequence: Synthetic oligonucleotide
aucugcccauaguauggca

SEQ ID NO: 3127145 - RNA, 19 nt, Artificial Sequence
  Description of Artificial Sequence: Synthetic oligonucleotide
uggguguacccucgacacu

SEQ ID NO: 3127146 - RNA, 19 nt, Artificial Sequence
  Description of Artificial Sequence: Synthetic oligonucleotide
guagguuggcugccuguac

SEQ ID NO: 3127147 - RNA, 19 nt, Artificial Sequence
  Description of Artificial Sequence: Synthetic oligonucleotide
acacaaguacagccucaga

SEQ ID NO: 3127148 - RNA, 19 nt, Artificial Sequence
  Description of Artificial Sequence: Synthetic oligonucleotide
cauguucacacaggguuca

SEQ ID NO: 3127149 - RNA, 19 nt, Artificial Sequence
  Description of Artificial Sequence: Synthetic oligonucleotide
agguuggcugccuguacaa

SEQ ID NO: 3127150 - RNA, 19 nt, Artificial Sequence
  Description of Artificial Sequence: Synthetic oligonucleotide
cacucaugcccauguucac

SEQ ID NO: 3127151 - RNA, 19 nt, Artificial Sequence
  Description of Artificial Sequence: Synthetic oligonucleotide
ucaugcccauguucacaca

SEQ ID NO: 3127152 - RNA, 19 nt, Artificial Sequence
  Description of Artificial Sequence: Synthetic oligonucleotide
guccaugggaauucaagau

SEQ ID NO: 3127153 - RNA, 19 nt, Artificial Sequence
  Description of Artificial Sequence: Synthetic oligonucleotide
uggcugccuguacaaggcu

SEQ ID NO: 3127154 - RNA, 19 nt, Artificial Sequence
  Description of Artificial Sequence: Synthetic oligonucleotide
cuugcacucaugcccaugu

SEQ ID NO: 3127155 - RNA, 19 nt, Artificial Sequence
  Description of Artificial Sequence: Synthetic oligonucleotide
caaggcugccuuggggagg

SEQ ID NO: 3127156 - RNA, 19 nt, Artificial Sequence
  Description of Artificial Sequence: Synthetic oligonucleotide
uacccucgacacugguacc

SEQ ID NO: 3127157 - RNA, 19 nt, Artificial Sequence
  Description of Artificial Sequence: Synthetic oligonucleotide
aagggcauggucacaccua

SEQ ID NO: 3127158 - RNA, 19 nt, Artificial Sequence
  Description of Artificial Sequence: Synthetic oligonucleotide
auguucacacaggguucac

SEQ ID NO: 3127159 - RNA, 19 nt, Artificial Sequence
  Description of Artificial Sequence: Synthetic oligonucleotide
acacaucugcccauaguau

SEQ ID NO: 3127160 - RNA, 19 nt, Artificial Sequence
  Description of Artificial Sequence: Synthetic oligonucleotide
gaauacacaucugcccaua

SEQ ID NO: 3127161 - RNA, 19 nt, Artificial Sequence
  Description of Artificial Sequence: Synthetic oligonucleotide
gagcuguccaugggaauuc

SEQ ID NO: 3127162 - RNA, 19 nt, Artificial Sequence
  Description of Artificial Sequence: Synthetic oligonucleotide
gcacucaugcccauguuca

SEQ ID NO: 3127163 - RNA, 19 nt, Artificial Sequence
  Description of Artificial Sequence: Synthetic oligonucleotide
ugcaugcccuugcacucau

SEQ ID NO: 3127164 - RNA, 19 nt, Artificial Sequence
  Description of Artificial Sequence: Synthetic oligonucleotide
ccauguucacacaggguuc

SEQ ID NO: 3127165 - RNA, 19 nt, Artificial Sequence
  Description of Artificial Sequence: Synthetic oligonucleotide
acauaaccuugaauacaca

SEQ ID NO: 3127166 - RNA, 19 nt, Artificial Sequence
  Description of Artificial Sequence: Synthetic oligonucleotide
aaguacagccucagaccau

SEQ ID NO: 3127167 - RNA, 19 nt, Artificial Sequence
  Description of Artificial Sequence: Synthetic oligonucleotide
gcugccuguacaaggcugc

SEQ ID NO: 3127168 - RNA, 19 nt, Artificial Sequence
  Description of Artificial Sequence: Synthetic oligonucleotide
ugccuguacaaggcugccu

SEQ ID NO: 3127169 - RNA, 19 nt, Artificial Sequence
  Description of Artificial Sequence: Synthetic oligonucleotide
cacuggguguacccucgac

SEQ ID NO: 3127170 - RNA, 19 nt, Artificial Sequence
  Description of Artificial Sequence: Synthetic oligonucleotide
guaccccaagggcaugguc

SEQ ID NO: 3127171 - RNA, 19 nt, Artificial Sequence
  Description of Artificial Sequence: Synthetic oligonucleotide
uugcacucaugcccauguu

SEQ ID NO: 3127172 - RNA, 19 nt, Artificial Sequence
  Description of Artificial Sequence: Synthetic oligonucleotide
ugccuuggggaggcggggc

SEQ ID NO: 3127173 - RNA, 19 nt, Artificial Sequence
  Description of Artificial Sequence: Synthetic oligonucleotide
cucgacacugguaccccaa

SEQ ID NO: 3127174 - RNA, 19 nt, Artificial Sequence
  Description of Artificial Sequence: Synthetic oligonucleotide
augcaugcccuugcacuca

SEQ ID NO: 3127175 - RNA, 19 nt, Artificial Sequence
  Description of Artificial Sequence: Synthetic oligonucleotide
gcugccuuggggaggcggg

SEQ ID NO: 3127176 - RNA, 19 nt, Artificial Sequence
  Description of Artificial Sequence: Synthetic oligonucleotide
cugccuguacaaggcugcc

SEQ ID NO: 3127177 - RNA, 19 nt, Artificial Sequence
  Description of Artificial Sequence: Synthetic oligonucleotide
caagggcauggucacaccu

SEQ ID NO: 3127178 - RNA, 19 nt, Artificial Sequence
  Description of Artificial Sequence: Synthetic oligonucleotide
acacuggguguacccucga

SEQ ID NO: 3127179 - RNA, 19 nt, Artificial Sequence
  Description of Artificial Sequence: Synthetic oligonucleotide
gguucacacuggguguacc

SEQ ID NO: 3127180 - RNA, 19 nt, Artificial Sequence
  Description of Artificial Sequence: Synthetic oligonucleotide
ggcugccuguacaaggcug

SEQ ID NO: 3127181 - RNA, 19 nt, Artificial Sequence
  Description of Artificial Sequence: Synthetic oligonucleotide
gguguacccucgacacugg

SEQ ID NO: 3127182 - RNA, 19 nt, Artificial Sequence
  Description of Artificial Sequence: Synthetic oligonucleotide
caggguucacacugggugu

SEQ ID NO: 3127183 - RNA, 19 nt, Artificial Sequence
  Description of Artificial Sequence: Synthetic oligonucleotide
cugccuuggggaggcgggg

SEQ ID NO: 3127184 - RNA, 19 nt, Artificial Sequence
  Description of Artificial Sequence: Synthetic oligonucleotide
agcuguccaugggaauuca

SEQ ID NO: 3127185 - RNA, 19 nt, Artificial Sequence
  Description of Artificial Sequence: Synthetic oligonucleotide
auggguagguuggcugccu

SEQ ID NO: 3127186 - RNA, 19 nt, Artificial Sequence
  Description of Artificial Sequence: Synthetic oligonucleotide
gguuggcugccuguacaag

SEQ ID NO: 3127187 - RNA, 19 nt, Artificial Sequence
  Description of Artificial Sequence: Synthetic oligonucleotide
cccaagggcauggucacac

SEQ ID NO: 3127188 - RNA, 19 nt, Artificial Sequence
  Description of Artificial Sequence: Synthetic oligonucleotide
ggaggcggggcagacauaa

SEQ ID NO: 3127189 - RNA, 19 nt, Artificial Sequence
  Description of Artificial Sequence: Synthetic oligonucleotide
aggguucacacugggugua

SEQ ID NO: 3127190 - RNA, 19 nt, Artificial Sequence
  Description of Artificial Sequence: Synthetic oligonucleotide
ggggcagacauaaccuuga

SEQ ID NO: 3127191 - RNA, 19 nt, Artificial Sequence
  Description of Artificial Sequence: Synthetic oligonucleotide
cccauguucacacaggguu

SEQ ID NO: 3127192 - RNA, 19 nt, Artificial Sequence
  Description of Artificial Sequence: Synthetic oligonucleotide
ccuguacaaggcugccuug

SEQ ID NO: 3127193 - RNA, 19 nt, Artificial Sequence
  Description of Artificial Sequence: Synthetic oligonucleotide
uuggggaggcggggcagac

SEQ ID NO: 3127194 - RNA, 19 nt, Artificial Sequence
  Description of Artificial Sequence: Synthetic oligonucleotide
cgacacugguaccccaagg

SEQ ID NO: 3127195 - RNA, 19 nt, Artificial Sequence
  Description of Artificial Sequence: Synthetic oligonucleotide
ccaugagcagagcugucca

SEQ ID NO: 3127196 - RNA, 19 nt, Artificial Sequence
  Description of Artificial Sequence: Synthetic oligonucleotide
ccaagggcauggucacacc

SEQ ID NO: 3127197 - RNA, 19 nt, Artificial Sequence
  Description of Artificial Sequence: Synthetic oligonucleotide
gaccaugagcagagcuguc

SEQ ID NO: 3127198 - RNA, 19 nt, Artificial Sequence
  Description of Artificial Sequence: Synthetic oligonucleotide
ggcugccuuggggaggcgg

SEQ ID NO: 3127199 - RNA, 19 nt, Artificial Sequence
  Description of Artificial Sequence: Synthetic oligonucleotide
gccucagaccaugagcaga

SEQ ID NO: 3127200 - RNA, 19 nt, Artificial Sequence
  Description of Artificial Sequence: Synthetic oligonucleotide
cggggcagacauaaccuug

SEQ ID NO: 3127201 - RNA, 19 nt, Artificial Sequence
  Description of Artificial Sequence: Synthetic oligonucleotide
caagauggguagguuggcu

SEQ ID NO: 3127202 - RNA, 19 nt, Artificial Sequence
  Description of Artificial Sequence: Synthetic oligonucleotide
uggggaggcggggcagaca

SEQ ID NO: 3127203 - RNA, 19 nt, Artificial Sequence
  Description of Artificial Sequence: Synthetic oligonucleotide
gcagagcuguccaugggaa

SEQ ID NO: 3127204 - RNA, 19 nt, Artificial Sequence
  Description of Artificial Sequence: Synthetic oligonucleotide
ggcagacauaaccuugaau

SEQ ID NO: 3127205 - RNA, 19 nt, Artificial Sequence
  Description of Artificial Sequence: Synthetic oligonucleotide
gguagguuggcugccugua

SEQ ID NO: 3127206 - RNA, 19 nt, Artificial Sequence
  Description of Artificial Sequence: Synthetic oligonucleotide
cacaggguucacacugggu

SEQ ID NO: 3127207 - RNA, 19 nt, Artificial Sequence
  Description of Artificial Sequence: Synthetic oligonucleotide
guacagccucagaccauga

SEQ ID NO: 3127208 - RNA, 19 nt, Artificial Sequence
  Description of Artificial Sequence: Synthetic oligonucleotide
cugguaccccaagggcaug

SEQ ID NO: 3127209 - RNA, 19 nt, Artificial Sequence
  Description of Artificial Sequence: Synthetic oligonucleotide
caugagcagagcuguccau

SEQ ID NO: 3127210 - RNA, 19 nt, Artificial Sequence
  Description of Artificial Sequence: Synthetic oligonucleotide
gccuguacaaggcugccuu

SEQ ID NO: 3127211 - RNA, 19 nt, Artificial Sequence
  Description of Artificial Sequence: Synthetic oligonucleotide
ggggaggcggggcagacau

SEQ ID NO: 3127212 - RNA, 19 nt, Artificial Sequence
  Description of Artificial Sequence: Synthetic oligonucleotide
cuuggggaggcggggcaga

SEQ ID NO: 3127213 - RNA, 19 nt, Artificial Sequence
  Description of Artificial Sequence: Synthetic oligonucleotide
ggcggggcagacauaaccu

SEQ ID NO: 3127214 - RNA, 19 nt, Artificial Sequence
  Description of Artificial Sequence: Synthetic oligonucleotide
gcccuugcacucaugccca

SEQ ID NO: 3127215 - RNA, 19 nt, Artificial Sequence
  Description of Artificial Sequence: Synthetic oligonucleotide
guguacccucgacacuggu

SEQ ID NO: 3127216 - RNA, 19 nt, Artificial Sequence
  Description of Artificial Sequence: Synthetic oligonucleotide
cccucgacacugguacccc

SEQ ID NO: 3127217 - RNA, 19 nt, Artificial Sequence
  Description of Artificial Sequence: Synthetic oligonucleotide
ggguucacacuggguguac

SEQ ID NO: 3127218 - RNA, 19 nt, Artificial Sequence
  Description of Artificial Sequence: Synthetic oligonucleotide
cagagcuguccaugggaau

SEQ ID NO: 3127219 - RNA, 19 nt, Artificial Sequence
  Description of Artificial Sequence: Synthetic oligonucleotide
gcccauaguauggcaugca

SEQ ID NO: 3127220 - RNA, 19 nt, Artificial Sequence
  Description of Artificial Sequence: Synthetic oligonucleotide
ccuugcacucaugcccaug

SEQ ID NO: 3127221 - RNA, 19 nt, Artificial Sequence
  Description of Artificial Sequence: Synthetic oligonucleotide
ggguagguuggcugccugu

SEQ ID NO: 3127222 - RNA, 19 nt, Artificial Sequence
  Description of Artificial Sequence: Synthetic oligonucleotide
gccuuggggaggcggggca

SEQ ID NO: 3127223 - RNA, 19 nt, Artificial Sequence
  Description of Artificial Sequence: Synthetic oligonucleotide
ccuuggggaggcggggcag

SEQ ID NO: 3127224 - RNA, 19 nt, Artificial Sequence
  Description of Artificial Sequence: Synthetic oligonucleotide
cccauaguauggcaugcau

SEQ ID NO: 3127225 - RNA, 19 nt, Artificial Sequence
  Description of Artificial Sequence: Synthetic oligonucleotide
gcuguccaugggaauucaa

SEQ ID NO: 3127226 - RNA, 19 nt, Artificial Sequence
  Description of Artificial Sequence: Synthetic oligonucleotide
ccucgacacugguacccca

SEQ ID NO: 3127227 - RNA, 19 nt, Artificial Sequence
  Description of Artificial Sequence: Synthetic oligonucleotide
guauggcaugcaugcccuu

SEQ ID NO: 3127228 - RNA, 19 nt, Artificial Sequence
  Description of Artificial Sequence: Synthetic oligonucleotide
aggcugccuuggggaggcg

SEQ ID NO: 3127229 - RNA, 19 nt, Artificial Sequence
  Description of Artificial Sequence: Synthetic oligonucleotide
gggcauggucacaccuaga

SEQ ID NO: 3127230 - RNA, 19 nt, Artificial Sequence
  Description of Artificial Sequence: Synthetic oligonucleotide
gcggggcagacauaaccuu

SEQ ID NO: 3127231 - RNA, 19 nt, Artificial Sequence
  Description of Artificial Sequence: Synthetic oligonucleotide
gcaugcccuugcacucaug

SEQ ID NO: 3127232 - RNA, 19 nt, Artificial Sequence
  Description of Artificial Sequence: Synthetic oligonucleotide
gguaccccaagggcauggu

SEQ ID NO: 3127233 - RNA, 19 nt, Artificial Sequence
  Description of Artificial Sequence: Synthetic oligonucleotide
gcccauguucacacagggu

SEQ ID NO: 3127234 - RNA, 19 nt, Artificial Sequence
  Description of Artificial Sequence: Synthetic oligonucleotide
ccccaagggcauggucaca

SEQ ID NO: 3127235 - RNA, 19 nt, Artificial Sequence
  Description of Artificial Sequence: Synthetic oligonucleotide
gggaggcggggcagacaua

SEQ ID NO: 3127236 - RNA, 19 nt, Artificial Sequence
  Description of Artificial Sequence: Synthetic oligonucleotide
cccuugcacucaugcccau

SEQ ID NO: 3127237 - RNA, 19 nt, Artificial Sequence
  Description of Artificial Sequence: Synthetic oligonucleotide
uuuuauuguugaauagucg

SEQ ID NO: 3127238 - RNA, 19 nt, Artificial Sequence
  Description of Artificial Sequence: Synthetic oligonucleotide
uuuauuguugaauagucgu

SEQ ID NO: 3127239 - RNA, 19 nt, Artificial Sequence
  Description of Artificial Sequence: Synthetic oligonucleotide
cagaccuugagcaugaagg

SEQ ID NO: 3127240 - RNA, 19 nt, Artificial Sequence
  Description of Artificial Sequence: Synthetic oligonucleotide
uucagggugaacuuacugg

SEQ ID NO: 3127241 - RNA, 19 nt, Artificial Sequence
  Description of Artificial Sequence: Synthetic oligonucleotide
aguagaggcacuugaaggg

SEQ ID NO: 3127242 - RNA, 19 nt, Artificial Sequence
  Description of Artificial Sequence: Synthetic oligonucleotide
agugcaggugcauaugacc

SEQ ID NO: 3127243 - RNA, 19 nt, Artificial Sequence
  Description of Artificial Sequence: Synthetic oligonucleotide
ucagggugaacuuacuggg

SEQ ID NO: 3127244 - RNA, 19 nt, Artificial Sequence
  Description of Artificial Sequence: Synthetic oligonucleotide
agcaugaaggccucgcucc

SEQ ID NO: 3127245 - RNA, 19 nt, Artificial Sequence
  Description of Artificial Sequence: Synthetic oligonucleotide
ugaauuccuucccacacag

SEQ ID NO: 3127246 - RNA, 19 nt, Artificial Sequence
  Description of Artificial Sequence: Synthetic oligonucleotide
auuguugaauagucguccc

SEQ ID NO: 3127247 - RNA, 19 nt, Artificial Sequence
  Description of Artificial Sequence: Synthetic oligonucleotide
uguguuuuauuguugaaua

SEQ ID NO: 3127248 - RNA, 19 nt, Artificial Sequence
  Description of Artificial Sequence: Synthetic oligonucleotide
cauaugacccaucagguug

SEQ ID NO: 3127249 - RNA, 19 nt, Artificial Sequence
  Description of Artificial Sequence: Synthetic oligonucleotide
uauuguugaauagucgucc

SEQ ID NO: 3127250 - RNA, 19 nt, Artificial Sequence
  Description of Artificial Sequence: Synthetic oligonucleotide
agaccuugagcaugaaggc

SEQ ID NO: 3127251 - RNA, 19 nt, Artificial Sequence
  Description of Artificial Sequence: Synthetic oligonucleotide
agggugaacuuacuggggc

SEQ ID NO: 3127252 - RNA, 19 nt, Artificial Sequence
  Description of Artificial Sequence: Synthetic oligonucleotide
caguagaggcacuugaagg

SEQ ID NO: 3127253 - RNA, 19 nt, Artificial Sequence
  Description of Artificial Sequence: Synthetic oligonucleotide
uguuuuauuguugaauagu

SEQ ID NO: 3127254 - RNA, 19 nt, Artificial Sequence
  Description of Artificial Sequence: Synthetic oligonucleotide
gucagguuccccuucaggg

SEQ ID NO: 3127255 - RNA, 19 nt, Artificial Sequence
  Description of Artificial Sequence: Synthetic oligonucleotide
auccgguugaauuccuucc

SEQ ID NO: 3127256 - RNA, 19 nt, Artificial Sequence
  Description of Artificial Sequence: Synthetic oligonucleotide
ugaauagucguccccuacc

SEQ ID NO: 3127257 - RNA, 19 nt, Artificial Sequence
  Description of Artificial Sequence: Synthetic oligonucleotide
ugacccaucagguugugca

SEQ ID NO: 3127258 - RNA, 19 nt, Artificial Sequence
  Description of Artificial Sequence: Synthetic oligonucleotide
ugcauaugacccaucaggu

SEQ ID NO: 3127259 - RNA, 19 nt, Artificial Sequence
  Description of Artificial Sequence: Synthetic oligonucleotide
uuauuguugaauagucguc

SEQ ID NO: 3127260 - RNA, 19 nt, Artificial Sequence
  Description of Artificial Sequence: Synthetic oligonucleotide
auagucguccccuacccag

SEQ ID NO: 3127261 - RNA, 19 nt, Artificial Sequence
  Description of Artificial Sequence: Synthetic oligonucleotide
caugacuccaugcuugacc

SEQ ID NO: 3127262 - RNA, 19 nt, Artificial Sequence
  Description of Artificial Sequence: Synthetic oligonucleotide
gaauagucguccccuaccc

SEQ ID NO: 3127263 - RNA, 19 nt, Artificial Sequence
  Description of Artificial Sequence: Synthetic oligonucleotide
uuacuggggcaguagaggc

SEQ ID NO: 3127264 - RNA, 19 nt, Artificial Sequence
  Description of Artificial Sequence: Synthetic oligonucleotide
guugaauuccuucccacac

SEQ ID NO: 3127265 - RNA, 19 nt, Artificial Sequence
  Description of Artificial Sequence: Synthetic oligonucleotide
ugugcauccgguugaauuc

SEQ ID NO: 3127266 - RNA, 19 nt, Artificial Sequence
  Description of Artificial Sequence: Synthetic oligonucleotide
guuuuauuguugaauaguc

SEQ ID NO: 3127267 - RNA, 19 nt, Artificial Sequence
  Description of Artificial Sequence: Synthetic oligonucleotide
guguuuuauuguugaauag

SEQ ID NO: 3127268 - RNA, 19 nt, Artificial Sequence
  Description of Artificial Sequence: Synthetic oligonucleotide
aacuuacuggggcaguaga

SEQ ID NO: 3127269 - RNA, 19 nt, Artificial Sequence
  Description of Artificial Sequence: Synthetic oligonucleotide
uguugaauagucguccccu

SEQ ID NO: 3127270 - RNA, 19 nt, Artificial Sequence
  Description of Artificial Sequence: Synthetic oligonucleotide
cuuacuggggcaguagagg

SEQ ID NO: 3127271 - RNA, 19 nt, Artificial Sequence
  Description of Artificial Sequence: Synthetic oligonucleotide
uugaauuccuucccacaca

SEQ ID NO: 3127272 - RNA, 19 nt, Artificial Sequence
  Description of Artificial Sequence: Synthetic oligonucleotide
uuguugaauagucgucccc

SEQ ID NO: 3127273 - RNA, 19 nt, Artificial Sequence
  Description of Artificial Sequence: Synthetic oligonucleotide
ucguccccuacccagaccu

SEQ ID NO: 3127274 - RNA, 19 nt, Artificial Sequence
  Description of Artificial Sequence: Synthetic oligonucleotide
uccgguugaauuccuuccc

SEQ ID NO: 3127275 - RNA, 19 nt, Artificial Sequence
  Description of Artificial Sequence: Synthetic oligonucleotide
uuguguuuuauuguugaau

SEQ ID NO: 3127276 - RNA, 19 nt, Artificial Sequence
  Description of Artificial Sequence: Synthetic oligonucleotide
cuugcuguccgagugcagg

SEQ ID NO: 3127277 - RNA, 19 nt, Artificial Sequence
  Description of Artificial Sequence: Synthetic oligonucleotide
aauagucguccccuaccca

SEQ ID NO: 3127278 - RNA, 19 nt, Artificial Sequence
  Description of Artificial Sequence: Synthetic oligonucleotide
uugaauagucguccccuac

SEQ ID NO: 3127279 - RNA, 19 nt, Artificial Sequence
  Description of Artificial Sequence: Synthetic oligonucleotide
cauguggcgggucagguuc

SEQ ID NO: 3127280 - RNA, 19 nt, Artificial Sequence
  Description of Artificial Sequence: Synthetic oligonucleotide
uugugcauccgguugaauu

SEQ ID NO: 3127281 - RNA, 19 nt, Artificial Sequence
  Description of Artificial Sequence: Synthetic oligonucleotide
uuccccuucagggugaacu

SEQ ID NO: 3127282 - RNA, 19 nt, Artificial Sequence
  Description of Artificial Sequence: Synthetic oligonucleotide
uuuguguuuuauuguugaa

SEQ ID NO: 3127283 - RNA, 19 nt, Artificial Sequence
  Description of Artificial Sequence: Synthetic oligonucleotide
caucagguugugcauccgg

SEQ ID NO: 3127284 - RNA, 19 nt, Artificial Sequence
  Description of Artificial Sequence: Synthetic oligonucleotide
cuucagggugaacuuacug

SEQ ID NO: 3127285 - RNA, 19 nt, Artificial Sequence
  Description of Artificial Sequence: Synthetic oligonucleotide
agggcuugcuguccgagug

SEQ ID NO: 3127286 - RNA, 19 nt, Artificial Sequence
  Description of Artificial Sequence: Synthetic oligonucleotide
ugagcaugaaggccucgcu

SEQ ID NO: 3127287 - RNA, 19 nt, Artificial Sequence
  Description of Artificial Sequence: Synthetic oligonucleotide
uagaggcacuugaagggcu

SEQ ID NO: 3127288 - RNA, 19 nt, Artificial Sequence
  Description of Artificial Sequence: Synthetic oligonucleotide
accuugagcaugaaggccu

SEQ ID NO: 3127289 - RNA, 19 nt, Artificial Sequence
  Description of Artificial Sequence: Synthetic oligonucleotide
gaccuugagcaugaaggcc

SEQ ID NO: 3127290 - RNA, 19 nt, Artificial Sequence
  Description of Artificial Sequence: Synthetic oligonucleotide
cagguugugcauccgguug

SEQ ID NO: 3127291 - RNA, 19 nt, Artificial Sequence
  Description of Artificial Sequence: Synthetic oligonucleotide
cauccgguugaauuccuuc

SEQ ID NO: 3127292 - RNA, 19 nt, Artificial Sequence
  Description of Artificial Sequence: Synthetic oligonucleotide
agucguccccuacccagac

SEQ ID NO: 3127293 - RNA, 19 nt, Artificial Sequence
  Description of Artificial Sequence: Synthetic oligonucleotide
gcaguagaggcacuugaag

SEQ ID NO: 3127294 - RNA, 19 nt, Artificial Sequence
  Description of Artificial Sequence: Synthetic oligonucleotide
gaacuuacuggggcaguag

SEQ ID NO: 3127295 - RNA, 19 nt, Artificial Sequence
  Description of Artificial Sequence: Synthetic oligonucleotide
guagaggcacuugaagggc

SEQ ID NO: 3127296 - RNA, 19 nt, Artificial Sequence
  Description of Artificial Sequence: Synthetic oligonucleotide
acuuacuggggcaguagag

SEQ ID NO: 3127297 - RNA, 19 nt, Artificial Sequence
  Description of Artificial Sequence: Synthetic oligonucleotide
gacuccaugcuugaccuuc

SEQ ID NO: 3127298 - RNA, 19 nt, Artificial Sequence
  Description of Artificial Sequence: Synthetic oligonucleotide
uccaugacuccaugcuuga

SEQ ID NO: 3127299 - RNA, 19 nt, Artificial Sequence
  Description of Artificial Sequence: Synthetic oligonucleotide
uacuggggcaguagaggca

SEQ ID NO: 3127300 - RNA, 19 nt, Artificial Sequence
  Description of Artificial Sequence: Synthetic oligonucleotide
agguugugcauccgguuga

SEQ ID NO: 3127301 - RNA, 19 nt, Artificial Sequence
  Description of Artificial Sequence: Synthetic oligonucleotide
gagcaugaaggccucgcuc

SEQ ID NO: 3127302 - RNA, 19 nt, Artificial Sequence
  Description of Artificial Sequence: Synthetic oligonucleotide
uccgagugcaggugcauau

SEQ ID NO: 3127303 - RNA, 19 nt, Artificial Sequence
  Description of Artificial Sequence: Synthetic oligonucleotide
cuugaagggcuugcugucc

SEQ ID NO: 3127304 - RNA, 19 nt, Artificial Sequence
  Description of Artificial Sequence: Synthetic oligonucleotide
augaaggccucgcuccaug

SEQ ID NO: 3127305 - RNA, 19 nt, Artificial Sequence
  Description of Artificial Sequence: Synthetic oligonucleotide
ccuacccagaccuugagca

SEQ ID NO: 3127306 - RNA, 19 nt, Artificial Sequence
  Description of Artificial Sequence: Synthetic oligonucleotide
cagguuccccuucagggug

SEQ ID NO: 3127307 - RNA, 19 nt, Artificial Sequence
  Description of Artificial Sequence: Synthetic oligonucleotide
uagucguccccuacccaga

SEQ ID NO: 3127308 - RNA, 19 nt, Artificial Sequence
  Description of Artificial Sequence: Synthetic oligonucleotide
gaagggcuugcuguccgag

SEQ ID NO: 3127309 - RNA, 19 nt, Artificial Sequence
  Description of Artificial Sequence: Synthetic oligonucleotide
auaugacccaucagguugu

SEQ ID NO: 3127310 - RNA, 19 nt, Artificial Sequence
  Description of Artificial Sequence: Synthetic oligonucleotide
gaaggccucgcuccaugac

SEQ ID NO: 3127311 - RNA, 19 nt, Artificial Sequence
  Description of Artificial Sequence: Synthetic oligonucleotide
ugaacuuacuggggcagua

SEQ ID NO: 3127312 - RNA, 19 nt, Artificial Sequence
  Description of Artificial Sequence: Synthetic oligonucleotide
uugcuguccgagugcaggu

SEQ ID NO: 3127313 - RNA, 19 nt, Artificial Sequence
  Description of Artificial Sequence: Synthetic oligonucleotide
uccccuacccagaccuuga

SEQ ID NO: 3127314 - RNA, 19 nt, Artificial Sequence
  Description of Artificial Sequence: Synthetic oligonucleotide
gguugaauuccuucccaca

SEQ ID NO: 3127315 - RNA, 19 nt, Artificial Sequence
  Description of Artificial Sequence: Synthetic oligonucleotide
augacccaucagguugugc

SEQ ID NO: 3127316 - RNA, 19 nt, Artificial Sequence
  Description of Artificial Sequence: Synthetic oligonucleotide
ucgcuccaugacuccaugc

SEQ ID NO: 3127317 - RNA, 19 nt, Artificial Sequence
  Description of Artificial Sequence: Synthetic oligonucleotide
acccaucagguugugcauc

SEQ ID NO: 3127318 - RNA, 19 nt, Artificial Sequence
  Description of Artificial Sequence: Synthetic oligonucleotide
aucagguugugcauccggu

SEQ ID NO: 3127319 - RNA, 19 nt, Artificial Sequence
  Description of Artificial Sequence: Synthetic oligonucleotide
uggcgggucagguuccccu

SEQ ID NO: 3127320 - RNA, 19 nt, Artificial Sequence
  Description of Artificial Sequence: Synthetic oligonucleotide
aggccucgcuccaugacuc

SEQ ID NO: 3127321 - RNA, 19 nt, Artificial Sequence
  Description of Artificial Sequence: Synthetic oligonucleotide
ugaagggcuugcuguccga

SEQ ID NO: 3127322 - RNA, 19 nt, Artificial Sequence
  Description of Artificial Sequence: Synthetic oligonucleotide
gagugcaggugcauaugac

SEQ ID NO: 3127323 - RNA, 19 nt, Artificial Sequence
  Description of Artificial Sequence: Synthetic oligonucleotide
cuugagcaugaaggccucg

SEQ ID NO: 3127324 - RNA, 19 nt, Artificial Sequence
  Description of Artificial Sequence: Synthetic oligonucleotide
guugaauagucguccccua

SEQ ID NO: 3127325 - RNA, 19 nt, Artificial Sequence
  Description of Artificial Sequence: Synthetic oligonucleotide
ugcuguccgagugcaggug

SEQ ID NO: 3127326 - RNA, 19 nt, Artificial Sequence
  Description of Artificial Sequence: Synthetic oligonucleotide
auguggcgggucagguucc

SEQ ID NO: 3127327 - RNA, 19 nt, Artificial Sequence
  Description of Artificial Sequence: Synthetic oligonucleotide
cccaucagguugugcaucc

SEQ ID NO: 3127328 - RNA, 19 nt, Artificial Sequence
  Description of Artificial Sequence: Synthetic oligonucleotide
gcuguccgagugcaggugc

SEQ ID NO: 3127329 - RNA, 19 nt, Artificial Sequence
  Description of Artificial Sequence: Synthetic oligonucleotide
ugaccuucauguggcgggu

SEQ ID NO: 3127330 - RNA, 19 nt, Artificial Sequence
  Description of Artificial Sequence: Synthetic oligonucleotide
gaggcacuugaagggcuug

SEQ ID NO: 3127331 - RNA, 19 nt, Artificial Sequence
  Description of Artificial Sequence: Synthetic oligonucleotide
uaugacccaucagguugug

SEQ ID NO: 3127332 - RNA, 19 nt, Artificial Sequence
  Description of Artificial Sequence: Synthetic oligonucleotide
cucgcuccaugacuccaug

SEQ ID NO: 3127333 - RNA, 19 nt, Artificial Sequence
  Description of Artificial Sequence: Synthetic oligonucleotide
cccuucagggugaacuuac

SEQ ID NO: 3127334 - RNA, 19 nt, Artificial Sequence
  Description of Artificial Sequence: Synthetic oligonucleotide
guccccuacccagaccuug

SEQ ID NO: 3127335 - RNA, 19 nt, Artificial Sequence
  Description of Artificial Sequence: Synthetic oligonucleotide
gggugaacuuacuggggca

SEQ ID NO: 3127336 - RNA, 19 nt, Artificial Sequence
  Description of Artificial Sequence: Synthetic oligonucleotide
ccagaccuugagcaugaag

SEQ ID NO: 3127337 - RNA, 19 nt, Artificial Sequence
  Description of Artificial Sequence: Synthetic oligonucleotide
gucguccccuacccagacc

SEQ ID NO: 3127338 - RNA, 19 nt, Artificial Sequence
  Description of Artificial Sequence: Synthetic oligonucleotide
uguggcgggucagguuccc

SEQ ID NO: 3127339 - RNA, 19 nt, Artificial Sequence
  Description of Artificial Sequence: Synthetic oligonucleotide
acccagaccuugagcauga

SEQ ID NO: 3127340 - RNA, 19 nt, Artificial Sequence
  Description of Artificial Sequence: Synthetic oligonucleotide
uggggcaguagaggcacuu

SEQ ID NO: 3127341 - RNA, 19 nt, Artificial Sequence
  Description of Artificial Sequence: Synthetic oligonucleotide
cuguccgagugcaggugca

SEQ ID NO: 3127342 - RNA, 19 nt, Artificial Sequence
  Description of Artificial Sequence: Synthetic oligonucleotide
acuccaugcuugaccuuca

SEQ ID NO: 3127343 - RNA, 19 nt, Artificial Sequence
  Description of Artificial Sequence: Synthetic oligonucleotide
uguccgagugcaggugcau

SEQ ID NO: 3127344 - RNA, 19 nt, Artificial Sequence
  Description of Artificial Sequence: Synthetic oligonucleotide
gacccaucagguugugcau

SEQ ID NO: 3127345 - RNA, 19 nt, Artificial Sequence
  Description of Artificial Sequence: Synthetic oligonucleotide
gggcuugcuguccgagugc

SEQ ID NO: 3127346 - RNA, 19 nt, Artificial Sequence
  Description of Artificial Sequence: Synthetic oligonucleotide
caggugcauaugacccauc

SEQ ID NO: 3127347 - RNA, 19 nt, Artificial Sequence
  Description of Artificial Sequence: Synthetic oligonucleotide
cccuacccagaccuugagc

SEQ ID NO: 3127348 - RNA, 19 nt, Artificial Sequence
  Description of Artificial Sequence: Synthetic oligonucleotide
agaggcacuugaagggcuu

SEQ ID NO: 3127349 - RNA, 19 nt, Artificial Sequence
  Description of Artificial Sequence: Synthetic oligonucleotide
cgguugaauuccuucccac

SEQ ID NO: 3127350 - RNA, 19 nt, Artificial Sequence
  Description of Artificial Sequence: Synthetic oligonucleotide
gggucagguuccccuucag

SEQ ID NO: 3127351 - RNA, 19 nt, Artificial Sequence
  Description of Artificial Sequence: Synthetic oligonucleotide
gcaugaaggccucgcucca

SEQ ID NO: 3127352 - RNA, 19 nt, Artificial Sequence
  Description of Artificial Sequence: Synthetic oligonucleotide
ccuugagcaugaaggccuc

SEQ ID NO: 3127353 - RNA, 19 nt, Artificial Sequence
  Description of Artificial Sequence: Synthetic oligonucleotide
ggcaguagaggcacuugaa

SEQ ID NO: 3127354 - RNA, 19 nt, Artificial Sequence
  Description of Artificial Sequence: Synthetic oligonucleotide
agguuccccuucaggguga

SEQ ID NO: 3127355 - RNA, 19 nt, Artificial Sequence
  Description of Artificial Sequence: Synthetic oligonucleotide
ggcuugcuguccgagugca

SEQ ID NO: 3127356 - RNA, 19 nt, Artificial Sequence
  Description of Artificial Sequence: Synthetic oligonucleotide
cuacccagaccuugagcau

SEQ ID NO: 3127357 - RNA, 19 nt, Artificial Sequence
  Description of Artificial Sequence: Synthetic oligonucleotide
ccgguugaauuccuuccca

SEQ ID NO: 3127358 - RNA, 19 nt, Artificial Sequence
  Description of Artificial Sequence: Synthetic oligonucleotide
ggccucgcuccaugacucc

SEQ ID NO: 3127359 - RNA, 19 nt, Artificial Sequence
  Description of Artificial Sequence: Synthetic oligonucleotide
cgagugcaggugcauauga

SEQ ID NO: 3127360 - RNA, 19 nt, Artificial Sequence
  Description of Artificial Sequence: Synthetic oligonucleotide
gugaacuuacuggggcagu

SEQ ID NO: 3127361 - RNA, 19 nt, Artificial Sequence
  Description of Artificial Sequence: Synthetic oligonucleotide
gcauaugacccaucagguu

SEQ ID NO: 3127362 - RNA, 19 nt, Artificial Sequence
  Description of Artificial Sequence: Synthetic oligonucleotide
ccaucagguugugcauccg

SEQ ID NO: 3127363 - RNA, 19 nt, Artificial Sequence
  Description of Artificial Sequence: Synthetic oligonucleotide
guggcgggucagguucccc

SEQ ID NO: 3127364 - RNA, 19 nt, Artificial Sequence
  Description of Artificial Sequence: Synthetic oligonucleotide
guccgagugcaggugcaua

SEQ ID NO: 3127365 - RNA, 19 nt, Artificial Sequence
  Description of Artificial Sequence: Synthetic oligonucleotide
ccgagugcaggugcauaug

SEQ ID NO: 3127366 - RNA, 19 nt, Artificial Sequence
  Description of Artificial Sequence: Synthetic oligonucleotide
ccccuacccagaccuugag

SEQ ID NO: 3127367 - RNA, 19 nt, Artificial Sequence
  Description of Artificial Sequence: Synthetic oligonucleotide
gcuugcuguccgagugcag

SEQ ID NO: 3127368 - RNA, 19 nt, Artificial Sequence
  Description of Artificial Sequence: Synthetic oligonucleotide
gcuccaugacuccaugcuu

SEQ ID NO: 3127369 - RNA, 19 nt, Artificial Sequence
  Description of Artificial Sequence: Synthetic oligonucleotide
ccaugacuccaugcuugac

SEQ ID NO: 3127370 - RNA, 19 nt, Artificial Sequence
  Description of Artificial Sequence: Synthetic oligonucleotide
gcgggucagguuccccuuc

SEQ ID NO: 3127371 - RNA, 19 nt, Artificial Sequence
  Description of Artificial Sequence: Synthetic oligonucleotide
guuccccuucagggugaac

SEQ ID NO: 3127372 - RNA, 19 nt, Artificial Sequence
  Description of Artificial Sequence: Synthetic oligonucleotide
cgcuccaugacuccaugcu

SEQ ID NO: 3127373 - RNA, 19 nt, Artificial Sequence
  Description of Artificial Sequence: Synthetic oligonucleotide
gccucgcuccaugacucca

SEQ ID NO: 3127374 - RNA, 19 nt, Artificial Sequence
  Description of Artificial Sequence: Synthetic oligonucleotide
caugaaggccucgcuccau

SEQ ID NO: 3127375 - RNA, 19 nt, Artificial Sequence
  Description of Artificial Sequence: Synthetic oligonucleotide
ccuucagggugaacuuacu

SEQ ID NO: 3127376 - RNA, 19 nt, Artificial Sequence
  Description of Artificial Sequence: Synthetic oligonucleotide
gguuccccuucagggugaa

SEQ ID NO: 3127377 - RNA, 19 nt, Artificial Sequence
  Description of Artificial Sequence: Synthetic oligonucleotide
ggcgggucagguuccccuu

SEQ ID NO: 3127378 - RNA, 19 nt, Artificial Sequence
  Description of Artificial Sequence: Synthetic oligonucleotide
cgggucagguuccccuuca

SEQ ID NO: 3127379 - RNA, 19 nt, Artificial Sequence
  Description of Artificial Sequence: Synthetic oligonucleotide
ccucgcuccaugacuccau

SEQ ID NO: 3127380 - RNA, 19 nt, Artificial Sequence
  Description of Artificial Sequence: Synthetic oligonucleotide
gcauccgguugaauuccuu

SEQ ID NO: 3127381 - RNA, 19 nt, Artificial Sequence
  Description of Artificial Sequence: Synthetic oligonucleotide
cccagaccuugagcaugaa

SEQ ID NO: 3127382 - RNA, 19 nt, Artificial Sequence
  Description of Artificial Sequence: Synthetic oligonucleotide
cguccccuacccagaccuu

SEQ ID NO: 3127383 - RNA, 19 nt, Artificial Sequence
  Description of Artificial Sequence: Synthetic oligonucleotide
uguuccauggccaagaagg

SEQ ID NO: 3127384 - RNA, 19 nt, Artificial Sequence
  Description of Artificial Sequence: Synthetic oligonucleotide
uguagagguagauauacug

SEQ ID NO: 3127385 - RNA, 19 nt, Artificial Sequence
  Description of Artificial Sequence: Synthetic oligonucleotide
uguucagacauuuguagag

SEQ ID NO: 3127386 - RNA, 19 nt, Artificial Sequence
  Description of Artificial Sequence: Synthetic oligonucleotide
aguguuggggucaugaggc

SEQ ID NO: 3127387 - RNA, 19 nt, Artificial Sequence
  Description of Artificial Sequence: Synthetic oligonucleotide
guugaagacguccacagug

SEQ ID NO: 3127388 - RNA, 19 nt, Artificial Sequence
  Description of Artificial Sequence: Synthetic oligonucleotide
acuguucagacauuuguag

SEQ ID NO: 3127389 - RNA, 19 nt, Artificial Sequence
  Description of Artificial Sequence: Synthetic oligonucleotide
uccauggccaagaaggugc

SEQ ID NO: 3127390 - RNA, 19 nt, Artificial Sequence
  Description of Artificial Sequence: Synthetic oligonucleotide
aacucagugcaugccaucc

SEQ ID NO: 3127391 - RNA, 19 nt, Artificial Sequence
  Description of Artificial Sequence: Synthetic oligonucleotide
uuuguagagguagauauac

SEQ ID NO: 3127392 - RNA, 19 nt, Artificial Sequence
  Description of Artificial Sequence: Synthetic oligonucleotide
uucagggccacguugaaga

SEQ ID NO: 3127393 - RNA, 19 nt, Artificial Sequence
  Description of Artificial Sequence: Synthetic oligonucleotide
acacucuccaacucagugc

SEQ ID NO: 3127394 - RNA, 19 nt, Artificial Sequence
  Description of Artificial Sequence: Synthetic oligonucleotide
gagguagauauacugcucc

SEQ ID NO: 3127395 - RNA, 19 nt, Artificial Sequence
  Description of Artificial Sequence: Synthetic oligonucleotide
uagagguagauauacugcu

SEQ ID NO: 3127396 - RNA, 19 nt, Artificial Sequence
  Description of Artificial Sequence: Synthetic oligonucleotide
agcagugcacuguucagac

SEQ ID NO: 3127397 - RNA, 19 nt, Artificial Sequence
  Description of Artificial Sequence: Synthetic oligonucleotide
uagauauacugcuccagug

SEQ ID NO: 3127398 - RNA, 19 nt, Artificial Sequence
  Description of Artificial Sequence: Synthetic oligonucleotide
uugaagacguccacagugc

SEQ ID NO: 3127399 - RNA, 19 nt, Artificial Sequence
  Description of Artificial Sequence: Synthetic oligonucleotide
agauauacugcuccagugu

SEQ ID NO: 3127400 - RNA, 19 nt, Artificial Sequence
  Description of Artificial Sequence: Synthetic oligonucleotide
cagacauuuguagagguag

SEQ ID NO: 3127401 - RNA, 19 nt, Artificial Sequence
  Description of Artificial Sequence: Synthetic oligonucleotide
aagacguccacagugcacu

SEQ ID NO: 3127402 - RNA, 19 nt, Artificial Sequence
  Description of Artificial Sequence: Synthetic oligonucleotide
gacacucuccaacucagug

SEQ ID NO: 3127403 - RNA, 19 nt, Artificial Sequence
  Description of Artificial Sequence: Synthetic oligonucleotide
acguugaagacguccacag

SEQ ID NO: 3127404 - RNA, 19 nt, Artificial Sequence
  Description of Artificial Sequence: Synthetic oligonucleotide
uccagcagugcacuguuca

SEQ ID NO: 3127405 - RNA, 19 nt, Artificial Sequence
  Description of Artificial Sequence: Synthetic oligonucleotide
uccaacucagugcaugcca

SEQ ID NO: 3127406 - RNA, 19 nt, Artificial Sequence
  Description of Artificial Sequence: Synthetic oligonucleotide
uucagacauuuguagaggu

SEQ ID NO: 3127407 - RNA, 19 nt, Artificial Sequence
  Description of Artificial Sequence: Synthetic oligonucleotide
ugccuaguaggguacagga

SEQ ID NO: 3127408 - RNA, 19 nt, Artificial Sequence
  Description of Artificial Sequence: Synthetic oligonucleotide
guagagguagauauacugc

SEQ ID NO: 3127409 - RNA, 19 nt, Artificial Sequence
  Description of Artificial Sequence: Synthetic oligonucleotide
aguaggguacaggacacuc

SEQ ID NO: 3127410 - RNA, 19 nt, Artificial Sequence
  Description of Artificial Sequence: Synthetic oligonucleotide
caguguuggggucaugagg

SEQ ID NO: 3127411 - RNA, 19 nt, Artificial Sequence
  Description of Artificial Sequence: Synthetic oligonucleotide
uaggguacaggacacucuc

SEQ ID NO: 3127412 - RNA, 19 nt, Artificial Sequence
  Description of Artificial Sequence: Synthetic oligonucleotide
guucagacauuuguagagg

SEQ ID NO: 3127413 - RNA, 19 nt, Artificial Sequence
  Description of Artificial Sequence: Synthetic oligonucleotide
cauuuguagagguagauau

SEQ ID NO: 3127414 - RNA, 19 nt, Artificial Sequence
  Description of Artificial Sequence: Synthetic oligonucleotide
cuaguaggguacaggacac

SEQ ID NO: 3127415 - RNA, 19 nt, Artificial Sequence
  Description of Artificial Sequence: Synthetic oligonucleotide
ucuccaacucagugcaugc

SEQ ID NO: 3127416 - RNA, 19 nt, Artificial Sequence
  Description of Artificial Sequence: Synthetic oligonucleotide
ugaagacguccacagugca

SEQ ID NO: 3127417 - RNA, 19 nt, Artificial Sequence
  Description of Artificial Sequence: Synthetic oligonucleotide
caagaaggugcccagccug

SEQ ID NO: 3127418 - RNA, 19 nt, Artificial Sequence
  Description of Artificial Sequence: Synthetic oligonucleotide
ugugacugcuucagggcca

SEQ ID NO: 3127419 - RNA, 19 nt, Artificial Sequence
  Description of Artificial Sequence: Synthetic oligonucleotide
aagaaggugcccagccugg

SEQ ID NO: 3127420 - RNA, 19 nt, Artificial Sequence
  Description of Artificial Sequence: Synthetic oligonucleotide
guacaggacacucuccaac

SEQ ID NO: 3127421 - RNA, 19 nt, Artificial Sequence
  Description of Artificial Sequence: Synthetic oligonucleotide
uuguagagguagauauacu

SEQ ID NO: 3127422 - RNA, 19 nt, Artificial Sequence
  Description of Artificial Sequence: Synthetic oligonucleotide
cugugacugcuucagggcc

SEQ ID NO: 3127423 - RNA, 19 nt, Artificial Sequence
  Description of Artificial Sequence: Synthetic oligonucleotide
uccaguguuggggucauga

SEQ ID NO: 3127424 - RNA, 19 nt, Artificial Sequence
  Description of Artificial Sequence: Synthetic oligonucleotide
agugcaugccauccagcag

SEQ ID NO: 3127425 - RNA, 19 nt, Artificial Sequence
  Description of Artificial Sequence: Synthetic oligonucleotide
ugcacuguucagacauuug

SEQ ID NO: 3127426 - RNA, 19 nt, Artificial Sequence
  Description of Artificial Sequence: Synthetic oligonucleotide
cucagugcaugccauccag

SEQ ID NO: 3127427 - RNA, 19 nt, Artificial Sequence
  Description of Artificial Sequence: Synthetic oligonucleotide
aaggugcccagccugguuu

SEQ ID NO: 3127428 - RNA, 19 nt, Artificial Sequence
  Description of Artificial Sequence: Synthetic oligonucleotide
acugcuccaguguuggggu

SEQ ID NO: 3127429 - RNA, 19 nt, Artificial Sequence
  Description of Artificial Sequence: Synthetic oligonucleotide
ucagugcaugccauccagc

SEQ ID NO: 3127430 - RNA, 19 nt, Artificial Sequence
  Description of Artificial Sequence: Synthetic oligonucleotide
acguccacagugcacucag

SEQ ID NO: 3127431 - RNA, 19 nt, Artificial Sequence
  Description of Artificial Sequence: Synthetic oligonucleotide
ucagacauuuguagaggua

SEQ ID NO: 3127432 - RNA, 19 nt, Artificial Sequence
  Description of Artificial Sequence: Synthetic oligonucleotide
agagguagauauacugcuc

SEQ ID NO: 3127433 - RNA, 19 nt, Artificial Sequence
  Description of Artificial Sequence: Synthetic oligonucleotide
acaggccugugacugcuuc

SEQ ID NO: 3127434 - RNA, 19 nt, Artificial Sequence
  Description of Artificial Sequence: Synthetic oligonucleotide
caugccauccagcagugca

SEQ ID NO: 3127435 - RNA, 19 nt, Artificial Sequence
  Description of Artificial Sequence: Synthetic oligonucleotide
ugggacauggugccuagua

SEQ ID NO: 3127436 - RNA, 19 nt, Artificial Sequence
  Description of Artificial Sequence: Synthetic oligonucleotide
agugcacucagucccugcu

SEQ ID NO: 3127437 - RNA, 19 nt, Artificial Sequence
  Description of Artificial Sequence: Synthetic oligonucleotide
cacucuccaacucagugca

SEQ ID NO: 3127438 - RNA, 19 nt, Artificial Sequence
  Description of Artificial Sequence: Synthetic oligonucleotide
gccugugacugcuucaggg

SEQ ID NO: 3127439 - RNA, 19 nt, Artificial Sequence
  Description of Artificial Sequence: Synthetic oligonucleotide
gggucaugaggccacaggc

SEQ ID NO: 3127440 - RNA, 19 nt, Artificial Sequence
  Description of Artificial Sequence: Synthetic oligonucleotide
agguagauauacugcucca

SEQ ID NO: 3127441 - RNA, 19 nt, Artificial Sequence
  Description of Artificial Sequence: Synthetic oligonucleotide
cugguuugugcccuugcug

SEQ ID NO: 3127442 - RNA, 19 nt, Artificial Sequence
  Description of Artificial Sequence: Synthetic oligonucleotide
cuguucagacauuuguaga

SEQ ID NO: 3127443 - RNA, 19 nt, Artificial Sequence
  Description of Artificial Sequence: Synthetic oligonucleotide
ccacagugcacucaguccc

SEQ ID NO: 3127444 - RNA, 19 nt, Artificial Sequence
  Description of Artificial Sequence: Synthetic oligonucleotide
ugcaugccauccagcagug

SEQ ID NO: 3127445 - RNA, 19 nt, Artificial Sequence
  Description of Artificial Sequence: Synthetic oligonucleotide
guagauauacugcuccagu

SEQ ID NO: 3127446 - RNA, 19 nt, Artificial Sequence
  Description of Artificial Sequence: Synthetic oligonucleotide
uguuggggucaugaggcca

SEQ ID NO: 3127447 - RNA, 19 nt, Artificial Sequence
  Description of Artificial Sequence: Synthetic oligonucleotide
gguagauauacugcuccag

SEQ ID NO: 3127448 - RNA, 19 nt, Artificial Sequence
  Description of Artificial Sequence: Synthetic oligonucleotide
gauauacugcuccaguguu

SEQ ID NO: 3127449 - RNA, 19 nt, Artificial Sequence
  Description of Artificial Sequence: Synthetic oligonucleotide
uuccauggccaagaaggug

SEQ ID NO: 3127450 - RNA, 19 nt, Artificial Sequence
  Description of Artificial Sequence: Synthetic oligonucleotide
ccuaguaggguacaggaca

SEQ ID NO: 3127451 - RNA, 19 nt, Artificial Sequence
  Description of Artificial Sequence: Synthetic oligonucleotide
ugcuugcugcagcagcugu

SEQ ID NO: 3127452 - RNA, 19 nt, Artificial Sequence
  Description of Artificial Sequence: Synthetic oligonucleotide
aggacacucuccaacucag

SEQ ID NO: 3127453 - RNA, 19 nt, Artificial Sequence
  Description of Artificial Sequence: Synthetic oligonucleotide
ugcccagccugguuugugc

SEQ ID NO: 3127454 - RNA, 19 nt, Artificial Sequence
  Description of Artificial Sequence: Synthetic oligonucleotide
acucagucccugcuugcug

SEQ ID NO: 3127455 - RNA, 19 nt, Artificial Sequence
  Description of Artificial Sequence: Synthetic oligonucleotide
agggccacguugaagacgu

SEQ ID NO: 3127456 - RNA, 19 nt, Artificial Sequence
  Description of Artificial Sequence: Synthetic oligonucleotide
auauacugcuccaguguug

SEQ ID NO: 3127457 - RNA, 19 nt, Artificial Sequence
  Description of Artificial Sequence: Synthetic oligonucleotide
gaagacguccacagugcac

SEQ ID NO: 3127458 - RNA, 19 nt, Artificial Sequence
  Description of Artificial Sequence: Synthetic oligonucleotide
cagugcaugccauccagca

SEQ ID NO: 3127459 - RNA, 19 nt, Artificial Sequence
  Description of Artificial Sequence: Synthetic oligonucleotide
acauuuguagagguagaua

SEQ ID NO: 3127460 - RNA, 19 nt, Artificial Sequence
  Description of Artificial Sequence: Synthetic oligonucleotide
aggguacaggacacucucc

SEQ ID NO: 3127461 - RNA, 19 nt, Artificial Sequence
  Description of Artificial Sequence: Synthetic oligonucleotide
gugcaugccauccagcagu

SEQ ID NO: 3127462 - RNA, 19 nt, Artificial Sequence
  Description of Artificial Sequence: Synthetic oligonucleotide
cuguuccauggccaagaag

SEQ ID NO: 3127463 - RNA, 19 nt, Artificial Sequence
  Description of Artificial Sequence: Synthetic oligonucleotide
gugccuaguaggguacagg

SEQ ID NO: 3127464 - RNA, 19 nt, Artificial Sequence
  Description of Artificial Sequence: Synthetic oligonucleotide
auggugccuaguaggguac

SEQ ID NO: 3127465 - RNA, 19 nt, Artificial Sequence
  Description of Artificial Sequence: Synthetic oligonucleotide
agcuguuccauggccaaga

SEQ ID NO: 3127466 - RNA, 19 nt, Artificial Sequence
  Description of Artificial Sequence: Synthetic oligonucleotide
gucaugaggccacaggccu

SEQ ID NO: 3127467 - RNA, 19 nt, Artificial Sequence
  Description of Artificial Sequence: Synthetic oligonucleotide
gccaagaaggugcccagcc

SEQ ID NO: 3127468 - RNA, 19 nt, Artificial Sequence
  Description of Artificial Sequence: Synthetic oligonucleotide
acucagugcaugccaucca

SEQ ID NO: 3127469 - RNA, 19 nt, Artificial Sequence
  Description of Artificial Sequence: Synthetic oligonucleotide
agacguccacagugcacuc

SEQ ID NO: 3127470 - RNA, 19 nt, Artificial Sequence
  Description of Artificial Sequence: Synthetic oligonucleotide
ugcuccaguguugggguca

SEQ ID NO: 3127471 - RNA, 19 nt, Artificial Sequence
  Description of Artificial Sequence: Synthetic oligonucleotide
aggccugugacugcuucag

SEQ ID NO: 3127472 - RNA, 19 nt, Artificial Sequence
  Description of Artificial Sequence: Synthetic oligonucleotide
cagcagcuguuccauggcc

SEQ ID NO: 3127473 - RNA, 19 nt, Artificial Sequence
  Description of Artificial Sequence: Synthetic oligonucleotide
caggacacucuccaacuca

SEQ ID NO: 3127474 - RNA, 19 nt, Artificial Sequence
  Description of Artificial Sequence: Synthetic oligonucleotide
cacuguucagacauuugua

SEQ ID NO: 3127475 - RNA, 19 nt, Artificial Sequence
  Description of Artificial Sequence: Synthetic oligonucleotide
agacauuuguagagguaga

SEQ ID NO: 3127476 - RNA, 19 nt, Artificial Sequence
  Description of Artificial Sequence: Synthetic oligonucleotide
ucagggccacguugaagac

SEQ ID NO: 3127477 - RNA, 19 nt, Artificial Sequence
  Description of Artificial Sequence: Synthetic oligonucleotide
ggguacaggacacucucca

SEQ ID NO: 3127478 - RNA, 19 nt, Artificial Sequence
  Description of Artificial Sequence: Synthetic oligonucleotide
guuggggucaugaggccac

SEQ ID NO: 3127479 - RNA, 19 nt, Artificial Sequence
  Description of Artificial Sequence: Synthetic oligonucleotide
auuuguagagguagauaua

SEQ ID NO: 3127480 - RNA, 19 nt, Artificial Sequence
  Description of Artificial Sequence: Synthetic oligonucleotide
cagggccacguugaagacg

SEQ ID NO: 3127481 - RNA, 19 nt, Artificial Sequence
  Description of Artificial Sequence: Synthetic oligonucleotide
cuccaacucagugcaugcc

SEQ ID NO: 3127482 - RNA, 19 nt, Artificial Sequence
  Description of Artificial Sequence: Synthetic oligonucleotide
agcagcuguuccauggcca

SEQ ID NO: 3127483 - RNA, 19 nt, Artificial Sequence
  Description of Artificial Sequence: Synthetic oligonucleotide
cagugcacuguucagacau

SEQ ID NO: 3127484 - RNA, 19 nt, Artificial Sequence
  Description of Artificial Sequence: Synthetic oligonucleotide
ugccauccagcagugcacu

SEQ ID NO: 3127485 - RNA, 19 nt, Artificial Sequence
  Description of Artificial Sequence: Synthetic oligonucleotide
ggucaugaggccacaggcc

SEQ ID NO: 3127486 - RNA, 19 nt, Artificial Sequence
  Description of Artificial Sequence: Synthetic oligonucleotide
caacucagugcaugccauc

SEQ ID NO: 3127487 - RNA, 19 nt, Artificial Sequence
  Description of Artificial Sequence: Synthetic oligonucleotide
gacauuuguagagguagau

SEQ ID NO: 3127488 - RNA, 19 nt, Artificial Sequence
  Description of Artificial Sequence: Synthetic oligonucleotide
guguuggggucaugaggcc

SEQ ID NO: 3127489 - RNA, 19 nt, Artificial Sequence
  Description of Artificial Sequence: Synthetic oligonucleotide
cagugcacucagucccugc

SEQ ID NO: 3127490 - RNA, 19 nt, Artificial Sequence
  Description of Artificial Sequence: Synthetic oligonucleotide
aggugcccagccugguuug

SEQ ID NO: 3127491 - RNA, 19 nt, Artificial Sequence
  Description of Artificial Sequence: Synthetic oligonucleotide
acugcuucagggccacguu

SEQ ID NO: 3127492 - RNA, 19 nt, Artificial Sequence
  Description of Artificial Sequence: Synthetic oligonucleotide
gcacuguucagacauuugu

SEQ ID NO: 3127493 - RNA, 19 nt, Artificial Sequence
  Description of Artificial Sequence: Synthetic oligonucleotide
cacguugaagacguccaca

SEQ ID NO: 3127494 - RNA, 19 nt, Artificial Sequence
  Description of Artificial Sequence: Synthetic oligonucleotide
uaguaggguacaggacacu

SEQ ID NO: 3127495 - RNA, 19 nt, Artificial Sequence
  Description of Artificial Sequence: Synthetic oligonucleotide
ggccacaggccugugacug

SEQ ID NO: 3127496 - RNA, 19 nt, Artificial Sequence
  Description of Artificial Sequence: Synthetic oligonucleotide
ggccacguugaagacgucc

SEQ ID NO: 3127497 - RNA, 19 nt, Artificial Sequence
  Description of Artificial Sequence: Synthetic oligonucleotide
gucccugcuugcugcagca

SEQ ID NO: 3127498 - RNA, 19 nt, Artificial Sequence
  Description of Artificial Sequence: Synthetic oligonucleotide
ccaguguuggggucaugag

SEQ ID NO: 3127499 - RNA, 19 nt, Artificial Sequence
  Description of Artificial Sequence: Synthetic oligonucleotide
ccagcagugcacuguucag

SEQ ID NO: 3127500 - RNA, 19 nt, Artificial Sequence
  Description of Artificial Sequence: Synthetic oligonucleotide
acagugcacucagucccug

SEQ ID NO: 3127501 - RNA, 19 nt, Artificial Sequence
  Description of Artificial Sequence: Synthetic oligonucleotide
gacguccacagugcacuca

SEQ ID NO: 3127502 - RNA, 19 nt, Artificial Sequence
  Description of Artificial Sequence: Synthetic oligonucleotide
gacugcuucagggccacgu

SEQ ID NO: 3127503 - RNA, 19 nt, Artificial Sequence
  Description of Artificial Sequence: Synthetic oligonucleotide
aggccacaggccugugacu

SEQ ID NO: 3127504 - RNA, 19 nt, Artificial Sequence
  Description of Artificial Sequence: Synthetic oligonucleotide
ggugccuaguaggguacag

SEQ ID NO: 3127505 - RNA, 19 nt, Artificial Sequence
  Description of Artificial Sequence: Synthetic oligonucleotide
cagcagugcacuguucaga

SEQ ID NO: 3127506 - RNA, 19 nt, Artificial Sequence
  Description of Artificial Sequence: Synthetic oligonucleotide
cccugcuugcugcagcagc

SEQ ID NO: 3127507 - RNA, 19 nt, Artificial Sequence
  Description of Artificial Sequence: Synthetic oligonucleotide
ccauggccaagaaggugcc

SEQ ID NO: 3127508 - RNA, 19 nt, Artificial Sequence
  Description of Artificial Sequence: Synthetic oligonucleotide
gguacaggacacucuccaa

SEQ ID NO: 3127509 - RNA, 19 nt, Artificial Sequence
  Description of Artificial Sequence: Synthetic oligonucleotide
gugacugcuucagggccac

SEQ ID NO: 3127510 - RNA, 19 nt, Artificial Sequence
  Description of Artificial Sequence: Synthetic oligonucleotide
ucccugcuugcugcagcag

SEQ ID NO: 3127511 - RNA, 19 nt, Artificial Sequence
  Description of Artificial Sequence: Synthetic oligonucleotide
ggccugugacugcuucagg

SEQ ID NO: 3127512 - RNA, 19 nt, Artificial Sequence
  Description of Artificial Sequence: Synthetic oligonucleotide
auccagcagugcacuguuc

SEQ ID NO: 3127513 - RNA, 19 nt, Artificial Sequence
  Description of Artificial Sequence: Synthetic oligonucleotide
gccacguugaagacgucca

SEQ ID NO: 3127514 - RNA, 19 nt, Artificial Sequence
  Description of Artificial Sequence: Synthetic oligonucleotide
guaggguacaggacacucu

SEQ ID NO: 3127515 - RNA, 19 nt, Artificial Sequence
  Description of Artificial Sequence: Synthetic oligonucleotide
caggccugugacugcuuca

SEQ ID NO: 3127516 - RNA, 19 nt, Artificial Sequence
  Description of Artificial Sequence: Synthetic oligonucleotide
gcacucagucccugcuugc

SEQ ID NO: 3127517 - RNA, 19 nt, Artificial Sequence
  Description of Artificial Sequence: Synthetic oligonucleotide
uuggggucaugaggccaca

SEQ ID NO: 3127518 - RNA, 19 nt, Artificial Sequence
  Description of Artificial Sequence: Synthetic oligonucleotide
guuccauggccaagaaggu

SEQ ID NO: 3127519 - RNA, 19 nt, Artificial Sequence
  Description of Artificial Sequence: Synthetic oligonucleotide
ugacugcuucagggccacg

SEQ ID NO: 3127520 - RNA, 19 nt, Artificial Sequence
  Description of Artificial Sequence: Synthetic oligonucleotide
cagcuguuccauggccaag

SEQ ID NO: 3127521 - RNA, 19 nt, Artificial Sequence
  Description of Artificial Sequence: Synthetic oligonucleotide
cugcuccaguguugggguc

SEQ ID NO: 3127522 - RNA, 19 nt, Artificial Sequence
  Description of Artificial Sequence: Synthetic oligonucleotide
gccuaguaggguacaggac

SEQ ID NO: 3127523 - RNA, 19 nt, Artificial Sequence
  Description of Artificial Sequence: Synthetic oligonucleotide
gccugguuugugcccuugc

SEQ ID NO: 3127524 - RNA, 19 nt, Artificial Sequence
  Description of Artificial Sequence: Synthetic oligonucleotide
ccacguugaagacguccac

SEQ ID NO: 3127525 - RNA, 19 nt, Artificial Sequence
  Description of Artificial Sequence: Synthetic oligonucleotide
agccugguuugugcccuug

SEQ ID NO: 3127526 - RNA, 19 nt, Artificial Sequence
  Description of Artificial Sequence: Synthetic oligonucleotide
gugcccagccugguuugug

SEQ ID NO: 3127527 - RNA, 19 nt, Artificial Sequence
  Description of Artificial Sequence: Synthetic oligonucleotide
gccacaggccugugacugc

SEQ ID NO: 3127528 - RNA, 19 nt, Artificial Sequence
  Description of Artificial Sequence: Synthetic oligonucleotide
agugcacuguucagacauu

SEQ ID NO: 3127529 - RNA, 19 nt, Artificial Sequence
  Description of Artificial Sequence: Synthetic oligonucleotide
gaaggugcccagccugguu

SEQ ID NO: 3127530 - RNA, 19 nt, Artificial Sequence
  Description of Artificial Sequence: Synthetic oligonucleotide
caugaggccacaggccugu

SEQ ID NO: 3127531 - RNA, 19 nt, Artificial Sequence
  Description of Artificial Sequence: Synthetic oligonucleotide
cacagugcacucagucccu

SEQ ID NO: 3127532 - RNA, 19 nt, Artificial Sequence
  Description of Artificial Sequence: Synthetic oligonucleotide
gcagugcacuguucagaca

SEQ ID NO: 3127533 - RNA, 19 nt, Artificial Sequence
  Description of Artificial Sequence: Synthetic oligonucleotide
cauccagcagugcacuguu

SEQ ID NO: 3127534 - RNA, 19 nt, Artificial Sequence
  Description of Artificial Sequence: Synthetic oligonucleotide
gccauccagcagugcacug

SEQ ID NO: 3127535 - RNA, 19 nt, Artificial Sequence
  Description of Artificial Sequence: Synthetic oligonucleotide
gcuguuccauggccaagaa

SEQ ID NO: 3127536 - RNA, 19 nt, Artificial Sequence
  Description of Artificial Sequence: Synthetic oligonucleotide
gugcacuguucagacauuu

SEQ ID NO: 3127537 - RNA, 19 nt, Artificial Sequence
  Description of Artificial Sequence: Synthetic oligonucleotide
cacucagucccugcuugcu

SEQ ID NO: 3127538 - RNA, 19 nt, Artificial Sequence
  Description of Artificial Sequence: Synthetic oligonucleotide
acucuccaacucagugcau

SEQ ID NO: 3127539 - RNA, 19 nt, Artificial Sequence
  Description of Artificial Sequence: Synthetic oligonucleotide
gugcacucagucccugcuu

SEQ ID NO: 3127540 - RNA, 19 nt, Artificial Sequence
  Description of Artificial Sequence: Synthetic oligonucleotide
ccaacucagugcaugccau

SEQ ID NO: 3127541 - RNA, 19 nt, Artificial Sequence
  Description of Artificial Sequence: Synthetic oligonucleotide
ccugguuugugcccuugcu

SEQ ID NO: 3127542 - RNA, 19 nt, Artificial Sequence
  Description of Artificial Sequence: Synthetic oligonucleotide
gcaugccauccagcagugc

SEQ ID NO: 3127543 - RNA, 19 nt, Artificial Sequence
  Description of Artificial Sequence: Synthetic oligonucleotide
ccaagaaggugcccagccu

SEQ ID NO: 3127544 - RNA, 19 nt, Artificial Sequence
  Description of Artificial Sequence: Synthetic oligonucleotide
cuccaguguuggggucaug

SEQ ID NO: 3127545 - RNA, 19 nt, Artificial Sequence
  Description of Artificial Sequence: Synthetic oligonucleotide
ggacacucuccaacucagu

SEQ ID NO: 3127546 - RNA, 19 nt, Artificial Sequence
  Description of Artificial Sequence: Synthetic oligonucleotide
ccagccugguuugugcccu

SEQ ID NO: 3127547 - RNA, 19 nt, Artificial Sequence
  Description of Artificial Sequence: Synthetic oligonucleotide
cguugaagacguccacagu

SEQ ID NO: 3127548 - RNA, 19 nt, Artificial Sequence
  Description of Artificial Sequence: Synthetic oligonucleotide
cugggacauggugccuagu

SEQ ID NO: 3127549 - RNA, 19 nt, Artificial Sequence
  Description of Artificial Sequence: Synthetic oligonucleotide
cacaggccugugacugcuu

SEQ ID NO: 3127550 - RNA, 19 nt, Artificial Sequence
  Description of Artificial Sequence: Synthetic oligonucleotide
ccacaggccugugacugcu

SEQ ID NO: 3127551 - RNA, 19 nt, Artificial Sequence
  Description of Artificial Sequence: Synthetic oligonucleotide
ggugcccagccugguuugu

SEQ ID NO: 3127552 - RNA, 19 nt, Artificial Sequence
  Description of Artificial Sequence: Synthetic oligonucleotide
cagccugguuugugcccuu

SEQ ID NO: 3127553 - RNA, 19 nt, Artificial Sequence
  Description of Artificial Sequence: Synthetic oligonucleotide
cguccacagugcacucagu

SEQ ID NO: 3127554 - RNA, 19 nt, Artificial Sequence
  Description of Artificial Sequence: Synthetic oligonucleotide
aagauaaaggaaaagaaac

SEQ ID NO: 3127555 - RNA, 19 nt, Artificial Sequence
  Description of Artificial Sequence: Synthetic oligonucleotide
uuuuaaagaaaagaaaagg

SEQ ID NO: 3127556 - RNA, 19 nt, Artificial Sequence
  Description of Artificial Sequence: Synthetic oligonucleotide
uaaaggaaaagaaacaaug

SEQ ID NO: 3127557 - RNA, 19 nt, Artificial Sequence
  Description of Artificial Sequence: Synthetic oligonucleotide
aaaaggaagaaagauaaag

SEQ ID NO: 3127558 - RNA, 19 nt, Artificial Sequence
  Description of Artificial Sequence: Synthetic oligonucleotide
gaaaagaaacaauggaugg

SEQ ID NO: 3127559 - RNA, 19 nt, Artificial Sequence
  Description of Artificial Sequence: Synthetic oligonucleotide
uuauuuacuggacagagac

SEQ ID NO: 3127560 - RNA, 19 nt, Artificial Sequence
  Description of Artificial Sequence: Synthetic oligonucleotide
uugcaaagaaacaucagcg

SEQ ID NO: 3127561 - RNA, 19 nt, Artificial Sequence
  Description of Artificial Sequence: Synthetic oligonucleotide
aaggaagaaagauaaagga

SEQ ID NO: 3127562 - RNA, 19 nt, Artificial Sequence
  Description of Artificial Sequence: Synthetic oligonucleotide
aaaagaaacaauggauggc

SEQ ID NO: 3127563 - RNA, 19 nt, Artificial Sequence
  Description of Artificial Sequence: Synthetic oligonucleotide
aaaggaagaaagauaaagg

SEQ ID NO: 3127564 - RNA, 19 nt, Artificial Sequence
  Description of Artificial Sequence: Synthetic oligonucleotide
aaaggaaaagaaacaaugg

SEQ ID NO: 3127565 - RNA, 19 nt, Artificial Sequence
  Description of Artificial Sequence: Synthetic oligonucleotide
aaggaaaagaaacaaugga

SEQ ID NO: 3127566 - RNA, 19 nt, Artificial Sequence
  Description of Artificial Sequence: Synthetic oligonucleotide
uauaaggagacucuguccu

SEQ ID NO: 3127567 - RNA, 19 nt, Artificial Sequence
  Description of Artificial Sequence: Synthetic oligonucleotide
gaaaccuccacuugcaaag

SEQ ID NO: 3127568 - RNA, 19 nt, Artificial Sequence
  Description of Artificial Sequence: Synthetic oligonucleotide
aguauaaggagacucuguc

SEQ ID NO: 3127569 - RNA, 19 nt, Artificial Sequence
  Description of Artificial Sequence: Synthetic oligonucleotide
acaugaaaccuccacuugc

SEQ ID NO: 3127570 - RNA, 19 nt, Artificial Sequence
  Description of Artificial Sequence: Synthetic oligonucleotide
cuugcaaagaaacaucagc

SEQ ID NO: 3127571 - RNA, 19 nt, Artificial Sequence
  Description of Artificial Sequence: Synthetic oligonucleotide
uuugacaguauaaggagac

SEQ ID NO: 3127572 - RNA, 19 nt, Artificial Sequence
  Description of Artificial Sequence: Synthetic oligonucleotide
aaagaaacaauggauggcu

SEQ ID NO: 3127573 - RNA, 19 nt, Artificial Sequence
  Description of Artificial Sequence: Synthetic oligonucleotide
aacaauggauggcuguugg

SEQ ID NO: 3127574 - RNA, 19 nt, Artificial Sequence
  Description of Artificial Sequence: Synthetic oligonucleotide
ugcaaagaaacaucagcgg

SEQ ID NO: 3127575 - RNA, 19 nt, Artificial Sequence
  Description of Artificial Sequence: Synthetic oligonucleotide
agaaagauaaaggaaaaga

SEQ ID NO: 3127576 - RNA, 19 nt, Artificial Sequence
  Description of Artificial Sequence: Synthetic oligonucleotide
ugaaacaugaaaccuccac

SEQ ID NO: 3127577 - RNA, 19 nt, Artificial Sequence
  Description of Artificial Sequence: Synthetic oligonucleotide
aaacaugaaaccuccacuu

SEQ ID NO: 3127578 - RNA, 19 nt, Artificial Sequence
  Description of Artificial Sequence: Synthetic oligonucleotide
gaugaaacaugaaaccucc

SEQ ID NO: 3127579 - RNA, 19 nt, Artificial Sequence
  Description of Artificial Sequence: Synthetic oligonucleotide
agaaaaggaagaaagauaa

SEQ ID NO: 3127580 - RNA, 19 nt, Artificial Sequence
  Description of Artificial Sequence: Synthetic oligonucleotide
caauuugacaguauaagga

SEQ ID NO: 3127581 - RNA, 19 nt, Artificial Sequence
  Description of Artificial Sequence: Synthetic oligonucleotide
ugaugaaacaugaaaccuc

SEQ ID NO: 3127582 - RNA, 19 nt, Artificial Sequence
  Description of Artificial Sequence: Synthetic oligonucleotide
accugaugaaacaugaaac

SEQ ID NO: 3127583 - RNA, 19 nt, Artificial Sequence
  Description of Artificial Sequence: Synthetic oligonucleotide
gcuguuggcaauuugacag

SEQ ID NO: 3127584 - RNA, 19 nt, Artificial Sequence
  Description of Artificial Sequence: Synthetic oligonucleotide
cugaauucccuccuggucc

SEQ ID NO: 3127585 - RNA, 19 nt, Artificial Sequence
  Description of Artificial Sequence: Synthetic oligonucleotide
gaaagauaaaggaaaagaa

SEQ ID NO: 3127586 - RNA, 19 nt, Artificial Sequence
  Description of Artificial Sequence: Synthetic oligonucleotide
uggacagagaccccagagg

SEQ ID NO: 3127587 - RNA, 19 nt, Artificial Sequence
  Description of Artificial Sequence: Synthetic oligonucleotide
aacaugaaaccuccacuug

SEQ ID NO: 3127588 - RNA, 19 nt, Artificial Sequence
  Description of Artificial Sequence: Synthetic oligonucleotide
uaccugaugaaacaugaaa

SEQ ID NO: 3127589 - RNA, 19 nt, Artificial Sequence
  Description of Artificial Sequence: Synthetic oligonucleotide
acagagaccccagaggccc

SEQ ID NO: 3127590 - RNA, 19 nt, Artificial Sequence
  Description of Artificial Sequence: Synthetic oligonucleotide
aaagaaacaucagcgggug

SEQ ID NO: 3127591 - RNA, 19 nt, Artificial Sequence
  Description of Artificial Sequence: Synthetic oligonucleotide
ucuugagugauccucugaa

SEQ ID NO: 3127592 - RNA, 19 nt, Artificial Sequence
  Description of Artificial Sequence: Synthetic oligonucleotide
gcaauuugacaguauaagg

SEQ ID NO: 3127593 - RNA, 19 nt, Artificial Sequence
  Description of Artificial Sequence: Synthetic oligonucleotide
uggcuuauuuacuggacag

SEQ ID NO: 3127594 - RNA, 19 nt, Artificial Sequence
  Description of Artificial Sequence: Synthetic oligonucleotide
gcaaagaaacaucagcggg

SEQ ID NO: 3127595 - RNA, 19 nt, Artificial Sequence
  Description of Artificial Sequence: Synthetic oligonucleotide
ggaaaagaaacaauggaug

SEQ ID NO: 3127596 - RNA, 19 nt, Artificial Sequence
  Description of Artificial Sequence: Synthetic oligonucleotide
gauccucugaauucccucc

SEQ ID NO: 3127597 - RNA, 19 nt, Artificial Sequence
  Description of Artificial Sequence: Synthetic oligonucleotide
uauuuacuggacagagacc

SEQ ID NO: 3127598 - RNA, 19 nt, Artificial Sequence
  Description of Artificial Sequence: Synthetic oligonucleotide
aaggagacucuguccuccc

SEQ ID NO: 3127599 - RNA, 19 nt, Artificial Sequence
  Description of Artificial Sequence: Synthetic oligonucleotide
aagaaaaggaagaaagaua

SEQ ID NO: 3127600 - RNA, 19 nt, Artificial Sequence
  Description of Artificial Sequence: Synthetic oligonucleotide
cugcucauggcuuauuuac

SEQ ID NO: 3127601 - RNA, 19 nt, Artificial Sequence
  Description of Artificial Sequence: Synthetic oligonucleotide
ugagugauccucugaauuc

SEQ ID NO: 3127602 - RNA, 19 nt, Artificial Sequence
  Description of Artificial Sequence: Synthetic oligonucleotide
uccacuugcaaagaaacau

SEQ ID NO: 3127603 - RNA, 19 nt, Artificial Sequence
  Description of Artificial Sequence: Synthetic oligonucleotide
agaaacaauggauggcugu

SEQ ID NO: 3127604 - RNA, 19 nt, Artificial Sequence
  Description of Artificial Sequence: Synthetic oligonucleotide
uugagugauccucugaauu

SEQ ID NO: 3127605 - RNA, 19 nt, Artificial Sequence
  Description of Artificial Sequence: Synthetic oligonucleotide
guauaaggagacucugucc

SEQ ID NO: 3127606 - RNA, 19 nt, Artificial Sequence
  Description of Artificial Sequence: Synthetic oligonucleotide
aauggauggcuguuggcaa

SEQ ID NO: 3127607 - RNA, 19 nt, Artificial Sequence
  Description of Artificial Sequence: Synthetic oligonucleotide
acaauggauggcuguuggc

SEQ ID NO: 3127608 - RNA, 19 nt, Artificial Sequence
  Description of Artificial Sequence: Synthetic oligonucleotide
ucauggcuuauuuacugga

SEQ ID NO: 3127609 - RNA, 19 nt, Artificial Sequence
  Description of Artificial Sequence: Synthetic oligonucleotide
agauaaaggaaaagaaaca

SEQ ID NO: 3127610 - RNA, 19 nt, Artificial Sequence
  Description of Artificial Sequence: Synthetic oligonucleotide
uuggcaauuugacaguaua

SEQ ID NO: 3127611 - RNA, 19 nt, Artificial Sequence
  Description of Artificial Sequence: Synthetic oligonucleotide
cucauggcuuauuuacugg

SEQ ID NO: 3127612 - RNA, 19 nt, Artificial Sequence
  Description of Artificial Sequence: Synthetic oligonucleotide
ucugaauucccuccugguc

SEQ ID NO: 3127613 - RNA, 19 nt, Artificial Sequence
  Description of Artificial Sequence: Synthetic oligonucleotide
aggaaaagaaacaauggau

SEQ ID NO: 3127614 - RNA, 19 nt, Artificial Sequence
  Description of Artificial Sequence: Synthetic oligonucleotide
ccugaugaaacaugaaacc

SEQ ID NO: 3127615 - RNA, 19 nt, Artificial Sequence
  Description of Artificial Sequence: Synthetic oligonucleotide
gaaacaugaaaccuccacu

SEQ ID NO: 3127616 - RNA, 19 nt, Artificial Sequence
  Description of Artificial Sequence: Synthetic oligonucleotide
ugacaguauaaggagacuc

SEQ ID NO: 3127617 - RNA, 19 nt, Artificial Sequence
  Description of Artificial Sequence: Synthetic oligonucleotide
auggcuuauuuacuggaca

SEQ ID NO: 3127618 - RNA, 19 nt, Artificial Sequence
  Description of Artificial Sequence: Synthetic oligonucleotide
ggcaauuugacaguauaag

SEQ ID NO: 3127619 - RNA, 19 nt, Artificial Sequence
  Description of Artificial Sequence: Synthetic oligonucleotide
ugaaaccuccacuugcaaa

SEQ ID NO: 3127620 - RNA, 19 nt, Artificial Sequence
  Description of Artificial Sequence: Synthetic oligonucleotide
auaaggagacucuguccuc

SEQ ID NO: 3127621 - RNA, 19 nt, Artificial Sequence
  Description of Artificial Sequence: Synthetic oligonucleotide
aaacaauggauggcuguug

SEQ ID NO: 3127622 - RNA, 19 nt, Artificial Sequence
  Description of Artificial Sequence: Synthetic oligonucleotide
uggcaauuugacaguauaa

SEQ ID NO: 3127623 - RNA, 19 nt, Artificial Sequence
  Description of Artificial Sequence: Synthetic oligonucleotide
ugaauucccuccugguccc

SEQ ID NO: 3127624 - RNA, 19 nt, Artificial Sequence
  Description of Artificial Sequence: Synthetic oligonucleotide
uaaggagacucuguccucc

SEQ ID NO: 3127625 - RNA, 19 nt, Artificial Sequence
  Description of Artificial Sequence: Synthetic oligonucleotide
uuuacuggacagagacccc

SEQ ID NO: 3127626 - RNA, 19 nt, Artificial Sequence
  Description of Artificial Sequence: Synthetic oligonucleotide
ggacagagaccccagaggc

SEQ ID NO: 3127627 - RNA, 19 nt, Artificial Sequence
  Description of Artificial Sequence: Synthetic oligonucleotide
gagugauccucugaauucc

SEQ ID NO: 3127628 - RNA, 19 nt, Artificial Sequence
  Description of Artificial Sequence: Synthetic oligonucleotide
ugcucuugagugauccucu

SEQ ID NO: 3127629 - RNA, 19 nt, Artificial Sequence
  Description of Artificial Sequence: Synthetic oligonucleotide
gcuuauuuacuggacagag

SEQ ID NO: 3127630 - RNA, 19 nt, Artificial Sequence
  Description of Artificial Sequence: Synthetic oligonucleotide
aggaagaaagauaaaggaa

SEQ ID NO: 3127631 - RNA, 19 nt, Artificial Sequence
  Description of Artificial Sequence: Synthetic oligonucleotide
cacuugcaaagaaacauca

SEQ ID NO: 3127632 - RNA, 19 nt, Artificial Sequence
  Description of Artificial Sequence: Synthetic oligonucleotide
cauggcuuauuuacuggac

SEQ ID NO: 3127633 - RNA, 19 nt, Artificial Sequence
  Description of Artificial Sequence: Synthetic oligonucleotide
ugcucauggcuuauuuacu

SEQ ID NO: 3127634 - RNA, 19 nt, Artificial Sequence
  Description of Artificial Sequence: Synthetic oligonucleotide
cuguccucccugcucaugg

SEQ ID NO: 3127635 - RNA, 19 nt, Artificial Sequence
  Description of Artificial Sequence: Synthetic oligonucleotide
acaguauaaggagacucug

SEQ ID NO: 3127636 - RNA, 19 nt, Artificial Sequence
  Description of Artificial Sequence: Synthetic oligonucleotide
uggcuguuggcaauuugac

SEQ ID NO: 3127637 - RNA, 19 nt, Artificial Sequence
  Description of Artificial Sequence: Synthetic oligonucleotide
aagaaacaauggauggcug

SEQ ID NO: 3127638 - RNA, 19 nt, Artificial Sequence
  Description of Artificial Sequence: Synthetic oligonucleotide
cuggacagagaccccagag

SEQ ID NO: 3127639 - RNA, 19 nt, Artificial Sequence
  Description of Artificial Sequence: Synthetic oligonucleotide
uuacuggacagagacccca

SEQ ID NO: 3127640 - RNA, 19 nt, Artificial Sequence
  Description of Artificial Sequence: Synthetic oligonucleotide
acucuguccucccugcuca

SEQ ID NO: 3127641 - RNA, 19 nt, Artificial Sequence
  Description of Artificial Sequence: Synthetic oligonucleotide
gagacucuguccucccugc

SEQ ID NO: 3127642 - RNA, 19 nt, Artificial Sequence
  Description of Artificial Sequence: Synthetic oligonucleotide
agugauccucugaauuccc

SEQ ID NO: 3127643 - RNA, 19 nt, Artificial Sequence
  Description of Artificial Sequence: Synthetic oligonucleotide
auuugacaguauaaggaga

SEQ ID NO: 3127644 - RNA, 19 nt, Artificial Sequence
  Description of Artificial Sequence: Synthetic oligonucleotide
caugaaaccuccacuugca

SEQ ID NO: 3127645 - RNA, 19 nt, Artificial Sequence
  Description of Artificial Sequence: Synthetic oligonucleotide
gauggcuguuggcaauuug

SEQ ID NO: 3127646 - RNA, 19 nt, Artificial Sequence
  Description of Artificial Sequence: Synthetic oligonucleotide
cuuauuuacuggacagaga

SEQ ID NO: 3127647 - RNA, 19 nt, Artificial Sequence
  Description of Artificial Sequence: Synthetic oligonucleotide
agaaacaucagcggguguu

SEQ ID NO: 3127648 - RNA, 19 nt, Artificial Sequence
  Description of Artificial Sequence: Synthetic oligonucleotide
uacuggacagagaccccag

SEQ ID NO: 3127649 - RNA, 19 nt, Artificial Sequence
  Description of Artificial Sequence: Synthetic oligonucleotide
accccagaggcccaggaca

SEQ ID NO: 3127650 - RNA, 19 nt, Artificial Sequence
  Description of Artificial Sequence: Synthetic oligonucleotide
aagaaacaucagcgggugu

SEQ ID NO: 3127651 - RNA, 19 nt, Artificial Sequence
  Description of Artificial Sequence: Synthetic oligonucleotide
auucccuccuggucccuac

SEQ ID NO: 3127652 - RNA, 19 nt, Artificial Sequence
  Description of Artificial Sequence: Synthetic oligonucleotide
caaagaaacaucagcgggu

SEQ ID NO: 3127653 - RNA, 19 nt, Artificial Sequence
  Description of Artificial Sequence: Synthetic oligonucleotide
gcucauggcuuauuuacug

SEQ ID NO: 3127654 - RNA, 19 nt, Artificial Sequence
  Description of Artificial Sequence: Synthetic oligonucleotide
auggcuguuggcaauuuga

SEQ ID NO: 3127655 - RNA, 19 nt, Artificial Sequence
  Description of Artificial Sequence: Synthetic oligonucleotide
uccucugaauucccuccug

SEQ ID NO: 3127656 - RNA, 19 nt, Artificial Sequence
  Description of Artificial Sequence: Synthetic oligonucleotide
caauggauggcuguuggca

SEQ ID NO: 3127657 - RNA, 19 nt, Artificial Sequence
  Description of Artificial Sequence: Synthetic oligonucleotide
gugugcucuugagugaucc

SEQ ID NO: 3127658 - RNA, 19 nt, Artificial Sequence
  Description of Artificial Sequence: Synthetic oligonucleotide
aaccuccacuugcaaagaa

SEQ ID NO: 3127659 - RNA, 19 nt, Artificial Sequence
  Description of Artificial Sequence: Synthetic oligonucleotide
ccuccacuugcaaagaaac

SEQ ID NO: 3127660 - RNA, 19 nt, Artificial Sequence
  Description of Artificial Sequence: Synthetic oligonucleotide
uugacaguauaaggagacu

SEQ ID NO: 3127661 - RNA, 19 nt, Artificial Sequence
  Description of Artificial Sequence: Synthetic oligonucleotide
aaaccuccacuugcaaaga

SEQ ID NO: 3127662 - RNA, 19 nt, Artificial Sequence
  Description of Artificial Sequence: Synthetic oligonucleotide
gacaguauaaggagacucu

SEQ ID NO: 3127663 - RNA, 19 nt, Artificial Sequence
  Description of Artificial Sequence: Synthetic oligonucleotide
gacagagaccccagaggcc

SEQ ID NO: 3127664 - RNA, 19 nt, Artificial Sequence
  Description of Artificial Sequence: Synthetic oligonucleotide
gucccuaccugaugaaaca

SEQ ID NO: 3127665 - RNA, 19 nt, Artificial Sequence
  Description of Artificial Sequence: Synthetic oligonucleotide
gacucuguccucccugcuc

SEQ ID NO: 3127666 - RNA, 19 nt, Artificial Sequence
  Description of Artificial Sequence: Synthetic oligonucleotide
uguuggcaauuugacagua

SEQ ID NO: 3127667 - RNA, 19 nt, Artificial Sequence
  Description of Artificial Sequence: Synthetic oligonucleotide
auccucugaauucccuccu

SEQ ID NO: 3127668 - RNA, 19 nt, Artificial Sequence
  Description of Artificial Sequence: Synthetic oligonucleotide
ugugcucuugagugauccu

SEQ ID NO: 3127669 - RNA, 19 nt, Artificial Sequence
  Description of Artificial Sequence: Synthetic oligonucleotide
ccuaccugaugaaacauga

SEQ ID NO: 3127670 - RNA, 19 nt, Artificial Sequence
  Description of Artificial Sequence: Synthetic oligonucleotide
cugaugaaacaugaaaccu

SEQ ID NO: 3127671 - RNA, 19 nt, Artificial Sequence
  Description of Artificial Sequence: Synthetic oligonucleotide
augaaaccuccacuugcaa

SEQ ID NO: 3127672 - RNA, 19 nt, Artificial Sequence
  Description of Artificial Sequence: Synthetic oligonucleotide
ggagacucuguccucccug

SEQ ID NO: 3127673 - RNA, 19 nt, Artificial Sequence
  Description of Artificial Sequence: Synthetic oligonucleotide
uguccucccugcucauggc

SEQ ID NO: 3127674 - RNA, 19 nt, Artificial Sequence
  Description of Artificial Sequence: Synthetic oligonucleotide
auggauggcuguuggcaau

SEQ ID NO: 3127675 - RNA, 19 nt, Artificial Sequence
  Description of Artificial Sequence: Synthetic oligonucleotide
cuccacuugcaaagaaaca

SEQ ID NO: 3127676 - RNA, 19 nt, Artificial Sequence
  Description of Artificial Sequence: Synthetic oligonucleotide
acuggacagagaccccaga

SEQ ID NO: 3127677 - RNA, 19 nt, Artificial Sequence
  Description of Artificial Sequence: Synthetic oligonucleotide
ucccuccuggucccuaccu

SEQ ID NO: 3127678 - RNA, 19 nt, Artificial Sequence
  Description of Artificial Sequence: Synthetic oligonucleotide
ccacuugcaaagaaacauc

SEQ ID NO: 3127679 - RNA, 19 nt, Artificial Sequence
  Description of Artificial Sequence: Synthetic oligonucleotide
gugcucuugagugauccuc

SEQ ID NO: 3127680 - RNA, 19 nt, Artificial Sequence
  Description of Artificial Sequence: Synthetic oligonucleotide
aaacaucagcggguguuuu

SEQ ID NO: 3127681 - RNA, 19 nt, Artificial Sequence
  Description of Artificial Sequence: Synthetic oligonucleotide
uucccuccuggucccuacc

SEQ ID NO: 3127682 - RNA, 19 nt, Artificial Sequence
  Description of Artificial Sequence: Synthetic oligonucleotide
ggucccuaccugaugaaac

SEQ ID NO: 3127683 - RNA, 19 nt, Artificial Sequence
  Description of Artificial Sequence: Synthetic oligonucleotide
gaccccagaggcccaggac

SEQ ID NO: 3127684 - RNA, 19 nt, Artificial Sequence
  Description of Artificial Sequence: Synthetic oligonucleotide
ucccuaccugaugaaacau

SEQ ID NO: 3127685 - RNA, 19 nt, Artificial Sequence
  Description of Artificial Sequence: Synthetic oligonucleotide
ggcuguuggcaauuugaca

SEQ ID NO: 3127686 - RNA, 19 nt, Artificial Sequence
  Description of Artificial Sequence: Synthetic oligonucleotide
cucuugagugauccucuga

SEQ ID NO: 3127687 - RNA, 19 nt, Artificial Sequence
  Description of Artificial Sequence: Synthetic oligonucleotide
ucuguccucccugcucaug

SEQ ID NO: 3127688 - RNA, 19 nt, Artificial Sequence
  Description of Artificial Sequence: Synthetic oligonucleotide
aggagacucuguccucccu

SEQ ID NO: 3127689 - RNA, 19 nt, Artificial Sequence
  Description of Artificial Sequence: Synthetic oligonucleotide
cuaccugaugaaacaugaa

SEQ ID NO: 3127690 - RNA, 19 nt, Artificial Sequence
  Description of Artificial Sequence: Synthetic oligonucleotide
caguauaaggagacucugu

SEQ ID NO: 3127691 - RNA, 19 nt, Artificial Sequence
  Description of Artificial Sequence: Synthetic oligonucleotide
uggucccuaccugaugaaa

SEQ ID NO: 3127692 - RNA, 19 nt, Artificial Sequence
  Description of Artificial Sequence: Synthetic oligonucleotide
accuccacuugcaaagaaa

SEQ ID NO: 3127693 - RNA, 19 nt, Artificial Sequence
  Description of Artificial Sequence: Synthetic oligonucleotide
agacucuguccucccugcu

SEQ ID NO: 3127694 - RNA, 19 nt, Artificial Sequence
  Description of Artificial Sequence: Synthetic oligonucleotide
augaaacaugaaaccucca

SEQ ID NO: 3127695 - RNA, 19 nt, Artificial Sequence
  Description of Artificial Sequence: Synthetic oligonucleotide
cccuaccugaugaaacaug

SEQ ID NO: 3127696 - RNA, 19 nt, Artificial Sequence
  Description of Artificial Sequence: Synthetic oligonucleotide
aauucccuccuggucccua

SEQ ID NO: 3127697 - RNA, 19 nt, Artificial Sequence
  Description of Artificial Sequence: Synthetic oligonucleotide
agagaccccagaggcccag

SEQ ID NO: 3127698 - RNA, 19 nt, Artificial Sequence
  Description of Artificial Sequence: Synthetic oligonucleotide
ccuggucccuaccugauga

SEQ ID NO: 3127699 - RNA, 19 nt, Artificial Sequence
  Description of Artificial Sequence: Synthetic oligonucleotide
cucugaauucccuccuggu

SEQ ID NO: 3127700 - RNA, 19 nt, Artificial Sequence
  Description of Artificial Sequence: Synthetic oligonucleotide
gcucuugagugauccucug

SEQ ID NO: 3127701 - RNA, 19 nt, Artificial Sequence
  Description of Artificial Sequence: Synthetic oligonucleotide
ggcuuauuuacuggacaga

SEQ ID NO: 3127702 - RNA, 19 nt, Artificial Sequence
  Description of Artificial Sequence: Synthetic oligonucleotide
cuugagugauccucugaau

SEQ ID NO: 3127703 - RNA, 19 nt, Artificial Sequence
  Description of Artificial Sequence: Synthetic oligonucleotide
gagaccccagaggcccagg

SEQ ID NO: 3127704 - RNA, 19 nt, Artificial Sequence
  Description of Artificial Sequence: Synthetic oligonucleotide
gaaacaucagcggguguuu

SEQ ID NO: 3127705 - RNA, 19 nt, Artificial Sequence
  Description of Artificial Sequence: Synthetic oligonucleotide
cuguuggcaauuugacagu

SEQ ID NO: 3127706 - RNA, 19 nt, Artificial Sequence
  Description of Artificial Sequence: Synthetic oligonucleotide
ccccagaggcccaggacac

SEQ ID NO: 3127707 - RNA, 19 nt, Artificial Sequence
  Description of Artificial Sequence: Synthetic oligonucleotide
ccuccuggucccuaccuga

SEQ ID NO: 3127708 - RNA, 19 nt, Artificial Sequence
  Description of Artificial Sequence: Synthetic oligonucleotide
cuggucccuaccugaugaa

SEQ ID NO: 3127709 - RNA, 19 nt, Artificial Sequence
  Description of Artificial Sequence: Synthetic oligonucleotide
guuggcaauuugacaguau

SEQ ID NO: 3127710 - RNA, 19 nt, Artificial Sequence
  Description of Artificial Sequence: Synthetic oligonucleotide
cagagaccccagaggccca

SEQ ID NO: 3127711 - RNA, 19 nt, Artificial Sequence
  Description of Artificial Sequence: Synthetic oligonucleotide
ccugcucauggcuuauuua

SEQ ID NO: 3127712 - RNA, 19 nt, Artificial Sequence
  Description of Artificial Sequence: Synthetic oligonucleotide
ucccugcucauggcuuauu

SEQ ID NO: 3127713 - RNA, 19 nt, Artificial Sequence
  Description of Artificial Sequence: Synthetic oligonucleotide
cuccuggucccuaccugau

SEQ ID NO: 3127714 - RNA, 19 nt, Artificial Sequence
  Description of Artificial Sequence: Synthetic oligonucleotide
gaauucccuccuggucccu

SEQ ID NO: 3127715 - RNA, 19 nt, Artificial Sequence
  Description of Artificial Sequence: Synthetic oligonucleotide
ccucccugcucauggcuua

SEQ ID NO: 3127716 - RNA, 19 nt, Artificial Sequence
  Description of Artificial Sequence: Synthetic oligonucleotide
cucuguccucccugcucau

SEQ ID NO: 3127717 - RNA, 19 nt, Artificial Sequence
  Description of Artificial Sequence: Synthetic oligonucleotide
cccugcucauggcuuauuu

SEQ ID NO: 3127718 - RNA, 19 nt, Artificial Sequence
  Description of Artificial Sequence: Synthetic oligonucleotide
ggauggcuguuggcaauuu

SEQ ID NO: 3127719 - RNA, 19 nt, Artificial Sequence
  Description of Artificial Sequence: Synthetic oligonucleotide
cucccugcucauggcuuau

SEQ ID NO: 3127720 - RNA, 19 nt, Artificial Sequence
  Description of Artificial Sequence: Synthetic oligonucleotide
aacucagagaucuuccuuc

SEQ ID NO: 3127721 - RNA, 19 nt, Artificial Sequence
  Description of Artificial Sequence: Synthetic oligonucleotide
agaucuuccuuccucuucc

SEQ ID NO: 3127722 - RNA, 19 nt, Artificial Sequence
  Description of Artificial Sequence: Synthetic oligonucleotide
ucuguguagcuucuggagg

SEQ ID NO: 3127723 - RNA, 19 nt, Artificial Sequence
  Description of Artificial Sequence: Synthetic oligonucleotide
ugugcaccaaaccagcacc

SEQ ID NO: 3127724 - RNA, 19 nt, Artificial Sequence
  Description of Artificial Sequence: Synthetic oligonucleotide
uaaaggugugcaccaaacc

SEQ ID NO: 3127725 - RNA, 19 nt, Artificial Sequence
  Description of Artificial Sequence: Synthetic oligonucleotide
cuaaaggugugcaccaaac

SEQ ID NO: 3127726 - RNA, 19 nt, Artificial Sequence
  Description of Artificial Sequence: Synthetic oligonucleotide
cuguguagcuucuggaggc

SEQ ID NO: 3127727 - RNA, 19 nt, Artificial Sequence
  Description of Artificial Sequence: Synthetic oligonucleotide
ugggagccagcacagguag

SEQ ID NO: 3127728 - RNA, 19 nt, Artificial Sequence
  Description of Artificial Sequence: Synthetic oligonucleotide
agcacagguagcucagagg

SEQ ID NO: 3127729 - RNA, 19 nt, Artificial Sequence
  Description of Artificial Sequence: Synthetic oligonucleotide
cucuguguagcuucuggag

SEQ ID NO: 3127730 - RNA, 19 nt, Artificial Sequence
  Description of Artificial Sequence: Synthetic oligonucleotide
caccaaaccagcaccuggg

SEQ ID NO: 3127731 - RNA, 19 nt, Artificial Sequence
  Description of Artificial Sequence: Synthetic oligonucleotide
uuccucuuccucccaagug

SEQ ID NO: 3127732 - RNA, 19 nt, Artificial Sequence
  Description of Artificial Sequence: Synthetic oligonucleotide
acagguagcucagaggugu

SEQ ID NO: 3127733 - RNA, 19 nt, Artificial Sequence
  Description of Artificial Sequence: Synthetic oligonucleotide
uguagcuucuggaggcugu

SEQ ID NO: 3127734 - RNA, 19 nt, Artificial Sequence
  Description of Artificial Sequence: Synthetic oligonucleotide
uuugguuuguuuguuuguu

SEQ ID NO: 3127735 - RNA, 19 nt, Artificial Sequence
  Description of Artificial Sequence: Synthetic oligonucleotide
aggugugcaccaaaccagc

SEQ ID NO: 3127736 - RNA, 19 nt, Artificial Sequence
  Description of Artificial Sequence: Synthetic oligonucleotide
acuaaaggugugcaccaaa

SEQ ID NO: 3127737 - RNA, 19 nt, Artificial Sequence
  Description of Artificial Sequence: Synthetic oligonucleotide
cuucuggaggcuguccugg

SEQ ID NO: 3127738 - RNA, 19 nt, Artificial Sequence
  Description of Artificial Sequence: Synthetic oligonucleotide
gagaucuuccuuccucuuc

SEQ ID NO: 3127739 - RNA, 19 nt, Artificial Sequence
  Description of Artificial Sequence: Synthetic oligonucleotide
agcuucuggaggcuguccu

SEQ ID NO: 3127740 - RNA, 19 nt, Artificial Sequence
  Description of Artificial Sequence: Synthetic oligonucleotide
ugugugucugugugugugu

SEQ ID NO: 3127741 - RNA, 19 nt, Artificial Sequence
  Description of Artificial Sequence: Synthetic oligonucleotide
aggugugugucugugugug

SEQ ID NO: 3127742 - RNA, 19 nt, Artificial Sequence
  Description of Artificial Sequence: Synthetic oligonucleotide
agccagcacagguagcuca

SEQ ID NO: 3127743 - RNA, 19 nt, Artificial Sequence
  Description of Artificial Sequence: Synthetic oligonucleotide
uugguuuguuuguuuguuu

SEQ ID NO: 3127744 - RNA, 19 nt, Artificial Sequence
  Description of Artificial Sequence: Synthetic oligonucleotide
agcaccugggagccagcac

SEQ ID NO: 3127745 - RNA, 19 nt, Artificial Sequence
  Description of Artificial Sequence: Synthetic oligonucleotide
gcaccaaaccagcaccugg

SEQ ID NO: 3127746 - RNA, 19 nt, Artificial Sequence
  Description of Artificial Sequence: Synthetic oligonucleotide
gugugcaccaaaccagcac

SEQ ID NO: 3127747 - RNA, 19 nt, Artificial Sequence
  Description of Artificial Sequence: Synthetic oligonucleotide
ugugucugugugugugugu

SEQ ID NO: 3127748 - RNA, 19 nt, Artificial Sequence
  Description of Artificial Sequence: Synthetic oligonucleotide
gugucugugugugugugug

SEQ ID NO: 3127749 - RNA, 19 nt, Artificial Sequence
  Description of Artificial Sequence: Synthetic oligonucleotide
ugugugugugugugugugu

SEQ ID NO: 3127750 - RNA, 19 nt, Artificial Sequence
  Description of Artificial Sequence: Synthetic oligonucleotide
cagcacagguagcucagag

SEQ ID NO: 3127751 - RNA, 19 nt, Artificial Sequence
  Description of Artificial Sequence: Synthetic oligonucleotide
ucugugugugugugugugu

SEQ ID NO: 3127752 - RNA, 19 nt, Artificial Sequence
  Description of Artificial Sequence: Synthetic oligonucleotide
gucugugugugugugugug

SEQ ID NO: 3127753 - RNA, 19 nt, Artificial Sequence
  Description of Artificial Sequence: Synthetic oligonucleotide
gugugugucugugugugug

SEQ ID NO: 3127754 - RNA, 19 nt, Artificial Sequence
  Description of Artificial Sequence: Synthetic oligonucleotide
cugugugugugugugugug

SEQ ID NO: 3127755 - RNA, 19 nt, Artificial Sequence
  Description of Artificial Sequence: Synthetic oligonucleotide
gugugugugugugugugug

SEQ ID NO: 3127756 - RNA, 19 nt, Artificial Sequence
  Description of Artificial Sequence: Synthetic oligonucleotide
agcucagaggugugugucu

SEQ ID NO: 3127757 - RNA, 19 nt, Artificial Sequence
  Description of Artificial Sequence: Synthetic oligonucleotide
accaaaccagcaccuggga

SEQ ID NO: 3127758 - RNA, 19 nt, Artificial Sequence
  Description of Artificial Sequence: Synthetic oligonucleotide
uagcucagagguguguguc

SEQ ID NO: 3127759 - RNA, 19 nt, Artificial Sequence
  Description of Artificial Sequence: Synthetic oligonucleotide
ugcaccaaaccagcaccug

SEQ ID NO: 3127760 - RNA, 19 nt, Artificial Sequence
  Description of Artificial Sequence: Synthetic oligonucleotide
ugucugugugugugugugu

SEQ ID NO: 3127761 - RNA, 19 nt, Artificial Sequence
  Description of Artificial Sequence: Synthetic oligonucleotide
uguguagcuucuggaggcu

SEQ ID NO: 3127762 - RNA, 19 nt, Artificial Sequence
  Description of Artificial Sequence: Synthetic oligonucleotide
cacagguagcucagaggug

SEQ ID NO: 3127763 - RNA, 19 nt, Artificial Sequence
  Description of Artificial Sequence: Synthetic oligonucleotide
gguagcucagaggugugug

SEQ ID NO: 3127764 - RNA, 19 nt, Artificial Sequence
  Description of Artificial Sequence: Synthetic oligonucleotide
caccugggagccagcacag

SEQ ID NO: 3127765 - RNA, 19 nt, Artificial Sequence
  Description of Artificial Sequence: Synthetic oligonucleotide
gcaccugggagccagcaca

SEQ ID NO: 3127766 - RNA, 19 nt, Artificial Sequence
  Description of Artificial Sequence: Synthetic oligonucleotide
gugugucugugugugugug

SEQ ID NO: 3127767 - RNA, 19 nt, Artificial Sequence
  Description of Artificial Sequence: Synthetic oligonucleotide
ccaaaccagcaccugggag

SEQ ID NO: 3127768 - RNA, 19 nt, Artificial Sequence
  Description of Artificial Sequence: Synthetic oligonucleotide
uagcuucuggaggcugucc

SEQ ID NO: 3127769 - RNA, 19 nt, Artificial Sequence
  Description of Artificial Sequence: Synthetic oligonucleotide
cagguagcucagaggugug

SEQ ID NO: 3127770 - RNA, 19 nt, Artificial Sequence
  Description of Artificial Sequence: Synthetic oligonucleotide
guagcucagaggugugugu

SEQ ID NO: 3127771 - RNA, 19 nt, Artificial Sequence
  Description of Artificial Sequence: Synthetic oligonucleotide
gcuucuggaggcuguccug

SEQ ID NO: 3127772 - RNA, 19 nt, Artificial Sequence
  Description of Artificial Sequence: Synthetic oligonucleotide
guguagcuucuggaggcug

SEQ ID NO: 3127773 - RNA, 19 nt, Artificial Sequence
  Description of Artificial Sequence: Synthetic oligonucleotide
agguagcucagaggugugu

SEQ ID NO: 3127774 - RNA, 19 nt, Artificial Sequence
  Description of Artificial Sequence: Synthetic oligonucleotide
guagcuucuggaggcuguc

SEQ ID NO: 3127775 - RNA, 19 nt, Artificial Sequence
  Description of Artificial Sequence: Synthetic oligonucleotide
cugggagccagcacaggua

SEQ ID NO: 3127776 - RNA, 19 nt, Artificial Sequence
  Description of Artificial Sequence: Synthetic oligonucleotide
gcucagaggugugugucug

SEQ ID NO: 3127777 - RNA, 19 nt, Artificial Sequence
  Description of Artificial Sequence: Synthetic oligonucleotide
ggagccagcacagguagcu

SEQ ID NO: 3127778 - RNA, 19 nt, Artificial Sequence
  Description of Artificial Sequence: Synthetic oligonucleotide
gagccagcacagguagcuc

SEQ ID NO: 3127779 - RNA, 19 nt, Artificial Sequence
  Description of Artificial Sequence: Synthetic oligonucleotide
ggugugcaccaaaccagca

SEQ ID NO: 3127780 - RNA, 19 nt, Artificial Sequence
  Description of Artificial Sequence: Synthetic oligonucleotide
cagaggugugugucugugu

SEQ ID NO: 3127781 - RNA, 19 nt, Artificial Sequence
  Description of Artificial Sequence: Synthetic oligonucleotide
gugcaccaaaccagcaccu

SEQ ID NO: 3127782 - RNA, 19 nt, Artificial Sequence
  Description of Artificial Sequence: Synthetic oligonucleotide
cucagaggugugugucugu

SEQ ID NO: 3127783 - RNA, 19 nt, Artificial Sequence
  Description of Artificial Sequence: Synthetic oligonucleotide
gggagccagcacagguagc

SEQ ID NO: 3127784 - RNA, 19 nt, Artificial Sequence
  Description of Artificial Sequence: Synthetic oligonucleotide
ggugugugucugugugugu

SEQ ID NO: 3127785 - RNA, 19 nt, Artificial Sequence
  Description of Artificial Sequence: Synthetic oligonucleotide
ggaggcuguccuggaauuu

SEQ ID NO: 3127786 - RNA, 19 nt, Artificial Sequence
  Description of Artificial Sequence: Synthetic oligonucleotide
ccagcacagguagcucaga

SEQ ID NO: 3127787 - RNA, 19 nt, Artificial Sequence
  Description of Artificial Sequence: Synthetic oligonucleotide
ucaacauagaggaugagga

SEQ ID NO: 3127788 - RNA, 19 nt, Artificial Sequence
  Description of Artificial Sequence: Synthetic oligonucleotide
ucaucuagcccaaugacug

SEQ ID NO: 3127789 - RNA, 19 nt, Artificial Sequence
  Description of Artificial Sequence: Synthetic oligonucleotide
agcaaugaacuugagaagc

SEQ ID NO: 3127790 - RNA, 19 nt, Artificial Sequence
  Description of Artificial Sequence: Synthetic oligonucleotide
uuggguaaaguccagggcc

SEQ ID NO: 3127791 - RNA, 19 nt, Artificial Sequence
  Description of Artificial Sequence: Synthetic oligonucleotide
cagauguucacccagggcg

SEQ ID NO: 3127792 - RNA, 19 nt, Artificial Sequence
  Description of Artificial Sequence: Synthetic oligonucleotide
aacauagaggaugaggaag

SEQ ID NO: 3127793 - RNA, 19 nt, Artificial Sequence
  Description of Artificial Sequence: Synthetic oligonucleotide
aggaccaugagccauuggg

SEQ ID NO: 3127794 - RNA, 19 nt, Artificial Sequence
  Description of Artificial Sequence: Synthetic oligonucleotide
auuggguaaaguccagggc

SEQ ID NO: 3127795 - RNA, 19 nt, Artificial Sequence
  Description of Artificial Sequence: Synthetic oligonucleotide
aaugacuggaagugagauc

SEQ ID NO: 3127796 - RNA, 19 nt, Artificial Sequence
  Description of Artificial Sequence: Synthetic oligonucleotide
uggaagugagaucuugagg

SEQ ID NO: 3127797 - RNA, 19 nt, Artificial Sequence
  Description of Artificial Sequence: Synthetic oligonucleotide
aagugagaucuugaggacc

SEQ ID NO: 3127798 - RNA, 19 nt, Artificial Sequence
  Description of Artificial Sequence: Synthetic oligonucleotide
acuugagaagcucaucuag

SEQ ID NO: 3127799 - RNA, 19 nt, Artificial Sequence
  Description of Artificial Sequence: Synthetic oligonucleotide
augacuggaagugagaucu

SEQ ID NO: 3127800 - RNA, 19 nt, Artificial Sequence
  Description of Artificial Sequence: Synthetic oligonucleotide
gaucuugaggaccaugagc

SEQ ID NO: 3127801 - RNA, 19 nt, Artificial Sequence
  Description of Artificial Sequence: Synthetic oligonucleotide
cauuggguaaaguccaggg

SEQ ID NO: 3127802 - RNA, 19 nt, Artificial Sequence
  Description of Artificial Sequence: Synthetic oligonucleotide
uugagaagcucaucuagcc

SEQ ID NO: 3127803 - RNA, 19 nt, Artificial Sequence
  Description of Artificial Sequence: Synthetic oligonucleotide
aguggagggacauggacag

SEQ ID NO: 3127804 - RNA, 19 nt, Artificial Sequence
  Description of Artificial Sequence: Synthetic oligonucleotide
ggaagugagaucuugagga

SEQ ID NO: 3127805 - RNA, 19 nt, Artificial Sequence
  Description of Artificial Sequence: Synthetic oligonucleotide
agcagccagauguucaccc

SEQ ID NO: 3127806 - RNA, 19 nt, Artificial Sequence
  Description of Artificial Sequence: Synthetic oligonucleotide
ugagccauuggguaaaguc

SEQ ID NO: 3127807 - RNA, 19 nt, Artificial Sequence
  Description of Artificial Sequence: Synthetic oligonucleotide
gauggaacccagcagccag

SEQ ID NO: 3127808 - RNA, 19 nt, Artificial Sequence
  Description of Artificial Sequence: Synthetic oligonucleotide
aaaguccagggcccguagc

SEQ ID NO: 3127809 - RNA, 19 nt, Artificial Sequence
  Description of Artificial Sequence: Synthetic oligonucleotide
uggacaggcagauggaacc

SEQ ID NO: 3127810 - RNA, 19 nt, Artificial Sequence
  Description of Artificial Sequence: Synthetic oligonucleotide
cuugagaagcucaucuagc

SEQ ID NO: 3127811 - RNA, 19 nt, Artificial Sequence
  Description of Artificial Sequence: Synthetic oligonucleotide
guagcuugaagaucaucgg

SEQ ID NO: 3127812 - RNA, 19 nt, Artificial Sequence
  Description of Artificial Sequence: Synthetic oligonucleotide
auaguuccgagcaaugaac

SEQ ID NO: 3127813 - RNA, 19 nt, Artificial Sequence
  Description of Artificial Sequence: Synthetic oligonucleotide
gagaagcucaucuagccca

SEQ ID NO: 3127814 - RNA, 19 nt, Artificial Sequence
  Description of Artificial Sequence: Synthetic oligonucleotide
gucaacauagaggaugagg

SEQ ID NO: 3127815 - RNA, 19 nt, Artificial Sequence
  Description of Artificial Sequence: Synthetic oligonucleotide
ugagaagcucaucuagccc

SEQ ID NO: 3127816 - RNA, 19 nt, Artificial Sequence
  Description of Artificial Sequence: Synthetic oligonucleotide
aaugaacuugagaagcuca

SEQ ID NO: 3127817 - RNA, 19 nt, Artificial Sequence
  Description of Artificial Sequence: Synthetic oligonucleotide
uagcuugaagaucaucggc

SEQ ID NO: 3127818 - RNA, 19 nt, Artificial Sequence
  Description of Artificial Sequence: Synthetic oligonucleotide
aggaaguggagggacaugg

SEQ ID NO: 3127819 - RNA, 19 nt, Artificial Sequence
  Description of Artificial Sequence: Synthetic oligonucleotide
gaacccagcagccagaugu

SEQ ID NO: 3127820 - RNA, 19 nt, Artificial Sequence
  Description of Artificial Sequence: Synthetic oligonucleotide
gagcaaugaacuugagaag

SEQ ID NO: 3127821 - RNA, 19 nt, Artificial Sequence
  Description of Artificial Sequence: Synthetic oligonucleotide
gagccauuggguaaagucc

SEQ ID NO: 3127822 - RNA, 19 nt, Artificial Sequence
  Description of Artificial Sequence: Synthetic oligonucleotide
cguagcuugaagaucaucg

SEQ ID NO: 3127823 - RNA, 19 nt, Artificial Sequence
  Description of Artificial Sequence: Synthetic oligonucleotide
gauaguuccgagcaaugaa

SEQ ID NO: 3127824 - RNA, 19 nt, Artificial Sequence
  Description of Artificial Sequence: Synthetic oligonucleotide
uggguaaaguccagggccc

SEQ ID NO: 3127825 - RNA, 19 nt, Artificial Sequence
  Description of Artificial Sequence: Synthetic oligonucleotide
gaaguggagggacauggac

SEQ ID NO: 3127826 - RNA, 19 nt, Artificial Sequence
  Description of Artificial Sequence: Synthetic oligonucleotide
uuccgagcaaugaacuuga

SEQ ID NO: 3127827 - RNA, 19 nt, Artificial Sequence
  Description of Artificial Sequence: Synthetic oligonucleotide
aagcucaucuagcccaaug

SEQ ID NO: 3127828 - RNA, 19 nt, Artificial Sequence
  Description of Artificial Sequence: Synthetic oligonucleotide
gaacuugagaagcucaucu

SEQ ID NO: 3127829 - RNA, 19 nt, Artificial Sequence
  Description of Artificial Sequence: Synthetic oligonucleotide
uaguuccgagcaaugaacu

SEQ ID NO: 3127830 - RNA, 19 nt, Artificial Sequence
  Description of Artificial Sequence: Synthetic oligonucleotide
cugguucucagacaggcug

SEQ ID NO: 3127831 - RNA, 19 nt, Artificial Sequence
  Description of Artificial Sequence: Synthetic oligonucleotide
cuggaagugagaucuugag

SEQ ID NO: 3127832 - RNA, 19 nt, Artificial Sequence
  Description of Artificial Sequence: Synthetic oligonucleotide
aaguccagggcccguagcu

SEQ ID NO: 3127833 - RNA, 19 nt, Artificial Sequence
  Description of Artificial Sequence: Synthetic oligonucleotide
gacugguucucagacaggc

SEQ ID NO: 3127834 - RNA, 19 nt, Artificial Sequence
  Description of Artificial Sequence: Synthetic oligonucleotide
agcucaucuagcccaauga

SEQ ID NO: 3127835 - RNA, 19 nt, Artificial Sequence
  Description of Artificial Sequence: Synthetic oligonucleotide
gcagauggaacccagcagc

SEQ ID NO: 3127836 - RNA, 19 nt, Artificial Sequence
  Description of Artificial Sequence: Synthetic oligonucleotide
cuugaagaucaucggcagg

SEQ ID NO: 3127837 - RNA, 19 nt, Artificial Sequence
  Description of Artificial Sequence: Synthetic oligonucleotide
gaagugagaucuugaggac

SEQ ID NO: 3127838 - RNA, 19 nt, Artificial Sequence
  Description of Artificial Sequence: Synthetic oligonucleotide
agaucuugaggaccaugag

SEQ ID NO: 3127839 - RNA, 19 nt, Artificial Sequence
  Description of Artificial Sequence: Synthetic oligonucleotide
gaugaggaaguggagggac

SEQ ID NO: 3127840 - RNA, 19 nt, Artificial Sequence
  Description of Artificial Sequence: Synthetic oligonucleotide
aaguggagggacauggaca

SEQ ID NO: 3127841 - RNA, 19 nt, Artificial Sequence
  Description of Artificial Sequence: Synthetic oligonucleotide
aacuugagaagcucaucua

SEQ ID NO: 3127842 - RNA, 19 nt, Artificial Sequence
  Description of Artificial Sequence: Synthetic oligonucleotide
uaaaguccagggcccguag

SEQ ID NO: 3127843 - RNA, 19 nt, Artificial Sequence
  Description of Artificial Sequence: Synthetic oligonucleotide
guuccgagcaaugaacuug

SEQ ID NO: 3127844 - RNA, 19 nt, Artificial Sequence
  Description of Artificial Sequence: Synthetic oligonucleotide
gagaucuugaggaccauga

SEQ ID NO: 3127845 - RNA, 19 nt, Artificial Sequence
  Description of Artificial Sequence: Synthetic oligonucleotide
uagcccaaugacuggaagu

SEQ ID NO: 3127846 - RNA, 19 nt, Artificial Sequence
  Description of Artificial Sequence: Synthetic oligonucleotide
ugaagaucaucggcagggg

SEQ ID NO: 3127847 - RNA, 19 nt, Artificial Sequence
  Description of Artificial Sequence: Synthetic oligonucleotide
agcccaaugacuggaagug

SEQ ID NO: 3127848 - RNA, 19 nt, Artificial Sequence
  Description of Artificial Sequence: Synthetic oligonucleotide
cuccagauaguuccgagca

SEQ ID NO: 3127849 - RNA, 19 nt, Artificial Sequence
  Description of Artificial Sequence: Synthetic oligonucleotide
gagggacauggacaggcag

SEQ ID NO: 3127850 - RNA, 19 nt, Artificial Sequence
  Description of Artificial Sequence: Synthetic oligonucleotide
acauagaggaugaggaagu

SEQ ID NO: 3127851 - RNA, 19 nt, Artificial Sequence
  Description of Artificial Sequence: Synthetic oligonucleotide
agugagaucuugaggacca

SEQ ID NO: 3127852 - RNA, 19 nt, Artificial Sequence
  Description of Artificial Sequence: Synthetic oligonucleotide
cagauggaacccagcagcc

SEQ ID NO: 3127853 - RNA, 19 nt, Artificial Sequence
  Description of Artificial Sequence: Synthetic oligonucleotide
aggcagauggaacccagca

SEQ ID NO: 3127854 - RNA, 19 nt, Artificial Sequence
  Description of Artificial Sequence: Synthetic oligonucleotide
agauguucacccagggcgg

SEQ ID NO: 3127855 - RNA, 19 nt, Artificial Sequence
  Description of Artificial Sequence: Synthetic oligonucleotide
cgagcaaugaacuugagaa

SEQ ID NO: 3127856 - RNA, 19 nt, Artificial Sequence
  Description of Artificial Sequence: Synthetic oligonucleotide
auggacaggcagauggaac

SEQ ID NO: 3127857 - RNA, 19 nt, Artificial Sequence
  Description of Artificial Sequence: Synthetic oligonucleotide
ugguucucagacaggcugu

SEQ ID NO: 3127858 - RNA, 19 nt, Artificial Sequence
  Description of Artificial Sequence: Synthetic oligonucleotide
caucuagcccaaugacugg

SEQ ID NO: 3127859 - RNA, 19 nt, Artificial Sequence
  Description of Artificial Sequence: Synthetic oligonucleotide
agauaguuccgagcaauga

SEQ ID NO: 3127860 - RNA, 19 nt, Artificial Sequence
  Description of Artificial Sequence: Synthetic oligonucleotide
ugagaucuugaggaccaug

SEQ ID NO: 3127861 - RNA, 19 nt, Artificial Sequence
  Description of Artificial Sequence: Synthetic oligonucleotide
ggggucaacauagaggaug

SEQ ID NO: 3127862 - RNA, 19 nt, Artificial Sequence
  Description of Artificial Sequence: Synthetic oligonucleotide
gcuugaagaucaucggcag

SEQ ID NO: 3127863 - RNA, 19 nt, Artificial Sequence
  Description of Artificial Sequence: Synthetic oligonucleotide
gacuggaagugagaucuug

SEQ ID NO: 3127864 - RNA, 19 nt, Artificial Sequence
  Description of Artificial Sequence: Synthetic oligonucleotide
cuagcccaaugacuggaag

SEQ ID NO: 3127865 - RNA, 19 nt, Artificial Sequence
  Description of Artificial Sequence: Synthetic oligonucleotide
agggcccguagcuugaaga

SEQ ID NO: 3127866 - RNA, 19 nt, Artificial Sequence
  Description of Artificial Sequence: Synthetic oligonucleotide
cagauaguuccgagcaaug

SEQ ID NO: 3127867 - RNA, 19 nt, Artificial Sequence
  Description of Artificial Sequence: Synthetic oligonucleotide
ucuugaggaccaugagcca

SEQ ID NO: 3127868 - RNA, 19 nt, Artificial Sequence
  Description of Artificial Sequence: Synthetic oligonucleotide
accaugagccauuggguaa

SEQ ID NO: 3127869 - RNA, 19 nt, Artificial Sequence
  Description of Artificial Sequence: Synthetic oligonucleotide
ucuagcccaaugacuggaa

SEQ ID NO: 3127870 - RNA, 19 nt, Artificial Sequence
  Description of Artificial Sequence: Synthetic oligonucleotide
ugaacuugagaagcucauc

SEQ ID NO: 3127871 - RNA, 19 nt, Artificial Sequence
  Description of Artificial Sequence: Synthetic oligonucleotide
gaccaugagccauugggua

SEQ ID NO: 3127872 - RNA, 19 nt, Artificial Sequence
  Description of Artificial Sequence: Synthetic oligonucleotide
caaugaacuugagaagcuc

SEQ ID NO: 3127873 - RNA, 19 nt, Artificial Sequence
  Description of Artificial Sequence: Synthetic oligonucleotide
agccauuggguaaagucca

SEQ ID NO: 3127874 - RNA, 19 nt, Artificial Sequence
  Description of Artificial Sequence: Synthetic oligonucleotide
uccagauaguuccgagcaa

SEQ ID NO: 3127875 - RNA, 19 nt, Artificial Sequence
  Description of Artificial Sequence: Synthetic oligonucleotide
agcagggacugguucucag

SEQ ID NO: 3127876 - RNA, 19 nt, Artificial Sequence
  Description of Artificial Sequence: Synthetic oligonucleotide
ugaggaaguggagggacau

SEQ ID NO: 3127877 - RNA, 19 nt, Artificial Sequence
  Description of Artificial Sequence: Synthetic oligonucleotide
uugaggaccaugagccauu

SEQ ID NO: 3127878 - RNA, 19 nt, Artificial Sequence
  Description of Artificial Sequence: Synthetic oligonucleotide
cagccagauguucacccag

SEQ ID NO: 3127879 - RNA, 19 nt, Artificial Sequence
  Description of Artificial Sequence: Synthetic oligonucleotide
ggcagauggaacccagcag

SEQ ID NO: 3127880 - RNA, 19 nt, Artificial Sequence
  Description of Artificial Sequence: Synthetic oligonucleotide
acuggaagugagaucuuga

SEQ ID NO: 3127881 - RNA, 19 nt, Artificial Sequence
  Description of Artificial Sequence: Synthetic oligonucleotide
aguuccgagcaaugaacuu

SEQ ID NO: 3127882 - RNA, 19 nt, Artificial Sequence
  Description of Artificial Sequence: Synthetic oligonucleotide
aucuagcccaaugacugga

SEQ ID NO: 3127883 - RNA, 19 nt, Artificial Sequence
  Description of Artificial Sequence: Synthetic oligonucleotide
cauagaggaugaggaagug

SEQ ID NO: 3127884 - RNA, 19 nt, Artificial Sequence
  Description of Artificial Sequence: Synthetic oligonucleotide
cucaucuagcccaaugacu

SEQ ID NO: 3127885 - RNA, 19 nt, Artificial Sequence
  Description of Artificial Sequence: Synthetic oligonucleotide
uucacccagggcggcaucc

SEQ ID NO: 3127886 - RNA, 19 nt, Artificial Sequence
  Description of Artificial Sequence: Synthetic oligonucleotide
gaggaccaugagccauugg

SEQ ID NO: 3127887 - RNA, 19 nt, Artificial Sequence
  Description of Artificial Sequence: Synthetic oligonucleotide
gcucaucuagcccaaugac

SEQ ID NO: 3127888 - RNA, 19 nt, Artificial Sequence
  Description of Artificial Sequence: Synthetic oligonucleotide
caacauagaggaugaggaa

SEQ ID NO: 3127889 - RNA, 19 nt, Artificial Sequence
  Description of Artificial Sequence: Synthetic oligonucleotide
uccgagcaaugaacuugag

SEQ ID NO: 3127890 - RNA, 19 nt, Artificial Sequence
  Description of Artificial Sequence: Synthetic oligonucleotide
gauguucacccagggcggc

SEQ ID NO: 3127891 - RNA, 19 nt, Artificial Sequence
  Description of Artificial Sequence: Synthetic oligonucleotide
ugaggaccaugagccauug

SEQ ID NO: 3127892 - RNA, 19 nt, Artificial Sequence
  Description of Artificial Sequence: Synthetic oligonucleotide
augaacuugagaagcucau

SEQ ID NO: 3127893 - RNA, 19 nt, Artificial Sequence
  Description of Artificial Sequence: Synthetic oligonucleotide
agccagauguucacccagg

SEQ ID NO: 3127894 - RNA, 19 nt, Artificial Sequence
  Description of Artificial Sequence: Synthetic oligonucleotide
caggcagauggaacccagc

SEQ ID NO: 3127895 - RNA, 19 nt, Artificial Sequence
  Description of Artificial Sequence: Synthetic oligonucleotide
gccagauguucacccaggg

SEQ ID NO: 3127896 - RNA, 19 nt, Artificial Sequence
  Description of Artificial Sequence: Synthetic oligonucleotide
agggacauggacaggcaga

SEQ ID NO: 3127897 - RNA, 19 nt, Artificial Sequence
  Description of Artificial Sequence: Synthetic oligonucleotide
acaggcagauggaacccag

SEQ ID NO: 3127898 - RNA, 19 nt, Artificial Sequence
  Description of Artificial Sequence: Synthetic oligonucleotide
uccagggcccguagcuuga

SEQ ID NO: 3127899 - RNA, 19 nt, Artificial Sequence
  Description of Artificial Sequence: Synthetic oligonucleotide
ccuccagauaguuccgagc

SEQ ID NO: 3127900 - RNA, 19 nt, Artificial Sequence
  Description of Artificial Sequence: Synthetic oligonucleotide
agauggaacccagcagcca

SEQ ID NO: 3127901 - RNA, 19 nt, Artificial Sequence
  Description of Artificial Sequence: Synthetic oligonucleotide
ccagauguucacccagggc

SEQ ID NO: 3127902 - RNA, 19 nt, Artificial Sequence
  Description of Artificial Sequence: Synthetic oligonucleotide
gacaggcagauggaaccca

SEQ ID NO: 3127903 - RNA, 19 nt, Artificial Sequence
  Description of Artificial Sequence: Synthetic oligonucleotide
ggcggcauccgcagcaggg

SEQ ID NO: 3127904 - RNA, 19 nt, Artificial Sequence
  Description of Artificial Sequence: Synthetic oligonucleotide
uguucacccagggcggcau

SEQ ID NO: 3127905 - RNA, 19 nt, Artificial Sequence
  Description of Artificial Sequence: Synthetic oligonucleotide
augaggaaguggagggaca

SEQ ID NO: 3127906 - RNA, 19 nt, Artificial Sequence
  Description of Artificial Sequence: Synthetic oligonucleotide
acccagcagccagauguuc

SEQ ID NO: 3127907 - RNA, 19 nt, Artificial Sequence
  Description of Artificial Sequence: Synthetic oligonucleotide
gcccguagcuugaagauca

SEQ ID NO: 3127908 - RNA, 19 nt, Artificial Sequence
  Description of Artificial Sequence: Synthetic oligonucleotide
gggucaacauagaggauga

SEQ ID NO: 3127909 - RNA, 19 nt, Artificial Sequence
  Description of Artificial Sequence: Synthetic oligonucleotide
auccgcagcagggacuggu

SEQ ID NO: 3127910 - RNA, 19 nt, Artificial Sequence
  Description of Artificial Sequence: Synthetic oligonucleotide
uggaacccagcagccagau

SEQ ID NO: 3127911 - RNA, 19 nt, Artificial Sequence
  Description of Artificial Sequence: Synthetic oligonucleotide
caugagccauuggguaaag

SEQ ID NO: 3127912 - RNA, 19 nt, Artificial Sequence
  Description of Artificial Sequence: Synthetic oligonucleotide
ccauuggguaaaguccagg

SEQ ID NO: 3127913 - RNA, 19 nt, Artificial Sequence
  Description of Artificial Sequence: Synthetic oligonucleotide
ccagcagccagauguucac

SEQ ID NO: 3127914 - RNA, 19 nt, Artificial Sequence
  Description of Artificial Sequence: Synthetic oligonucleotide
caaugacuggaagugagau

SEQ ID NO: 3127915 - RNA, 19 nt, Artificial Sequence
  Description of Artificial Sequence: Synthetic oligonucleotide
acugguucucagacaggcu

SEQ ID NO: 3127916 - RNA, 19 nt, Artificial Sequence
  Description of Artificial Sequence: Synthetic oligonucleotide
ugacuggaagugagaucuu

SEQ ID NO: 3127917 - RNA, 19 nt, Artificial Sequence
  Description of Artificial Sequence: Synthetic oligonucleotide
uccgcagcagggacugguu

SEQ ID NO: 3127918 - RNA, 19 nt, Artificial Sequence
  Description of Artificial Sequence: Synthetic oligonucleotide
ggacaggcagauggaaccc

SEQ ID NO: 3127919 - RNA, 19 nt, Artificial Sequence
  Description of Artificial Sequence: Synthetic oligonucleotide
agaagcucaucuagcccaa

SEQ ID NO: 3127920 - RNA, 19 nt, Artificial Sequence
  Description of Artificial Sequence: Synthetic oligonucleotide
cauggacaggcagauggaa

SEQ ID NO: 3127921 - RNA, 19 nt, Artificial Sequence
  Description of Artificial Sequence: Synthetic oligonucleotide
ggguaaaguccagggcccg

SEQ ID NO: 3127922 - RNA, 19 nt, Artificial Sequence
  Description of Artificial Sequence: Synthetic oligonucleotide
cagcagccagauguucacc

SEQ ID NO: 3127923 - RNA, 19 nt, Artificial Sequence
  Description of Artificial Sequence: Synthetic oligonucleotide
cagggcggcauccgcagca

SEQ ID NO: 3127924 - RNA, 19 nt, Artificial Sequence
  Description of Artificial Sequence: Synthetic oligonucleotide
gcauccgcagcagggacug

SEQ ID NO: 3127925 - RNA, 19 nt, Artificial Sequence
  Description of Artificial Sequence: Synthetic oligonucleotide
guaaaguccagggcccgua

SEQ ID NO: 3127926 - RNA, 19 nt, Artificial Sequence
  Description of Artificial Sequence: Synthetic oligonucleotide
augagccauuggguaaagu

SEQ ID NO: 3127927 - RNA, 19 nt, Artificial Sequence
  Description of Artificial Sequence: Synthetic oligonucleotide
cacccagggcggcauccgc

SEQ ID NO: 3127928 - RNA, 19 nt, Artificial Sequence
  Description of Artificial Sequence: Synthetic oligonucleotide
auggaacccagcagccaga

SEQ ID NO: 3127929 - RNA, 19 nt, Artificial Sequence
  Description of Artificial Sequence: Synthetic oligonucleotide
cuugaggaccaugagccau

SEQ ID NO: 3127930 - RNA, 19 nt, Artificial Sequence
  Description of Artificial Sequence: Synthetic oligonucleotide
ccaaugacuggaagugaga

SEQ ID NO: 3127931 - RNA, 19 nt, Artificial Sequence
  Description of Artificial Sequence: Synthetic oligonucleotide
ggacugguucucagacagg

SEQ ID NO: 3127932 - RNA, 19 nt, Artificial Sequence
  Description of Artificial Sequence: Synthetic oligonucleotide
cagggcccguagcuugaag

SEQ ID NO: 3127933 - RNA, 19 nt, Artificial Sequence
  Description of Artificial Sequence: Synthetic oligonucleotide
auguucacccagggcggca

SEQ ID NO: 3127934 - RNA, 19 nt, Artificial Sequence
  Description of Artificial Sequence: Synthetic oligonucleotide
gcagccagauguucaccca

SEQ ID NO: 3127935 - RNA, 19 nt, Artificial Sequence
  Description of Artificial Sequence: Synthetic oligonucleotide
ggucaacauagaggaugag

SEQ ID NO: 3127936 - RNA, 19 nt, Artificial Sequence
  Description of Artificial Sequence: Synthetic oligonucleotide
ccgagcaaugaacuugaga

SEQ ID NO: 3127937 - RNA, 19 nt, Artificial Sequence
  Description of Artificial Sequence: Synthetic oligonucleotide
agggcggcauccgcagcag

SEQ ID NO: 3127938 - RNA, 19 nt, Artificial Sequence
  Description of Artificial Sequence: Synthetic oligonucleotide
gcaaugaacuugagaagcu

SEQ ID NO: 3127939 - RNA, 19 nt, Artificial Sequence
  Description of Artificial Sequence: Synthetic oligonucleotide
ggaacccagcagccagaug

SEQ ID NO: 3127940 - RNA, 19 nt, Artificial Sequence
  Description of Artificial Sequence: Synthetic oligonucleotide
ggaccaugagccauugggu

SEQ ID NO: 3127941 - RNA, 19 nt, Artificial Sequence
  Description of Artificial Sequence: Synthetic oligonucleotide
cccagggcggcauccgcag

SEQ ID NO: 3127942 - RNA, 19 nt, Artificial Sequence
  Description of Artificial Sequence: Synthetic oligonucleotide
ggaaguggagggacaugga

SEQ ID NO: 3127943 - RNA, 19 nt, Artificial Sequence
  Description of Artificial Sequence: Synthetic oligonucleotide
acccagggcggcauccgca

SEQ ID NO: 3127944 - RNA, 19 nt, Artificial Sequence
  Description of Artificial Sequence: Synthetic oligonucleotide
guucacccagggcggcauc

SEQ ID NO: 3127945 - RNA, 19 nt, Artificial Sequence
  Description of Artificial Sequence: Synthetic oligonucleotide
ggagggacauggacaggca

SEQ ID NO: 3127946 - RNA, 19 nt, Artificial Sequence
  Description of Artificial Sequence: Synthetic oligonucleotide
ggcccguagcuugaagauc

SEQ ID NO: 3127947 - RNA, 19 nt, Artificial Sequence
  Description of Artificial Sequence: Synthetic oligonucleotide
gggcggcauccgcagcagg

SEQ ID NO: 3127948 - RNA, 19 nt, Artificial Sequence
  Description of Artificial Sequence: Synthetic oligonucleotide
cauccgcagcagggacugg

SEQ ID NO: 3127949 - RNA, 19 nt, Artificial Sequence
  Description of Artificial Sequence: Synthetic oligonucleotide
gggacauggacaggcagau

SEQ ID NO: 3127950 - RNA, 19 nt, Artificial Sequence
  Description of Artificial Sequence: Synthetic oligonucleotide
gcccaaugacuggaaguga

SEQ ID NO: 3127951 - RNA, 19 nt, Artificial Sequence
  Description of Artificial Sequence: Synthetic oligonucleotide
gggcccguagcuugaagau

SEQ ID NO: 3127952 - RNA, 19 nt, Artificial Sequence
  Description of Artificial Sequence: Synthetic oligonucleotide
ccaugagccauuggguaaa

SEQ ID NO: 3127953 - RNA, 19 nt, Artificial Sequence
  Description of Artificial Sequence: Synthetic oligonucleotide
ccgcagcagggacugguuc

SEQ ID NO: 3127954 - RNA, 19 nt, Artificial Sequence
  Description of Artificial Sequence: Synthetic oligonucleotide
ccguagcuugaagaucauc

SEQ ID NO: 3127955 - RNA, 19 nt, Artificial Sequence
  Description of Artificial Sequence: Synthetic oligonucleotide
gguaaaguccagggcccgu

SEQ ID NO: 3127956 - RNA, 19 nt, Artificial Sequence
  Description of Artificial Sequence: Synthetic oligonucleotide
gaagcucaucuagcccaau

SEQ ID NO: 3127957 - RNA, 19 nt, Artificial Sequence
  Description of Artificial Sequence: Synthetic oligonucleotide
cagcagggacugguucuca

SEQ ID NO: 3127958 - RNA, 19 nt, Artificial Sequence
  Description of Artificial Sequence: Synthetic oligonucleotide
gcggcauccgcagcaggga

SEQ ID NO: 3127959 - RNA, 19 nt, Artificial Sequence
  Description of Artificial Sequence: Synthetic oligonucleotide
ccagggcggcauccgcagc

SEQ ID NO: 3127960 - RNA, 19 nt, Artificial Sequence
  Description of Artificial Sequence: Synthetic oligonucleotide
cggcauccgcagcagggac

SEQ ID NO: 3127961 - RNA, 19 nt, Artificial Sequence
  Description of Artificial Sequence: Synthetic oligonucleotide
ggcauccgcagcagggacu

SEQ ID NO: 3127962 - RNA, 19 nt, Artificial Sequence
  Description of Artificial Sequence: Synthetic oligonucleotide
gugagaucuugaggaccau

SEQ ID NO: 3127963 - RNA, 19 nt, Artificial Sequence
  Description of Artificial Sequence: Synthetic oligonucleotide
cccguagcuugaagaucau

SEQ ID NO: 3127964 - RNA, 19 nt, Artificial Sequence
  Description of Artificial Sequence: Synthetic oligonucleotide
ccagggcccguagcuugaa

SEQ ID NO: 3127965 - RNA, 19 nt, Artificial Sequence
  Description of Artificial Sequence: Synthetic oligonucleotide
uucaaaauucuucagaucc

SEQ ID NO: 3127966 - RNA, 19 nt, Artificial Sequence
  Description of Artificial Sequence: Synthetic oligonucleotide
uuuagcacggccuccaugg

SEQ ID NO: 3127967 - RNA, 19 nt, Artificial Sequence
  Description of Artificial Sequence: Synthetic oligonucleotide
uguauuuugcuuucgcacc

SEQ ID NO: 3127968 - RNA, 19 nt, Artificial Sequence
  Description of Artificial Sequence: Synthetic oligonucleotide
aaaauucuucagauccucc

SEQ ID NO: 3127969 - RNA, 19 nt, Artificial Sequence
  Description of Artificial Sequence: Synthetic oligonucleotide
uuguauuuugcuuucgcac

SEQ ID NO: 3127970 - RNA, 19 nt, Artificial Sequence
  Description of Artificial Sequence: Synthetic oligonucleotide
uuugcuuucgcaccaggca

SEQ ID NO: 3127971 - RNA, 19 nt, Artificial Sequence
  Description of Artificial Sequence: Synthetic oligonucleotide
cuuccuuucaaaauucuuc

SEQ ID NO: 3127972 - RNA, 19 nt, Artificial Sequence
  Description of Artificial Sequence: Synthetic oligonucleotide
uuccuuucaaaauucuuca

SEQ ID NO: 3127973 - RNA, 19 nt, Artificial Sequence
  Description of Artificial Sequence: Synthetic oligonucleotide
uuucgcaccaggcaccagg

SEQ ID NO: 3127974 - RNA, 19 nt, Artificial Sequence
  Description of Artificial Sequence: Synthetic oligonucleotide
uggauacagagccagcugc

SEQ ID NO: 3127975 - RNA, 19 nt, Artificial Sequence
  Description of Artificial Sequence: Synthetic oligonucleotide
cacaagcucguuuagcacg

SEQ ID NO: 3127976 - RNA, 19 nt, Artificial Sequence
  Description of Artificial Sequence: Synthetic oligonucleotide
acacuaagggcucuacugg

SEQ ID NO: 3127977 - RNA, 19 nt, Artificial Sequence
  Description of Artificial Sequence: Synthetic oligonucleotide
cuucagauccuccacagac

SEQ ID NO: 3127978 - RNA, 19 nt, Artificial Sequence
  Description of Artificial Sequence: Synthetic oligonucleotide
auccuccacagacacaagc

SEQ ID NO: 3127979 - RNA, 19 nt, Artificial Sequence
  Description of Artificial Sequence: Synthetic oligonucleotide
gaugccucuacggaugucg

SEQ ID NO: 3127980 - RNA, 19 nt, Artificial Sequence
  Description of Artificial Sequence: Synthetic oligonucleotide
aagcucguuuagcacggcc

SEQ ID NO: 3127981 - RNA, 19 nt, Artificial Sequence
  Description of Artificial Sequence: Synthetic oligonucleotide
ugcaagucucacacuaagg

SEQ ID NO: 3127982 - RNA, 19 nt, Artificial Sequence
  Description of Artificial Sequence: Synthetic oligonucleotide
gcaagucucacacuaaggg

SEQ ID NO: 3127983 - RNA, 19 nt, Artificial Sequence
  Description of Artificial Sequence: Synthetic oligonucleotide
aagucucacacuaagggcu

SEQ ID NO: 3127984 - RNA, 19 nt, Artificial Sequence
  Description of Artificial Sequence: Synthetic oligonucleotide
ucaaaauucuucagauccu

SEQ ID NO: 3127985 - RNA, 19 nt, Artificial Sequence
  Description of Artificial Sequence: Synthetic oligonucleotide
gacacaagcucguuuagca

SEQ ID NO: 3127986 - RNA, 19 nt, Artificial Sequence
  Description of Artificial Sequence: Synthetic oligonucleotide
caagucucacacuaagggc

SEQ ID NO: 3127987 - RNA, 19 nt, Artificial Sequence
  Description of Artificial Sequence: Synthetic oligonucleotide
gagcaugaugccucuacgg

SEQ ID NO: 3127988 - RNA, 19 nt, Artificial Sequence
  Description of Artificial Sequence: Synthetic oligonucleotide
aggagcaugaugccucuac

SEQ ID NO: 3127989 - RNA, 19 nt, Artificial Sequence
  Description of Artificial Sequence: Synthetic oligonucleotide
cuccacagacacaagcucg

SEQ ID NO: 3127990 - RNA, 19 nt, Artificial Sequence
  Description of Artificial Sequence: Synthetic oligonucleotide
ucuacggaugucgucauug

SEQ ID NO: 3127991 - RNA, 19 nt, Artificial Sequence
  Description of Artificial Sequence: Synthetic oligonucleotide
ugcucagacugaaacuucc

SEQ ID NO: 3127992 - RNA, 19 nt, Artificial Sequence
  Description of Artificial Sequence: Synthetic oligonucleotide
uuuggauacagagccagcu

SEQ ID NO: 3127993 - RNA, 19 nt, Artificial Sequence
  Description of Artificial Sequence: Synthetic oligonucleotide
cauuguauuuugcuuucgc

SEQ ID NO: 3127994 - RNA, 19 nt, Artificial Sequence
  Description of Artificial Sequence: Synthetic oligonucleotide
uuucaaaauucuucagauc

SEQ ID NO: 3127995 - RNA, 19 nt, Artificial Sequence
  Description of Artificial Sequence: Synthetic oligonucleotide
acacaagcucguuuagcac

SEQ ID NO: 3127996 - RNA, 19 nt, Artificial Sequence
  Description of Artificial Sequence: Synthetic oligonucleotide
gaaacuuccuuucaaaauu

SEQ ID NO: 3127997 - RNA, 19 nt, Artificial Sequence
  Description of Artificial Sequence: Synthetic oligonucleotide
caugaugccucuacggaug

SEQ ID NO: 3127998 - RNA, 19 nt, Artificial Sequence
  Description of Artificial Sequence: Synthetic oligonucleotide
uugcuuucgcaccaggcac

SEQ ID NO: 3127999 - RNA, 19 nt, Artificial Sequence
  Description of Artificial Sequence: Synthetic oligonucleotide
uuggauacagagccagcug

SEQ ID NO: 3128000 - RNA, 19 nt, Artificial Sequence
  Description of Artificial Sequence: Synthetic oligonucleotide
uccuccacagacacaagcu

SEQ ID NO: 3128001 - RNA, 19 nt, Artificial Sequence
  Description of Artificial Sequence: Synthetic oligonucleotide
aacaacuccuccaggagca

SEQ ID NO: 3128002 - RNA, 19 nt, Artificial Sequence
  Description of Artificial Sequence: Synthetic oligonucleotide
uccuuucaaaauucuucag

SEQ ID NO: 3128003 - RNA, 19 nt, Artificial Sequence
  Description of Artificial Sequence: Synthetic oligonucleotide
accaggcauacucaaacug

SEQ ID NO: 3128004 - RNA, 19 nt, Artificial Sequence
  Description of Artificial Sequence: Synthetic oligonucleotide
acugaaacuuccuuucaaa

SEQ ID NO: 3128005 - RNA, 19 nt, Artificial Sequence
  Description of Artificial Sequence: Synthetic oligonucleotide
cagacugaaacuuccuuuc

SEQ ID NO: 3128006 - RNA, 19 nt, Artificial Sequence
  Description of Artificial Sequence: Synthetic oligonucleotide
acagacacaagcucguuua

SEQ ID NO: 3128007 - RNA, 19 nt, Artificial Sequence
  Description of Artificial Sequence: Synthetic oligonucleotide
uuuuggauacagagccagc

SEQ ID NO: 3128008 - RNA, 19 nt, Artificial Sequence
  Description of Artificial Sequence: Synthetic oligonucleotide
agcaugaugccucuacgga

SEQ ID NO: 3128009 - RNA, 19 nt, Artificial Sequence
  Description of Artificial Sequence: Synthetic oligonucleotide
agacacaagcucguuuagc

SEQ ID NO: 3128010 - RNA, 19 nt, Artificial Sequence
  Description of Artificial Sequence: Synthetic oligonucleotide
cacuaagggcucuacuggg

SEQ ID NO: 3128011 - RNA, 19 nt, Artificial Sequence
  Description of Artificial Sequence: Synthetic oligonucleotide
auuuugcuuucgcaccagg

SEQ ID NO: 3128012 - RNA, 19 nt, Artificial Sequence
  Description of Artificial Sequence: Synthetic oligonucleotide
agauccuccacagacacaa

SEQ ID NO: 3128013 - RNA, 19 nt, Artificial Sequence
  Description of Artificial Sequence: Synthetic oligonucleotide
ucauuguauuuugcuuucg

SEQ ID NO: 3128014 - RNA, 19 nt, Artificial Sequence
  Description of Artificial Sequence: Synthetic oligonucleotide
uccacagacacaagcucgu

SEQ ID NO: 3128015 - RNA, 19 nt, Artificial Sequence
  Description of Artificial Sequence: Synthetic oligonucleotide
augucgucauuguauuuug

SEQ ID NO: 3128016 - RNA, 19 nt, Artificial Sequence
  Description of Artificial Sequence: Synthetic oligonucleotide
acuaagggcucuacugggc

SEQ ID NO: 3128017 - RNA, 19 nt, Artificial Sequence
  Description of Artificial Sequence: Synthetic oligonucleotide
aagggcucuacugggccac

SEQ ID NO: 3128018 - RNA, 19 nt, Artificial Sequence
  Description of Artificial Sequence: Synthetic oligonucleotide
caggcauacucaaacugug

SEQ ID NO: 3128019 - RNA, 19 nt, Artificial Sequence
  Description of Artificial Sequence: Synthetic oligonucleotide
ugucgucauuguauuuugc

SEQ ID NO: 3128020 - RNA, 19 nt, Artificial Sequence
  Description of Artificial Sequence: Synthetic oligonucleotide
ugcuuucgcaccaggcacc

SEQ ID NO: 3128021 - RNA, 19 nt, Artificial Sequence
  Description of Artificial Sequence: Synthetic oligonucleotide
caaaauucuucagauccuc

SEQ ID NO: 3128022 - RNA, 19 nt, Artificial Sequence
  Description of Artificial Sequence: Synthetic oligonucleotide
ucgucauuguauuuugcuu

SEQ ID NO: 3128023 - RNA, 19 nt, Artificial Sequence
  Description of Artificial Sequence: Synthetic oligonucleotide
cugcaagucucacacuaag

SEQ ID NO: 3128024 - RNA, 19 nt, Artificial Sequence
  Description of Artificial Sequence: Synthetic oligonucleotide
guauuuugcuuucgcacca

SEQ ID NO: 3128025 - RNA, 19 nt, Artificial Sequence
  Description of Artificial Sequence: Synthetic oligonucleotide
acaagcucguuuagcacgg

SEQ ID NO: 3128026 - RNA, 19 nt, Artificial Sequence
  Description of Artificial Sequence: Synthetic oligonucleotide
uucgcaccaggcaccaggc

SEQ ID NO: 3128027 - RNA, 19 nt, Artificial Sequence
  Description of Artificial Sequence: Synthetic oligonucleotide
ucacacuaagggcucuacu

SEQ ID NO: 3128028 - RNA, 19 nt, Artificial Sequence
  Description of Artificial Sequence: Synthetic oligonucleotide
gucauuguauuuugcuuuc

SEQ ID NO: 3128029 - RNA, 19 nt, Artificial Sequence
  Description of Artificial Sequence: Synthetic oligonucleotide
aacuccuccaggagcauga

SEQ ID NO: 3128030 - RNA, 19 nt, Artificial Sequence
  Description of Artificial Sequence: Synthetic oligonucleotide
uauuuugcuuucgcaccag

SEQ ID NO: 3128031 - RNA, 19 nt, Artificial Sequence
  Description of Artificial Sequence: Synthetic oligonucleotide
agacugaaacuuccuuuca

SEQ ID NO: 3128032 - RNA, 19 nt, Artificial Sequence
  Description of Artificial Sequence: Synthetic oligonucleotide
gacugaaacuuccuuucaa

SEQ ID NO: 3128033 - RNA, 19 nt, Artificial Sequence
  Description of Artificial Sequence: Synthetic oligonucleotide
aacuuccuuucaaaauucu

SEQ ID NO: 3128034 - RNA, 19 nt, Artificial Sequence
  Description of Artificial Sequence: Synthetic oligonucleotide
uacucaaacugugugcuuu

SEQ ID NO: 3128035 - RNA, 19 nt, Artificial Sequence
  Description of Artificial Sequence: Synthetic oligonucleotide
ggagcaugaugccucuacg

SEQ ID NO: 3128036 - RNA, 19 nt, Artificial Sequence
  Description of Artificial Sequence: Synthetic oligonucleotide
cugaaacuuccuuucaaaa

SEQ ID NO: 3128037 - RNA, 19 nt, Artificial Sequence
  Description of Artificial Sequence: Synthetic oligonucleotide
ucuacugggccacggucuc

SEQ ID NO: 3128038 - RNA, 19 nt, Artificial Sequence
  Description of Artificial Sequence: Synthetic oligonucleotide
uaagggcucuacugggcca

SEQ ID NO: 3128039 - RNA, 19 nt, Artificial Sequence
  Description of Artificial Sequence: Synthetic oligonucleotide
guuuagcacggccuccaug

SEQ ID NO: 3128040 - RNA, 19 nt, Artificial Sequence
  Description of Artificial Sequence: Synthetic oligonucleotide
acggaugucgucauuguau

SEQ ID NO: 3128041 - RNA, 19 nt, Artificial Sequence
  Description of Artificial Sequence: Synthetic oligonucleotide
uuagcacggccuccauggc

SEQ ID NO: 3128042 - RNA, 19 nt, Artificial Sequence
  Description of Artificial Sequence: Synthetic oligonucleotide
agucucacacuaagggcuc

SEQ ID NO: 3128043 - RNA, 19 nt, Artificial Sequence
  Description of Artificial Sequence: Synthetic oligonucleotide
gcaccaggcauacucaaac

SEQ ID NO: 3128044 - RNA, 19 nt, Artificial Sequence
  Description of Artificial Sequence: Synthetic oligonucleotide
gucgucauuguauuuugcu

SEQ ID NO: 3128045 - RNA, 19 nt, Artificial Sequence
  Description of Artificial Sequence: Synthetic oligonucleotide
uacggaugucgucauugua

SEQ ID NO: 3128046 - RNA, 19 nt, Artificial Sequence
  Description of Artificial Sequence: Synthetic oligonucleotide
ucguuuagcacggccucca

SEQ ID NO: 3128047 - RNA, 19 nt, Artificial Sequence
  Description of Artificial Sequence: Synthetic oligonucleotide
cagacacaagcucguuuag

SEQ ID NO: 3128048 - RNA, 19 nt, Artificial Sequence
  Description of Artificial Sequence: Synthetic oligonucleotide
cauacucaaacugugugcu

SEQ ID NO: 3128049 - RNA, 19 nt, Artificial Sequence
  Description of Artificial Sequence: Synthetic oligonucleotide
gaugucgucauuguauuuu

SEQ ID NO: 3128050 - RNA, 19 nt, Artificial Sequence
  Description of Artificial Sequence: Synthetic oligonucleotide
acggccuccauggccaccg

SEQ ID NO: 3128051 - RNA, 19 nt, Artificial Sequence
  Description of Artificial Sequence: Synthetic oligonucleotide
augaugccucuacggaugu

SEQ ID NO: 3128052 - RNA, 19 nt, Artificial Sequence
  Description of Artificial Sequence: Synthetic oligonucleotide
cagcugccugcucagacug

SEQ ID NO: 3128053 - RNA, 19 nt, Artificial Sequence
  Description of Artificial Sequence: Synthetic oligonucleotide
agcucguuuagcacggccu

SEQ ID NO: 3128054 - RNA, 19 nt, Artificial Sequence
  Description of Artificial Sequence: Synthetic oligonucleotide
ccaggcaccaggcauacuc

SEQ ID NO: 3128055 - RNA, 19 nt, Artificial Sequence
  Description of Artificial Sequence: Synthetic oligonucleotide
uggccaccgccccugcaag

SEQ ID NO: 3128056 - RNA, 19 nt, Artificial Sequence
  Description of Artificial Sequence: Synthetic oligonucleotide
acucaaacugugugcuuuu

SEQ ID NO: 3128057 - RNA, 19 nt, Artificial Sequence
  Description of Artificial Sequence: Synthetic oligonucleotide
gccccugcaagucucacac

SEQ ID NO: 3128058 - RNA, 19 nt, Artificial Sequence
  Description of Artificial Sequence: Synthetic oligonucleotide
uccauggccaccgccccug

SEQ ID NO: 3128059 - RNA, 19 nt, Artificial Sequence
  Description of Artificial Sequence: Synthetic oligonucleotide
auggccaccgccccugcaa

SEQ ID NO: 3128060 - RNA, 19 nt, Artificial Sequence
  Description of Artificial Sequence: Synthetic oligonucleotide
acuuccuuucaaaauucuu

SEQ ID NO: 3128061 - RNA, 19 nt, Artificial Sequence
  Description of Artificial Sequence: Synthetic oligonucleotide
cucguuuagcacggccucc

SEQ ID NO: 3128062 - RNA, 19 nt, Artificial Sequence
  Description of Artificial Sequence: Synthetic oligonucleotide
ggauacagagccagcugcc

SEQ ID NO: 3128063 - RNA, 19 nt, Artificial Sequence
  Description of Artificial Sequence: Synthetic oligonucleotide
auacucaaacugugugcuu

SEQ ID NO: 3128064 - RNA, 19 nt, Artificial Sequence
  Description of Artificial Sequence: Synthetic oligonucleotide
cucacacuaagggcucuac

SEQ ID NO: 3128065 - RNA, 19 nt, Artificial Sequence
  Description of Artificial Sequence: Synthetic oligonucleotide
aggcauacucaaacugugu

SEQ ID NO: 3128066 - RNA, 19 nt, Artificial Sequence
  Description of Artificial Sequence: Synthetic oligonucleotide
gauacagagccagcugccu

SEQ ID NO: 3128067 - RNA, 19 nt, Artificial Sequence
  Description of Artificial Sequence: Synthetic oligonucleotide
aggcaccaggcauacucaa

SEQ ID NO: 3128068 - RNA, 19 nt, Artificial Sequence
  Description of Artificial Sequence: Synthetic oligonucleotide
cucuacugggccacggucu

SEQ ID NO: 3128069 - RNA, 19 nt, Artificial Sequence
  Description of Artificial Sequence: Synthetic oligonucleotide
gauccuccacagacacaag

SEQ ID NO: 3128070 - RNA, 19 nt, Artificial Sequence
  Description of Artificial Sequence: Synthetic oligonucleotide
ugccucuacggaugucguc

SEQ ID NO: 3128071 - RNA, 19 nt, Artificial Sequence
  Description of Artificial Sequence: Synthetic oligonucleotide
gccucuacggaugucguca

SEQ ID NO: 3128072 - RNA, 19 nt, Artificial Sequence
  Description of Artificial Sequence: Synthetic oligonucleotide
ucgcaccaggcaccaggca

SEQ ID NO: 3128073 - RNA, 19 nt, Artificial Sequence
  Description of Artificial Sequence: Synthetic oligonucleotide
gcucguuuagcacggccuc

SEQ ID NO: 3128074 - RNA, 19 nt, Artificial Sequence
  Description of Artificial Sequence: Synthetic oligonucleotide
ccuccacagacacaagcuc

SEQ ID NO: 3128075 - RNA, 19 nt, Artificial Sequence
  Description of Artificial Sequence: Synthetic oligonucleotide
caacuccuccaggagcaug

SEQ ID NO: 3128076 - RNA, 19 nt, Artificial Sequence
  Description of Artificial Sequence: Synthetic oligonucleotide
gcucuacugggccacgguc

SEQ ID NO: 3128077 - RNA, 19 nt, Artificial Sequence
  Description of Artificial Sequence: Synthetic oligonucleotide
cuacggaugucgucauugu

SEQ ID NO: 3128078 - RNA, 19 nt, Artificial Sequence
  Description of Artificial Sequence: Synthetic oligonucleotide
acagagccagcugccugcu

SEQ ID NO: 3128079 - RNA, 19 nt, Artificial Sequence
  Description of Artificial Sequence: Synthetic oligonucleotide
caccaggcaccaggcauac

SEQ ID NO: 3128080 - RNA, 19 nt, Artificial Sequence
  Description of Artificial Sequence: Synthetic oligonucleotide
caccgccccugcaagucuc

SEQ ID NO: 3128081 - RNA, 19 nt, Artificial Sequence
  Description of Artificial Sequence: Synthetic oligonucleotide
ccaggcauacucaaacugu

SEQ ID NO: 3128082 - RNA, 19 nt, Artificial Sequence
  Description of Artificial Sequence: Synthetic oligonucleotide
caagcucguuuagcacggc

SEQ ID NO: 3128083 - RNA, 19 nt, Artificial Sequence
  Description of Artificial Sequence: Synthetic oligonucleotide
augccucuacggaugucgu

SEQ ID NO: 3128084 - RNA, 19 nt, Artificial Sequence
  Description of Artificial Sequence: Synthetic oligonucleotide
cagauccuccacagacaca

SEQ ID NO: 3128085 - RNA, 19 nt, Artificial Sequence
  Description of Artificial Sequence: Synthetic oligonucleotide
caccaggcauacucaaacu

SEQ ID NO: 3128086 - RNA, 19 nt, Artificial Sequence
  Description of Artificial Sequence: Synthetic oligonucleotide
gcaugaugccucuacggau

SEQ ID NO: 3128087 - RNA, 19 nt, Artificial Sequence
  Description of Artificial Sequence: Synthetic oligonucleotide
agggcucuacugggccacg

SEQ ID NO: 3128088 - RNA, 19 nt, Artificial Sequence
  Description of Artificial Sequence: Synthetic oligonucleotide
ccuccauggccaccgcccc

SEQ ID NO: 3128089 - RNA, 19 nt, Artificial Sequence
  Description of Artificial Sequence: Synthetic oligonucleotide
cacagacacaagcucguuu

SEQ ID NO: 3128090 - RNA, 19 nt, Artificial Sequence
  Description of Artificial Sequence: Synthetic oligonucleotide
cuuucgcaccaggcaccag

SEQ ID NO: 3128091 - RNA, 19 nt, Artificial Sequence
  Description of Artificial Sequence: Synthetic oligonucleotide
cgucauuguauuuugcuuu

SEQ ID NO: 3128092 - RNA, 19 nt, Artificial Sequence
  Description of Artificial Sequence: Synthetic oligonucleotide
gccugcucagacugaaacu

SEQ ID NO: 3128093 - RNA, 19 nt, Artificial Sequence
  Description of Artificial Sequence: Synthetic oligonucleotide
gggcucuacugggccacgg

SEQ ID NO: 3128094 - RNA, 19 nt, Artificial Sequence
  Description of Artificial Sequence: Synthetic oligonucleotide
ccugcaagucucacacuaa

SEQ ID NO: 3128095 - RNA, 19 nt, Artificial Sequence
  Description of Artificial Sequence: Synthetic oligonucleotide
gcuuucgcaccaggcacca

SEQ ID NO: 3128096 - RNA, 19 nt, Artificial Sequence
  Description of Artificial Sequence: Synthetic oligonucleotide
cacggccuccauggccacc

SEQ ID NO: 3128097 - RNA, 19 nt, Artificial Sequence
  Description of Artificial Sequence: Synthetic oligonucleotide
cuccaggagcaugaugccu

SEQ ID NO: 3128098 - RNA, 19 nt, Artificial Sequence
  Description of Artificial Sequence: Synthetic oligonucleotide
cugccugcucagacugaaa

SEQ ID NO: 3128099 - RNA, 19 nt, Artificial Sequence
  Description of Artificial Sequence: Synthetic oligonucleotide
cauggccaccgccccugca

SEQ ID NO: 3128100 - RNA, 19 nt, Artificial Sequence
  Description of Artificial Sequence: Synthetic oligonucleotide
ccugcucagacugaaacuu

SEQ ID NO: 3128101 - RNA, 19 nt, Artificial Sequence
  Description of Artificial Sequence: Synthetic oligonucleotide
agcugccugcucagacuga

SEQ ID NO: 3128102 - RNA, 19 nt, Artificial Sequence
  Description of Artificial Sequence: Synthetic oligonucleotide
cagagccagcugccugcuc

SEQ ID NO: 3128103 - RNA, 19 nt, Artificial Sequence
  Description of Artificial Sequence: Synthetic oligonucleotide
ggcaccaggcauacucaaa

SEQ ID NO: 3128104 - RNA, 19 nt, Artificial Sequence
  Description of Artificial Sequence: Synthetic oligonucleotide
gccaccgccccugcaaguc

SEQ ID NO: 3128105 - RNA, 19 nt, Artificial Sequence
  Description of Artificial Sequence: Synthetic oligonucleotide
agccagcugccugcucaga

SEQ ID NO: 3128106 - RNA, 19 nt, Artificial Sequence
  Description of Artificial Sequence: Synthetic oligonucleotide
ggaugucgucauuguauuu

SEQ ID NO: 3128107 - RNA, 19 nt, Artificial Sequence
  Description of Artificial Sequence: Synthetic oligonucleotide
accgccccugcaagucuca

SEQ ID NO: 3128108 - RNA, 19 nt, Artificial Sequence
  Description of Artificial Sequence: Synthetic oligonucleotide
gucucacacuaagggcucu

SEQ ID NO: 3128109 - RNA, 19 nt, Artificial Sequence
  Description of Artificial Sequence: Synthetic oligonucleotide
ggcucuacugggccacggu

SEQ ID NO: 3128110 - RNA, 19 nt, Artificial Sequence
  Description of Artificial Sequence: Synthetic oligonucleotide
gcaccaggcaccaggcaua

SEQ ID NO: 3128111 - RNA, 19 nt, Artificial Sequence
  Description of Artificial Sequence: Synthetic oligonucleotide
gcucagacugaaacuuccu

SEQ ID NO: 3128112 - RNA, 19 nt, Artificial Sequence
  Description of Artificial Sequence: Synthetic oligonucleotide
accaggcaccaggcauacu

SEQ ID NO: 3128113 - RNA, 19 nt, Artificial Sequence
  Description of Artificial Sequence: Synthetic oligonucleotide
ccagcugccugcucagacu

SEQ ID NO: 3128114 - RNA, 19 nt, Artificial Sequence
  Description of Artificial Sequence: Synthetic oligonucleotide
ccauggccaccgccccugc

SEQ ID NO: 3128115 - RNA, 19 nt, Artificial Sequence
  Description of Artificial Sequence: Synthetic oligonucleotide
ccaggagcaugaugccucu

SEQ ID NO: 3128116 - RNA, 19 nt, Artificial Sequence
  Description of Artificial Sequence: Synthetic oligonucleotide
cggaugucgucauuguauu

SEQ ID NO: 3128117 - RNA, 19 nt, Artificial Sequence
  Description of Artificial Sequence: Synthetic oligonucleotide
cucuacggaugucgucauu

SEQ ID NO: 3128118 - RNA, 19 nt, Artificial Sequence
  Description of Artificial Sequence: Synthetic oligonucleotide
cgcaccaggcaccaggcau

SEQ ID NO: 3128119 - RNA, 19 nt, Artificial Sequence
  Description of Artificial Sequence: Synthetic oligonucleotide
caggagcaugaugccucua

SEQ ID NO: 3128120 - RNA, 19 nt, Artificial Sequence
  Description of Artificial Sequence: Synthetic oligonucleotide
cgccccugcaagucucaca

SEQ ID NO: 3128121 - RNA, 19 nt, Artificial Sequence
  Description of Artificial Sequence: Synthetic oligonucleotide
ggccaccgccccugcaagu

SEQ ID NO: 3128122 - RNA, 19 nt, Artificial Sequence
  Description of Artificial Sequence: Synthetic oligonucleotide
ccucuacggaugucgucau

SEQ ID NO: 3128123 - RNA, 19 nt, Artificial Sequence
  Description of Artificial Sequence: Synthetic oligonucleotide
ccgccccugcaagucucac

SEQ ID NO: 3128124 - RNA, 19 nt, Artificial Sequence
  Description of Artificial Sequence: Synthetic oligonucleotide
ccaccgccccugcaagucu

SEQ ID NO: 3128125 - RNA, 19 nt, Artificial Sequence
  Description of Artificial Sequence: Synthetic oligonucleotide
ccccugcaagucucacacu

SEQ ID NO: 3128126 - RNA, 19 nt, Artificial Sequence
  Description of Artificial Sequence: Synthetic oligonucleotide
cggccuccauggccaccgc

SEQ ID NO: 3128127 - RNA, 19 nt, Artificial Sequence
  Description of Artificial Sequence: Synthetic oligonucleotide
cguuuagcacggccuccau

SEQ ID NO: 3128128 - RNA, 19 nt, Artificial Sequence
  Description of Artificial Sequence: Synthetic oligonucleotide
aggcugguauguuagaacc

SEQ ID NO: 3128129 - RNA, 19 nt, Artificial Sequence
  Description of Artificial Sequence: Synthetic oligonucleotide
auguuagaaccuucgauac

SEQ ID NO: 3128130 - RNA, 19 nt, Artificial Sequence
  Description of Artificial Sequence: Synthetic oligonucleotide
uuuucuuucugcccagggg

SEQ ID NO: 3128131 - RNA, 19 nt, Artificial Sequence
  Description of Artificial Sequence: Synthetic oligonucleotide
uauguuagaaccuucgaua

SEQ ID NO: 3128132 - RNA, 19 nt, Artificial Sequence
  Description of Artificial Sequence: Synthetic oligonucleotide
aucuaggauguccaggagc

SEQ ID NO: 3128133 - RNA, 19 nt, Artificial Sequence
  Description of Artificial Sequence: Synthetic oligonucleotide
acagggauccccuuccugc

SEQ ID NO: 3128134 - RNA, 19 nt, Artificial Sequence
  Description of Artificial Sequence: Synthetic oligonucleotide
ugguauguuagaaccuucg

SEQ ID NO: 3128135 - RNA, 19 nt, Artificial Sequence
  Description of Artificial Sequence: Synthetic oligonucleotide
uucagcuucuccuuucggg

SEQ ID NO: 3128136 - RNA, 19 nt, Artificial Sequence
  Description of Artificial Sequence: Synthetic oligonucleotide
gaaccuucgauacagggca

SEQ ID NO: 3128137 - RNA, 19 nt, Artificial Sequence
  Description of Artificial Sequence: Synthetic oligonucleotide
guuagaaccuucgauacag

SEQ ID NO: 3128138 - RNA, 19 nt, Artificial Sequence
  Description of Artificial Sequence: Synthetic oligonucleotide
gcuuggagcagauauagcg

SEQ ID NO: 3128139 - RNA, 19 nt, Artificial Sequence
  Description of Artificial Sequence: Synthetic oligonucleotide
uucuguuucagcuucuccu

SEQ ID NO: 3128140 - RNA, 19 nt, Artificial Sequence
  Description of Artificial Sequence: Synthetic oligonucleotide
uagaaccuucgauacaggg

SEQ ID NO: 3128141 - RNA, 19 nt, Artificial Sequence
  Description of Artificial Sequence: Synthetic oligonucleotide
agcucagccagcucgagag

SEQ ID NO: 3128142 - RNA, 19 nt, Artificial Sequence
  Description of Artificial Sequence: Synthetic oligonucleotide
gugaaggugaugcacuggg

SEQ ID NO: 3128143 - RNA, 19 nt, Artificial Sequence
  Description of Artificial Sequence: Synthetic oligonucleotide
ucagcuucuccuuucgggc

SEQ ID NO: 3128144 - RNA, 19 nt, Artificial Sequence
  Description of Artificial Sequence: Synthetic oligonucleotide
aguugugaaggugaugcac

SEQ ID NO: 3128145 - RNA, 19 nt, Artificial Sequence
  Description of Artificial Sequence: Synthetic oligonucleotide
ucuccuuucgggcugcggc

SEQ ID NO: 3128146 - RNA, 19 nt, Artificial Sequence
  Description of Artificial Sequence: Synthetic oligonucleotide
ugaugcacugggcaucuag

SEQ ID NO: 3128147 - RNA, 19 nt, Artificial Sequence
  Description of Artificial Sequence: Synthetic oligonucleotide
uacagggcaggcuuggagc

SEQ ID NO: 3128148 - RNA, 19 nt, Artificial Sequence
  Description of Artificial Sequence: Synthetic oligonucleotide
uucgauacagggcaggcuu

SEQ ID NO: 3128149 - RNA, 19 nt, Artificial Sequence
  Description of Artificial Sequence: Synthetic oligonucleotide
uuagaaccuucgauacagg

SEQ ID NO: 3128150 - RNA, 19 nt, Artificial Sequence
  Description of Artificial Sequence: Synthetic oligonucleotide
gaaggugaugcacugggca

SEQ ID NO: 3128151 - RNA, 19 nt, Artificial Sequence
  Description of Artificial Sequence: Synthetic oligonucleotide
uguuagaaccuucgauaca

SEQ ID NO: 3128152 - RNA, 19 nt, Artificial Sequence
  Description of Artificial Sequence: Synthetic oligonucleotide
ugggcaucuaggaugucca

SEQ ID NO: 3128153 - RNA, 19 nt, Artificial Sequence
  Description of Artificial Sequence: Synthetic oligonucleotide
gcaguugugaaggugaugc

SEQ ID NO: 3128154 - RNA, 19 nt, Artificial Sequence
  Description of Artificial Sequence: Synthetic oligonucleotide
aaggugaugcacugggcau

SEQ ID NO: 3128155 - RNA, 19 nt, Artificial Sequence
  Description of Artificial Sequence: Synthetic oligonucleotide
auacagggcaggcuuggag

SEQ ID NO: 3128156 - RNA, 19 nt, Artificial Sequence
  Description of Artificial Sequence: Synthetic oligonucleotide
uugugaaggugaugcacug

SEQ ID NO: 3128157 - RNA, 19 nt, Artificial Sequence
  Description of Artificial Sequence: Synthetic oligonucleotide
gaggcugguauguuagaac

SEQ ID NO: 3128158 - RNA, 19 nt, Artificial Sequence
  Description of Artificial Sequence: Synthetic oligonucleotide
ugugaaggugaugcacugg

SEQ ID NO: 3128159 - RNA, 19 nt, Artificial Sequence
  Description of Artificial Sequence: Synthetic oligonucleotide
ugaaggugaugcacugggc

SEQ ID NO: 3128160 - RNA, 19 nt, Artificial Sequence
  Description of Artificial Sequence: Synthetic oligonucleotide
uguagcucagccagcucga

SEQ ID NO: 3128161 - RNA, 19 nt, Artificial Sequence
  Description of Artificial Sequence: Synthetic oligonucleotide
aggcuuggagcagauauag

SEQ ID NO: 3128162 - RNA, 19 nt, Artificial Sequence
  Description of Artificial Sequence: Synthetic oligonucleotide
uugcccauggccacaggga

SEQ ID NO: 3128163 - RNA, 19 nt, Artificial Sequence
  Description of Artificial Sequence: Synthetic oligonucleotide
aucauuucugauuccuuuu

SEQ ID NO: 3128164 - RNA, 19 nt, Artificial Sequence
  Description of Artificial Sequence: Synthetic oligonucleotide
uucuuucugcccaggggcu

SEQ ID NO: 3128165 - RNA, 19 nt, Artificial Sequence
  Description of Artificial Sequence: Synthetic oligonucleotide
ucgcuucuguuucagcuuc

SEQ ID NO: 3128166 - RNA, 19 nt, Artificial Sequence
  Description of Artificial Sequence: Synthetic oligonucleotide
ugcacugggcaucuaggau

SEQ ID NO: 3128167 - RNA, 19 nt, Artificial Sequence
  Description of Artificial Sequence: Synthetic oligonucleotide
ucgauacagggcaggcuug

SEQ ID NO: 3128168 - RNA, 19 nt, Artificial Sequence
  Description of Artificial Sequence: Synthetic oligonucleotide
aggauguccaggagcuugc

SEQ ID NO: 3128169 - RNA, 19 nt, Artificial Sequence
  Description of Artificial Sequence: Synthetic oligonucleotide
gcugcggcaguugugaagg

SEQ ID NO: 3128170 - RNA, 19 nt, Artificial Sequence
  Description of Artificial Sequence: Synthetic oligonucleotide
cugggcaucuaggaugucc

SEQ ID NO: 3128171 - RNA, 19 nt, Artificial Sequence
  Description of Artificial Sequence: Synthetic oligonucleotide
gcacugggcaucuaggaug

SEQ ID NO: 3128172 - RNA, 19 nt, Artificial Sequence
  Description of Artificial Sequence: Synthetic oligonucleotide
guauguuagaaccuucgau

SEQ ID NO: 3128173 - RNA, 19 nt, Artificial Sequence
  Description of Artificial Sequence: Synthetic oligonucleotide
acagggcaggcuuggagca

SEQ ID NO: 3128174 - RNA, 19 nt, Artificial Sequence
  Description of Artificial Sequence: Synthetic oligonucleotide
augcacugggcaucuagga

SEQ ID NO: 3128175 - RNA, 19 nt, Artificial Sequence
  Description of Artificial Sequence: Synthetic oligonucleotide
agcucgagaggcugguaug

SEQ ID NO: 3128176 - RNA, 19 nt, Artificial Sequence
  Description of Artificial Sequence: Synthetic oligonucleotide
cucagccagcucgagaggc

SEQ ID NO: 3128177 - RNA, 19 nt, Artificial Sequence
  Description of Artificial Sequence: Synthetic oligonucleotide
aggugaugcacugggcauc

SEQ ID NO: 3128178 - RNA, 19 nt, Artificial Sequence
  Description of Artificial Sequence: Synthetic oligonucleotide
cugguauguuagaaccuuc

SEQ ID NO: 3128179 - RNA, 19 nt, Artificial Sequence
  Description of Artificial Sequence: Synthetic oligonucleotide
uccgccuguagcucagcca

SEQ ID NO: 3128180 - RNA, 19 nt, Artificial Sequence
  Description of Artificial Sequence: Synthetic oligonucleotide
ucagccagcucgagaggcu

SEQ ID NO: 3128181 - RNA, 19 nt, Artificial Sequence
  Description of Artificial Sequence: Synthetic oligonucleotide
ucgagaggcugguauguua

SEQ ID NO: 3128182 - RNA, 19 nt, Artificial Sequence
  Description of Artificial Sequence: Synthetic oligonucleotide
gguauguuagaaccuucga

SEQ ID NO: 3128183 - RNA, 19 nt, Artificial Sequence
  Description of Artificial Sequence: Synthetic oligonucleotide
ggcaucuaggauguccagg

SEQ ID NO: 3128184 - RNA, 19 nt, Artificial Sequence
  Description of Artificial Sequence: Synthetic oligonucleotide
accuucgauacagggcagg

SEQ ID NO: 3128185 - RNA, 19 nt, Artificial Sequence
  Description of Artificial Sequence: Synthetic oligonucleotide
caucuaggauguccaggag

SEQ ID NO: 3128186 - RNA, 19 nt, Artificial Sequence
  Description of Artificial Sequence: Synthetic oligonucleotide
uucgggcugcggcaguugu

SEQ ID NO: 3128187 - RNA, 19 nt, Artificial Sequence
  Description of Artificial Sequence: Synthetic oligonucleotide
ucuuucugcccaggggcug

SEQ ID NO: 3128188 - RNA, 19 nt, Artificial Sequence
  Description of Artificial Sequence: Synthetic oligonucleotide
ugcggcaguugugaaggug

SEQ ID NO: 3128189 - RNA, 19 nt, Artificial Sequence
  Description of Artificial Sequence: Synthetic oligonucleotide
agaggcugguauguuagaa

SEQ ID NO: 3128190 - RNA, 19 nt, Artificial Sequence
  Description of Artificial Sequence: Synthetic oligonucleotide
ucugcccaggggcugccgu

SEQ ID NO: 3128191 - RNA, 19 nt, Artificial Sequence
  Description of Artificial Sequence: Synthetic oligonucleotide
guugugaaggugaugcacu

SEQ ID NO: 3128192 - RNA, 19 nt, Artificial Sequence
  Description of Artificial Sequence: Synthetic oligonucleotide
cuuucugcccaggggcugc

SEQ ID NO: 3128193 - RNA, 19 nt, Artificial Sequence
  Description of Artificial Sequence: Synthetic oligonucleotide
uccuuucgggcugcggcag

SEQ ID NO: 3128194 - RNA, 19 nt, Artificial Sequence
  Description of Artificial Sequence: Synthetic oligonucleotide
aaccuucgauacagggcag

SEQ ID NO: 3128195 - RNA, 19 nt, Artificial Sequence
  Description of Artificial Sequence: Synthetic oligonucleotide
uucuccuuucgggcugcgg

SEQ ID NO: 3128196 - RNA, 19 nt, Artificial Sequence
  Description of Artificial Sequence: Synthetic oligonucleotide
ugcccaggggcugccgucg

SEQ ID NO: 3128197 - RNA, 19 nt, Artificial Sequence
  Description of Artificial Sequence: Synthetic oligonucleotide
cauggccacagggaucccc

SEQ ID NO: 3128198 - RNA, 19 nt, Artificial Sequence
  Description of Artificial Sequence: Synthetic oligonucleotide
cugccgucgcuucuguuuc

SEQ ID NO: 3128199 - RNA, 19 nt, Artificial Sequence
  Description of Artificial Sequence: Synthetic oligonucleotide
uguccaggagcuugcccau

SEQ ID NO: 3128200 - RNA, 19 nt, Artificial Sequence
  Description of Artificial Sequence: Synthetic oligonucleotide
ccgccuguagcucagccag

SEQ ID NO: 3128201 - RNA, 19 nt, Artificial Sequence
  Description of Artificial Sequence: Synthetic oligonucleotide
cgagaggcugguauguuag

SEQ ID NO: 3128202 - RNA, 19 nt, Artificial Sequence
  Description of Artificial Sequence: Synthetic oligonucleotide
cccauggccacagggaucc

SEQ ID NO: 3128203 - RNA, 19 nt, Artificial Sequence
  Description of Artificial Sequence: Synthetic oligonucleotide
cacagggauccccuuccug

SEQ ID NO: 3128204 - RNA, 19 nt, Artificial Sequence
  Description of Artificial Sequence: Synthetic oligonucleotide
uuccugcuucagcuccgcc

SEQ ID NO: 3128205 - RNA, 19 nt, Artificial Sequence
  Description of Artificial Sequence: Synthetic oligonucleotide
cuccgccuguagcucagcc

SEQ ID NO: 3128206 - RNA, 19 nt, Artificial Sequence
  Description of Artificial Sequence: Synthetic oligonucleotide
gagaggcugguauguuaga

SEQ ID NO: 3128207 - RNA, 19 nt, Artificial Sequence
  Description of Artificial Sequence: Synthetic oligonucleotide
ucgggcugcggcaguugug

SEQ ID NO: 3128208 - RNA, 19 nt, Artificial Sequence
  Description of Artificial Sequence: Synthetic oligonucleotide
ucagcuccgccuguagcuc

SEQ ID NO: 3128209 - RNA, 19 nt, Artificial Sequence
  Description of Artificial Sequence: Synthetic oligonucleotide
gcaggcuuggagcagauau

SEQ ID NO: 3128210 - RNA, 19 nt, Artificial Sequence
  Description of Artificial Sequence: Synthetic oligonucleotide
auggccacagggauccccu

SEQ ID NO: 3128211 - RNA, 19 nt, Artificial Sequence
  Description of Artificial Sequence: Synthetic oligonucleotide
cuccuuucgggcugcggca

SEQ ID NO: 3128212 - RNA, 19 nt, Artificial Sequence
  Description of Artificial Sequence: Synthetic oligonucleotide
uuucgggcugcggcaguug

SEQ ID NO: 3128213 - RNA, 19 nt, Artificial Sequence
  Description of Artificial Sequence: Synthetic oligonucleotide
gauacagggcaggcuugga

SEQ ID NO: 3128214 - RNA, 19 nt, Artificial Sequence
  Description of Artificial Sequence: Synthetic oligonucleotide
caguugugaaggugaugca

SEQ ID NO: 3128215 - RNA, 19 nt, Artificial Sequence
  Description of Artificial Sequence: Synthetic oligonucleotide
guagcucagccagcucgag

SEQ ID NO: 3128216 - RNA, 19 nt, Artificial Sequence
  Description of Artificial Sequence: Synthetic oligonucleotide
gauccccuuccugcuucag

SEQ ID NO: 3128217 - RNA, 19 nt, Artificial Sequence
  Description of Artificial Sequence: Synthetic oligonucleotide
uuucugcccaggggcugcc

SEQ ID NO: 3128218 - RNA, 19 nt, Artificial Sequence
  Description of Artificial Sequence: Synthetic oligonucleotide
gcggcaguugugaagguga

SEQ ID NO: 3128219 - RNA, 19 nt, Artificial Sequence
  Description of Artificial Sequence: Synthetic oligonucleotide
ccuucgauacagggcaggc

SEQ ID NO: 3128220 - RNA, 19 nt, Artificial Sequence
  Description of Artificial Sequence: Synthetic oligonucleotide
ugccgucgcuucuguuuca

SEQ ID NO: 3128221 - RNA, 19 nt, Artificial Sequence
  Description of Artificial Sequence: Synthetic oligonucleotide
cagccagcucgagaggcug

SEQ ID NO: 3128222 - RNA, 19 nt, Artificial Sequence
  Description of Artificial Sequence: Synthetic oligonucleotide
caggcuuggagcagauaua

SEQ ID NO: 3128223 - RNA, 19 nt, Artificial Sequence
  Description of Artificial Sequence: Synthetic oligonucleotide
uucugcccaggggcugccg

SEQ ID NO: 3128224 - RNA, 19 nt, Artificial Sequence
  Description of Artificial Sequence: Synthetic oligonucleotide
gccuaucauuucugauucc

SEQ ID NO: 3128225 - RNA, 19 nt, Artificial Sequence
  Description of Artificial Sequence: Synthetic oligonucleotide
gcucagccagcucgagagg

SEQ ID NO: 3128226 - RNA, 19 nt, Artificial Sequence
  Description of Artificial Sequence: Synthetic oligonucleotide
gggcaucuaggauguccag

SEQ ID NO: 3128227 - RNA, 19 nt, Artificial Sequence
  Description of Artificial Sequence: Synthetic oligonucleotide
gggauccccuuccugcuuc

SEQ ID NO: 3128228 - RNA, 19 nt, Artificial Sequence
  Description of Artificial Sequence: Synthetic oligonucleotide
aggggcugccgucgcuucu

SEQ ID NO: 3128229 - RNA, 19 nt, Artificial Sequence
  Description of Artificial Sequence: Synthetic oligonucleotide
ugcuucagcuccgccugua

SEQ ID NO: 3128230 - RNA, 19 nt, Artificial Sequence
  Description of Artificial Sequence: Synthetic oligonucleotide
gucgcuucuguuucagcuu

SEQ ID NO: 3128231 - RNA, 19 nt, Artificial Sequence
  Description of Artificial Sequence: Synthetic oligonucleotide
agggauccccuuccugcuu

SEQ ID NO: 3128232 - RNA, 19 nt, Artificial Sequence
  Description of Artificial Sequence: Synthetic oligonucleotide
ggcaguugugaaggugaug

SEQ ID NO: 3128233 - RNA, 19 nt, Artificial Sequence
  Description of Artificial Sequence: Synthetic oligonucleotide
cugcccaggggcugccguc

SEQ ID NO: 3128234 - RNA, 19 nt, Artificial Sequence
  Description of Artificial Sequence: Synthetic oligonucleotide
ggcuuggagcagauauagc

SEQ ID NO: 3128235 - RNA, 19 nt, Artificial Sequence
  Description of Artificial Sequence: Synthetic oligonucleotide
agcuccgccuguagcucag

SEQ ID NO: 3128236 - RNA, 19 nt, Artificial Sequence
  Description of Artificial Sequence: Synthetic oligonucleotide
ccuaucauuucugauuccu

SEQ ID NO: 3128237 - RNA, 19 nt, Artificial Sequence
  Description of Artificial Sequence: Synthetic oligonucleotide
cuucuccuuucgggcugcg

SEQ ID NO: 3128238 - RNA, 19 nt, Artificial Sequence
  Description of Artificial Sequence: Synthetic oligonucleotide
cagggcaggcuuggagcag

SEQ ID NO: 3128239 - RNA, 19 nt, Artificial Sequence
  Description of Artificial Sequence: Synthetic oligonucleotide
caggggcugccgucgcuuc

SEQ ID NO: 3128240 - RNA, 19 nt, Artificial Sequence
  Description of Artificial Sequence: Synthetic oligonucleotide
cgauacagggcaggcuugg

SEQ ID NO: 3128241 - RNA, 19 nt, Artificial Sequence
  Description of Artificial Sequence: Synthetic oligonucleotide
ggccacagggauccccuuc

SEQ ID NO: 3128242 - RNA, 19 nt, Artificial Sequence
  Description of Artificial Sequence: Synthetic oligonucleotide
cagcuccgccuguagcuca

SEQ ID NO: 3128243 - RNA, 19 nt, Artificial Sequence
  Description of Artificial Sequence: Synthetic oligonucleotide
gagcuugcccauggccaca

SEQ ID NO: 3128244 - RNA, 19 nt, Artificial Sequence
  Description of Artificial Sequence: Synthetic oligonucleotide
cuucgauacagggcaggcu

SEQ ID NO: 3128245 - RNA, 19 nt, Artificial Sequence
  Description of Artificial Sequence: Synthetic oligonucleotide
cagggauccccuuccugcu

SEQ ID NO: 3128246 - RNA, 19 nt, Artificial Sequence
  Description of Artificial Sequence: Synthetic oligonucleotide
cagcucgagaggcugguau

SEQ ID NO: 3128247 - RNA, 19 nt, Artificial Sequence
  Description of Artificial Sequence: Synthetic oligonucleotide
guccaggagcuugcccaug

SEQ ID NO: 3128248 - RNA, 19 nt, Artificial Sequence
  Description of Artificial Sequence: Synthetic oligonucleotide
gccgucgcuucuguuucag

SEQ ID NO: 3128249 - RNA, 19 nt, Artificial Sequence
  Description of Artificial Sequence: Synthetic oligonucleotide
gcugguauguuagaaccuu

SEQ ID NO: 3128250 - RNA, 19 nt, Artificial Sequence
  Description of Artificial Sequence: Synthetic oligonucleotide
gcuucuccuuucgggcugc

SEQ ID NO: 3128251 - RNA, 19 nt, Artificial Sequence
  Description of Artificial Sequence: Synthetic oligonucleotide
uggccacagggauccccuu

SEQ ID NO: 3128252 - RNA, 19 nt, Artificial Sequence
  Description of Artificial Sequence: Synthetic oligonucleotide
ggugaugcacugggcaucu

SEQ ID NO: 3128253 - RNA, 19 nt, Artificial Sequence
  Description of Artificial Sequence: Synthetic oligonucleotide
ggauccccuuccugcuuca

SEQ ID NO: 3128254 - RNA, 19 nt, Artificial Sequence
  Description of Artificial Sequence: Synthetic oligonucleotide
ggggcugccgucgcuucug

SEQ ID NO: 3128255 - RNA, 19 nt, Artificial Sequence
  Description of Artificial Sequence: Synthetic oligonucleotide
cuguuucagcuucuccuuu

SEQ ID NO: 3128256 - RNA, 19 nt, Artificial Sequence
  Description of Artificial Sequence: Synthetic oligonucleotide
ccgucgcuucuguuucagc

SEQ ID NO: 3128257 - RNA, 19 nt, Artificial Sequence
  Description of Artificial Sequence: Synthetic oligonucleotide
ccuguagcucagccagcuc

SEQ ID NO: 3128258 - RNA, 19 nt, Artificial Sequence
  Description of Artificial Sequence: Synthetic oligonucleotide
gcucgagaggcugguaugu

SEQ ID NO: 3128259 - RNA, 19 nt, Artificial Sequence
  Description of Artificial Sequence: Synthetic oligonucleotide
gccuguagcucagccagcu

SEQ ID NO: 3128260 - RNA, 19 nt, Artificial Sequence
  Description of Artificial Sequence: Synthetic oligonucleotide
gcccauggccacagggauc

SEQ ID NO: 3128261 - RNA, 19 nt, Artificial Sequence
  Description of Artificial Sequence: Synthetic oligonucleotide
cgccuguagcucagccagc

SEQ ID NO: 3128262 - RNA, 19 nt, Artificial Sequence
  Description of Artificial Sequence: Synthetic oligonucleotide
cuuucgggcugcggcaguu

SEQ ID NO: 3128263 - RNA, 19 nt, Artificial Sequence
  Description of Artificial Sequence: Synthetic oligonucleotide
gcccaggggcugccgucgc

SEQ ID NO: 3128264 - RNA, 19 nt, Artificial Sequence
  Description of Artificial Sequence: Synthetic oligonucleotide
cucgagaggcugguauguu

SEQ ID NO: 3128265 - RNA, 19 nt, Artificial Sequence
  Description of Artificial Sequence: Synthetic oligonucleotide
cugcggcaguugugaaggu

SEQ ID NO: 3128266 - RNA, 19 nt, Artificial Sequence
  Description of Artificial Sequence: Synthetic oligonucleotide
cugcuucagcuccgccugu

SEQ ID NO: 3128267 - RNA, 19 nt, Artificial Sequence
  Description of Artificial Sequence: Synthetic oligonucleotide
gggcugcggcaguugugaa

SEQ ID NO: 3128268 - RNA, 19 nt, Artificial Sequence
  Description of Artificial Sequence: Synthetic oligonucleotide
gcuccgccuguagcucagc

SEQ ID NO: 3128269 - RNA, 19 nt, Artificial Sequence
  Description of Artificial Sequence: Synthetic oligonucleotide
cuaggauguccaggagcuu

SEQ ID NO: 3128270 - RNA, 19 nt, Artificial Sequence
  Description of Artificial Sequence: Synthetic oligonucleotide
gugaugcacugggcaucua

SEQ ID NO: 3128271 - RNA, 19 nt, Artificial Sequence
  Description of Artificial Sequence: Synthetic oligonucleotide
gccagcucgagaggcuggu

SEQ ID NO: 3128272 - RNA, 19 nt, Artificial Sequence
  Description of Artificial Sequence: Synthetic oligonucleotide
ggcaggcuuggagcagaua

SEQ ID NO: 3128273 - RNA, 19 nt, Artificial Sequence
  Description of Artificial Sequence: Synthetic oligonucleotide
gggcugccgucgcuucugu

SEQ ID NO: 3128274 - RNA, 19 nt, Artificial Sequence
  Description of Artificial Sequence: Synthetic oligonucleotide
ccacagggauccccuuccu

SEQ ID NO: 3128275 - RNA, 19 nt, Artificial Sequence
  Description of Artificial Sequence: Synthetic oligonucleotide
ccuuucgggcugcggcagu

SEQ ID NO: 3128276 - RNA, 19 nt, Artificial Sequence
  Description of Artificial Sequence: Synthetic oligonucleotide
ggcugccgucgcuucuguu

SEQ ID NO: 3128277 - RNA, 19 nt, Artificial Sequence
  Description of Artificial Sequence: Synthetic oligonucleotide
ccagcucgagaggcuggua

SEQ ID NO: 3128278 - RNA, 19 nt, Artificial Sequence
  Description of Artificial Sequence: Synthetic oligonucleotide
cggcaguugugaaggugau

SEQ ID NO: 3128279 - RNA, 19 nt, Artificial Sequence
  Description of Artificial Sequence: Synthetic oligonucleotide
ccaggggcugccgucgcuu

SEQ ID NO: 3128280 - RNA, 19 nt, Artificial Sequence
  Description of Artificial Sequence: Synthetic oligonucleotide
cccaggggcugccgucgcu

SEQ ID NO: 3128281 - RNA, 19 nt, Artificial Sequence
  Description of Artificial Sequence: Synthetic oligonucleotide
agagguuucauauuggcuc

SEQ ID NO: 3128282 - RNA, 19 nt, Artificial Sequence
  Description of Artificial Sequence: Synthetic oligonucleotide
ucagcuauuagucucagcu

SEQ ID NO: 3128283 - RNA, 19 nt, Artificial Sequence
  Description of Artificial Sequence: Synthetic oligonucleotide
agcuauuagucucagcucc

SEQ ID NO: 3128284 - RNA, 19 nt, Artificial Sequence
  Description of Artificial Sequence: Synthetic oligonucleotide
auucauuucagauacaaau

SEQ ID NO: 3128285 - RNA, 19 nt, Artificial Sequence
  Description of Artificial Sequence: Synthetic oligonucleotide
ucuuuuacaccucuucagg

SEQ ID NO: 3128286 - RNA, 19 nt, Artificial Sequence
  Description of Artificial Sequence: Synthetic oligonucleotide
uuaguuuauucucuguugc

SEQ ID NO: 3128287 - RNA, 19 nt, Artificial Sequence
  Description of Artificial Sequence: Synthetic oligonucleotide
acaccgauuuucuagcucc

SEQ ID NO: 3128288 - RNA, 19 nt, Artificial Sequence
  Description of Artificial Sequence: Synthetic oligonucleotide
gauaguuucuucaaauucc

SEQ ID NO: 3128289 - RNA, 19 nt, Artificial Sequence
  Description of Artificial Sequence: Synthetic oligonucleotide
uuuaguuuauucucuguug

SEQ ID NO: 3128290 - RNA, 19 nt, Artificial Sequence
  Description of Artificial Sequence: Synthetic oligonucleotide
uucauauuggcucuuggcu

SEQ ID NO: 3128291 - RNA, 19 nt, Artificial Sequence
  Description of Artificial Sequence: Synthetic oligonucleotide
ugauaguuucuucaaauuc

SEQ ID NO: 3128292 - RNA, 19 nt, Artificial Sequence
  Description of Artificial Sequence: Synthetic oligonucleotide
uguugcuucuuuuacaccu

SEQ ID NO: 3128293 - RNA, 19 nt, Artificial Sequence
  Description of Artificial Sequence: Synthetic oligonucleotide
cuucaaauuccgcacaccg

SEQ ID NO: 3128294 - RNA, 19 nt, Artificial Sequence
  Description of Artificial Sequence: Synthetic oligonucleotide
uuggcuaacagcuccaucu

SEQ ID NO: 3128295 - RNA, 19 nt, Artificial Sequence
  Description of Artificial Sequence: Synthetic oligonucleotide
gguuauucauuucagauac

SEQ ID NO: 3128296 - RNA, 19 nt, Artificial Sequence
  Description of Artificial Sequence: Synthetic oligonucleotide
aguuucuucaaauuccgca

SEQ ID NO: 3128297 - RNA, 19 nt, Artificial Sequence
  Description of Artificial Sequence: Synthetic oligonucleotide
uucuuuuacaccucuucag

SEQ ID NO: 3128298 - RNA, 19 nt, Artificial Sequence
  Description of Artificial Sequence: Synthetic oligonucleotide
uucauuucagauacaaauc

SEQ ID NO: 3128299 - RNA, 19 nt, Artificial Sequence
  Description of Artificial Sequence: Synthetic oligonucleotide
ucugacuccacacuuggcu

SEQ ID NO: 3128300 - RNA, 19 nt, Artificial Sequence
  Description of Artificial Sequence: Synthetic oligonucleotide
ucaaauuccgcacaccgau

SEQ ID NO: 3128301 - RNA, 19 nt, Artificial Sequence
  Description of Artificial Sequence: Synthetic oligonucleotide
uuucauauuggcucuuggc

SEQ ID NO: 3128302 - RNA, 19 nt, Artificial Sequence
  Description of Artificial Sequence: Synthetic oligonucleotide
ucuguugcuucuuuuacac

SEQ ID NO: 3128303 - RNA, 19 nt, Artificial Sequence
  Description of Artificial Sequence: Synthetic oligonucleotide
uuuuaguuuauucucuguu

SEQ ID NO: 3128304 - RNA, 19 nt, Artificial Sequence
  Description of Artificial Sequence: Synthetic oligonucleotide
ucugauaguuucuucaaau

SEQ ID NO: 3128305 - RNA, 19 nt, Artificial Sequence
  Description of Artificial Sequence: Synthetic oligonucleotide
auuuucuagcuccugucuc

SEQ ID NO: 3128306 - RNA, 19 nt, Artificial Sequence
  Description of Artificial Sequence: Synthetic oligonucleotide
uuuuacaccucuucaggug

SEQ ID NO: 3128307 - RNA, 19 nt, Artificial Sequence
  Description of Artificial Sequence: Synthetic oligonucleotide
uuuacaccucuucaggugu

SEQ ID NO: 3128308 - RNA, 19 nt, Artificial Sequence
  Description of Artificial Sequence: Synthetic oligonucleotide
ucuuuuaguuuauucucug

SEQ ID NO: 3128309 - RNA, 19 nt, Artificial Sequence
  Description of Artificial Sequence: Synthetic oligonucleotide
uuauucauuucagauacaa

SEQ ID NO: 3128310 - RNA, 19 nt, Artificial Sequence
  Description of Artificial Sequence: Synthetic oligonucleotide
guuucuucaaauuccgcac

SEQ ID NO: 3128311 - RNA, 19 nt, Artificial Sequence
  Description of Artificial Sequence: Synthetic oligonucleotide
ucaggugucugauaguuuc

SEQ ID NO: 3128312 - RNA, 19 nt, Artificial Sequence
  Description of Artificial Sequence: Synthetic oligonucleotide
auaguuucuucaaauuccg

SEQ ID NO: 3128313 - RNA, 19 nt, Artificial Sequence
  Description of Artificial Sequence: Synthetic oligonucleotide
ugcagguuauucauuucag

SEQ ID NO: 3128314 - RNA, 19 nt, Artificial Sequence
  Description of Artificial Sequence: Synthetic oligonucleotide
cucuucaggugucugauag

SEQ ID NO: 3128315 - RNA, 19 nt, Artificial Sequence
  Description of Artificial Sequence: Synthetic oligonucleotide
ucuuucugcagguuauuca

SEQ ID NO: 3128316 - RNA, 19 nt, Artificial Sequence
  Description of Artificial Sequence: Synthetic oligonucleotide
uuuucuagcuccugucuca

SEQ ID NO: 3128317 - RNA, 19 nt, Artificial Sequence
  Description of Artificial Sequence: Synthetic oligonucleotide
agcuccugcuguuuauucc

SEQ ID NO: 3128318 - RNA, 19 nt, Artificial Sequence
  Description of Artificial Sequence: Synthetic oligonucleotide
uuucuucaaauuccgcaca

SEQ ID NO: 3128319 - RNA, 19 nt, Artificial Sequence
  Description of Artificial Sequence: Synthetic oligonucleotide
auuucagauacaaaucucu

SEQ ID NO: 3128320 - RNA, 19 nt, Artificial Sequence
  Description of Artificial Sequence: Synthetic oligonucleotide
ugcagagguuucauauugg

SEQ ID NO: 3128321 - RNA, 19 nt, Artificial Sequence
  Description of Artificial Sequence: Synthetic oligonucleotide
uucggcucagcuauuaguc

SEQ ID NO: 3128322 - RNA, 19 nt, Artificial Sequence
  Description of Artificial Sequence: Synthetic oligonucleotide
aaauuccgcacaccgauuu

SEQ ID NO: 3128323 - RNA, 19 nt, Artificial Sequence
  Description of Artificial Sequence: Synthetic oligonucleotide
ucuagcuccugucucauuu

SEQ ID NO: 3128324 - RNA, 19 nt, Artificial Sequence
  Description of Artificial Sequence: Synthetic oligonucleotide
auuagucucagcuccugcu

SEQ ID NO: 3128325 - RNA, 19 nt, Artificial Sequence
  Description of Artificial Sequence: Synthetic oligonucleotide
ucauauuggcucuuggcua

SEQ ID NO: 3128326 - RNA, 19 nt, Artificial Sequence
  Description of Artificial Sequence: Synthetic oligonucleotide
guuucauauuggcucuugg

SEQ ID NO: 3128327 - RNA, 19 nt, Artificial Sequence
  Description of Artificial Sequence: Synthetic oligonucleotide
uauuagucucagcuccugc

SEQ ID NO: 3128328 - RNA, 19 nt, Artificial Sequence
  Description of Artificial Sequence: Synthetic oligonucleotide
uuuauucucuguugcuucu

SEQ ID NO: 3128329 - RNA, 19 nt, Artificial Sequence
  Description of Artificial Sequence: Synthetic oligonucleotide
uauucauuucagauacaaa

SEQ ID NO: 3128330 - RNA, 19 nt, Artificial Sequence
  Description of Artificial Sequence: Synthetic oligonucleotide
uucaaauuccgcacaccga

SEQ ID NO: 3128331 - RNA, 19 nt, Artificial Sequence
  Description of Artificial Sequence: Synthetic oligonucleotide
ucucuguugcuucuuuuac

SEQ ID NO: 3128332 - RNA, 19 nt, Artificial Sequence
  Description of Artificial Sequence: Synthetic oligonucleotide
cuguuuauuccgugcagag

SEQ ID NO: 3128333 - RNA, 19 nt, Artificial Sequence
  Description of Artificial Sequence: Synthetic oligonucleotide
uucuucaaauuccgcacac

SEQ ID NO: 3128334 - RNA, 19 nt, Artificial Sequence
  Description of Artificial Sequence: Synthetic oligonucleotide
uuuucggcucagcuauuag

SEQ ID NO: 3128335 - RNA, 19 nt, Artificial Sequence
  Description of Artificial Sequence: Synthetic oligonucleotide
gugcagagguuucauauug

SEQ ID NO: 3128336 - RNA, 19 nt, Artificial Sequence
  Description of Artificial Sequence: Synthetic oligonucleotide
auuggcucuuggcuaacag

SEQ ID NO: 3128337 - RNA, 19 nt, Artificial Sequence
  Description of Artificial Sequence: Synthetic oligonucleotide
uuucggcucagcuauuagu

SEQ ID NO: 3128338 - RNA, 19 nt, Artificial Sequence
  Description of Artificial Sequence: Synthetic oligonucleotide
ugcuguuuauuccgugcag

SEQ ID NO: 3128339 - RNA, 19 nt, Artificial Sequence
  Description of Artificial Sequence: Synthetic oligonucleotide
uuggcucuuggcuaacagc

SEQ ID NO: 3128340 - RNA, 19 nt, Artificial Sequence
  Description of Artificial Sequence: Synthetic oligonucleotide
cacacuuggcuucuuuuag

SEQ ID NO: 3128341 - RNA, 19 nt, Artificial Sequence
  Description of Artificial Sequence: Synthetic oligonucleotide
agguuauucauuucagaua

SEQ ID NO: 3128342 - RNA, 19 nt, Artificial Sequence
  Description of Artificial Sequence: Synthetic oligonucleotide
uaguuuauucucuguugcu

SEQ ID NO: 3128343 - RNA, 19 nt, Artificial Sequence
  Description of Artificial Sequence: Synthetic oligonucleotide
gugucugauaguuucuuca

SEQ ID NO: 3128344 - RNA, 19 nt, Artificial Sequence
  Description of Artificial Sequence: Synthetic oligonucleotide
uaguuucuucaaauuccgc

SEQ ID NO: 3128345 - RNA, 19 nt, Artificial Sequence
  Description of Artificial Sequence: Synthetic oligonucleotide
uucugcagguuauucauuu

SEQ ID NO: 3128346 - RNA, 19 nt, Artificial Sequence
  Description of Artificial Sequence: Synthetic oligonucleotide
cuuggcuucuuuuaguuua

SEQ ID NO: 3128347 - RNA, 19 nt, Artificial Sequence
  Description of Artificial Sequence: Synthetic oligonucleotide
cuccaucucuuucugcagg

SEQ ID NO: 3128348 - RNA, 19 nt, Artificial Sequence
  Description of Artificial Sequence: Synthetic oligonucleotide
cuucuuuuacaccucuuca

SEQ ID NO: 3128349 - RNA, 19 nt, Artificial Sequence
  Description of Artificial Sequence: Synthetic oligonucleotide
auuccgcacaccgauuuuc

SEQ ID NO: 3128350 - RNA, 19 nt, Artificial Sequence
  Description of Artificial Sequence: Synthetic oligonucleotide
ugcucugacuccacacuug

SEQ ID NO: 3128351 - RNA, 19 nt, Artificial Sequence
  Description of Artificial Sequence: Synthetic oligonucleotide
ucuucaaauuccgcacacc

SEQ ID NO: 3128352 - RNA, 19 nt, Artificial Sequence
  Description of Artificial Sequence: Synthetic oligonucleotide
gcuccugcuguuuauuccg

SEQ ID NO: 3128353 - RNA, 19 nt, Artificial Sequence
  Description of Artificial Sequence: Synthetic oligonucleotide
uagucucagcuccugcugu

SEQ ID NO: 3128354 - RNA, 19 nt, Artificial Sequence
  Description of Artificial Sequence: Synthetic oligonucleotide
uccaucucuuucugcaggu

SEQ ID NO: 3128355 - RNA, 19 nt, Artificial Sequence
  Description of Artificial Sequence: Synthetic oligonucleotide
uauuccgugcagagguuuc

SEQ ID NO: 3128356 - RNA, 19 nt, Artificial Sequence
  Description of Artificial Sequence: Synthetic oligonucleotide
aguuuauucucuguugcuu

SEQ ID NO: 3128357 - RNA, 19 nt, Artificial Sequence
  Description of Artificial Sequence: Synthetic oligonucleotide
acacuuggcuucuuuuagu

SEQ ID NO: 3128358 - RNA, 19 nt, Artificial Sequence
  Description of Artificial Sequence: Synthetic oligonucleotide
uauucucuguugcuucuuu

SEQ ID NO: 3128359 - RNA, 19 nt, Artificial Sequence
  Description of Artificial Sequence: Synthetic oligonucleotide
gcuucuuuuaguuuauucu

SEQ ID NO: 3128360 - RNA, 19 nt, Artificial Sequence
  Description of Artificial Sequence: Synthetic oligonucleotide
cugcagguuauucauuuca

SEQ ID NO: 3128361 - RNA, 19 nt, Artificial Sequence
  Description of Artificial Sequence: Synthetic oligonucleotide
uuccgcacaccgauuuucu

SEQ ID NO: 3128362 - RNA, 19 nt, Artificial Sequence
  Description of Artificial Sequence: Synthetic oligonucleotide
gcagagguuucauauuggc

SEQ ID NO: 3128363 - RNA, 19 nt, Artificial Sequence
  Description of Artificial Sequence: Synthetic oligonucleotide
cauauuggcucuuggcuaa

SEQ ID NO: 3128364 - RNA, 19 nt, Artificial Sequence
  Description of Artificial Sequence: Synthetic oligonucleotide
cuguugcuucuuuuacacc

SEQ ID NO: 3128365 - RNA, 19 nt, Artificial Sequence
  Description of Artificial Sequence: Synthetic oligonucleotide
ucggcucagcuauuagucu

SEQ ID NO: 3128366 - RNA, 19 nt, Artificial Sequence
  Description of Artificial Sequence: Synthetic oligonucleotide
ucuucaggugucugauagu

SEQ ID NO: 3128367 - RNA, 19 nt, Artificial Sequence
  Description of Artificial Sequence: Synthetic oligonucleotide
ugacuccacacuuggcuuc

SEQ ID NO: 3128368 - RNA, 19 nt, Artificial Sequence
  Description of Artificial Sequence: Synthetic oligonucleotide
ucugcagguuauucauuuc

SEQ ID NO: 3128369 - RNA, 19 nt, Artificial Sequence
  Description of Artificial Sequence: Synthetic oligonucleotide
aauuccgcacaccgauuuu

SEQ ID NO: 3128370 - RNA, 19 nt, Artificial Sequence
  Description of Artificial Sequence: Synthetic oligonucleotide
cagguuauucauuucagau

SEQ ID NO: 3128371 - RNA, 19 nt, Artificial Sequence
  Description of Artificial Sequence: Synthetic oligonucleotide
cagcuauuagucucagcuc

SEQ ID NO: 3128372 - RNA, 19 nt, Artificial Sequence
  Description of Artificial Sequence: Synthetic oligonucleotide
uggcuaacagcuccaucuc

SEQ ID NO: 3128373 - RNA, 19 nt, Artificial Sequence
  Description of Artificial Sequence: Synthetic oligonucleotide
gcuucuuuuacaccucuuc

SEQ ID NO: 3128374 - RNA, 19 nt, Artificial Sequence
  Description of Artificial Sequence: Synthetic oligonucleotide
gcucugacuccacacuugg

SEQ ID NO: 3128375 - RNA, 19 nt, Artificial Sequence
  Description of Artificial Sequence: Synthetic oligonucleotide
uuuauuccgugcagagguu

SEQ ID NO: 3128376 - RNA, 19 nt, Artificial Sequence
  Description of Artificial Sequence: Synthetic oligonucleotide
gagguuucauauuggcucu

SEQ ID NO: 3128377 - RNA, 19 nt, Artificial Sequence
  Description of Artificial Sequence: Synthetic oligonucleotide
cucuguugcuucuuuuaca

SEQ ID NO: 3128378 - RNA, 19 nt, Artificial Sequence
  Description of Artificial Sequence: Synthetic oligonucleotide
ggcuucuuuuaguuuauuc

SEQ ID NO: 3128379 - RNA, 19 nt, Artificial Sequence
  Description of Artificial Sequence: Synthetic oligonucleotide
uccugcuguuuauuccgug

SEQ ID NO: 3128380 - RNA, 19 nt, Artificial Sequence
  Description of Artificial Sequence: Synthetic oligonucleotide
cuuucugcagguuauucau

SEQ ID NO: 3128381 - RNA, 19 nt, Artificial Sequence
  Description of Artificial Sequence: Synthetic oligonucleotide
uuacaccucuucagguguc

SEQ ID NO: 3128382 - RNA, 19 nt, Artificial Sequence
  Description of Artificial Sequence: Synthetic oligonucleotide
cuuuuacaccucuucaggu

SEQ ID NO: 3128383 - RNA, 19 nt, Artificial Sequence
  Description of Artificial Sequence: Synthetic oligonucleotide
ccugcuguuuauuccgugc

SEQ ID NO: 3128384 - RNA, 19 nt, Artificial Sequence
  Description of Artificial Sequence: Synthetic oligonucleotide
cuauuagucucagcuccug

SEQ ID NO: 3128385 - RNA, 19 nt, Artificial Sequence
  Description of Artificial Sequence: Synthetic oligonucleotide
cucagcuauuagucucagc

SEQ ID NO: 3128386 - RNA, 19 nt, Artificial Sequence
  Description of Artificial Sequence: Synthetic oligonucleotide
uuauuccgugcagagguuu

SEQ ID NO: 3128387 - RNA, 19 nt, Artificial Sequence
  Description of Artificial Sequence: Synthetic oligonucleotide
uucaggugucugauaguuu

SEQ ID NO: 3128388 - RNA, 19 nt, Artificial Sequence
  Description of Artificial Sequence: Synthetic oligonucleotide
cacaccgauuuucuagcuc

SEQ ID NO: 3128389 - RNA, 19 nt, Artificial Sequence
  Description of Artificial Sequence: Synthetic oligonucleotide
ucucagcuccugcuguuua

SEQ ID NO: 3128390 - RNA, 19 nt, Artificial Sequence
  Description of Artificial Sequence: Synthetic oligonucleotide
cuuuuaguuuauucucugu

SEQ ID NO: 3128391 - RNA, 19 nt, Artificial Sequence
  Description of Artificial Sequence: Synthetic oligonucleotide
auauuggcucuuggcuaac

SEQ ID NO: 3128392 - RNA, 19 nt, Artificial Sequence
  Description of Artificial Sequence: Synthetic oligonucleotide
cucugacuccacacuuggc

SEQ ID NO: 3128393 - RNA, 19 nt, Artificial Sequence
  Description of Artificial Sequence: Synthetic oligonucleotide
cugcuguuuauuccgugca

SEQ ID NO: 3128394 - RNA, 19 nt, Artificial Sequence
  Description of Artificial Sequence: Synthetic oligonucleotide
uauuggcucuuggcuaaca

SEQ ID NO: 3128395 - RNA, 19 nt, Artificial Sequence
  Description of Artificial Sequence: Synthetic oligonucleotide
gucugauaguuucuucaaa

SEQ ID NO: 3128396 - RNA, 19 nt, Artificial Sequence
  Description of Artificial Sequence: Synthetic oligonucleotide
aucucuuucugcagguuau

SEQ ID NO: 3128397 - RNA, 19 nt, Artificial Sequence
  Description of Artificial Sequence: Synthetic oligonucleotide
uuucuagcuccugucucau

SEQ ID NO: 3128398 - RNA, 19 nt, Artificial Sequence
  Description of Artificial Sequence: Synthetic oligonucleotide
ccgcacaccgauuuucuag

SEQ ID NO: 3128399 - RNA, 19 nt, Artificial Sequence
  Description of Artificial Sequence: Synthetic oligonucleotide
caucucuuucugcagguua

SEQ ID NO: 3128400 - RNA, 19 nt, Artificial Sequence
  Description of Artificial Sequence: Synthetic oligonucleotide
gcagguuauucauuucaga

SEQ ID NO: 3128401 - RNA, 19 nt, Artificial Sequence
  Description of Artificial Sequence: Synthetic oligonucleotide
uacaccucuucaggugucu

SEQ ID NO: 3128402 - RNA, 19 nt, Artificial Sequence
  Description of Artificial Sequence: Synthetic oligonucleotide
ggugucugauaguuucuuc

SEQ ID NO: 3128403 - RNA, 19 nt, Artificial Sequence
  Description of Artificial Sequence: Synthetic oligonucleotide
uuauucucuguugcuucuu

SEQ ID NO: 3128404 - RNA, 19 nt, Artificial Sequence
  Description of Artificial Sequence: Synthetic oligonucleotide
accucuucaggugucugau

SEQ ID NO: 3128405 - RNA, 19 nt, Artificial Sequence
  Description of Artificial Sequence: Synthetic oligonucleotide
auuccgugcagagguuuca

SEQ ID NO: 3128406 - RNA, 19 nt, Artificial Sequence
  Description of Artificial Sequence: Synthetic oligonucleotide
cagagguuucauauuggcu

SEQ ID NO: 3128407 - RNA, 19 nt, Artificial Sequence
  Description of Artificial Sequence: Synthetic oligonucleotide
accgauuuucuagcuccug

SEQ ID NO: 3128408 - RNA, 19 nt, Artificial Sequence
  Description of Artificial Sequence: Synthetic oligonucleotide
cugauaguuucuucaaauu

SEQ ID NO: 3128409 - RNA, 19 nt, Artificial Sequence
  Description of Artificial Sequence: Synthetic oligonucleotide
guuauucauuucagauaca

SEQ ID NO: 3128410 - RNA, 19 nt, Artificial Sequence
  Description of Artificial Sequence: Synthetic oligonucleotide
uccgugcagagguuucaua

SEQ ID NO: 3128411 - RNA, 19 nt, Artificial Sequence
  Description of Artificial Sequence: Synthetic oligonucleotide
gguuucauauuggcucuug

SEQ ID NO: 3128412 - RNA, 19 nt, Artificial Sequence
  Description of Artificial Sequence: Synthetic oligonucleotide
cucuuggcuaacagcucca

SEQ ID NO: 3128413 - RNA, 19 nt, Artificial Sequence
  Description of Artificial Sequence: Synthetic oligonucleotide
cgcacaccgauuuucuagc

SEQ ID NO: 3128414 - RNA, 19 nt, Artificial Sequence
  Description of Artificial Sequence: Synthetic oligonucleotide
agucucagcuccugcuguu

SEQ ID NO: 3128415 - RNA, 19 nt, Artificial Sequence
  Description of Artificial Sequence: Synthetic oligonucleotide
gcuguuuauuccgugcaga

SEQ ID NO: 3128416 - RNA, 19 nt, Artificial Sequence
  Description of Artificial Sequence: Synthetic oligonucleotide
caccucuucaggugucuga

SEQ ID NO: 3128417 - RNA, 19 nt, Artificial Sequence
  Description of Artificial Sequence: Synthetic oligonucleotide
uccgcacaccgauuuucua

SEQ ID NO: 3128418 - RNA, 19 nt, Artificial Sequence
  Description of Artificial Sequence: Synthetic oligonucleotide
aggugucugauaguuucuu

SEQ ID NO: 3128419 - RNA, 19 nt, Artificial Sequence
  Description of Artificial Sequence: Synthetic oligonucleotide
cgauuuucuagcuccuguc

SEQ ID NO: 3128420 - RNA, 19 nt, Artificial Sequence
  Description of Artificial Sequence: Synthetic oligonucleotide
acaccucuucaggugucug

SEQ ID NO: 3128421 - RNA, 19 nt, Artificial Sequence
  Description of Artificial Sequence: Synthetic oligonucleotide
uuccgugcagagguuucau

SEQ ID NO: 3128422 - RNA, 19 nt, Artificial Sequence
  Description of Artificial Sequence: Synthetic oligonucleotide
cuucaggugucugauaguu

SEQ ID NO: 3128423 - RNA, 19 nt, Artificial Sequence
  Description of Artificial Sequence: Synthetic oligonucleotide
cacuuggcuucuuuuaguu

SEQ ID NO: 3128424 - RNA, 19 nt, Artificial Sequence
  Description of Artificial Sequence: Synthetic oligonucleotide
uucuagcuccugucucauu

SEQ ID NO: 3128425 - RNA, 19 nt, Artificial Sequence
  Description of Artificial Sequence: Synthetic oligonucleotide
ggcucagcuauuagucuca

SEQ ID NO: 3128426 - RNA, 19 nt, Artificial Sequence
  Description of Artificial Sequence: Synthetic oligonucleotide
cuaacagcuccaucucuuu

SEQ ID NO: 3128427 - RNA, 19 nt, Artificial Sequence
  Description of Artificial Sequence: Synthetic oligonucleotide
cugacuccacacuuggcuu

SEQ ID NO: 3128428 - RNA, 19 nt, Artificial Sequence
  Description of Artificial Sequence: Synthetic oligonucleotide
caggugucugauaguuucu

SEQ ID NO: 3128429 - RNA, 19 nt, Artificial Sequence
  Description of Artificial Sequence: Synthetic oligonucleotide
gacuccacacuuggcuucu

SEQ ID NO: 3128430 - RNA, 19 nt, Artificial Sequence
  Description of Artificial Sequence: Synthetic oligonucleotide
cggcucagcuauuagucuc

SEQ ID NO: 3128431 - RNA, 19 nt, Artificial Sequence
  Description of Artificial Sequence: Synthetic oligonucleotide
gcucagcuauuagucucag

SEQ ID NO: 3128432 - RNA, 19 nt, Artificial Sequence
  Description of Artificial Sequence: Synthetic oligonucleotide
ggcuaacagcuccaucucu

SEQ ID NO: 3128433 - RNA, 19 nt, Artificial Sequence
  Description of Artificial Sequence: Synthetic oligonucleotide
agguuucauauuggcucuu

SEQ ID NO: 3128434 - RNA, 19 nt, Artificial Sequence
  Description of Artificial Sequence: Synthetic oligonucleotide
ccacacuuggcuucuuuua

SEQ ID NO: 3128435 - RNA, 19 nt, Artificial Sequence
  Description of Artificial Sequence: Synthetic oligonucleotide
caaauuccgcacaccgauu

SEQ ID NO: 3128436 - RNA, 19 nt, Artificial Sequence
  Description of Artificial Sequence: Synthetic oligonucleotide
cuagcuccugucucauuuu

SEQ ID NO: 3128437 - RNA, 19 nt, Artificial Sequence
  Description of Artificial Sequence: Synthetic oligonucleotide
cugcucugacuccacacuu

SEQ ID NO: 3128438 - RNA, 19 nt, Artificial Sequence
  Description of Artificial Sequence: Synthetic oligonucleotide
cucagcuccugcuguuuau

SEQ ID NO: 3128439 - RNA, 19 nt, Artificial Sequence
  Description of Artificial Sequence: Synthetic oligonucleotide
caccgauuuucuagcuccu

SEQ ID NO: 3128440 - RNA, 19 nt, Artificial Sequence
  Description of Artificial Sequence: Synthetic oligonucleotide
ccgugcagagguuucauau

SEQ ID NO: 3128441 - RNA, 19 nt, Artificial Sequence
  Description of Artificial Sequence: Synthetic oligonucleotide
ccgauuuucuagcuccugu

SEQ ID NO: 3128442 - RNA, 19 nt, Artificial Sequence
  Description of Artificial Sequence: Synthetic oligonucleotide
cuccugcuguuuauuccgu

SEQ ID NO: 3128443 - RNA, 19 nt, Artificial Sequence
  Description of Artificial Sequence: Synthetic oligonucleotide
gcuaacagcuccaucucuu

SEQ ID NO: 3128444 - RNA, 19 nt, Artificial Sequence
  Description of Artificial Sequence: Synthetic oligonucleotide
gcuauuagucucagcuccu

SEQ ID NO: 3128445 - RNA, 19 nt, Artificial Sequence
  Description of Artificial Sequence: Synthetic oligonucleotide
gcacaccgauuuucuagcu

SEQ ID NO: 3128446 - RNA, 19 nt, Artificial Sequence
  Description of Artificial Sequence: Synthetic oligonucleotide
ccucuucaggugucugaua

SEQ ID NO: 3128447 - RNA, 19 nt, Artificial Sequence
  Description of Artificial Sequence: Synthetic oligonucleotide
cgugcagagguuucauauu

SEQ ID NO: 3128448 - RNA, 19 nt, Artificial Sequence
  Description of Artificial Sequence: Synthetic oligonucleotide
aguaugucuacacagaacc

SEQ ID NO: 3128449 - RNA, 19 nt, Artificial Sequence
  Description of Artificial Sequence: Synthetic oligonucleotide
uaauguaaaggguagaggg

SEQ ID NO: 3128450 - RNA, 19 nt, Artificial Sequence
  Description of Artificial Sequence: Synthetic oligonucleotide
agaaaggcaugucagaugc

SEQ ID NO: 3128451 - RNA, 19 nt, Artificial Sequence
  Description of Artificial Sequence: Synthetic oligonucleotide
aagacaaguaugucuacac

SEQ ID NO: 3128452 - RNA, 19 nt, Artificial Sequence
  Description of Artificial Sequence: Synthetic oligonucleotide
gauauauggggcuaccagg

SEQ ID NO: 3128453 - RNA, 19 nt, Artificial Sequence
  Description of Artificial Sequence: Synthetic oligonucleotide
gacaaguaugucuacacag

SEQ ID NO: 3128454 - RNA, 19 nt, Artificial Sequence
  Description of Artificial Sequence: Synthetic oligonucleotide
ucuacacagaaccagcccc

SEQ ID NO: 3128455 - RNA, 19 nt, Artificial Sequence
  Description of Artificial Sequence: Synthetic oligonucleotide
ugugucaaacucuuucugg

SEQ ID NO: 3128456 - RNA, 19 nt, Artificial Sequence
  Description of Artificial Sequence: Synthetic oligonucleotide
aauguaaaggguagagggg

SEQ ID NO: 3128457 - RNA, 19 nt, Artificial Sequence
  Description of Artificial Sequence: Synthetic oligonucleotide
cuaggguggauauaugggg

SEQ ID NO: 3128458 - RNA, 19 nt, Artificial Sequence
  Description of Artificial Sequence: Synthetic oligonucleotide
auauggggcuaccaggagc

SEQ ID NO: 3128459 - RNA, 19 nt, Artificial Sequence
  Description of Artificial Sequence: Synthetic oligonucleotide
uagaagacaaguaugucua

SEQ ID NO: 3128460 - RNA, 19 nt, Artificial Sequence
  Description of Artificial Sequence: Synthetic oligonucleotide
agcugugucaaacucuuuc

SEQ ID NO: 3128461 - RNA, 19 nt, Artificial Sequence
  Description of Artificial Sequence: Synthetic oligonucleotide
caugucagaugccagauac

SEQ ID NO: 3128462 - RNA, 19 nt, Artificial Sequence
  Description of Artificial Sequence: Synthetic oligonucleotide
cacuuccuaauguaaaggg

SEQ ID NO: 3128463 - RNA, 19 nt, Artificial Sequence
  Description of Artificial Sequence: Synthetic oligonucleotide
uuccuaauguaaaggguag

SEQ ID NO: 3128464 - RNA, 19 nt, Artificial Sequence
  Description of Artificial Sequence: Synthetic oligonucleotide
ucuacuagcacuuccuaau

SEQ ID NO: 3128465 - RNA, 19 nt, Artificial Sequence
  Description of Artificial Sequence: Synthetic oligonucleotide
gugucaaacucuuucuggg

SEQ ID NO: 3128466 - RNA, 19 nt, Artificial Sequence
  Description of Artificial Sequence: Synthetic oligonucleotide
aaagaaaggcaugucagau

SEQ ID NO: 3128467 - RNA, 19 nt, Artificial Sequence
  Description of Artificial Sequence: Synthetic oligonucleotide
aaguaugucuacacagaac

SEQ ID NO: 3128468 - RNA, 19 nt, Artificial Sequence
  Description of Artificial Sequence: Synthetic oligonucleotide
uauggggcuaccaggagcu

SEQ ID NO: 3128469 - RNA, 19 nt, Artificial Sequence
  Description of Artificial Sequence: Synthetic oligonucleotide
cuaauguaaaggguagagg

SEQ ID NO: 3128470 - RNA, 19 nt, Artificial Sequence
  Description of Artificial Sequence: Synthetic oligonucleotide
aaaggcaugucagaugcca

SEQ ID NO: 3128471 - RNA, 19 nt, Artificial Sequence
  Description of Artificial Sequence: Synthetic oligonucleotide
agcacuuccuaauguaaag

SEQ ID NO: 3128472 - RNA, 19 nt, Artificial Sequence
  Description of Artificial Sequence: Synthetic oligonucleotide
uaggguggauauauggggc

SEQ ID NO: 3128473 - RNA, 19 nt, Artificial Sequence
  Description of Artificial Sequence: Synthetic oligonucleotide
caacuggccaccaugcccc

SEQ ID NO: 3128474 - RNA, 19 nt, Artificial Sequence
  Description of Artificial Sequence: Synthetic oligonucleotide
ucuggggugucuacuagca

SEQ ID NO: 3128475 - RNA, 19 nt, Artificial Sequence
  Description of Artificial Sequence: Synthetic oligonucleotide
uccccuagaagacaaguau

SEQ ID NO: 3128476 - RNA, 19 nt, Artificial Sequence
  Description of Artificial Sequence: Synthetic oligonucleotide
ucaaacucuuucuggggug

SEQ ID NO: 3128477 - RNA, 19 nt, Artificial Sequence
  Description of Artificial Sequence: Synthetic oligonucleotide
agaagacaaguaugucuac

SEQ ID NO: 3128478 - RNA, 19 nt, Artificial Sequence
  Description of Artificial Sequence: Synthetic oligonucleotide
uggggugucuacuagcacu

SEQ ID NO: 3128479 - RNA, 19 nt, Artificial Sequence
  Description of Artificial Sequence: Synthetic oligonucleotide
augucuacacagaaccagc

SEQ ID NO: 3128480 - RNA, 19 nt, Artificial Sequence
  Description of Artificial Sequence: Synthetic oligonucleotide
agcuggagcaacuggccac

SEQ ID NO: 3128481 - RNA, 19 nt, Artificial Sequence
  Description of Artificial Sequence: Synthetic oligonucleotide
uccuguagcagcuguguca

SEQ ID NO: 3128482 - RNA, 19 nt, Artificial Sequence
  Description of Artificial Sequence: Synthetic oligonucleotide
uguagcagcugugucaaac

SEQ ID NO: 3128483 - RNA, 19 nt, Artificial Sequence
  Description of Artificial Sequence: Synthetic oligonucleotide
uauauggggcuaccaggag

SEQ ID NO: 3128484 - RNA, 19 nt, Artificial Sequence
  Description of Artificial Sequence: Synthetic oligonucleotide
ggauauauggggcuaccag

SEQ ID NO: 3128485 - RNA, 19 nt, Artificial Sequence
  Description of Artificial Sequence: Synthetic oligonucleotide
aggagcuggagcaacuggc

SEQ ID NO: 3128486 - RNA, 19 nt, Artificial Sequence
  Description of Artificial Sequence: Synthetic oligonucleotide
uuucuggggugucuacuag

SEQ ID NO: 3128487 - RNA, 19 nt, Artificial Sequence
  Description of Artificial Sequence: Synthetic oligonucleotide
uacuagcacuuccuaaugu

SEQ ID NO: 3128488 - RNA, 19 nt, Artificial Sequence
  Description of Artificial Sequence: Synthetic oligonucleotide
cuagaagacaaguaugucu

SEQ ID NO: 3128489 - RNA, 19 nt, Artificial Sequence
  Description of Artificial Sequence: Synthetic oligonucleotide
auguaaaggguagaggggu

SEQ ID NO: 3128490 - RNA, 19 nt, Artificial Sequence
  Description of Artificial Sequence: Synthetic oligonucleotide
uuauccuguagcagcugug

SEQ ID NO: 3128491 - RNA, 19 nt, Artificial Sequence
  Description of Artificial Sequence: Synthetic oligonucleotide
cuuccuaauguaaagggua

SEQ ID NO: 3128492 - RNA, 19 nt, Artificial Sequence
  Description of Artificial Sequence: Synthetic oligonucleotide
agacaaguaugucuacaca

SEQ ID NO: 3128493 - RNA, 19 nt, Artificial Sequence
  Description of Artificial Sequence: Synthetic oligonucleotide
agcaacuggccaccaugcc

SEQ ID NO: 3128494 - RNA, 19 nt, Artificial Sequence
  Description of Artificial Sequence: Synthetic oligonucleotide
uagaggggucccuagggug

SEQ ID NO: 3128495 - RNA, 19 nt, Artificial Sequence
  Description of Artificial Sequence: Synthetic oligonucleotide
acuagcacuuccuaaugua

SEQ ID NO: 3128496 - RNA, 19 nt, Artificial Sequence
  Description of Artificial Sequence: Synthetic oligonucleotide
uagcacuuccuaauguaaa

SEQ ID NO: 3128497 - RNA, 19 nt, Artificial Sequence
  Description of Artificial Sequence: Synthetic oligonucleotide
auauauggggcuaccagga

SEQ ID NO: 3128498 - RNA, 19 nt, Artificial Sequence
  Description of Artificial Sequence: Synthetic oligonucleotide
gguagaggggucccuaggg

SEQ ID NO: 3128499 - RNA, 19 nt, Artificial Sequence
  Description of Artificial Sequence: Synthetic oligonucleotide
uguaaaggguagagggguc

SEQ ID NO: 3128500 - RNA, 19 nt, Artificial Sequence
  Description of Artificial Sequence: Synthetic oligonucleotide
gaagacaaguaugucuaca

SEQ ID NO: 3128501 - RNA, 19 nt, Artificial Sequence
  Description of Artificial Sequence: Synthetic oligonucleotide
uucuggggugucuacuagc

SEQ ID NO: 3128502 - RNA, 19 nt, Artificial Sequence
  Description of Artificial Sequence: Synthetic oligonucleotide
ccuaggguggauauauggg

SEQ ID NO: 3128503 - RNA, 19 nt, Artificial Sequence
  Description of Artificial Sequence: Synthetic oligonucleotide
gucuacacagaaccagccc

SEQ ID NO: 3128504 - RNA, 19 nt, Artificial Sequence
  Description of Artificial Sequence: Synthetic oligonucleotide
acaaguaugucuacacaga

SEQ ID NO: 3128505 - RNA, 19 nt, Artificial Sequence
  Description of Artificial Sequence: Synthetic oligonucleotide
caaagaaaggcaugucaga

SEQ ID NO: 3128506 - RNA, 19 nt, Artificial Sequence
  Description of Artificial Sequence: Synthetic oligonucleotide
agugggagcccucagggua

SEQ ID NO: 3128507 - RNA, 19 nt, Artificial Sequence
  Description of Artificial Sequence: Synthetic oligonucleotide
uauccuguagcagcugugu

SEQ ID NO: 3128508 - RNA, 19 nt, Artificial Sequence
  Description of Artificial Sequence: Synthetic oligonucleotide
cugugucaaacucuuucug

SEQ ID NO: 3128509 - RNA, 19 nt, Artificial Sequence
  Description of Artificial Sequence: Synthetic oligonucleotide
cuacuagcacuuccuaaug

SEQ ID NO: 3128510 - RNA, 19 nt, Artificial Sequence
  Description of Artificial Sequence: Synthetic oligonucleotide
gcuaccaggagcuggagca

SEQ ID NO: 3128511 - RNA, 19 nt, Artificial Sequence
  Description of Artificial Sequence: Synthetic oligonucleotide
guaaaggguagaggggucc

SEQ ID NO: 3128512 - RNA, 19 nt, Artificial Sequence
  Description of Artificial Sequence: Synthetic oligonucleotide
acuuccuaauguaaagggu

SEQ ID NO: 3128513 - RNA, 19 nt, Artificial Sequence
  Description of Artificial Sequence: Synthetic oligonucleotide
auccuguagcagcuguguc

SEQ ID NO: 3128514 - RNA, 19 nt, Artificial Sequence
  Description of Artificial Sequence: Synthetic oligonucleotide
uaaaggguagagggguccc

SEQ ID NO: 3128515 - RNA, 19 nt, Artificial Sequence
  Description of Artificial Sequence: Synthetic oligonucleotide
aaggcaugucagaugccag

SEQ ID NO: 3128516 - RNA, 19 nt, Artificial Sequence
  Description of Artificial Sequence: Synthetic oligonucleotide
ccuaauguaaaggguagag

SEQ ID NO: 3128517 - RNA, 19 nt, Artificial Sequence
  Description of Artificial Sequence: Synthetic oligonucleotide
aggguggauauauggggcu

SEQ ID NO: 3128518 - RNA, 19 nt, Artificial Sequence
  Description of Artificial Sequence: Synthetic oligonucleotide
ugucuacuagcacuuccua

SEQ ID NO: 3128519 - RNA, 19 nt, Artificial Sequence
  Description of Artificial Sequence: Synthetic oligonucleotide
ggagcaacuggccaccaug

SEQ ID NO: 3128520 - RNA, 19 nt, Artificial Sequence
  Description of Artificial Sequence: Synthetic oligonucleotide
aaacucuuucugggguguc

SEQ ID NO: 3128521 - RNA, 19 nt, Artificial Sequence
  Description of Artificial Sequence: Synthetic oligonucleotide
caaguaugucuacacagaa

SEQ ID NO: 3128522 - RNA, 19 nt, Artificial Sequence
  Description of Artificial Sequence: Synthetic oligonucleotide
agaggggucccuagggugg

SEQ ID NO: 3128523 - RNA, 19 nt, Artificial Sequence
  Description of Artificial Sequence: Synthetic oligonucleotide
uggggcuaccaggagcugg

SEQ ID NO: 3128524 - RNA, 19 nt, Artificial Sequence
  Description of Artificial Sequence: Synthetic oligonucleotide
gagcaacuggccaccaugc

SEQ ID NO: 3128525 - RNA, 19 nt, Artificial Sequence
  Description of Artificial Sequence: Synthetic oligonucleotide
ugccccacggcuccccuag

SEQ ID NO: 3128526 - RNA, 19 nt, Artificial Sequence
  Description of Artificial Sequence: Synthetic oligonucleotide
ucuuucuggggugucuacu

SEQ ID NO: 3128527 - RNA, 19 nt, Artificial Sequence
  Description of Artificial Sequence: Synthetic oligonucleotide
cccuaggguggauauaugg

SEQ ID NO: 3128528 - RNA, 19 nt, Artificial Sequence
  Description of Artificial Sequence: Synthetic oligonucleotide
uccuaauguaaaggguaga

SEQ ID NO: 3128529 - RNA, 19 nt, Artificial Sequence
  Description of Artificial Sequence: Synthetic oligonucleotide
cuagcacuuccuaauguaa

SEQ ID NO: 3128530 - RNA, 19 nt, Artificial Sequence
  Description of Artificial Sequence: Synthetic oligonucleotide
uggauauauggggcuacca

SEQ ID NO: 3128531 - RNA, 19 nt, Artificial Sequence
  Description of Artificial Sequence: Synthetic oligonucleotide
aacucuuucuggggugucu

SEQ ID NO: 3128532 - RNA, 19 nt, Artificial Sequence
  Description of Artificial Sequence: Synthetic oligonucleotide
aggcaugucagaugccaga

SEQ ID NO: 3128533 - RNA, 19 nt, Artificial Sequence
  Description of Artificial Sequence: Synthetic oligonucleotide
cuggccaccaugccccacg

SEQ ID NO: 3128534 - RNA, 19 nt, Artificial Sequence
  Description of Artificial Sequence: Synthetic oligonucleotide
gcaacuggccaccaugccc

SEQ ID NO: 3128535 - RNA, 19 nt, Artificial Sequence
  Description of Artificial Sequence: Synthetic oligonucleotide
gcacuuccuaauguaaagg

SEQ ID NO: 3128536 - RNA, 19 nt, Artificial Sequence
  Description of Artificial Sequence: Synthetic oligonucleotide
aggguagaggggucccuag

SEQ ID NO: 3128537 - RNA, 19 nt, Artificial Sequence
  Description of Artificial Sequence: Synthetic oligonucleotide
ccccuuauccuguagcagc

SEQ ID NO: 3128538 - RNA, 19 nt, Artificial Sequence
  Description of Artificial Sequence: Synthetic oligonucleotide
aaaggguagaggggucccu

SEQ ID NO: 3128539 - RNA, 19 nt, Artificial Sequence
  Description of Artificial Sequence: Synthetic oligonucleotide
gucuacuagcacuuccuaa

SEQ ID NO: 3128540 - RNA, 19 nt, Artificial Sequence
  Description of Artificial Sequence: Synthetic oligonucleotide
ccagugggagcccucaggg

SEQ ID NO: 3128541 - RNA, 19 nt, Artificial Sequence
  Description of Artificial Sequence: Synthetic oligonucleotide
cacggcuccccuagaagac

SEQ ID NO: 3128542 - RNA, 19 nt, Artificial Sequence
  Description of Artificial Sequence: Synthetic oligonucleotide
uggccaccaugccccacgg

SEQ ID NO: 3128543 - RNA, 19 nt, Artificial Sequence
  Description of Artificial Sequence: Synthetic oligonucleotide
agcagcugugucaaacucu

SEQ ID NO: 3128544 - RNA, 19 nt, Artificial Sequence
  Description of Artificial Sequence: Synthetic oligonucleotide
gaaaggcaugucagaugcc

SEQ ID NO: 3128545 - RNA, 19 nt, Artificial Sequence
  Description of Artificial Sequence: Synthetic oligonucleotide
ucccuaggguggauauaug

SEQ ID NO: 3128546 - RNA, 19 nt, Artificial Sequence
  Description of Artificial Sequence: Synthetic oligonucleotide
gucagaugccagauacccc

SEQ ID NO: 3128547 - RNA, 19 nt, Artificial Sequence
  Description of Artificial Sequence: Synthetic oligonucleotide
caccaugccccacggcucc

SEQ ID NO: 3128548 - RNA, 19 nt, Artificial Sequence
  Description of Artificial Sequence: Synthetic oligonucleotide
cuuucuggggugucuacua

SEQ ID NO: 3128549 - RNA, 19 nt, Artificial Sequence
  Description of Artificial Sequence: Synthetic oligonucleotide
guaugucuacacagaacca

SEQ ID NO: 3128550 - RNA, 19 nt, Artificial Sequence
  Description of Artificial Sequence: Synthetic oligonucleotide
cucuuucuggggugucuac

SEQ ID NO: 3128551 - RNA, 19 nt, Artificial Sequence
  Description of Artificial Sequence: Synthetic oligonucleotide
ccccuagaagacaaguaug

SEQ ID NO: 3128552 - RNA, 19 nt, Artificial Sequence
  Description of Artificial Sequence: Synthetic oligonucleotide
guggauauauggggcuacc

SEQ ID NO: 3128553 - RNA, 19 nt, Artificial Sequence
  Description of Artificial Sequence: Synthetic oligonucleotide
guagcagcugugucaaacu

SEQ ID NO: 3128554 - RNA, 19 nt, Artificial Sequence
  Description of Artificial Sequence: Synthetic oligonucleotide
ggguagaggggucccuagg

SEQ ID NO: 3128555 - RNA, 19 nt, Artificial Sequence
  Description of Artificial Sequence: Synthetic oligonucleotide
cuuauccuguagcagcugu

SEQ ID NO: 3128556 - RNA, 19 nt, Artificial Sequence
  Description of Artificial Sequence: Synthetic oligonucleotide
aaggguagaggggucccua

SEQ ID NO: 3128557 - RNA, 19 nt, Artificial Sequence
  Description of Artificial Sequence: Synthetic oligonucleotide
ggagcuggagcaacuggcc

SEQ ID NO: 3128558 - RNA, 19 nt, Artificial Sequence
  Description of Artificial Sequence: Synthetic oligonucleotide
uaccaggagcuggagcaac

SEQ ID NO: 3128559 - RNA, 19 nt, Artificial Sequence
  Description of Artificial Sequence: Synthetic oligonucleotide
aacuggccaccaugcccca

SEQ ID NO: 3128560 - RNA, 19 nt, Artificial Sequence
  Description of Artificial Sequence: Synthetic oligonucleotide
uggagcaacuggccaccau

SEQ ID NO: 3128561 - RNA, 19 nt, Artificial Sequence
  Description of Artificial Sequence: Synthetic oligonucleotide
cuggggugucuacuagcac

SEQ ID NO: 3128562 - RNA, 19 nt, Artificial Sequence
  Description of Artificial Sequence: Synthetic oligonucleotide
gcugugucaaacucuuucu

SEQ ID NO: 3128563 - RNA, 19 nt, Artificial Sequence
  Description of Artificial Sequence: Synthetic oligonucleotide
gguggauauauggggcuac

SEQ ID NO: 3128564 - RNA, 19 nt, Artificial Sequence
  Description of Artificial Sequence: Synthetic oligonucleotide
cuccccuagaagacaagua

SEQ ID NO: 3128565 - RNA, 19 nt, Artificial Sequence
  Description of Artificial Sequence: Synthetic oligonucleotide
guagaggggucccuagggu

SEQ ID NO: 3128566 - RNA, 19 nt, Artificial Sequence
  Description of Artificial Sequence: Synthetic oligonucleotide
acucuuucuggggugucua

SEQ ID NO: 3128567 - RNA, 19 nt, Artificial Sequence
  Description of Artificial Sequence: Synthetic oligonucleotide
ccuagaagacaaguauguc

SEQ ID NO: 3128568 - RNA, 19 nt, Artificial Sequence
  Description of Artificial Sequence: Synthetic oligonucleotide
gucccuaggguggauauau

SEQ ID NO: 3128569 - RNA, 19 nt, Artificial Sequence
  Description of Artificial Sequence: Synthetic oligonucleotide
gcuggagcaacuggccacc

SEQ ID NO: 3128570 - RNA, 19 nt, Artificial Sequence
  Description of Artificial Sequence: Synthetic oligonucleotide
cccuagaagacaaguaugu

SEQ ID NO: 3128571 - RNA, 19 nt, Artificial Sequence
  Description of Artificial Sequence: Synthetic oligonucleotide
acggcuccccuagaagaca

SEQ ID NO: 3128572 - RNA, 19 nt, Artificial Sequence
  Description of Artificial Sequence: Synthetic oligonucleotide
acuggccaccaugccccac

SEQ ID NO: 3128573 - RNA, 19 nt, Artificial Sequence
  Description of Artificial Sequence: Synthetic oligonucleotide
gccaccaugccccacggcu

SEQ ID NO: 3128574 - RNA, 19 nt, Artificial Sequence
  Description of Artificial Sequence: Synthetic oligonucleotide
ccacggcuccccuagaaga

SEQ ID NO: 3128575 - RNA, 19 nt, Artificial Sequence
  Description of Artificial Sequence: Synthetic oligonucleotide
caaacucuuucuggggugu

SEQ ID NO: 3128576 - RNA, 19 nt, Artificial Sequence
  Description of Artificial Sequence: Synthetic oligonucleotide
ggagcccucaggguaggac

SEQ ID NO: 3128577 - RNA, 19 nt, Artificial Sequence
  Description of Artificial Sequence: Synthetic oligonucleotide
cccacggcuccccuagaag

SEQ ID NO: 3128578 - RNA, 19 nt, Artificial Sequence
  Description of Artificial Sequence: Synthetic oligonucleotide
ccuguagcagcugugucaa

SEQ ID NO: 3128579 - RNA, 19 nt, Artificial Sequence
  Description of Artificial Sequence: Synthetic oligonucleotide
ccaccaugccccacggcuc

SEQ ID NO: 3128580 - RNA, 19 nt, Artificial Sequence
  Description of Artificial Sequence: Synthetic oligonucleotide
ggggcuaccaggagcugga

SEQ ID NO: 3128581 - RNA, 19 nt, Artificial Sequence
  Description of Artificial Sequence: Synthetic oligonucleotide
cuaccaggagcuggagcaa

SEQ ID NO: 3128582 - RNA, 19 nt, Artificial Sequence
  Description of Artificial Sequence: Synthetic oligonucleotide
auggggcuaccaggagcug

SEQ ID NO: 3128583 - RNA, 19 nt, Artificial Sequence
  Description of Artificial Sequence: Synthetic oligonucleotide
ccuuauccuguagcagcug

SEQ ID NO: 3128584 - RNA, 19 nt, Artificial Sequence
  Description of Artificial Sequence: Synthetic oligonucleotide
gcaugucagaugccagaua

SEQ ID NO: 3128585 - RNA, 19 nt, Artificial Sequence
  Description of Artificial Sequence: Synthetic oligonucleotide
ggcaugucagaugccagau

SEQ ID NO: 3128586 - RNA, 19 nt, Artificial Sequence
  Description of Artificial Sequence: Synthetic oligonucleotide
gcuccccuagaagacaagu

SEQ ID NO: 3128587 - RNA, 19 nt, Artificial Sequence
  Description of Artificial Sequence: Synthetic oligonucleotide
ggcuccccuagaagacaag

SEQ ID NO: 3128588 - RNA, 19 nt, Artificial Sequence
  Description of Artificial Sequence: Synthetic oligonucleotide
ggguggauauauggggcua

SEQ ID NO: 3128589 - RNA, 19 nt, Artificial Sequence
  Description of Artificial Sequence: Synthetic oligonucleotide
cccuuauccuguagcagcu

SEQ ID NO: 3128590 - RNA, 19 nt, Artificial Sequence
  Description of Artificial Sequence: Synthetic oligonucleotide
augccccacggcuccccua

SEQ ID NO: 3128591 - RNA, 19 nt, Artificial Sequence
  Description of Artificial Sequence: Synthetic oligonucleotide
cagugggagcccucagggu

SEQ ID NO: 3128592 - RNA, 19 nt, Artificial Sequence
  Description of Artificial Sequence: Synthetic oligonucleotide
ggccaccaugccccacggc

SEQ ID NO: 3128593 - RNA, 19 nt, Artificial Sequence
  Description of Artificial Sequence: Synthetic oligonucleotide
cuggagcaacuggccacca

SEQ ID NO: 3128594 - RNA, 19 nt, Artificial Sequence
  Description of Artificial Sequence: Synthetic oligonucleotide
gggucccuaggguggauau

SEQ ID NO: 3128595 - RNA, 19 nt, Artificial Sequence
  Description of Artificial Sequence: Synthetic oligonucleotide
cuguagcagcugugucaaa

SEQ ID NO: 3128596 - RNA, 19 nt, Artificial Sequence
  Description of Artificial Sequence: Synthetic oligonucleotide
gggcuaccaggagcuggag

SEQ ID NO: 3128597 - RNA, 19 nt, Artificial Sequence
  Description of Artificial Sequence: Synthetic oligonucleotide
ggggugucuacuagcacuu

SEQ ID NO: 3128598 - RNA, 19 nt, Artificial Sequence
  Description of Artificial Sequence: Synthetic oligonucleotide
gggugucuacuagcacuuc

SEQ ID NO: 3128599 - RNA, 19 nt, Artificial Sequence
  Description of Artificial Sequence: Synthetic oligonucleotide
ggucccuaggguggauaua

SEQ ID NO: 3128600 - RNA, 19 nt, Artificial Sequence
  Description of Artificial Sequence: Synthetic oligonucleotide
ggggucccuaggguggaua

SEQ ID NO: 3128601 - RNA, 19 nt, Artificial Sequence
  Description of Artificial Sequence: Synthetic oligonucleotide
cagcugugucaaacucuuu

SEQ ID NO: 3128602 - RNA, 19 nt, Artificial Sequence
  Description of Artificial Sequence: Synthetic oligonucleotide
cggcuccccuagaagacaa

SEQ ID NO: 3128603 - RNA, 19 nt, Artificial Sequence
  Description of Artificial Sequence: Synthetic oligonucleotide
ccccacggcuccccuagaa

SEQ ID NO: 3128604 - RNA, 19 nt, Artificial Sequence
  Description of Artificial Sequence: Synthetic oligonucleotide
ccucaggguaggacuccua

SEQ ID NO: 3128605 - RNA, 19 nt, Artificial Sequence
  Description of Artificial Sequence: Synthetic oligonucleotide
gggagcccucaggguagga

SEQ ID NO: 3128606 - RNA, 19 nt, Artificial Sequence
  Description of Artificial Sequence: Synthetic oligonucleotide
gccccacggcuccccuaga

SEQ ID NO: 3128607 - RNA, 19 nt, Artificial Sequence
  Description of Artificial Sequence: Synthetic oligonucleotide
cccucaggguaggacuccu

SEQ ID NO: 3128608 - RNA, 19 nt, Artificial Sequence
  Description of Artificial Sequence: Synthetic oligonucleotide
aaguugagcacguugacug

SEQ ID NO: 3128609 - RNA, 19 nt, Artificial Sequence
  Description of Artificial Sequence: Synthetic oligonucleotide
uuuaaguggaugaugucag

SEQ ID NO: 3128610 - RNA, 19 nt, Artificial Sequence
  Description of Artificial Sequence: Synthetic oligonucleotide
gugaagaugauccggaugg

SEQ ID NO: 3128611 - RNA, 19 nt, Artificial Sequence
  Description of Artificial Sequence: Synthetic oligonucleotide
aagaagaaaacgccagacg

SEQ ID NO: 3128612 - RNA, 19 nt, Artificial Sequence
  Description of Artificial Sequence: Synthetic oligonucleotide
gaucaugaccaacaaaggg

SEQ ID NO: 3128613 - RNA, 19 nt, Artificial Sequence
  Description of Artificial Sequence: Synthetic oligonucleotide
aguggaugaugucagagac

SEQ ID NO: 3128614 - RNA, 19 nt, Artificial Sequence
  Description of Artificial Sequence: Synthetic oligonucleotide
aacaaagggagcaagaaga

SEQ ID NO: 3128615 - RNA, 19 nt, Artificial Sequence
  Description of Artificial Sequence: Synthetic oligonucleotide
agaagaaaacgccagacgu

SEQ ID NO: 3128616 - RNA, 19 nt, Artificial Sequence
  Description of Artificial Sequence: Synthetic oligonucleotide
ucaugaccaacaaagggag

SEQ ID NO: 3128617 - RNA, 19 nt, Artificial Sequence
  Description of Artificial Sequence: Synthetic oligonucleotide
aagggcacgaagcagagga

SEQ ID NO: 3128618 - RNA, 19 nt, Artificial Sequence
  Description of Artificial Sequence: Synthetic oligonucleotide
uuuuaaguggaugauguca

SEQ ID NO: 3128619 - RNA, 19 nt, Artificial Sequence
  Description of Artificial Sequence: Synthetic oligonucleotide
guugacugcuuuuaagugg

SEQ ID NO: 3128620 - RNA, 19 nt, Artificial Sequence
  Description of Artificial Sequence: Synthetic oligonucleotide
acugcuuuuaaguggauga

SEQ ID NO: 3128621 - RNA, 19 nt, Artificial Sequence
  Description of Artificial Sequence: Synthetic oligonucleotide
agacgugugaaguugagca

SEQ ID NO: 3128622 - RNA, 19 nt, Artificial Sequence
  Description of Artificial Sequence: Synthetic oligonucleotide
ugugaaguugagcacguug

SEQ ID NO: 3128623 - RNA, 19 nt, Artificial Sequence
  Description of Artificial Sequence: Synthetic oligonucleotide
gugaugaccacguagcacc

SEQ ID NO: 3128624 - RNA, 19 nt, Artificial Sequence
  Description of Artificial Sequence: Synthetic oligonucleotide
aaagggagcaagaagaaaa

SEQ ID NO: 3128625 - RNA, 19 nt, Artificial Sequence
  Description of Artificial Sequence: Synthetic oligonucleotide
uugacugcuuuuaagugga

SEQ ID NO: 3128626 - RNA, 19 nt, Artificial Sequence
  Description of Artificial Sequence: Synthetic oligonucleotide
ugggugaugaccacguagc

SEQ ID NO: 3128627 - RNA, 19 nt, Artificial Sequence
  Description of Artificial Sequence: Synthetic oligonucleotide
uggaugaugucagagaccu

SEQ ID NO: 3128628 - RNA, 19 nt, Artificial Sequence
  Description of Artificial Sequence: Synthetic oligonucleotide
aagaaaacgccagacgugu

SEQ ID NO: 3128629 - RNA, 19 nt, Artificial Sequence
  Description of Artificial Sequence: Synthetic oligonucleotide
ugugaagaugauccggaug

SEQ ID NO: 3128630 - RNA, 19 nt, Artificial Sequence
  Description of Artificial Sequence: Synthetic oligonucleotide
gaugaugucagagaccuuc

SEQ ID NO: 3128631 - RNA, 19 nt, Artificial Sequence
  Description of Artificial Sequence: Synthetic oligonucleotide
ugcaccagcagugugaaga

SEQ ID NO: 3128632 - RNA, 19 nt, Artificial Sequence
  Description of Artificial Sequence: Synthetic oligonucleotide
ccgaucaugaccaacaaag

SEQ ID NO: 3128633 - RNA, 19 nt, Artificial Sequence
  Description of Artificial Sequence: Synthetic oligonucleotide
aaguggaugaugucagaga

SEQ ID NO: 3128634 - RNA, 19 nt, Artificial Sequence
  Description of Artificial Sequence: Synthetic oligonucleotide
aagggagcaagaagaaaac

SEQ ID NO: 3128635 - RNA, 19 nt, Artificial Sequence
  Description of Artificial Sequence: Synthetic oligonucleotide
uguggaagggcacgaagca

SEQ ID NO: 3128636 - RNA, 19 nt, Artificial Sequence
  Description of Artificial Sequence: Synthetic oligonucleotide
gaagcagaggagcaccugc

SEQ ID NO: 3128637 - RNA, 19 nt, Artificial Sequence
  Description of Artificial Sequence: Synthetic oligonucleotide
aucaugaccaacaaaggga

SEQ ID NO: 3128638 - RNA, 19 nt, Artificial Sequence
  Description of Artificial Sequence: Synthetic oligonucleotide
acguugacugcuuuuaagu

SEQ ID NO: 3128639 - RNA, 19 nt, Artificial Sequence
  Description of Artificial Sequence: Synthetic oligonucleotide
gauguggaagggcacgaag

SEQ ID NO: 3128640 - RNA, 19 nt, Artificial Sequence
  Description of Artificial Sequence: Synthetic oligonucleotide
aguugagcacguugacugc

SEQ ID NO: 3128641 - RNA, 19 nt, Artificial Sequence
  Description of Artificial Sequence: Synthetic oligonucleotide
auguggaagggcacgaagc

SEQ ID NO: 3128642 - RNA, 19 nt, Artificial Sequence
  Description of Artificial Sequence: Synthetic oligonucleotide
uucaccgcgggcuucagcu

SEQ ID NO: 3128643 - RNA, 19 nt, Artificial Sequence
  Description of Artificial Sequence: Synthetic oligonucleotide
aagaugauccggauggacu

SEQ ID NO: 3128644 - RNA, 19 nt, Artificial Sequence
  Description of Artificial Sequence: Synthetic oligonucleotide
caacaaagggagcaagaag

SEQ ID NO: 3128645 - RNA, 19 nt, Artificial Sequence
  Description of Artificial Sequence: Synthetic oligonucleotide
gaagaaaacgccagacgug

SEQ ID NO: 3128646 - RNA, 19 nt, Artificial Sequence
  Description of Artificial Sequence: Synthetic oligonucleotide
augaccaacaaagggagca

SEQ ID NO: 3128647 - RNA, 19 nt, Artificial Sequence
  Description of Artificial Sequence: Synthetic oligonucleotide
caagaagaaaacgccagac

SEQ ID NO: 3128648 - RNA, 19 nt, Artificial Sequence
  Description of Artificial Sequence: Synthetic oligonucleotide
agcaagaagaaaacgccag

SEQ ID NO: 3128649 - RNA, 19 nt, Artificial Sequence
  Description of Artificial Sequence: Synthetic oligonucleotide
acgugugaaguugagcacg

SEQ ID NO: 3128650 - RNA, 19 nt, Artificial Sequence
  Description of Artificial Sequence: Synthetic oligonucleotide
aacgccagacgugugaagu

SEQ ID NO: 3128651 - RNA, 19 nt, Artificial Sequence
  Description of Artificial Sequence: Synthetic oligonucleotide
gaaaacgccagacguguga

SEQ ID NO: 3128652 - RNA, 19 nt, Artificial Sequence
  Description of Artificial Sequence: Synthetic oligonucleotide
guagcacccgaucaugacc

SEQ ID NO: 3128653 - RNA, 19 nt, Artificial Sequence
  Description of Artificial Sequence: Synthetic oligonucleotide
ugaugucagagaccuucag

SEQ ID NO: 3128654 - RNA, 19 nt, Artificial Sequence
  Description of Artificial Sequence: Synthetic oligonucleotide
ugcuuuuaaguggaugaug

SEQ ID NO: 3128655 - RNA, 19 nt, Artificial Sequence
  Description of Artificial Sequence: Synthetic oligonucleotide
gugggugaugaccacguag

SEQ ID NO: 3128656 - RNA, 19 nt, Artificial Sequence
  Description of Artificial Sequence: Synthetic oligonucleotide
aagcagauguggaagggca

SEQ ID NO: 3128657 - RNA, 19 nt, Artificial Sequence
  Description of Artificial Sequence: Synthetic oligonucleotide
cacguugacugcuuuuaag

SEQ ID NO: 3128658 - RNA, 19 nt, Artificial Sequence
  Description of Artificial Sequence: Synthetic oligonucleotide
accacguagcacccgauca

SEQ ID NO: 3128659 - RNA, 19 nt, Artificial Sequence
  Description of Artificial Sequence: Synthetic oligonucleotide
gauggacuucuccuucacc

SEQ ID NO: 3128660 - RNA, 19 nt, Artificial Sequence
  Description of Artificial Sequence: Synthetic oligonucleotide
agcagaggagcaccugcac

SEQ ID NO: 3128661 - RNA, 19 nt, Artificial Sequence
  Description of Artificial Sequence: Synthetic oligonucleotide
agaugauccggauggacuu

SEQ ID NO: 3128662 - RNA, 19 nt, Artificial Sequence
  Description of Artificial Sequence: Synthetic oligonucleotide
aaacgccagacgugugaag

SEQ ID NO: 3128663 - RNA, 19 nt, Artificial Sequence
  Description of Artificial Sequence: Synthetic oligonucleotide
auccggauggacuucuccu

SEQ ID NO: 3128664 - RNA, 19 nt, Artificial Sequence
  Description of Artificial Sequence: Synthetic oligonucleotide
uggacuucuccuucaccgc

SEQ ID NO: 3128665 - RNA, 19 nt, Artificial Sequence
  Description of Artificial Sequence: Synthetic oligonucleotide
cuuuuaaguggaugauguc

SEQ ID NO: 3128666 - RNA, 19 nt, Artificial Sequence
  Description of Artificial Sequence: Synthetic oligonucleotide
cagugugaagaugauccgg

SEQ ID NO: 3128667 - RNA, 19 nt, Artificial Sequence
  Description of Artificial Sequence: Synthetic oligonucleotide
ugaugaccacguagcaccc

SEQ ID NO: 3128668 - RNA, 19 nt, Artificial Sequence
  Description of Artificial Sequence: Synthetic oligonucleotide
agugugaagaugauccgga

SEQ ID NO: 3128669 - RNA, 19 nt, Artificial Sequence
  Description of Artificial Sequence: Synthetic oligonucleotide
caggcugugggugaugacc

SEQ ID NO: 3128670 - RNA, 19 nt, Artificial Sequence
  Description of Artificial Sequence: Synthetic oligonucleotide
gacgugugaaguugagcac

SEQ ID NO: 3128671 - RNA, 19 nt, Artificial Sequence
  Description of Artificial Sequence: Synthetic oligonucleotide
gaagaugauccggauggac

SEQ ID NO: 3128672 - RNA, 19 nt, Artificial Sequence
  Description of Artificial Sequence: Synthetic oligonucleotide
aaaacgccagacgugugaa

SEQ ID NO: 3128673 - RNA, 19 nt, Artificial Sequence
  Description of Artificial Sequence: Synthetic oligonucleotide
gugaaguugagcacguuga

SEQ ID NO: 3128674 - RNA, 19 nt, Artificial Sequence
  Description of Artificial Sequence: Synthetic oligonucleotide
acuucuccuucaccgcggg

SEQ ID NO: 3128675 - RNA, 19 nt, Artificial Sequence
  Description of Artificial Sequence: Synthetic oligonucleotide
augaccacguagcacccga

SEQ ID NO: 3128676 - RNA, 19 nt, Artificial Sequence
  Description of Artificial Sequence: Synthetic oligonucleotide
gaccaacaaagggagcaag

SEQ ID NO: 3128677 - RNA, 19 nt, Artificial Sequence
  Description of Artificial Sequence: Synthetic oligonucleotide
cagaggagcaccugcacca

SEQ ID NO: 3128678 - RNA, 19 nt, Artificial Sequence
  Description of Artificial Sequence: Synthetic oligonucleotide
cacgaagcagaggagcacc

SEQ ID NO: 3128679 - RNA, 19 nt, Artificial Sequence
  Description of Artificial Sequence: Synthetic oligonucleotide
caugaccaacaaagggagc

SEQ ID NO: 3128680 - RNA, 19 nt, Artificial Sequence
  Description of Artificial Sequence: Synthetic oligonucleotide
ggacuucuccuucaccgcg

SEQ ID NO: 3128681 - RNA, 19 nt, Artificial Sequence
  Description of Artificial Sequence: Synthetic oligonucleotide
gacuucuccuucaccgcgg

SEQ ID NO: 3128682 - RNA, 19 nt, Artificial Sequence
  Description of Artificial Sequence: Synthetic oligonucleotide
agcaccugcaccagcagug

SEQ ID NO: 3128683 - RNA, 19 nt, Artificial Sequence
  Description of Artificial Sequence: Synthetic oligonucleotide
cacccgaucaugaccaaca

SEQ ID NO: 3128684 - RNA, 19 nt, Artificial Sequence
  Description of Artificial Sequence: Synthetic oligonucleotide
gcagugugaagaugauccg

SEQ ID NO: 3128685 - RNA, 19 nt, Artificial Sequence
  Description of Artificial Sequence: Synthetic oligonucleotide
gaugaccacguagcacccg

SEQ ID NO: 3128686 - RNA, 19 nt, Artificial Sequence
  Description of Artificial Sequence: Synthetic oligonucleotide
agcagauguggaagggcac

SEQ ID NO: 3128687 - RNA, 19 nt, Artificial Sequence
  Description of Artificial Sequence: Synthetic oligonucleotide
ugggaggucugcccgcgca

SEQ ID NO: 3128688 - RNA, 19 nt, Artificial Sequence
  Description of Artificial Sequence: Synthetic oligonucleotide
aagcagaggagcaccugca

SEQ ID NO: 3128689 - RNA, 19 nt, Artificial Sequence
  Description of Artificial Sequence: Synthetic oligonucleotide
uucagcugggaggucugcc

SEQ ID NO: 3128690 - RNA, 19 nt, Artificial Sequence
  Description of Artificial Sequence: Synthetic oligonucleotide
ugaagaugauccggaugga

SEQ ID NO: 3128691 - RNA, 19 nt, Artificial Sequence
  Description of Artificial Sequence: Synthetic oligonucleotide
gcgggcuucagcugggagg

SEQ ID NO: 3128692 - RNA, 19 nt, Artificial Sequence
  Description of Artificial Sequence: Synthetic oligonucleotide
cagcugggaggucugcccg

SEQ ID NO: 3128693 - RNA, 19 nt, Artificial Sequence
  Description of Artificial Sequence: Synthetic oligonucleotide
cagacgugugaaguugagc

SEQ ID NO: 3128694 - RNA, 19 nt, Artificial Sequence
  Description of Artificial Sequence: Synthetic oligonucleotide
accaacaaagggagcaaga

SEQ ID NO: 3128695 - RNA, 19 nt, Artificial Sequence
  Description of Artificial Sequence: Synthetic oligonucleotide
gcagauguggaagggcacg

SEQ ID NO: 3128696 - RNA, 19 nt, Artificial Sequence
  Description of Artificial Sequence: Synthetic oligonucleotide
ugaccaacaaagggagcaa

SEQ ID NO: 3128697 - RNA, 19 nt, Artificial Sequence
  Description of Artificial Sequence: Synthetic oligonucleotide
acaaagggagcaagaagaa

SEQ ID NO: 3128698 - RNA, 19 nt, Artificial Sequence
  Description of Artificial Sequence: Synthetic oligonucleotide
caccgcgggcuucagcugg

SEQ ID NO: 3128699 - RNA, 19 nt, Artificial Sequence
  Description of Artificial Sequence: Synthetic oligonucleotide
uccggauggacuucuccuu

SEQ ID NO: 3128700 - RNA, 19 nt, Artificial Sequence
  Description of Artificial Sequence: Synthetic oligonucleotide
gaagggcacgaagcagagg

SEQ ID NO: 3128701 - RNA, 19 nt, Artificial Sequence
  Description of Artificial Sequence: Synthetic oligonucleotide
gcuuuuaaguggaugaugu

SEQ ID NO: 3128702 - RNA, 19 nt, Artificial Sequence
  Description of Artificial Sequence: Synthetic oligonucleotide
cgaucaugaccaacaaagg

SEQ ID NO: 3128703 - RNA, 19 nt, Artificial Sequence
  Description of Artificial Sequence: Synthetic oligonucleotide
gaaguugagcacguugacu

SEQ ID NO: 3128704 - RNA, 19 nt, Artificial Sequence
  Description of Artificial Sequence: Synthetic oligonucleotide
agcacguugacugcuuuua

SEQ ID NO: 3128705 - RNA, 19 nt, Artificial Sequence
  Description of Artificial Sequence: Synthetic oligonucleotide
gcagaggagcaccugcacc

SEQ ID NO: 3128706 - RNA, 19 nt, Artificial Sequence
  Description of Artificial Sequence: Synthetic oligonucleotide
gaccacguagcacccgauc

SEQ ID NO: 3128707 - RNA, 19 nt, Artificial Sequence
  Description of Artificial Sequence: Synthetic oligonucleotide
ugagcacguugacugcuuu

SEQ ID NO: 3128708 - RNA, 19 nt, Artificial Sequence
  Description of Artificial Sequence: Synthetic oligonucleotide
uugagcacguugacugcuu

SEQ ID NO: 3128709 - RNA, 19 nt, Artificial Sequence
  Description of Artificial Sequence: Synthetic oligonucleotide
gcaagaagaaaacgccaga

SEQ ID NO: 3128710 - RNA, 19 nt, Artificial Sequence
  Description of Artificial Sequence: Synthetic oligonucleotide
gaggagcaccugcaccagc

SEQ ID NO: 3128711 - RNA, 19 nt, Artificial Sequence
  Description of Artificial Sequence: Synthetic oligonucleotide
gaugauccggauggacuuc

SEQ ID NO: 3128712 - RNA, 19 nt, Artificial Sequence
  Description of Artificial Sequence: Synthetic oligonucleotide
aggagcaccugcaccagca

SEQ ID NO: 3128713 - RNA, 19 nt, Artificial Sequence
  Description of Artificial Sequence: Synthetic oligonucleotide
cacguagcacccgaucaug

SEQ ID NO: 3128714 - RNA, 19 nt, Artificial Sequence
  Description of Artificial Sequence: Synthetic oligonucleotide
ggugaugaccacguagcac

SEQ ID NO: 3128715 - RNA, 19 nt, Artificial Sequence
  Description of Artificial Sequence: Synthetic oligonucleotide
augauccggauggacuucu

SEQ ID NO: 3128716 - RNA, 19 nt, Artificial Sequence
  Description of Artificial Sequence: Synthetic oligonucleotide
augaugucagagaccuuca

SEQ ID NO: 3128717 - RNA, 19 nt, Artificial Sequence
  Description of Artificial Sequence: Synthetic oligonucleotide
cguugacugcuuuuaagug

SEQ ID NO: 3128718 - RNA, 19 nt, Artificial Sequence
  Description of Artificial Sequence: Synthetic oligonucleotide
aggcugugggugaugacca

SEQ ID NO: 3128719 - RNA, 19 nt, Artificial Sequence
  Description of Artificial Sequence: Synthetic oligonucleotide
ggucugcccgcgcagcagg

SEQ ID NO: 3128720 - RNA, 19 nt, Artificial Sequence
  Description of Artificial Sequence: Synthetic oligonucleotide
gcugugggugaugaccacg

SEQ ID NO: 3128721 - RNA, 19 nt, Artificial Sequence
  Description of Artificial Sequence: Synthetic oligonucleotide
ucaccgcgggcuucagcug

SEQ ID NO: 3128722 - RNA, 19 nt, Artificial Sequence
  Description of Artificial Sequence: Synthetic oligonucleotide
ugugggugaugaccacgua

SEQ ID NO: 3128723 - RNA, 19 nt, Artificial Sequence
  Description of Artificial Sequence: Synthetic oligonucleotide
agaaaacgccagacgugug

SEQ ID NO: 3128724 - RNA, 19 nt, Artificial Sequence
  Description of Artificial Sequence: Synthetic oligonucleotide
acccgaucaugaccaacaa

SEQ ID NO: 3128725 - RNA, 19 nt, Artificial Sequence
  Description of Artificial Sequence: Synthetic oligonucleotide
cuucaccgcgggcuucagc

SEQ ID NO: 3128726 - RNA, 19 nt, Artificial Sequence
  Description of Artificial Sequence: Synthetic oligonucleotide
ugauccggauggacuucuc

SEQ ID NO: 3128727 - RNA, 19 nt, Artificial Sequence
  Description of Artificial Sequence: Synthetic oligonucleotide
gggcacgaagcagaggagc

SEQ ID NO: 3128728 - RNA, 19 nt, Artificial Sequence
  Description of Artificial Sequence: Synthetic oligonucleotide
ugaccacguagcacccgau

SEQ ID NO: 3128729 - RNA, 19 nt, Artificial Sequence
  Description of Artificial Sequence: Synthetic oligonucleotide
ugacugcuuuuaaguggau

SEQ ID NO: 3128730 - RNA, 19 nt, Artificial Sequence
  Description of Artificial Sequence: Synthetic oligonucleotide
gaggucugcccgcgcagca

SEQ ID NO: 3128731 - RNA, 19 nt, Artificial Sequence
  Description of Artificial Sequence: Synthetic oligonucleotide
ggauggacuucuccuucac

SEQ ID NO: 3128732 - RNA, 19 nt, Artificial Sequence
  Description of Artificial Sequence: Synthetic oligonucleotide
cuucuccuucaccgcgggc

SEQ ID NO: 3128733 - RNA, 19 nt, Artificial Sequence
  Description of Artificial Sequence: Synthetic oligonucleotide
cugcccgcgcagcaggcug

SEQ ID NO: 3128734 - RNA, 19 nt, Artificial Sequence
  Description of Artificial Sequence: Synthetic oligonucleotide
acgccagacgugugaaguu

SEQ ID NO: 3128735 - RNA, 19 nt, Artificial Sequence
  Description of Artificial Sequence: Synthetic oligonucleotide
cuucagcugggaggucugc

SEQ ID NO: 3128736 - RNA, 19 nt, Artificial Sequence
  Description of Artificial Sequence: Synthetic oligonucleotide
cugugggugaugaccacgu

SEQ ID NO: 3128737 - RNA, 19 nt, Artificial Sequence
  Description of Artificial Sequence: Synthetic oligonucleotide
ggagcaccugcaccagcag

SEQ ID NO: 3128738 - RNA, 19 nt, Artificial Sequence
  Description of Artificial Sequence: Synthetic oligonucleotide
acgaagcagaggagcaccu

SEQ ID NO: 3128739 - RNA, 19 nt, Artificial Sequence
  Description of Artificial Sequence: Synthetic oligonucleotide
ugcccgcgcagcaggcugu

SEQ ID NO: 3128740 - RNA, 19 nt, Artificial Sequence
  Description of Artificial Sequence: Synthetic oligonucleotide
agauguggaagggcacgaa

SEQ ID NO: 3128741 - RNA, 19 nt, Artificial Sequence
  Description of Artificial Sequence: Synthetic oligonucleotide
agggcacgaagcagaggag

SEQ ID NO: 3128742 - RNA, 19 nt, Artificial Sequence
  Description of Artificial Sequence: Synthetic oligonucleotide
ccagacgugugaaguugag

SEQ ID NO: 3128743 - RNA, 19 nt, Artificial Sequence
  Description of Artificial Sequence: Synthetic oligonucleotide
guugagcacguugacugcu

SEQ ID NO: 3128744 - RNA, 19 nt, Artificial Sequence
  Description of Artificial Sequence: Synthetic oligonucleotide
aggucugcccgcgcagcag

SEQ ID NO: 3128745 - RNA, 19 nt, Artificial Sequence
  Description of Artificial Sequence: Synthetic oligonucleotide
ggcacgaagcagaggagca

SEQ ID NO: 3128746 - RNA, 19 nt, Artificial Sequence
  Description of Artificial Sequence: Synthetic oligonucleotide
cagauguggaagggcacga

SEQ ID NO: 3128747 - RNA, 19 nt, Artificial Sequence
  Description of Artificial Sequence: Synthetic oligonucleotide
gggugaugaccacguagca

SEQ ID NO: 3128748 - RNA, 19 nt, Artificial Sequence
  Description of Artificial Sequence: Synthetic oligonucleotide
gggaggucugcccgcgcag

SEQ ID NO: 3128749 - RNA, 19 nt, Artificial Sequence
  Description of Artificial Sequence: Synthetic oligonucleotide
ccaacaaagggagcaagaa

SEQ ID NO: 3128750 - RNA, 19 nt, Artificial Sequence
  Description of Artificial Sequence: Synthetic oligonucleotide
cguagcacccgaucaugac

SEQ ID NO: 3128751 - RNA, 19 nt, Artificial Sequence
  Description of Artificial Sequence: Synthetic oligonucleotide
gcugggaggucugcccgcg

SEQ ID NO: 3128752 - RNA, 19 nt, Artificial Sequence
  Description of Artificial Sequence: Synthetic oligonucleotide
gugugaagaugauccggau

SEQ ID NO: 3128753 - RNA, 19 nt, Artificial Sequence
  Description of Artificial Sequence: Synthetic oligonucleotide
cugcaccagcagugugaag

SEQ ID NO: 3128754 - RNA, 19 nt, Artificial Sequence
  Description of Artificial Sequence: Synthetic oligonucleotide
cugggaggucugcccgcgc

SEQ ID NO: 3128755 - RNA, 19 nt, Artificial Sequence
  Description of Artificial Sequence: Synthetic oligonucleotide
ccggauggacuucuccuuc

SEQ ID NO: 3128756 - RNA, 19 nt, Artificial Sequence
  Description of Artificial Sequence: Synthetic oligonucleotide
accgcgggcuucagcuggg

SEQ ID NO: 3128757 - RNA, 19 nt, Artificial Sequence
  Description of Artificial Sequence: Synthetic oligonucleotide
agcacccgaucaugaccaa

SEQ ID NO: 3128758 - RNA, 19 nt, Artificial Sequence
  Description of Artificial Sequence: Synthetic oligonucleotide
ggaggucugcccgcgcagc

SEQ ID NO: 3128759 - RNA, 19 nt, Artificial Sequence
  Description of Artificial Sequence: Synthetic oligonucleotide
gagcacguugacugcuuuu

SEQ ID NO: 3128760 - RNA, 19 nt, Artificial Sequence
  Description of Artificial Sequence: Synthetic oligonucleotide
gcacgaagcagaggagcac

SEQ ID NO: 3128761 - RNA, 19 nt, Artificial Sequence
  Description of Artificial Sequence: Synthetic oligonucleotide
gcacguugacugcuuuuaa

SEQ ID NO: 3128762 - RNA, 19 nt, Artificial Sequence
  Description of Artificial Sequence: Synthetic oligonucleotide
gucugcccgcgcagcaggc

SEQ ID NO: 3128763 - RNA, 19 nt, Artificial Sequence
  Description of Artificial Sequence: Synthetic oligonucleotide
cugcuuuuaaguggaugau

SEQ ID NO: 3128764 - RNA, 19 nt, Artificial Sequence
  Description of Artificial Sequence: Synthetic oligonucleotide
ggcugugggugaugaccac

SEQ ID NO: 3128765 - RNA, 19 nt, Artificial Sequence
  Description of Artificial Sequence: Synthetic oligonucleotide
gccagacgugugaaguuga

SEQ ID NO: 3128766 - RNA, 19 nt, Artificial Sequence
  Description of Artificial Sequence: Synthetic oligonucleotide
gcacccgaucaugaccaac

SEQ ID NO: 3128767 - RNA, 19 nt, Artificial Sequence
  Description of Artificial Sequence: Synthetic oligonucleotide
cgccagacgugugaaguug

SEQ ID NO: 3128768 - RNA, 19 nt, Artificial Sequence
  Description of Artificial Sequence: Synthetic oligonucleotide
gcaggcugugggugaugac

SEQ ID NO: 3128769 - RNA, 19 nt, Artificial Sequence
  Description of Artificial Sequence: Synthetic oligonucleotide
cccgaucaugaccaacaaa

SEQ ID NO: 3128770 - RNA, 19 nt, Artificial Sequence
  Description of Artificial Sequence: Synthetic oligonucleotide
cagcaggcugugggugaug

SEQ ID NO: 3128771 - RNA, 19 nt, Artificial Sequence
  Description of Artificial Sequence: Synthetic oligonucleotide
cgaagcagaggagcaccug

SEQ ID NO: 3128772 - RNA, 19 nt, Artificial Sequence
  Description of Artificial Sequence: Synthetic oligonucleotide
cgugugaaguugagcacgu

SEQ ID NO: 3128773 - RNA, 19 nt, Artificial Sequence
  Description of Artificial Sequence: Synthetic oligonucleotide
cgcgggcuucagcugggag

SEQ ID NO: 3128774 - RNA, 19 nt, Artificial Sequence
  Description of Artificial Sequence: Synthetic oligonucleotide
ccacguagcacccgaucau

SEQ ID NO: 3128775 - RNA, 19 nt, Artificial Sequence
  Description of Artificial Sequence: Synthetic oligonucleotide
ccagcagugugaagaugau

SEQ ID NO: 3128776 - RNA, 19 nt, Artificial Sequence
  Description of Artificial Sequence: Synthetic oligonucleotide
gcaccugcaccagcagugu

SEQ ID NO: 3128777 - RNA, 19 nt, Artificial Sequence
  Description of Artificial Sequence: Synthetic oligonucleotide
gugugaaguugagcacguu

SEQ ID NO: 3128778 - RNA, 19 nt, Artificial Sequence
  Description of Artificial Sequence: Synthetic oligonucleotide
ccuucaccgcgggcuucag

SEQ ID NO: 3128779 - RNA, 19 nt, Artificial Sequence
  Description of Artificial Sequence: Synthetic oligonucleotide
cgggcuucagcugggaggu

SEQ ID NO: 3128780 - RNA, 19 nt, Artificial Sequence
  Description of Artificial Sequence: Synthetic oligonucleotide
cccgcgcagcaggcugugg

SEQ ID NO: 3128781 - RNA, 19 nt, Artificial Sequence
  Description of Artificial Sequence: Synthetic oligonucleotide
gcagcaggcugugggugau

SEQ ID NO: 3128782 - RNA, 19 nt, Artificial Sequence
  Description of Artificial Sequence: Synthetic oligonucleotide
ggaugaugucagagaccuu

SEQ ID NO: 3128783 - RNA, 19 nt, Artificial Sequence
  Description of Artificial Sequence: Synthetic oligonucleotide
ccgcgggcuucagcuggga

SEQ ID NO: 3128784 - RNA, 19 nt, Artificial Sequence
  Description of Artificial Sequence: Synthetic oligonucleotide
aacaacaggaagcgggucc

SEQ ID NO: 3128785 - RNA, 19 nt, Artificial Sequence
  Description of Artificial Sequence: Synthetic oligonucleotide
auuacaaagggguuagcac

SEQ ID NO: 3128786 - RNA, 19 nt, Artificial Sequence
  Description of Artificial Sequence: Synthetic oligonucleotide
agaggcagaauccagauca

SEQ ID NO: 3128787 - RNA, 19 nt, Artificial Sequence
  Description of Artificial Sequence: Synthetic oligonucleotide
uuuggcaagaggcagaauc

SEQ ID NO: 3128788 - RNA, 19 nt, Artificial Sequence
  Description of Artificial Sequence: Synthetic oligonucleotide
uuacaaagggguuagcacc

SEQ ID NO: 3128789 - RNA, 19 nt, Artificial Sequence
  Description of Artificial Sequence: Synthetic oligonucleotide
agcaccaacaacaggaagc

SEQ ID NO: 3128790 - RNA, 19 nt, Artificial Sequence
  Description of Artificial Sequence: Synthetic oligonucleotide
cucugcuuuggcaagaggc

SEQ ID NO: 3128791 - RNA, 19 nt, Artificial Sequence
  Description of Artificial Sequence: Synthetic oligonucleotide
agugcagacagugcaagcc

SEQ ID NO: 3128792 - RNA, 19 nt, Artificial Sequence
  Description of Artificial Sequence: Synthetic oligonucleotide
acagugcaagccuuugucc

SEQ ID NO: 3128793 - RNA, 19 nt, Artificial Sequence
  Description of Artificial Sequence: Synthetic oligonucleotide
guuagcaccaacaacagga

SEQ ID NO: 3128794 - RNA, 19 nt, Artificial Sequence
  Description of Artificial Sequence: Synthetic oligonucleotide
uuggcaagaggcagaaucc

SEQ ID NO: 3128795 - RNA, 19 nt, Artificial Sequence
  Description of Artificial Sequence: Synthetic oligonucleotide
uuuguccucagguaggcgu

SEQ ID NO: 3128796 - RNA, 19 nt, Artificial Sequence
  Description of Artificial Sequence: Synthetic oligonucleotide
accaacaacaggaagcggg

SEQ ID NO: 3128797 - RNA, 19 nt, Artificial Sequence
  Description of Artificial Sequence: Synthetic oligonucleotide
uaguguggggagaggaugg

SEQ ID NO: 3128798 - RNA, 19 nt, Artificial Sequence
  Description of Artificial Sequence: Synthetic oligonucleotide
uacugggauuacaaagggg

SEQ ID NO: 3128799 - RNA, 19 nt, Artificial Sequence
  Description of Artificial Sequence: Synthetic oligonucleotide
acugggauuacaaaggggu

SEQ ID NO: 3128800 - RNA, 19 nt, Artificial Sequence
  Description of Artificial Sequence: Synthetic oligonucleotide
gagaggggagugcagacag

SEQ ID NO: 3128801 - RNA, 19 nt, Artificial Sequence
  Description of Artificial Sequence: Synthetic oligonucleotide
guacugggauuacaaaggg

SEQ ID NO: 3128802 - RNA, 19 nt, Artificial Sequence
  Description of Artificial Sequence: Synthetic oligonucleotide
acaggaagcggguccuucc

SEQ ID NO: 3128803 - RNA, 19 nt, Artificial Sequence
  Description of Artificial Sequence: Synthetic oligonucleotide
gguacugggauuacaaagg

SEQ ID NO: 3128804 - RNA, 19 nt, Artificial Sequence
  Description of Artificial Sequence: Synthetic oligonucleotide
cagaauccagaucagugag

SEQ ID NO: 3128805 - RNA, 19 nt, Artificial Sequence
  Description of Artificial Sequence: Synthetic oligonucleotide
gauuacaaagggguuagca

SEQ ID NO: 3128806 - RNA, 19 nt, Artificial Sequence
  Description of Artificial Sequence: Synthetic oligonucleotide
agggguuagcaccaacaac

SEQ ID NO: 3128807 - RNA, 19 nt, Artificial Sequence
  Description of Artificial Sequence: Synthetic oligonucleotide
agccuuuguccucagguag

SEQ ID NO: 3128808 - RNA, 19 nt, Artificial Sequence
  Description of Artificial Sequence: Synthetic oligonucleotide
aaagggguuagcaccaaca

SEQ ID NO: 3128809 - RNA, 19 nt, Artificial Sequence
  Description of Artificial Sequence: Synthetic oligonucleotide
gagguaaggggccaggaga

SEQ ID NO: 3128810 - RNA, 19 nt, Artificial Sequence
  Description of Artificial Sequence: Synthetic oligonucleotide
gacagugcaagccuuuguc

SEQ ID NO: 3128811 - RNA, 19 nt, Artificial Sequence
  Description of Artificial Sequence: Synthetic oligonucleotide
cucagggacagguagugug

SEQ ID NO: 3128812 - RNA, 19 nt, Artificial Sequence
  Description of Artificial Sequence: Synthetic oligonucleotide
aagggguuagcaccaacaa

SEQ ID NO: 3128813 - RNA, 19 nt, Artificial Sequence
  Description of Artificial Sequence: Synthetic oligonucleotide
agugcaagccuuuguccuc

SEQ ID NO: 3128814 - RNA, 19 nt, Artificial Sequence
  Description of Artificial Sequence: Synthetic oligonucleotide
uaaggggccaggagagggg

SEQ ID NO: 3128815 - RNA, 19 nt, Artificial Sequence
  Description of Artificial Sequence: Synthetic oligonucleotide
uccuuccuuccucaggcag

SEQ ID NO: 3128816 - RNA, 19 nt, Artificial Sequence
  Description of Artificial Sequence: Synthetic oligonucleotide
gugggcaugcagcucaggg

SEQ ID NO: 3128817 - RNA, 19 nt, Artificial Sequence
  Description of Artificial Sequence: Synthetic oligonucleotide
agguaggcgugguuggugg

SEQ ID NO: 3128818 - RNA, 19 nt, Artificial Sequence
  Description of Artificial Sequence: Synthetic oligonucleotide
uuagcaccaacaacaggaa

SEQ ID NO: 3128819 - RNA, 19 nt, Artificial Sequence
  Description of Artificial Sequence: Synthetic oligonucleotide
ucaggcagccacagacugg

SEQ ID NO: 3128820 - RNA, 19 nt, Artificial Sequence
  Description of Artificial Sequence: Synthetic oligonucleotide
guaaggggccaggagaggg

SEQ ID NO: 3128821 - RNA, 19 nt, Artificial Sequence
  Description of Artificial Sequence: Synthetic oligonucleotide
uagcaccaacaacaggaag

SEQ ID NO: 3128822 - RNA, 19 nt, Artificial Sequence
  Description of Artificial Sequence: Synthetic oligonucleotide
aggagaggggagugcagac

SEQ ID NO: 3128823 - RNA, 19 nt, Artificial Sequence
  Description of Artificial Sequence: Synthetic oligonucleotide
aacaggaagcggguccuuc

SEQ ID NO: 3128824 - RNA, 19 nt, Artificial Sequence
  Description of Artificial Sequence: Synthetic oligonucleotide
uuguccucagguaggcgug

SEQ ID NO: 3128825 - RNA, 19 nt, Artificial Sequence
  Description of Artificial Sequence: Synthetic oligonucleotide
gggguuagcaccaacaaca

SEQ ID NO: 3128826 - RNA, 19 nt, Artificial Sequence
  Description of Artificial Sequence: Synthetic oligonucleotide
ugcuuuggcaagaggcaga

SEQ ID NO: 3128827 - RNA, 19 nt, Artificial Sequence
  Description of Artificial Sequence: Synthetic oligonucleotide
gguccuuccuuccucaggc

SEQ ID NO: 3128828 - RNA, 19 nt, Artificial Sequence
  Description of Artificial Sequence: Synthetic oligonucleotide
uccuuccucaggcagccac

SEQ ID NO: 3128829 - RNA, 19 nt, Artificial Sequence
  Description of Artificial Sequence: Synthetic oligonucleotide
ugggcaugcagcucaggga

SEQ ID NO: 3128830 - RNA, 19 nt, Artificial Sequence
  Description of Artificial Sequence: Synthetic oligonucleotide
aagccuuuguccucaggua

SEQ ID NO: 3128831 - RNA, 19 nt, Artificial Sequence
  Description of Artificial Sequence: Synthetic oligonucleotide
ugggauuacaaagggguua

SEQ ID NO: 3128832 - RNA, 19 nt, Artificial Sequence
  Description of Artificial Sequence: Synthetic oligonucleotide
acagguaguguggggagag

SEQ ID NO: 3128833 - RNA, 19 nt, Artificial Sequence
  Description of Artificial Sequence: Synthetic oligonucleotide
gcaccaacaacaggaagcg

SEQ ID NO: 3128834 - RNA, 19 nt, Artificial Sequence
  Description of Artificial Sequence: Synthetic oligonucleotide
cacagacuggccaggggag

SEQ ID NO: 3128835 - RNA, 19 nt, Artificial Sequence
  Description of Artificial Sequence: Synthetic oligonucleotide
gaagcggguccuuccuucc

SEQ ID NO: 3128836 - RNA, 19 nt, Artificial Sequence
  Description of Artificial Sequence: Synthetic oligonucleotide
caggcagccacagacuggc

SEQ ID NO: 3128837 - RNA, 19 nt, Artificial Sequence
  Description of Artificial Sequence: Synthetic oligonucleotide
ggcagaauccagaucagug

SEQ ID NO: 3128838 - RNA, 19 nt, Artificial Sequence
  Description of Artificial Sequence: Synthetic oligonucleotide
gagugcagacagugcaagc

SEQ ID NO: 3128839 - RNA, 19 nt, Artificial Sequence
  Description of Artificial Sequence: Synthetic oligonucleotide
gcagcucagggacagguag

SEQ ID NO: 3128840 - RNA, 19 nt, Artificial Sequence
  Description of Artificial Sequence: Synthetic oligonucleotide
agguaaggggccaggagag

SEQ ID NO: 3128841 - RNA, 19 nt, Artificial Sequence
  Description of Artificial Sequence: Synthetic oligonucleotide
aguguggggagaggauggc

SEQ ID NO: 3128842 - RNA, 19 nt, Artificial Sequence
  Description of Artificial Sequence: Synthetic oligonucleotide
gggauuacaaagggguuag

SEQ ID NO: 3128843 - RNA, 19 nt, Artificial Sequence
  Description of Artificial Sequence: Synthetic oligonucleotide
gguuagcaccaacaacagg

SEQ ID NO: 3128844 - RNA, 19 nt, Artificial Sequence
  Description of Artificial Sequence: Synthetic oligonucleotide
agggacagguagugugggg

SEQ ID NO: 3128845 - RNA, 19 nt, Artificial Sequence
  Description of Artificial Sequence: Synthetic oligonucleotide
gcagaauccagaucaguga

SEQ ID NO: 3128846 - RNA, 19 nt, Artificial Sequence
  Description of Artificial Sequence: Synthetic oligonucleotide
gggcaugcagcucagggac

SEQ ID NO: 3128847 - RNA, 19 nt, Artificial Sequence
  Description of Artificial Sequence: Synthetic oligonucleotide
acaacaggaagcggguccu

SEQ ID NO: 3128848 - RNA, 19 nt, Artificial Sequence
  Description of Artificial Sequence: Synthetic oligonucleotide
ugcagacagugcaagccuu

SEQ ID NO: 3128849 - RNA, 19 nt, Artificial Sequence
  Description of Artificial Sequence: Synthetic oligonucleotide
caagccuuuguccucaggu

SEQ ID NO: 3128850 - RNA, 19 nt, Artificial Sequence
  Description of Artificial Sequence: Synthetic oligonucleotide
agguaguguggggagagga

SEQ ID NO: 3128851 - RNA, 19 nt, Artificial Sequence
  Description of Artificial Sequence: Synthetic oligonucleotide
ggagguaaggggccaggag

SEQ ID NO: 3128852 - RNA, 19 nt, Artificial Sequence
  Description of Artificial Sequence: Synthetic oligonucleotide
aggggagugcagacagugc

SEQ ID NO: 3128853 - RNA, 19 nt, Artificial Sequence
  Description of Artificial Sequence: Synthetic oligonucleotide
ggccaggggagguaagggg

SEQ ID NO: 3128854 - RNA, 19 nt, Artificial Sequence
  Description of Artificial Sequence: Synthetic oligonucleotide
gaggcagaauccagaucag

SEQ ID NO: 3128855 - RNA, 19 nt, Artificial Sequence
  Description of Artificial Sequence: Synthetic oligonucleotide
ggggagugcagacagugca

SEQ ID NO: 3128856 - RNA, 19 nt, Artificial Sequence
  Description of Artificial Sequence: Synthetic oligonucleotide
aagcggguccuuccuuccu

SEQ ID NO: 3128857 - RNA, 19 nt, Artificial Sequence
  Description of Artificial Sequence: Synthetic oligonucleotide
caaagggguuagcaccaac

SEQ ID NO: 3128858 - RNA, 19 nt, Artificial Sequence
  Description of Artificial Sequence: Synthetic oligonucleotide
cuuuguccucagguaggcg

SEQ ID NO: 3128859 - RNA, 19 nt, Artificial Sequence
  Description of Artificial Sequence: Synthetic oligonucleotide
aaggggccaggagagggga

SEQ ID NO: 3128860 - RNA, 19 nt, Artificial Sequence
  Description of Artificial Sequence: Synthetic oligonucleotide
augcagcucagggacaggu

SEQ ID NO: 3128861 - RNA, 19 nt, Artificial Sequence
  Description of Artificial Sequence: Synthetic oligonucleotide
cagggacagguaguguggg

SEQ ID NO: 3128862 - RNA, 19 nt, Artificial Sequence
  Description of Artificial Sequence: Synthetic oligonucleotide
ggagugcagacagugcaag

SEQ ID NO: 3128863 - RNA, 19 nt, Artificial Sequence
  Description of Artificial Sequence: Synthetic oligonucleotide
aggauggcaggccccucug

SEQ ID NO: 3128864 - RNA, 19 nt, Artificial Sequence
  Description of Artificial Sequence: Synthetic oligonucleotide
gauggcaggccccucugcu

SEQ ID NO: 3128865 - RNA, 19 nt, Artificial Sequence
  Description of Artificial Sequence: Synthetic oligonucleotide
uggcaggccccucugcuuu

SEQ ID NO: 3128866 - RNA, 19 nt, Artificial Sequence
  Description of Artificial Sequence: Synthetic oligonucleotide
uaggcgugguuggugggca

SEQ ID NO: 3128867 - RNA, 19 nt, Artificial Sequence
  Description of Artificial Sequence: Synthetic oligonucleotide
guaggcgugguuggugggc

SEQ ID NO: 3128868 - RNA, 19 nt, Artificial Sequence
  Description of Artificial Sequence: Synthetic oligonucleotide
ugcagcucagggacaggua

SEQ ID NO: 3128869 - RNA, 19 nt, Artificial Sequence
  Description of Artificial Sequence: Synthetic oligonucleotide
uggugggcaugcagcucag

SEQ ID NO: 3128870 - RNA, 19 nt, Artificial Sequence
  Description of Artificial Sequence: Synthetic oligonucleotide
ggguccuuccuuccucagg

SEQ ID NO: 3128871 - RNA, 19 nt, Artificial Sequence
  Description of Artificial Sequence: Synthetic oligonucleotide
ucagguaggcgugguuggu

SEQ ID NO: 3128872 - RNA, 19 nt, Artificial Sequence
  Description of Artificial Sequence: Synthetic oligonucleotide
ugcaagccuuuguccucag

SEQ ID NO: 3128873 - RNA, 19 nt, Artificial Sequence
  Description of Artificial Sequence: Synthetic oligonucleotide
cagacagugcaagccuuug

SEQ ID NO: 3128874 - RNA, 19 nt, Artificial Sequence
  Description of Artificial Sequence: Synthetic oligonucleotide
cagugcaagccuuuguccu

SEQ ID NO: 3128875 - RNA, 19 nt, Artificial Sequence
  Description of Artificial Sequence: Synthetic oligonucleotide
ggguuagcaccaacaacag

SEQ ID NO: 3128876 - RNA, 19 nt, Artificial Sequence
  Description of Artificial Sequence: Synthetic oligonucleotide
ggaagcggguccuuccuuc

SEQ ID NO: 3128877 - RNA, 19 nt, Artificial Sequence
  Description of Artificial Sequence: Synthetic oligonucleotide
gccuuuguccucagguagg

SEQ ID NO: 3128878 - RNA, 19 nt, Artificial Sequence
  Description of Artificial Sequence: Synthetic oligonucleotide
uuccucaggcagccacaga

SEQ ID NO: 3128879 - RNA, 19 nt, Artificial Sequence
  Description of Artificial Sequence: Synthetic oligonucleotide
caagaggcagaauccagau

SEQ ID NO: 3128880 - RNA, 19 nt, Artificial Sequence
  Description of Artificial Sequence: Synthetic oligonucleotide
aggcagaauccagaucagu

SEQ ID NO: 3128881 - RNA, 19 nt, Artificial Sequence
  Description of Artificial Sequence: Synthetic oligonucleotide
gacagguaguguggggaga

SEQ ID NO: 3128882 - RNA, 19 nt, Artificial Sequence
  Description of Artificial Sequence: Synthetic oligonucleotide
caccaacaacaggaagcgg

SEQ ID NO: 3128883 - RNA, 19 nt, Artificial Sequence
  Description of Artificial Sequence: Synthetic oligonucleotide
aggccccucugcuuuggca

SEQ ID NO: 3128884 - RNA, 19 nt, Artificial Sequence
  Description of Artificial Sequence: Synthetic oligonucleotide
gccaggggagguaaggggc

SEQ ID NO: 3128885 - RNA, 19 nt, Artificial Sequence
  Description of Artificial Sequence: Synthetic oligonucleotide
gcaagaggcagaauccaga

SEQ ID NO: 3128886 - RNA, 19 nt, Artificial Sequence
  Description of Artificial Sequence: Synthetic oligonucleotide
ggcagccacagacuggcca

SEQ ID NO: 3128887 - RNA, 19 nt, Artificial Sequence
  Description of Artificial Sequence: Synthetic oligonucleotide
gcaugcagcucagggacag

SEQ ID NO: 3128888 - RNA, 19 nt, Artificial Sequence
  Description of Artificial Sequence: Synthetic oligonucleotide
gugcagacagugcaagccu

SEQ ID NO: 3128889 - RNA, 19 nt, Artificial Sequence
  Description of Artificial Sequence: Synthetic oligonucleotide
gggacagguagugugggga

SEQ ID NO: 3128890 - RNA, 19 nt, Artificial Sequence
  Description of Artificial Sequence: Synthetic oligonucleotide
cagguaggcgugguuggug

SEQ ID NO: 3128891 - RNA, 19 nt, Artificial Sequence
  Description of Artificial Sequence: Synthetic oligonucleotide
gaggauggcaggccccucu

SEQ ID NO: 3128892 - RNA, 19 nt, Artificial Sequence
  Description of Artificial Sequence: Synthetic oligonucleotide
ccaggggagguaaggggcc

SEQ ID NO: 3128893 - RNA, 19 nt, Artificial Sequence
  Description of Artificial Sequence: Synthetic oligonucleotide
ccucagguaggcgugguug

SEQ ID NO: 3128894 - RNA, 19 nt, Artificial Sequence
  Description of Artificial Sequence: Synthetic oligonucleotide
gguaaggggccaggagagg

SEQ ID NO: 3128895 - RNA, 19 nt, Artificial Sequence
  Description of Artificial Sequence: Synthetic oligonucleotide
cagguaguguggggagagg

SEQ ID NO: 3128896 - RNA, 19 nt, Artificial Sequence
  Description of Artificial Sequence: Synthetic oligonucleotide
uccucagguaggcgugguu

SEQ ID NO: 3128897 - RNA, 19 nt, Artificial Sequence
  Description of Artificial Sequence: Synthetic oligonucleotide
gugcaagccuuuguccuca

SEQ ID NO: 3128898 - RNA, 19 nt, Artificial Sequence
  Description of Artificial Sequence: Synthetic oligonucleotide
caugcagcucagggacagg

SEQ ID NO: 3128899 - RNA, 19 nt, Artificial Sequence
  Description of Artificial Sequence: Synthetic oligonucleotide
auggcaggccccucugcuu

SEQ ID NO: 3128900 - RNA, 19 nt, Artificial Sequence
  Description of Artificial Sequence: Synthetic oligonucleotide
gcaagccuuuguccucagg

SEQ ID NO: 3128901 - RNA, 19 nt, Artificial Sequence
  Description of Artificial Sequence: Synthetic oligonucleotide
agaggauggcaggccccuc

SEQ ID NO: 3128902 - RNA, 19 nt, Artificial Sequence
  Description of Artificial Sequence: Synthetic oligonucleotide
aggaagcggguccuuccuu

SEQ ID NO: 3128903 - RNA, 19 nt, Artificial Sequence
  Description of Artificial Sequence: Synthetic oligonucleotide
ccacagacuggccagggga

SEQ ID NO: 3128904 - RNA, 19 nt, Artificial Sequence
  Description of Artificial Sequence: Synthetic oligonucleotide
ggagaggauggcaggcccc

SEQ ID NO: 3128905 - RNA, 19 nt, Artificial Sequence
  Description of Artificial Sequence: Synthetic oligonucleotide
aggggagguaaggggccag

SEQ ID NO: 3128906 - RNA, 19 nt, Artificial Sequence
  Description of Artificial Sequence: Synthetic oligonucleotide
guuggugggcaugcagcuc

SEQ ID NO: 3128907 - RNA, 19 nt, Artificial Sequence
  Description of Artificial Sequence: Synthetic oligonucleotide
ggccccucugcuuuggcaa

SEQ ID NO: 3128908 - RNA, 19 nt, Artificial Sequence
  Description of Artificial Sequence: Synthetic oligonucleotide
gguuggugggcaugcagcu

SEQ ID NO: 3128909 - RNA, 19 nt, Artificial Sequence
  Description of Artificial Sequence: Synthetic oligonucleotide
ggauggcaggccccucugc

SEQ ID NO: 3128910 - RNA, 19 nt, Artificial Sequence
  Description of Artificial Sequence: Synthetic oligonucleotide
acaaagggguuagcaccaa

SEQ ID NO: 3128911 - RNA, 19 nt, Artificial Sequence
  Description of Artificial Sequence: Synthetic oligonucleotide
ggauuacaaagggguuagc

SEQ ID NO: 3128912 - RNA, 19 nt, Artificial Sequence
  Description of Artificial Sequence: Synthetic oligonucleotide
gacuggccaggggagguaa

SEQ ID NO: 3128913 - RNA, 19 nt, Artificial Sequence
  Description of Artificial Sequence: Synthetic oligonucleotide
gagaggauggcaggccccu

SEQ ID NO: 3128914 - RNA, 19 nt, Artificial Sequence
  Description of Artificial Sequence: Synthetic oligonucleotide
guccuuccuuccucaggca

SEQ ID NO: 3128915 - RNA, 19 nt, Artificial Sequence
  Description of Artificial Sequence: Synthetic oligonucleotide
ggggagguaaggggccagg

SEQ ID NO: 3128916 - RNA, 19 nt, Artificial Sequence
  Description of Artificial Sequence: Synthetic oligonucleotide
ccucugcuuuggcaagagg

SEQ ID NO: 3128917 - RNA, 19 nt, Artificial Sequence
  Description of Artificial Sequence: Synthetic oligonucleotide
acuggccaggggagguaag

SEQ ID NO: 3128918 - RNA, 19 nt, Artificial Sequence
  Description of Artificial Sequence: Synthetic oligonucleotide
ggagaggggagugcagaca

SEQ ID NO: 3128919 - RNA, 19 nt, Artificial Sequence
  Description of Artificial Sequence: Synthetic oligonucleotide
aggcagccacagacuggcc

SEQ ID NO: 3128920 - RNA, 19 nt, Artificial Sequence
  Description of Artificial Sequence: Synthetic oligonucleotide
cugggauuacaaagggguu

SEQ ID NO: 3128921 - RNA, 19 nt, Artificial Sequence
  Description of Artificial Sequence: Synthetic oligonucleotide
caggccccucugcuuuggc

SEQ ID NO: 3128922 - RNA, 19 nt, Artificial Sequence
  Description of Artificial Sequence: Synthetic oligonucleotide
gcuuuggcaagaggcagaa

SEQ ID NO: 3128923 - RNA, 19 nt, Artificial Sequence
  Description of Artificial Sequence: Synthetic oligonucleotide
gccccucugcuuuggcaag

SEQ ID NO: 3128924 - RNA, 19 nt, Artificial Sequence
  Description of Artificial Sequence: Synthetic oligonucleotide
gcgugguuggugggcaugc

SEQ ID NO: 3128925 - RNA, 19 nt, Artificial Sequence
  Description of Artificial Sequence: Synthetic oligonucleotide
ggugggcaugcagcucagg

SEQ ID NO: 3128926 - RNA, 19 nt, Artificial Sequence
  Description of Artificial Sequence: Synthetic oligonucleotide
cagcucagggacagguagu

SEQ ID NO: 3128927 - RNA, 19 nt, Artificial Sequence
  Description of Artificial Sequence: Synthetic oligonucleotide
aggggccaggagaggggag

SEQ ID NO: 3128928 - RNA, 19 nt, Artificial Sequence
  Description of Artificial Sequence: Synthetic oligonucleotide
caggaagcggguccuuccu

SEQ ID NO: 3128929 - RNA, 19 nt, Artificial Sequence
  Description of Artificial Sequence: Synthetic oligonucleotide
aggcgugguuggugggcau

SEQ ID NO: 3128930 - RNA, 19 nt, Artificial Sequence
  Description of Artificial Sequence: Synthetic oligonucleotide
ggcgugguuggugggcaug

SEQ ID NO: 3128931 - RNA, 19 nt, Artificial Sequence
  Description of Artificial Sequence: Synthetic oligonucleotide
gggagugcagacagugcaa

SEQ ID NO: 3128932 - RNA, 19 nt, Artificial Sequence
  Description of Artificial Sequence: Synthetic oligonucleotide
gggagguaaggggccagga

SEQ ID NO: 3128933 - RNA, 19 nt, Artificial Sequence
  Description of Artificial Sequence: Synthetic oligonucleotide
ggcaggccccucugcuuug

SEQ ID NO: 3128934 - RNA, 19 nt, Artificial Sequence
  Description of Artificial Sequence: Synthetic oligonucleotide
agacuggccaggggaggua

SEQ ID NO: 3128935 - RNA, 19 nt, Artificial Sequence
  Description of Artificial Sequence: Synthetic oligonucleotide
gcaggccccucugcuuugg

SEQ ID NO: 3128936 - RNA, 19 nt, Artificial Sequence
  Description of Artificial Sequence: Synthetic oligonucleotide
ggccaggagaggggagugc

SEQ ID NO: 3128937 - RNA, 19 nt, Artificial Sequence
  Description of Artificial Sequence: Synthetic oligonucleotide
cccucugcuuuggcaagag

SEQ ID NO: 3128938 - RNA, 19 nt, Artificial Sequence
  Description of Artificial Sequence: Synthetic oligonucleotide
cagacuggccaggggaggu

SEQ ID NO: 3128939 - RNA, 19 nt, Artificial Sequence
  Description of Artificial Sequence: Synthetic oligonucleotide
ggcaugcagcucagggaca

SEQ ID NO: 3128940 - RNA, 19 nt, Artificial Sequence
  Description of Artificial Sequence: Synthetic oligonucleotide
guccucagguaggcguggu

SEQ ID NO: 3128941 - RNA, 19 nt, Artificial Sequence
  Description of Artificial Sequence: Synthetic oligonucleotide
cuuuggcaagaggcagaau

SEQ ID NO: 3128942 - RNA, 19 nt, Artificial Sequence
  Description of Artificial Sequence: Synthetic oligonucleotide
gcagacagugcaagccuuu

SEQ ID NO: 3128943 - RNA, 19 nt, Artificial Sequence
  Description of Artificial Sequence: Synthetic oligonucleotide
ccccucugcuuuggcaaga

SEQ ID NO: 3128944 - RNA, 19 nt, Artificial Sequence
  Description of Artificial Sequence: Synthetic oligonucleotide
caacaggaagcggguccuu

SEQ ID NO: 3128945 - RNA, 19 nt, Artificial Sequence
  Description of Artificial Sequence: Synthetic oligonucleotide
cgugguuggugggcaugca

SEQ ID NO: 3128946 - RNA, 19 nt, Artificial Sequence
  Description of Artificial Sequence: Synthetic oligonucleotide
uuagcagugaauuacuccg

SEQ ID NO: 3128947 - RNA, 19 nt, Artificial Sequence
  Description of Artificial Sequence: Synthetic oligonucleotide
aaaauuuucgcacugucga

SEQ ID NO: 3128948 - RNA, 19 nt, Artificial Sequence
  Description of Artificial Sequence: Synthetic oligonucleotide
aaagucaccuccgagaugg

SEQ ID NO: 3128949 - RNA, 19 nt, Artificial Sequence
  Description of Artificial Sequence: Synthetic oligonucleotide
ucuggcaaacauuucaagg

SEQ ID NO: 3128950 - RNA, 19 nt, Artificial Sequence
  Description of Artificial Sequence: Synthetic oligonucleotide
uuuggcaaaauuuucgcac

SEQ ID NO: 3128951 - RNA, 19 nt, Artificial Sequence
  Description of Artificial Sequence: Synthetic oligonucleotide
uuuucuuuggccuuucgcu

SEQ ID NO: 3128952 - RNA, 19 nt, Artificial Sequence
  Description of Artificial Sequence: Synthetic oligonucleotide
uauuuuagcagugaauuac

SEQ ID NO: 3128953 - RNA, 19 nt, Artificial Sequence
  Description of Artificial Sequence: Synthetic oligonucleotide
uuuagcagugaauuacucc

SEQ ID NO: 3128954 - RNA, 19 nt, Artificial Sequence
  Description of Artificial Sequence: Synthetic oligonucleotide
uguauuuuagcagugaauu

SEQ ID NO: 3128955 - RNA, 19 nt, Artificial Sequence
  Description of Artificial Sequence: Synthetic oligonucleotide
caaaauuuucgcacugucg

SEQ ID NO: 3128956 - RNA, 19 nt, Artificial Sequence
  Description of Artificial Sequence: Synthetic oligonucleotide
ucuuuggcaaaauuuucgc

SEQ ID NO: 3128957 - RNA, 19 nt, Artificial Sequence
  Description of Artificial Sequence: Synthetic oligonucleotide
acauuucaaggucuuuggc

SEQ ID NO: 3128958 - RNA, 19 nt, Artificial Sequence
  Description of Artificial Sequence: Synthetic oligonucleotide
aagagcuucacguccucag

SEQ ID NO: 3128959 - RNA, 19 nt, Artificial Sequence
  Description of Artificial Sequence: Synthetic oligonucleotide
cugucgaaaagucaccucc

SEQ ID NO: 3128960 - RNA, 19 nt, Artificial Sequence
  Description of Artificial Sequence: Synthetic oligonucleotide
ugucgaaaagucaccuccg

SEQ ID NO: 3128961 - RNA, 19 nt, Artificial Sequence
  Description of Artificial Sequence: Synthetic oligonucleotide
auuucaaggucuuuggcaa

SEQ ID NO: 3128962 - RNA, 19 nt, Artificial Sequence
  Description of Artificial Sequence: Synthetic oligonucleotide
agcagugaauuacuccgcc

SEQ ID NO: 3128963 - RNA, 19 nt, Artificial Sequence
  Description of Artificial Sequence: Synthetic oligonucleotide
aauuacuccgccuggcuaa

SEQ ID NO: 3128964 - RNA, 19 nt, Artificial Sequence
  Description of Artificial Sequence: Synthetic oligonucleotide
agugaauuacuccgccugg

SEQ ID NO: 3128965 - RNA, 19 nt, Artificial Sequence
  Description of Artificial Sequence: Synthetic oligonucleotide
gucuuuggcaaaauuuucg

SEQ ID NO: 3128966 - RNA, 19 nt, Artificial Sequence
  Description of Artificial Sequence: Synthetic oligonucleotide
augucuggcaaacauuuca

SEQ ID NO: 3128967 - RNA, 19 nt, Artificial Sequence
  Description of Artificial Sequence: Synthetic oligonucleotide
uucgcucuagguuaagcug

SEQ ID NO: 3128968 - RNA, 19 nt, Artificial Sequence
  Description of Artificial Sequence: Synthetic oligonucleotide
uuucgcucuagguuaagcu

SEQ ID NO: 3128969 - RNA, 19 nt, Artificial Sequence
  Description of Artificial Sequence: Synthetic oligonucleotide
ucgaaaagucaccuccgag

SEQ ID NO: 3128970 - RNA, 19 nt, Artificial Sequence
  Description of Artificial Sequence: Synthetic oligonucleotide
ucuagguuaagcugagcaa

SEQ ID NO: 3128971 - RNA, 19 nt, Artificial Sequence
  Description of Artificial Sequence: Synthetic oligonucleotide
cauuucaaggucuuuggca

SEQ ID NO: 3128972 - RNA, 19 nt, Artificial Sequence
  Description of Artificial Sequence: Synthetic oligonucleotide
gauguauuuuagcagugaa

SEQ ID NO: 3128973 - RNA, 19 nt, Artificial Sequence
  Description of Artificial Sequence: Synthetic oligonucleotide
uuggcaaaauuuucgcacu

SEQ ID NO: 3128974 - RNA, 19 nt, Artificial Sequence
  Description of Artificial Sequence: Synthetic oligonucleotide
uuuuagcagugaauuacuc

SEQ ID NO: 3128975 - RNA, 19 nt, Artificial Sequence
  Description of Artificial Sequence: Synthetic oligonucleotide
aaauuuucgcacugucgaa

SEQ ID NO: 3128976 - RNA, 19 nt, Artificial Sequence
  Description of Artificial Sequence: Synthetic oligonucleotide
ucaguggugacugugcuuc

SEQ ID NO: 3128977 - RNA, 19 nt, Artificial Sequence
  Description of Artificial Sequence: Synthetic oligonucleotide
uggcaaacauuucaagguc

SEQ ID NO: 3128978 - RNA, 19 nt, Artificial Sequence
  Description of Artificial Sequence: Synthetic oligonucleotide
aauuuucgcacugucgaaa

SEQ ID NO: 3128979 - RNA, 19 nt, Artificial Sequence
  Description of Artificial Sequence: Synthetic oligonucleotide
aaggucuuuggcaaaauuu

SEQ ID NO: 3128980 - RNA, 19 nt, Artificial Sequence
  Description of Artificial Sequence: Synthetic oligonucleotide
uuucgcacugucgaaaagu

SEQ ID NO: 3128981 - RNA, 19 nt, Artificial Sequence
  Description of Artificial Sequence: Synthetic oligonucleotide
aaaagucaccuccgagaug

SEQ ID NO: 3128982 - RNA, 19 nt, Artificial Sequence
  Description of Artificial Sequence: Synthetic oligonucleotide
ugagcaaucucuucauuuu

SEQ ID NO: 3128983 - RNA, 19 nt, Artificial Sequence
  Description of Artificial Sequence: Synthetic oligonucleotide
uucucggugauguauuuua

SEQ ID NO: 3128984 - RNA, 19 nt, Artificial Sequence
  Description of Artificial Sequence: Synthetic oligonucleotide
ucucggugauguauuuuag

SEQ ID NO: 3128985 - RNA, 19 nt, Artificial Sequence
  Description of Artificial Sequence: Synthetic oligonucleotide
ugucuggcaaacauuucaa

SEQ ID NO: 3128986 - RNA, 19 nt, Artificial Sequence
  Description of Artificial Sequence: Synthetic oligonucleotide
acugucgaaaagucaccuc

SEQ ID NO: 3128987 - RNA, 19 nt, Artificial Sequence
  Description of Artificial Sequence: Synthetic oligonucleotide
uuuucgcacugucgaaaag

SEQ ID NO: 3128988 - RNA, 19 nt, Artificial Sequence
  Description of Artificial Sequence: Synthetic oligonucleotide
uuuugcaugucuggcaaac

SEQ ID NO: 3128989 - RNA, 19 nt, Artificial Sequence
  Description of Artificial Sequence: Synthetic oligonucleotide
cagugaauuacuccgccug

SEQ ID NO: 3128990 - RNA, 19 nt, Artificial Sequence
  Description of Artificial Sequence: Synthetic oligonucleotide
cucuagguuaagcugagca

SEQ ID NO: 3128991 - RNA, 19 nt, Artificial Sequence
  Description of Artificial Sequence: Synthetic oligonucleotide
uugcaugucuggcaaacau

SEQ ID NO: 3128992 - RNA, 19 nt, Artificial Sequence
  Description of Artificial Sequence: Synthetic oligonucleotide
cucggugauguauuuuagc

SEQ ID NO: 3128993 - RNA, 19 nt, Artificial Sequence
  Description of Artificial Sequence: Synthetic oligonucleotide
uuaagcugagcaaucucuu

SEQ ID NO: 3128994 - RNA, 19 nt, Artificial Sequence
  Description of Artificial Sequence: Synthetic oligonucleotide
uucgcacugucgaaaaguc

SEQ ID NO: 3128995 - RNA, 19 nt, Artificial Sequence
  Description of Artificial Sequence: Synthetic oligonucleotide
uacuccgccuggcuaagag

SEQ ID NO: 3128996 - RNA, 19 nt, Artificial Sequence
  Description of Artificial Sequence: Synthetic oligonucleotide
uggcaaaauuuucgcacug

SEQ ID NO: 3128997 - RNA, 19 nt, Artificial Sequence
  Description of Artificial Sequence: Synthetic oligonucleotide
uucacguccucagugguga

SEQ ID NO: 3128998 - RNA, 19 nt, Artificial Sequence
  Description of Artificial Sequence: Synthetic oligonucleotide
ugauguauuuuagcaguga

SEQ ID NO: 3128999 - RNA, 19 nt, Artificial Sequence
  Description of Artificial Sequence: Synthetic oligonucleotide
acuccgccuggcuaagagc

SEQ ID NO: 3129000 - RNA, 19 nt, Artificial Sequence
  Description of Artificial Sequence: Synthetic oligonucleotide
uuuggccuuucgcucuagg

SEQ ID NO: 3129001 - RNA, 19 nt, Artificial Sequence
  Description of Artificial Sequence: Synthetic oligonucleotide
uccucaguggugacugugc

SEQ ID NO: 3129002 - RNA, 19 nt, Artificial Sequence
  Description of Artificial Sequence: Synthetic oligonucleotide
uucuuuggccuuucgcucu

SEQ ID NO: 3129003 - RNA, 19 nt, Artificial Sequence
  Description of Artificial Sequence: Synthetic oligonucleotide
uagcagugaauuacuccgc

SEQ ID NO: 3129004 - RNA, 19 nt, Artificial Sequence
  Description of Artificial Sequence: Synthetic oligonucleotide
cuggcuaagagcuucacgu

SEQ ID NO: 3129005 - RNA, 19 nt, Artificial Sequence
  Description of Artificial Sequence: Synthetic oligonucleotide
uagguuaagcugagcaauc

SEQ ID NO: 3129006 - RNA, 19 nt, Artificial Sequence
  Description of Artificial Sequence: Synthetic oligonucleotide
auuuuagcagugaauuacu

SEQ ID NO: 3129007 - RNA, 19 nt, Artificial Sequence
  Description of Artificial Sequence: Synthetic oligonucleotide
auuuucgcacugucgaaaa

SEQ ID NO: 3129008 - RNA, 19 nt, Artificial Sequence
  Description of Artificial Sequence: Synthetic oligonucleotide
gaaaagucaccuccgagau

SEQ ID NO: 3129009 - RNA, 19 nt, Artificial Sequence
  Description of Artificial Sequence: Synthetic oligonucleotide
uggccuuucgcucuagguu

SEQ ID NO: 3129010 - RNA, 19 nt, Artificial Sequence
  Description of Artificial Sequence: Synthetic oligonucleotide
gucuggcaaacauuucaag

SEQ ID NO: 3129011 - RNA, 19 nt, Artificial Sequence
  Description of Artificial Sequence: Synthetic oligonucleotide
ucaccuccgagauggcugc

SEQ ID NO: 3129012 - RNA, 19 nt, Artificial Sequence
  Description of Artificial Sequence: Synthetic oligonucleotide
uuggccuuucgcucuaggu

SEQ ID NO: 3129013 - RNA, 19 nt, Artificial Sequence
  Description of Artificial Sequence: Synthetic oligonucleotide
ggugauguauuuuagcagu

SEQ ID NO: 3129014 - RNA, 19 nt, Artificial Sequence
  Description of Artificial Sequence: Synthetic oligonucleotide
ggcuaagagcuucacgucc

SEQ ID NO: 3129015 - RNA, 19 nt, Artificial Sequence
  Description of Artificial Sequence: Synthetic oligonucleotide
ugcaugucuggcaaacauu

SEQ ID NO: 3129016 - RNA, 19 nt, Artificial Sequence
  Description of Artificial Sequence: Synthetic oligonucleotide
ucgcacugucgaaaaguca

SEQ ID NO: 3129017 - RNA, 19 nt, Artificial Sequence
  Description of Artificial Sequence: Synthetic oligonucleotide
uucaaggucuuuggcaaaa

SEQ ID NO: 3129018 - RNA, 19 nt, Artificial Sequence
  Description of Artificial Sequence: Synthetic oligonucleotide
guauuuuagcagugaauua

SEQ ID NO: 3129019 - RNA, 19 nt, Artificial Sequence
  Description of Artificial Sequence: Synthetic oligonucleotide
cuuucgcucuagguuaagc

SEQ ID NO: 3129020 - RNA, 19 nt, Artificial Sequence
  Description of Artificial Sequence: Synthetic oligonucleotide
aggucuuuggcaaaauuuu

SEQ ID NO: 3129021 - RNA, 19 nt, Artificial Sequence
  Description of Artificial Sequence: Synthetic oligonucleotide
gaauuacuccgccuggcua

SEQ ID NO: 3129022 - RNA, 19 nt, Artificial Sequence
  Description of Artificial Sequence: Synthetic oligonucleotide
gucaccuccgagauggcug

SEQ ID NO: 3129023 - RNA, 19 nt, Artificial Sequence
  Description of Artificial Sequence: Synthetic oligonucleotide
uuugcaugucuggcaaaca

SEQ ID NO: 3129024 - RNA, 19 nt, Artificial Sequence
  Description of Artificial Sequence: Synthetic oligonucleotide
agagcuucacguccucagu

SEQ ID NO: 3129025 - RNA, 19 nt, Artificial Sequence
  Description of Artificial Sequence: Synthetic oligonucleotide
uuucaaggucuuuggcaaa

SEQ ID NO: 3129026 - RNA, 19 nt, Artificial Sequence
  Description of Artificial Sequence: Synthetic oligonucleotide
uucucauccucuggcuucc

SEQ ID NO: 3129027 - RNA, 19 nt, Artificial Sequence
  Description of Artificial Sequence: Synthetic oligonucleotide
uuuucucggugauguauuu

SEQ ID NO: 3129028 - RNA, 19 nt, Artificial Sequence
  Description of Artificial Sequence: Synthetic oligonucleotide
ccuguucucauccucuggc

SEQ ID NO: 3129029 - RNA, 19 nt, Artificial Sequence
  Description of Artificial Sequence: Synthetic oligonucleotide
auguauuuuagcagugaau

SEQ ID NO: 3129030 - RNA, 19 nt, Artificial Sequence
  Description of Artificial Sequence: Synthetic oligonucleotide
gcaaaauuuucgcacuguc

SEQ ID NO: 3129031 - RNA, 19 nt, Artificial Sequence
  Description of Artificial Sequence: Synthetic oligonucleotide
gugauguauuuuagcagug

SEQ ID NO: 3129032 - RNA, 19 nt, Artificial Sequence
  Description of Artificial Sequence: Synthetic oligonucleotide
cuucacguccucaguggug

SEQ ID NO: 3129033 - RNA, 19 nt, Artificial Sequence
  Description of Artificial Sequence: Synthetic oligonucleotide
acguccucaguggugacug

SEQ ID NO: 3129034 - RNA, 19 nt, Artificial Sequence
  Description of Artificial Sequence: Synthetic oligonucleotide
agcugagcaaucucuucau

SEQ ID NO: 3129035 - RNA, 19 nt, Artificial Sequence
  Description of Artificial Sequence: Synthetic oligonucleotide
uggcuaagagcuucacguc

SEQ ID NO: 3129036 - RNA, 19 nt, Artificial Sequence
  Description of Artificial Sequence: Synthetic oligonucleotide
uaagagcuucacguccuca

SEQ ID NO: 3129037 - RNA, 19 nt, Artificial Sequence
  Description of Artificial Sequence: Synthetic oligonucleotide
cgcacugucgaaaagucac

SEQ ID NO: 3129038 - RNA, 19 nt, Artificial Sequence
  Description of Artificial Sequence: Synthetic oligonucleotide
agguuaagcugagcaaucu

SEQ ID NO: 3129039 - RNA, 19 nt, Artificial Sequence
  Description of Artificial Sequence: Synthetic oligonucleotide
caugucuggcaaacauuuc

SEQ ID NO: 3129040 - RNA, 19 nt, Artificial Sequence
  Description of Artificial Sequence: Synthetic oligonucleotide
gucgaaaagucaccuccga

SEQ ID NO: 3129041 - RNA, 19 nt, Artificial Sequence
  Description of Artificial Sequence: Synthetic oligonucleotide
gguuaagcugagcaaucuc

SEQ ID NO: 3129042 - RNA, 19 nt, Artificial Sequence
  Description of Artificial Sequence: Synthetic oligonucleotide
cuccgagauggcugcaaug

SEQ ID NO: 3129043 - RNA, 19 nt, Artificial Sequence
  Description of Artificial Sequence: Synthetic oligonucleotide
auuacuccgccuggcuaag

SEQ ID NO: 3129044 - RNA, 19 nt, Artificial Sequence
  Description of Artificial Sequence: Synthetic oligonucleotide
ucuuuggccuuucgcucua

SEQ ID NO: 3129045 - RNA, 19 nt, Artificial Sequence
  Description of Artificial Sequence: Synthetic oligonucleotide
cuagguuaagcugagcaau

SEQ ID NO: 3129046 - RNA, 19 nt, Artificial Sequence
  Description of Artificial Sequence: Synthetic oligonucleotide
aagucaccuccgagauggc

SEQ ID NO: 3129047 - RNA, 19 nt, Artificial Sequence
  Description of Artificial Sequence: Synthetic oligonucleotide
cuaagagcuucacguccuc

SEQ ID NO: 3129048 - RNA, 19 nt, Artificial Sequence
  Description of Artificial Sequence: Synthetic oligonucleotide
cgaaaagucaccuccgaga

SEQ ID NO: 3129049 - RNA, 19 nt, Artificial Sequence
  Description of Artificial Sequence: Synthetic oligonucleotide
ccuggcuaagagcuucacg

SEQ ID NO: 3129050 - RNA, 19 nt, Artificial Sequence
  Description of Artificial Sequence: Synthetic oligonucleotide
ucaaggucuuuggcaaaau

SEQ ID NO: 3129051 - RNA, 19 nt, Artificial Sequence
  Description of Artificial Sequence: Synthetic oligonucleotide
uuucucggugauguauuuu

SEQ ID NO: 3129052 - RNA, 19 nt, Artificial Sequence
  Description of Artificial Sequence: Synthetic oligonucleotide
ggucuuuggcaaaauuuuc

SEQ ID NO: 3129053 - RNA, 19 nt, Artificial Sequence
  Description of Artificial Sequence: Synthetic oligonucleotide
cggugauguauuuuagcag

SEQ ID NO: 3129054 - RNA, 19 nt, Artificial Sequence
  Description of Artificial Sequence: Synthetic oligonucleotide
cuccgccuggcuaagagcu

SEQ ID NO: 3129055 - RNA, 19 nt, Artificial Sequence
  Description of Artificial Sequence: Synthetic oligonucleotide
ggccuuucgcucuagguua

SEQ ID NO: 3129056 - RNA, 19 nt, Artificial Sequence
  Description of Artificial Sequence: Synthetic oligonucleotide
cgagauggcugcaaugguc

SEQ ID NO: 3129057 - RNA, 19 nt, Artificial Sequence
  Description of Artificial Sequence: Synthetic oligonucleotide
ucacguccucaguggugac

SEQ ID NO: 3129058 - RNA, 19 nt, Artificial Sequence
  Description of Artificial Sequence: Synthetic oligonucleotide
gcacugucgaaaagucacc

SEQ ID NO: 3129059 - RNA, 19 nt, Artificial Sequence
  Description of Artificial Sequence: Synthetic oligonucleotide
ggcaaacauuucaaggucu

SEQ ID NO: 3129060 - RNA, 19 nt, Artificial Sequence
  Description of Artificial Sequence: Synthetic oligonucleotide
cuguucucauccucuggcu

SEQ ID NO: 3129061 - RNA, 19 nt, Artificial Sequence
  Description of Artificial Sequence: Synthetic oligonucleotide
uuacuccgccuggcuaaga

SEQ ID NO: 3129062 - RNA, 19 nt, Artificial Sequence
  Description of Artificial Sequence: Synthetic oligonucleotide
uccgccuggcuaagagcuu

SEQ ID NO: 3129063 - RNA, 19 nt, Artificial Sequence
  Description of Artificial Sequence: Synthetic oligonucleotide
cacugucgaaaagucaccu

SEQ ID NO: 3129064 - RNA, 19 nt, Artificial Sequence
  Description of Artificial Sequence: Synthetic oligonucleotide
gcaugucuggcaaacauuu

SEQ ID NO: 3129065 - RNA, 19 nt, Artificial Sequence
  Description of Artificial Sequence: Synthetic oligonucleotide
caaggucuuuggcaaaauu

SEQ ID NO: 3129066 - RNA, 19 nt, Artificial Sequence
  Description of Artificial Sequence: Synthetic oligonucleotide
cauccucuggcuuccguuu

SEQ ID NO: 3129067 - RNA, 19 nt, Artificial Sequence
  Description of Artificial Sequence: Synthetic oligonucleotide
ggcaaaauuuucgcacugu

SEQ ID NO: 3129068 - RNA, 19 nt, Artificial Sequence
  Description of Artificial Sequence: Synthetic oligonucleotide
gcuaagagcuucacguccu

SEQ ID NO: 3129069 - RNA, 19 nt, Artificial Sequence
  Description of Artificial Sequence: Synthetic oligonucleotide
gcagugaauuacuccgccu

SEQ ID NO: 3129070 - RNA, 19 nt, Artificial Sequence
  Description of Artificial Sequence: Synthetic oligonucleotide
guggugacugugcuucuuu

SEQ ID NO: 3129071 - RNA, 19 nt, Artificial Sequence
  Description of Artificial Sequence: Synthetic oligonucleotide
accuccgagauggcugcaa

SEQ ID NO: 3129072 - RNA, 19 nt, Artificial Sequence
  Description of Artificial Sequence: Synthetic oligonucleotide
cgcucuagguuaagcugag

SEQ ID NO: 3129073 - RNA, 19 nt, Artificial Sequence
  Description of Artificial Sequence: Synthetic oligonucleotide
caaacauuucaaggucuuu

SEQ ID NO: 3129074 - RNA, 19 nt, Artificial Sequence
  Description of Artificial Sequence: Synthetic oligonucleotide
gcucuagguuaagcugagc

SEQ ID NO: 3129075 - RNA, 19 nt, Artificial Sequence
  Description of Artificial Sequence: Synthetic oligonucleotide
cucaguggugacugugcuu

SEQ ID NO: 3129076 - RNA, 19 nt, Artificial Sequence
  Description of Artificial Sequence: Synthetic oligonucleotide
gcaaacauuucaaggucuu

SEQ ID NO: 3129077 - RNA, 19 nt, Artificial Sequence
  Description of Artificial Sequence: Synthetic oligonucleotide
cucauccucuggcuuccgu

SEQ ID NO: 3129078 - RNA, 19 nt, Artificial Sequence
  Description of Artificial Sequence: Synthetic oligonucleotide
ccgccuggcuaagagcuuc

SEQ ID NO: 3129079 - RNA, 19 nt, Artificial Sequence
  Description of Artificial Sequence: Synthetic oligonucleotide
ccuuucgcucuagguuaag

SEQ ID NO: 3129080 - RNA, 19 nt, Artificial Sequence
  Description of Artificial Sequence: Synthetic oligonucleotide
gccuggcuaagagcuucac

SEQ ID NO: 3129081 - RNA, 19 nt, Artificial Sequence
  Description of Artificial Sequence: Synthetic oligonucleotide
ccucaguggugacugugcu

SEQ ID NO: 3129082 - RNA, 19 nt, Artificial Sequence
  Description of Artificial Sequence: Synthetic oligonucleotide
gccuuucgcucuagguuaa

SEQ ID NO: 3129083 - RNA, 19 nt, Artificial Sequence
  Description of Artificial Sequence: Synthetic oligonucleotide
ccgagauggcugcaauggu

SEQ ID NO: 3129084 - RNA, 19 nt, Artificial Sequence
  Description of Artificial Sequence: Synthetic oligonucleotide
caccuccgagauggcugca

SEQ ID NO: 3129085 - RNA, 19 nt, Artificial Sequence
  Description of Artificial Sequence: Synthetic oligonucleotide
ccuccgagauggcugcaau

SEQ ID NO: 3129086 - RNA, 19 nt, Artificial Sequence
  Description of Artificial Sequence: Synthetic oligonucleotide
aacauuuccauaucaucuc

SEQ ID NO: 3129087 - RNA, 19 nt, Artificial Sequence
  Description of Artificial Sequence: Synthetic oligonucleotide
ucaugaaucugccuauugg

SEQ ID NO: 3129088 - RNA, 19 nt, Artificial Sequence
  Description of Artificial Sequence: Synthetic oligonucleotide
aaaguuaggggcaagccgg

SEQ ID NO: 3129089 - RNA, 19 nt, Artificial Sequence
  Description of Artificial Sequence: Synthetic oligonucleotide
uuccauaucaucuccaucu

SEQ ID NO: 3129090 - RNA, 19 nt, Artificial Sequence
  Description of Artificial Sequence: Synthetic oligonucleotide
gaaaguuaggggcaagccg

SEQ ID NO: 3129091 - RNA, 19 nt, Artificial Sequence
  Description of Artificial Sequence: Synthetic oligonucleotide
caugaaucugccuauuggg

SEQ ID NO: 3129092 - RNA, 19 nt, Artificial Sequence
  Description of Artificial Sequence: Synthetic oligonucleotide
aucaccuccucccaaaggg

SEQ ID NO: 3129093 - RNA, 19 nt, Artificial Sequence
  Description of Artificial Sequence: Synthetic oligonucleotide
acauuuccauaucaucucc

SEQ ID NO: 3129094 - RNA, 19 nt, Artificial Sequence
  Description of Artificial Sequence: Synthetic oligonucleotide
uucuucguuuuccuggugg

SEQ ID NO: 3129095 - RNA, 19 nt, Artificial Sequence
  Description of Artificial Sequence: Synthetic oligonucleotide
caacccaucaugaaucugc

SEQ ID NO: 3129096 - RNA, 19 nt, Artificial Sequence
  Description of Artificial Sequence: Synthetic oligonucleotide
ugccuauuggguauggccc

SEQ ID NO: 3129097 - RNA, 19 nt, Artificial Sequence
  Description of Artificial Sequence: Synthetic oligonucleotide
uauuggguauggcccaucg

SEQ ID NO: 3129098 - RNA, 19 nt, Artificial Sequence
  Description of Artificial Sequence: Synthetic oligonucleotide
ugaacauuuccauaucauc

SEQ ID NO: 3129099 - RNA, 19 nt, Artificial Sequence
  Description of Artificial Sequence: Synthetic oligonucleotide
guuugcugcaggcuggugg

SEQ ID NO: 3129100 - RNA, 19 nt, Artificial Sequence
  Description of Artificial Sequence: Synthetic oligonucleotide
uuggguauggcccaucgaa

SEQ ID NO: 3129101 - RNA, 19 nt, Artificial Sequence
  Description of Artificial Sequence: Synthetic oligonucleotide
auccauuucuucguuuucc

SEQ ID NO: 3129102 - RNA, 19 nt, Artificial Sequence
  Description of Artificial Sequence: Synthetic oligonucleotide
ugugguuguuugcugcagg

SEQ ID NO: 3129103 - RNA, 19 nt, Artificial Sequence
  Description of Artificial Sequence: Synthetic oligonucleotide
uuguccauucugcaggggc

SEQ ID NO: 3129104 - RNA, 19 nt, Artificial Sequence
  Description of Artificial Sequence: Synthetic oligonucleotide
uguugugguuguuugcugc

SEQ ID NO: 3129105 - RNA, 19 nt, Artificial Sequence
  Description of Artificial Sequence: Synthetic oligonucleotide
aucuucuuguccauucugc

SEQ ID NO: 3129106 - RNA, 19 nt, Artificial Sequence
  Description of Artificial Sequence: Synthetic oligonucleotide
uuugcugcaggcugguggc

SEQ ID NO: 3129107 - RNA, 19 nt, Artificial Sequence
  Description of Artificial Sequence: Synthetic oligonucleotide
aacccaucaugaaucugcc

SEQ ID NO: 3129108 - RNA, 19 nt, Artificial Sequence
  Description of Artificial Sequence: Synthetic oligonucleotide
ugugguuguguugugguug

SEQ ID NO: 3129109 - RNA, 19 nt, Artificial Sequence
  Description of Artificial Sequence: Synthetic oligonucleotide
guuguguugugguuguuug

SEQ ID NO: 3129110 - RNA, 19 nt, Artificial Sequence
  Description of Artificial Sequence: Synthetic oligonucleotide
cauaucaucuccaucucca

SEQ ID NO: 3129111 - RNA, 19 nt, Artificial Sequence
  Description of Artificial Sequence: Synthetic oligonucleotide
ucuuguccauucugcaggg

SEQ ID NO: 3129112 - RNA, 19 nt, Artificial Sequence
  Description of Artificial Sequence: Synthetic oligonucleotide
cugccuauuggguauggcc

SEQ ID NO: 3129113 - RNA, 19 nt, Artificial Sequence
  Description of Artificial Sequence: Synthetic oligonucleotide
ucuucuuguccauucugca

SEQ ID NO: 3129114 - RNA, 19 nt, Artificial Sequence
  Description of Artificial Sequence: Synthetic oligonucleotide
uguguugugguuguuugcu

SEQ ID NO: 3129115 - RNA, 19 nt, Artificial Sequence
  Description of Artificial Sequence: Synthetic oligonucleotide
uccucuucgguugugguug

SEQ ID NO: 3129116 - RNA, 19 nt, Artificial Sequence
  Description of Artificial Sequence: Synthetic oligonucleotide
gaucuucuuguccauucug

SEQ ID NO: 3129117 - RNA, 19 nt, Artificial Sequence
  Description of Artificial Sequence: Synthetic oligonucleotide
gaacauuuccauaucaucu

SEQ ID NO: 3129118 - RNA, 19 nt, Artificial Sequence
  Description of Artificial Sequence: Synthetic oligonucleotide
uuaggggcaagccggcgag

SEQ ID NO: 3129119 - RNA, 19 nt, Artificial Sequence
  Description of Artificial Sequence: Synthetic oligonucleotide
ucucaucuccuccaugaac

SEQ ID NO: 3129120 - RNA, 19 nt, Artificial Sequence
  Description of Artificial Sequence: Synthetic oligonucleotide
ugaaucugccuauugggua

SEQ ID NO: 3129121 - RNA, 19 nt, Artificial Sequence
  Description of Artificial Sequence: Synthetic oligonucleotide
cuucuuguccauucugcag

SEQ ID NO: 3129122 - RNA, 19 nt, Artificial Sequence
  Description of Artificial Sequence: Synthetic oligonucleotide
auuucuucguuuuccuggu

SEQ ID NO: 3129123 - RNA, 19 nt, Artificial Sequence
  Description of Artificial Sequence: Synthetic oligonucleotide
aucaugaaucugccuauug

SEQ ID NO: 3129124 - RNA, 19 nt, Artificial Sequence
  Description of Artificial Sequence: Synthetic oligonucleotide
caccaacccaucaugaauc

SEQ ID NO: 3129125 - RNA, 19 nt, Artificial Sequence
  Description of Artificial Sequence: Synthetic oligonucleotide
uguccauucugcaggggcu

SEQ ID NO: 3129126 - RNA, 19 nt, Artificial Sequence
  Description of Artificial Sequence: Synthetic oligonucleotide
ugauccauuucuucguuuu

SEQ ID NO: 3129127 - RNA, 19 nt, Artificial Sequence
  Description of Artificial Sequence: Synthetic oligonucleotide
uggcccaucgaaaguuagg

SEQ ID NO: 3129128 - RNA, 19 nt, Artificial Sequence
  Description of Artificial Sequence: Synthetic oligonucleotide
cccaucgaaaguuaggggc

SEQ ID NO: 3129129 - RNA, 19 nt, Artificial Sequence
  Description of Artificial Sequence: Synthetic oligonucleotide
ucuucguuuuccuggugga

SEQ ID NO: 3129130 - RNA, 19 nt, Artificial Sequence
  Description of Artificial Sequence: Synthetic oligonucleotide
uuuccauaucaucuccauc

SEQ ID NO: 3129131 - RNA, 19 nt, Artificial Sequence
  Description of Artificial Sequence: Synthetic oligonucleotide
uccauuucuucguuuuccu

SEQ ID NO: 3129132 - RNA, 19 nt, Artificial Sequence
  Description of Artificial Sequence: Synthetic oligonucleotide
ucgguugugguuguguugu

SEQ ID NO: 3129133 - RNA, 19 nt, Artificial Sequence
  Description of Artificial Sequence: Synthetic oligonucleotide
aaagggcgaucuucuuguc

SEQ ID NO: 3129134 - RNA, 19 nt, Artificial Sequence
  Description of Artificial Sequence: Synthetic oligonucleotide
aagccggcgagccuguccu

SEQ ID NO: 3129135 - RNA, 19 nt, Artificial Sequence
  Description of Artificial Sequence: Synthetic oligonucleotide
caugaacauuuccauauca

SEQ ID NO: 3129136 - RNA, 19 nt, Artificial Sequence
  Description of Artificial Sequence: Synthetic oligonucleotide
aaguuaggggcaagccggc

SEQ ID NO: 3129137 - RNA, 19 nt, Artificial Sequence
  Description of Artificial Sequence: Synthetic oligonucleotide
guuguuugcugcaggcugg

SEQ ID NO: 3129138 - RNA, 19 nt, Artificial Sequence
  Description of Artificial Sequence: Synthetic oligonucleotide
gguuguuugcugcaggcug

SEQ ID NO: 3129139 - RNA, 19 nt, Artificial Sequence
  Description of Artificial Sequence: Synthetic oligonucleotide
ucccaaagggcgaucuucu

SEQ ID NO: 3129140 - RNA, 19 nt, Artificial Sequence
  Description of Artificial Sequence: Synthetic oligonucleotide
ucgaaaguuaggggcaagc

SEQ ID NO: 3129141 - RNA, 19 nt, Artificial Sequence
  Description of Artificial Sequence: Synthetic oligonucleotide
uuguguugugguuguuugc

SEQ ID NO: 3129142 - RNA, 19 nt, Artificial Sequence
  Description of Artificial Sequence: Synthetic oligonucleotide
uucgguugugguuguguug

SEQ ID NO: 3129143 - RNA, 19 nt, Artificial Sequence
  Description of Artificial Sequence: Synthetic oligonucleotide
gggcugauccauuucuucg

SEQ ID NO: 3129144 - RNA, 19 nt, Artificial Sequence
  Description of Artificial Sequence: Synthetic oligonucleotide
uccauaucaucuccaucuc

SEQ ID NO: 3129145 - RNA, 19 nt, Artificial Sequence
  Description of Artificial Sequence: Synthetic oligonucleotide
gugguuguuugcugcaggc

SEQ ID NO: 3129146 - RNA, 19 nt, Artificial Sequence
  Description of Artificial Sequence: Synthetic oligonucleotide
caccuccucccaaagggcg

SEQ ID NO: 3129147 - RNA, 19 nt, Artificial Sequence
  Description of Artificial Sequence: Synthetic oligonucleotide
ucguuuuccugguggauau

SEQ ID NO: 3129148 - RNA, 19 nt, Artificial Sequence
  Description of Artificial Sequence: Synthetic oligonucleotide
ggcccaucgaaaguuaggg

SEQ ID NO: 3129149 - RNA, 19 nt, Artificial Sequence
  Description of Artificial Sequence: Synthetic oligonucleotide
uggguauggcccaucgaaa

SEQ ID NO: 3129150 - RNA, 19 nt, Artificial Sequence
  Description of Artificial Sequence: Synthetic oligonucleotide
caucaccuccucccaaagg

SEQ ID NO: 3129151 - RNA, 19 nt, Artificial Sequence
  Description of Artificial Sequence: Synthetic oligonucleotide
ggguauggcccaucgaaag

SEQ ID NO: 3129152 - RNA, 19 nt, Artificial Sequence
  Description of Artificial Sequence: Synthetic oligonucleotide
aucuccaccaacccaucau

SEQ ID NO: 3129153 - RNA, 19 nt, Artificial Sequence
  Description of Artificial Sequence: Synthetic oligonucleotide
agccuguccucuucgguug

SEQ ID NO: 3129154 - RNA, 19 nt, Artificial Sequence
  Description of Artificial Sequence: Synthetic oligonucleotide
augaaucugccuauugggu

SEQ ID NO: 3129155 - RNA, 19 nt, Artificial Sequence
  Description of Artificial Sequence: Synthetic oligonucleotide
uucguuuuccugguggaua

SEQ ID NO: 3129156 - RNA, 19 nt, Artificial Sequence
  Description of Artificial Sequence: Synthetic oligonucleotide
ucuucgguugugguugugu

SEQ ID NO: 3129157 - RNA, 19 nt, Artificial Sequence
  Description of Artificial Sequence: Synthetic oligonucleotide
uccaccaacccaucaugaa

SEQ ID NO: 3129158 - RNA, 19 nt, Artificial Sequence
  Description of Artificial Sequence: Synthetic oligonucleotide
aggggcaagccggcgagcc

SEQ ID NO: 3129159 - RNA, 19 nt, Artificial Sequence
  Description of Artificial Sequence: Synthetic oligonucleotide
augaacauuuccauaucau

SEQ ID NO: 3129160 - RNA, 19 nt, Artificial Sequence
  Description of Artificial Sequence: Synthetic oligonucleotide
accaacccaucaugaaucu

SEQ ID NO: 3129161 - RNA, 19 nt, Artificial Sequence
  Description of Artificial Sequence: Synthetic oligonucleotide
cauuuccauaucaucucca

SEQ ID NO: 3129162 - RNA, 19 nt, Artificial Sequence
  Description of Artificial Sequence: Synthetic oligonucleotide
gaaucugccuauuggguau

SEQ ID NO: 3129163 - RNA, 19 nt, Artificial Sequence
  Description of Artificial Sequence: Synthetic oligonucleotide
uauggcccaucgaaaguua

SEQ ID NO: 3129164 - RNA, 19 nt, Artificial Sequence
  Description of Artificial Sequence: Synthetic oligonucleotide
caggcugguggccaucacc

SEQ ID NO: 3129165 - RNA, 19 nt, Artificial Sequence
  Description of Artificial Sequence: Synthetic oligonucleotide
uugugguuguuugcugcag

SEQ ID NO: 3129166 - RNA, 19 nt, Artificial Sequence
  Description of Artificial Sequence: Synthetic oligonucleotide
guugugguuguuugcugca

SEQ ID NO: 3129167 - RNA, 19 nt, Artificial Sequence
  Description of Artificial Sequence: Synthetic oligonucleotide
caaagggcgaucuucuugu

SEQ ID NO: 3129168 - RNA, 19 nt, Artificial Sequence
  Description of Artificial Sequence: Synthetic oligonucleotide
uguccucuucgguuguggu

SEQ ID NO: 3129169 - RNA, 19 nt, Artificial Sequence
  Description of Artificial Sequence: Synthetic oligonucleotide
ucugcaggggcugauccau

SEQ ID NO: 3129170 - RNA, 19 nt, Artificial Sequence
  Description of Artificial Sequence: Synthetic oligonucleotide
auuggguauggcccaucga

SEQ ID NO: 3129171 - RNA, 19 nt, Artificial Sequence
  Description of Artificial Sequence: Synthetic oligonucleotide
guuaggggcaagccggcga

SEQ ID NO: 3129172 - RNA, 19 nt, Artificial Sequence
  Description of Artificial Sequence: Synthetic oligonucleotide
cuccuccaugaacauuucc

SEQ ID NO: 3129173 - RNA, 19 nt, Artificial Sequence
  Description of Artificial Sequence: Synthetic oligonucleotide
guguugugguuguuugcug

SEQ ID NO: 3129174 - RNA, 19 nt, Artificial Sequence
  Description of Artificial Sequence: Synthetic oligonucleotide
guugugguuguguuguggu

SEQ ID NO: 3129175 - RNA, 19 nt, Artificial Sequence
  Description of Artificial Sequence: Synthetic oligonucleotide
gguugugguuguguugugg

SEQ ID NO: 3129176 - RNA, 19 nt, Artificial Sequence
  Description of Artificial Sequence: Synthetic oligonucleotide
ucaucuccaucuccaccaa

SEQ ID NO: 3129177 - RNA, 19 nt, Artificial Sequence
  Description of Artificial Sequence: Synthetic oligonucleotide
ucugccuauuggguauggc

SEQ ID NO: 3129178 - RNA, 19 nt, Artificial Sequence
  Description of Artificial Sequence: Synthetic oligonucleotide
cucccaaagggcgaucuuc

SEQ ID NO: 3129179 - RNA, 19 nt, Artificial Sequence
  Description of Artificial Sequence: Synthetic oligonucleotide
gcugguggccaucaccucc

SEQ ID NO: 3129180 - RNA, 19 nt, Artificial Sequence
  Description of Artificial Sequence: Synthetic oligonucleotide
ugguuguuugcugcaggcu

SEQ ID NO: 3129181 - RNA, 19 nt, Artificial Sequence
  Description of Artificial Sequence: Synthetic oligonucleotide
aguuaggggcaagccggcg

SEQ ID NO: 3129182 - RNA, 19 nt, Artificial Sequence
  Description of Artificial Sequence: Synthetic oligonucleotide
cuguccucuucgguugugg

SEQ ID NO: 3129183 - RNA, 19 nt, Artificial Sequence
  Description of Artificial Sequence: Synthetic oligonucleotide
ccauaucaucuccaucucc

SEQ ID NO: 3129184 - RNA, 19 nt, Artificial Sequence
  Description of Artificial Sequence: Synthetic oligonucleotide
uccucccaaagggcgaucu

SEQ ID NO: 3129185 - RNA, 19 nt, Artificial Sequence
  Description of Artificial Sequence: Synthetic oligonucleotide
ccaaagggcgaucuucuug

SEQ ID NO: 3129186 - RNA, 19 nt, Artificial Sequence
  Description of Artificial Sequence: Synthetic oligonucleotide
gcccaucgaaaguuagggg

SEQ ID NO: 3129187 - RNA, 19 nt, Artificial Sequence
  Description of Artificial Sequence: Synthetic oligonucleotide
uugugguuguguugugguu

SEQ ID NO: 3129188 - RNA, 19 nt, Artificial Sequence
  Description of Artificial Sequence: Synthetic oligonucleotide
ucuccuccaugaacauuuc

SEQ ID NO: 3129189 - RNA, 19 nt, Artificial Sequence
  Description of Artificial Sequence: Synthetic oligonucleotide
aucgaaaguuaggggcaag

SEQ ID NO: 3129190 - RNA, 19 nt, Artificial Sequence
  Description of Artificial Sequence: Synthetic oligonucleotide
ugcaggggcugauccauuu

SEQ ID NO: 3129191 - RNA, 19 nt, Artificial Sequence
  Description of Artificial Sequence: Synthetic oligonucleotide
cuccaccaacccaucauga

SEQ ID NO: 3129192 - RNA, 19 nt, Artificial Sequence
  Description of Artificial Sequence: Synthetic oligonucleotide
aucugccuauuggguaugg

SEQ ID NO: 3129193 - RNA, 19 nt, Artificial Sequence
  Description of Artificial Sequence: Synthetic oligonucleotide
auggcccaucgaaaguuag

SEQ ID NO: 3129194 - RNA, 19 nt, Artificial Sequence
  Description of Artificial Sequence: Synthetic oligonucleotide
cuuguccauucugcagggg

SEQ ID NO: 3129195 - RNA, 19 nt, Artificial Sequence
  Description of Artificial Sequence: Synthetic oligonucleotide
gcgaucuucuuguccauuc

SEQ ID NO: 3129196 - RNA, 19 nt, Artificial Sequence
  Description of Artificial Sequence: Synthetic oligonucleotide
acccaucaugaaucugccu

SEQ ID NO: 3129197 - RNA, 19 nt, Artificial Sequence
  Description of Artificial Sequence: Synthetic oligonucleotide
cccaucaugaaucugccua

SEQ ID NO: 3129198 - RNA, 19 nt, Artificial Sequence
  Description of Artificial Sequence: Synthetic oligonucleotide
uuguuugcugcaggcuggu

SEQ ID NO: 3129199 - RNA, 19 nt, Artificial Sequence
  Description of Artificial Sequence: Synthetic oligonucleotide
cuccaugaacauuuccaua

SEQ ID NO: 3129200 - RNA, 19 nt, Artificial Sequence
  Description of Artificial Sequence: Synthetic oligonucleotide
caucuccaucuccaccaac

SEQ ID NO: 3129201 - RNA, 19 nt, Artificial Sequence
  Description of Artificial Sequence: Synthetic oligonucleotide
ccaucgaaaguuaggggca

SEQ ID NO: 3129202 - RNA, 19 nt, Artificial Sequence
  Description of Artificial Sequence: Synthetic oligonucleotide
ggcgagccuguccucuucg

SEQ ID NO: 3129203 - RNA, 19 nt, Artificial Sequence
  Description of Artificial Sequence: Synthetic oligonucleotide
guccauucugcaggggcug

SEQ ID NO: 3129204 - RNA, 19 nt, Artificial Sequence
  Description of Artificial Sequence: Synthetic oligonucleotide
cauucugcaggggcugauc

SEQ ID NO: 3129205 - RNA, 19 nt, Artificial Sequence
  Description of Artificial Sequence: Synthetic oligonucleotide
ggggcugauccauuucuuc

SEQ ID NO: 3129206 - RNA, 19 nt, Artificial Sequence
  Description of Artificial Sequence: Synthetic oligonucleotide
cgaaaguuaggggcaagcc

SEQ ID NO: 3129207 - RNA, 19 nt, Artificial Sequence
  Description of Artificial Sequence: Synthetic oligonucleotide
uguuugcugcaggcuggug

SEQ ID NO: 3129208 - RNA, 19 nt, Artificial Sequence
  Description of Artificial Sequence: Synthetic oligonucleotide
gugguuguguugugguugu

SEQ ID NO: 3129209 - RNA, 19 nt, Artificial Sequence
  Description of Artificial Sequence: Synthetic oligonucleotide
gagccuguccucuucgguu

SEQ ID NO: 3129210 - RNA, 19 nt, Artificial Sequence
  Description of Artificial Sequence: Synthetic oligonucleotide
ccaugaacauuuccauauc

SEQ ID NO: 3129211 - RNA, 19 nt, Artificial Sequence
  Description of Artificial Sequence: Synthetic oligonucleotide
gccuauuggguauggccca

SEQ ID NO: 3129212 - RNA, 19 nt, Artificial Sequence
  Description of Artificial Sequence: Synthetic oligonucleotide
gguggccaucaccuccucc

SEQ ID NO: 3129213 - RNA, 19 nt, Artificial Sequence
  Description of Artificial Sequence: Synthetic oligonucleotide
guauggcccaucgaaaguu

SEQ ID NO: 3129214 - RNA, 19 nt, Artificial Sequence
  Description of Artificial Sequence: Synthetic oligonucleotide
gguauggcccaucgaaagu

SEQ ID NO: 3129215 - RNA, 19 nt, Artificial Sequence
  Description of Artificial Sequence: Synthetic oligonucleotide
cuauuggguauggcccauc

SEQ ID NO: 3129216 - RNA, 19 nt, Artificial Sequence
  Description of Artificial Sequence: Synthetic oligonucleotide
caggggcugauccauuucu

SEQ ID NO: 3129217 - RNA, 19 nt, Artificial Sequence
  Description of Artificial Sequence: Synthetic oligonucleotide
ggcugauccauuucuucgu

SEQ ID NO: 3129218 - RNA, 19 nt, Artificial Sequence
  Description of Artificial Sequence: Synthetic oligonucleotide
caucgaaaguuaggggcaa

SEQ ID NO: 3129219 - RNA, 19 nt, Artificial Sequence
  Description of Artificial Sequence: Synthetic oligonucleotide
ccaucaccuccucccaaag

SEQ ID NO: 3129220 - RNA, 19 nt, Artificial Sequence
  Description of Artificial Sequence: Synthetic oligonucleotide
gcgagccuguccucuucgg

SEQ ID NO: 3129221 - RNA, 19 nt, Artificial Sequence
  Description of Artificial Sequence: Synthetic oligonucleotide
gggcaagccggcgagccug

SEQ ID NO: 3129222 - RNA, 19 nt, Artificial Sequence
  Description of Artificial Sequence: Synthetic oligonucleotide
accuccucccaaagggcga

SEQ ID NO: 3129223 - RNA, 19 nt, Artificial Sequence
  Description of Artificial Sequence: Synthetic oligonucleotide
uaggggcaagccggcgagc

SEQ ID NO: 3129224 - RNA, 19 nt, Artificial Sequence
  Description of Artificial Sequence: Synthetic oligonucleotide
cugguggccaucaccuccu

SEQ ID NO: 3129225 - RNA, 19 nt, Artificial Sequence
  Description of Artificial Sequence: Synthetic oligonucleotide
cuucgguugugguuguguu

SEQ ID NO: 3129226 - RNA, 19 nt, Artificial Sequence
  Description of Artificial Sequence: Synthetic oligonucleotide
agccggcgagccuguccuc

SEQ ID NO: 3129227 - RNA, 19 nt, Artificial Sequence
  Description of Artificial Sequence: Synthetic oligonucleotide
gccaucaccuccucccaaa

SEQ ID NO: 3129228 - RNA, 19 nt, Artificial Sequence
  Description of Artificial Sequence: Synthetic oligonucleotide
aggggcugauccauuucuu

SEQ ID NO: 3129229 - RNA, 19 nt, Artificial Sequence
  Description of Artificial Sequence: Synthetic oligonucleotide
cugauccauuucuucguuu

SEQ ID NO: 3129230 - RNA, 19 nt, Artificial Sequence
  Description of Artificial Sequence: Synthetic oligonucleotide
guccucuucgguugugguu

SEQ ID NO: 3129231 - RNA, 19 nt, Artificial Sequence
  Description of Artificial Sequence: Synthetic oligonucleotide
cucuucgguugugguugug

SEQ ID NO: 3129232 - RNA, 19 nt, Artificial Sequence
  Description of Artificial Sequence: Synthetic oligonucleotide
ccaacccaucaugaaucug

SEQ ID NO: 3129233 - RNA, 19 nt, Artificial Sequence
  Description of Artificial Sequence: Synthetic oligonucleotide
gguuguguugugguuguuu

SEQ ID NO: 3129234 - RNA, 19 nt, Artificial Sequence
  Description of Artificial Sequence: Synthetic oligonucleotide
ccaucaugaaucugccuau

SEQ ID NO: 3129235 - RNA, 19 nt, Artificial Sequence
  Description of Artificial Sequence: Synthetic oligonucleotide
ccaccaacccaucaugaau

SEQ ID NO: 3129236 - RNA, 19 nt, Artificial Sequence
  Description of Artificial Sequence: Synthetic oligonucleotide
ugguuguguugugguuguu

SEQ ID NO: 3129237 - RNA, 19 nt, Artificial Sequence
  Description of Artificial Sequence: Synthetic oligonucleotide
cuucguuuuccugguggau

SEQ ID NO: 3129238 - RNA, 19 nt, Artificial Sequence
  Description of Artificial Sequence: Synthetic oligonucleotide
ggcugguggccaucaccuc

SEQ ID NO: 3129239 - RNA, 19 nt, Artificial Sequence
  Description of Artificial Sequence: Synthetic oligonucleotide
ggccaucaccuccucccaa

SEQ ID NO: 3129240 - RNA, 19 nt, Artificial Sequence
  Description of Artificial Sequence: Synthetic oligonucleotide
caucaugaaucugccuauu

SEQ ID NO: 3129241 - RNA, 19 nt, Artificial Sequence
  Description of Artificial Sequence: Synthetic oligonucleotide
cuccucccaaagggcgauc

SEQ ID NO: 3129242 - RNA, 19 nt, Artificial Sequence
  Description of Artificial Sequence: Synthetic oligonucleotide
gcaggcugguggccaucac

SEQ ID NO: 3129243 - RNA, 19 nt, Artificial Sequence
  Description of Artificial Sequence: Synthetic oligonucleotide
ccuguccucuucgguugug

SEQ ID NO: 3129244 - RNA, 19 nt, Artificial Sequence
  Description of Artificial Sequence: Synthetic oligonucleotide
cgaucuucuuguccauucu

SEQ ID NO: 3129245 - RNA, 19 nt, Artificial Sequence
  Description of Artificial Sequence: Synthetic oligonucleotide
cgguugugguuguguugug

SEQ ID NO: 3129246 - RNA, 19 nt, Artificial Sequence
  Description of Artificial Sequence: Synthetic oligonucleotide
ggggcaagccggcgagccu

SEQ ID NO: 3129247 - RNA, 19 nt, Artificial Sequence
  Description of Artificial Sequence: Synthetic oligonucleotide
cugcaggggcugauccauu

SEQ ID NO: 3129248 - RNA, 19 nt, Artificial Sequence
  Description of Artificial Sequence: Synthetic oligonucleotide
gggcgaucuucuuguccau

SEQ ID NO: 3129249 - RNA, 19 nt, Artificial Sequence
  Description of Artificial Sequence: Synthetic oligonucleotide
gccuguccucuucgguugu

SEQ ID NO: 3129250 - RNA, 19 nt, Artificial Sequence
  Description of Artificial Sequence: Synthetic oligonucleotide
ggcgaucuucuuguccauu

SEQ ID NO: 3129251 - RNA, 19 nt, Artificial Sequence
  Description of Artificial Sequence: Synthetic oligonucleotide
gccggcgagccuguccucu

SEQ ID NO: 3129252 - RNA, 19 nt, Artificial Sequence
  Description of Artificial Sequence: Synthetic oligonucleotide
cgagccuguccucuucggu

SEQ ID NO: 3129253 - RNA, 19 nt, Artificial Sequence
  Description of Artificial Sequence: Synthetic oligonucleotide
cggcgagccuguccucuuc

SEQ ID NO: 3129254 - RNA, 19 nt, Artificial Sequence
  Description of Artificial Sequence: Synthetic oligonucleotide
ccucuucgguugugguugu

SEQ ID NO: 3129255 - RNA, 19 nt, Artificial Sequence
  Description of Artificial Sequence: Synthetic oligonucleotide
ggcaagccggcgagccugu

SEQ ID NO: 3129256 - RNA, 19 nt, Artificial Sequence
  Description of Artificial Sequence: Synthetic oligonucleotide
ccuauuggguauggcccau

SEQ ID NO: 3129257 - RNA, 19 nt, Artificial Sequence
  Description of Artificial Sequence: Synthetic oligonucleotide
gcaagccggcgagccuguc

SEQ ID NO: 3129258 - RNA, 19 nt, Artificial Sequence
  Description of Artificial Sequence: Synthetic oligonucleotide
cccaaagggcgaucuucuu

SEQ ID NO: 3129259 - RNA, 19 nt, Artificial Sequence
  Description of Artificial Sequence: Synthetic oligonucleotide
ccuccucccaaagggcgau

SEQ ID NO: 3129260 - RNA, 19 nt, Artificial Sequence
  Description of Artificial Sequence: Synthetic oligonucleotide
ccauucugcaggggcugau

SEQ ID NO: 3129261 - RNA, 19 nt, Artificial Sequence
  Description of Artificial Sequence: Synthetic oligonucleotide
ccucccaaagggcgaucuu

SEQ ID NO: 3129262 - RNA, 19 nt, Artificial Sequence
  Description of Artificial Sequence: Synthetic oligonucleotide
ccggcgagccuguccucuu

SEQ ID NO: 3129263 - RNA, 19 nt, Artificial Sequence
  Description of Artificial Sequence: Synthetic oligonucleotide
cguuuuccugguggauauu

SEQ ID NO: 3129264 - RNA, 19 nt, Artificial Sequence
  Description of Artificial Sequence: Synthetic oligonucleotide
aauuuuaaguaucugaugc

SEQ ID NO: 3129265 - RNA, 19 nt, Artificial Sequence
  Description of Artificial Sequence: Synthetic oligonucleotide
uuuauuauuuauacaacgu

SEQ ID NO: 3129266 - RNA, 19 nt, Artificial Sequence
  Description of Artificial Sequence: Synthetic oligonucleotide
uauuauuuauacaacguuc

SEQ ID NO: 3129267 - RNA, 19 nt, Artificial Sequence
  Description of Artificial Sequence: Synthetic oligonucleotide
uuaacuaauuuuaaguauc

SEQ ID NO: 3129268 - RNA, 19 nt, Artificial Sequence
  Description of Artificial Sequence: Synthetic oligonucleotide
auuuuaaguaucugaugcc

SEQ ID NO: 3129269 - RNA, 19 nt, Artificial Sequence
  Description of Artificial Sequence: Synthetic oligonucleotide
ucugcuugcauguauaucu

SEQ ID NO: 3129270 - RNA, 19 nt, Artificial Sequence
  Description of Artificial Sequence: Synthetic oligonucleotide
auuuauacaacguucugcu

SEQ ID NO: 3129271 - RNA, 19 nt, Artificial Sequence
  Description of Artificial Sequence: Synthetic oligonucleotide
uuuuaacuaauuuuaagua

SEQ ID NO: 3129272 - RNA, 19 nt, Artificial Sequence
  Description of Artificial Sequence: Synthetic oligonucleotide
uauuuauacaacguucugc

SEQ ID NO: 3129273 - RNA, 19 nt, Artificial Sequence
  Description of Artificial Sequence: Synthetic oligonucleotide
uuuuaaguaucugaugccc

SEQ ID NO: 3129274 - RNA, 19 nt, Artificial Sequence
  Description of Artificial Sequence: Synthetic oligonucleotide
uuauuauuuauacaacguu

SEQ ID NO: 3129275 - RNA, 19 nt, Artificial Sequence
  Description of Artificial Sequence: Synthetic oligonucleotide
uaauuuuaaguaucugaug

SEQ ID NO: 3129276 - RNA, 19 nt, Artificial Sequence
  Description of Artificial Sequence: Synthetic oligonucleotide
uuauuuauacaacguucug

SEQ ID NO: 3129277 - RNA, 19 nt, Artificial Sequence
  Description of Artificial Sequence: Synthetic oligonucleotide
uauacaacguucugcuugc

SEQ ID NO: 3129278 - RNA, 19 nt, Artificial Sequence
  Description of Artificial Sequence: Synthetic oligonucleotide
auuauuuauacaacguucu

SEQ ID NO: 3129279 - RNA, 19 nt, Artificial Sequence
  Description of Artificial Sequence: Synthetic oligonucleotide
uuuaaguaucugaugcccu

SEQ ID NO: 3129280 - RNA, 19 nt, Artificial Sequence
  Description of Artificial Sequence: Synthetic oligonucleotide
acaacguucugcuugcaug

SEQ ID NO: 3129281 - RNA, 19 nt, Artificial Sequence
  Description of Artificial Sequence: Synthetic oligonucleotide
uugcauguauaucugcaca

SEQ ID NO: 3129282 - RNA, 19 nt, Artificial Sequence
  Description of Artificial Sequence: Synthetic oligonucleotide
ugcauguauaucugcacac

SEQ ID NO: 3129283 - RNA, 19 nt, Artificial Sequence
  Description of Artificial Sequence: Synthetic oligonucleotide
uuaaguaucugaugcccuc

SEQ ID NO: 3129284 - RNA, 19 nt, Artificial Sequence
  Description of Artificial Sequence: Synthetic oligonucleotide
aucugaugcccucuucugg

SEQ ID NO: 3129285 - RNA, 19 nt, Artificial Sequence
  Description of Artificial Sequence: Synthetic oligonucleotide
cuugcauguauaucugcac

SEQ ID NO: 3129286 - RNA, 19 nt, Artificial Sequence
  Description of Artificial Sequence: Synthetic oligonucleotide
uaucugaugcccucuucug

SEQ ID NO: 3129287 - RNA, 19 nt, Artificial Sequence
  Description of Artificial Sequence: Synthetic oligonucleotide
aguaucugaugcccucuuc

SEQ ID NO: 3129288 - RNA, 19 nt, Artificial Sequence
  Description of Artificial Sequence: Synthetic oligonucleotide
ucuccagccccuauuuuau

SEQ ID NO: 3129289 - RNA, 19 nt, Artificial Sequence
  Description of Artificial Sequence: Synthetic oligonucleotide
uaaguaucugaugcccucu

SEQ ID NO: 3129290 - RNA, 19 nt, Artificial Sequence
  Description of Artificial Sequence: Synthetic oligonucleotide
ugaugcccucuucuggucu

SEQ ID NO: 3129291 - RNA, 19 nt, Artificial Sequence
  Description of Artificial Sequence: Synthetic oligonucleotide
uccagccccuauuuuauau

SEQ ID NO: 3129292 - RNA, 19 nt, Artificial Sequence
  Description of Artificial Sequence: Synthetic oligonucleotide
uacaacguucugcuugcau

SEQ ID NO: 3129293 - RNA, 19 nt, Artificial Sequence
  Description of Artificial Sequence: Synthetic oligonucleotide
uuuauacaacguucugcuu

SEQ ID NO: 3129294 - RNA, 19 nt, Artificial Sequence
  Description of Artificial Sequence: Synthetic oligonucleotide
aaguaucugaugcccucuu

SEQ ID NO: 3129295 - RNA, 19 nt, Artificial Sequence
  Description of Artificial Sequence: Synthetic oligonucleotide
guaucugaugcccucuucu

SEQ ID NO: 3129296 - RNA, 19 nt, Artificial Sequence
  Description of Artificial Sequence: Synthetic oligonucleotide
uucugcuugcauguauauc

SEQ ID NO: 3129297 - RNA, 19 nt, Artificial Sequence
  Description of Artificial Sequence: Synthetic oligonucleotide
gaugcccucuucuggucuc

SEQ ID NO: 3129298 - RNA, 19 nt, Artificial Sequence
  Description of Artificial Sequence: Synthetic oligonucleotide
acguucugcuugcauguau

SEQ ID NO: 3129299 - RNA, 19 nt, Artificial Sequence
  Description of Artificial Sequence: Synthetic oligonucleotide
caacguucugcuugcaugu

SEQ ID NO: 3129300 - RNA, 19 nt, Artificial Sequence
  Description of Artificial Sequence: Synthetic oligonucleotide
augcccucuucuggucucc

SEQ ID NO: 3129301 - RNA, 19 nt, Artificial Sequence
  Description of Artificial Sequence: Synthetic oligonucleotide
gcuugcauguauaucugca

SEQ ID NO: 3129302 - RNA, 19 nt, Artificial Sequence
  Description of Artificial Sequence: Synthetic oligonucleotide
cugaugcccucuucugguc

SEQ ID NO: 3129303 - RNA, 19 nt, Artificial Sequence
  Description of Artificial Sequence: Synthetic oligonucleotide
gccccuauuuuauauauuu

SEQ ID NO: 3129304 - RNA, 19 nt, Artificial Sequence
  Description of Artificial Sequence: Synthetic oligonucleotide
aacguucugcuugcaugua

SEQ ID NO: 3129305 - RNA, 19 nt, Artificial Sequence
  Description of Artificial Sequence: Synthetic oligonucleotide
cagccccuauuuuauauau

SEQ ID NO: 3129306 - RNA, 19 nt, Artificial Sequence
  Description of Artificial Sequence: Synthetic oligonucleotide
auacaacguucugcuugca

SEQ ID NO: 3129307 - RNA, 19 nt, Artificial Sequence
  Description of Artificial Sequence: Synthetic oligonucleotide
agccccuauuuuauauauu

SEQ ID NO: 3129308 - RNA, 19 nt, Artificial Sequence
  Description of Artificial Sequence: Synthetic oligonucleotide
cuccagccccuauuuuaua

SEQ ID NO: 3129309 - RNA, 19 nt, Artificial Sequence
  Description of Artificial Sequence: Synthetic oligonucleotide
cguucugcuugcauguaua

SEQ ID NO: 3129310 - RNA, 19 nt, Artificial Sequence
  Description of Artificial Sequence: Synthetic oligonucleotide
ccagccccuauuuuauaua

SEQ ID NO: 3129311 - RNA, 19 nt, Artificial Sequence
  Description of Artificial Sequence: Synthetic oligonucleotide
ccccuauuuuauauauuuu

SEQ ID NO: 3129312 - RNA, 19 nt, Artificial Sequence
  Description of Artificial Sequence: Synthetic oligonucleotide
aagaucacuaaauugauuc

SEQ ID NO: 3129313 - RNA, 19 nt, Artificial Sequence
  Description of Artificial Sequence: Synthetic oligonucleotide
acuaaauugauucaggcuc

SEQ ID NO: 3129314 - RNA, 19 nt, Artificial Sequence
  Description of Artificial Sequence: Synthetic oligonucleotide
uguaagaucacuaaauuga

SEQ ID NO: 3129315 - RNA, 19 nt, Artificial Sequence
  Description of Artificial Sequence: Synthetic oligonucleotide
aauugauucaggcucagag

SEQ ID NO: 3129316 - RNA, 19 nt, Artificial Sequence
  Description of Artificial Sequence: Synthetic oligonucleotide
uugauucaggcucagagag

SEQ ID NO: 3129317 - RNA, 19 nt, Artificial Sequence
  Description of Artificial Sequence: Synthetic oligonucleotide
aauuucaucuuccauuccu

SEQ ID NO: 3129318 - RNA, 19 nt, Artificial Sequence
  Description of Artificial Sequence: Synthetic oligonucleotide
uucuuuuccucccacagug

SEQ ID NO: 3129319 - RNA, 19 nt, Artificial Sequence
  Description of Artificial Sequence: Synthetic oligonucleotide
ucuucauucuggcuguagg

SEQ ID NO: 3129320 - RNA, 19 nt, Artificial Sequence
  Description of Artificial Sequence: Synthetic oligonucleotide
aaauuucaucuuccauucc

SEQ ID NO: 3129321 - RNA, 19 nt, Artificial Sequence
  Description of Artificial Sequence: Synthetic oligonucleotide
uguaggauuuuccaaauuu

SEQ ID NO: 3129322 - RNA, 19 nt, Artificial Sequence
  Description of Artificial Sequence: Synthetic oligonucleotide
uuuccaaauuucaucuucc

SEQ ID NO: 3129323 - RNA, 19 nt, Artificial Sequence
  Description of Artificial Sequence: Synthetic oligonucleotide
ugaauucuucaucuguaag

SEQ ID NO: 3129324 - RNA, 19 nt, Artificial Sequence
  Description of Artificial Sequence: Synthetic oligonucleotide
uuuuccaaauuucaucuuc

SEQ ID NO: 3129325 - RNA, 19 nt, Artificial Sequence
  Description of Artificial Sequence: Synthetic oligonucleotide
gaauucuucaucuguaaga

SEQ ID NO: 3129326 - RNA, 19 nt, Artificial Sequence
  Description of Artificial Sequence: Synthetic oligonucleotide
ucacuaaauugauucaggc

SEQ ID NO: 3129327 - RNA, 19 nt, Artificial Sequence
  Description of Artificial Sequence: Synthetic oligonucleotide
agaguagcuggucuugccc

SEQ ID NO: 3129328 - RNA, 19 nt, Artificial Sequence
  Description of Artificial Sequence: Synthetic oligonucleotide
cauucagcauccaaacugg

SEQ ID NO: 3129329 - RNA, 19 nt, Artificial Sequence
  Description of Artificial Sequence: Synthetic oligonucleotide
ucagcauccaaacugggau

SEQ ID NO: 3129330 - RNA, 19 nt, Artificial Sequence
  Description of Artificial Sequence: Synthetic oligonucleotide
aauucuucaucuguaagau

SEQ ID NO: 3129331 - RNA, 19 nt, Artificial Sequence
  Description of Artificial Sequence: Synthetic oligonucleotide
ucaucuuccauuccugcca

SEQ ID NO: 3129332 - RNA, 19 nt, Artificial Sequence
  Description of Artificial Sequence: Synthetic oligonucleotide
gaucacuaaauugauucag

SEQ ID NO: 3129333 - RNA, 19 nt, Artificial Sequence
  Description of Artificial Sequence: Synthetic oligonucleotide
cuguaagaucacuaaauug

SEQ ID NO: 3129334 - RNA, 19 nt, Artificial Sequence
  Description of Artificial Sequence: Synthetic oligonucleotide
ucuguaagaucacuaaauu

SEQ ID NO: 3129335 - RNA, 19 nt, Artificial Sequence
  Description of Artificial Sequence: Synthetic oligonucleotide
ucuguguccuucuucauuc

SEQ ID NO: 3129336 - RNA, 19 nt, Artificial Sequence
  Description of Artificial Sequence: Synthetic oligonucleotide
agcaauuuuccccugaauu

SEQ ID NO: 3129337 - RNA, 19 nt, Artificial Sequence
  Description of Artificial Sequence: Synthetic oligonucleotide
aacugggaucacgugaugg

SEQ ID NO: 3129338 - RNA, 19 nt, Artificial Sequence
  Description of Artificial Sequence: Synthetic oligonucleotide
aauugugcuucucaauuuu

SEQ ID NO: 3129339 - RNA, 19 nt, Artificial Sequence
  Description of Artificial Sequence: Synthetic oligonucleotide
ucaucuguaagaucacuaa

SEQ ID NO: 3129340 - RNA, 19 nt, Artificial Sequence
  Description of Artificial Sequence: Synthetic oligonucleotide
uuccaaauugugcuucuca

SEQ ID NO: 3129341 - RNA, 19 nt, Artificial Sequence
  Description of Artificial Sequence: Synthetic oligonucleotide
auugauucaggcucagaga

SEQ ID NO: 3129342 - RNA, 19 nt, Artificial Sequence
  Description of Artificial Sequence: Synthetic oligonucleotide
uuccauuccugccauucag

SEQ ID NO: 3129343 - RNA, 19 nt, Artificial Sequence
  Description of Artificial Sequence: Synthetic oligonucleotide
aaauugugcuucucaauuu

SEQ ID NO: 3129344 - RNA, 19 nt, Artificial Sequence
  Description of Artificial Sequence: Synthetic oligonucleotide
cugcucauauuccaaauug

SEQ ID NO: 3129345 - RNA, 19 nt, Artificial Sequence
  Description of Artificial Sequence: Synthetic oligonucleotide
auauuccaaauugugcuuc

SEQ ID NO: 3129346 - RNA, 19 nt, Artificial Sequence
  Description of Artificial Sequence: Synthetic oligonucleotide
uucaucuuccauuccugcc

SEQ ID NO: 3129347 - RNA, 19 nt, Artificial Sequence
  Description of Artificial Sequence: Synthetic oligonucleotide
uucaucuguaagaucacua

SEQ ID NO: 3129348 - RNA, 19 nt, Artificial Sequence
  Description of Artificial Sequence: Synthetic oligonucleotide
ugcucauauuccaaauugu

SEQ ID NO: 3129349 - RNA, 19 nt, Artificial Sequence
  Description of Artificial Sequence: Synthetic oligonucleotide
ucuggcuguaggauuuucc

SEQ ID NO: 3129350 - RNA, 19 nt, Artificial Sequence
  Description of Artificial Sequence: Synthetic oligonucleotide
aggcucagagaguagcugg

SEQ ID NO: 3129351 - RNA, 19 nt, Artificial Sequence
  Description of Artificial Sequence: Synthetic oligonucleotide
aucacuaaauugauucagg

SEQ ID NO: 3129352 - RNA, 19 nt, Artificial Sequence
  Description of Artificial Sequence: Synthetic oligonucleotide
uccaaauugugcuucucaa

SEQ ID NO: 3129353 - RNA, 19 nt, Artificial Sequence
  Description of Artificial Sequence: Synthetic oligonucleotide
agaucacuaaauugauuca

SEQ ID NO: 3129354 - RNA, 19 nt, Artificial Sequence
  Description of Artificial Sequence: Synthetic oligonucleotide
uccaaauuucaucuuccau

SEQ ID NO: 3129355 - RNA, 19 nt, Artificial Sequence
  Description of Artificial Sequence: Synthetic oligonucleotide
ugggaucacgugauggagc

SEQ ID NO: 3129356 - RNA, 19 nt, Artificial Sequence
  Description of Artificial Sequence: Synthetic oligonucleotide
cuaaauugauucaggcuca

SEQ ID NO: 3129357 - RNA, 19 nt, Artificial Sequence
  Description of Artificial Sequence: Synthetic oligonucleotide
uucaggcucagagaguagc

SEQ ID NO: 3129358 - RNA, 19 nt, Artificial Sequence
  Description of Artificial Sequence: Synthetic oligonucleotide
uccauuccugccauucagc

SEQ ID NO: 3129359 - RNA, 19 nt, Artificial Sequence
  Description of Artificial Sequence: Synthetic oligonucleotide
gaucacgugauggagcaac

SEQ ID NO: 3129360 - RNA, 19 nt, Artificial Sequence
  Description of Artificial Sequence: Synthetic oligonucleotide
uuccaaauuucaucuucca

SEQ ID NO: 3129361 - RNA, 19 nt, Artificial Sequence
  Description of Artificial Sequence: Synthetic oligonucleotide
uuuuccccugaauucuuca

SEQ ID NO: 3129362 - RNA, 19 nt, Artificial Sequence
  Description of Artificial Sequence: Synthetic oligonucleotide
uguguccuucuucauucug

SEQ ID NO: 3129363 - RNA, 19 nt, Artificial Sequence
  Description of Artificial Sequence: Synthetic oligonucleotide
ccauucagcauccaaacug

SEQ ID NO: 3129364 - RNA, 19 nt, Artificial Sequence
  Description of Artificial Sequence: Synthetic oligonucleotide
uauuccaaauugugcuucu

SEQ ID NO: 3129365 - RNA, 19 nt, Artificial Sequence
  Description of Artificial Sequence: Synthetic oligonucleotide
uaagaucacuaaauugauu

SEQ ID NO: 3129366 - RNA, 19 nt, Artificial Sequence
  Description of Artificial Sequence: Synthetic oligonucleotide
uuuccucccacagugcucu

SEQ ID NO: 3129367 - RNA, 19 nt, Artificial Sequence
  Description of Artificial Sequence: Synthetic oligonucleotide
cuugcccugcucauauucc

SEQ ID NO: 3129368 - RNA, 19 nt, Artificial Sequence
  Description of Artificial Sequence: Synthetic oligonucleotide
agagaguagcuggucuugc

SEQ ID NO: 3129369 - RNA, 19 nt, Artificial Sequence
  Description of Artificial Sequence: Synthetic oligonucleotide
aucuguaagaucacuaaau

SEQ ID NO: 3129370 - RNA, 19 nt, Artificial Sequence
  Description of Artificial Sequence: Synthetic oligonucleotide
acugggaucacgugaugga

SEQ ID NO: 3129371 - RNA, 19 nt, Artificial Sequence
  Description of Artificial Sequence: Synthetic oligonucleotide
ucuuuuccucccacagugc

SEQ ID NO: 3129372 - RNA, 19 nt, Artificial Sequence
  Description of Artificial Sequence: Synthetic oligonucleotide
guguccuucuucauucugg

SEQ ID NO: 3129373 - RNA, 19 nt, Artificial Sequence
  Description of Artificial Sequence: Synthetic oligonucleotide
gcaauuuuccccugaauuc

SEQ ID NO: 3129374 - RNA, 19 nt, Artificial Sequence
  Description of Artificial Sequence: Synthetic oligonucleotide
ucaggcucagagaguagcu

SEQ ID NO: 3129375 - RNA, 19 nt, Artificial Sequence
  Description of Artificial Sequence: Synthetic oligonucleotide
uaaauugauucaggcucag

SEQ ID NO: 3129376 - RNA, 19 nt, Artificial Sequence
  Description of Artificial Sequence: Synthetic oligonucleotide
gauucaggcucagagagua

SEQ ID NO: 3129377 - RNA, 19 nt, Artificial Sequence
  Description of Artificial Sequence: Synthetic oligonucleotide
gagaguagcuggucuugcc

SEQ ID NO: 3129378 - RNA, 19 nt, Artificial Sequence
  Description of Artificial Sequence: Synthetic oligonucleotide
uuccccugaauucuucauc

SEQ ID NO: 3129379 - RNA, 19 nt, Artificial Sequence
  Description of Artificial Sequence: Synthetic oligonucleotide
cauccaaacugggaucacg

SEQ ID NO: 3129380 - RNA, 19 nt, Artificial Sequence
  Description of Artificial Sequence: Synthetic oligonucleotide
uccaaacugggaucacgug

SEQ ID NO: 3129381 - RNA, 19 nt, Artificial Sequence
  Description of Artificial Sequence: Synthetic oligonucleotide
ugauucaggcucagagagu

SEQ ID NO: 3129382 - RNA, 19 nt, Artificial Sequence
  Description of Artificial Sequence: Synthetic oligonucleotide
uucauucuggcuguaggau

SEQ ID NO: 3129383 - RNA, 19 nt, Artificial Sequence
  Description of Artificial Sequence: Synthetic oligonucleotide
ucauucuggcuguaggauu

SEQ ID NO: 3129384 - RNA, 19 nt, Artificial Sequence
  Description of Artificial Sequence: Synthetic oligonucleotide
aaacugggaucacgugaug

SEQ ID NO: 3129385 - RNA, 19 nt, Artificial Sequence
  Description of Artificial Sequence: Synthetic oligonucleotide
ucagagaguagcuggucuu

SEQ ID NO: 3129386 - RNA, 19 nt, Artificial Sequence
  Description of Artificial Sequence: Synthetic oligonucleotide
uuuuccucccacagugcuc

SEQ ID NO: 3129387 - RNA, 19 nt, Artificial Sequence
  Description of Artificial Sequence: Synthetic oligonucleotide
agcauccaaacugggauca

SEQ ID NO: 3129388 - RNA, 19 nt, Artificial Sequence
  Description of Artificial Sequence: Synthetic oligonucleotide
uugcccugcucauauucca

SEQ ID NO: 3129389 - RNA, 19 nt, Artificial Sequence
  Description of Artificial Sequence: Synthetic oligonucleotide
aaauugauucaggcucaga

SEQ ID NO: 3129390 - RNA, 19 nt, Artificial Sequence
  Description of Artificial Sequence: Synthetic oligonucleotide
acagcaauuuuccccugaa

SEQ ID NO: 3129391 - RNA, 19 nt, Artificial Sequence
  Description of Artificial Sequence: Synthetic oligonucleotide
aguagcuggucuugcccug

SEQ ID NO: 3129392 - RNA, 19 nt, Artificial Sequence
  Description of Artificial Sequence: Synthetic oligonucleotide
gcucauauuccaaauugug

SEQ ID NO: 3129393 - RNA, 19 nt, Artificial Sequence
  Description of Artificial Sequence: Synthetic oligonucleotide
uggcuguaggauuuuccaa

SEQ ID NO: 3129394 - RNA, 19 nt, Artificial Sequence
  Description of Artificial Sequence: Synthetic oligonucleotide
auuuuccccugaauucuuc

SEQ ID NO: 3129395 - RNA, 19 nt, Artificial Sequence
  Description of Artificial Sequence: Synthetic oligonucleotide
cacgugauggagcaacuga

SEQ ID NO: 3129396 - RNA, 19 nt, Artificial Sequence
  Description of Artificial Sequence: Synthetic oligonucleotide
caaauugugcuucucaauu

SEQ ID NO: 3129397 - RNA, 19 nt, Artificial Sequence
  Description of Artificial Sequence: Synthetic oligonucleotide
auccaaacugggaucacgu

SEQ ID NO: 3129398 - RNA, 19 nt, Artificial Sequence
  Description of Artificial Sequence: Synthetic oligonucleotide
cacuaaauugauucaggcu

SEQ ID NO: 3129399 - RNA, 19 nt, Artificial Sequence
  Description of Artificial Sequence: Synthetic oligonucleotide
auucagcauccaaacuggg

SEQ ID NO: 3129400 - RNA, 19 nt, Artificial Sequence
  Description of Artificial Sequence: Synthetic oligonucleotide
cugggaucacgugauggag

SEQ ID NO: 3129401 - RNA, 19 nt, Artificial Sequence
  Description of Artificial Sequence: Synthetic oligonucleotide
caucuguaagaucacuaaa

SEQ ID NO: 3129402 - RNA, 19 nt, Artificial Sequence
  Description of Artificial Sequence: Synthetic oligonucleotide
ucacgugauggagcaacug

SEQ ID NO: 3129403 - RNA, 19 nt, Artificial Sequence
  Description of Artificial Sequence: Synthetic oligonucleotide
aauuuuccccugaauucuu

SEQ ID NO: 3129404 - RNA, 19 nt, Artificial Sequence
  Description of Artificial Sequence: Synthetic oligonucleotide
cucuucuguguccuucuuc

SEQ ID NO: 3129405 - RNA, 19 nt, Artificial Sequence
  Description of Artificial Sequence: Synthetic oligonucleotide
ggcuguaggauuuuccaaa

SEQ ID NO: 3129406 - RNA, 19 nt, Artificial Sequence
  Description of Artificial Sequence: Synthetic oligonucleotide
cagcauccaaacugggauc

SEQ ID NO: 3129407 - RNA, 19 nt, Artificial Sequence
  Description of Artificial Sequence: Synthetic oligonucleotide
gggaucacgugauggagca

SEQ ID NO: 3129408 - RNA, 19 nt, Artificial Sequence
  Description of Artificial Sequence: Synthetic oligonucleotide
ugcccugcucauauuccaa

SEQ ID NO: 3129409 - RNA, 19 nt, Artificial Sequence
  Description of Artificial Sequence: Synthetic oligonucleotide
gaguagcuggucuugcccu

SEQ ID NO: 3129410 - RNA, 19 nt, Artificial Sequence
  Description of Artificial Sequence: Synthetic oligonucleotide
caaacugggaucacgugau

SEQ ID NO: 3129411 - RNA, 19 nt, Artificial Sequence
  Description of Artificial Sequence: Synthetic oligonucleotide
cagagaguagcuggucuug

SEQ ID NO: 3129412 - RNA, 19 nt, Artificial Sequence
  Description of Artificial Sequence: Synthetic oligonucleotide
caauuuuccccugaauucu

SEQ ID NO: 3129413 - RNA, 19 nt, Artificial Sequence
  Description of Artificial Sequence: Synthetic oligonucleotide
ccaaacugggaucacguga

SEQ ID NO: 3129414 - RNA, 19 nt, Artificial Sequence
  Description of Artificial Sequence: Synthetic oligonucleotide
agcuggucuugcccugcuc

SEQ ID NO: 3129415 - RNA, 19 nt, Artificial Sequence
  Description of Artificial Sequence: Synthetic oligonucleotide
guaagaucacuaaauugau

SEQ ID NO: 3129416 - RNA, 19 nt, Artificial Sequence
  Description of Artificial Sequence: Synthetic oligonucleotide
ccaaauuucaucuuccauu

SEQ ID NO: 3129417 - RNA, 19 nt, Artificial Sequence
  Description of Artificial Sequence: Synthetic oligonucleotide
caggcucagagaguagcug

SEQ ID NO: 3129418 - RNA, 19 nt, Artificial Sequence
  Description of Artificial Sequence: Synthetic oligonucleotide
cuuuuccucccacagugcu

SEQ ID NO: 3129419 - RNA, 19 nt, Artificial Sequence
  Description of Artificial Sequence: Synthetic oligonucleotide
gcuggucuugcccugcuca

SEQ ID NO: 3129420 - RNA, 19 nt, Artificial Sequence
  Description of Artificial Sequence: Synthetic oligonucleotide
cucagagaguagcuggucu

SEQ ID NO: 3129421 - RNA, 19 nt, Artificial Sequence
  Description of Artificial Sequence: Synthetic oligonucleotide
cauauuccaaauugugcuu

SEQ ID NO: 3129422 - RNA, 19 nt, Artificial Sequence
  Description of Artificial Sequence: Synthetic oligonucleotide
cauucuggcuguaggauuu

SEQ ID NO: 3129423 - RNA, 19 nt, Artificial Sequence
  Description of Artificial Sequence: Synthetic oligonucleotide
cacagcaauuuuccccuga

SEQ ID NO: 3129424 - RNA, 19 nt, Artificial Sequence
  Description of Artificial Sequence: Synthetic oligonucleotide
guagcuggucuugcccugc

SEQ ID NO: 3129425 - RNA, 19 nt, Artificial Sequence
  Description of Artificial Sequence: Synthetic oligonucleotide
uagcuggucuugcccugcu

SEQ ID NO: 3129426 - RNA, 19 nt, Artificial Sequence
  Description of Artificial Sequence: Synthetic oligonucleotide
aucacgugauggagcaacu

SEQ ID NO: 3129427 - RNA, 19 nt, Artificial Sequence
  Description of Artificial Sequence: Synthetic oligonucleotide
ccugaauucuucaucugua

SEQ ID NO: 3129428 - RNA, 19 nt, Artificial Sequence
  Description of Artificial Sequence: Synthetic oligonucleotide
uucuggcuguaggauuuuc

SEQ ID NO: 3129429 - RNA, 19 nt, Artificial Sequence
  Description of Artificial Sequence: Synthetic oligonucleotide
ccauuccugccauucagca

SEQ ID NO: 3129430 - RNA, 19 nt, Artificial Sequence
  Description of Artificial Sequence: Synthetic oligonucleotide
uccucccacagugcucuuc

SEQ ID NO: 3129431 - RNA, 19 nt, Artificial Sequence
  Description of Artificial Sequence: Synthetic oligonucleotide
cuucaucuguaagaucacu

SEQ ID NO: 3129432 - RNA, 19 nt, Artificial Sequence
  Description of Artificial Sequence: Synthetic oligonucleotide
agugcucuucuguguccuu

SEQ ID NO: 3129433 - RNA, 19 nt, Artificial Sequence
  Description of Artificial Sequence: Synthetic oligonucleotide
uggucuugcccugcucaua

SEQ ID NO: 3129434 - RNA, 19 nt, Artificial Sequence
  Description of Artificial Sequence: Synthetic oligonucleotide
cucccacagugcucuucug

SEQ ID NO: 3129435 - RNA, 19 nt, Artificial Sequence
  Description of Artificial Sequence: Synthetic oligonucleotide
ggucuugcccugcucauau

SEQ ID NO: 3129436 - RNA, 19 nt, Artificial Sequence
  Description of Artificial Sequence: Synthetic oligonucleotide
gcuguaggauuuuccaaau

SEQ ID NO: 3129437 - RNA, 19 nt, Artificial Sequence
  Description of Artificial Sequence: Synthetic oligonucleotide
cauuccugccauucagcau

SEQ ID NO: 3129438 - RNA, 19 nt, Artificial Sequence
  Description of Artificial Sequence: Synthetic oligonucleotide
caucuuccauuccugccau

SEQ ID NO: 3129439 - RNA, 19 nt, Artificial Sequence
  Description of Artificial Sequence: Synthetic oligonucleotide
cccugaauucuucaucugu

SEQ ID NO: 3129440 - RNA, 19 nt, Artificial Sequence
  Description of Artificial Sequence: Synthetic oligonucleotide
gcccugcucauauuccaaa

SEQ ID NO: 3129441 - RNA, 19 nt, Artificial Sequence
  Description of Artificial Sequence: Synthetic oligonucleotide
gccauucagcauccaaacu

SEQ ID NO: 3129442 - RNA, 19 nt, Artificial Sequence
  Description of Artificial Sequence: Synthetic oligonucleotide
ccaaauugugcuucucaau

SEQ ID NO: 3129443 - RNA, 19 nt, Artificial Sequence
  Description of Artificial Sequence: Synthetic oligonucleotide
cuguaggauuuuccaaauu

SEQ ID NO: 3129444 - RNA, 19 nt, Artificial Sequence
  Description of Artificial Sequence: Synthetic oligonucleotide
cuguguccuucuucauucu

SEQ ID NO: 3129445 - RNA, 19 nt, Artificial Sequence
  Description of Artificial Sequence: Synthetic oligonucleotide
gcucagagaguagcugguc

SEQ ID NO: 3129446 - RNA, 19 nt, Artificial Sequence
  Description of Artificial Sequence: Synthetic oligonucleotide
cagcaauuuuccccugaau

SEQ ID NO: 3129447 - RNA, 19 nt, Artificial Sequence
  Description of Artificial Sequence: Synthetic oligonucleotide
cagugcucuucuguguccu

SEQ ID NO: 3129448 - RNA, 19 nt, Artificial Sequence
  Description of Artificial Sequence: Synthetic oligonucleotide
cuggucuugcccugcucau

SEQ ID NO: 3129449 - RNA, 19 nt, Artificial Sequence
  Description of Artificial Sequence: Synthetic oligonucleotide
ggcucagagaguagcuggu

SEQ ID NO: 3129450 - RNA, 19 nt, Artificial Sequence
  Description of Artificial Sequence: Synthetic oligonucleotide
uuccucccacagugcucuu

SEQ ID NO: 3129451 - RNA, 19 nt, Artificial Sequence
  Description of Artificial Sequence: Synthetic oligonucleotide
ccugcucauauuccaaauu

SEQ ID NO: 3129452 - RNA, 19 nt, Artificial Sequence
  Description of Artificial Sequence: Synthetic oligonucleotide
cuucuucauucuggcugua

SEQ ID NO: 3129453 - RNA, 19 nt, Artificial Sequence
  Description of Artificial Sequence: Synthetic oligonucleotide
ccacagugcucuucugugu

SEQ ID NO: 3129454 - RNA, 19 nt, Artificial Sequence
  Description of Artificial Sequence: Synthetic oligonucleotide
cccugcucauauuccaaau

SEQ ID NO: 3129455 - RNA, 19 nt, Artificial Sequence
  Description of Artificial Sequence: Synthetic oligonucleotide
ggaucacgugauggagcaa

SEQ ID NO: 3129456 - RNA, 19 nt, Artificial Sequence
  Description of Artificial Sequence: Synthetic oligonucleotide
gucuugcccugcucauauu

SEQ ID NO: 3129457 - RNA, 19 nt, Artificial Sequence
  Description of Artificial Sequence: Synthetic oligonucleotide
aauaggagaaggcagagcg

SEQ ID NO: 3129458 - RNA, 19 nt, Artificial Sequence
  Description of Artificial Sequence: Synthetic oligonucleotide
accaaaguaaguuucgggc

SEQ ID NO: 3129459 - RNA, 19 nt, Artificial Sequence
  Description of Artificial Sequence: Synthetic oligonucleotide
agaagaagcugucagaagg

SEQ ID NO: 3129460 - RNA, 19 nt, Artificial Sequence
  Description of Artificial Sequence: Synthetic oligonucleotide
uuauaauaggagaaggcag

SEQ ID NO: 3129461 - RNA, 19 nt, Artificial Sequence
  Description of Artificial Sequence: Synthetic oligonucleotide
acaauggagaagaagaagc

SEQ ID NO: 3129462 - RNA, 19 nt, Artificial Sequence
  Description of Artificial Sequence: Synthetic oligonucleotide
ugaggauuggacaggaagg

SEQ ID NO: 3129463 - RNA, 19 nt, Artificial Sequence
  Description of Artificial Sequence: Synthetic oligonucleotide
uauaauaggagaaggcaga

SEQ ID NO: 3129464 - RNA, 19 nt, Artificial Sequence
  Description of Artificial Sequence: Synthetic oligonucleotide
ugagguugacuuauaauag

SEQ ID NO: 3129465 - RNA, 19 nt, Artificial Sequence
  Description of Artificial Sequence: Synthetic oligonucleotide
ucuguagaaggcuugagga

SEQ ID NO: 3129466 - RNA, 19 nt, Artificial Sequence
  Description of Artificial Sequence: Synthetic oligonucleotide
uugaggauuggacaggaag

SEQ ID NO: 3129467 - RNA, 19 nt, Artificial Sequence
  Description of Artificial Sequence: Synthetic oligonucleotide
aaccaaaguaaguuucggg

SEQ ID NO: 3129468 - RNA, 19 nt, Artificial Sequence
  Description of Artificial Sequence: Synthetic oligonucleotide
uugacuuauaauaggagaa

SEQ ID NO: 3129469 - RNA, 19 nt, Artificial Sequence
  Description of Artificial Sequence: Synthetic oligonucleotide
guaaguuucgggcauagug

SEQ ID NO: 3129470 - RNA, 19 nt, Artificial Sequence
  Description of Artificial Sequence: Synthetic oligonucleotide
gagaagaagaagcugucag

SEQ ID NO: 3129471 - RNA, 19 nt, Artificial Sequence
  Description of Artificial Sequence: Synthetic oligonucleotide
acuuauaauaggagaaggc

SEQ ID NO: 3129472 - RNA, 19 nt, Artificial Sequence
  Description of Artificial Sequence: Synthetic oligonucleotide
augagguugacuuauaaua

SEQ ID NO: 3129473 - RNA, 19 nt, Artificial Sequence
  Description of Artificial Sequence: Synthetic oligonucleotide
gacuuauaauaggagaagg

SEQ ID NO: 3129474 - RNA, 19 nt, Artificial Sequence
  Description of Artificial Sequence: Synthetic oligonucleotide
aaggcuugaggauuggaca

SEQ ID NO: 3129475 - RNA, 19 nt, Artificial Sequence
  Description of Artificial Sequence: Synthetic oligonucleotide
gagguugacuuauaauagg

SEQ ID NO: 3129476 - RNA, 19 nt, Artificial Sequence
  Description of Artificial Sequence: Synthetic oligonucleotide
guugacuuauaauaggaga

SEQ ID NO: 3129477 - RNA, 19 nt, Artificial Sequence
  Description of Artificial Sequence: Synthetic oligonucleotide
aaagucgaaccaaaguaag

SEQ ID NO: 3129478 - RNA, 19 nt, Artificial Sequence
  Description of Artificial Sequence: Synthetic oligonucleotide
aaggcaugaccugaaguac

SEQ ID NO: 3129479 - RNA, 19 nt, Artificial Sequence
  Description of Artificial Sequence: Synthetic oligonucleotide
aauggagaagaagaagcug

SEQ ID NO: 3129480 - RNA, 19 nt, Artificial Sequence
  Description of Artificial Sequence: Synthetic oligonucleotide
aagaagaagcugucagaag

SEQ ID NO: 3129481 - RNA, 19 nt, Artificial Sequence
  Description of Artificial Sequence: Synthetic oligonucleotide
uaggagaaggcagagcggg

SEQ ID NO: 3129482 - RNA, 19 nt, Artificial Sequence
  Description of Artificial Sequence: Synthetic oligonucleotide
uuucggaaggccgaugagg

SEQ ID NO: 3129483 - RNA, 19 nt, Artificial Sequence
  Description of Artificial Sequence: Synthetic oligonucleotide
ugacuuauaauaggagaag

SEQ ID NO: 3129484 - RNA, 19 nt, Artificial Sequence
  Description of Artificial Sequence: Synthetic oligonucleotide
ucgaaccaaaguaaguuuc

SEQ ID NO: 3129485 - RNA, 19 nt, Artificial Sequence
  Description of Artificial Sequence: Synthetic oligonucleotide
cuuauaauaggagaaggca

SEQ ID NO: 3129486 - RNA, 19 nt, Artificial Sequence
  Description of Artificial Sequence: Synthetic oligonucleotide
ucucggacaauggagaaga

SEQ ID NO: 3129487 - RNA, 19 nt, Artificial Sequence
  Description of Artificial Sequence: Synthetic oligonucleotide
ugggucucggacaauggag

SEQ ID NO: 3129488 - RNA, 19 nt, Artificial Sequence
  Description of Artificial Sequence: Synthetic oligonucleotide
gucuguagaaggcuugagg

SEQ ID NO: 3129489 - RNA, 19 nt, Artificial Sequence
  Description of Artificial Sequence: Synthetic oligonucleotide
aaagacggugccuuucgga

SEQ ID NO: 3129490 - RNA, 19 nt, Artificial Sequence
  Description of Artificial Sequence: Synthetic oligonucleotide
gacaauggagaagaagaag

SEQ ID NO: 3129491 - RNA, 19 nt, Artificial Sequence
  Description of Artificial Sequence: Synthetic oligonucleotide
uucggaaggccgaugaggu

SEQ ID NO: 3129492 - RNA, 19 nt, Artificial Sequence
  Description of Artificial Sequence: Synthetic oligonucleotide
gacggugccuuucggaagg

SEQ ID NO: 3129493 - RNA, 19 nt, Artificial Sequence
  Description of Artificial Sequence: Synthetic oligonucleotide
aaggcagccaaagacggug

SEQ ID NO: 3129494 - RNA, 19 nt, Artificial Sequence
  Description of Artificial Sequence: Synthetic oligonucleotide
gaaggcaugaccugaagua

SEQ ID NO: 3129495 - RNA, 19 nt, Artificial Sequence
  Description of Artificial Sequence: Synthetic oligonucleotide
accaaagucgaaccaaagu

SEQ ID NO: 3129496 - RNA, 19 nt, Artificial Sequence
  Description of Artificial Sequence: Synthetic oligonucleotide
aagacggugccuuucggaa

SEQ ID NO: 3129497 - RNA, 19 nt, Artificial Sequence
  Description of Artificial Sequence: Synthetic oligonucleotide
agaagaagaagcugucaga

SEQ ID NO: 3129498 - RNA, 19 nt, Artificial Sequence
  Description of Artificial Sequence: Synthetic oligonucleotide
auagugguugccacggccc

SEQ ID NO: 3129499 - RNA, 19 nt, Artificial Sequence
  Description of Artificial Sequence: Synthetic oligonucleotide
gaaccaaaguaaguuucgg

SEQ ID NO: 3129500 - RNA, 19 nt, Artificial Sequence
  Description of Artificial Sequence: Synthetic oligonucleotide
gaagcugucagaaggcaug

SEQ ID NO: 3129501 - RNA, 19 nt, Artificial Sequence
  Description of Artificial Sequence: Synthetic oligonucleotide
ggcagagcgggcuagagcc

SEQ ID NO: 3129502 - RNA, 19 nt, Artificial Sequence
  Description of Artificial Sequence: Synthetic oligonucleotide
gaagaagaagcugucagaa

SEQ ID NO: 3129503 - RNA, 19 nt, Artificial Sequence
  Description of Artificial Sequence: Synthetic oligonucleotide
gaagaagcugucagaaggc

SEQ ID NO: 3129504 - RNA, 19 nt, Artificial Sequence
  Description of Artificial Sequence: Synthetic oligonucleotide
agaaggcaugaccugaagu

SEQ ID NO: 3129505 - RNA, 19 nt, Artificial Sequence
  Description of Artificial Sequence: Synthetic oligonucleotide
cauagugguugccacggcc

SEQ ID NO: 3129506 - RNA, 19 nt, Artificial Sequence
  Description of Artificial Sequence: Synthetic oligonucleotide
auaauaggagaaggcagag

SEQ ID NO: 3129507 - RNA, 19 nt, Artificial Sequence
  Description of Artificial Sequence: Synthetic oligonucleotide
ggaagggcaaaccaaaguc

SEQ ID NO: 3129508 - RNA, 19 nt, Artificial Sequence
  Description of Artificial Sequence: Synthetic oligonucleotide
gaggauuggacaggaaggc

SEQ ID NO: 3129509 - RNA, 19 nt, Artificial Sequence
  Description of Artificial Sequence: Synthetic oligonucleotide
gaaggcuugaggauuggac

SEQ ID NO: 3129510 - RNA, 19 nt, Artificial Sequence
  Description of Artificial Sequence: Synthetic oligonucleotide
aaguaaguuucgggcauag

SEQ ID NO: 3129511 - RNA, 19 nt, Artificial Sequence
  Description of Artificial Sequence: Synthetic oligonucleotide
gacaggaaggcagccaaag

SEQ ID NO: 3129512 - RNA, 19 nt, Artificial Sequence
  Description of Artificial Sequence: Synthetic oligonucleotide
aagggcaaaccaaagucga

SEQ ID NO: 3129513 - RNA, 19 nt, Artificial Sequence
  Description of Artificial Sequence: Synthetic oligonucleotide
caaagucgaaccaaaguaa

SEQ ID NO: 3129514 - RNA, 19 nt, Artificial Sequence
  Description of Artificial Sequence: Synthetic oligonucleotide
guuucgggcauagugguug

SEQ ID NO: 3129515 - RNA, 19 nt, Artificial Sequence
  Description of Artificial Sequence: Synthetic oligonucleotide
ucggacaauggagaagaag

SEQ ID NO: 3129516 - RNA, 19 nt, Artificial Sequence
  Description of Artificial Sequence: Synthetic oligonucleotide
ugucagaaggcaugaccug

SEQ ID NO: 3129517 - RNA, 19 nt, Artificial Sequence
  Description of Artificial Sequence: Synthetic oligonucleotide
aggccgaugagguugacuu

SEQ ID NO: 3129518 - RNA, 19 nt, Artificial Sequence
  Description of Artificial Sequence: Synthetic oligonucleotide
agucgaaccaaaguaaguu

SEQ ID NO: 3129519 - RNA, 19 nt, Artificial Sequence
  Description of Artificial Sequence: Synthetic oligonucleotide
aggcaugaccugaaguacc

SEQ ID NO: 3129520 - RNA, 19 nt, Artificial Sequence
  Description of Artificial Sequence: Synthetic oligonucleotide
aggcagagcgggcuagagc

SEQ ID NO: 3129521 - RNA, 19 nt, Artificial Sequence
  Description of Artificial Sequence: Synthetic oligonucleotide
ggcaaaccaaagucgaacc

SEQ ID NO: 3129522 - RNA, 19 nt, Artificial Sequence
  Description of Artificial Sequence: Synthetic oligonucleotide
aagaagcugucagaaggca

SEQ ID NO: 3129523 - RNA, 19 nt, Artificial Sequence
  Description of Artificial Sequence: Synthetic oligonucleotide
uggagaagaagaagcuguc

SEQ ID NO: 3129524 - RNA, 19 nt, Artificial Sequence
  Description of Artificial Sequence: Synthetic oligonucleotide
uaauaggagaaggcagagc

SEQ ID NO: 3129525 - RNA, 19 nt, Artificial Sequence
  Description of Artificial Sequence: Synthetic oligonucleotide
aaccaaagucgaaccaaag

SEQ ID NO: 3129526 - RNA, 19 nt, Artificial Sequence
  Description of Artificial Sequence: Synthetic oligonucleotide
aaaccaaagucgaaccaaa

SEQ ID NO: 3129527 - RNA, 19 nt, Artificial Sequence
  Description of Artificial Sequence: Synthetic oligonucleotide
agguugacuuauaauagga

SEQ ID NO: 3129528 - RNA, 19 nt, Artificial Sequence
  Description of Artificial Sequence: Synthetic oligonucleotide
ucagaaggcaugaccugaa

SEQ ID NO: 3129529 - RNA, 19 nt, Artificial Sequence
  Description of Artificial Sequence: Synthetic oligonucleotide
gcugucagaaggcaugacc

SEQ ID NO: 3129530 - RNA, 19 nt, Artificial Sequence
  Description of Artificial Sequence: Synthetic oligonucleotide
aagucgaaccaaaguaagu

SEQ ID NO: 3129531 - RNA, 19 nt, Artificial Sequence
  Description of Artificial Sequence: Synthetic oligonucleotide
ggauuggacaggaaggcag

SEQ ID NO: 3129532 - RNA, 19 nt, Artificial Sequence
  Description of Artificial Sequence: Synthetic oligonucleotide
ggaaggcagccaaagacgg

SEQ ID NO: 3129533 - RNA, 19 nt, Artificial Sequence
  Description of Artificial Sequence: Synthetic oligonucleotide
guagaaggcuugaggauug

SEQ ID NO: 3129534 - RNA, 19 nt, Artificial Sequence
  Description of Artificial Sequence: Synthetic oligonucleotide
gguugacuuauaauaggag

SEQ ID NO: 3129535 - RNA, 19 nt, Artificial Sequence
  Description of Artificial Sequence: Synthetic oligonucleotide
auaggagaaggcagagcgg

SEQ ID NO: 3129536 - RNA, 19 nt, Artificial Sequence
  Description of Artificial Sequence: Synthetic oligonucleotide
uagugguugccacggcccc

SEQ ID NO: 3129537 - RNA, 19 nt, Artificial Sequence
  Description of Artificial Sequence: Synthetic oligonucleotide
gaugagguugacuuauaau

SEQ ID NO: 3129538 - RNA, 19 nt, Artificial Sequence
  Description of Artificial Sequence: Synthetic oligonucleotide
agacggugccuuucggaag

SEQ ID NO: 3129539 - RNA, 19 nt, Artificial Sequence
  Description of Artificial Sequence: Synthetic oligonucleotide
ggcauagugguugccacgg

SEQ ID NO: 3129540 - RNA, 19 nt, Artificial Sequence
  Description of Artificial Sequence: Synthetic oligonucleotide
caaagacggugccuuucgg

SEQ ID NO: 3129541 - RNA, 19 nt, Artificial Sequence
  Description of Artificial Sequence: Synthetic oligonucleotide
uuucgggcauagugguugc

SEQ ID NO: 3129542 - RNA, 19 nt, Artificial Sequence
  Description of Artificial Sequence: Synthetic oligonucleotide
cugucagaaggcaugaccu

SEQ ID NO: 3129543 - RNA, 19 nt, Artificial Sequence
  Description of Artificial Sequence: Synthetic oligonucleotide
ggugccuuucggaaggccg

SEQ ID NO: 3129544 - RNA, 19 nt, Artificial Sequence
  Description of Artificial Sequence: Synthetic oligonucleotide
aagcugucagaaggcauga

SEQ ID NO: 3129545 - RNA, 19 nt, Artificial Sequence
  Description of Artificial Sequence: Synthetic oligonucleotide
cuuucggaaggccgaugag

SEQ ID NO: 3129546 - RNA, 19 nt, Artificial Sequence
  Description of Artificial Sequence: Synthetic oligonucleotide
aaggcagagcgggcuagag

SEQ ID NO: 3129547 - RNA, 19 nt, Artificial Sequence
  Description of Artificial Sequence: Synthetic oligonucleotide
caaaccaaagucgaaccaa

SEQ ID NO: 3129548 - RNA, 19 nt, Artificial Sequence
  Description of Artificial Sequence: Synthetic oligonucleotide
cgaaccaaaguaaguuucg

SEQ ID NO: 3129549 - RNA, 19 nt, Artificial Sequence
  Description of Artificial Sequence: Synthetic oligonucleotide
cggacaauggagaagaaga

SEQ ID NO: 3129550 - RNA, 19 nt, Artificial Sequence
  Description of Artificial Sequence: Synthetic oligonucleotide
aaaguaaguuucgggcaua

SEQ ID NO: 3129551 - RNA, 19 nt, Artificial Sequence
  Description of Artificial Sequence: Synthetic oligonucleotide
ucgggcauagugguugcca

SEQ ID NO: 3129552 - RNA, 19 nt, Artificial Sequence
  Description of Artificial Sequence: Synthetic oligonucleotide
ccaaagucgaaccaaagua

SEQ ID NO: 3129553 - RNA, 19 nt, Artificial Sequence
  Description of Artificial Sequence: Synthetic oligonucleotide
caauggagaagaagaagcu

SEQ ID NO: 3129554 - RNA, 19 nt, Artificial Sequence
  Description of Artificial Sequence: Synthetic oligonucleotide
uagaaggcuugaggauugg

SEQ ID NO: 3129555 - RNA, 19 nt, Artificial Sequence
  Description of Artificial Sequence: Synthetic oligonucleotide
ccaaagacggugccuuucg

SEQ ID NO: 3129556 - RNA, 19 nt, Artificial Sequence
  Description of Artificial Sequence: Synthetic oligonucleotide
ccaaaguaaguuucgggca

SEQ ID NO: 3129557 - RNA, 19 nt, Artificial Sequence
  Description of Artificial Sequence: Synthetic oligonucleotide
gucagaaggcaugaccuga

SEQ ID NO: 3129558 - RNA, 19 nt, Artificial Sequence
  Description of Artificial Sequence: Synthetic oligonucleotide
agaaggcagagcgggcuag

SEQ ID NO: 3129559 - RNA, 19 nt, Artificial Sequence
  Description of Artificial Sequence: Synthetic oligonucleotide
cagaaggcaugaccugaag

SEQ ID NO: 3129560 - RNA, 19 nt, Artificial Sequence
  Description of Artificial Sequence: Synthetic oligonucleotide
aggagaaggcagagcgggc

SEQ ID NO: 3129561 - RNA, 19 nt, Artificial Sequence
  Description of Artificial Sequence: Synthetic oligonucleotide
aaggccgaugagguugacu

SEQ ID NO: 3129562 - RNA, 19 nt, Artificial Sequence
  Description of Artificial Sequence: Synthetic oligonucleotide
aggcagccaaagacggugc

SEQ ID NO: 3129563 - RNA, 19 nt, Artificial Sequence
  Description of Artificial Sequence: Synthetic oligonucleotide
gucucggacaauggagaag

SEQ ID NO: 3129564 - RNA, 19 nt, Artificial Sequence
  Description of Artificial Sequence: Synthetic oligonucleotide
agcgggcuagagccgcugg

SEQ ID NO: 3129565 - RNA, 19 nt, Artificial Sequence
  Description of Artificial Sequence: Synthetic oligonucleotide
aggauuggacaggaaggca

SEQ ID NO: 3129566 - RNA, 19 nt, Artificial Sequence
  Description of Artificial Sequence: Synthetic oligonucleotide
gggcauagugguugccacg

SEQ ID NO: 3129567 - RNA, 19 nt, Artificial Sequence
  Description of Artificial Sequence: Synthetic oligonucleotide
gggcaaaccaaagucgaac

SEQ ID NO: 3129568 - RNA, 19 nt, Artificial Sequence
  Description of Artificial Sequence: Synthetic oligonucleotide
agaagcugucagaaggcau

SEQ ID NO: 3129569 - RNA, 19 nt, Artificial Sequence
  Description of Artificial Sequence: Synthetic oligonucleotide
caaaguaaguuucgggcau

SEQ ID NO: 3129570 - RNA, 19 nt, Artificial Sequence
  Description of Artificial Sequence: Synthetic oligonucleotide
agcugucagaaggcaugac

SEQ ID NO: 3129571 - RNA, 19 nt, Artificial Sequence
  Description of Artificial Sequence: Synthetic oligonucleotide
agaaggcuugaggauugga

SEQ ID NO: 3129572 - RNA, 19 nt, Artificial Sequence
  Description of Artificial Sequence: Synthetic oligonucleotide
aguaaguuucgggcauagu

SEQ ID NO: 3129573 - RNA, 19 nt, Artificial Sequence
  Description of Artificial Sequence: Synthetic oligonucleotide
gagccgcugggucucggac

SEQ ID NO: 3129574 - RNA, 19 nt, Artificial Sequence
  Description of Artificial Sequence: Synthetic oligonucleotide
cugggucucggacaaugga

SEQ ID NO: 3129575 - RNA, 19 nt, Artificial Sequence
  Description of Artificial Sequence: Synthetic oligonucleotide
ggcuugaggauuggacagg

SEQ ID NO: 3129576 - RNA, 19 nt, Artificial Sequence
  Description of Artificial Sequence: Synthetic oligonucleotide
gucgaaccaaaguaaguuu

SEQ ID NO: 3129577 - RNA, 19 nt, Artificial Sequence
  Description of Artificial Sequence: Synthetic oligonucleotide
cagagcgggcuagagccgc

SEQ ID NO: 3129578 - RNA, 19 nt, Artificial Sequence
  Description of Artificial Sequence: Synthetic oligonucleotide
ggagaagaagaagcuguca

SEQ ID NO: 3129579 - RNA, 19 nt, Artificial Sequence
  Description of Artificial Sequence: Synthetic oligonucleotide
gagaaggcagagcgggcua

SEQ ID NO: 3129580 - RNA, 19 nt, Artificial Sequence
  Description of Artificial Sequence: Synthetic oligonucleotide
agagccgcugggucucgga

SEQ ID NO: 3129581 - RNA, 19 nt, Artificial Sequence
  Description of Artificial Sequence: Synthetic oligonucleotide
ggacaauggagaagaagaa

SEQ ID NO: 3129582 - RNA, 19 nt, Artificial Sequence
  Description of Artificial Sequence: Synthetic oligonucleotide
acggugccuuucggaaggc

SEQ ID NO: 3129583 - RNA, 19 nt, Artificial Sequence
  Description of Artificial Sequence: Synthetic oligonucleotide
uucgggcauagugguugcc

SEQ ID NO: 3129584 - RNA, 19 nt, Artificial Sequence
  Description of Artificial Sequence: Synthetic oligonucleotide
ggcagccaaagacggugcc

SEQ ID NO: 3129585 - RNA, 19 nt, Artificial Sequence
  Description of Artificial Sequence: Synthetic oligonucleotide
ggggaagggcaaaccaaag

SEQ ID NO: 3129586 - RNA, 19 nt, Artificial Sequence
  Description of Artificial Sequence: Synthetic oligonucleotide
ggucuguagaaggcuugag

SEQ ID NO: 3129587 - RNA, 19 nt, Artificial Sequence
  Description of Artificial Sequence: Synthetic oligonucleotide
gugccuuucggaaggccga

SEQ ID NO: 3129588 - RNA, 19 nt, Artificial Sequence
  Description of Artificial Sequence: Synthetic oligonucleotide
gcugggucucggacaaugg

SEQ ID NO: 3129589 - RNA, 19 nt, Artificial Sequence
  Description of Artificial Sequence: Synthetic oligonucleotide
gggucucggacaauggaga

SEQ ID NO: 3129590 - RNA, 19 nt, Artificial Sequence
  Description of Artificial Sequence: Synthetic oligonucleotide
gggaagggcaaaccaaagu

SEQ ID NO: 3129591 - RNA, 19 nt, Artificial Sequence
  Description of Artificial Sequence: Synthetic oligonucleotide
ccuuucggaaggccgauga

SEQ ID NO: 3129592 - RNA, 19 nt, Artificial Sequence
  Description of Artificial Sequence: Synthetic oligonucleotide
uagagccgcugggucucgg

SEQ ID NO: 3129593 - RNA, 19 nt, Artificial Sequence
  Description of Artificial Sequence: Synthetic oligonucleotide
cuugaggauuggacaggaa

SEQ ID NO: 3129594 - RNA, 19 nt, Artificial Sequence
  Description of Artificial Sequence: Synthetic oligonucleotide
ucggaaggccgaugagguu

SEQ ID NO: 3129595 - RNA, 19 nt, Artificial Sequence
  Description of Artificial Sequence: Synthetic oligonucleotide
gaaggcagagcgggcuaga

SEQ ID NO: 3129596 - RNA, 19 nt, Artificial Sequence
  Description of Artificial Sequence: Synthetic oligonucleotide
gcgggcuagagccgcuggg

SEQ ID NO: 3129597 - RNA, 19 nt, Artificial Sequence
  Description of Artificial Sequence: Synthetic oligonucleotide
cggaaggccgaugagguug

SEQ ID NO: 3129598 - RNA, 19 nt, Artificial Sequence
  Description of Artificial Sequence: Synthetic oligonucleotide
ggucucggacaauggagaa

SEQ ID NO: 3129599 - RNA, 19 nt, Artificial Sequence
  Description of Artificial Sequence: Synthetic oligonucleotide
gcuugaggauuggacagga

SEQ ID NO: 3129600 - RNA, 19 nt, Artificial Sequence
  Description of Artificial Sequence: Synthetic oligonucleotide
agccaaagacggugccuuu

SEQ ID NO: 3129601 - RNA, 19 nt, Artificial Sequence
  Description of Artificial Sequence: Synthetic oligonucleotide
ugccuuucggaaggccgau

SEQ ID NO: 3129602 - RNA, 19 nt, Artificial Sequence
  Description of Artificial Sequence: Synthetic oligonucleotide
gcauagugguugccacggc

SEQ ID NO: 3129603 - RNA, 19 nt, Artificial Sequence
  Description of Artificial Sequence: Synthetic oligonucleotide
gagcgggcuagagccgcug

SEQ ID NO: 3129604 - RNA, 19 nt, Artificial Sequence
  Description of Artificial Sequence: Synthetic oligonucleotide
gcuagagccgcugggucuc

SEQ ID NO: 3129605 - RNA, 19 nt, Artificial Sequence
  Description of Artificial Sequence: Synthetic oligonucleotide
gaaggcagccaaagacggu

SEQ ID NO: 3129606 - RNA, 19 nt, Artificial Sequence
  Description of Artificial Sequence: Synthetic oligonucleotide
gggcuagagccgcuggguc

SEQ ID NO: 3129607 - RNA, 19 nt, Artificial Sequence
  Description of Artificial Sequence: Synthetic oligonucleotide
aguuucgggcauagugguu

SEQ ID NO: 3129608 - RNA, 19 nt, Artificial Sequence
  Description of Artificial Sequence: Synthetic oligonucleotide
gcagagcgggcuagagccg

SEQ ID NO: 3129609 - RNA, 19 nt, Artificial Sequence
  Description of Artificial Sequence: Synthetic oligonucleotide
ggagaaggcagagcgggcu

SEQ ID NO: 3129610 - RNA, 19 nt, Artificial Sequence
  Description of Artificial Sequence: Synthetic oligonucleotide
ccccgggucuguagaaggc

SEQ ID NO: 3129611 - RNA, 19 nt, Artificial Sequence
  Description of Artificial Sequence: Synthetic oligonucleotide
gccaaagacggugccuuuc

SEQ ID NO: 3129612 - RNA, 19 nt, Artificial Sequence
  Description of Artificial Sequence: Synthetic oligonucleotide
gggucuguagaaggcuuga

SEQ ID NO: 3129613 - RNA, 19 nt, Artificial Sequence
  Description of Artificial Sequence: Synthetic oligonucleotide
cucggacaauggagaagaa

SEQ ID NO: 3129614 - RNA, 19 nt, Artificial Sequence
  Description of Artificial Sequence: Synthetic oligonucleotide
ggaaggccgaugagguuga

SEQ ID NO: 3129615 - RNA, 19 nt, Artificial Sequence
  Description of Artificial Sequence: Synthetic oligonucleotide
ggcuagagccgcugggucu

SEQ ID NO: 3129616 - RNA, 19 nt, Artificial Sequence
  Description of Artificial Sequence: Synthetic oligonucleotide
cgggcauagugguugccac

SEQ ID NO: 3129617 - RNA, 19 nt, Artificial Sequence
  Description of Artificial Sequence: Synthetic oligonucleotide
ggcaugaccugaaguaccu

SEQ ID NO: 3129618 - RNA, 19 nt, Artificial Sequence
  Description of Artificial Sequence: Synthetic oligonucleotide
gccgcugggucucggacaa

SEQ ID NO: 3129619 - RNA, 19 nt, Artificial Sequence
  Description of Artificial Sequence: Synthetic oligonucleotide
cgggucuguagaaggcuug

SEQ ID NO: 3129620 - RNA, 19 nt, Artificial Sequence
  Description of Artificial Sequence: Synthetic oligonucleotide
gaaggccgaugagguugac

SEQ ID NO: 3129621 - RNA, 19 nt, Artificial Sequence
  Description of Artificial Sequence: Synthetic oligonucleotide
agagcgggcuagagccgcu

SEQ ID NO: 3129622 - RNA, 19 nt, Artificial Sequence
  Description of Artificial Sequence: Synthetic oligonucleotide
cagccaaagacggugccuu

SEQ ID NO: 3129623 - RNA, 19 nt, Artificial Sequence
  Description of Artificial Sequence: Synthetic oligonucleotide
gccgaugagguugacuuau

SEQ ID NO: 3129624 - RNA, 19 nt, Artificial Sequence
  Description of Artificial Sequence: Synthetic oligonucleotide
cgaugagguugacuuauaa

SEQ ID NO: 3129625 - RNA, 19 nt, Artificial Sequence
  Description of Artificial Sequence: Synthetic oligonucleotide
cgcugggucucggacaaug

SEQ ID NO: 3129626 - RNA, 19 nt, Artificial Sequence
  Description of Artificial Sequence: Synthetic oligonucleotide
ggccgaugagguugacuua

SEQ ID NO: 3129627 - RNA, 19 nt, Artificial Sequence
  Description of Artificial Sequence: Synthetic oligonucleotide
gccuuucggaaggccgaug

SEQ ID NO: 3129628 - RNA, 19 nt, Artificial Sequence
  Description of Artificial Sequence: Synthetic oligonucleotide
gcagccaaagacggugccu

SEQ ID NO: 3129629 - RNA, 19 nt, Artificial Sequence
  Description of Artificial Sequence: Synthetic oligonucleotide
ggacaggaaggcagccaaa

SEQ ID NO: 3129630 - RNA, 19 nt, Artificial Sequence
  Description of Artificial Sequence: Synthetic oligonucleotide
ccgaugagguugacuuaua

SEQ ID NO: 3129631 - RNA, 19 nt, Artificial Sequence
  Description of Artificial Sequence: Synthetic oligonucleotide
cggugccuuucggaaggcc

SEQ ID NO: 3129632 - RNA, 19 nt, Artificial Sequence
  Description of Artificial Sequence: Synthetic oligonucleotide
ccgggucuguagaaggcuu

SEQ ID NO: 3129633 - RNA, 19 nt, Artificial Sequence
  Description of Artificial Sequence: Synthetic oligonucleotide
cccgggucuguagaaggcu

SEQ ID NO: 3129634 - RNA, 19 nt, Artificial Sequence
  Description of Artificial Sequence: Synthetic oligonucleotide
ccgcugggucucggacaau

SEQ ID NO: 3129635 - RNA, 19 nt, Artificial Sequence
  Description of Artificial Sequence: Synthetic oligonucleotide
  modified_base (6)..(6): a, c, u, g, unknown or other
uuaacngccacauucacuc

SEQ ID NO: 3129636 - RNA, 19 nt, Artificial Sequence
  Description of Artificial Sequence: Synthetic oligonucleotide
  modified_base (17)..(17): a, c, u, g, unknown or other
aagguguguguuuaacngc

SEQ ID NO: 3129637 - RNA, 19 nt, Artificial Sequence
  Description of Artificial Sequence: Synthetic oligonucleotide
  modified_base (18)..(18): a, c, u, g, unknown or other
gaagguguguguuuaacng

SEQ ID NO: 3129638 - RNA, 19 nt, Artificial Sequence
  Description of Artificial Sequence: Synthetic oligonucleotide
gaagucauaguacugaaga

SEQ ID NO: 3129639 - RNA, 19 nt, Artificial Sequence
  Description of Artificial Sequence: Synthetic oligonucleotide
  modified_base (4)..(4): a, c, u, g, unknown or other
aacngccacauucacuccg

SEQ ID NO: 3129640 - RNA, 19 nt, Artificial Sequence
  Description of Artificial Sequence: Synthetic oligonucleotide
  modified_base (10)..(10): a, c, u, g, unknown or other
guguuuaacngccacauuc

SEQ ID NO: 3129641 - RNA, 19 nt, Artificial Sequence
  Description of Artificial Sequence: Synthetic oligonucleotide
uccuucagcccucaggugg

SEQ ID NO: 3129642 - RNA, 19 nt, Artificial Sequence
  Description of Artificial Sequence: Synthetic oligonucleotide
  modified_base (9)..(9): a, c, u, g, unknown or other
uguuuaacngccacauuca

SEQ ID NO: 3129643 - RNA, 19 nt, Artificial Sequence
  Description of Artificial Sequence: Synthetic oligonucleotide
  modified_base (7)..(7): a, c, u, g, unknown or other
uuuaacngccacauucacu

SEQ ID NO: 3129644 - RNA, 19 nt, Artificial Sequence
  Description of Artificial Sequence: Synthetic oligonucleotide
  modified_base (16)..(16): a, c, u, g, unknown or other
agguguguguuuaacngcc

SEQ ID NO: 3129645 - RNA, 19 nt, Artificial Sequence
  Description of Artificial Sequence: Synthetic oligonucleotide
gaagucgcccaccaggacg

SEQ ID NO: 3129646 - RNA, 19 nt, Artificial Sequence
  Description of Artificial Sequence: Synthetic oligonucleotide
aacgaagucauaguacuga

SEQ ID NO: 3129647 - RNA, 19 nt, Artificial Sequence
  Description of Artificial Sequence: Synthetic oligonucleotide
  modified_base (19)..(19): a, c, u, g, unknown or other
ugaagguguguguuuaacn

SEQ ID NO: 3129648 - RNA, 19 nt, Artificial Sequence
  Description of Artificial Sequence: Synthetic oligonucleotide
  modified_base (13)..(13): a, c, u, g, unknown or other
uguguguuuaacngccaca

SEQ ID NO: 3129649 - RNA, 19 nt, Artificial Sequence
  Description of Artificial Sequence: Synthetic oligonucleotide
aaaaugaagguguguguuu

SEQ ID NO: 3129650 - RNA, 19 nt, Artificial Sequence
  Description of Artificial Sequence: Synthetic oligonucleotide
guggaagucgcccaccagg

SEQ ID NO: 3129651 - RNA, 19 nt, Artificial Sequence
  Description of Artificial Sequence: Synthetic oligonucleotide
cauggcaacgaagucauag

SEQ ID NO: 3129652 - RNA, 19 nt, Artificial Sequence
  Description of Artificial Sequence: Synthetic oligonucleotide
aagucauaguacugaagau

SEQ ID NO: 3129653 - RNA, 19 nt, Artificial Sequence
  Description of Artificial Sequence: Synthetic oligonucleotide
aucuccuucagcccucagg

SEQ ID NO: 3129654 - RNA, 19 nt, Artificial Sequence
  Description of Artificial Sequence: Synthetic oligonucleotide
cuucuuucgguggaagucg

SEQ ID NO: 3129655 - RNA, 19 nt, Artificial Sequence
  Description of Artificial Sequence: Synthetic oligonucleotide
aaaugaagguguguguuua

SEQ ID NO: 3129656 - RNA, 19 nt, Artificial Sequence
  Description of Artificial Sequence: Synthetic oligonucleotide
uggaagucgcccaccagga

SEQ ID NO: 3129657 - RNA, 19 nt, Artificial Sequence
  Description of Artificial Sequence: Synthetic oligonucleotide
ugcggccucucccugggcg

SEQ ID NO: 3129658 - RNA, 19 nt, Artificial Sequence
  Description of Artificial Sequence: Synthetic oligonucleotide
aaugaagguguguguuuaa

SEQ ID NO: 3129659 - RNA, 19 nt, Artificial Sequence
  Description of Artificial Sequence: Synthetic oligonucleotide
auggcaacgaagucauagu

SEQ ID NO: 3129660 - RNA, 19 nt, Artificial Sequence
  Description of Artificial Sequence: Synthetic oligonucleotide
  modified_base (14)..(14): a, c, u, g, unknown or other
guguguguuuaacngccac

SEQ ID NO: 3129661 - RNA, 19 nt, Artificial Sequence
  Description of Artificial Sequence: Synthetic oligonucleotide
cuuucgguggaagucgccc

SEQ ID NO: 3129662 - RNA, 19 nt, Artificial Sequence
  Description of Artificial Sequence: Synthetic oligonucleotide
  modified_base (8)..(8): a, c, u, g, unknown or other
guuuaacngccacauucac

SEQ ID NO: 3129663 - RNA, 19 nt, Artificial Sequence
  Description of Artificial Sequence: Synthetic oligonucleotide
uucuuucgguggaagucgc

SEQ ID NO: 3129664 - RNA, 19 nt, Artificial Sequence
  Description of Artificial Sequence: Synthetic oligonucleotide
uggcaacgaagucauagua

SEQ ID NO: 3129665 - RNA, 19 nt, Artificial Sequence
  Description of Artificial Sequence: Synthetic oligonucleotide
uggaccugcggccucuccc

SEQ ID NO: 3129666 - RNA, 19 nt, Artificial Sequence
  Description of Artificial Sequence: Synthetic oligonucleotide
uuucgguggaagucgccca

SEQ ID NO: 3129667 - RNA, 19 nt, Artificial Sequence
  Description of Artificial Sequence: Synthetic oligonucleotide
caacgaagucauaguacug

SEQ ID NO: 3129668 - RNA, 19 nt, Artificial Sequence
  Description of Artificial Sequence: Synthetic oligonucleotide
aggcauggcaacgaaguca

SEQ ID NO: 3129669 - RNA, 19 nt, Artificial Sequence
  Description of Artificial Sequence: Synthetic oligonucleotide
  modified_base (5)..(5): a, c, u, g, unknown or other
uaacngccacauucacucc

SEQ ID NO: 3129670 - RNA, 19 nt, Artificial Sequence
  Description of Artificial Sequence: Synthetic oligonucleotide
ucagcccucagguggggca

SEQ ID NO: 3129671 - RNA, 19 nt, Artificial Sequence
  Description of Artificial Sequence: Synthetic oligonucleotide
ucuuucgguggaagucgcc

SEQ ID NO: 3129672 - RNA, 19 nt, Artificial Sequence
  Description of Artificial Sequence: Synthetic oligonucleotide
acgaagucauaguacugaa

SEQ ID NO: 3129673 - RNA, 19 nt, Artificial Sequence
  Description of Artificial Sequence: Synthetic oligonucleotide
aagucgcccaccaggacga

SEQ ID NO: 3129674 - RNA, 19 nt, Artificial Sequence
  Description of Artificial Sequence: Synthetic oligonucleotide
uucgguggaagucgcccac

SEQ ID NO: 3129675 - RNA, 19 nt, Artificial Sequence
  Description of Artificial Sequence: Synthetic oligonucleotide
  modified_base (11)..(11): a, c, u, g, unknown or other
uguguuuaacngccacauu

SEQ ID NO: 3129676 - RNA, 19 nt, Artificial Sequence
  Description of Artificial Sequence: Synthetic oligonucleotide
aauuggaccugcggccucu

SEQ ID NO: 3129677 - RNA, 19 nt, Artificial Sequence
  Description of Artificial Sequence: Synthetic oligonucleotide
gcaacgaagucauaguacu

SEQ ID NO: 3129678 - RNA, 19 nt, Artificial Sequence
  Description of Artificial Sequence: Synthetic oligonucleotide
ggcaacgaagucauaguac

SEQ ID NO: 3129679 - RNA, 19 nt, Artificial Sequence
  Description of Artificial Sequence: Synthetic oligonucleotide
accugcggccucucccugg

SEQ ID NO: 3129680 - RNA, 19 nt, Artificial Sequence
  Description of Artificial Sequence: Synthetic oligonucleotide
gaauuggaccugcggccuc

SEQ ID NO: 3129681 - RNA, 19 nt, Artificial Sequence
  Description of Artificial Sequence: Synthetic oligonucleotide
  modified_base (12)..(12): a, c, u, g, unknown or other
guguguuuaacngccacau

SEQ ID NO: 3129682 - RNA, 19 nt, Artificial Sequence
  Description of Artificial Sequence: Synthetic oligonucleotide
uuggaccugcggccucucc

SEQ ID NO: 3129683 - RNA, 19 nt, Artificial Sequence
  Description of Artificial Sequence: Synthetic oligonucleotide
  modified_base (3)..(3): a, c, u, g, unknown or other
acngccacauucacuccga

SEQ ID NO: 3129684 - RNA, 19 nt, Artificial Sequence
  Description of Artificial Sequence: Synthetic oligonucleotide
ucaucuccuucagcccuca

SEQ ID NO: 3129685 - RNA, 19 nt, Artificial Sequence
  Description of Artificial Sequence: Synthetic oligonucleotide
ucgguggaagucgcccacc

SEQ ID NO: 3129686 - RNA, 19 nt, Artificial Sequence
  Description of Artificial Sequence: Synthetic oligonucleotide
uucagcccucagguggggc

SEQ ID NO: 3129687 - RNA, 19 nt, Artificial Sequence
  Description of Artificial Sequence: Synthetic oligonucleotide
cuccuucagcccucaggug

SEQ ID NO: 3129688 - RNA, 19 nt, Artificial Sequence
  Description of Artificial Sequence: Synthetic oligonucleotide
gguggaagucgcccaccag

SEQ ID NO: 3129689 - RNA, 19 nt, Artificial Sequence
  Description of Artificial Sequence: Synthetic oligonucleotide
auuggaccugcggccucuc

SEQ ID NO: 3129690 - RNA, 19 nt, Artificial Sequence
  Description of Artificial Sequence: Synthetic oligonucleotide
gcaggcauggcaacgaagu

SEQ ID NO: 3129691 - RNA, 19 nt, Artificial Sequence
  Description of Artificial Sequence: Synthetic oligonucleotide
cuucagcccucaggugggg

SEQ ID NO: 3129692 - RNA, 19 nt, Artificial Sequence
  Description of Artificial Sequence: Synthetic oligonucleotide
gaccugcggccucucccug

SEQ ID NO: 3129693 - RNA, 19 nt, Artificial Sequence
  Description of Artificial Sequence: Synthetic oligonucleotide
ggaagucgcccaccaggac

SEQ ID NO: 3129694 - RNA, 19 nt, Artificial Sequence
  Description of Artificial Sequence: Synthetic oligonucleotide
gcggccucucccugggcgg

SEQ ID NO: 3129695 - RNA, 19 nt, Artificial Sequence
  Description of Artificial Sequence: Synthetic oligonucleotide
  modified_base (15)..(15): a, c, u, g, unknown or other
gguguguguuuaacngcca

SEQ ID NO: 3129696 - RNA, 19 nt, Artificial Sequence
  Description of Artificial Sequence: Synthetic oligonucleotide
ggaccugcggccucucccu

SEQ ID NO: 3129697 - RNA, 19 nt, Artificial Sequence
  Description of Artificial Sequence: Synthetic oligonucleotide
  modified_base (2)..(2): a, c, u, g, unknown or other
cngccacauucacuccgaa

SEQ ID NO: 3129698 - RNA, 19 nt, Artificial Sequence
  Description of Artificial Sequence: Synthetic oligonucleotide
cugcggccucucccugggc

SEQ ID NO: 3129699 - RNA, 19 nt, Artificial Sequence
  Description of Artificial Sequence: Synthetic oligonucleotide
cgguggaagucgcccacca

SEQ ID NO: 3129700 - RNA, 19 nt, Artificial Sequence
  Description of Artificial Sequence: Synthetic oligonucleotide
gcccucagguggggcaaga

SEQ ID NO: 3129701 - RNA, 19 nt, Artificial Sequence
  Description of Artificial Sequence: Synthetic oligonucleotide
gccucucccugggcggcca

SEQ ID NO: 3129702 - RNA, 19 nt, Artificial Sequence
  Description of Artificial Sequence: Synthetic oligonucleotide
cggccucucccugggcggc

SEQ ID NO: 3129703 - RNA, 19 nt, Artificial Sequence
  Description of Artificial Sequence: Synthetic oligonucleotide
gcauggcaacgaagucaua

SEQ ID NO: 3129704 - RNA, 19 nt, Artificial Sequence
  Description of Artificial Sequence: Synthetic oligonucleotide
aacacauagacauagcuuc

SEQ ID NO: 3129705 - RNA, 19 nt, Artificial Sequence
  Description of Artificial Sequence: Synthetic oligonucleotide
caaacuuuuagcaagaaag

SEQ ID NO: 3129706 - RNA, 19 nt, Artificial Sequence
  Description of Artificial Sequence: Synthetic oligonucleotide
aaagcuuugaggaucaagc

SEQ ID NO: 3129707 - RNA, 19 nt, Artificial Sequence
  Description of Artificial Sequence: Synthetic oligonucleotide
guaaccaucgaacacauag

SEQ ID NO: 3129708 - RNA, 19 nt, Artificial Sequence
  Description of Artificial Sequence: Synthetic oligonucleotide
auagacauagcuuccaggg

SEQ ID NO: 3129709 - RNA, 19 nt, Artificial Sequence
  Description of Artificial Sequence: Synthetic oligonucleotide
aaagccacauagaagaugg

SEQ ID NO: 3129710 - RNA, 19 nt, Artificial Sequence
  Description of Artificial Sequence: Synthetic oligonucleotide
uugacaaacuuuuagcaag

SEQ ID NO: 3129711 - RNA, 19 nt, Artificial Sequence
  Description of Artificial Sequence: Synthetic oligonucleotide
aaccaucgaacacauagac

SEQ ID NO: 3129712 - RNA, 19 nt, Artificial Sequence
  Description of Artificial Sequence: Synthetic oligonucleotide
aaacuuuuagcaagaaagc

SEQ ID NO: 3129713 - RNA, 19 nt, Artificial Sequence
  Description of Artificial Sequence: Synthetic oligonucleotide
agcaagaaagcuuugagga

SEQ ID NO: 3129714 - RNA, 19 nt, Artificial Sequence
  Description of Artificial Sequence: Synthetic oligonucleotide
uuagcaagaaagcuuugag

SEQ ID NO: 3129715 - RNA, 19 nt, Artificial Sequence
  Description of Artificial Sequence: Synthetic oligonucleotide
aagcuuugaggaucaagcg

SEQ ID NO: 3129716 - RNA, 19 nt, Artificial Sequence
  Description of Artificial Sequence: Synthetic oligonucleotide
agacauagcuuccaggguc

SEQ ID NO: 3129717 - RNA, 19 nt, Artificial Sequence
  Description of Artificial Sequence: Synthetic oligonucleotide
uagcaagaaagcuuugagg

SEQ ID NO: 3129718 - RNA, 19 nt, Artificial Sequence
  Description of Artificial Sequence: Synthetic oligonucleotide
gaucaagcguucuucaaag

SEQ ID NO: 3129719 - RNA, 19 nt, Artificial Sequence
  Description of Artificial Sequence: Synthetic oligonucleotide
uuuugugagccacuuggcc

SEQ ID NO: 3129720 - RNA, 19 nt, Artificial Sequence
  Description of Artificial Sequence: Synthetic oligonucleotide
ucaagcguucuucaaaggu

SEQ ID NO: 3129721 - RNA, 19 nt, Artificial Sequence
  Description of Artificial Sequence: Synthetic oligonucleotide
uuugugagccacuuggcca

SEQ ID NO: 3129722 - RNA, 19 nt, Artificial Sequence
  Description of Artificial Sequence: Synthetic oligonucleotide
aacuuuuagcaagaaagcu

SEQ ID NO: 3129723 - RNA, 19 nt, Artificial Sequence
  Description of Artificial Sequence: Synthetic oligonucleotide
auagcuuccagggucuacc

SEQ ID NO: 3129724 - RNA, 19 nt, Artificial Sequence
  Description of Artificial Sequence: Synthetic oligonucleotide
ucccaugcgguaaccaucg

SEQ ID NO: 3129725 - RNA, 19 nt, Artificial Sequence
  Description of Artificial Sequence: Synthetic oligonucleotide
caugcgguaaccaucgaac

SEQ ID NO: 3129726 - RNA, 19 nt, Artificial Sequence
  Description of Artificial Sequence: Synthetic oligonucleotide
cauagacauagcuuccagg

SEQ ID NO: 3129727 - RNA, 19 nt, Artificial Sequence
  Description of Artificial Sequence: Synthetic oligonucleotide
aaaagccacauagaagaug

SEQ ID NO: 3129728 - RNA, 19 nt, Artificial Sequence
  Description of Artificial Sequence: Synthetic oligonucleotide
auugacaaacuuuuagcaa

SEQ ID NO: 3129729 - RNA, 19 nt, Artificial Sequence
  Description of Artificial Sequence: Synthetic oligonucleotide
uuuagcaagaaagcuuuga

SEQ ID NO: 3129730 - RNA, 19 nt, Artificial Sequence
  Description of Artificial Sequence: Synthetic oligonucleotide
ugacaaacuuuuagcaaga

SEQ ID NO: 3129731 - RNA, 19 nt, Artificial Sequence
  Description of Artificial Sequence: Synthetic oligonucleotide
uccgggagcacacucuucc

SEQ ID NO: 3129732 - RNA, 19 nt, Artificial Sequence
  Description of Artificial Sequence: Synthetic oligonucleotide
uaaccaucgaacacauaga

SEQ ID NO: 3129733 - RNA, 19 nt, Artificial Sequence
  Description of Artificial Sequence: Synthetic oligonucleotide
ggcauugacaaacuuuuag

SEQ ID NO: 3129734 - RNA, 19 nt, Artificial Sequence
  Description of Artificial Sequence: Synthetic oligonucleotide
gaaagcuuugaggaucaag

SEQ ID NO: 3129735 - RNA, 19 nt, Artificial Sequence
  Description of Artificial Sequence: Synthetic oligonucleotide
caagcguucuucaaagguc

SEQ ID NO: 3129736 - RNA, 19 nt, Artificial Sequence
  Description of Artificial Sequence: Synthetic oligonucleotide
agcuuugaggaucaagcgu

SEQ ID NO: 3129737 - RNA, 19 nt, Artificial Sequence
  Description of Artificial Sequence: Synthetic oligonucleotide
acauagacauagcuuccag

SEQ ID NO: 3129738 - RNA, 19 nt, Artificial Sequence
  Description of Artificial Sequence: Synthetic oligonucleotide
aauaggcauugacaaacuu

SEQ ID NO: 3129739 - RNA, 19 nt, Artificial Sequence
  Description of Artificial Sequence: Synthetic oligonucleotide
aaggucugcucaguuuucg

SEQ ID NO: 3129740 - RNA, 19 nt, Artificial Sequence
  Description of Artificial Sequence: Synthetic oligonucleotide
caagaaagcuuugaggauc

SEQ ID NO: 3129741 - RNA, 19 nt, Artificial Sequence
  Description of Artificial Sequence: Synthetic oligonucleotide
ggaauaggcauugacaaac

SEQ ID NO: 3129742 - RNA, 19 nt, Artificial Sequence
  Description of Artificial Sequence: Synthetic oligonucleotide
acaaacuuuuagcaagaaa

SEQ ID NO: 3129743 - RNA, 19 nt, Artificial Sequence
  Description of Artificial Sequence: Synthetic oligonucleotide
ugcgguaaccaucgaacac

SEQ ID NO: 3129744 - RNA, 19 nt, Artificial Sequence
  Description of Artificial Sequence: Synthetic oligonucleotide
aagcguucuucaaaggucu

SEQ ID NO: 3129745 - RNA, 19 nt, Artificial Sequence
  Description of Artificial Sequence: Synthetic oligonucleotide
aucaagcguucuucaaagg

SEQ ID NO: 3129746 - RNA, 19 nt, Artificial Sequence
  Description of Artificial Sequence: Synthetic oligonucleotide
acacauagacauagcuucc

SEQ ID NO: 3129747 - RNA, 19 nt, Artificial Sequence
  Description of Artificial Sequence: Synthetic oligonucleotide
aagaaagcuuugaggauca

SEQ ID NO: 3129748 - RNA, 19 nt, Artificial Sequence
  Description of Artificial Sequence: Synthetic oligonucleotide
uugugagccacuuggccac

SEQ ID NO: 3129749 - RNA, 19 nt, Artificial Sequence
  Description of Artificial Sequence: Synthetic oligonucleotide
uagacauagcuuccagggu

SEQ ID NO: 3129750 - RNA, 19 nt, Artificial Sequence
  Description of Artificial Sequence: Synthetic oligonucleotide
ugaggaucaagcguucuuc

SEQ ID NO: 3129751 - RNA, 19 nt, Artificial Sequence
  Description of Artificial Sequence: Synthetic oligonucleotide
acuuuuagcaagaaagcuu

SEQ ID NO: 3129752 - RNA, 19 nt, Artificial Sequence
  Description of Artificial Sequence: Synthetic oligonucleotide
agcuuccagggucuacccc

SEQ ID NO: 3129753 - RNA, 19 nt, Artificial Sequence
  Description of Artificial Sequence: Synthetic oligonucleotide
gagcacacucuucccaugc

SEQ ID NO: 3129754 - RNA, 19 nt, Artificial Sequence
  Description of Artificial Sequence: Synthetic oligonucleotide
ucugcucaguuuucgggac

SEQ ID NO: 3129755 - RNA, 19 nt, Artificial Sequence
  Description of Artificial Sequence: Synthetic oligonucleotide
agggucuaccccacaaacc

SEQ ID NO: 3129756 - RNA, 19 nt, Artificial Sequence
  Description of Artificial Sequence: Synthetic oligonucleotide
acucuucccaugcgguaac

SEQ ID NO: 3129757 - RNA, 19 nt, Artificial Sequence
  Description of Artificial Sequence: Synthetic oligonucleotide
ucaaaggucugcucaguuu

SEQ ID NO: 3129758 - RNA, 19 nt, Artificial Sequence
  Description of Artificial Sequence: Synthetic oligonucleotide
aaaggucugcucaguuuuc

SEQ ID NO: 3129759 - RNA, 19 nt, Artificial Sequence
  Description of Artificial Sequence: Synthetic oligonucleotide
uucccaugcgguaaccauc

SEQ ID NO: 3129760 - RNA, 19 nt, Artificial Sequence
  Description of Artificial Sequence: Synthetic oligonucleotide
uuggccacagcaccauaga

SEQ ID NO: 3129761 - RNA, 19 nt, Artificial Sequence
  Description of Artificial Sequence: Synthetic oligonucleotide
ggucugcucaguuuucggg

SEQ ID NO: 3129762 - RNA, 19 nt, Artificial Sequence
  Description of Artificial Sequence: Synthetic oligonucleotide
cuuuuagcaagaaagcuuu

SEQ ID NO: 3129763 - RNA, 19 nt, Artificial Sequence
  Description of Artificial Sequence: Synthetic oligonucleotide
uuuucgggaccucuauuuu

SEQ ID NO: 3129764 - RNA, 19 nt, Artificial Sequence
  Description of Artificial Sequence: Synthetic oligonucleotide
aggucugcucaguuuucgg

SEQ ID NO: 3129765 - RNA, 19 nt, Artificial Sequence
  Description of Artificial Sequence: Synthetic oligonucleotide
uucaaaggucugcucaguu

SEQ ID NO: 3129766 - RNA, 19 nt, Artificial Sequence
  Description of Artificial Sequence: Synthetic oligonucleotide
agcacacucuucccaugcg

SEQ ID NO: 3129767 - RNA, 19 nt, Artificial Sequence
  Description of Artificial Sequence: Synthetic oligonucleotide
ggggaauaggcauugacaa

SEQ ID NO: 3129768 - RNA, 19 nt, Artificial Sequence
  Description of Artificial Sequence: Synthetic oligonucleotide
ucaguuuucgggaccucua

SEQ ID NO: 3129769 - RNA, 19 nt, Artificial Sequence
  Description of Artificial Sequence: Synthetic oligonucleotide
auaggcauugacaaacuuu

SEQ ID NO: 3129770 - RNA, 19 nt, Artificial Sequence
  Description of Artificial Sequence: Synthetic oligonucleotide
cagggucuaccccacaaac

SEQ ID NO: 3129771 - RNA, 19 nt, Artificial Sequence
  Description of Artificial Sequence: Synthetic oligonucleotide
gaggaucaagcguucuuca

SEQ ID NO: 3129772 - RNA, 19 nt, Artificial Sequence
  Description of Artificial Sequence: Synthetic oligonucleotide
augcgguaaccaucgaaca

SEQ ID NO: 3129773 - RNA, 19 nt, Artificial Sequence
  Description of Artificial Sequence: Synthetic oligonucleotide
uugaggaucaagcguucuu

SEQ ID NO: 3129774 - RNA, 19 nt, Artificial Sequence
  Description of Artificial Sequence: Synthetic oligonucleotide
gucuaccccacaaaccucc

SEQ ID NO: 3129775 - RNA, 19 nt, Artificial Sequence
  Description of Artificial Sequence: Synthetic oligonucleotide
uccagggucuaccccacaa

SEQ ID NO: 3129776 - RNA, 19 nt, Artificial Sequence
  Description of Artificial Sequence: Synthetic oligonucleotide
cacagcaccauagaucuca

SEQ ID NO: 3129777 - RNA, 19 nt, Artificial Sequence
  Description of Artificial Sequence: Synthetic oligonucleotide
ucuaccccacaaaccuccc

SEQ ID NO: 3129778 - RNA, 19 nt, Artificial Sequence
  Description of Artificial Sequence: Synthetic oligonucleotide
uuugaggaucaagcguucu

SEQ ID NO: 3129779 - RNA, 19 nt, Artificial Sequence
  Description of Artificial Sequence: Synthetic oligonucleotide
cuuugaggaucaagcguuc

SEQ ID NO: 3129780 - RNA, 19 nt, Artificial Sequence
  Description of Artificial Sequence: Synthetic oligonucleotide
uagcuuccagggucuaccc

SEQ ID NO: 3129781 - RNA, 19 nt, Artificial Sequence
  Description of Artificial Sequence: Synthetic oligonucleotide
ugcucaguuuucgggaccu

SEQ ID NO: 3129782 - RNA, 19 nt, Artificial Sequence
  Description of Artificial Sequence: Synthetic oligonucleotide
ccaucgaacacauagacau

SEQ ID NO: 3129783 - RNA, 19 nt, Artificial Sequence
  Description of Artificial Sequence: Synthetic oligonucleotide
gccacuuggccacagcacc

SEQ ID NO: 3129784 - RNA, 19 nt, Artificial Sequence
  Description of Artificial Sequence: Synthetic oligonucleotide
ugagccacuuggccacagc

SEQ ID NO: 3129785 - RNA, 19 nt, Artificial Sequence
  Description of Artificial Sequence: Synthetic oligonucleotide
ucuucccaugcgguaacca

SEQ ID NO: 3129786 - RNA, 19 nt, Artificial Sequence
  Description of Artificial Sequence: Synthetic oligonucleotide
gcacacucuucccaugcgg

SEQ ID NO: 3129787 - RNA, 19 nt, Artificial Sequence
  Description of Artificial Sequence: Synthetic oligonucleotide
agccacuuggccacagcac

SEQ ID NO: 3129788 - RNA, 19 nt, Artificial Sequence
  Description of Artificial Sequence: Synthetic oligonucleotide
aggaucaagcguucuucaa

SEQ ID NO: 3129789 - RNA, 19 nt, Artificial Sequence
  Description of Artificial Sequence: Synthetic oligonucleotide
uggccacagcaccauagau

SEQ ID NO: 3129790 - RNA, 19 nt, Artificial Sequence
  Description of Artificial Sequence: Synthetic oligonucleotide
aagccacauagaagauggg

SEQ ID NO: 3129791 - RNA, 19 nt, Artificial Sequence
  Description of Artificial Sequence: Synthetic oligonucleotide
gccacagcaccauagaucu

SEQ ID NO: 3129792 - RNA, 19 nt, Artificial Sequence
  Description of Artificial Sequence: Synthetic oligonucleotide
guuuucgggaccucuauuu

SEQ ID NO: 3129793 - RNA, 19 nt, Artificial Sequence
  Description of Artificial Sequence: Synthetic oligonucleotide
aguuuucgggaccucuauu

SEQ ID NO: 3129794 - RNA, 19 nt, Artificial Sequence
  Description of Artificial Sequence: Synthetic oligonucleotide
ggaucaagcguucuucaaa

SEQ ID NO: 3129795 - RNA, 19 nt, Artificial Sequence
  Description of Artificial Sequence: Synthetic oligonucleotide
gaacacauagacauagcuu

SEQ ID NO: 3129796 - RNA, 19 nt, Artificial Sequence
  Description of Artificial Sequence: Synthetic oligonucleotide
guucuucaaaggucugcuc

SEQ ID NO: 3129797 - RNA, 19 nt, Artificial Sequence
  Description of Artificial Sequence: Synthetic oligonucleotide
accaucgaacacauagaca

SEQ ID NO: 3129798 - RNA, 19 nt, Artificial Sequence
  Description of Artificial Sequence: Synthetic oligonucleotide
agccuccgggagcacacuc

SEQ ID NO: 3129799 - RNA, 19 nt, Artificial Sequence
  Description of Artificial Sequence: Synthetic oligonucleotide
gcuuccagggucuacccca

SEQ ID NO: 3129800 - RNA, 19 nt, Artificial Sequence
  Description of Artificial Sequence: Synthetic oligonucleotide
cugcucaguuuucgggacc

SEQ ID NO: 3129801 - RNA, 19 nt, Artificial Sequence
  Description of Artificial Sequence: Synthetic oligonucleotide
cuuccagggucuaccccac

SEQ ID NO: 3129802 - RNA, 19 nt, Artificial Sequence
  Description of Artificial Sequence: Synthetic oligonucleotide
gggucuaccccacaaaccu

SEQ ID NO: 3129803 - RNA, 19 nt, Artificial Sequence
  Description of Artificial Sequence: Synthetic oligonucleotide
caaaggucugcucaguuuu

SEQ ID NO: 3129804 - RNA, 19 nt, Artificial Sequence
  Description of Artificial Sequence: Synthetic oligonucleotide
gacaaacuuuuagcaagaa

SEQ ID NO: 3129805 - RNA, 19 nt, Artificial Sequence
  Description of Artificial Sequence: Synthetic oligonucleotide
cacauagacauagcuucca

SEQ ID NO: 3129806 - RNA, 19 nt, Artificial Sequence
  Description of Artificial Sequence: Synthetic oligonucleotide
gaauaggcauugacaaacu

SEQ ID NO: 3129807 - RNA, 19 nt, Artificial Sequence
  Description of Artificial Sequence: Synthetic oligonucleotide
cauagcuuccagggucuac

SEQ ID NO: 3129808 - RNA, 19 nt, Artificial Sequence
  Description of Artificial Sequence: Synthetic oligonucleotide
gcgguaaccaucgaacaca

SEQ ID NO: 3129809 - RNA, 19 nt, Artificial Sequence
  Description of Artificial Sequence: Synthetic oligonucleotide
acacucuucccaugcggua

SEQ ID NO: 3129810 - RNA, 19 nt, Artificial Sequence
  Description of Artificial Sequence: Synthetic oligonucleotide
gacauagcuuccagggucu

SEQ ID NO: 3129811 - RNA, 19 nt, Artificial Sequence
  Description of Artificial Sequence: Synthetic oligonucleotide
uuccagggucuaccccaca

SEQ ID NO: 3129812 - RNA, 19 nt, Artificial Sequence
  Description of Artificial Sequence: Synthetic oligonucleotide
gggaauaggcauugacaaa

SEQ ID NO: 3129813 - RNA, 19 nt, Artificial Sequence
  Description of Artificial Sequence: Synthetic oligonucleotide
caucgaacacauagacaua

SEQ ID NO: 3129814 - RNA, 19 nt, Artificial Sequence
  Description of Artificial Sequence: Synthetic oligonucleotide
gcguucuucaaaggucugc

SEQ ID NO: 3129815 - RNA, 19 nt, Artificial Sequence
  Description of Artificial Sequence: Synthetic oligonucleotide
cucuucccaugcgguaacc

SEQ ID NO: 3129816 - RNA, 19 nt, Artificial Sequence
  Description of Artificial Sequence: Synthetic oligonucleotide
gacagccuccgggagcaca

SEQ ID NO: 3129817 - RNA, 19 nt, Artificial Sequence
  Description of Artificial Sequence: Synthetic oligonucleotide
cuucccaugcgguaaccau

SEQ ID NO: 3129818 - RNA, 19 nt, Artificial Sequence
  Description of Artificial Sequence: Synthetic oligonucleotide
cacucuucccaugcgguaa

SEQ ID NO: 3129819 - RNA, 19 nt, Artificial Sequence
  Description of Artificial Sequence: Synthetic oligonucleotide
agcguucuucaaaggucug

SEQ ID NO: 3129820 - RNA, 19 nt, Artificial Sequence
  Description of Artificial Sequence: Synthetic oligonucleotide
gcuuugaggaucaagcguu

SEQ ID NO: 3129821 - RNA, 19 nt, Artificial Sequence
  Description of Artificial Sequence: Synthetic oligonucleotide
ugugagccacuuggccaca

SEQ ID NO: 3129822 - RNA, 19 nt, Artificial Sequence
  Description of Artificial Sequence: Synthetic oligonucleotide
acuuggccacagcaccaua

SEQ ID NO: 3129823 - RNA, 19 nt, Artificial Sequence
  Description of Artificial Sequence: Synthetic oligonucleotide
gcaagaaagcuuugaggau

SEQ ID NO: 3129824 - RNA, 19 nt, Artificial Sequence
  Description of Artificial Sequence: Synthetic oligonucleotide
cuccgggagcacacucuuc

SEQ ID NO: 3129825 - RNA, 19 nt, Artificial Sequence
  Description of Artificial Sequence: Synthetic oligonucleotide
cucaguuuucgggaccucu

SEQ ID NO: 3129826 - RNA, 19 nt, Artificial Sequence
  Description of Artificial Sequence: Synthetic oligonucleotide
gugagccacuuggccacag

SEQ ID NO: 3129827 - RNA, 19 nt, Artificial Sequence
  Description of Artificial Sequence: Synthetic oligonucleotide
cgaacacauagacauagcu

SEQ ID NO: 3129828 - RNA, 19 nt, Artificial Sequence
  Description of Artificial Sequence: Synthetic oligonucleotide
agaaagcuuugaggaucaa

SEQ ID NO: 3129829 - RNA, 19 nt, Artificial Sequence
  Description of Artificial Sequence: Synthetic oligonucleotide
aggcauugacaaacuuuua

SEQ ID NO: 3129830 - RNA, 19 nt, Artificial Sequence
  Description of Artificial Sequence: Synthetic oligonucleotide
cuucaaaggucugcucagu

SEQ ID NO: 3129831 - RNA, 19 nt, Artificial Sequence
  Description of Artificial Sequence: Synthetic oligonucleotide
ggucuaccccacaaaccuc

SEQ ID NO: 3129832 - RNA, 19 nt, Artificial Sequence
  Description of Artificial Sequence: Synthetic oligonucleotide
caguuuucgggaccucuau

SEQ ID NO: 3129833 - RNA, 19 nt, Artificial Sequence
  Description of Artificial Sequence: Synthetic oligonucleotide
ccgggagcacacucuuccc

SEQ ID NO: 3129834 - RNA, 19 nt, Artificial Sequence
  Description of Artificial Sequence: Synthetic oligonucleotide
ccaugcgguaaccaucgaa

SEQ ID NO: 3129835 - RNA, 19 nt, Artificial Sequence
  Description of Artificial Sequence: Synthetic oligonucleotide
gggagcacacucuucccau

SEQ ID NO: 3129836 - RNA, 19 nt, Artificial Sequence
  Description of Artificial Sequence: Synthetic oligonucleotide
acauagcuuccagggucua

SEQ ID NO: 3129837 - RNA, 19 nt, Artificial Sequence
  Description of Artificial Sequence: Synthetic oligonucleotide
ccacuuggccacagcacca

SEQ ID NO: 3129838 - RNA, 19 nt, Artificial Sequence
  Description of Artificial Sequence: Synthetic oligonucleotide
cgggagcacacucuuccca

SEQ ID NO: 3129839 - RNA, 19 nt, Artificial Sequence
  Description of Artificial Sequence: Synthetic oligonucleotide
ccacagcaccauagaucuc

SEQ ID NO: 3129840 - RNA, 19 nt, Artificial Sequence
  Description of Artificial Sequence: Synthetic oligonucleotide
gguaaccaucgaacacaua

SEQ ID NO: 3129841 - RNA, 19 nt, Artificial Sequence
  Description of Artificial Sequence: Synthetic oligonucleotide
gcucaguuuucgggaccuc

SEQ ID NO: 3129842 - RNA, 19 nt, Artificial Sequence
  Description of Artificial Sequence: Synthetic oligonucleotide
gccuccgggagcacacucu

SEQ ID NO: 3129843 - RNA, 19 nt, Artificial Sequence
  Description of Artificial Sequence: Synthetic oligonucleotide
cgguaaccaucgaacacau

SEQ ID NO: 3129844 - RNA, 19 nt, Artificial Sequence
  Description of Artificial Sequence: Synthetic oligonucleotide
cccaugcgguaaccaucga

SEQ ID NO: 3129845 - RNA, 19 nt, Artificial Sequence
  Description of Artificial Sequence: Synthetic oligonucleotide
ccuccgggagcacacucuu

SEQ ID NO: 3129846 - RNA, 19 nt, Artificial Sequence
  Description of Artificial Sequence: Synthetic oligonucleotide
cagccuccgggagcacacu

SEQ ID NO: 3129847 - RNA, 19 nt, Artificial Sequence
  Description of Artificial Sequence: Synthetic oligonucleotide
auaucaaccaaauaaaacc

SEQ ID NO: 3129848 - RNA, 19 nt, Artificial Sequence
  Description of Artificial Sequence: Synthetic oligonucleotide
aauuauaucaaccaaauaa

SEQ ID NO: 3129849 - RNA, 19 nt, Artificial Sequence
  Description of Artificial Sequence: Synthetic oligonucleotide
aauauaaaauuauaucaac

SEQ ID NO: 3129850 - RNA, 19 nt, Artificial Sequence
  Description of Artificial Sequence: Synthetic oligonucleotide
aauaucacaacuuuaagga

SEQ ID NO: 3129851 - RNA, 19 nt, Artificial Sequence
  Description of Artificial Sequence: Synthetic oligonucleotide
aauauaguacaaaacaugc

SEQ ID NO: 3129852 - RNA, 19 nt, Artificial Sequence
  Description of Artificial Sequence: Synthetic oligonucleotide
aaaacuacaucacuuaaag

SEQ ID NO: 3129853 - RNA, 19 nt, Artificial Sequence
  Description of Artificial Sequence: Synthetic oligonucleotide
aauaaaaccugucaaaacu

SEQ ID NO: 3129854 - RNA, 19 nt, Artificial Sequence
  Description of Artificial Sequence: Synthetic oligonucleotide
aguauguacaauuucaaac

SEQ ID NO: 3129855 - RNA, 19 nt, Artificial Sequence
  Description of Artificial Sequence: Synthetic oligonucleotide
uucaauauaguacaaaaca

SEQ ID NO: 3129856 - RNA, 19 nt, Artificial Sequence
  Description of Artificial Sequence: Synthetic oligonucleotide
aaacaugcaacucaggguc

SEQ ID NO: 3129857 - RNA, 19 nt, Artificial Sequence
  Description of Artificial Sequence: Synthetic oligonucleotide
uauaaaauuauaucaacca

SEQ ID NO: 3129858 - RNA, 19 nt, Artificial Sequence
  Description of Artificial Sequence: Synthetic oligonucleotide
uuuaauauaaaauuauauc

SEQ ID NO: 3129859 - RNA, 19 nt, Artificial Sequence
  Description of Artificial Sequence: Synthetic oligonucleotide
uaauaucacaacuuuaagg

SEQ ID NO: 3129860 - RNA, 19 nt, Artificial Sequence
  Description of Artificial Sequence: Synthetic oligonucleotide
aaauaaaaccugucaaaac

SEQ ID NO: 3129861 - RNA, 19 nt, Artificial Sequence
  Description of Artificial Sequence: Synthetic oligonucleotide
aacuacaucacuuaaagua

SEQ ID NO: 3129862 - RNA, 19 nt, Artificial Sequence
  Description of Artificial Sequence: Synthetic oligonucleotide
uuuaaggaaaauaaaacau

SEQ ID NO: 3129863 - RNA, 19 nt, Artificial Sequence
  Description of Artificial Sequence: Synthetic oligonucleotide
uaaaguauguacaauuuca

SEQ ID NO: 3129864 - RNA, 19 nt, Artificial Sequence
  Description of Artificial Sequence: Synthetic oligonucleotide
uacaauuucaaacauaaua

SEQ ID NO: 3129865 - RNA, 19 nt, Artificial Sequence
  Description of Artificial Sequence: Synthetic oligonucleotide
uguacaauuucaaacauaa

SEQ ID NO: 3129866 - RNA, 19 nt, Artificial Sequence
  Description of Artificial Sequence: Synthetic oligonucleotide
aaugucacugaugaugugc

SEQ ID NO: 3129867 - RNA, 19 nt, Artificial Sequence
  Description of Artificial Sequence: Synthetic oligonucleotide
uucagaaugucacugauga

SEQ ID NO: 3129868 - RNA, 19 nt, Artificial Sequence
  Description of Artificial Sequence: Synthetic oligonucleotide
uauaguacaaaacaugcaa

SEQ ID NO: 3129869 - RNA, 19 nt, Artificial Sequence
  Description of Artificial Sequence: Synthetic oligonucleotide
auauaaaauuauaucaacc

SEQ ID NO: 3129870 - RNA, 19 nt, Artificial Sequence
  Description of Artificial Sequence: Synthetic oligonucleotide
uaauauaaaauuauaucaa

SEQ ID NO: 3129871 - RNA, 19 nt, Artificial Sequence
  Description of Artificial Sequence: Synthetic oligonucleotide
uaaaauuauaucaaccaaa

SEQ ID NO: 3129872 - RNA, 19 nt, Artificial Sequence
  Description of Artificial Sequence: Synthetic oligonucleotide
aggaaaauaaaacauauuu

SEQ ID NO: 3129873 - RNA, 19 nt, Artificial Sequence
  Description of Artificial Sequence: Synthetic oligonucleotide
uauaucaaccaaauaaaac

SEQ ID NO: 3129874 - RNA, 19 nt, Artificial Sequence
  Description of Artificial Sequence: Synthetic oligonucleotide
aagagcgagcaacacaggc

SEQ ID NO: 3129875 - RNA, 19 nt, Artificial Sequence
  Description of Artificial Sequence: Synthetic oligonucleotide
caaaacaugcaacucaggg

SEQ ID NO: 3129876 - RNA, 19 nt, Artificial Sequence
  Description of Artificial Sequence: Synthetic oligonucleotide
aaaacaugcaacucagggu

SEQ ID NO: 3129877 - RNA, 19 nt, Artificial Sequence
  Description of Artificial Sequence: Synthetic oligonucleotide
auuucaaacauaauaucac

SEQ ID NO: 3129878 - RNA, 19 nt, Artificial Sequence
  Description of Artificial Sequence: Synthetic oligonucleotide
uaucaaccaaauaaaaccu

SEQ ID NO: 3129879 - RNA, 19 nt, Artificial Sequence
  Description of Artificial Sequence: Synthetic oligonucleotide
uacaaaacaugcaacucag

SEQ ID NO: 3129880 - RNA, 19 nt, Artificial Sequence
  Description of Artificial Sequence: Synthetic oligonucleotide
ucaauauaguacaaaacau

SEQ ID NO: 3129881 - RNA, 19 nt, Artificial Sequence
  Description of Artificial Sequence: Synthetic oligonucleotide
caaagaucuacuauacugc

SEQ ID NO: 3129882 - RNA, 19 nt, Artificial Sequence
  Description of Artificial Sequence: Synthetic oligonucleotide
aaccaaauaaaaccuguca

SEQ ID NO: 3129883 - RNA, 19 nt, Artificial Sequence
  Description of Artificial Sequence: Synthetic oligonucleotide
aacacaggcaaagaucuac

SEQ ID NO: 3129884 - RNA, 19 nt, Artificial Sequence
  Description of Artificial Sequence: Synthetic oligonucleotide
caauauaguacaaaacaug

SEQ ID NO: 3129885 - RNA, 19 nt, Artificial Sequence
  Description of Artificial Sequence: Synthetic oligonucleotide
aacauaauaucacaacuuu

SEQ ID NO: 3129886 - RNA, 19 nt, Artificial Sequence
  Description of Artificial Sequence: Synthetic oligonucleotide
cuuuaaggaaaauaaaaca

SEQ ID NO: 3129887 - RNA, 19 nt, Artificial Sequence
  Description of Artificial Sequence: Synthetic oligonucleotide
uuucaauauaguacaaaac

SEQ ID NO: 3129888 - RNA, 19 nt, Artificial Sequence
  Description of Artificial Sequence: Synthetic oligonucleotide
ucaaacauaauaucacaac

SEQ ID NO: 3129889 - RNA, 19 nt, Artificial Sequence
  Description of Artificial Sequence: Synthetic oligonucleotide
aaaauuauaucaaccaaau

SEQ ID NO: 3129890 - RNA, 19 nt, Artificial Sequence
  Description of Artificial Sequence: Synthetic oligonucleotide
uuucaaacauaauaucaca

SEQ ID NO: 3129891 - RNA, 19 nt, Artificial Sequence
  Description of Artificial Sequence: Synthetic oligonucleotide
aaagaucuacuauacugca

SEQ ID NO: 3129892 - RNA, 19 nt, Artificial Sequence
  Description of Artificial Sequence: Synthetic oligonucleotide
uaucacaacuuuaaggaaa

SEQ ID NO: 3129893 - RNA, 19 nt, Artificial Sequence
  Description of Artificial Sequence: Synthetic oligonucleotide
guauguacaauuucaaaca

SEQ ID NO: 3129894 - RNA, 19 nt, Artificial Sequence
  Description of Artificial Sequence: Synthetic oligonucleotide
ucaaccaaauaaaaccugu

SEQ ID NO: 3129895 - RNA, 19 nt, Artificial Sequence
  Description of Artificial Sequence: Synthetic oligonucleotide
auaaaauuauaucaaccaa

SEQ ID NO: 3129896 - RNA, 19 nt, Artificial Sequence
  Description of Artificial Sequence: Synthetic oligonucleotide
auaauaucacaacuuuaag

SEQ ID NO: 3129897 - RNA, 19 nt, Artificial Sequence
  Description of Artificial Sequence: Synthetic oligonucleotide
uuauaucaaccaaauaaaa

SEQ ID NO: 3129898 - RNA, 19 nt, Artificial Sequence
  Description of Artificial Sequence: Synthetic oligonucleotide
caucacuuaaaguauguac

SEQ ID NO: 3129899 - RNA, 19 nt, Artificial Sequence
  Description of Artificial Sequence: Synthetic oligonucleotide
uucaaacauaauaucacaa

SEQ ID NO: 3129900 - RNA, 19 nt, Artificial Sequence
  Description of Artificial Sequence: Synthetic oligonucleotide
guaagagcgagcaacacag

SEQ ID NO: 3129901 - RNA, 19 nt, Artificial Sequence
  Description of Artificial Sequence: Synthetic oligonucleotide
acaauuucaaacauaauau

SEQ ID NO: 3129902 - RNA, 19 nt, Artificial Sequence
  Description of Artificial Sequence: Synthetic oligonucleotide
aaccugucaaaacuacauc

SEQ ID NO: 3129903 - RNA, 19 nt, Artificial Sequence
  Description of Artificial Sequence: Synthetic oligonucleotide
acuuaaaguauguacaauu

SEQ ID NO: 3129904 - RNA, 19 nt, Artificial Sequence
  Description of Artificial Sequence: Synthetic oligonucleotide
uaguacaaaacaugcaacu

SEQ ID NO: 3129905 - RNA, 19 nt, Artificial Sequence
  Description of Artificial Sequence: Synthetic oligonucleotide
gcaaagaucuacuauacug

SEQ ID NO: 3129906 - RNA, 19 nt, Artificial Sequence
  Description of Artificial Sequence: Synthetic oligonucleotide
uguaagagcgagcaacaca

SEQ ID NO: 3129907 - RNA, 19 nt, Artificial Sequence
  Description of Artificial Sequence: Synthetic oligonucleotide
uaaaaccugucaaaacuac

SEQ ID NO: 3129908 - RNA, 19 nt, Artificial Sequence
  Description of Artificial Sequence: Synthetic oligonucleotide
auaguacaaaacaugcaac

SEQ ID NO: 3129909 - RNA, 19 nt, Artificial Sequence
  Description of Artificial Sequence: Synthetic oligonucleotide
accugucaaaacuacauca

SEQ ID NO: 3129910 - RNA, 19 nt, Artificial Sequence
  Description of Artificial Sequence: Synthetic oligonucleotide
auuauaucaaccaaauaaa

SEQ ID NO: 3129911 - RNA, 19 nt, Artificial Sequence
  Description of Artificial Sequence: Synthetic oligonucleotide
accaaauaaaaccugucaa

SEQ ID NO: 3129912 - RNA, 19 nt, Artificial Sequence
  Description of Artificial Sequence: Synthetic oligonucleotide
aguacaaaacaugcaacuc

SEQ ID NO: 3129913 - RNA, 19 nt, Artificial Sequence
  Description of Artificial Sequence: Synthetic oligonucleotide
ugucaaaacuacaucacuu

SEQ ID NO: 3129914 - RNA, 19 nt, Artificial Sequence
  Description of Artificial Sequence: Synthetic oligonucleotide
ucaaaacuacaucacuuaa

SEQ ID NO: 3129915 - RNA, 19 nt, Artificial Sequence
  Description of Artificial Sequence: Synthetic oligonucleotide
aaguauguacaauuucaaa

SEQ ID NO: 3129916 - RNA, 19 nt, Artificial Sequence
  Description of Artificial Sequence: Synthetic oligonucleotide
uauguacaauuucaaacau

SEQ ID NO: 3129917 - RNA, 19 nt, Artificial Sequence
  Description of Artificial Sequence: Synthetic oligonucleotide
aucacuuaaaguauguaca

SEQ ID NO: 3129918 - RNA, 19 nt, Artificial Sequence
  Description of Artificial Sequence: Synthetic oligonucleotide
auucucuuuuaauauaaaa

SEQ ID NO: 3129919 - RNA, 19 nt, Artificial Sequence
  Description of Artificial Sequence: Synthetic oligonucleotide
aaacuacaucacuuaaagu

SEQ ID NO: 3129920 - RNA, 19 nt, Artificial Sequence
  Description of Artificial Sequence: Synthetic oligonucleotide
agaucuacuauacugcauu

SEQ ID NO: 3129921 - RNA, 19 nt, Artificial Sequence
  Description of Artificial Sequence: Synthetic oligonucleotide
aaacauaauaucacaacuu

SEQ ID NO: 3129922 - RNA, 19 nt, Artificial Sequence
  Description of Artificial Sequence: Synthetic oligonucleotide
guacaaaacaugcaacuca

SEQ ID NO: 3129923 - RNA, 19 nt, Artificial Sequence
  Description of Artificial Sequence: Synthetic oligonucleotide
uuucagaaugucacugaug

SEQ ID NO: 3129924 - RNA, 19 nt, Artificial Sequence
  Description of Artificial Sequence: Synthetic oligonucleotide
ucacuuaaaguauguacaa

SEQ ID NO: 3129925 - RNA, 19 nt, Artificial Sequence
  Description of Artificial Sequence: Synthetic oligonucleotide
aaaccugucaaaacuacau

SEQ ID NO: 3129926 - RNA, 19 nt, Artificial Sequence
  Description of Artificial Sequence: Synthetic oligonucleotide
uacaucacuuaaaguaugu

SEQ ID NO: 3129927 - RNA, 19 nt, Artificial Sequence
  Description of Artificial Sequence: Synthetic oligonucleotide
agugcuguaagagcgagca

SEQ ID NO: 3129928 - RNA, 19 nt, Artificial Sequence
  Description of Artificial Sequence: Synthetic oligonucleotide
ugcuguaagagcgagcaac

SEQ ID NO: 3129929 - RNA, 19 nt, Artificial Sequence
  Description of Artificial Sequence: Synthetic oligonucleotide
ucagggucagugcuguaag

SEQ ID NO: 3129930 - RNA, 19 nt, Artificial Sequence
  Description of Artificial Sequence: Synthetic oligonucleotide
agcaacacaggcaaagauc

SEQ ID NO: 3129931 - RNA, 19 nt, Artificial Sequence
  Description of Artificial Sequence: Synthetic oligonucleotide
aaaguauguacaauuucaa

SEQ ID NO: 3129932 - RNA, 19 nt, Artificial Sequence
  Description of Artificial Sequence: Synthetic oligonucleotide
gucacugaugaugugcugg

SEQ ID NO: 3129933 - RNA, 19 nt, Artificial Sequence
  Description of Artificial Sequence: Synthetic oligonucleotide
agaaugucacugaugaugu

SEQ ID NO: 3129934 - RNA, 19 nt, Artificial Sequence
  Description of Artificial Sequence: Synthetic oligonucleotide
cuacaucacuuaaaguaug

SEQ ID NO: 3129935 - RNA, 19 nt, Artificial Sequence
  Description of Artificial Sequence: Synthetic oligonucleotide
caaacauaauaucacaacu

SEQ ID NO: 3129936 - RNA, 19 nt, Artificial Sequence
  Description of Artificial Sequence: Synthetic oligonucleotide
aaaaccugucaaaacuaca

SEQ ID NO: 3129937 - RNA, 19 nt, Artificial Sequence
  Description of Artificial Sequence: Synthetic oligonucleotide
ggucagugcuguaagagcg

SEQ ID NO: 3129938 - RNA, 19 nt, Artificial Sequence
  Description of Artificial Sequence: Synthetic oligonucleotide
auaucacaacuuuaaggaa

SEQ ID NO: 3129939 - RNA, 19 nt, Artificial Sequence
  Description of Artificial Sequence: Synthetic oligonucleotide
acaggcaaagaucuacuau

SEQ ID NO: 3129940 - RNA, 19 nt, Artificial Sequence
  Description of Artificial Sequence: Synthetic oligonucleotide
aggcaaagaucuacuauac

SEQ ID NO: 3129941 - RNA, 19 nt, Artificial Sequence
  Description of Artificial Sequence: Synthetic oligonucleotide
acuacaucacuuaaaguau

SEQ ID NO: 3129942 - RNA, 19 nt, Artificial Sequence
  Description of Artificial Sequence: Synthetic oligonucleotide
aaagcagcauucucuuuua

SEQ ID NO: 3129943 - RNA, 19 nt, Artificial Sequence
  Description of Artificial Sequence: Synthetic oligonucleotide
uaagagcgagcaacacagg

SEQ ID NO: 3129944 - RNA, 19 nt, Artificial Sequence
  Description of Artificial Sequence: Synthetic oligonucleotide
ugcaacucagggucagugc

SEQ ID NO: 3129945 - RNA, 19 nt, Artificial Sequence
  Description of Artificial Sequence: Synthetic oligonucleotide
auauaguacaaaacaugca

SEQ ID NO: 3129946 - RNA, 19 nt, Artificial Sequence
  Description of Artificial Sequence: Synthetic oligonucleotide
caaaacuacaucacuuaaa

SEQ ID NO: 3129947 - RNA, 19 nt, Artificial Sequence
  Description of Artificial Sequence: Synthetic oligonucleotide
gucaaaacuacaucacuua

SEQ ID NO: 3129948 - RNA, 19 nt, Artificial Sequence
  Description of Artificial Sequence: Synthetic oligonucleotide
aucaaccaaauaaaaccug

SEQ ID NO: 3129949 - RNA, 19 nt, Artificial Sequence
  Description of Artificial Sequence: Synthetic oligonucleotide
aaggaaaauaaaacauauu

SEQ ID NO: 3129950 - RNA, 19 nt, Artificial Sequence
  Description of Artificial Sequence: Synthetic oligonucleotide
gaaagcagcauucucuuuu

SEQ ID NO: 3129951 - RNA, 19 nt, Artificial Sequence
  Description of Artificial Sequence: Synthetic oligonucleotide
agcauucucuuuuaauaua

SEQ ID NO: 3129952 - RNA, 19 nt, Artificial Sequence
  Description of Artificial Sequence: Synthetic oligonucleotide
agcagcauucucuuuuaau

SEQ ID NO: 3129953 - RNA, 19 nt, Artificial Sequence
  Description of Artificial Sequence: Synthetic oligonucleotide
gagcgagcaacacaggcaa

SEQ ID NO: 3129954 - RNA, 19 nt, Artificial Sequence
  Description of Artificial Sequence: Synthetic oligonucleotide
cuuaaaguauguacaauuu

SEQ ID NO: 3129955 - RNA, 19 nt, Artificial Sequence
  Description of Artificial Sequence: Synthetic oligonucleotide
acaaaacaugcaacucagg

SEQ ID NO: 3129956 - RNA, 19 nt, Artificial Sequence
  Description of Artificial Sequence: Synthetic oligonucleotide
ccugucaaaacuacaucac

SEQ ID NO: 3129957 - RNA, 19 nt, Artificial Sequence
  Description of Artificial Sequence: Synthetic oligonucleotide
gaaugucacugaugaugug

SEQ ID NO: 3129958 - RNA, 19 nt, Artificial Sequence
  Description of Artificial Sequence: Synthetic oligonucleotide
aagaucuacuauacugcau

SEQ ID NO: 3129959 - RNA, 19 nt, Artificial Sequence
  Description of Artificial Sequence: Synthetic oligonucleotide
cacaacuuuaaggaaaaua

SEQ ID NO: 3129960 - RNA, 19 nt, Artificial Sequence
  Description of Artificial Sequence: Synthetic oligonucleotide
agagcgagcaacacaggca

SEQ ID NO: 3129961 - RNA, 19 nt, Artificial Sequence
  Description of Artificial Sequence: Synthetic oligonucleotide
ugucacugaugaugugcug

SEQ ID NO: 3129962 - RNA, 19 nt, Artificial Sequence
  Description of Artificial Sequence: Synthetic oligonucleotide
acauaauaucacaacuuua

SEQ ID NO: 3129963 - RNA, 19 nt, Artificial Sequence
  Description of Artificial Sequence: Synthetic oligonucleotide
augucacugaugaugugcu

SEQ ID NO: 3129964 - RNA, 19 nt, Artificial Sequence
  Description of Artificial Sequence: Synthetic oligonucleotide
ccaaauaaaaccugucaaa

SEQ ID NO: 3129965 - RNA, 19 nt, Artificial Sequence
  Description of Artificial Sequence: Synthetic oligonucleotide
aacaugcaacucaggguca

SEQ ID NO: 3129966 - RNA, 19 nt, Artificial Sequence
  Description of Artificial Sequence: Synthetic oligonucleotide
acaugcaacucagggucag

SEQ ID NO: 3129967 - RNA, 19 nt, Artificial Sequence
  Description of Artificial Sequence: Synthetic oligonucleotide
gggucagugcuguaagagc

SEQ ID NO: 3129968 - RNA, 19 nt, Artificial Sequence
  Description of Artificial Sequence: Synthetic oligonucleotide
aagcagcauucucuuuuaa

SEQ ID NO: 3129969 - RNA, 19 nt, Artificial Sequence
  Description of Artificial Sequence: Synthetic oligonucleotide
ugaaagcagcauucucuuu

SEQ ID NO: 3129970 - RNA, 19 nt, Artificial Sequence
  Description of Artificial Sequence: Synthetic oligonucleotide
acacaggcaaagaucuacu

SEQ ID NO: 3129971 - RNA, 19 nt, Artificial Sequence
  Description of Artificial Sequence: Synthetic oligonucleotide
auguacaauuucaaacaua

SEQ ID NO: 3129972 - RNA, 19 nt, Artificial Sequence
  Description of Artificial Sequence: Synthetic oligonucleotide
cagugcuguaagagcgagc

SEQ ID NO: 3129973 - RNA, 19 nt, Artificial Sequence
  Description of Artificial Sequence: Synthetic oligonucleotide
gcgagcaacacaggcaaag

SEQ ID NO: 3129974 - RNA, 19 nt, Artificial Sequence
  Description of Artificial Sequence: Synthetic oligonucleotide
acaucacuuaaaguaugua

SEQ ID NO: 3129975 - RNA, 19 nt, Artificial Sequence
  Description of Artificial Sequence: Synthetic oligonucleotide
cugucaaaacuacaucacu

SEQ ID NO: 3129976 - RNA, 19 nt, Artificial Sequence
  Description of Artificial Sequence: Synthetic oligonucleotide
aucuacuauacugcauuuu

SEQ ID NO: 3129977 - RNA, 19 nt, Artificial Sequence
  Description of Artificial Sequence: Synthetic oligonucleotide
cuguaagagcgagcaacac

SEQ ID NO: 3129978 - RNA, 19 nt, Artificial Sequence
  Description of Artificial Sequence: Synthetic oligonucleotide
gagcaacacaggcaaagau

SEQ ID NO: 3129979 - RNA, 19 nt, Artificial Sequence
  Description of Artificial Sequence: Synthetic oligonucleotide
cagcauucucuuuuaauau

SEQ ID NO: 3129980 - RNA, 19 nt, Artificial Sequence
  Description of Artificial Sequence: Synthetic oligonucleotide
gaucuacuauacugcauuu

SEQ ID NO: 3129981 - RNA, 19 nt, Artificial Sequence
  Description of Artificial Sequence: Synthetic oligonucleotide
gugaaagcagcauucucuu

SEQ ID NO: 3129982 - RNA, 19 nt, Artificial Sequence
  Description of Artificial Sequence: Synthetic oligonucleotide
ucacaacuuuaaggaaaau

SEQ ID NO: 3129983 - RNA, 19 nt, Artificial Sequence
  Description of Artificial Sequence: Synthetic oligonucleotide
cacaggcaaagaucuacua

SEQ ID NO: 3129984 - RNA, 19 nt, Artificial Sequence
  Description of Artificial Sequence: Synthetic oligonucleotide
gcaacucagggucagugcu

SEQ ID NO: 3129985 - RNA, 19 nt, Artificial Sequence
  Description of Artificial Sequence: Synthetic oligonucleotide
gcuguaagagcgagcaaca

SEQ ID NO: 3129986 - RNA, 19 nt, Artificial Sequence
  Description of Artificial Sequence: Synthetic oligonucleotide
gucagugcuguaagagcga

SEQ ID NO: 3129987 - RNA, 19 nt, Artificial Sequence
  Description of Artificial Sequence: Synthetic oligonucleotide
ggcaaagaucuacuauacu

SEQ ID NO: 3129988 - RNA, 19 nt, Artificial Sequence
  Description of Artificial Sequence: Synthetic oligonucleotide
cacuuaaaguauguacaau

SEQ ID NO: 3129989 - RNA, 19 nt, Artificial Sequence
  Description of Artificial Sequence: Synthetic oligonucleotide
caacacaggcaaagaucua

SEQ ID NO: 3129990 - RNA, 19 nt, Artificial Sequence
  Description of Artificial Sequence: Synthetic oligonucleotide
gugcuguaagagcgagcaa

SEQ ID NO: 3129991 - RNA, 19 nt, Artificial Sequence
  Description of Artificial Sequence: Synthetic oligonucleotide
agcgagcaacacaggcaaa

SEQ ID NO: 3129992 - RNA, 19 nt, Artificial Sequence
  Description of Artificial Sequence: Synthetic oligonucleotide
caugcaacucagggucagu

SEQ ID NO: 3129993 - RNA, 19 nt, Artificial Sequence
  Description of Artificial Sequence: Synthetic oligonucleotide
cgagcaacacaggcaaaga

SEQ ID NO: 3129994 - RNA, 19 nt, Artificial Sequence
  Description of Artificial Sequence: Synthetic oligonucleotide
uuugaaguugagcacggcg

SEQ ID NO: 3129995 - RNA, 19 nt, Artificial Sequence
  Description of Artificial Sequence: Synthetic oligonucleotide
augaacacauuccacaggg

SEQ ID NO: 3129996 - RNA, 19 nt, Artificial Sequence
  Description of Artificial Sequence: Synthetic oligonucleotide
agagccaaacacuacaguc

SEQ ID NO: 3129997 - RNA, 19 nt, Artificial Sequence
  Description of Artificial Sequence: Synthetic oligonucleotide
gaacacauuccacagggcg

SEQ ID NO: 3129998 - RNA, 19 nt, Artificial Sequence
  Description of Artificial Sequence: Synthetic oligonucleotide
ucaagagccaaacacuaca

SEQ ID NO: 3129999 - RNA, 19 nt, Artificial Sequence
  Description of Artificial Sequence: Synthetic oligonucleotide
uugaaguugagcacggcgc

SEQ ID NO: 3130000 - RNA, 19 nt, Artificial Sequence
  Description of Artificial Sequence: Synthetic oligonucleotide
cacagggcgaugaagaucc

SEQ ID NO: 3130001 - RNA, 19 nt, Artificial Sequence
  Description of Artificial Sequence: Synthetic oligonucleotide
aucaugaacacauuccaca

SEQ ID NO: 3130002 - RNA, 19 nt, Artificial Sequence
  Description of Artificial Sequence: Synthetic oligonucleotide
ucaugaacacauuccacag

SEQ ID NO: 3130003 - RNA, 19 nt, Artificial Sequence
  Description of Artificial Sequence: Synthetic oligonucleotide
agcaucaugaacacauucc

SEQ ID NO: 3130004 - RNA, 19 nt, Artificial Sequence
  Description of Artificial Sequence: Synthetic oligonucleotide
gauguugucuccuguacug

SEQ ID NO: 3130005 - RNA, 19 nt, Artificial Sequence
  Description of Artificial Sequence: Synthetic oligonucleotide
augaagauccggaaguacc

SEQ ID NO: 3130006 - RNA, 19 nt, Artificial Sequence
  Description of Artificial Sequence: Synthetic oligonucleotide
auccggaaguaccucaggc

SEQ ID NO: 3130007 - RNA, 19 nt, Artificial Sequence
  Description of Artificial Sequence: Synthetic oligonucleotide
aguaggaacucccggaugu

SEQ ID NO: 3130008 - RNA, 19 nt, Artificial Sequence
  Description of Artificial Sequence: Synthetic oligonucleotide
ugaagauccggaaguaccu

SEQ ID NO: 3130009 - RNA, 19 nt, Artificial Sequence
  Description of Artificial Sequence: Synthetic oligonucleotide
ugaaguugagcacggcgcc

SEQ ID NO: 3130010 - RNA, 19 nt, Artificial Sequence
  Description of Artificial Sequence: Synthetic oligonucleotide
aguaccucaggcucaguag

SEQ ID NO: 3130011 - RNA, 19 nt, Artificial Sequence
  Description of Artificial Sequence: Synthetic oligonucleotide
uuccacagggcgaugaaga

SEQ ID NO: 3130012 - RNA, 19 nt, Artificial Sequence
  Description of Artificial Sequence: Synthetic oligonucleotide
uguugucuccuguacuggg

SEQ ID NO: 3130013 - RNA, 19 nt, Artificial Sequence
  Description of Artificial Sequence: Synthetic oligonucleotide
ucaguuugaaguugagcac

SEQ ID NO: 3130014 - RNA, 19 nt, Artificial Sequence
  Description of Artificial Sequence: Synthetic oligonucleotide
uuuucaguuugaaguugag

SEQ ID NO: 3130015 - RNA, 19 nt, Artificial Sequence
  Description of Artificial Sequence: Synthetic oligonucleotide
aacucccggauguugucuc

SEQ ID NO: 3130016 - RNA, 19 nt, Artificial Sequence
  Description of Artificial Sequence: Synthetic oligonucleotide
guaccucaggcucaguagg

SEQ ID NO: 3130017 - RNA, 19 nt, Artificial Sequence
  Description of Artificial Sequence: Synthetic oligonucleotide
aagauccggaaguaccuca

SEQ ID NO: 3130018 - RNA, 19 nt, Artificial Sequence
  Description of Artificial Sequence: Synthetic oligonucleotide
caguuugaaguugagcacg

SEQ ID NO: 3130019 - RNA, 19 nt, Artificial Sequence
  Description of Artificial Sequence: Synthetic oligonucleotide
uuucaguuugaaguugagc

SEQ ID NO: 3130020 - RNA, 19 nt, Artificial Sequence
  Description of Artificial Sequence: Synthetic oligonucleotide
aagagccaaacacuacagu

SEQ ID NO: 3130021 - RNA, 19 nt, Artificial Sequence
  Description of Artificial Sequence: Synthetic oligonucleotide
caagagccaaacacuacag

SEQ ID NO: 3130022 - RNA, 19 nt, Artificial Sequence
  Description of Artificial Sequence: Synthetic oligonucleotide
caaacagcaggaugucucc

SEQ ID NO: 3130023 - RNA, 19 nt, Artificial Sequence
  Description of Artificial Sequence: Synthetic oligonucleotide
caugaacacauuccacagg

SEQ ID NO: 3130024 - RNA, 19 nt, Artificial Sequence
  Description of Artificial Sequence: Synthetic oligonucleotide
augcacagcaucaugaaca

SEQ ID NO: 3130025 - RNA, 19 nt, Artificial Sequence
  Description of Artificial Sequence: Synthetic oligonucleotide
aacagcaggaugucuccga

SEQ ID NO: 3130026 - RNA, 19 nt, Artificial Sequence
  Description of Artificial Sequence: Synthetic oligonucleotide
ccaaacacuacagucaugc

SEQ ID NO: 3130027 - RNA, 19 nt, Artificial Sequence
  Description of Artificial Sequence: Synthetic oligonucleotide
aaguugagcacggcgccgg

SEQ ID NO: 3130028 - RNA, 19 nt, Artificial Sequence
  Description of Artificial Sequence: Synthetic oligonucleotide
aaguaccucaggcucagua

SEQ ID NO: 3130029 - RNA, 19 nt, Artificial Sequence
  Description of Artificial Sequence: Synthetic oligonucleotide
aaacagcaggaugucuccg

SEQ ID NO: 3130030 - RNA, 19 nt, Artificial Sequence
  Description of Artificial Sequence: Synthetic oligonucleotide
caucaugaacacauuccac

SEQ ID NO: 3130031 - RNA, 19 nt, Artificial Sequence
  Description of Artificial Sequence: Synthetic oligonucleotide
aacacauuccacagggcga

SEQ ID NO: 3130032 - RNA, 19 nt, Artificial Sequence
  Description of Artificial Sequence: Synthetic oligonucleotide
aucagcagcgucccaaaca

SEQ ID NO: 3130033 - RNA, 19 nt, Artificial Sequence
  Description of Artificial Sequence: Synthetic oligonucleotide
ugaacacauuccacagggc

SEQ ID NO: 3130034 - RNA, 19 nt, Artificial Sequence
  Description of Artificial Sequence: Synthetic oligonucleotide
cucgacuccuccccgaagc

SEQ ID NO: 3130035 - RNA, 19 nt, Artificial Sequence
  Description of Artificial Sequence: Synthetic oligonucleotide
uccggaaguaccucaggcu

SEQ ID NO: 3130036 - RNA, 19 nt, Artificial Sequence
  Description of Artificial Sequence: Synthetic oligonucleotide
gauccggaaguaccucagg

SEQ ID NO: 3130037 - RNA, 19 nt, Artificial Sequence
  Description of Artificial Sequence: Synthetic oligonucleotide
aguuugaaguugagcacgg

SEQ ID NO: 3130038 - RNA, 19 nt, Artificial Sequence
  Description of Artificial Sequence: Synthetic oligonucleotide
gaugaagauccggaaguac

SEQ ID NO: 3130039 - RNA, 19 nt, Artificial Sequence
  Description of Artificial Sequence: Synthetic oligonucleotide
agucaugcacagcaucaug

SEQ ID NO: 3130040 - RNA, 19 nt, Artificial Sequence
  Description of Artificial Sequence: Synthetic oligonucleotide
gagccaaacacuacaguca

SEQ ID NO: 3130041 - RNA, 19 nt, Artificial Sequence
  Description of Artificial Sequence: Synthetic oligonucleotide
agccaaacacuacagucau

SEQ ID NO: 3130042 - RNA, 19 nt, Artificial Sequence
  Description of Artificial Sequence: Synthetic oligonucleotide
cagcgucccaaacagcagg

SEQ ID NO: 3130043 - RNA, 19 nt, Artificial Sequence
  Description of Artificial Sequence: Synthetic oligonucleotide
aagccuugcgugucuuucu

SEQ ID NO: 3130044 - RNA, 19 nt, Artificial Sequence
  Description of Artificial Sequence: Synthetic oligonucleotide
uucaucagcagcgucccaa

SEQ ID NO: 3130045 - RNA, 19 nt, Artificial Sequence
  Description of Artificial Sequence: Synthetic oligonucleotide
caugcacagcaucaugaac

SEQ ID NO: 3130046 - RNA, 19 nt, Artificial Sequence
  Description of Artificial Sequence: Synthetic oligonucleotide
cucaagagccaaacacuac

SEQ ID NO: 3130047 - RNA, 19 nt, Artificial Sequence
  Description of Artificial Sequence: Synthetic oligonucleotide
uguacugggcucccucgac

SEQ ID NO: 3130048 - RNA, 19 nt, Artificial Sequence
  Description of Artificial Sequence: Synthetic oligonucleotide
gaaguugagcacggcgccg

SEQ ID NO: 3130049 - RNA, 19 nt, Artificial Sequence
  Description of Artificial Sequence: Synthetic oligonucleotide
acucccggauguugucucc

SEQ ID NO: 3130050 - RNA, 19 nt, Artificial Sequence
  Description of Artificial Sequence: Synthetic oligonucleotide
acagucaugcacagcauca

SEQ ID NO: 3130051 - RNA, 19 nt, Artificial Sequence
  Description of Artificial Sequence: Synthetic oligonucleotide
uugagcacggcgccggcgu

SEQ ID NO: 3130052 - RNA, 19 nt, Artificial Sequence
  Description of Artificial Sequence: Synthetic oligonucleotide
acugggcucccucgacucc

SEQ ID NO: 3130053 - RNA, 19 nt, Artificial Sequence
  Description of Artificial Sequence: Synthetic oligonucleotide
agcagcgucccaaacagca

SEQ ID NO: 3130054 - RNA, 19 nt, Artificial Sequence
  Description of Artificial Sequence: Synthetic oligonucleotide
aggcucaguaggaacuccc

SEQ ID NO: 3130055 - RNA, 19 nt, Artificial Sequence
  Description of Artificial Sequence: Synthetic oligonucleotide
gucaugcacagcaucauga

SEQ ID NO: 3130056 - RNA, 19 nt, Artificial Sequence
  Description of Artificial Sequence: Synthetic oligonucleotide
auguugucuccuguacugg

SEQ ID NO: 3130057 - RNA, 19 nt, Artificial Sequence
  Description of Artificial Sequence: Synthetic oligonucleotide
cagcaucaugaacacauuc

SEQ ID NO: 3130058 - RNA, 19 nt, Artificial Sequence
  Description of Artificial Sequence: Synthetic oligonucleotide
uaccucaggcucaguagga

SEQ ID NO: 3130059 - RNA, 19 nt, Artificial Sequence
  Description of Artificial Sequence: Synthetic oligonucleotide
ucgacuccuccccgaagcc

SEQ ID NO: 3130060 - RNA, 19 nt, Artificial Sequence
  Description of Artificial Sequence: Synthetic oligonucleotide
aguugagcacggcgccggc

SEQ ID NO: 3130061 - RNA, 19 nt, Artificial Sequence
  Description of Artificial Sequence: Synthetic oligonucleotide
cuccccgaagccuugcgug

SEQ ID NO: 3130062 - RNA, 19 nt, Artificial Sequence
  Description of Artificial Sequence: Synthetic oligonucleotide
auuccacagggcgaugaag

SEQ ID NO: 3130063 - RNA, 19 nt, Artificial Sequence
  Description of Artificial Sequence: Synthetic oligonucleotide
gaagccuugcgugucuuuc

SEQ ID NO: 3130064 - RNA, 19 nt, Artificial Sequence
  Description of Artificial Sequence: Synthetic oligonucleotide
ccggcguucaucagcagcg

SEQ ID NO: 3130065 - RNA, 19 nt, Artificial Sequence
  Description of Artificial Sequence: Synthetic oligonucleotide
ucaucagcagcgucccaaa

SEQ ID NO: 3130066 - RNA, 19 nt, Artificial Sequence
  Description of Artificial Sequence: Synthetic oligonucleotide
uccuguacugggcucccuc

SEQ ID NO: 3130067 - RNA, 19 nt, Artificial Sequence
  Description of Artificial Sequence: Synthetic oligonucleotide
gcucaguaggaacucccgg

SEQ ID NO: 3130068 - RNA, 19 nt, Artificial Sequence
  Description of Artificial Sequence: Synthetic oligonucleotide
uccuccccgaagccuugcg

SEQ ID NO: 3130069 - RNA, 19 nt, Artificial Sequence
  Description of Artificial Sequence: Synthetic oligonucleotide
guugucuccuguacugggc

SEQ ID NO: 3130070 - RNA, 19 nt, Artificial Sequence
  Description of Artificial Sequence: Synthetic oligonucleotide
gaugucuccgaucauccuu

SEQ ID NO: 3130071 - RNA, 19 nt, Artificial Sequence
  Description of Artificial Sequence: Synthetic oligonucleotide
uacugggcucccucgacuc

SEQ ID NO: 3130072 - RNA, 19 nt, Artificial Sequence
  Description of Artificial Sequence: Synthetic oligonucleotide
agggcgaugaagauccgga

SEQ ID NO: 3130073 - RNA, 19 nt, Artificial Sequence
  Description of Artificial Sequence: Synthetic oligonucleotide
agauccggaaguaccucag

SEQ ID NO: 3130074 - RNA, 19 nt, Artificial Sequence
  Description of Artificial Sequence: Synthetic oligonucleotide
gaagauccggaaguaccuc

SEQ ID NO: 3130075 - RNA, 19 nt, Artificial Sequence
  Description of Artificial Sequence: Synthetic oligonucleotide
uccacagggcgaugaagau

SEQ ID NO: 3130076 - RNA, 19 nt, Artificial Sequence
  Description of Artificial Sequence: Synthetic oligonucleotide
acauuccacagggcgauga

SEQ ID NO: 3130077 - RNA, 19 nt, Artificial Sequence
  Description of Artificial Sequence: Synthetic oligonucleotide
acacauuccacagggcgau

SEQ ID NO: 3130078 - RNA, 19 nt, Artificial Sequence
  Description of Artificial Sequence: Synthetic oligonucleotide
gucccaaacagcaggaugu

SEQ ID NO: 3130079 - RNA, 19 nt, Artificial Sequence
  Description of Artificial Sequence: Synthetic oligonucleotide
ucaggcucaguaggaacuc

SEQ ID NO: 3130080 - RNA, 19 nt, Artificial Sequence
  Description of Artificial Sequence: Synthetic oligonucleotide
acggcgccggcguucauca

SEQ ID NO: 3130081 - RNA, 19 nt, Artificial Sequence
  Description of Artificial Sequence: Synthetic oligonucleotide
uccccgaagccuugcgugu

SEQ ID NO: 3130082 - RNA, 19 nt, Artificial Sequence
  Description of Artificial Sequence: Synthetic oligonucleotide
aggaacucccggauguugu

SEQ ID NO: 3130083 - RNA, 19 nt, Artificial Sequence
  Description of Artificial Sequence: Synthetic oligonucleotide
cucaggcucaguaggaacu

SEQ ID NO: 3130084 - RNA, 19 nt, Artificial Sequence
  Description of Artificial Sequence: Synthetic oligonucleotide
caaacacuacagucaugca

SEQ ID NO: 3130085 - RNA, 19 nt, Artificial Sequence
  Description of Artificial Sequence: Synthetic oligonucleotide
guuugaaguugagcacggc

SEQ ID NO: 3130086 - RNA, 19 nt, Artificial Sequence
  Description of Artificial Sequence: Synthetic oligonucleotide
cagggcgaugaagauccgg

SEQ ID NO: 3130087 - RNA, 19 nt, Artificial Sequence
  Description of Artificial Sequence: Synthetic oligonucleotide
gcguucaucagcagcgucc

SEQ ID NO: 3130088 - RNA, 19 nt, Artificial Sequence
  Description of Artificial Sequence: Synthetic oligonucleotide
ucccggauguugucuccug

SEQ ID NO: 3130089 - RNA, 19 nt, Artificial Sequence
  Description of Artificial Sequence: Synthetic oligonucleotide
ccuguacugggcucccucg

SEQ ID NO: 3130090 - RNA, 19 nt, Artificial Sequence
  Description of Artificial Sequence: Synthetic oligonucleotide
guugagcacggcgccggcg

SEQ ID NO: 3130091 - RNA, 19 nt, Artificial Sequence
  Description of Artificial Sequence: Synthetic oligonucleotide
ccggaaguaccucaggcuc

SEQ ID NO: 3130092 - RNA, 19 nt, Artificial Sequence
  Description of Artificial Sequence: Synthetic oligonucleotide
ggcucaguaggaacucccg

SEQ ID NO: 3130093 - RNA, 19 nt, Artificial Sequence
  Description of Artificial Sequence: Synthetic oligonucleotide
gcgaugaagauccggaagu

SEQ ID NO: 3130094 - RNA, 19 nt, Artificial Sequence
  Description of Artificial Sequence: Synthetic oligonucleotide
caucagcagcgucccaaac

SEQ ID NO: 3130095 - RNA, 19 nt, Artificial Sequence
  Description of Artificial Sequence: Synthetic oligonucleotide
ugucuccgaucauccuuac

SEQ ID NO: 3130096 - RNA, 19 nt, Artificial Sequence
  Description of Artificial Sequence: Synthetic oligonucleotide
augucuccgaucauccuua

SEQ ID NO: 3130097 - RNA, 19 nt, Artificial Sequence
  Description of Artificial Sequence: Synthetic oligonucleotide
ucccaaacagcaggauguc

SEQ ID NO: 3130098 - RNA, 19 nt, Artificial Sequence
  Description of Artificial Sequence: Synthetic oligonucleotide
caggcucaguaggaacucc

SEQ ID NO: 3130099 - RNA, 19 nt, Artificial Sequence
  Description of Artificial Sequence: Synthetic oligonucleotide
cucccucgacuccuccccg

SEQ ID NO: 3130100 - RNA, 19 nt, Artificial Sequence
  Description of Artificial Sequence: Synthetic oligonucleotide
gcucccucgacuccucccc

SEQ ID NO: 3130101 - RNA, 19 nt, Artificial Sequence
  Description of Artificial Sequence: Synthetic oligonucleotide
ggcgccggcguucaucagc

SEQ ID NO: 3130102 - RNA, 19 nt, Artificial Sequence
  Description of Artificial Sequence: Synthetic oligonucleotide
gccggcguucaucagcagc

SEQ ID NO: 3130103 - RNA, 19 nt, Artificial Sequence
  Description of Artificial Sequence: Synthetic oligonucleotide
agccuugcgugucuuucuu

SEQ ID NO: 3130104 - RNA, 19 nt, Artificial Sequence
  Description of Artificial Sequence: Synthetic oligonucleotide
ucccucgacuccuccccga

SEQ ID NO: 3130105 - RNA, 19 nt, Artificial Sequence
  Description of Artificial Sequence: Synthetic oligonucleotide
agcgucccaaacagcagga

SEQ ID NO: 3130106 - RNA, 19 nt, Artificial Sequence
  Description of Artificial Sequence: Synthetic oligonucleotide
cagcaggaugucuccgauc

SEQ ID NO: 3130107 - RNA, 19 nt, Artificial Sequence
  Description of Artificial Sequence: Synthetic oligonucleotide
ccucaggcucaguaggaac

SEQ ID NO: 3130108 - RNA, 19 nt, Artificial Sequence
  Description of Artificial Sequence: Synthetic oligonucleotide
ggauguugucuccuguacu

SEQ ID NO: 3130109 - RNA, 19 nt, Artificial Sequence
  Description of Artificial Sequence: Synthetic oligonucleotide
ggaacucccggauguuguc

SEQ ID NO: 3130110 - RNA, 19 nt, Artificial Sequence
  Description of Artificial Sequence: Synthetic oligonucleotide
cuguacugggcucccucga

SEQ ID NO: 3130111 - RNA, 19 nt, Artificial Sequence
  Description of Artificial Sequence: Synthetic oligonucleotide
accucaggcucaguaggaa

SEQ ID NO: 3130112 - RNA, 19 nt, Artificial Sequence
  Description of Artificial Sequence: Synthetic oligonucleotide
cauuccacagggcgaugaa

SEQ ID NO: 3130113 - RNA, 19 nt, Artificial Sequence
  Description of Artificial Sequence: Synthetic oligonucleotide
gucuccgaucauccuuaca

SEQ ID NO: 3130114 - RNA, 19 nt, Artificial Sequence
  Description of Artificial Sequence: Synthetic oligonucleotide
cgucccaaacagcaggaug

SEQ ID NO: 3130115 - RNA, 19 nt, Artificial Sequence
  Description of Artificial Sequence: Synthetic oligonucleotide
gaacucccggauguugucu

SEQ ID NO: 3130116 - RNA, 19 nt, Artificial Sequence
  Description of Artificial Sequence: Synthetic oligonucleotide
cguucaucagcagcguccc

SEQ ID NO: 3130117 - RNA, 19 nt, Artificial Sequence
  Description of Artificial Sequence: Synthetic oligonucleotide
guacugggcucccucgacu

SEQ ID NO: 3130118 - RNA, 19 nt, Artificial Sequence
  Description of Artificial Sequence: Synthetic oligonucleotide
cggauguugucuccuguac

SEQ ID NO: 3130119 - RNA, 19 nt, Artificial Sequence
  Description of Artificial Sequence: Synthetic oligonucleotide
gcagcgucccaaacagcag

SEQ ID NO: 3130120 - RNA, 19 nt, Artificial Sequence
  Description of Artificial Sequence: Synthetic oligonucleotide
ugggcucccucgacuccuc

SEQ ID NO: 3130121 - RNA, 19 nt, Artificial Sequence
  Description of Artificial Sequence: Synthetic oligonucleotide
ugagcacggcgccggcguu

SEQ ID NO: 3130122 - RNA, 19 nt, Artificial Sequence
  Description of Artificial Sequence: Synthetic oligonucleotide
guucaucagcagcguccca

SEQ ID NO: 3130123 - RNA, 19 nt, Artificial Sequence
  Description of Artificial Sequence: Synthetic oligonucleotide
acagggcgaugaagauccg

SEQ ID NO: 3130124 - RNA, 19 nt, Artificial Sequence
  Description of Artificial Sequence: Synthetic oligonucleotide
cacggcgccggcguucauc

SEQ ID NO: 3130125 - RNA, 19 nt, Artificial Sequence
  Description of Artificial Sequence: Synthetic oligonucleotide
cuacagucaugcacagcau

SEQ ID NO: 3130126 - RNA, 19 nt, Artificial Sequence
  Description of Artificial Sequence: Synthetic oligonucleotide
cacauuccacagggcgaug

SEQ ID NO: 3130127 - RNA, 19 nt, Artificial Sequence
  Description of Artificial Sequence: Synthetic oligonucleotide
gacuccuccccgaagccuu

SEQ ID NO: 3130128 - RNA, 19 nt, Artificial Sequence
  Description of Artificial Sequence: Synthetic oligonucleotide
ccacagggcgaugaagauc

SEQ ID NO: 3130129 - RNA, 19 nt, Artificial Sequence
  Description of Artificial Sequence: Synthetic oligonucleotide
cuccuccccgaagccuugc

SEQ ID NO: 3130130 - RNA, 19 nt, Artificial Sequence
  Description of Artificial Sequence: Synthetic oligonucleotide
acuccuccccgaagccuug

SEQ ID NO: 3130131 - RNA, 19 nt, Artificial Sequence
  Description of Artificial Sequence: Synthetic oligonucleotide
gccaaacacuacagucaug

SEQ ID NO: 3130132 - RNA, 19 nt, Artificial Sequence
  Description of Artificial Sequence: Synthetic oligonucleotide
ccucgacuccuccccgaag

SEQ ID NO: 3130133 - RNA, 19 nt, Artificial Sequence
  Description of Artificial Sequence: Synthetic oligonucleotide
cagucaugcacagcaucau

SEQ ID NO: 3130134 - RNA, 19 nt, Artificial Sequence
  Description of Artificial Sequence: Synthetic oligonucleotide
gcgccggcguucaucagca

SEQ ID NO: 3130135 - RNA, 19 nt, Artificial Sequence
  Description of Artificial Sequence: Synthetic oligonucleotide
ccuugcgugucuuucuuuu

SEQ ID NO: 3130136 - RNA, 19 nt, Artificial Sequence
  Description of Artificial Sequence: Synthetic oligonucleotide
ccggauguugucuccugua

SEQ ID NO: 3130137 - RNA, 19 nt, Artificial Sequence
  Description of Artificial Sequence: Synthetic oligonucleotide
gggcucccucgacuccucc

SEQ ID NO: 3130138 - RNA, 19 nt, Artificial Sequence
  Description of Artificial Sequence: Synthetic oligonucleotide
cugggcucccucgacuccu

SEQ ID NO: 3130139 - RNA, 19 nt, Artificial Sequence
  Description of Artificial Sequence: Synthetic oligonucleotide
gcacagcaucaugaacaca

SEQ ID NO: 3130140 - RNA, 19 nt, Artificial Sequence
  Description of Artificial Sequence: Synthetic oligonucleotide
guaggaacucccggauguu

SEQ ID NO: 3130141 - RNA, 19 nt, Artificial Sequence
  Description of Artificial Sequence: Synthetic oligonucleotide
gaaguaccucaggcucagu

SEQ ID NO: 3130142 - RNA, 19 nt, Artificial Sequence
  Description of Artificial Sequence: Synthetic oligonucleotide
cucccggauguugucuccu

SEQ ID NO: 3130143 - RNA, 19 nt, Artificial Sequence
  Description of Artificial Sequence: Synthetic oligonucleotide
cgaugaagauccggaagua

SEQ ID NO: 3130144 - RNA, 19 nt, Artificial Sequence
  Description of Artificial Sequence: Synthetic oligonucleotide
ccccgaagccuugcguguc

SEQ ID NO: 3130145 - RNA, 19 nt, Artificial Sequence
  Description of Artificial Sequence: Synthetic oligonucleotide
cccaaacagcaggaugucu

SEQ ID NO: 3130146 - RNA, 19 nt, Artificial Sequence
  Description of Artificial Sequence: Synthetic oligonucleotide
gcaggaugucuccgaucau

SEQ ID NO: 3130147 - RNA, 19 nt, Artificial Sequence
  Description of Artificial Sequence: Synthetic oligonucleotide
cccggauguugucuccugu

SEQ ID NO: 3130148 - RNA, 19 nt, Artificial Sequence
  Description of Artificial Sequence: Synthetic oligonucleotide
cccucgacuccuccccgaa

SEQ ID NO: 3130149 - RNA, 19 nt, Artificial Sequence
  Description of Artificial Sequence: Synthetic oligonucleotide
gccuugcgugucuuucuuu

SEQ ID NO: 3130150 - RNA, 19 nt, Artificial Sequence
  Description of Artificial Sequence: Synthetic oligonucleotide
ccuccccgaagccuugcgu

SEQ ID NO: 3130151 - RNA, 19 nt, Artificial Sequence
  Description of Artificial Sequence: Synthetic oligonucleotide
cuccuguacugggcucccu

SEQ ID NO: 3130152 - RNA, 19 nt, Artificial Sequence
  Description of Artificial Sequence: Synthetic oligonucleotide
cccgaagccuugcgugucu

SEQ ID NO: 3130153 - RNA, 19 nt, Artificial Sequence
  Description of Artificial Sequence: Synthetic oligonucleotide
cgccggcguucaucagcag

SEQ ID NO: 3130154 - RNA, 19 nt, Artificial Sequence
  Description of Artificial Sequence: Synthetic oligonucleotide
cgacuccuccccgaagccu

SEQ ID NO: 3130155 - RNA, 19 nt, Artificial Sequence
  Description of Artificial Sequence: Synthetic oligonucleotide
cggcgccggcguucaucag

SEQ ID NO: 3130156 - RNA, 19 nt, Artificial Sequence
  Description of Artificial Sequence: Synthetic oligonucleotide
ccgaagccuugcgugucuu

SEQ ID NO: 3130157 - RNA, 19 nt, Artificial Sequence
  Description of Artificial Sequence: Synthetic oligonucleotide
cggcguucaucagcagcgu

SEQ ID NO: 3130158 - RNA, 19 nt, Artificial Sequence
  Description of Artificial Sequence: Synthetic oligonucleotide
gcacggcgccggcguucau

SEQ ID NO: 3130159 - RNA, 19 nt, Artificial Sequence
  Description of Artificial Sequence: Synthetic oligonucleotide
aaaaguucucuucagaucu

SEQ ID NO: 3130160 - RNA, 19 nt, Artificial Sequence
  Description of Artificial Sequence: Synthetic oligonucleotide
aagauucaaaaccagcugg

SEQ ID NO: 3130161 - RNA, 19 nt, Artificial Sequence
  Description of Artificial Sequence: Synthetic oligonucleotide
caaagcaagauucaaaacc

SEQ ID NO: 3130162 - RNA, 19 nt, Artificial Sequence
  Description of Artificial Sequence: Synthetic oligonucleotide
uuuauuuuagugaggaaac

SEQ ID NO: 3130163 - RNA, 19 nt, Artificial Sequence
  Description of Artificial Sequence: Synthetic oligonucleotide
uugacugugacacacuucu

SEQ ID NO: 3130164 - RNA, 19 nt, Artificial Sequence
  Description of Artificial Sequence: Synthetic oligonucleotide
uuuaauuauuuauuuauuu

SEQ ID NO: 3130165 - RNA, 19 nt, Artificial Sequence
  Description of Artificial Sequence: Synthetic oligonucleotide
agugaggaaacacuggauc

SEQ ID NO: 3130166 - RNA, 19 nt, Artificial Sequence
  Description of Artificial Sequence: Synthetic oligonucleotide
aaagcaagauucaaaacca

SEQ ID NO: 3130167 - RNA, 19 nt, Artificial Sequence
  Description of Artificial Sequence: Synthetic oligonucleotide
aaacucugcaucuccaugu

SEQ ID NO: 3130168 - RNA, 19 nt, Artificial Sequence
  Description of Artificial Sequence: Synthetic oligonucleotide
aaaccagcugggcaaacuc

SEQ ID NO: 3130169 - RNA, 19 nt, Artificial Sequence
  Description of Artificial Sequence: Synthetic oligonucleotide
cuggaucaaagcaagauuc

SEQ ID NO: 3130170 - RNA, 19 nt, Artificial Sequence
  Description of Artificial Sequence: Synthetic oligonucleotide
ucaaaaguucucuucagau

SEQ ID NO: 3130171 - RNA, 19 nt, Artificial Sequence
  Description of Artificial Sequence: Synthetic oligonucleotide
uauuuuaauuauuuauuua

SEQ ID NO: 3130172 - RNA, 19 nt, Artificial Sequence
  Description of Artificial Sequence: Synthetic oligonucleotide
uucaaaaccagcugggcaa

SEQ ID NO: 3130173 - RNA, 19 nt, Artificial Sequence
  Description of Artificial Sequence: Synthetic oligonucleotide
acugugacacacuucuuuc

SEQ ID NO: 3130174 - RNA, 19 nt, Artificial Sequence
  Description of Artificial Sequence: Synthetic oligonucleotide
ugucugaugucaaaaguuc

SEQ ID NO: 3130175 - RNA, 19 nt, Artificial Sequence
  Description of Artificial Sequence: Synthetic oligonucleotide
gaugucaaaaguucucuuc

SEQ ID NO: 3130176 - RNA, 19 nt, Artificial Sequence
  Description of Artificial Sequence: Synthetic oligonucleotide
uauuuuagugaggaaacac

SEQ ID NO: 3130177 - RNA, 19 nt, Artificial Sequence
  Description of Artificial Sequence: Synthetic oligonucleotide
ucuucagaucuccaacucc

SEQ ID NO: 3130178 - RNA, 19 nt, Artificial Sequence
  Description of Artificial Sequence: Synthetic oligonucleotide
ucuccaacuccuuucagcu

SEQ ID NO: 3130179 - RNA, 19 nt, Artificial Sequence
  Description of Artificial Sequence: Synthetic oligonucleotide
uuuguugacugugacacac

SEQ ID NO: 3130180 - RNA, 19 nt, Artificial Sequence
  Description of Artificial Sequence: Synthetic oligonucleotide
agcaagauucaaaaccagc

SEQ ID NO: 3130181 - RNA, 19 nt, Artificial Sequence
  Description of Artificial Sequence: Synthetic oligonucleotide
augucaaaaguucucuuca

SEQ ID NO: 3130182 - RNA, 19 nt, Artificial Sequence
  Description of Artificial Sequence: Synthetic oligonucleotide
ugggcaaacuccaaacucu

SEQ ID NO: 3130183 - RNA, 19 nt, Artificial Sequence
  Description of Artificial Sequence: Synthetic oligonucleotide
auucaaaaccagcugggca

SEQ ID NO: 3130184 - RNA, 19 nt, Artificial Sequence
  Description of Artificial Sequence: Synthetic oligonucleotide
uucucuucagaucuccaac

SEQ ID NO: 3130185 - RNA, 19 nt, Artificial Sequence
  Description of Artificial Sequence: Synthetic oligonucleotide
cuuucagcuuuguugacug

SEQ ID NO: 3130186 - RNA, 19 nt, Artificial Sequence
  Description of Artificial Sequence: Synthetic oligonucleotide
agcugggcaaacuccaaac

SEQ ID NO: 3130187 - RNA, 19 nt, Artificial Sequence
  Description of Artificial Sequence: Synthetic oligonucleotide
aacucugcaucuccauguc

SEQ ID NO: 3130188 - RNA, 19 nt, Artificial Sequence
  Description of Artificial Sequence: Synthetic oligonucleotide
uguuugcacucccuguuag

SEQ ID NO: 3130189 - RNA, 19 nt, Artificial Sequence
  Description of Artificial Sequence: Synthetic oligonucleotide
ugucaaaaguucucuucag

SEQ ID NO: 3130190 - RNA, 19 nt, Artificial Sequence
  Description of Artificial Sequence: Synthetic oligonucleotide
caagauucaaaaccagcug

SEQ ID NO: 3130191 - RNA, 19 nt, Artificial Sequence
  Description of Artificial Sequence: Synthetic oligonucleotide
uggaucaaagcaagauuca

SEQ ID NO: 3130192 - RNA, 19 nt, Artificial Sequence
  Description of Artificial Sequence: Synthetic oligonucleotide
caaaaguucucuucagauc

SEQ ID NO: 3130193 - RNA, 19 nt, Artificial Sequence
  Description of Artificial Sequence: Synthetic oligonucleotide
aaccagcugggcaaacucc

SEQ ID NO: 3130194 - RNA, 19 nt, Artificial Sequence
  Description of Artificial Sequence: Synthetic oligonucleotide
agauucaaaaccagcuggg

SEQ ID NO: 3130195 - RNA, 19 nt, Artificial Sequence
  Description of Artificial Sequence: Synthetic oligonucleotide
auuuuagugaggaaacacu

SEQ ID NO: 3130196 - RNA, 19 nt, Artificial Sequence
  Description of Artificial Sequence: Synthetic oligonucleotide
ucucuucagaucuccaacu

SEQ ID NO: 3130197 - RNA, 19 nt, Artificial Sequence
  Description of Artificial Sequence: Synthetic oligonucleotide
uuugcacucccuguuagca

SEQ ID NO: 3130198 - RNA, 19 nt, Artificial Sequence
  Description of Artificial Sequence: Synthetic oligonucleotide
uuucucuugggcuguuugc

SEQ ID NO: 3130199 - RNA, 19 nt, Artificial Sequence
  Description of Artificial Sequence: Synthetic oligonucleotide
ugcacucccuguuagcagc

SEQ ID NO: 3130200 - RNA, 19 nt, Artificial Sequence
  Description of Artificial Sequence: Synthetic oligonucleotide
aaacacuggaucaaagcaa

SEQ ID NO: 3130201 - RNA, 19 nt, Artificial Sequence
  Description of Artificial Sequence: Synthetic oligonucleotide
uuauuuuagugaggaaaca

SEQ ID NO: 3130202 - RNA, 19 nt, Artificial Sequence
  Description of Artificial Sequence: Synthetic oligonucleotide
cucugcaucuccaugucug

SEQ ID NO: 3130203 - RNA, 19 nt, Artificial Sequence
  Description of Artificial Sequence: Synthetic oligonucleotide
uccaacuccuuucagcuuu

SEQ ID NO: 3130204 - RNA, 19 nt, Artificial Sequence
  Description of Artificial Sequence: Synthetic oligonucleotide
uucagcuuuguugacugug

SEQ ID NO: 3130205 - RNA, 19 nt, Artificial Sequence
  Description of Artificial Sequence: Synthetic oligonucleotide
gauucaaaaccagcugggc

SEQ ID NO: 3130206 - RNA, 19 nt, Artificial Sequence
  Description of Artificial Sequence: Synthetic oligonucleotide
gcuuuguugacugugacac

SEQ ID NO: 3130207 - RNA, 19 nt, Artificial Sequence
  Description of Artificial Sequence: Synthetic oligonucleotide
acuggaucaaagcaagauu

SEQ ID NO: 3130208 - RNA, 19 nt, Artificial Sequence
  Description of Artificial Sequence: Synthetic oligonucleotide
cacacuucuuucucuuggg

SEQ ID NO: 3130209 - RNA, 19 nt, Artificial Sequence
  Description of Artificial Sequence: Synthetic oligonucleotide
uccaaacucugcaucucca

SEQ ID NO: 3130210 - RNA, 19 nt, Artificial Sequence
  Description of Artificial Sequence: Synthetic oligonucleotide
aucuccaugucugauguca

SEQ ID NO: 3130211 - RNA, 19 nt, Artificial Sequence
  Description of Artificial Sequence: Synthetic oligonucleotide
uguugacugugacacacuu

SEQ ID NO: 3130212 - RNA, 19 nt, Artificial Sequence
  Description of Artificial Sequence: Synthetic oligonucleotide
aaaaccagcugggcaaacu

SEQ ID NO: 3130213 - RNA, 19 nt, Artificial Sequence
  Description of Artificial Sequence: Synthetic oligonucleotide
aagcaagauucaaaaccag

SEQ ID NO: 3130214 - RNA, 19 nt, Artificial Sequence
  Description of Artificial Sequence: Synthetic oligonucleotide
cuuucucuugggcuguuug

SEQ ID NO: 3130215 - RNA, 19 nt, Artificial Sequence
  Description of Artificial Sequence: Synthetic oligonucleotide
cugggcaaacuccaaacuc

SEQ ID NO: 3130216 - RNA, 19 nt, Artificial Sequence
  Description of Artificial Sequence: Synthetic oligonucleotide
cagaucuccaacuccuuuc

SEQ ID NO: 3130217 - RNA, 19 nt, Artificial Sequence
  Description of Artificial Sequence: Synthetic oligonucleotide
caaacucugcaucuccaug

SEQ ID NO: 3130218 - RNA, 19 nt, Artificial Sequence
  Description of Artificial Sequence: Synthetic oligonucleotide
cuccaaacucugcaucucc

SEQ ID NO: 3130219 - RNA, 19 nt, Artificial Sequence
  Description of Artificial Sequence: Synthetic oligonucleotide
ugaggaaacacuggaucaa

SEQ ID NO: 3130220 - RNA, 19 nt, Artificial Sequence
  Description of Artificial Sequence: Synthetic oligonucleotide
uugcacucccuguuagcag

SEQ ID NO: 3130221 - RNA, 19 nt, Artificial Sequence
  Description of Artificial Sequence: Synthetic oligonucleotide
ucagaucuccaacuccuuu

SEQ ID NO: 3130222 - RNA, 19 nt, Artificial Sequence
  Description of Artificial Sequence: Synthetic oligonucleotide
uagugaggaaacacuggau

SEQ ID NO: 3130223 - RNA, 19 nt, Artificial Sequence
  Description of Artificial Sequence: Synthetic oligonucleotide
ugaugucaaaaguucucuu

SEQ ID NO: 3130224 - RNA, 19 nt, Artificial Sequence
  Description of Artificial Sequence: Synthetic oligonucleotide
gcaaacuccaaacucugca

SEQ ID NO: 3130225 - RNA, 19 nt, Artificial Sequence
  Description of Artificial Sequence: Synthetic oligonucleotide
ucuugggcuguuugcacuc

SEQ ID NO: 3130226 - RNA, 19 nt, Artificial Sequence
  Description of Artificial Sequence: Synthetic oligonucleotide
augucugaugucaaaaguu

SEQ ID NO: 3130227 - RNA, 19 nt, Artificial Sequence
  Description of Artificial Sequence: Synthetic oligonucleotide
guuugcacucccuguuagc

SEQ ID NO: 3130228 - RNA, 19 nt, Artificial Sequence
  Description of Artificial Sequence: Synthetic oligonucleotide
uuguugacugugacacacu

SEQ ID NO: 3130229 - RNA, 19 nt, Artificial Sequence
  Description of Artificial Sequence: Synthetic oligonucleotide
ucuccaugucugaugucaa

SEQ ID NO: 3130230 - RNA, 19 nt, Artificial Sequence
  Description of Artificial Sequence: Synthetic oligonucleotide
aggaaacacuggaucaaag

SEQ ID NO: 3130231 - RNA, 19 nt, Artificial Sequence
  Description of Artificial Sequence: Synthetic oligonucleotide
uugggcuguuugcacuccc

SEQ ID NO: 3130232 - RNA, 19 nt, Artificial Sequence
  Description of Artificial Sequence: Synthetic oligonucleotide
guucucuucagaucuccaa

SEQ ID NO: 3130233 - RNA, 19 nt, Artificial Sequence
  Description of Artificial Sequence: Synthetic oligonucleotide
ccaugucugaugucaaaag

SEQ ID NO: 3130234 - RNA, 19 nt, Artificial Sequence
  Description of Artificial Sequence: Synthetic oligonucleotide
caugucugaugucaaaagu

SEQ ID NO: 3130235 - RNA, 19 nt, Artificial Sequence
  Description of Artificial Sequence: Synthetic oligonucleotide
ucaaaaccagcugggcaaa

SEQ ID NO: 3130236 - RNA, 19 nt, Artificial Sequence
  Description of Artificial Sequence: Synthetic oligonucleotide
gacugugacacacuucuuu

SEQ ID NO: 3130237 - RNA, 19 nt, Artificial Sequence
  Description of Artificial Sequence: Synthetic oligonucleotide
ucccuguuagcagcuuucc

SEQ ID NO: 3130238 - RNA, 19 nt, Artificial Sequence
  Description of Artificial Sequence: Synthetic oligonucleotide
ugggcuguuugcacucccu

SEQ ID NO: 3130239 - RNA, 19 nt, Artificial Sequence
  Description of Artificial Sequence: Synthetic oligonucleotide
acucugcaucuccaugucu

SEQ ID NO: 3130240 - RNA, 19 nt, Artificial Sequence
  Description of Artificial Sequence: Synthetic oligonucleotide
uuucagcuuuguugacugu

SEQ ID NO: 3130241 - RNA, 19 nt, Artificial Sequence
  Description of Artificial Sequence: Synthetic oligonucleotide
cagcuuuguugacugugac

SEQ ID NO: 3130242 - RNA, 19 nt, Artificial Sequence
  Description of Artificial Sequence: Synthetic oligonucleotide
gcaagauucaaaaccagcu

SEQ ID NO: 3130243 - RNA, 19 nt, Artificial Sequence
  Description of Artificial Sequence: Synthetic oligonucleotide
uccuuucagcuuuguugac

SEQ ID NO: 3130244 - RNA, 19 nt, Artificial Sequence
  Description of Artificial Sequence: Synthetic oligonucleotide
gaggaaacacuggaucaaa

SEQ ID NO: 3130245 - RNA, 19 nt, Artificial Sequence
  Description of Artificial Sequence: Synthetic oligonucleotide
guugacugugacacacuuc

SEQ ID NO: 3130246 - RNA, 19 nt, Artificial Sequence
  Description of Artificial Sequence: Synthetic oligonucleotide
cuuuguugacugugacaca

SEQ ID NO: 3130247 - RNA, 19 nt, Artificial Sequence
  Description of Artificial Sequence: Synthetic oligonucleotide
acucccuguuagcagcuuu

SEQ ID NO: 3130248 - RNA, 19 nt, Artificial Sequence
  Description of Artificial Sequence: Synthetic oligonucleotide
caaacuccaaacucugcau

SEQ ID NO: 3130249 - RNA, 19 nt, Artificial Sequence
  Description of Artificial Sequence: Synthetic oligonucleotide
aguucucuucagaucucca

SEQ ID NO: 3130250 - RNA, 19 nt, Artificial Sequence
  Description of Artificial Sequence: Synthetic oligonucleotide
gugacacacuucuuucucu

SEQ ID NO: 3130251 - RNA, 19 nt, Artificial Sequence
  Description of Artificial Sequence: Synthetic oligonucleotide
cuugggcuguuugcacucc

SEQ ID NO: 3130252 - RNA, 19 nt, Artificial Sequence
  Description of Artificial Sequence: Synthetic oligonucleotide
ugacugugacacacuucuu

SEQ ID NO: 3130253 - RNA, 19 nt, Artificial Sequence
  Description of Artificial Sequence: Synthetic oligonucleotide
gcaucuccaugucugaugu

SEQ ID NO: 3130254 - RNA, 19 nt, Artificial Sequence
  Description of Artificial Sequence: Synthetic oligonucleotide
gucugaugucaaaaguucu

SEQ ID NO: 3130255 - RNA, 19 nt, Artificial Sequence
  Description of Artificial Sequence: Synthetic oligonucleotide
caaaaccagcugggcaaac

SEQ ID NO: 3130256 - RNA, 19 nt, Artificial Sequence
  Description of Artificial Sequence: Synthetic oligonucleotide
cugugacacacuucuuucu

SEQ ID NO: 3130257 - RNA, 19 nt, Artificial Sequence
  Description of Artificial Sequence: Synthetic oligonucleotide
caucuccaugucugauguc

SEQ ID NO: 3130258 - RNA, 19 nt, Artificial Sequence
  Description of Artificial Sequence: Synthetic oligonucleotide
cucuugggcuguuugcacu

SEQ ID NO: 3130259 - RNA, 19 nt, Artificial Sequence
  Description of Artificial Sequence: Synthetic oligonucleotide
cacuggaucaaagcaagau

SEQ ID NO: 3130260 - RNA, 19 nt, Artificial Sequence
  Description of Artificial Sequence: Synthetic oligonucleotide
acacuggaucaaagcaaga

SEQ ID NO: 3130261 - RNA, 19 nt, Artificial Sequence
  Description of Artificial Sequence: Synthetic oligonucleotide
cuguuugcacucccuguua

SEQ ID NO: 3130262 - RNA, 19 nt, Artificial Sequence
  Description of Artificial Sequence: Synthetic oligonucleotide
ucuuucucuugggcuguuu

SEQ ID NO: 3130263 - RNA, 19 nt, Artificial Sequence
  Description of Artificial Sequence: Synthetic oligonucleotide
cagcugggcaaacuccaaa

SEQ ID NO: 3130264 - RNA, 19 nt, Artificial Sequence
  Description of Artificial Sequence: Synthetic oligonucleotide
gcugggcaaacuccaaacu

SEQ ID NO: 3130265 - RNA, 19 nt, Artificial Sequence
  Description of Artificial Sequence: Synthetic oligonucleotide
ggcuguuugcacucccugu

SEQ ID NO: 3130266 - RNA, 19 nt, Artificial Sequence
  Description of Artificial Sequence: Synthetic oligonucleotide
gcuguuugcacucccuguu

SEQ ID NO: 3130267 - RNA, 19 nt, Artificial Sequence
  Description of Artificial Sequence: Synthetic oligonucleotide
uucuuucucuugggcuguu

SEQ ID NO: 3130268 - RNA, 19 nt, Artificial Sequence
  Description of Artificial Sequence: Synthetic oligonucleotide
ccaaacucugcaucuccau

SEQ ID NO: 3130269 - RNA, 19 nt, Artificial Sequence
  Description of Artificial Sequence: Synthetic oligonucleotide
cuccaacuccuuucagcuu

SEQ ID NO: 3130270 - RNA, 19 nt, Artificial Sequence
  Description of Artificial Sequence: Synthetic oligonucleotide
ccagcugggcaaacuccaa

SEQ ID NO: 3130271 - RNA, 19 nt, Artificial Sequence
  Description of Artificial Sequence: Synthetic oligonucleotide
cccuguuagcagcuuuccu

SEQ ID NO: 3130272 - RNA, 19 nt, Artificial Sequence
  Description of Artificial Sequence: Synthetic oligonucleotide
caacuccuuucagcuuugu

SEQ ID NO: 3130273 - RNA, 19 nt, Artificial Sequence
  Description of Artificial Sequence: Synthetic oligonucleotide
gcacucccuguuagcagcu

SEQ ID NO: 3130274 - RNA, 19 nt, Artificial Sequence
  Description of Artificial Sequence: Synthetic oligonucleotide
gauuaaauagaccacagag

SEQ ID NO: 3130275 - RNA, 19 nt, Artificial Sequence
  Description of Artificial Sequence: Synthetic oligonucleotide
uuaaauagaccacagagca

SEQ ID NO: 3130276 - RNA, 19 nt, Artificial Sequence
  Description of Artificial Sequence: Synthetic oligonucleotide
aaggaagcagauuaaauag

SEQ ID NO: 3130277 - RNA, 19 nt, Artificial Sequence
  Description of Artificial Sequence: Synthetic oligonucleotide
uuaugaacaggccagcacc

SEQ ID NO: 3130278 - RNA, 19 nt, Artificial Sequence
  Description of Artificial Sequence: Synthetic oligonucleotide
ugauuugugcccaacaucu

SEQ ID NO: 3130279 - RNA, 19 nt, Artificial Sequence
  Description of Artificial Sequence: Synthetic oligonucleotide
auuaaauagaccacagagc

SEQ ID NO: 3130280 - RNA, 19 nt, Artificial Sequence
  Description of Artificial Sequence: Synthetic oligonucleotide
auaggauccugauuugugc

SEQ ID NO: 3130281 - RNA, 19 nt, Artificial Sequence
  Description of Artificial Sequence: Synthetic oligonucleotide
uucagaaggaagcagauua

SEQ ID NO: 3130282 - RNA, 19 nt, Artificial Sequence
  Description of Artificial Sequence: Synthetic oligonucleotide
aaugccuggggacagggag

SEQ ID NO: 3130283 - RNA, 19 nt, Artificial Sequence
  Description of Artificial Sequence: Synthetic oligonucleotide
acaguucccaguuaugaac

SEQ ID NO: 3130284 - RNA, 19 nt, Artificial Sequence
  Description of Artificial Sequence: Synthetic oligonucleotide
ucaaggaagcagaaggaag

SEQ ID NO: 3130285 - RNA, 19 nt, Artificial Sequence
  Description of Artificial Sequence: Synthetic oligonucleotide
uucccaguuaugaacaggc

SEQ ID NO: 3130286 - RNA, 19 nt, Artificial Sequence
  Description of Artificial Sequence: Synthetic oligonucleotide
ucucucaucauacccagac

SEQ ID NO: 3130287 - RNA, 19 nt, Artificial Sequence
  Description of Artificial Sequence: Synthetic oligonucleotide
uauaggauccugauuugug

SEQ ID NO: 3130288 - RNA, 19 nt, Artificial Sequence
  Description of Artificial Sequence: Synthetic oligonucleotide
aaauagaccacagagcauu

SEQ ID NO: 3130289 - RNA, 19 nt, Artificial Sequence
  Description of Artificial Sequence: Synthetic oligonucleotide
uuuucauacaguucccagu

SEQ ID NO: 3130290 - RNA, 19 nt, Artificial Sequence
  Description of Artificial Sequence: Synthetic oligonucleotide
gaaggaagcagauuaaaua

SEQ ID NO: 3130291 - RNA, 19 nt, Artificial Sequence
  Description of Artificial Sequence: Synthetic oligonucleotide
gagaggaagagugugcagg

SEQ ID NO: 3130292 - RNA, 19 nt, Artificial Sequence
  Description of Artificial Sequence: Synthetic oligonucleotide
gggucaaggaagcagaagg

SEQ ID NO: 3130293 - RNA, 19 nt, Artificial Sequence
  Description of Artificial Sequence: Synthetic oligonucleotide
uucauuccccuuuucauac

SEQ ID NO: 3130294 - RNA, 19 nt, Artificial Sequence
  Description of Artificial Sequence: Synthetic oligonucleotide
uuucauacaguucccaguu

SEQ ID NO: 3130295 - RNA, 19 nt, Artificial Sequence
  Description of Artificial Sequence: Synthetic oligonucleotide
ucuggaaucucucaucaua

SEQ ID NO: 3130296 - RNA, 19 nt, Artificial Sequence
  Description of Artificial Sequence: Synthetic oligonucleotide
agaggaagagugugcaggg

SEQ ID NO: 3130297 - RNA, 19 nt, Artificial Sequence
  Description of Artificial Sequence: Synthetic oligonucleotide
accacagagcauucauucc

SEQ ID NO: 3130298 - RNA, 19 nt, Artificial Sequence
  Description of Artificial Sequence: Synthetic oligonucleotide
uccuucagaaggaagcaga

SEQ ID NO: 3130299 - RNA, 19 nt, Artificial Sequence
  Description of Artificial Sequence: Synthetic oligonucleotide
aggauccugauuugugccc

SEQ ID NO: 3130300 - RNA, 19 nt, Artificial Sequence
  Description of Artificial Sequence: Synthetic oligonucleotide
cuuuucauacaguucccag

SEQ ID NO: 3130301 - RNA, 19 nt, Artificial Sequence
  Description of Artificial Sequence: Synthetic oligonucleotide
ucauacaguucccaguuau

SEQ ID NO: 3130302 - RNA, 19 nt, Artificial Sequence
  Description of Artificial Sequence: Synthetic oligonucleotide
cagauuaaauagaccacag

SEQ ID NO: 3130303 - RNA, 19 nt, Artificial Sequence
  Description of Artificial Sequence: Synthetic oligonucleotide
aucauacccagacuccuuc

SEQ ID NO: 3130304 - RNA, 19 nt, Artificial Sequence
  Description of Artificial Sequence: Synthetic oligonucleotide
gacuccuucagaaggaagc

SEQ ID NO: 3130305 - RNA, 19 nt, Artificial Sequence
  Description of Artificial Sequence: Synthetic oligonucleotide
gaccacagagcauucauuc

SEQ ID NO: 3130306 - RNA, 19 nt, Artificial Sequence
  Description of Artificial Sequence: Synthetic oligonucleotide
caggccagcaccauauagg

SEQ ID NO: 3130307 - RNA, 19 nt, Artificial Sequence
  Description of Artificial Sequence: Synthetic oligonucleotide
cuggaaucucucaucauac

SEQ ID NO: 3130308 - RNA, 19 nt, Artificial Sequence
  Description of Artificial Sequence: Synthetic oligonucleotide
uaugaacaggccagcacca

SEQ ID NO: 3130309 - RNA, 19 nt, Artificial Sequence
  Description of Artificial Sequence: Synthetic oligonucleotide
uaggauccugauuugugcc

SEQ ID NO: 3130310 - RNA, 19 nt, Artificial Sequence
  Description of Artificial Sequence: Synthetic oligonucleotide
agauuaaauagaccacaga

SEQ ID NO: 3130311 - RNA, 19 nt, Artificial Sequence
  Description of Artificial Sequence: Synthetic oligonucleotide
ggaaucucucaucauaccc

SEQ ID NO: 3130312 - RNA, 19 nt, Artificial Sequence
  Description of Artificial Sequence: Synthetic oligonucleotide
agcagauuaaauagaccac

SEQ ID NO: 3130313 - RNA, 19 nt, Artificial Sequence
  Description of Artificial Sequence: Synthetic oligonucleotide
cucaucauacccagacucc

SEQ ID NO: 3130314 - RNA, 19 nt, Artificial Sequence
  Description of Artificial Sequence: Synthetic oligonucleotide
caucuugguccccagaaug

SEQ ID NO: 3130315 - RNA, 19 nt, Artificial Sequence
  Description of Artificial Sequence: Synthetic oligonucleotide
gaagcagauuaaauagacc

SEQ ID NO: 3130316 - RNA, 19 nt, Artificial Sequence
  Description of Artificial Sequence: Synthetic oligonucleotide
guuaugaacaggccagcac

SEQ ID NO: 3130317 - RNA, 19 nt, Artificial Sequence
  Description of Artificial Sequence: Synthetic oligonucleotide
gaaucucucaucauaccca

SEQ ID NO: 3130318 - RNA, 19 nt, Artificial Sequence
  Description of Artificial Sequence: Synthetic oligonucleotide
aucuugguccccagaaugc

SEQ ID NO: 3130319 - RNA, 19 nt, Artificial Sequence
  Description of Artificial Sequence: Synthetic oligonucleotide
aauagaccacagagcauuc

SEQ ID NO: 3130320 - RNA, 19 nt, Artificial Sequence
  Description of Artificial Sequence: Synthetic oligonucleotide
acaggccagcaccauauag

SEQ ID NO: 3130321 - RNA, 19 nt, Artificial Sequence
  Description of Artificial Sequence: Synthetic oligonucleotide
ucagaaggaagcagauuaa

SEQ ID NO: 3130322 - RNA, 19 nt, Artificial Sequence
  Description of Artificial Sequence: Synthetic oligonucleotide
agagcauucauuccccuuu

SEQ ID NO: 3130323 - RNA, 19 nt, Artificial Sequence
  Description of Artificial Sequence: Synthetic oligonucleotide
auacaguucccaguuauga

SEQ ID NO: 3130324 - RNA, 19 nt, Artificial Sequence
  Description of Artificial Sequence: Synthetic oligonucleotide
uagaccacagagcauucau

SEQ ID NO: 3130325 - RNA, 19 nt, Artificial Sequence
  Description of Artificial Sequence: Synthetic oligonucleotide
ccaguuaugaacaggccag

SEQ ID NO: 3130326 - RNA, 19 nt, Artificial Sequence
  Description of Artificial Sequence: Synthetic oligonucleotide
uaaauagaccacagagcau

SEQ ID NO: 3130327 - RNA, 19 nt, Artificial Sequence
  Description of Artificial Sequence: Synthetic oligonucleotide
ccccuuuucauacaguucc

SEQ ID NO: 3130328 - RNA, 19 nt, Artificial Sequence
  Description of Artificial Sequence: Synthetic oligonucleotide
uggaaucucucaucauacc

SEQ ID NO: 3130329 - RNA, 19 nt, Artificial Sequence
  Description of Artificial Sequence: Synthetic oligonucleotide
uccugauuugugcccaaca

SEQ ID NO: 3130330 - RNA, 19 nt, Artificial Sequence
  Description of Artificial Sequence: Synthetic oligonucleotide
cacagagcauucauucccc

SEQ ID NO: 3130331 - RNA, 19 nt, Artificial Sequence
  Description of Artificial Sequence: Synthetic oligonucleotide
cauauaggauccugauuug

SEQ ID NO: 3130332 - RNA, 19 nt, Artificial Sequence
  Description of Artificial Sequence: Synthetic oligonucleotide
cauuccccuuuucauacag

SEQ ID NO: 3130333 - RNA, 19 nt, Artificial Sequence
  Description of Artificial Sequence: Synthetic oligonucleotide
cugauuugugcccaacauc

SEQ ID NO: 3130334 - RNA, 19 nt, Artificial Sequence
  Description of Artificial Sequence: Synthetic oligonucleotide
uuccccuuuucauacaguu

SEQ ID NO: 3130335 - RNA, 19 nt, Artificial Sequence
  Description of Artificial Sequence: Synthetic oligonucleotide
ucaucauacccagacuccu

SEQ ID NO: 3130336 - RNA, 19 nt, Artificial Sequence
  Description of Artificial Sequence: Synthetic oligonucleotide
uacaguucccaguuaugaa

SEQ ID NO: 3130337 - RNA, 19 nt, Artificial Sequence
  Description of Artificial Sequence: Synthetic oligonucleotide
aggccagcaccauauagga

SEQ ID NO: 3130338 - RNA, 19 nt, Artificial Sequence
  Description of Artificial Sequence: Synthetic oligonucleotide
cauacaguucccaguuaug

SEQ ID NO: 3130339 - RNA, 19 nt, Artificial Sequence
  Description of Artificial Sequence: Synthetic oligonucleotide
uccuucuggaaucucucau

SEQ ID NO: 3130340 - RNA, 19 nt, Artificial Sequence
  Description of Artificial Sequence: Synthetic oligonucleotide
gccagcaccauauaggauc

SEQ ID NO: 3130341 - RNA, 19 nt, Artificial Sequence
  Description of Artificial Sequence: Synthetic oligonucleotide
ucuugguccccagaaugcc

SEQ ID NO: 3130342 - RNA, 19 nt, Artificial Sequence
  Description of Artificial Sequence: Synthetic oligonucleotide
aguucccaguuaugaacag

SEQ ID NO: 3130343 - RNA, 19 nt, Artificial Sequence
  Description of Artificial Sequence: Synthetic oligonucleotide
ucccaguuaugaacaggcc

SEQ ID NO: 3130344 - RNA, 19 nt, Artificial Sequence
  Description of Artificial Sequence: Synthetic oligonucleotide
uccccagaaugccugggga

SEQ ID NO: 3130345 - RNA, 19 nt, Artificial Sequence
  Description of Artificial Sequence: Synthetic oligonucleotide
auauaggauccugauuugu

SEQ ID NO: 3130346 - RNA, 19 nt, Artificial Sequence
  Description of Artificial Sequence: Synthetic oligonucleotide
gguggggagaggaagagug

SEQ ID NO: 3130347 - RNA, 19 nt, Artificial Sequence
  Description of Artificial Sequence: Synthetic oligonucleotide
uggggagaggaagagugug

SEQ ID NO: 3130348 - RNA, 19 nt, Artificial Sequence
  Description of Artificial Sequence: Synthetic oligonucleotide
cuggggacagggaguaggg

SEQ ID NO: 3130349 - RNA, 19 nt, Artificial Sequence
  Description of Artificial Sequence: Synthetic oligonucleotide
ucauacccagacuccuuca

SEQ ID NO: 3130350 - RNA, 19 nt, Artificial Sequence
  Description of Artificial Sequence: Synthetic oligonucleotide
guucccaguuaugaacagg

SEQ ID NO: 3130351 - RNA, 19 nt, Artificial Sequence
  Description of Artificial Sequence: Synthetic oligonucleotide
agcauucauuccccuuuuc

SEQ ID NO: 3130352 - RNA, 19 nt, Artificial Sequence
  Description of Artificial Sequence: Synthetic oligonucleotide
agaaggaagcagauuaaau

SEQ ID NO: 3130353 - RNA, 19 nt, Artificial Sequence
  Description of Artificial Sequence: Synthetic oligonucleotide
cccagacuccuucagaagg

SEQ ID NO: 3130354 - RNA, 19 nt, Artificial Sequence
  Description of Artificial Sequence: Synthetic oligonucleotide
ugaacaggccagcaccaua

SEQ ID NO: 3130355 - RNA, 19 nt, Artificial Sequence
  Description of Artificial Sequence: Synthetic oligonucleotide
ccacagagcauucauuccc

SEQ ID NO: 3130356 - RNA, 19 nt, Artificial Sequence
  Description of Artificial Sequence: Synthetic oligonucleotide
caguucccaguuaugaaca

SEQ ID NO: 3130357 - RNA, 19 nt, Artificial Sequence
  Description of Artificial Sequence: Synthetic oligonucleotide
uccccuuuucauacaguuc

SEQ ID NO: 3130358 - RNA, 19 nt, Artificial Sequence
  Description of Artificial Sequence: Synthetic oligonucleotide
agcaccauauaggauccug

SEQ ID NO: 3130359 - RNA, 19 nt, Artificial Sequence
  Description of Artificial Sequence: Synthetic oligonucleotide
gagugugcagggcuggguc

SEQ ID NO: 3130360 - RNA, 19 nt, Artificial Sequence
  Description of Artificial Sequence: Synthetic oligonucleotide
accauauaggauccugauu

SEQ ID NO: 3130361 - RNA, 19 nt, Artificial Sequence
  Description of Artificial Sequence: Synthetic oligonucleotide
agauccuucuggaaucucu

SEQ ID NO: 3130362 - RNA, 19 nt, Artificial Sequence
  Description of Artificial Sequence: Synthetic oligonucleotide
aguuaugaacaggccagca

SEQ ID NO: 3130363 - RNA, 19 nt, Artificial Sequence
  Description of Artificial Sequence: Synthetic oligonucleotide
aggaagcagauuaaauaga

SEQ ID NO: 3130364 - RNA, 19 nt, Artificial Sequence
  Description of Artificial Sequence: Synthetic oligonucleotide
ugggucaaggaagcagaag

SEQ ID NO: 3130365 - RNA, 19 nt, Artificial Sequence
  Description of Artificial Sequence: Synthetic oligonucleotide
gauccuucuggaaucucuc

SEQ ID NO: 3130366 - RNA, 19 nt, Artificial Sequence
  Description of Artificial Sequence: Synthetic oligonucleotide
gcagauuaaauagaccaca

SEQ ID NO: 3130367 - RNA, 19 nt, Artificial Sequence
  Description of Artificial Sequence: Synthetic oligonucleotide
gggaguagggcacgguggg

SEQ ID NO: 3130368 - RNA, 19 nt, Artificial Sequence
  Description of Artificial Sequence: Synthetic oligonucleotide
uagggcacgguggggagag

SEQ ID NO: 3130369 - RNA, 19 nt, Artificial Sequence
  Description of Artificial Sequence: Synthetic oligonucleotide
agugugcagggcuggguca

SEQ ID NO: 3130370 - RNA, 19 nt, Artificial Sequence
  Description of Artificial Sequence: Synthetic oligonucleotide
acccagacuccuucagaag

SEQ ID NO: 3130371 - RNA, 19 nt, Artificial Sequence
  Description of Artificial Sequence: Synthetic oligonucleotide
acuccuucagaaggaagca

SEQ ID NO: 3130372 - RNA, 19 nt, Artificial Sequence
  Description of Artificial Sequence: Synthetic oligonucleotide
uucauacaguucccaguua

SEQ ID NO: 3130373 - RNA, 19 nt, Artificial Sequence
  Description of Artificial Sequence: Synthetic oligonucleotide
auccuucuggaaucucuca

SEQ ID NO: 3130374 - RNA, 19 nt, Artificial Sequence
  Description of Artificial Sequence: Synthetic oligonucleotide
ucauuccccuuuucauaca

SEQ ID NO: 3130375 - RNA, 19 nt, Artificial Sequence
  Description of Artificial Sequence: Synthetic oligonucleotide
acaucuugguccccagaau

SEQ ID NO: 3130376 - RNA, 19 nt, Artificial Sequence
  Description of Artificial Sequence: Synthetic oligonucleotide
ugcagggcugggucaagga

SEQ ID NO: 3130377 - RNA, 19 nt, Artificial Sequence
  Description of Artificial Sequence: Synthetic oligonucleotide
gcauucauuccccuuuuca

SEQ ID NO: 3130378 - RNA, 19 nt, Artificial Sequence
  Description of Artificial Sequence: Synthetic oligonucleotide
uugugcccaacaucuuggu

SEQ ID NO: 3130379 - RNA, 19 nt, Artificial Sequence
  Description of Artificial Sequence: Synthetic oligonucleotide
ccagcaccauauaggaucc

SEQ ID NO: 3130380 - RNA, 19 nt, Artificial Sequence
  Description of Artificial Sequence: Synthetic oligonucleotide
cauucauuccccuuuucau

SEQ ID NO: 3130381 - RNA, 19 nt, Artificial Sequence
  Description of Artificial Sequence: Synthetic oligonucleotide
caguuaugaacaggccagc

SEQ ID NO: 3130382 - RNA, 19 nt, Artificial Sequence
  Description of Artificial Sequence: Synthetic oligonucleotide
cuccuucagaaggaagcag

SEQ ID NO: 3130383 - RNA, 19 nt, Artificial Sequence
  Description of Artificial Sequence: Synthetic oligonucleotide
gacagggaguagggcacgg

SEQ ID NO: 3130384 - RNA, 19 nt, Artificial Sequence
  Description of Artificial Sequence: Synthetic oligonucleotide
ccauauaggauccugauuu

SEQ ID NO: 3130385 - RNA, 19 nt, Artificial Sequence
  Description of Artificial Sequence: Synthetic oligonucleotide
gucaaggaagcagaaggaa

SEQ ID NO: 3130386 - RNA, 19 nt, Artificial Sequence
  Description of Artificial Sequence: Synthetic oligonucleotide
ggggacagggaguagggca

SEQ ID NO: 3130387 - RNA, 19 nt, Artificial Sequence
  Description of Artificial Sequence: Synthetic oligonucleotide
auccugauuugugcccaac

SEQ ID NO: 3130388 - RNA, 19 nt, Artificial Sequence
  Description of Artificial Sequence: Synthetic oligonucleotide
auagaccacagagcauuca

SEQ ID NO: 3130389 - RNA, 19 nt, Artificial Sequence
  Description of Artificial Sequence: Synthetic oligonucleotide
agacuccuucagaaggaag

SEQ ID NO: 3130390 - RNA, 19 nt, Artificial Sequence
  Description of Artificial Sequence: Synthetic oligonucleotide
aacaggccagcaccauaua

SEQ ID NO: 3130391 - RNA, 19 nt, Artificial Sequence
  Description of Artificial Sequence: Synthetic oligonucleotide
gaacaggccagcaccauau

SEQ ID NO: 3130392 - RNA, 19 nt, Artificial Sequence
  Description of Artificial Sequence: Synthetic oligonucleotide
cccaguuaugaacaggcca

SEQ ID NO: 3130393 - RNA, 19 nt, Artificial Sequence
  Description of Artificial Sequence: Synthetic oligonucleotide
uggggacagggaguagggc

SEQ ID NO: 3130394 - RNA, 19 nt, Artificial Sequence
  Description of Artificial Sequence: Synthetic oligonucleotide
ccuggggacagggaguagg

SEQ ID NO: 3130395 - RNA, 19 nt, Artificial Sequence
  Description of Artificial Sequence: Synthetic oligonucleotide
cagaaggaagcagauuaaa

SEQ ID NO: 3130396 - RNA, 19 nt, Artificial Sequence
  Description of Artificial Sequence: Synthetic oligonucleotide
ggucaaggaagcagaagga

SEQ ID NO: 3130397 - RNA, 19 nt, Artificial Sequence
  Description of Artificial Sequence: Synthetic oligonucleotide
agagugugcagggcugggu

SEQ ID NO: 3130398 - RNA, 19 nt, Artificial Sequence
  Description of Artificial Sequence: Synthetic oligonucleotide
gcugggucaaggaagcaga

SEQ ID NO: 3130399 - RNA, 19 nt, Artificial Sequence
  Description of Artificial Sequence: Synthetic oligonucleotide
cccuuuucauacaguuccc

SEQ ID NO: 3130400 - RNA, 19 nt, Artificial Sequence
  Description of Artificial Sequence: Synthetic oligonucleotide
gugcagggcugggucaagg

SEQ ID NO: 3130401 - RNA, 19 nt, Artificial Sequence
  Description of Artificial Sequence: Synthetic oligonucleotide
gggagaggaagagugugca

SEQ ID NO: 3130402 - RNA, 19 nt, Artificial Sequence
  Description of Artificial Sequence: Synthetic oligonucleotide
ugugcagggcugggucaag

SEQ ID NO: 3130403 - RNA, 19 nt, Artificial Sequence
  Description of Artificial Sequence: Synthetic oligonucleotide
gauccugauuugugcccaa

SEQ ID NO: 3130404 - RNA, 19 nt, Artificial Sequence
  Description of Artificial Sequence: Synthetic oligonucleotide
ugccuggggacagggagua

SEQ ID NO: 3130405 - RNA, 19 nt, Artificial Sequence
  Description of Artificial Sequence: Synthetic oligonucleotide
ggggagaggaagagugugc

SEQ ID NO: 3130406 - RNA, 19 nt, Artificial Sequence
  Description of Artificial Sequence: Synthetic oligonucleotide
gggacagggaguagggcac

SEQ ID NO: 3130407 - RNA, 19 nt, Artificial Sequence
  Description of Artificial Sequence: Synthetic oligonucleotide
caccauauaggauccugau

SEQ ID NO: 3130408 - RNA, 19 nt, Artificial Sequence
  Description of Artificial Sequence: Synthetic oligonucleotide
agaccacagagcauucauu

SEQ ID NO: 3130409 - RNA, 19 nt, Artificial Sequence
  Description of Artificial Sequence: Synthetic oligonucleotide
ggauccugauuugugccca

SEQ ID NO: 3130410 - RNA, 19 nt, Artificial Sequence
  Description of Artificial Sequence: Synthetic oligonucleotide
caacaucuugguccccaga

SEQ ID NO: 3130411 - RNA, 19 nt, Artificial Sequence
  Description of Artificial Sequence: Synthetic oligonucleotide
cuugguccccagaaugccu

SEQ ID NO: 3130412 - RNA, 19 nt, Artificial Sequence
  Description of Artificial Sequence: Synthetic oligonucleotide
cugggucaaggaagcagaa

SEQ ID NO: 3130413 - RNA, 19 nt, Artificial Sequence
  Description of Artificial Sequence: Synthetic oligonucleotide
ccaacaucuugguccccag

SEQ ID NO: 3130414 - RNA, 19 nt, Artificial Sequence
  Description of Artificial Sequence: Synthetic oligonucleotide
augaacaggccagcaccau

SEQ ID NO: 3130415 - RNA, 19 nt, Artificial Sequence
  Description of Artificial Sequence: Synthetic oligonucleotide
augccuggggacagggagu

SEQ ID NO: 3130416 - RNA, 19 nt, Artificial Sequence
  Description of Artificial Sequence: Synthetic oligonucleotide
gcaccauauaggauccuga

SEQ ID NO: 3130417 - RNA, 19 nt, Artificial Sequence
  Description of Artificial Sequence: Synthetic oligonucleotide
ggacagggaguagggcacg

SEQ ID NO: 3130418 - RNA, 19 nt, Artificial Sequence
  Description of Artificial Sequence: Synthetic oligonucleotide
ccccagaaugccuggggac

SEQ ID NO: 3130419 - RNA, 19 nt, Artificial Sequence
  Description of Artificial Sequence: Synthetic oligonucleotide
gguccccagaaugccuggg

SEQ ID NO: 3130420 - RNA, 19 nt, Artificial Sequence
  Description of Artificial Sequence: Synthetic oligonucleotide
ccagaaugccuggggacag

SEQ ID NO: 3130421 - RNA, 19 nt, Artificial Sequence
  Description of Artificial Sequence: Synthetic oligonucleotide
gagcauucauuccccuuuu

SEQ ID NO: 3130422 - RNA, 19 nt, Artificial Sequence
  Description of Artificial Sequence: Synthetic oligonucleotide
aucucucaucauacccaga

SEQ ID NO: 3130423 - RNA, 19 nt, Artificial Sequence
  Description of Artificial Sequence: Synthetic oligonucleotide
cagacuccuucagaaggaa

SEQ ID NO: 3130424 - RNA, 19 nt, Artificial Sequence
  Description of Artificial Sequence: Synthetic oligonucleotide
ccuuuucauacaguuccca

SEQ ID NO: 3130425 - RNA, 19 nt, Artificial Sequence
  Description of Artificial Sequence: Synthetic oligonucleotide
gauuugugcccaacaucuu

SEQ ID NO: 3130426 - RNA, 19 nt, Artificial Sequence
  Description of Artificial Sequence: Synthetic oligonucleotide
guagggcacgguggggaga

SEQ ID NO: 3130427 - RNA, 19 nt, Artificial Sequence
  Description of Artificial Sequence: Synthetic oligonucleotide
caucauacccagacuccuu

SEQ ID NO: 3130428 - RNA, 19 nt, Artificial Sequence
  Description of Artificial Sequence: Synthetic oligonucleotide
ccugauuugugcccaacau

SEQ ID NO: 3130429 - RNA, 19 nt, Artificial Sequence
  Description of Artificial Sequence: Synthetic oligonucleotide
gugugcagggcugggucaa

SEQ ID NO: 3130430 - RNA, 19 nt, Artificial Sequence
  Description of Artificial Sequence: Synthetic oligonucleotide
cccagaaugccuggggaca

SEQ ID NO: 3130431 - RNA, 19 nt, Artificial Sequence
  Description of Artificial Sequence: Synthetic oligonucleotide
cuucagaaggaagcagauu

SEQ ID NO: 3130432 - RNA, 19 nt, Artificial Sequence
  Description of Artificial Sequence: Synthetic oligonucleotide
ccuucagaaggaagcagau

SEQ ID NO: 3130433 - RNA, 19 nt, Artificial Sequence
  Description of Artificial Sequence: Synthetic oligonucleotide
guggggagaggaagagugu

SEQ ID NO: 3130434 - RNA, 19 nt, Artificial Sequence
  Description of Artificial Sequence: Synthetic oligonucleotide
cccaacaucuuggucccca

SEQ ID NO: 3130435 - RNA, 19 nt, Artificial Sequence
  Description of Artificial Sequence: Synthetic oligonucleotide
gggcacgguggggagagga

SEQ ID NO: 3130436 - RNA, 19 nt, Artificial Sequence
  Description of Artificial Sequence: Synthetic oligonucleotide
agggcacgguggggagagg

SEQ ID NO: 3130437 - RNA, 19 nt, Artificial Sequence
  Description of Artificial Sequence: Synthetic oligonucleotide
ggcacgguggggagaggaa

SEQ ID NO: 3130438 - RNA, 19 nt, Artificial Sequence
  Description of Artificial Sequence: Synthetic oligonucleotide
gggcugggucaaggaagca

SEQ ID NO: 3130439 - RNA, 19 nt, Artificial Sequence
  Description of Artificial Sequence: Synthetic oligonucleotide
gcccaacaucuuggucccc

SEQ ID NO: 3130440 - RNA, 19 nt, Artificial Sequence
  Description of Artificial Sequence: Synthetic oligonucleotide
cagcaccauauaggauccu

SEQ ID NO: 3130441 - RNA, 19 nt, Artificial Sequence
  Description of Artificial Sequence: Synthetic oligonucleotide
ggccagcaccauauaggau

SEQ ID NO: 3130442 - RNA, 19 nt, Artificial Sequence
  Description of Artificial Sequence: Synthetic oligonucleotide
cgguggggagaggaagagu

SEQ ID NO: 3130443 - RNA, 19 nt, Artificial Sequence
  Description of Artificial Sequence: Synthetic oligonucleotide
uuugaacagauuccuaggg

SEQ ID NO: 3130444 - RNA, 19 nt, Artificial Sequence
  Description of Artificial Sequence: Synthetic oligonucleotide
ucugcaaacccucucagag

SEQ ID NO: 3130445 - RNA, 19 nt, Artificial Sequence
  Description of Artificial Sequence: Synthetic oligonucleotide
gagaaaagcagcuaucgcc

SEQ ID NO: 3130446 - RNA, 19 nt, Artificial Sequence
  Description of Artificial Sequence: Synthetic oligonucleotide
aaacuagggcacuaccucg

SEQ ID NO: 3130447 - RNA, 19 nt, Artificial Sequence
  Description of Artificial Sequence: Synthetic oligonucleotide
gauuccuagggcuugucgg

SEQ ID NO: 3130448 - RNA, 19 nt, Artificial Sequence
  Description of Artificial Sequence: Synthetic oligonucleotide
ugagcuuugaacagauucc

SEQ ID NO: 3130449 - RNA, 19 nt, Artificial Sequence
  Description of Artificial Sequence: Synthetic oligonucleotide
agaaaagcagcuaucgccc

SEQ ID NO: 3130450 - RNA, 19 nt, Artificial Sequence
  Description of Artificial Sequence: Synthetic oligonucleotide
ucagguuguccacagauac

SEQ ID NO: 3130451 - RNA, 19 nt, Artificial Sequence
  Description of Artificial Sequence: Synthetic oligonucleotide
cuuugaacagauuccuagg

SEQ ID NO: 3130452 - RNA, 19 nt, Artificial Sequence
  Description of Artificial Sequence: Synthetic oligonucleotide
acuaccucgcaucuucagc

SEQ ID NO: 3130453 - RNA, 19 nt, Artificial Sequence
  Description of Artificial Sequence: Synthetic oligonucleotide
guuguccacagauacacag

SEQ ID NO: 3130454 - RNA, 19 nt, Artificial Sequence
  Description of Artificial Sequence: Synthetic oligonucleotide
ugcaaacccucucagagcu

SEQ ID NO: 3130455 - RNA, 19 nt, Artificial Sequence
  Description of Artificial Sequence: Synthetic oligonucleotide
uugaacagauuccuagggc

SEQ ID NO: 3130456 - RNA, 19 nt, Artificial Sequence
  Description of Artificial Sequence: Synthetic oligonucleotide
cugagcuuugaacagauuc

SEQ ID NO: 3130457 - RNA, 19 nt, Artificial Sequence
  Description of Artificial Sequence: Synthetic oligonucleotide
agguuguccacagauacac

SEQ ID NO: 3130458 - RNA, 19 nt, Artificial Sequence
  Description of Artificial Sequence: Synthetic oligonucleotide
cugagaaaagcagcuaucg

SEQ ID NO: 3130459 - RNA, 19 nt, Artificial Sequence
  Description of Artificial Sequence: Synthetic oligonucleotide
ucagcugagcuuugaacag

SEQ ID NO: 3130460 - RNA, 19 nt, Artificial Sequence
  Description of Artificial Sequence: Synthetic oligonucleotide
aaaagcagcuaucgcccag

SEQ ID NO: 3130461 - RNA, 19 nt, Artificial Sequence
  Description of Artificial Sequence: Synthetic oligonucleotide
gcagcuaucgcccaggggc

SEQ ID NO: 3130462 - RNA, 19 nt, Artificial Sequence
  Description of Artificial Sequence: Synthetic oligonucleotide
ucagagcucaccccaaacu

SEQ ID NO: 3130463 - RNA, 19 nt, Artificial Sequence
  Description of Artificial Sequence: Synthetic oligonucleotide
aacuagggcacuaccucgc

SEQ ID NO: 3130464 - RNA, 19 nt, Artificial Sequence
  Description of Artificial Sequence: Synthetic oligonucleotide
cuaucuaggguuccucugc

SEQ ID NO: 3130465 - RNA, 19 nt, Artificial Sequence
  Description of Artificial Sequence: Synthetic oligonucleotide
uuggcagucugagaaaagc

SEQ ID NO: 3130466 - RNA, 19 nt, Artificial Sequence
  Description of Artificial Sequence: Synthetic oligonucleotide
acccucucagagcucaccc

SEQ ID NO: 3130467 - RNA, 19 nt, Artificial Sequence
  Description of Artificial Sequence: Synthetic oligonucleotide
agauuccuagggcuugucg

SEQ ID NO: 3130468 - RNA, 19 nt, Artificial Sequence
  Description of Artificial Sequence: Synthetic oligonucleotide
caaacuagggcacuaccuc

SEQ ID NO: 3130469 - RNA, 19 nt, Artificial Sequence
  Description of Artificial Sequence: Synthetic oligonucleotide
agggcggcugcucaagccc

SEQ ID NO: 3130470 - RNA, 19 nt, Artificial Sequence
  Description of Artificial Sequence: Synthetic oligonucleotide
ucuaggguuccucugcaaa

SEQ ID NO: 3130471 - RNA, 19 nt, Artificial Sequence
  Description of Artificial Sequence: Synthetic oligonucleotide
aggaauccuaucuaggguu

SEQ ID NO: 3130472 - RNA, 19 nt, Artificial Sequence
  Description of Artificial Sequence: Synthetic oligonucleotide
aggguuccucugcaaaccc

SEQ ID NO: 3130473 - RNA, 19 nt, Artificial Sequence
  Description of Artificial Sequence: Synthetic oligonucleotide
uccucugcaaacccucuca

SEQ ID NO: 3130474 - RNA, 19 nt, Artificial Sequence
  Description of Artificial Sequence: Synthetic oligonucleotide
uggcagucugagaaaagca

SEQ ID NO: 3130475 - RNA, 19 nt, Artificial Sequence
  Description of Artificial Sequence: Synthetic oligonucleotide
aacccucucagagcucacc

SEQ ID NO: 3130476 - RNA, 19 nt, Artificial Sequence
  Description of Artificial Sequence: Synthetic oligonucleotide
uaucuaggguuccucugca

SEQ ID NO: 3130477 - RNA, 19 nt, Artificial Sequence
  Description of Artificial Sequence: Synthetic oligonucleotide
ugcugucaccucuuggcag

SEQ ID NO: 3130478 - RNA, 19 nt, Artificial Sequence
  Description of Artificial Sequence: Synthetic oligonucleotide
cuaggguuccucugcaaac

SEQ ID NO: 3130479 - RNA, 19 nt, Artificial Sequence
  Description of Artificial Sequence: Synthetic oligonucleotide
cucaccccaaacuagggca

SEQ ID NO: 3130480 - RNA, 19 nt, Artificial Sequence
  Description of Artificial Sequence: Synthetic oligonucleotide
aagcagcuaucgcccaggg

SEQ ID NO: 3130481 - RNA, 19 nt, Artificial Sequence
  Description of Artificial Sequence: Synthetic oligonucleotide
auuccuagggcuugucggu

SEQ ID NO: 3130482 - RNA, 19 nt, Artificial Sequence
  Description of Artificial Sequence: Synthetic oligonucleotide
gagcucaccccaaacuagg

SEQ ID NO: 3130483 - RNA, 19 nt, Artificial Sequence
  Description of Artificial Sequence: Synthetic oligonucleotide
uaggguuccucugcaaacc

SEQ ID NO: 3130484 - RNA, 19 nt, Artificial Sequence
  Description of Artificial Sequence: Synthetic oligonucleotide
uccuaucuaggguuccucu

SEQ ID NO: 3130485 - RNA, 19 nt, Artificial Sequence
  Description of Artificial Sequence: Synthetic oligonucleotide
uagggcacuaccucgcauc

SEQ ID NO: 3130486 - RNA, 19 nt, Artificial Sequence
  Description of Artificial Sequence: Synthetic oligonucleotide
cugcaaacccucucagagc

SEQ ID NO: 3130487 - RNA, 19 nt, Artificial Sequence
  Description of Artificial Sequence: Synthetic oligonucleotide
ucgcaucuucagcugagcu

SEQ ID NO: 3130488 - RNA, 19 nt, Artificial Sequence
  Description of Artificial Sequence: Synthetic oligonucleotide
ucuuggcagucugagaaaa

SEQ ID NO: 3130489 - RNA, 19 nt, Artificial Sequence
  Description of Artificial Sequence: Synthetic oligonucleotide
aauccuaucuaggguuccu

SEQ ID NO: 3130490 - RNA, 19 nt, Artificial Sequence
  Description of Artificial Sequence: Synthetic oligonucleotide
ucaccccaaacuagggcac

SEQ ID NO: 3130491 - RNA, 19 nt, Artificial Sequence
  Description of Artificial Sequence: Synthetic oligonucleotide
cuuggcagucugagaaaag

SEQ ID NO: 3130492 - RNA, 19 nt, Artificial Sequence
  Description of Artificial Sequence: Synthetic oligonucleotide
agagcucaccccaaacuag

SEQ ID NO: 3130493 - RNA, 19 nt, Artificial Sequence
  Description of Artificial Sequence: Synthetic oligonucleotide
aucgccucaggccuucuga

SEQ ID NO: 3130494 - RNA, 19 nt, Artificial Sequence
  Description of Artificial Sequence: Synthetic oligonucleotide
uccuagggcuugucgguag

SEQ ID NO: 3130495 - RNA, 19 nt, Artificial Sequence
  Description of Artificial Sequence: Synthetic oligonucleotide
gccucaggccuucugaggg

SEQ ID NO: 3130496 - RNA, 19 nt, Artificial Sequence
  Description of Artificial Sequence: Synthetic oligonucleotide
uucugagggcggcugcuca

SEQ ID NO: 3130497 - RNA, 19 nt, Artificial Sequence
  Description of Artificial Sequence: Synthetic oligonucleotide
gaaaagcagcuaucgccca

SEQ ID NO: 3130498 - RNA, 19 nt, Artificial Sequence
  Description of Artificial Sequence: Synthetic oligonucleotide
gaauccuaucuaggguucc

SEQ ID NO: 3130499 - RNA, 19 nt, Artificial Sequence
  Description of Artificial Sequence: Synthetic oligonucleotide
ggcagucugagaaaagcag

SEQ ID NO: 3130500 - RNA, 19 nt, Artificial Sequence
  Description of Artificial Sequence: Synthetic oligonucleotide
ucgccucaggccuucugag

SEQ ID NO: 3130501 - RNA, 19 nt, Artificial Sequence
  Description of Artificial Sequence: Synthetic oligonucleotide
aucgcccaggggcuccugc

SEQ ID NO: 3130502 - RNA, 19 nt, Artificial Sequence
  Description of Artificial Sequence: Synthetic oligonucleotide
aggggcuccugccaccauc

SEQ ID NO: 3130503 - RNA, 19 nt, Artificial Sequence
  Description of Artificial Sequence: Synthetic oligonucleotide
agcagcuaucgcccagggg

SEQ ID NO: 3130504 - RNA, 19 nt, Artificial Sequence
  Description of Artificial Sequence: Synthetic oligonucleotide
gucaccucuuggcagucug

SEQ ID NO: 3130505 - RNA, 19 nt, Artificial Sequence
  Description of Artificial Sequence: Synthetic oligonucleotide
gccaccaucgccucaggcc

SEQ ID NO: 3130506 - RNA, 19 nt, Artificial Sequence
  Description of Artificial Sequence: Synthetic oligonucleotide
cucagagcucaccccaaac

SEQ ID NO: 3130507 - RNA, 19 nt, Artificial Sequence
  Description of Artificial Sequence: Synthetic oligonucleotide
gagggcggcugcucaagcc

SEQ ID NO: 3130508 - RNA, 19 nt, Artificial Sequence
  Description of Artificial Sequence: Synthetic oligonucleotide
auccuaucuaggguuccuc

SEQ ID NO: 3130509 - RNA, 19 nt, Artificial Sequence
  Description of Artificial Sequence: Synthetic oligonucleotide
cucaggccuucugagggcg

SEQ ID NO: 3130510 - RNA, 19 nt, Artificial Sequence
  Description of Artificial Sequence: Synthetic oligonucleotide
ucaccucuuggcagucuga

SEQ ID NO: 3130511 - RNA, 19 nt, Artificial Sequence
  Description of Artificial Sequence: Synthetic oligonucleotide
ugagggcggcugcucaagc

SEQ ID NO: 3130512 - RNA, 19 nt, Artificial Sequence
  Description of Artificial Sequence: Synthetic oligonucleotide
uaccucgcaucuucagcug

SEQ ID NO: 3130513 - RNA, 19 nt, Artificial Sequence
  Description of Artificial Sequence: Synthetic oligonucleotide
ggcacuaccucgcaucuuc

SEQ ID NO: 3130514 - RNA, 19 nt, Artificial Sequence
  Description of Artificial Sequence: Synthetic oligonucleotide
cacuaccucgcaucuucag

SEQ ID NO: 3130515 - RNA, 19 nt, Artificial Sequence
  Description of Artificial Sequence: Synthetic oligonucleotide
gcagucugagaaaagcagc

SEQ ID NO: 3130516 - RNA, 19 nt, Artificial Sequence
  Description of Artificial Sequence: Synthetic oligonucleotide
agggcacuaccucgcaucu

SEQ ID NO: 3130517 - RNA, 19 nt, Artificial Sequence
  Description of Artificial Sequence: Synthetic oligonucleotide
ucucagagcucaccccaaa

SEQ ID NO: 3130518 - RNA, 19 nt, Artificial Sequence
  Description of Artificial Sequence: Synthetic oligonucleotide
ugucgguaggcugcuguca

SEQ ID NO: 3130519 - RNA, 19 nt, Artificial Sequence
  Description of Artificial Sequence: Synthetic oligonucleotide
cuaccucgcaucuucagcu

SEQ ID NO: 3130520 - RNA, 19 nt, Artificial Sequence
  Description of Artificial Sequence: Synthetic oligonucleotide
uuccucugcaaacccucuc

SEQ ID NO: 3130521 - RNA, 19 nt, Artificial Sequence
  Description of Artificial Sequence: Synthetic oligonucleotide
gucgguaggcugcugucac

SEQ ID NO: 3130522 - RNA, 19 nt, Artificial Sequence
  Description of Artificial Sequence: Synthetic oligonucleotide
ugccaccaucgccucaggc

SEQ ID NO: 3130523 - RNA, 19 nt, Artificial Sequence
  Description of Artificial Sequence: Synthetic oligonucleotide
gucugagaaaagcagcuau

SEQ ID NO: 3130524 - RNA, 19 nt, Artificial Sequence
  Description of Artificial Sequence: Synthetic oligonucleotide
caaacccucucagagcuca

SEQ ID NO: 3130525 - RNA, 19 nt, Artificial Sequence
  Description of Artificial Sequence: Synthetic oligonucleotide
uugucgguaggcugcuguc

SEQ ID NO: 3130526 - RNA, 19 nt, Artificial Sequence
  Description of Artificial Sequence: Synthetic oligonucleotide
acuagggcacuaccucgca

SEQ ID NO: 3130527 - RNA, 19 nt, Artificial Sequence
  Description of Artificial Sequence: Synthetic oligonucleotide
aaacccucucagagcucac

SEQ ID NO: 3130528 - RNA, 19 nt, Artificial Sequence
  Description of Artificial Sequence: Synthetic oligonucleotide
accucgcaucuucagcuga

SEQ ID NO: 3130529 - RNA, 19 nt, Artificial Sequence
  Description of Artificial Sequence: Synthetic oligonucleotide
ucgguaggcugcugucacc

SEQ ID NO: 3130530 - RNA, 19 nt, Artificial Sequence
  Description of Artificial Sequence: Synthetic oligonucleotide
agcucaccccaaacuaggg

SEQ ID NO: 3130531 - RNA, 19 nt, Artificial Sequence
  Description of Artificial Sequence: Synthetic oligonucleotide
cagagcucaccccaaacua

SEQ ID NO: 3130532 - RNA, 19 nt, Artificial Sequence
  Description of Artificial Sequence: Synthetic oligonucleotide
ucugagggcggcugcucaa

SEQ ID NO: 3130533 - RNA, 19 nt, Artificial Sequence
  Description of Artificial Sequence: Synthetic oligonucleotide
ccuaucuaggguuccucug

SEQ ID NO: 3130534 - RNA, 19 nt, Artificial Sequence
  Description of Artificial Sequence: Synthetic oligonucleotide
accucuuggcagucugaga

SEQ ID NO: 3130535 - RNA, 19 nt, Artificial Sequence
  Description of Artificial Sequence: Synthetic oligonucleotide
cuagggcuugucgguaggc

SEQ ID NO: 3130536 - RNA, 19 nt, Artificial Sequence
  Description of Artificial Sequence: Synthetic oligonucleotide
ccucuuggcagucugagaa

SEQ ID NO: 3130537 - RNA, 19 nt, Artificial Sequence
  Description of Artificial Sequence: Synthetic oligonucleotide
gcucaccccaaacuagggc

SEQ ID NO: 3130538 - RNA, 19 nt, Artificial Sequence
  Description of Artificial Sequence: Synthetic oligonucleotide
ucgcccaggggcuccugcc

SEQ ID NO: 3130539 - RNA, 19 nt, Artificial Sequence
  Description of Artificial Sequence: Synthetic oligonucleotide
uaggcugcugucaccucuu

SEQ ID NO: 3130540 - RNA, 19 nt, Artificial Sequence
  Description of Artificial Sequence: Synthetic oligonucleotide
cucgcaucuucagcugagc

SEQ ID NO: 3130541 - RNA, 19 nt, Artificial Sequence
  Description of Artificial Sequence: Synthetic oligonucleotide
cagguuguccacagauaca

SEQ ID NO: 3130542 - RNA, 19 nt, Artificial Sequence
  Description of Artificial Sequence: Synthetic oligonucleotide
cucugcaaacccucucaga

SEQ ID NO: 3130543 - RNA, 19 nt, Artificial Sequence
  Description of Artificial Sequence: Synthetic oligonucleotide
acagauuccuagggcuugu

SEQ ID NO: 3130544 - RNA, 19 nt, Artificial Sequence
  Description of Artificial Sequence: Synthetic oligonucleotide
cccaaacuagggcacuacc

SEQ ID NO: 3130545 - RNA, 19 nt, Artificial Sequence
  Description of Artificial Sequence: Synthetic oligonucleotide
agcugagcuuugaacagau

SEQ ID NO: 3130546 - RNA, 19 nt, Artificial Sequence
  Description of Artificial Sequence: Synthetic oligonucleotide
guaggcugcugucaccucu

SEQ ID NO: 3130547 - RNA, 19 nt, Artificial Sequence
  Description of Artificial Sequence: Synthetic oligonucleotide
aucuaggguuccucugcaa

SEQ ID NO: 3130548 - RNA, 19 nt, Artificial Sequence
  Description of Artificial Sequence: Synthetic oligonucleotide
agucugagaaaagcagcua

SEQ ID NO: 3130549 - RNA, 19 nt, Artificial Sequence
  Description of Artificial Sequence: Synthetic oligonucleotide
ggcuccugccaccaucgcc

SEQ ID NO: 3130550 - RNA, 19 nt, Artificial Sequence
  Description of Artificial Sequence: Synthetic oligonucleotide
gguuccucugcaaacccuc

SEQ ID NO: 3130551 - RNA, 19 nt, Artificial Sequence
  Description of Artificial Sequence: Synthetic oligonucleotide
cugcugucaccucuuggca

SEQ ID NO: 3130552 - RNA, 19 nt, Artificial Sequence
  Description of Artificial Sequence: Synthetic oligonucleotide
cucagguuguccacagaua

SEQ ID NO: 3130553 - RNA, 19 nt, Artificial Sequence
  Description of Artificial Sequence: Synthetic oligonucleotide
ggggcuccugccaccaucg

SEQ ID NO: 3130554 - RNA, 19 nt, Artificial Sequence
  Description of Artificial Sequence: Synthetic oligonucleotide
cuugucgguaggcugcugu

SEQ ID NO: 3130555 - RNA, 19 nt, Artificial Sequence
  Description of Artificial Sequence: Synthetic oligonucleotide
ggaauccuaucuaggguuc

SEQ ID NO: 3130556 - RNA, 19 nt, Artificial Sequence
  Description of Artificial Sequence: Synthetic oligonucleotide
accaucgccucaggccuuc

SEQ ID NO: 3130557 - RNA, 19 nt, Artificial Sequence
  Description of Artificial Sequence: Synthetic oligonucleotide
cugagggcggcugcucaag

SEQ ID NO: 3130558 - RNA, 19 nt, Artificial Sequence
  Description of Artificial Sequence: Synthetic oligonucleotide
agcuaucgcccaggggcuc

SEQ ID NO: 3130559 - RNA, 19 nt, Artificial Sequence
  Description of Artificial Sequence: Synthetic oligonucleotide
gggcuugucgguaggcugc

SEQ ID NO: 3130560 - RNA, 19 nt, Artificial Sequence
  Description of Artificial Sequence: Synthetic oligonucleotide
cucuuggcagucugagaaa

SEQ ID NO: 3130561 - RNA, 19 nt, Artificial Sequence
  Description of Artificial Sequence: Synthetic oligonucleotide
uccugccaccaucgccuca

SEQ ID NO: 3130562 - RNA, 19 nt, Artificial Sequence
  Description of Artificial Sequence: Synthetic oligonucleotide
ccucugcaaacccucucag

SEQ ID NO: 3130563 - RNA, 19 nt, Artificial Sequence
  Description of Artificial Sequence: Synthetic oligonucleotide
caggccuucugagggcggc

SEQ ID NO: 3130564 - RNA, 19 nt, Artificial Sequence
  Description of Artificial Sequence: Synthetic oligonucleotide
uuccuagggcuugucggua

SEQ ID NO: 3130565 - RNA, 19 nt, Artificial Sequence
  Description of Artificial Sequence: Synthetic oligonucleotide
ugucaccucuuggcagucu

SEQ ID NO: 3130566 - RNA, 19 nt, Artificial Sequence
  Description of Artificial Sequence: Synthetic oligonucleotide
ccucgcaucuucagcugag

SEQ ID NO: 3130567 - RNA, 19 nt, Artificial Sequence
  Description of Artificial Sequence: Synthetic oligonucleotide
caucgccucaggccuucug

SEQ ID NO: 3130568 - RNA, 19 nt, Artificial Sequence
  Description of Artificial Sequence: Synthetic oligonucleotide
ccuagggcuugucgguagg

SEQ ID NO: 3130569 - RNA, 19 nt, Artificial Sequence
  Description of Artificial Sequence: Synthetic oligonucleotide
aggcugcugucaccucuug

SEQ ID NO: 3130570 - RNA, 19 nt, Artificial Sequence
  Description of Artificial Sequence: Synthetic oligonucleotide
ccugccaccaucgccucag

SEQ ID NO: 3130571 - RNA, 19 nt, Artificial Sequence
  Description of Artificial Sequence: Synthetic oligonucleotide
ccaaacuagggcacuaccu

SEQ ID NO: 3130572 - RNA, 19 nt, Artificial Sequence
  Description of Artificial Sequence: Synthetic oligonucleotide
cccucucagagcucacccc

SEQ ID NO: 3130573 - RNA, 19 nt, Artificial Sequence
  Description of Artificial Sequence: Synthetic oligonucleotide
cuucugagggcggcugcuc

SEQ ID NO: 3130574 - RNA, 19 nt, Artificial Sequence
  Description of Artificial Sequence: Synthetic oligonucleotide
ccucucagagcucacccca

SEQ ID NO: 3130575 - RNA, 19 nt, Artificial Sequence
  Description of Artificial Sequence: Synthetic oligonucleotide
cagcugagcuuugaacaga

SEQ ID NO: 3130576 - RNA, 19 nt, Artificial Sequence
  Description of Artificial Sequence: Synthetic oligonucleotide
ccucaggccuucugagggc

SEQ ID NO: 3130577 - RNA, 19 nt, Artificial Sequence
  Description of Artificial Sequence: Synthetic oligonucleotide
gcugucaccucuuggcagu

SEQ ID NO: 3130578 - RNA, 19 nt, Artificial Sequence
  Description of Artificial Sequence: Synthetic oligonucleotide
cugccaccaucgccucagg

SEQ ID NO: 3130579 - RNA, 19 nt, Artificial Sequence
  Description of Artificial Sequence: Synthetic oligonucleotide
cagauuccuagggcuuguc

SEQ ID NO: 3130580 - RNA, 19 nt, Artificial Sequence
  Description of Artificial Sequence: Synthetic oligonucleotide
cuccugccaccaucgccuc

SEQ ID NO: 3130581 - RNA, 19 nt, Artificial Sequence
  Description of Artificial Sequence: Synthetic oligonucleotide
gcuaucgcccaggggcucc

SEQ ID NO: 3130582 - RNA, 19 nt, Artificial Sequence
  Description of Artificial Sequence: Synthetic oligonucleotide
ccccucagguuguccacag

SEQ ID NO: 3130583 - RNA, 19 nt, Artificial Sequence
  Description of Artificial Sequence: Synthetic oligonucleotide
gccuucugagggcggcugc

SEQ ID NO: 3130584 - RNA, 19 nt, Artificial Sequence
  Description of Artificial Sequence: Synthetic oligonucleotide
cugucaccucuuggcaguc

SEQ ID NO: 3130585 - RNA, 19 nt, Artificial Sequence
  Description of Artificial Sequence: Synthetic oligonucleotide
gguuguccacagauacaca

SEQ ID NO: 3130586 - RNA, 19 nt, Artificial Sequence
  Description of Artificial Sequence: Synthetic oligonucleotide
accccaaacuagggcacua

SEQ ID NO: 3130587 - RNA, 19 nt, Artificial Sequence
  Description of Artificial Sequence: Synthetic oligonucleotide
cagcuaucgcccaggggcu

SEQ ID NO: 3130588 - RNA, 19 nt, Artificial Sequence
  Description of Artificial Sequence: Synthetic oligonucleotide
gguaggcugcugucaccuc

SEQ ID NO: 3130589 - RNA, 19 nt, Artificial Sequence
  Description of Artificial Sequence: Synthetic oligonucleotide
ccucagguuguccacagau

SEQ ID NO: 3130590 - RNA, 19 nt, Artificial Sequence
  Description of Artificial Sequence: Synthetic oligonucleotide
cgccucaggccuucugagg

SEQ ID NO: 3130591 - RNA, 19 nt, Artificial Sequence
  Description of Artificial Sequence: Synthetic oligonucleotide
uaucgcccaggggcuccug

SEQ ID NO: 3130592 - RNA, 19 nt, Artificial Sequence
  Description of Artificial Sequence: Synthetic oligonucleotide
aggccuucugagggcggcu

SEQ ID NO: 3130593 - RNA, 19 nt, Artificial Sequence
  Description of Artificial Sequence: Synthetic oligonucleotide
guuccucugcaaacccucu

SEQ ID NO: 3130594 - RNA, 19 nt, Artificial Sequence
  Description of Artificial Sequence: Synthetic oligonucleotide
ccaccaucgccucaggccu

SEQ ID NO: 3130595 - RNA, 19 nt, Artificial Sequence
  Description of Artificial Sequence: Synthetic oligonucleotide
ggccuucugagggcggcug

SEQ ID NO: 3130596 - RNA, 19 nt, Artificial Sequence
  Description of Artificial Sequence: Synthetic oligonucleotide
gggcggcugcucaagcccc

SEQ ID NO: 3130597 - RNA, 19 nt, Artificial Sequence
  Description of Artificial Sequence: Synthetic oligonucleotide
cuagggcacuaccucgcau

SEQ ID NO: 3130598 - RNA, 19 nt, Artificial Sequence
  Description of Artificial Sequence: Synthetic oligonucleotide
ccccaaacuagggcacuac

SEQ ID NO: 3130599 - RNA, 19 nt, Artificial Sequence
  Description of Artificial Sequence: Synthetic oligonucleotide
gcccaggggcuccugccac

SEQ ID NO: 3130600 - RNA, 19 nt, Artificial Sequence
  Description of Artificial Sequence: Synthetic oligonucleotide
gcacuaccucgcaucuuca

SEQ ID NO: 3130601 - RNA, 19 nt, Artificial Sequence
  Description of Artificial Sequence: Synthetic oligonucleotide
gcaaacccucucagagcuc

SEQ ID NO: 3130602 - RNA, 19 nt, Artificial Sequence
  Description of Artificial Sequence: Synthetic oligonucleotide
ggguuccucugcaaacccu

SEQ ID NO: 3130603 - RNA, 19 nt, Artificial Sequence
  Description of Artificial Sequence: Synthetic oligonucleotide
gcuugucgguaggcugcug

SEQ ID NO: 3130604 - RNA, 19 nt, Artificial Sequence
  Description of Artificial Sequence: Synthetic oligonucleotide
caccccaaacuagggcacu

SEQ ID NO: 3130605 - RNA, 19 nt, Artificial Sequence
  Description of Artificial Sequence: Synthetic oligonucleotide
cgcaucuucagcugagcuu

SEQ ID NO: 3130606 - RNA, 19 nt, Artificial Sequence
  Description of Artificial Sequence: Synthetic oligonucleotide
ccaggggcuccugccacca

SEQ ID NO: 3130607 - RNA, 19 nt, Artificial Sequence
  Description of Artificial Sequence: Synthetic oligonucleotide
cuaucgcccaggggcuccu

SEQ ID NO: 3130608 - RNA, 19 nt, Artificial Sequence
  Description of Artificial Sequence: Synthetic oligonucleotide
ggcuugucgguaggcugcu

SEQ ID NO: 3130609 - RNA, 19 nt, Artificial Sequence
  Description of Artificial Sequence: Synthetic oligonucleotide
caccaucgccucaggccuu

SEQ ID NO: 3130610 - RNA, 19 nt, Artificial Sequence
  Description of Artificial Sequence: Synthetic oligonucleotide
cgguaggcugcugucaccu

SEQ ID NO: 3130611 - RNA, 19 nt, Artificial Sequence
  Description of Artificial Sequence: Synthetic oligonucleotide
ccuucugagggcggcugcu

SEQ ID NO: 3130612 - RNA, 19 nt, Artificial Sequence
  Description of Artificial Sequence: Synthetic oligonucleotide
cgcccaggggcuccugcca

SEQ ID NO: 3130613 - RNA, 19 nt, Artificial Sequence
  Description of Artificial Sequence: Synthetic oligonucleotide
gcugagcuuugaacagauu

SEQ ID NO: 3130614 - RNA, 19 nt, Artificial Sequence
  Description of Artificial Sequence: Synthetic oligonucleotide
caggggcuccugccaccau

SEQ ID NO: 3130615 - RNA, 19 nt, Artificial Sequence
  Description of Artificial Sequence: Synthetic oligonucleotide
gggcacuaccucgcaucuu

SEQ ID NO: 3130616 - RNA, 19 nt, Artificial Sequence
  Description of Artificial Sequence: Synthetic oligonucleotide
ccaucgccucaggccuucu

SEQ ID NO: 3130617 - RNA, 19 nt, Artificial Sequence
  Description of Artificial Sequence: Synthetic oligonucleotide
aauauaaaacauuaauugc

SEQ ID NO: 3130618 - RNA, 19 nt, Artificial Sequence
  Description of Artificial Sequence: Synthetic oligonucleotide
auaagaaucacuuaaaaug

SEQ ID NO: 3130619 - RNA, 19 nt, Artificial Sequence
  Description of Artificial Sequence: Synthetic oligonucleotide
gaauauaaaacauuaauug

SEQ ID NO: 3130620 - RNA, 19 nt, Artificial Sequence
  Description of Artificial Sequence: Synthetic oligonucleotide
aaauucucaauucauuuac

SEQ ID NO: 3130621 - RNA, 19 nt, Artificial Sequence
  Description of Artificial Sequence: Synthetic oligonucleotide
uauaaggccaagaagaaag

SEQ ID NO: 3130622 - RNA, 19 nt, Artificial Sequence
  Description of Artificial Sequence: Synthetic oligonucleotide
aaucacuuaaaauguaacg

SEQ ID NO: 3130623 - RNA, 19 nt, Artificial Sequence
  Description of Artificial Sequence: Synthetic oligonucleotide
uaaaacauuaauugcauag

SEQ ID NO: 3130624 - RNA, 19 nt, Artificial Sequence
  Description of Artificial Sequence: Synthetic oligonucleotide
aauucauuuacucacaaaa

SEQ ID NO: 3130625 - RNA, 19 nt, Artificial Sequence
  Description of Artificial Sequence: Synthetic oligonucleotide
aaauauaaggccaagaaga

SEQ ID NO: 3130626 - RNA, 19 nt, Artificial Sequence
  Description of Artificial Sequence: Synthetic oligonucleotide
aaacauuaauugcauaggg

SEQ ID NO: 3130627 - RNA, 19 nt, Artificial Sequence
  Description of Artificial Sequence: Synthetic oligonucleotide
uagggauuuaaauauaagg

SEQ ID NO: 3130628 - RNA, 19 nt, Artificial Sequence
  Description of Artificial Sequence: Synthetic oligonucleotide
uaaauauaaggccaagaag

SEQ ID NO: 3130629 - RNA, 19 nt, Artificial Sequence
  Description of Artificial Sequence: Synthetic oligonucleotide
agggauuuaaauauaaggc

SEQ ID NO: 3130630 - RNA, 19 nt, Artificial Sequence
  Description of Artificial Sequence: Synthetic oligonucleotide
uucauuuacucacaaaagc

SEQ ID NO: 3130631 - RNA, 19 nt, Artificial Sequence
  Description of Artificial Sequence: Synthetic oligonucleotide
uuaaauauaaggccaagaa

SEQ ID NO: 3130632 - RNA, 19 nt, Artificial Sequence
  Description of Artificial Sequence: Synthetic oligonucleotide
aaaaugcgaauauaaaaca

SEQ ID NO: 3130633 - RNA, 19 nt, Artificial Sequence
  Description of Artificial Sequence: Synthetic oligonucleotide
uaagaaucacuuaaaaugu

SEQ ID NO: 3130634 - RNA, 19 nt, Artificial Sequence
  Description of Artificial Sequence: Synthetic oligonucleotide
aaaacauuaauugcauagg

SEQ ID NO: 3130635 - RNA, 19 nt, Artificial Sequence
  Description of Artificial Sequence: Synthetic oligonucleotide
ucauuuacucacaaaagca

SEQ ID NO: 3130636 - RNA, 19 nt, Artificial Sequence
  Description of Artificial Sequence: Synthetic oligonucleotide
aaaggugcaagacccugcc

SEQ ID NO: 3130637 - RNA, 19 nt, Artificial Sequence
  Description of Artificial Sequence: Synthetic oligonucleotide
ucacaaaagcaauaggugc

SEQ ID NO: 3130638 - RNA, 19 nt, Artificial Sequence
  Description of Artificial Sequence: Synthetic oligonucleotide
ucucaauucauuuacucac

SEQ ID NO: 3130639 - RNA, 19 nt, Artificial Sequence
  Description of Artificial Sequence: Synthetic oligonucleotide
acauauaagaaucacuuaa

SEQ ID NO: 3130640 - RNA, 19 nt, Artificial Sequence
  Description of Artificial Sequence: Synthetic oligonucleotide
auaggugcuacauauaaga

SEQ ID NO: 3130641 - RNA, 19 nt, Artificial Sequence
  Description of Artificial Sequence: Synthetic oligonucleotide
gaagaaaggugcaagaccc

SEQ ID NO: 3130642 - RNA, 19 nt, Artificial Sequence
  Description of Artificial Sequence: Synthetic oligonucleotide
uauaaaacauuaauugcau

SEQ ID NO: 3130643 - RNA, 19 nt, Artificial Sequence
  Description of Artificial Sequence: Synthetic oligonucleotide
aagaagaaaggugcaagac

SEQ ID NO: 3130644 - RNA, 19 nt, Artificial Sequence
  Description of Artificial Sequence: Synthetic oligonucleotide
acauuaauugcauagggau

SEQ ID NO: 3130645 - RNA, 19 nt, Artificial Sequence
  Description of Artificial Sequence: Synthetic oligonucleotide
auauaaaacauuaauugca

SEQ ID NO: 3130646 - RNA, 19 nt, Artificial Sequence
  Description of Artificial Sequence: Synthetic oligonucleotide
ugcauagggauuuaaauau

SEQ ID NO: 3130647 - RNA, 19 nt, Artificial Sequence
  Description of Artificial Sequence: Synthetic oligonucleotide
aaaucacaguacaaaauuc

SEQ ID NO: 3130648 - RNA, 19 nt, Artificial Sequence
  Description of Artificial Sequence: Synthetic oligonucleotide
aaaauucucaauucauuua

SEQ ID NO: 3130649 - RNA, 19 nt, Artificial Sequence
  Description of Artificial Sequence: Synthetic oligonucleotide
aauggguucgaggaauugg

SEQ ID NO: 3130650 - RNA, 19 nt, Artificial Sequence
  Description of Artificial Sequence: Synthetic oligonucleotide
cacagcaaggcuucaaugg

SEQ ID NO: 3130651 - RNA, 19 nt, Artificial Sequence
  Description of Artificial Sequence: Synthetic oligonucleotide
gggauuuaaauauaaggcc

SEQ ID NO: 3130652 - RNA, 19 nt, Artificial Sequence
  Description of Artificial Sequence: Synthetic oligonucleotide
ucacaguacaaaauucuca

SEQ ID NO: 3130653 - RNA, 19 nt, Artificial Sequence
  Description of Artificial Sequence: Synthetic oligonucleotide
agcaauaggugcuacauau

SEQ ID NO: 3130654 - RNA, 19 nt, Artificial Sequence
  Description of Artificial Sequence: Synthetic oligonucleotide
uucucaauucauuuacuca

SEQ ID NO: 3130655 - RNA, 19 nt, Artificial Sequence
  Description of Artificial Sequence: Synthetic oligonucleotide
cucacaaaagcaauaggug

SEQ ID NO: 3130656 - RNA, 19 nt, Artificial Sequence
  Description of Artificial Sequence: Synthetic oligonucleotide
aucacuuaaaauguaacga

SEQ ID NO: 3130657 - RNA, 19 nt, Artificial Sequence
  Description of Artificial Sequence: Synthetic oligonucleotide
auugcauagggauuuaaau

SEQ ID NO: 3130658 - RNA, 19 nt, Artificial Sequence
  Description of Artificial Sequence: Synthetic oligonucleotide
uuacucacaaaagcaauag

SEQ ID NO: 3130659 - RNA, 19 nt, Artificial Sequence
  Description of Artificial Sequence: Synthetic oligonucleotide
uuuaaauauaaggccaaga

SEQ ID NO: 3130660 - RNA, 19 nt, Artificial Sequence
  Description of Artificial Sequence: Synthetic oligonucleotide
aaucacaguacaaaauucu

SEQ ID NO: 3130661 - RNA, 19 nt, Artificial Sequence
  Description of Artificial Sequence: Synthetic oligonucleotide
uacaaaauucucaauucau

SEQ ID NO: 3130662 - RNA, 19 nt, Artificial Sequence
  Description of Artificial Sequence: Synthetic oligonucleotide
aggccaagaagaaaggugc

SEQ ID NO: 3130663 - RNA, 19 nt, Artificial Sequence
  Description of Artificial Sequence: Synthetic oligonucleotide
uacucacaaaagcaauagg

SEQ ID NO: 3130664 - RNA, 19 nt, Artificial Sequence
  Description of Artificial Sequence: Synthetic oligonucleotide
acagcaaggcuucaauggg

SEQ ID NO: 3130665 - RNA, 19 nt, Artificial Sequence
  Description of Artificial Sequence: Synthetic oligonucleotide
ucacuuaaaauguaacgau

SEQ ID NO: 3130666 - RNA, 19 nt, Artificial Sequence
  Description of Artificial Sequence: Synthetic oligonucleotide
auauaagaaucacuuaaaa

SEQ ID NO: 3130667 - RNA, 19 nt, Artificial Sequence
  Description of Artificial Sequence: Synthetic oligonucleotide
aaaagcaauaggugcuaca

SEQ ID NO: 3130668 - RNA, 19 nt, Artificial Sequence
  Description of Artificial Sequence: Synthetic oligonucleotide
aaagcaauaggugcuacau

SEQ ID NO: 3130669 - RNA, 19 nt, Artificial Sequence
  Description of Artificial Sequence: Synthetic oligonucleotide
acucacaaaagcaauaggu

SEQ ID NO: 3130670 - RNA, 19 nt, Artificial Sequence
  Description of Artificial Sequence: Synthetic oligonucleotide
gugaacacaaaucacagua

SEQ ID NO: 3130671 - RNA, 19 nt, Artificial Sequence
  Description of Artificial Sequence: Synthetic oligonucleotide
uugcauagggauuuaaaua

SEQ ID NO: 3130672 - RNA, 19 nt, Artificial Sequence
  Description of Artificial Sequence: Synthetic oligonucleotide
aacauuaauugcauaggga

SEQ ID NO: 3130673 - RNA, 19 nt, Artificial Sequence
  Description of Artificial Sequence: Synthetic oligonucleotide
auuaauugcauagggauuu

SEQ ID NO: 3130674 - RNA, 19 nt, Artificial Sequence
  Description of Artificial Sequence: Synthetic oligonucleotide
aauaggugcuacauauaag

SEQ ID NO: 3130675 - RNA, 19 nt, Artificial Sequence
  Description of Artificial Sequence: Synthetic oligonucleotide
cagugaacacaaaucacag

SEQ ID NO: 3130676 - RNA, 19 nt, Artificial Sequence
  Description of Artificial Sequence: Synthetic oligonucleotide
uuucacagcacagcaaggc

SEQ ID NO: 3130677 - RNA, 19 nt, Artificial Sequence
  Description of Artificial Sequence: Synthetic oligonucleotide
aaugcgaauauaaaacauu

SEQ ID NO: 3130678 - RNA, 19 nt, Artificial Sequence
  Description of Artificial Sequence: Synthetic oligonucleotide
auucauuuacucacaaaag

SEQ ID NO: 3130679 - RNA, 19 nt, Artificial Sequence
  Description of Artificial Sequence: Synthetic oligonucleotide
gaaucacuuaaaauguaac

SEQ ID NO: 3130680 - RNA, 19 nt, Artificial Sequence
  Description of Artificial Sequence: Synthetic oligonucleotide
aaaugcgaauauaaaacau

SEQ ID NO: 3130681 - RNA, 19 nt, Artificial Sequence
  Description of Artificial Sequence: Synthetic oligonucleotide
aauauaaggccaagaagaa

SEQ ID NO: 3130682 - RNA, 19 nt, Artificial Sequence
  Description of Artificial Sequence: Synthetic oligonucleotide
ucaauucauuuacucacaa

SEQ ID NO: 3130683 - RNA, 19 nt, Artificial Sequence
  Description of Artificial Sequence: Synthetic oligonucleotide
aaggugcaagacccugccc

SEQ ID NO: 3130684 - RNA, 19 nt, Artificial Sequence
  Description of Artificial Sequence: Synthetic oligonucleotide
ggugcuacauauaagaauc

SEQ ID NO: 3130685 - RNA, 19 nt, Artificial Sequence
  Description of Artificial Sequence: Synthetic oligonucleotide
caaggcuucaauggguucg

SEQ ID NO: 3130686 - RNA, 19 nt, Artificial Sequence
  Description of Artificial Sequence: Synthetic oligonucleotide
aauuggggcagugaacaca

SEQ ID NO: 3130687 - RNA, 19 nt, Artificial Sequence
  Description of Artificial Sequence: Synthetic oligonucleotide
aucacaguacaaaauucuc

SEQ ID NO: 3130688 - RNA, 19 nt, Artificial Sequence
  Description of Artificial Sequence: Synthetic oligonucleotide
auuuaaauauaaggccaag

SEQ ID NO: 3130689 - RNA, 19 nt, Artificial Sequence
  Description of Artificial Sequence: Synthetic oligonucleotide
uucacagcacagcaaggcu

SEQ ID NO: 3130690 - RNA, 19 nt, Artificial Sequence
  Description of Artificial Sequence: Synthetic oligonucleotide
aggugcaagacccugccca

SEQ ID NO: 3130691 - RNA, 19 nt, Artificial Sequence
  Description of Artificial Sequence: Synthetic oligonucleotide
cauuuacucacaaaagcaa

SEQ ID NO: 3130692 - RNA, 19 nt, Artificial Sequence
  Description of Artificial Sequence: Synthetic oligonucleotide
ggauuuaaauauaaggcca

SEQ ID NO: 3130693 - RNA, 19 nt, Artificial Sequence
  Description of Artificial Sequence: Synthetic oligonucleotide
cauauaagaaucacuuaaa

SEQ ID NO: 3130694 - RNA, 19 nt, Artificial Sequence
  Description of Artificial Sequence: Synthetic oligonucleotide
uacauauaagaaucacuua

SEQ ID NO: 3130695 - RNA, 19 nt, Artificial Sequence
  Description of Artificial Sequence: Synthetic oligonucleotide
cuacauauaagaaucacuu

SEQ ID NO: 3130696 - RNA, 19 nt, Artificial Sequence
  Description of Artificial Sequence: Synthetic oligonucleotide
uggguucgaggaauugggg

SEQ ID NO: 3130697 - RNA, 19 nt, Artificial Sequence
  Description of Artificial Sequence: Synthetic oligonucleotide
aggugcuacauauaagaau

SEQ ID NO: 3130698 - RNA, 19 nt, Artificial Sequence
  Description of Artificial Sequence: Synthetic oligonucleotide
cacaguacaaaauucucaa

SEQ ID NO: 3130699 - RNA, 19 nt, Artificial Sequence
  Description of Artificial Sequence: Synthetic oligonucleotide
aauucucaauucauuuacu

SEQ ID NO: 3130700 - RNA, 19 nt, Artificial Sequence
  Description of Artificial Sequence: Synthetic oligonucleotide
gcuucaauggguucgagga

SEQ ID NO: 3130701 - RNA, 19 nt, Artificial Sequence
  Description of Artificial Sequence: Synthetic oligonucleotide
auggguucgaggaauuggg

SEQ ID NO: 3130702 - RNA, 19 nt, Artificial Sequence
  Description of Artificial Sequence: Synthetic oligonucleotide
auagggauuuaaauauaag

SEQ ID NO: 3130703 - RNA, 19 nt, Artificial Sequence
  Description of Artificial Sequence: Synthetic oligonucleotide
cauagggauuuaaauauaa

SEQ ID NO: 3130704 - RNA, 19 nt, Artificial Sequence
  Description of Artificial Sequence: Synthetic oligonucleotide
acacaaaucacaguacaaa

SEQ ID NO: 3130705 - RNA, 19 nt, Artificial Sequence
  Description of Artificial Sequence: Synthetic oligonucleotide
agugaacacaaaucacagu

SEQ ID NO: 3130706 - RNA, 19 nt, Artificial Sequence
  Description of Artificial Sequence: Synthetic oligonucleotide
ugcaagacccugcccagca

SEQ ID NO: 3130707 - RNA, 19 nt, Artificial Sequence
  Description of Artificial Sequence: Synthetic oligonucleotide
ugcuacauauaagaaucac

SEQ ID NO: 3130708 - RNA, 19 nt, Artificial Sequence
  Description of Artificial Sequence: Synthetic oligonucleotide
uaggugcuacauauaagaa

SEQ ID NO: 3130709 - RNA, 19 nt, Artificial Sequence
  Description of Artificial Sequence: Synthetic oligonucleotide
auaaggccaagaagaaagg

SEQ ID NO: 3130710 - RNA, 19 nt, Artificial Sequence
  Description of Artificial Sequence: Synthetic oligonucleotide
caauaggugcuacauauaa

SEQ ID NO: 3130711 - RNA, 19 nt, Artificial Sequence
  Description of Artificial Sequence: Synthetic oligonucleotide
gaggaauuggggcagugaa

SEQ ID NO: 3130712 - RNA, 19 nt, Artificial Sequence
  Description of Artificial Sequence: Synthetic oligonucleotide
cacaaaucacaguacaaaa

SEQ ID NO: 3130713 - RNA, 19 nt, Artificial Sequence
  Description of Artificial Sequence: Synthetic oligonucleotide
caagacccugcccagcagg

SEQ ID NO: 3130714 - RNA, 19 nt, Artificial Sequence
  Description of Artificial Sequence: Synthetic oligonucleotide
uucaauggguucgaggaau

SEQ ID NO: 3130715 - RNA, 19 nt, Artificial Sequence
  Description of Artificial Sequence: Synthetic oligonucleotide
agaaucacuuaaaauguaa

SEQ ID NO: 3130716 - RNA, 19 nt, Artificial Sequence
  Description of Artificial Sequence: Synthetic oligonucleotide
uggggcagugaacacaaau

SEQ ID NO: 3130717 - RNA, 19 nt, Artificial Sequence
  Description of Artificial Sequence: Synthetic oligonucleotide
caagaagaaaggugcaaga

SEQ ID NO: 3130718 - RNA, 19 nt, Artificial Sequence
  Description of Artificial Sequence: Synthetic oligonucleotide
gaaaggugcaagacccugc

SEQ ID NO: 3130719 - RNA, 19 nt, Artificial Sequence
  Description of Artificial Sequence: Synthetic oligonucleotide
auuuacucacaaaagcaau

SEQ ID NO: 3130720 - RNA, 19 nt, Artificial Sequence
  Description of Artificial Sequence: Synthetic oligonucleotide
acaaaucacaguacaaaau

SEQ ID NO: 3130721 - RNA, 19 nt, Artificial Sequence
  Description of Artificial Sequence: Synthetic oligonucleotide
uaaggccaagaagaaaggu

SEQ ID NO: 3130722 - RNA, 19 nt, Artificial Sequence
  Description of Artificial Sequence: Synthetic oligonucleotide
agaaaggugcaagacccug

SEQ ID NO: 3130723 - RNA, 19 nt, Artificial Sequence
  Description of Artificial Sequence: Synthetic oligonucleotide
gacccugcccagcaggacc

SEQ ID NO: 3130724 - RNA, 19 nt, Artificial Sequence
  Description of Artificial Sequence: Synthetic oligonucleotide
augcgaauauaaaacauua

SEQ ID NO: 3130725 - RNA, 19 nt, Artificial Sequence
  Description of Artificial Sequence: Synthetic oligonucleotide
caaaauucucaauucauuu

SEQ ID NO: 3130726 - RNA, 19 nt, Artificial Sequence
  Description of Artificial Sequence: Synthetic oligonucleotide
aagcaauaggugcuacaua

SEQ ID NO: 3130727 - RNA, 19 nt, Artificial Sequence
  Description of Artificial Sequence: Synthetic oligonucleotide
cucaauucauuuacucaca

SEQ ID NO: 3130728 - RNA, 19 nt, Artificial Sequence
  Description of Artificial Sequence: Synthetic oligonucleotide
aggaauuggggcagugaac

SEQ ID NO: 3130729 - RNA, 19 nt, Artificial Sequence
  Description of Artificial Sequence: Synthetic oligonucleotide
acaguacaaaauucucaau

SEQ ID NO: 3130730 - RNA, 19 nt, Artificial Sequence
  Description of Artificial Sequence: Synthetic oligonucleotide
ggaauuggggcagugaaca

SEQ ID NO: 3130731 - RNA, 19 nt, Artificial Sequence
  Description of Artificial Sequence: Synthetic oligonucleotide
cacaaaagcaauaggugcu

SEQ ID NO: 3130732 - RNA, 19 nt, Artificial Sequence
  Description of Artificial Sequence: Synthetic oligonucleotide
aagaaucacuuaaaaugua

SEQ ID NO: 3130733 - RNA, 19 nt, Artificial Sequence
  Description of Artificial Sequence: Synthetic oligonucleotide
gguucgaggaauuggggca

SEQ ID NO: 3130734 - RNA, 19 nt, Artificial Sequence
  Description of Artificial Sequence: Synthetic oligonucleotide
ggcuucaauggguucgagg

SEQ ID NO: 3130735 - RNA, 19 nt, Artificial Sequence
  Description of Artificial Sequence: Synthetic oligonucleotide
agcacagcaaggcuucaau

SEQ ID NO: 3130736 - RNA, 19 nt, Artificial Sequence
  Description of Artificial Sequence: Synthetic oligonucleotide
ggguucgaggaauuggggc

SEQ ID NO: 3130737 - RNA, 19 nt, Artificial Sequence
  Description of Artificial Sequence: Synthetic oligonucleotide
gaauuggggcagugaacac

SEQ ID NO: 3130738 - RNA, 19 nt, Artificial Sequence
  Description of Artificial Sequence: Synthetic oligonucleotide
auauaaggccaagaagaaa

SEQ ID NO: 3130739 - RNA, 19 nt, Artificial Sequence
  Description of Artificial Sequence: Synthetic oligonucleotide
gcgaauauaaaacauuaau

SEQ ID NO: 3130740 - RNA, 19 nt, Artificial Sequence
  Description of Artificial Sequence: Synthetic oligonucleotide
gcagugaacacaaaucaca

SEQ ID NO: 3130741 - RNA, 19 nt, Artificial Sequence
  Description of Artificial Sequence: Synthetic oligonucleotide
ucaauggguucgaggaauu

SEQ ID NO: 3130742 - RNA, 19 nt, Artificial Sequence
  Description of Artificial Sequence: Synthetic oligonucleotide
aaggcuucaauggguucga

SEQ ID NO: 3130743 - RNA, 19 nt, Artificial Sequence
  Description of Artificial Sequence: Synthetic oligonucleotide
guucgaggaauuggggcag

SEQ ID NO: 3130744 - RNA, 19 nt, Artificial Sequence
  Description of Artificial Sequence: Synthetic oligonucleotide
auuggggcagugaacacaa

SEQ ID NO: 3130745 - RNA, 19 nt, Artificial Sequence
  Description of Artificial Sequence: Synthetic oligonucleotide
uaauugcauagggauuuaa

SEQ ID NO: 3130746 - RNA, 19 nt, Artificial Sequence
  Description of Artificial Sequence: Synthetic oligonucleotide
aagaaaggugcaagacccu

SEQ ID NO: 3130747 - RNA, 19 nt, Artificial Sequence
  Description of Artificial Sequence: Synthetic oligonucleotide
caaaagcaauaggugcuac

SEQ ID NO: 3130748 - RNA, 19 nt, Artificial Sequence
  Description of Artificial Sequence: Synthetic oligonucleotide
caauucauuuacucacaaa

SEQ ID NO: 3130749 - RNA, 19 nt, Artificial Sequence
  Description of Artificial Sequence: Synthetic oligonucleotide
acaaaagcaauaggugcua

SEQ ID NO: 3130750 - RNA, 19 nt, Artificial Sequence
  Description of Artificial Sequence: Synthetic oligonucleotide
uuaauugcauagggauuua

SEQ ID NO: 3130751 - RNA, 19 nt, Artificial Sequence
  Description of Artificial Sequence: Synthetic oligonucleotide
ggugcaagacccugcccag

SEQ ID NO: 3130752 - RNA, 19 nt, Artificial Sequence
  Description of Artificial Sequence: Synthetic oligonucleotide
aagacccugcccagcagga

SEQ ID NO: 3130753 - RNA, 19 nt, Artificial Sequence
  Description of Artificial Sequence: Synthetic oligonucleotide
gcacagcaaggcuucaaug

SEQ ID NO: 3130754 - RNA, 19 nt, Artificial Sequence
  Description of Artificial Sequence: Synthetic oligonucleotide
cauuaauugcauagggauu

SEQ ID NO: 3130755 - RNA, 19 nt, Artificial Sequence
  Description of Artificial Sequence: Synthetic oligonucleotide
cacuuaaaauguaacgauu

SEQ ID NO: 3130756 - RNA, 19 nt, Artificial Sequence
  Description of Artificial Sequence: Synthetic oligonucleotide
ggggcagugaacacaaauc

SEQ ID NO: 3130757 - RNA, 19 nt, Artificial Sequence
  Description of Artificial Sequence: Synthetic oligonucleotide
caauggguucgaggaauug

SEQ ID NO: 3130758 - RNA, 19 nt, Artificial Sequence
  Description of Artificial Sequence: Synthetic oligonucleotide
ucgaggaauuggggcagug

SEQ ID NO: 3130759 - RNA, 19 nt, Artificial Sequence
  Description of Artificial Sequence: Synthetic oligonucleotide
gcuacauauaagaaucacu

SEQ ID NO: 3130760 - RNA, 19 nt, Artificial Sequence
  Description of Artificial Sequence: Synthetic oligonucleotide
cgaauauaaaacauuaauu

SEQ ID NO: 3130761 - RNA, 19 nt, Artificial Sequence
  Description of Artificial Sequence: Synthetic oligonucleotide
cuucaauggguucgaggaa

SEQ ID NO: 3130762 - RNA, 19 nt, Artificial Sequence
  Description of Artificial Sequence: Synthetic oligonucleotide
agcaaggcuucaauggguu

SEQ ID NO: 3130763 - RNA, 19 nt, Artificial Sequence
  Description of Artificial Sequence: Synthetic oligonucleotide
agacccugcccagcaggac

SEQ ID NO: 3130764 - RNA, 19 nt, Artificial Sequence
  Description of Artificial Sequence: Synthetic oligonucleotide
gugcuacauauaagaauca

SEQ ID NO: 3130765 - RNA, 19 nt, Artificial Sequence
  Description of Artificial Sequence: Synthetic oligonucleotide
uucgaggaauuggggcagu

SEQ ID NO: 3130766 - RNA, 19 nt, Artificial Sequence
  Description of Artificial Sequence: Synthetic oligonucleotide
cagcaaggcuucaaugggu

SEQ ID NO: 3130767 - RNA, 19 nt, Artificial Sequence
  Description of Artificial Sequence: Synthetic oligonucleotide
gcaagacccugcccagcag

SEQ ID NO: 3130768 - RNA, 19 nt, Artificial Sequence
  Description of Artificial Sequence: Synthetic oligonucleotide
gcaaggcuucaauggguuc

SEQ ID NO: 3130769 - RNA, 19 nt, Artificial Sequence
  Description of Artificial Sequence: Synthetic oligonucleotide
acccugcccagcaggaccu

SEQ ID NO: 3130770 - RNA, 19 nt, Artificial Sequence
  Description of Artificial Sequence: Synthetic oligonucleotide
aggcuucaauggguucgag

SEQ ID NO: 3130771 - RNA, 19 nt, Artificial Sequence
  Description of Artificial Sequence: Synthetic oligonucleotide
acagcacagcaaggcuuca

SEQ ID NO: 3130772 - RNA, 19 nt, Artificial Sequence
  Description of Artificial Sequence: Synthetic oligonucleotide
gccaagaagaaaggugcaa

SEQ ID NO: 3130773 - RNA, 19 nt, Artificial Sequence
  Description of Artificial Sequence: Synthetic oligonucleotide
ggccaagaagaaaggugca

SEQ ID NO: 3130774 - RNA, 19 nt, Artificial Sequence
  Description of Artificial Sequence: Synthetic oligonucleotide
gcauagggauuuaaauaua

SEQ ID NO: 3130775 - RNA, 19 nt, Artificial Sequence
  Description of Artificial Sequence: Synthetic oligonucleotide
gcaauaggugcuacauaua

SEQ ID NO: 3130776 - RNA, 19 nt, Artificial Sequence
  Description of Artificial Sequence: Synthetic oligonucleotide
cccugcccagcaggaccuu

SEQ ID NO: 3130777 - RNA, 19 nt, Artificial Sequence
  Description of Artificial Sequence: Synthetic oligonucleotide
agagguaacagguugagug

SEQ ID NO: 3130778 - RNA, 19 nt, Artificial Sequence
  Description of Artificial Sequence: Synthetic oligonucleotide
uucuccaagggcaacgucg

SEQ ID NO: 3130779 - RNA, 19 nt, Artificial Sequence
  Description of Artificial Sequence: Synthetic oligonucleotide
aggaccguaggguacauac

SEQ ID NO: 3130780 - RNA, 19 nt, Artificial Sequence
  Description of Artificial Sequence: Synthetic oligonucleotide
gagguaacagguugagugg

SEQ ID NO: 3130781 - RNA, 19 nt, Artificial Sequence
  Description of Artificial Sequence: Synthetic oligonucleotide
auugcagugacuaggcugg

SEQ ID NO: 3130782 - RNA, 19 nt, Artificial Sequence
  Description of Artificial Sequence: Synthetic oligonucleotide
uaggguacauacuuguaca

SEQ ID NO: 3130783 - RNA, 19 nt, Artificial Sequence
  Description of Artificial Sequence: Synthetic oligonucleotide
uccaucacaggaccguagg

SEQ ID NO: 3130784 - RNA, 19 nt, Artificial Sequence
  Description of Artificial Sequence: Synthetic oligonucleotide
ucuccaagggcaacgucgg

SEQ ID NO: 3130785 - RNA, 19 nt, Artificial Sequence
  Description of Artificial Sequence: Synthetic oligonucleotide
cauugcagugacuaggcug

SEQ ID NO: 3130786 - RNA, 19 nt, Artificial Sequence
  Description of Artificial Sequence: Synthetic oligonucleotide
ugacuaggcuggauggugg

SEQ ID NO: 3130787 - RNA, 19 nt, Artificial Sequence
  Description of Artificial Sequence: Synthetic oligonucleotide
auagcagcugccucucucg

SEQ ID NO: 3130788 - RNA, 19 nt, Artificial Sequence
  Description of Artificial Sequence: Synthetic oligonucleotide
uagggcagcaccuccauca

SEQ ID NO: 3130789 - RNA, 19 nt, Artificial Sequence
  Description of Artificial Sequence: Synthetic oligonucleotide
uguuucuccaagggcaacg

SEQ ID NO: 3130790 - RNA, 19 nt, Artificial Sequence
  Description of Artificial Sequence: Synthetic oligonucleotide
aacagguugaguggaguag

SEQ ID NO: 3130791 - RNA, 19 nt, Artificial Sequence
  Description of Artificial Sequence: Synthetic oligonucleotide
ugguggaagagguugccag

SEQ ID NO: 3130792 - RNA, 19 nt, Artificial Sequence
  Description of Artificial Sequence: Synthetic oligonucleotide
guaggguacauacuuguac

SEQ ID NO: 3130793 - RNA, 19 nt, Artificial Sequence
  Description of Artificial Sequence: Synthetic oligonucleotide
aggguacauacuuguacac

SEQ ID NO: 3130794 - RNA, 19 nt, Artificial Sequence
  Description of Artificial Sequence: Synthetic oligonucleotide
ugaugcuugcuguuucucc

SEQ ID NO: 3130795 - RNA, 19 nt, Artificial Sequence
  Description of Artificial Sequence: Synthetic oligonucleotide
ugagcacccuucaaugaug

SEQ ID NO: 3130796 - RNA, 19 nt, Artificial Sequence
  Description of Artificial Sequence: Synthetic oligonucleotide
aguaggugugggcaugguc

SEQ ID NO: 3130797 - RNA, 19 nt, Artificial Sequence
  Description of Artificial Sequence: Synthetic oligonucleotide
gacgagguagggcagcacc

SEQ ID NO: 3130798 - RNA, 19 nt, Artificial Sequence
  Description of Artificial Sequence: Synthetic oligonucleotide
cagugacuaggcuggaugg

SEQ ID NO: 3130799 - RNA, 19 nt, Artificial Sequence
  Description of Artificial Sequence: Synthetic oligonucleotide
cacccuucaaugaugcuug

SEQ ID NO: 3130800 - RNA, 19 nt, Artificial Sequence
  Description of Artificial Sequence: Synthetic oligonucleotide
guaggugugggcaugguca

SEQ ID NO: 3130801 - RNA, 19 nt, Artificial Sequence
  Description of Artificial Sequence: Synthetic oligonucleotide
aguggaguaggugugggca

SEQ ID NO: 3130802 - RNA, 19 nt, Artificial Sequence
  Description of Artificial Sequence: Synthetic oligonucleotide
aagagguugccagugcgca

SEQ ID NO: 3130803 - RNA, 19 nt, Artificial Sequence
  Description of Artificial Sequence: Synthetic oligonucleotide
ggucauugcagugacuagg

SEQ ID NO: 3130804 - RNA, 19 nt, Artificial Sequence
  Description of Artificial Sequence: Synthetic oligonucleotide
ggaagagguugccagugcg

SEQ ID NO: 3130805 - RNA, 19 nt, Artificial Sequence
  Description of Artificial Sequence: Synthetic oligonucleotide
agcaccuccaucacaggac

SEQ ID NO: 3130806 - RNA, 19 nt, Artificial Sequence
  Description of Artificial Sequence: Synthetic oligonucleotide
ugaguggaguagguguggg

SEQ ID NO: 3130807 - RNA, 19 nt, Artificial Sequence
  Description of Artificial Sequence: Synthetic oligonucleotide
uugaguggaguaggugugg

SEQ ID NO: 3130808 - RNA, 19 nt, Artificial Sequence
  Description of Artificial Sequence: Synthetic oligonucleotide
gucgggacgagguagggca

SEQ ID NO: 3130809 - RNA, 19 nt, Artificial Sequence
  Description of Artificial Sequence: Synthetic oligonucleotide
ugccauagcagcugccucu

SEQ ID NO: 3130810 - RNA, 19 nt, Artificial Sequence
  Description of Artificial Sequence: Synthetic oligonucleotide
ugggcauggucauugcagu

SEQ ID NO: 3130811 - RNA, 19 nt, Artificial Sequence
  Description of Artificial Sequence: Synthetic oligonucleotide
aagggcaacgucgggacga

SEQ ID NO: 3130812 - RNA, 19 nt, Artificial Sequence
  Description of Artificial Sequence: Synthetic oligonucleotide
uggaagagguugccagugc

SEQ ID NO: 3130813 - RNA, 19 nt, Artificial Sequence
  Description of Artificial Sequence: Synthetic oligonucleotide
ccuucaaugaugcuugcug

SEQ ID NO: 3130814 - RNA, 19 nt, Artificial Sequence
  Description of Artificial Sequence: Synthetic oligonucleotide
gugggcauggucauugcag

SEQ ID NO: 3130815 - RNA, 19 nt, Artificial Sequence
  Description of Artificial Sequence: Synthetic oligonucleotide
ugcuugcuguuucuccaag

SEQ ID NO: 3130816 - RNA, 19 nt, Artificial Sequence
  Description of Artificial Sequence: Synthetic oligonucleotide
uaacagguugaguggagua

SEQ ID NO: 3130817 - RNA, 19 nt, Artificial Sequence
  Description of Artificial Sequence: Synthetic oligonucleotide
ugugggcauggucauugca

SEQ ID NO: 3130818 - RNA, 19 nt, Artificial Sequence
  Description of Artificial Sequence: Synthetic oligonucleotide
uggucauugcagugacuag

SEQ ID NO: 3130819 - RNA, 19 nt, Artificial Sequence
  Description of Artificial Sequence: Synthetic oligonucleotide
auggucauugcagugacua

SEQ ID NO: 3130820 - RNA, 19 nt, Artificial Sequence
  Description of Artificial Sequence: Synthetic oligonucleotide
cuaggcuggaugguggaag

SEQ ID NO: 3130821 - RNA, 19 nt, Artificial Sequence
  Description of Artificial Sequence: Synthetic oligonucleotide
uucaaugaugcuugcuguu

SEQ ID NO: 3130822 - RNA, 19 nt, Artificial Sequence
  Description of Artificial Sequence: Synthetic oligonucleotide
guugaguggaguaggugug

SEQ ID NO: 3130823 - RNA, 19 nt, Artificial Sequence
  Description of Artificial Sequence: Synthetic oligonucleotide
aacgucgggacgagguagg

SEQ ID NO: 3130824 - RNA, 19 nt, Artificial Sequence
  Description of Artificial Sequence: Synthetic oligonucleotide
uccaagggcaacgucggga

SEQ ID NO: 3130825 - RNA, 19 nt, Artificial Sequence
  Description of Artificial Sequence: Synthetic oligonucleotide
gaagagguugccagugcgc

SEQ ID NO: 3130826 - RNA, 19 nt, Artificial Sequence
  Description of Artificial Sequence: Synthetic oligonucleotide
caaugaugcuugcuguuuc

SEQ ID NO: 3130827 - RNA, 19 nt, Artificial Sequence
  Description of Artificial Sequence: Synthetic oligonucleotide
aucacaggaccguagggua

SEQ ID NO: 3130828 - RNA, 19 nt, Artificial Sequence
  Description of Artificial Sequence: Synthetic oligonucleotide
gagguugccagugcgcagc

SEQ ID NO: 3130829 - RNA, 19 nt, Artificial Sequence
  Description of Artificial Sequence: Synthetic oligonucleotide
ucacaggaccguaggguac

SEQ ID NO: 3130830 - RNA, 19 nt, Artificial Sequence
  Description of Artificial Sequence: Synthetic oligonucleotide
gagcuccugccauagcagc

SEQ ID NO: 3130831 - RNA, 19 nt, Artificial Sequence
  Description of Artificial Sequence: Synthetic oligonucleotide
ucauugcagugacuaggcu

SEQ ID NO: 3130832 - RNA, 19 nt, Artificial Sequence
  Description of Artificial Sequence: Synthetic oligonucleotide
gaugguggaagagguugcc

SEQ ID NO: 3130833 - RNA, 19 nt, Artificial Sequence
  Description of Artificial Sequence: Synthetic oligonucleotide
ucgcugagcacccuucaau

SEQ ID NO: 3130834 - RNA, 19 nt, Artificial Sequence
  Description of Artificial Sequence: Synthetic oligonucleotide
ucaaugaugcuugcuguuu

SEQ ID NO: 3130835 - RNA, 19 nt, Artificial Sequence
  Description of Artificial Sequence: Synthetic oligonucleotide
cauagcagcugccucucuc

SEQ ID NO: 3130836 - RNA, 19 nt, Artificial Sequence
  Description of Artificial Sequence: Synthetic oligonucleotide
gcagugacuaggcuggaug

SEQ ID NO: 3130837 - RNA, 19 nt, Artificial Sequence
  Description of Artificial Sequence: Synthetic oligonucleotide
gagcacccuucaaugaugc

SEQ ID NO: 3130838 - RNA, 19 nt, Artificial Sequence
  Description of Artificial Sequence: Synthetic oligonucleotide
gaguggaguaggugugggc

SEQ ID NO: 3130839 - RNA, 19 nt, Artificial Sequence
  Description of Artificial Sequence: Synthetic oligonucleotide
agguugccagugcgcagcc

SEQ ID NO: 3130840 - RNA, 19 nt, Artificial Sequence
  Description of Artificial Sequence: Synthetic oligonucleotide
ucucgcugagcacccuuca

SEQ ID NO: 3130841 - RNA, 19 nt, Artificial Sequence
  Description of Artificial Sequence: Synthetic oligonucleotide
acccuucaaugaugcuugc

SEQ ID NO: 3130842 - RNA, 19 nt, Artificial Sequence
  Description of Artificial Sequence: Synthetic oligonucleotide
agagguugccagugcgcag

SEQ ID NO: 3130843 - RNA, 19 nt, Artificial Sequence
  Description of Artificial Sequence: Synthetic oligonucleotide
gguugaguggaguaggugu

SEQ ID NO: 3130844 - RNA, 19 nt, Artificial Sequence
  Description of Artificial Sequence: Synthetic oligonucleotide
gugacuaggcuggauggug

SEQ ID NO: 3130845 - RNA, 19 nt, Artificial Sequence
  Description of Artificial Sequence: Synthetic oligonucleotide
cuccaucacaggaccguag

SEQ ID NO: 3130846 - RNA, 19 nt, Artificial Sequence
  Description of Artificial Sequence: Synthetic oligonucleotide
uuucuccaagggcaacguc

SEQ ID NO: 3130847 - RNA, 19 nt, Artificial Sequence
  Description of Artificial Sequence: Synthetic oligonucleotide
agguaacagguugagugga

SEQ ID NO: 3130848 - RNA, 19 nt, Artificial Sequence
  Description of Artificial Sequence: Synthetic oligonucleotide
caacgucgggacgagguag

SEQ ID NO: 3130849 - RNA, 19 nt, Artificial Sequence
  Description of Artificial Sequence: Synthetic oligonucleotide
cuucaaugaugcuugcugu

SEQ ID NO: 3130850 - RNA, 19 nt, Artificial Sequence
  Description of Artificial Sequence: Synthetic oligonucleotide
uagcagcugccucucucgc

SEQ ID NO: 3130851 - RNA, 19 nt, Artificial Sequence
  Description of Artificial Sequence: Synthetic oligonucleotide
uggaguaggugugggcaug

SEQ ID NO: 3130852 - RNA, 19 nt, Artificial Sequence
  Description of Artificial Sequence: Synthetic oligonucleotide
gaccguaggguacauacuu

SEQ ID NO: 3130853 - RNA, 19 nt, Artificial Sequence
  Description of Artificial Sequence: Synthetic oligonucleotide
ucgggacgagguagggcag

SEQ ID NO: 3130854 - RNA, 19 nt, Artificial Sequence
  Description of Artificial Sequence: Synthetic oligonucleotide
uugccagugcgcagccgcc

SEQ ID NO: 3130855 - RNA, 19 nt, Artificial Sequence
  Description of Artificial Sequence: Synthetic oligonucleotide
gacuaggcuggauggugga

SEQ ID NO: 3130856 - RNA, 19 nt, Artificial Sequence
  Description of Artificial Sequence: Synthetic oligonucleotide
uaggugugggcauggucau

SEQ ID NO: 3130857 - RNA, 19 nt, Artificial Sequence
  Description of Artificial Sequence: Synthetic oligonucleotide
agugacuaggcuggauggu

SEQ ID NO: 3130858 - RNA, 19 nt, Artificial Sequence
  Description of Artificial Sequence: Synthetic oligonucleotide
gcagcugccucucucgcug

SEQ ID NO: 3130859 - RNA, 19 nt, Artificial Sequence
  Description of Artificial Sequence: Synthetic oligonucleotide
agguugaguggaguaggug

SEQ ID NO: 3130860 - RNA, 19 nt, Artificial Sequence
  Description of Artificial Sequence: Synthetic oligonucleotide
gugcgcagccgccugccgg

SEQ ID NO: 3130861 - RNA, 19 nt, Artificial Sequence
  Description of Artificial Sequence: Synthetic oligonucleotide
caagggcaacgucgggacg

SEQ ID NO: 3130862 - RNA, 19 nt, Artificial Sequence
  Description of Artificial Sequence: Synthetic oligonucleotide
ugcgcagccgccugccgga

SEQ ID NO: 3130863 - RNA, 19 nt, Artificial Sequence
  Description of Artificial Sequence: Synthetic oligonucleotide
gcaccuccaucacaggacc

SEQ ID NO: 3130864 - RNA, 19 nt, Artificial Sequence
  Description of Artificial Sequence: Synthetic oligonucleotide
cucucgcugagcacccuuc

SEQ ID NO: 3130865 - RNA, 19 nt, Artificial Sequence
  Description of Artificial Sequence: Synthetic oligonucleotide
accguaggguacauacuug

SEQ ID NO: 3130866 - RNA, 19 nt, Artificial Sequence
  Description of Artificial Sequence: Synthetic oligonucleotide
cugccucucucgcugagca

SEQ ID NO: 3130867 - RNA, 19 nt, Artificial Sequence
  Description of Artificial Sequence: Synthetic oligonucleotide
agcagcugccucucucgcu

SEQ ID NO: 3130868 - RNA, 19 nt, Artificial Sequence
  Description of Artificial Sequence: Synthetic oligonucleotide
gguaacagguugaguggag

SEQ ID NO: 3130869 - RNA, 19 nt, Artificial Sequence
  Description of Artificial Sequence: Synthetic oligonucleotide
agugcgcagccgccugccg

SEQ ID NO: 3130870 - RNA, 19 nt, Artificial Sequence
  Description of Artificial Sequence: Synthetic oligonucleotide
gcauggucauugcagugac

SEQ ID NO: 3130871 - RNA, 19 nt, Artificial Sequence
  Description of Artificial Sequence: Synthetic oligonucleotide
ggagcuccugccauagcag

SEQ ID NO: 3130872 - RNA, 19 nt, Artificial Sequence
  Description of Artificial Sequence: Synthetic oligonucleotide
ccaucacaggaccguaggg

SEQ ID NO: 3130873 - RNA, 19 nt, Artificial Sequence
  Description of Artificial Sequence: Synthetic oligonucleotide
augguggaagagguugcca

SEQ ID NO: 3130874 - RNA, 19 nt, Artificial Sequence
  Description of Artificial Sequence: Synthetic oligonucleotide
ggaguaggugugggcaugg

SEQ ID NO: 3130875 - RNA, 19 nt, Artificial Sequence
  Description of Artificial Sequence: Synthetic oligonucleotide
cagcaccuccaucacagga

SEQ ID NO: 3130876 - RNA, 19 nt, Artificial Sequence
  Description of Artificial Sequence: Synthetic oligonucleotide
agccgccugccggagcucc

SEQ ID NO: 3130877 - RNA, 19 nt, Artificial Sequence
  Description of Artificial Sequence: Synthetic oligonucleotide
cugccauagcagcugccuc

SEQ ID NO: 3130878 - RNA, 19 nt, Artificial Sequence
  Description of Artificial Sequence: Synthetic oligonucleotide
gccucucucgcugagcacc

SEQ ID NO: 3130879 - RNA, 19 nt, Artificial Sequence
  Description of Artificial Sequence: Synthetic oligonucleotide
acgagguagggcagcaccu

SEQ ID NO: 3130880 - RNA, 19 nt, Artificial Sequence
  Description of Artificial Sequence: Synthetic oligonucleotide
ggcauggucauugcaguga

SEQ ID NO: 3130881 - RNA, 19 nt, Artificial Sequence
  Description of Artificial Sequence: Synthetic oligonucleotide
agcacccuucaaugaugcu

SEQ ID NO: 3130882 - RNA, 19 nt, Artificial Sequence
  Description of Artificial Sequence: Synthetic oligonucleotide
agcugccucucucgcugag

SEQ ID NO: 3130883 - RNA, 19 nt, Artificial Sequence
  Description of Artificial Sequence: Synthetic oligonucleotide
ccccagagguaacagguug

SEQ ID NO: 3130884 - RNA, 19 nt, Artificial Sequence
  Description of Artificial Sequence: Synthetic oligonucleotide
caucacaggaccguagggu

SEQ ID NO: 3130885 - RNA, 19 nt, Artificial Sequence
  Description of Artificial Sequence: Synthetic oligonucleotide
gcugagcacccuucaauga

SEQ ID NO: 3130886 - RNA, 19 nt, Artificial Sequence
  Description of Artificial Sequence: Synthetic oligonucleotide
ggguacauacuuguacaca

SEQ ID NO: 3130887 - RNA, 19 nt, Artificial Sequence
  Description of Artificial Sequence: Synthetic oligonucleotide
gugugggcauggucauugc

SEQ ID NO: 3130888 - RNA, 19 nt, Artificial Sequence
  Description of Artificial Sequence: Synthetic oligonucleotide
guaacagguugaguggagu

SEQ ID NO: 3130889 - RNA, 19 nt, Artificial Sequence
  Description of Artificial Sequence: Synthetic oligonucleotide
agcuccugccauagcagcu

SEQ ID NO: 3130890 - RNA, 19 nt, Artificial Sequence
  Description of Artificial Sequence: Synthetic oligonucleotide
gggcauggucauugcagug

SEQ ID NO: 3130891 - RNA, 19 nt, Artificial Sequence
  Description of Artificial Sequence: Synthetic oligonucleotide
ccagagguaacagguugag

SEQ ID NO: 3130892 - RNA, 19 nt, Artificial Sequence
  Description of Artificial Sequence: Synthetic oligonucleotide
ugcagugacuaggcuggau

SEQ ID NO: 3130893 - RNA, 19 nt, Artificial Sequence
  Description of Artificial Sequence: Synthetic oligonucleotide
acgucgggacgagguaggg

SEQ ID NO: 3130894 - RNA, 19 nt, Artificial Sequence
  Description of Artificial Sequence: Synthetic oligonucleotide
cuguuucuccaagggcaac

SEQ ID NO: 3130895 - RNA, 19 nt, Artificial Sequence
  Description of Artificial Sequence: Synthetic oligonucleotide
cugagcacccuucaaugau

SEQ ID NO: 3130896 - RNA, 19 nt, Artificial Sequence
  Description of Artificial Sequence: Synthetic oligonucleotide
cgcugagcacccuucaaug

SEQ ID NO: 3130897 - RNA, 19 nt, Artificial Sequence
  Description of Artificial Sequence: Synthetic oligonucleotide
guagggcagcaccuccauc

SEQ ID NO: 3130898 - RNA, 19 nt, Artificial Sequence
  Description of Artificial Sequence: Synthetic oligonucleotide
ugccucucucgcugagcac

SEQ ID NO: 3130899 - RNA, 19 nt, Artificial Sequence
  Description of Artificial Sequence: Synthetic oligonucleotide
cacaggaccguaggguaca

SEQ ID NO: 3130900 - RNA, 19 nt, Artificial Sequence
  Description of Artificial Sequence: Synthetic oligonucleotide
acuaggcuggaugguggaa

SEQ ID NO: 3130901 - RNA, 19 nt, Artificial Sequence
  Description of Artificial Sequence: Synthetic oligonucleotide
guuucuccaagggcaacgu

SEQ ID NO: 3130902 - RNA, 19 nt, Artificial Sequence
  Description of Artificial Sequence: Synthetic oligonucleotide
gcuccugccauagcagcug

SEQ ID NO: 3130903 - RNA, 19 nt, Artificial Sequence
  Description of Artificial Sequence: Synthetic oligonucleotide
ugccagugcgcagccgccu

SEQ ID NO: 3130904 - RNA, 19 nt, Artificial Sequence
  Description of Artificial Sequence: Synthetic oligonucleotide
ccucucucgcugagcaccc

SEQ ID NO: 3130905 - RNA, 19 nt, Artificial Sequence
  Description of Artificial Sequence: Synthetic oligonucleotide
cagugcgcagccgccugcc

SEQ ID NO: 3130906 - RNA, 19 nt, Artificial Sequence
  Description of Artificial Sequence: Synthetic oligonucleotide
gcuggaugguggaagaggu

SEQ ID NO: 3130907 - RNA, 19 nt, Artificial Sequence
  Description of Artificial Sequence: Synthetic oligonucleotide
uugcagugacuaggcugga

SEQ ID NO: 3130908 - RNA, 19 nt, Artificial Sequence
  Description of Artificial Sequence: Synthetic oligonucleotide
cccagagguaacagguuga

SEQ ID NO: 3130909 - RNA, 19 nt, Artificial Sequence
  Description of Artificial Sequence: Synthetic oligonucleotide
ugccggagcuccugccaua

SEQ ID NO: 3130910 - RNA, 19 nt, Artificial Sequence
  Description of Artificial Sequence: Synthetic oligonucleotide
cagguugaguggaguaggu

SEQ ID NO: 3130911 - RNA, 19 nt, Artificial Sequence
  Description of Artificial Sequence: Synthetic oligonucleotide
cucgcugagcacccuucaa

SEQ ID NO: 3130912 - RNA, 19 nt, Artificial Sequence
  Description of Artificial Sequence: Synthetic oligonucleotide
guggaguaggugugggcau

SEQ ID NO: 3130913 - RNA, 19 nt, Artificial Sequence
  Description of Artificial Sequence: Synthetic oligonucleotide
ggcaacgucgggacgaggu

SEQ ID NO: 3130914 - RNA, 19 nt, Artificial Sequence
  Description of Artificial Sequence: Synthetic oligonucleotide
gccggagcuccugccauag

SEQ ID NO: 3130915 - RNA, 19 nt, Artificial Sequence
  Description of Artificial Sequence: Synthetic oligonucleotide
cggagcuccugccauagca

SEQ ID NO: 3130916 - RNA, 19 nt, Artificial Sequence
  Description of Artificial Sequence: Synthetic oligonucleotide
gguugccagugcgcagccg

SEQ ID NO: 3130917 - RNA, 19 nt, Artificial Sequence
  Description of Artificial Sequence: Synthetic oligonucleotide
gccagugcgcagccgccug

SEQ ID NO: 3130918 - RNA, 19 nt, Artificial Sequence
  Description of Artificial Sequence: Synthetic oligonucleotide
cauggucauugcagugacu

SEQ ID NO: 3130919 - RNA, 19 nt, Artificial Sequence
  Description of Artificial Sequence: Synthetic oligonucleotide
gcacccuucaaugaugcuu

SEQ ID NO: 3130920 - RNA, 19 nt, Artificial Sequence
  Description of Artificial Sequence: Synthetic oligonucleotide
ccguaggguacauacuugu

SEQ ID NO: 3130921 - RNA, 19 nt, Artificial Sequence
  Description of Artificial Sequence: Synthetic oligonucleotide
acaggaccguaggguacau

SEQ ID NO: 3130922 - RNA, 19 nt, Artificial Sequence
  Description of Artificial Sequence: Synthetic oligonucleotide
gcugccucucucgcugagc

SEQ ID NO: 3130923 - RNA, 19 nt, Artificial Sequence
  Description of Artificial Sequence: Synthetic oligonucleotide
gcaacgucgggacgaggua

SEQ ID NO: 3130924 - RNA, 19 nt, Artificial Sequence
  Description of Artificial Sequence: Synthetic oligonucleotide
gccauagcagcugccucuc

SEQ ID NO: 3130925 - RNA, 19 nt, Artificial Sequence
  Description of Artificial Sequence: Synthetic oligonucleotide
ccagugcgcagccgccugc

SEQ ID NO: 3130926 - RNA, 19 nt, Artificial Sequence
  Description of Artificial Sequence: Synthetic oligonucleotide
cagagguaacagguugagu

SEQ ID NO: 3130927 - RNA, 19 nt, Artificial Sequence
  Description of Artificial Sequence: Synthetic oligonucleotide
gggacgagguagggcagca

SEQ ID NO: 3130928 - RNA, 19 nt, Artificial Sequence
  Description of Artificial Sequence: Synthetic oligonucleotide
gguagggcagcaccuccau

SEQ ID NO: 3130929 - RNA, 19 nt, Artificial Sequence
  Description of Artificial Sequence: Synthetic oligonucleotide
cagcugccucucucgcuga

SEQ ID NO: 3130930 - RNA, 19 nt, Artificial Sequence
  Description of Artificial Sequence: Synthetic oligonucleotide
gcagccgccugccggagcu

SEQ ID NO: 3130931 - RNA, 19 nt, Artificial Sequence
  Description of Artificial Sequence: Synthetic oligonucleotide
gaguaggugugggcauggu

SEQ ID NO: 3130932 - RNA, 19 nt, Artificial Sequence
  Description of Artificial Sequence: Synthetic oligonucleotide
cuggaugguggaagagguu

SEQ ID NO: 3130933 - RNA, 19 nt, Artificial Sequence
  Description of Artificial Sequence: Synthetic oligonucleotide
ccugccggagcuccugcca

SEQ ID NO: 3130934 - RNA, 19 nt, Artificial Sequence
  Description of Artificial Sequence: Synthetic oligonucleotide
ggacgagguagggcagcac

SEQ ID NO: 3130935 - RNA, 19 nt, Artificial Sequence
  Description of Artificial Sequence: Synthetic oligonucleotide
aggugugggcauggucauu

SEQ ID NO: 3130936 - RNA, 19 nt, Artificial Sequence
  Description of Artificial Sequence: Synthetic oligonucleotide
gggcaacgucgggacgagg

SEQ ID NO: 3130937 - RNA, 19 nt, Artificial Sequence
  Description of Artificial Sequence: Synthetic oligonucleotide
cguaggguacauacuugua

SEQ ID NO: 3130938 - RNA, 19 nt, Artificial Sequence
  Description of Artificial Sequence: Synthetic oligonucleotide
ggaccguaggguacauacu

SEQ ID NO: 3130939 - RNA, 19 nt, Artificial Sequence
  Description of Artificial Sequence: Synthetic oligonucleotide
cgucgggacgagguagggc

SEQ ID NO: 3130940 - RNA, 19 nt, Artificial Sequence
  Description of Artificial Sequence: Synthetic oligonucleotide
ccugccauagcagcugccu

SEQ ID NO: 3130941 - RNA, 19 nt, Artificial Sequence
  Description of Artificial Sequence: Synthetic oligonucleotide
cugccggagcuccugccau

SEQ ID NO: 3130942 - RNA, 19 nt, Artificial Sequence
  Description of Artificial Sequence: Synthetic oligonucleotide
ccggagcuccugccauagc

SEQ ID NO: 3130943 - RNA, 19 nt, Artificial Sequence
  Description of Artificial Sequence: Synthetic oligonucleotide
cgggacgagguagggcagc

SEQ ID NO: 3130944 - RNA, 19 nt, Artificial Sequence
  Description of Artificial Sequence: Synthetic oligonucleotide
caggaccguaggguacaua

SEQ ID NO: 3130945 - RNA, 19 nt, Artificial Sequence
  Description of Artificial Sequence: Synthetic oligonucleotide
ccuccaucacaggaccgua

SEQ ID NO: 3130946 - RNA, 19 nt, Artificial Sequence
  Description of Artificial Sequence: Synthetic oligonucleotide
cgccugccggagcuccugc

SEQ ID NO: 3130947 - RNA, 19 nt, Artificial Sequence
  Description of Artificial Sequence: Synthetic oligonucleotide
cagccgccugccggagcuc

SEQ ID NO: 3130948 - RNA, 19 nt, Artificial Sequence
  Description of Artificial Sequence: Synthetic oligonucleotide
cccuucaaugaugcuugcu

SEQ ID NO: 3130949 - RNA, 19 nt, Artificial Sequence
  Description of Artificial Sequence: Synthetic oligonucleotide
ccgccugccggagcuccug

SEQ ID NO: 3130950 - RNA, 19 nt, Artificial Sequence
  Description of Artificial Sequence: Synthetic oligonucleotide
cucucucgcugagcacccu

SEQ ID NO: 3130951 - RNA, 19 nt, Artificial Sequence
  Description of Artificial Sequence: Synthetic oligonucleotide
gcgcagccgccugccggag

SEQ ID NO: 3130952 - RNA, 19 nt, Artificial Sequence
  Description of Artificial Sequence: Synthetic oligonucleotide
cgcagccgccugccggagc

SEQ ID NO: 3130953 - RNA, 19 nt, Artificial Sequence
  Description of Artificial Sequence: Synthetic oligonucleotide
gccccagagguaacagguu

SEQ ID NO: 3130954 - RNA, 19 nt, Artificial Sequence
  Description of Artificial Sequence: Synthetic oligonucleotide
ccauagcagcugccucucu

SEQ ID NO: 3130955 - RNA, 19 nt, Artificial Sequence
  Description of Artificial Sequence: Synthetic oligonucleotide
aaauauagggaccacaagc

SEQ ID NO: 3130956 - RNA, 19 nt, Artificial Sequence
  Description of Artificial Sequence: Synthetic oligonucleotide
aaggacaagaaauauaggg

SEQ ID NO: 3130957 - RNA, 19 nt, Artificial Sequence
  Description of Artificial Sequence: Synthetic oligonucleotide
aaaaggacaagaaauauag

SEQ ID NO: 3130958 - RNA, 19 nt, Artificial Sequence
  Description of Artificial Sequence: Synthetic oligonucleotide
uguacuucggaccagaggu

SEQ ID NO: 3130959 - RNA, 19 nt, Artificial Sequence
  Description of Artificial Sequence: Synthetic oligonucleotide
aguacaaacaaacucaagu

SEQ ID NO: 3130960 - RNA, 19 nt, Artificial Sequence
  Description of Artificial Sequence: Synthetic oligonucleotide
ucaaguuucgauccgcugg

SEQ ID NO: 3130961 - RNA, 19 nt, Artificial Sequence
  Description of Artificial Sequence: Synthetic oligonucleotide
uaggcgaucagcaucagag

SEQ ID NO: 3130962 - RNA, 19 nt, Artificial Sequence
  Description of Artificial Sequence: Synthetic oligonucleotide
cauguuuaccuccucaucg

SEQ ID NO: 3130963 - RNA, 19 nt, Artificial Sequence
  Description of Artificial Sequence: Synthetic oligonucleotide
ucagcaucagagcacacag

SEQ ID NO: 3130964 - RNA, 19 nt, Artificial Sequence
  Description of Artificial Sequence: Synthetic oligonucleotide
caaacucaaguuucgaucc

SEQ ID NO: 3130965 - RNA, 19 nt, Artificial Sequence
  Description of Artificial Sequence: Synthetic oligonucleotide
cuuagacuggguuuugucg

SEQ ID NO: 3130966 - RNA, 19 nt, Artificial Sequence
  Description of Artificial Sequence: Synthetic oligonucleotide
uauagggaccacaagcacc

SEQ ID NO: 3130967 - RNA, 19 nt, Artificial Sequence
  Description of Artificial Sequence: Synthetic oligonucleotide
uuuaccuccucaucguccg

SEQ ID NO: 3130968 - RNA, 19 nt, Artificial Sequence
  Description of Artificial Sequence: Synthetic oligonucleotide
aauauagggaccacaagca

SEQ ID NO: 3130969 - RNA, 19 nt, Artificial Sequence
  Description of Artificial Sequence: Synthetic oligonucleotide
acaaacaaacucaaguuuc

SEQ ID NO: 3130970 - RNA, 19 nt, Artificial Sequence
  Description of Artificial Sequence: Synthetic oligonucleotide
uuagacuggguuuugucgc

SEQ ID NO: 3130971 - RNA, 19 nt, Artificial Sequence
  Description of Artificial Sequence: Synthetic oligonucleotide
uggcuuaccaacaggacca

SEQ ID NO: 3130972 - RNA, 19 nt, Artificial Sequence
  Description of Artificial Sequence: Synthetic oligonucleotide
aacucaaguuucgauccgc

SEQ ID NO: 3130973 - RNA, 19 nt, Artificial Sequence
  Description of Artificial Sequence: Synthetic oligonucleotide
cuuaccaacaggaccacug

SEQ ID NO: 3130974 - RNA, 19 nt, Artificial Sequence
  Description of Artificial Sequence: Synthetic oligonucleotide
uacugcuucuuguacuucg

SEQ ID NO: 3130975 - RNA, 19 nt, Artificial Sequence
  Description of Artificial Sequence: Synthetic oligonucleotide
aaacucaaguuucgauccg

SEQ ID NO: 3130976 - RNA, 19 nt, Artificial Sequence
  Description of Artificial Sequence: Synthetic oligonucleotide
uuucauguuuaccuccuca

SEQ ID NO: 3130977 - RNA, 19 nt, Artificial Sequence
  Description of Artificial Sequence: Synthetic oligonucleotide
auauagggaccacaagcac

SEQ ID NO: 3130978 - RNA, 19 nt, Artificial Sequence
  Description of Artificial Sequence: Synthetic oligonucleotide
cagagcacacaguaaaagg

SEQ ID NO: 3130979 - RNA, 19 nt, Artificial Sequence
  Description of Artificial Sequence: Synthetic oligonucleotide
uacaaacaaacucaaguuu

SEQ ID NO: 3130980 - RNA, 19 nt, Artificial Sequence
  Description of Artificial Sequence: Synthetic oligonucleotide
augaacucccuggagauac

SEQ ID NO: 3130981 - RNA, 19 nt, Artificial Sequence
  Description of Artificial Sequence: Synthetic oligonucleotide
gaaauauagggaccacaag

SEQ ID NO: 3130982 - RNA, 19 nt, Artificial Sequence
  Description of Artificial Sequence: Synthetic oligonucleotide
aggaccacuguccacacug

SEQ ID NO: 3130983 - RNA, 19 nt, Artificial Sequence
  Description of Artificial Sequence: Synthetic oligonucleotide
acaguaaaaggacaagaaa

SEQ ID NO: 3130984 - RNA, 19 nt, Artificial Sequence
  Description of Artificial Sequence: Synthetic oligonucleotide
accaacaggaccacugucc

SEQ ID NO: 3130985 - RNA, 19 nt, Artificial Sequence
  Description of Artificial Sequence: Synthetic oligonucleotide
aaaggacaagaaauauagg

SEQ ID NO: 3130986 - RNA, 19 nt, Artificial Sequence
  Description of Artificial Sequence: Synthetic oligonucleotide
aagaaauauagggaccaca

SEQ ID NO: 3130987 - RNA, 19 nt, Artificial Sequence
  Description of Artificial Sequence: Synthetic oligonucleotide
ucagagcacacaguaaaag

SEQ ID NO: 3130988 - RNA, 19 nt, Artificial Sequence
  Description of Artificial Sequence: Synthetic oligonucleotide
ggacaagaaauauagggac

SEQ ID NO: 3130989 - RNA, 19 nt, Artificial Sequence
  Description of Artificial Sequence: Synthetic oligonucleotide
cuggcuuaccaacaggacc

SEQ ID NO: 3130990 - RNA, 19 nt, Artificial Sequence
  Description of Artificial Sequence: Synthetic oligonucleotide
aacaggaccacuguccaca

SEQ ID NO: 3130991 - RNA, 19 nt, Artificial Sequence
  Description of Artificial Sequence: Synthetic oligonucleotide
acaagaaauauagggacca

SEQ ID NO: 3130992 - RNA, 19 nt, Artificial Sequence
  Description of Artificial Sequence: Synthetic oligonucleotide
ucaucguccgccuuagacu

SEQ ID NO: 3130993 - RNA, 19 nt, Artificial Sequence
  Description of Artificial Sequence: Synthetic oligonucleotide
gacaagaaauauagggacc

SEQ ID NO: 3130994 - RNA, 19 nt, Artificial Sequence
  Description of Artificial Sequence: Synthetic oligonucleotide
agauacugcuucuuguacu

SEQ ID NO: 3130995 - RNA, 19 nt, Artificial Sequence
  Description of Artificial Sequence: Synthetic oligonucleotide
cacuuucauguuuaccucc

SEQ ID NO: 3130996 - RNA, 19 nt, Artificial Sequence
  Description of Artificial Sequence: Synthetic oligonucleotide
agcaucagagcacacagua

SEQ ID NO: 3130997 - RNA, 19 nt, Artificial Sequence
  Description of Artificial Sequence: Synthetic oligonucleotide
aggacaagaaauauaggga

SEQ ID NO: 3130998 - RNA, 19 nt, Artificial Sequence
  Description of Artificial Sequence: Synthetic oligonucleotide
ugaugaacucccuggagau

SEQ ID NO: 3130999 - RNA, 19 nt, Artificial Sequence
  Description of Artificial Sequence: Synthetic oligonucleotide
agggaccacaagcaccacc

SEQ ID NO: 3131000 - RNA, 19 nt, Artificial Sequence
  Description of Artificial Sequence: Synthetic oligonucleotide
caaguuucgauccgcuggc

SEQ ID NO: 3131001 - RNA, 19 nt, Artificial Sequence
  Description of Artificial Sequence: Synthetic oligonucleotide
agagcacacaguaaaagga

SEQ ID NO: 3131002 - RNA, 19 nt, Artificial Sequence
  Description of Artificial Sequence: Synthetic oligonucleotide
aguaaaaggacaagaaaua

SEQ ID NO: 3131003 - RNA, 19 nt, Artificial Sequence
  Description of Artificial Sequence: Synthetic oligonucleotide
agaaauauagggaccacaa

SEQ ID NO: 3131004 - RNA, 19 nt, Artificial Sequence
  Description of Artificial Sequence: Synthetic oligonucleotide
uucauguuuaccuccucau

SEQ ID NO: 3131005 - RNA, 19 nt, Artificial Sequence
  Description of Artificial Sequence: Synthetic oligonucleotide
caucguccgccuuagacug

SEQ ID NO: 3131006 - RNA, 19 nt, Artificial Sequence
  Description of Artificial Sequence: Synthetic oligonucleotide
uggagauacugcuucuugu

SEQ ID NO: 3131007 - RNA, 19 nt, Artificial Sequence
  Description of Artificial Sequence: Synthetic oligonucleotide
uuaccaacaggaccacugu

SEQ ID NO: 3131008 - RNA, 19 nt, Artificial Sequence
  Description of Artificial Sequence: Synthetic oligonucleotide
aacucccuggagauacugc

SEQ ID NO: 3131009 - RNA, 19 nt, Artificial Sequence
  Description of Artificial Sequence: Synthetic oligonucleotide
aggcgaucagcaucagagc

SEQ ID NO: 3131010 - RNA, 19 nt, Artificial Sequence
  Description of Artificial Sequence: Synthetic oligonucleotide
caguaaaaggacaagaaau

SEQ ID NO: 3131011 - RNA, 19 nt, Artificial Sequence
  Description of Artificial Sequence: Synthetic oligonucleotide
cucaucguccgccuuagac

SEQ ID NO: 3131012 - RNA, 19 nt, Artificial Sequence
  Description of Artificial Sequence: Synthetic oligonucleotide
gcuucuuguacuucggacc

SEQ ID NO: 3131013 - RNA, 19 nt, Artificial Sequence
  Description of Artificial Sequence: Synthetic oligonucleotide
ucauguuuaccuccucauc

SEQ ID NO: 3131014 - RNA, 19 nt, Artificial Sequence
  Description of Artificial Sequence: Synthetic oligonucleotide
acacaguaaaaggacaaga

SEQ ID NO: 3131015 - RNA, 19 nt, Artificial Sequence
  Description of Artificial Sequence: Synthetic oligonucleotide
acucccuggagauacugcu

SEQ ID NO: 3131016 - RNA, 19 nt, Artificial Sequence
  Description of Artificial Sequence: Synthetic oligonucleotide
aaguacaaacaaacucaag

SEQ ID NO: 3131017 - RNA, 19 nt, Artificial Sequence
  Description of Artificial Sequence: Synthetic oligonucleotide
gagguaggcgaucagcauc

SEQ ID NO: 3131018 - RNA, 19 nt, Artificial Sequence
  Description of Artificial Sequence: Synthetic oligonucleotide
uacuucggaccagagguag

SEQ ID NO: 3131019 - RNA, 19 nt, Artificial Sequence
  Description of Artificial Sequence: Synthetic oligonucleotide
auguuuaccuccucaucgu

SEQ ID NO: 3131020 - RNA, 19 nt, Artificial Sequence
  Description of Artificial Sequence: Synthetic oligonucleotide
uccgcuggcuuaccaacag

SEQ ID NO: 3131021 - RNA, 19 nt, Artificial Sequence
  Description of Artificial Sequence: Synthetic oligonucleotide
cacaguaaaaggacaagaa

SEQ ID NO: 3131022 - RNA, 19 nt, Artificial Sequence
  Description of Artificial Sequence: Synthetic oligonucleotide
gauccgcuggcuuaccaac

SEQ ID NO: 3131023 - RNA, 19 nt, Artificial Sequence
  Description of Artificial Sequence: Synthetic oligonucleotide
accacuguccacacugccc

SEQ ID NO: 3131024 - RNA, 19 nt, Artificial Sequence
  Description of Artificial Sequence: Synthetic oligonucleotide
caucagagcacacaguaaa

SEQ ID NO: 3131025 - RNA, 19 nt, Artificial Sequence
  Description of Artificial Sequence: Synthetic oligonucleotide
ucccuggagauacugcuuc

SEQ ID NO: 3131026 - RNA, 19 nt, Artificial Sequence
  Description of Artificial Sequence: Synthetic oligonucleotide
uagacuggguuuugucgcc

SEQ ID NO: 3131027 - RNA, 19 nt, Artificial Sequence
  Description of Artificial Sequence: Synthetic oligonucleotide
cuucuuguacuucggacca

SEQ ID NO: 3131028 - RNA, 19 nt, Artificial Sequence
  Description of Artificial Sequence: Synthetic oligonucleotide
uguuuaccuccucaucguc

SEQ ID NO: 3131029 - RNA, 19 nt, Artificial Sequence
  Description of Artificial Sequence: Synthetic oligonucleotide
ucggaccagagguaggcga

SEQ ID NO: 3131030 - RNA, 19 nt, Artificial Sequence
  Description of Artificial Sequence: Synthetic oligonucleotide
ucuuguacuucggaccaga

SEQ ID NO: 3131031 - RNA, 19 nt, Artificial Sequence
  Description of Artificial Sequence: Synthetic oligonucleotide
guuuaccuccucaucgucc

SEQ ID NO: 3131032 - RNA, 19 nt, Artificial Sequence
  Description of Artificial Sequence: Synthetic oligonucleotide
guacaaacaaacucaaguu

SEQ ID NO: 3131033 - RNA, 19 nt, Artificial Sequence
  Description of Artificial Sequence: Synthetic oligonucleotide
cuggagauacugcuucuug

SEQ ID NO: 3131034 - RNA, 19 nt, Artificial Sequence
  Description of Artificial Sequence: Synthetic oligonucleotide
cuucggaccagagguaggc

SEQ ID NO: 3131035 - RNA, 19 nt, Artificial Sequence
  Description of Artificial Sequence: Synthetic oligonucleotide
cuuguacuucggaccagag

SEQ ID NO: 3131036 - RNA, 19 nt, Artificial Sequence
  Description of Artificial Sequence: Synthetic oligonucleotide
aagcaccaccacuuucaug

SEQ ID NO: 3131037 - RNA, 19 nt, Artificial Sequence
  Description of Artificial Sequence: Synthetic oligonucleotide
cucaaguuucgauccgcug

SEQ ID NO: 3131038 - RNA, 19 nt, Artificial Sequence
  Description of Artificial Sequence: Synthetic oligonucleotide
cagagguaggcgaucagca

SEQ ID NO: 3131039 - RNA, 19 nt, Artificial Sequence
  Description of Artificial Sequence: Synthetic oligonucleotide
aucagcaucagagcacaca

SEQ ID NO: 3131040 - RNA, 19 nt, Artificial Sequence
  Description of Artificial Sequence: Synthetic oligonucleotide
uccgccuuagacuggguuu

SEQ ID NO: 3131041 - RNA, 19 nt, Artificial Sequence
  Description of Artificial Sequence: Synthetic oligonucleotide
gaccacuguccacacugcc

SEQ ID NO: 3131042 - RNA, 19 nt, Artificial Sequence
  Description of Artificial Sequence: Synthetic oligonucleotide
acugcuucuuguacuucgg

SEQ ID NO: 3131043 - RNA, 19 nt, Artificial Sequence
  Description of Artificial Sequence: Synthetic oligonucleotide
uaccaacaggaccacuguc

SEQ ID NO: 3131044 - RNA, 19 nt, Artificial Sequence
  Description of Artificial Sequence: Synthetic oligonucleotide
acuuucauguuuaccuccu

SEQ ID NO: 3131045 - RNA, 19 nt, Artificial Sequence
  Description of Artificial Sequence: Synthetic oligonucleotide
ucguccgccuuagacuggg

SEQ ID NO: 3131046 - RNA, 19 nt, Artificial Sequence
  Description of Artificial Sequence: Synthetic oligonucleotide
agcacacaguaaaaggaca

SEQ ID NO: 3131047 - RNA, 19 nt, Artificial Sequence
  Description of Artificial Sequence: Synthetic oligonucleotide
accacaagcaccaccacuu

SEQ ID NO: 3131048 - RNA, 19 nt, Artificial Sequence
  Description of Artificial Sequence: Synthetic oligonucleotide
uucggaccagagguaggcg

SEQ ID NO: 3131049 - RNA, 19 nt, Artificial Sequence
  Description of Artificial Sequence: Synthetic oligonucleotide
ggcgaucagcaucagagca

SEQ ID NO: 3131050 - RNA, 19 nt, Artificial Sequence
  Description of Artificial Sequence: Synthetic oligonucleotide
uuucgauccgcuggcuuac

SEQ ID NO: 3131051 - RNA, 19 nt, Artificial Sequence
  Description of Artificial Sequence: Synthetic oligonucleotide
gaacucccuggagauacug

SEQ ID NO: 3131052 - RNA, 19 nt, Artificial Sequence
  Description of Artificial Sequence: Synthetic oligonucleotide
agagguaggcgaucagcau

SEQ ID NO: 3131053 - RNA, 19 nt, Artificial Sequence
  Description of Artificial Sequence: Synthetic oligonucleotide
agguaggcgaucagcauca

SEQ ID NO: 3131054 - RNA, 19 nt, Artificial Sequence
  Description of Artificial Sequence: Synthetic oligonucleotide
guuucgauccgcuggcuua

SEQ ID NO: 3131055 - RNA, 19 nt, Artificial Sequence
  Description of Artificial Sequence: Synthetic oligonucleotide
caagaaauauagggaccac

SEQ ID NO: 3131056 - RNA, 19 nt, Artificial Sequence
  Description of Artificial Sequence: Synthetic oligonucleotide
ucgauccgcuggcuuacca

SEQ ID NO: 3131057 - RNA, 19 nt, Artificial Sequence
  Description of Artificial Sequence: Synthetic oligonucleotide
uccucaucguccgccuuag

SEQ ID NO: 3131058 - RNA, 19 nt, Artificial Sequence
  Description of Artificial Sequence: Synthetic oligonucleotide
ccacuguccacacugcccc

SEQ ID NO: 3131059 - RNA, 19 nt, Artificial Sequence
  Description of Artificial Sequence: Synthetic oligonucleotide
ugaacucccuggagauacu

SEQ ID NO: 3131060 - RNA, 19 nt, Artificial Sequence
  Description of Artificial Sequence: Synthetic oligonucleotide
auacugcuucuuguacuuc

SEQ ID NO: 3131061 - RNA, 19 nt, Artificial Sequence
  Description of Artificial Sequence: Synthetic oligonucleotide
aguuucgauccgcuggcuu

SEQ ID NO: 3131062 - RNA, 19 nt, Artificial Sequence
  Description of Artificial Sequence: Synthetic oligonucleotide
uucuuguacuucggaccag

SEQ ID NO: 3131063 - RNA, 19 nt, Artificial Sequence
  Description of Artificial Sequence: Synthetic oligonucleotide
caccacuuucauguuuacc

SEQ ID NO: 3131064 - RNA, 19 nt, Artificial Sequence
  Description of Artificial Sequence: Synthetic oligonucleotide
cuuucauguuuaccuccuc

SEQ ID NO: 3131065 - RNA, 19 nt, Artificial Sequence
  Description of Artificial Sequence: Synthetic oligonucleotide
uuaccuccucaucguccgc

SEQ ID NO: 3131066 - RNA, 19 nt, Artificial Sequence
  Description of Artificial Sequence: Synthetic oligonucleotide
ggagauacugcuucuugua

SEQ ID NO: 3131067 - RNA, 19 nt, Artificial Sequence
  Description of Artificial Sequence: Synthetic oligonucleotide
accagagguaggcgaucag

SEQ ID NO: 3131068 - RNA, 19 nt, Artificial Sequence
  Description of Artificial Sequence: Synthetic oligonucleotide
gaccacaagcaccaccacu

SEQ ID NO: 3131069 - RNA, 19 nt, Artificial Sequence
  Description of Artificial Sequence: Synthetic oligonucleotide
acuucggaccagagguagg

SEQ ID NO: 3131070 - RNA, 19 nt, Artificial Sequence
  Description of Artificial Sequence: Synthetic oligonucleotide
accaccacuuucauguuua

SEQ ID NO: 3131071 - RNA, 19 nt, Artificial Sequence
  Description of Artificial Sequence: Synthetic oligonucleotide
acucaaguuucgauccgcu

SEQ ID NO: 3131072 - RNA, 19 nt, Artificial Sequence
  Description of Artificial Sequence: Synthetic oligonucleotide
gggaccacaagcaccacca

SEQ ID NO: 3131073 - RNA, 19 nt, Artificial Sequence
  Description of Artificial Sequence: Synthetic oligonucleotide
aaguuucgauccgcuggcu

SEQ ID NO: 3131074 - RNA, 19 nt, Artificial Sequence
  Description of Artificial Sequence: Synthetic oligonucleotide
caacaggaccacuguccac

SEQ ID NO: 3131075 - RNA, 19 nt, Artificial Sequence
  Description of Artificial Sequence: Synthetic oligonucleotide
gaccagagguaggcgauca

SEQ ID NO: 3131076 - RNA, 19 nt, Artificial Sequence
  Description of Artificial Sequence: Synthetic oligonucleotide
aucagagcacacaguaaaa

SEQ ID NO: 3131077 - RNA, 19 nt, Artificial Sequence
  Description of Artificial Sequence: Synthetic oligonucleotide
ccuuagacuggguuuuguc

SEQ ID NO: 3131078 - RNA, 19 nt, Artificial Sequence
  Description of Artificial Sequence: Synthetic oligonucleotide
guaggcgaucagcaucaga

SEQ ID NO: 3131079 - RNA, 19 nt, Artificial Sequence
  Description of Artificial Sequence: Synthetic oligonucleotide
ccacuuucauguuuaccuc

SEQ ID NO: 3131080 - RNA, 19 nt, Artificial Sequence
  Description of Artificial Sequence: Synthetic oligonucleotide
ccagagguaggcgaucagc

SEQ ID NO: 3131081 - RNA, 19 nt, Artificial Sequence
  Description of Artificial Sequence: Synthetic oligonucleotide
cuggguuuugucgccaaaa

SEQ ID NO: 3131082 - RNA, 19 nt, Artificial Sequence
  Description of Artificial Sequence: Synthetic oligonucleotide
gacuggguuuugucgccaa

SEQ ID NO: 3131083 - RNA, 19 nt, Artificial Sequence
  Description of Artificial Sequence: Synthetic oligonucleotide
cugcuucuuguacuucgga

SEQ ID NO: 3131084 - RNA, 19 nt, Artificial Sequence
  Description of Artificial Sequence: Synthetic oligonucleotide
gaugaacucccuggagaua

SEQ ID NO: 3131085 - RNA, 19 nt, Artificial Sequence
  Description of Artificial Sequence: Synthetic oligonucleotide
agacuggguuuugucgcca

SEQ ID NO: 3131086 - RNA, 19 nt, Artificial Sequence
  Description of Artificial Sequence: Synthetic oligonucleotide
uucgauccgcuggcuuacc

SEQ ID NO: 3131087 - RNA, 19 nt, Artificial Sequence
  Description of Artificial Sequence: Synthetic oligonucleotide
gaucagcaucagagcacac

SEQ ID NO: 3131088 - RNA, 19 nt, Artificial Sequence
  Description of Artificial Sequence: Synthetic oligonucleotide
gcgaucagcaucagagcac

SEQ ID NO: 3131089 - RNA, 19 nt, Artificial Sequence
  Description of Artificial Sequence: Synthetic oligonucleotide
ccaacaggaccacugucca

SEQ ID NO: 3131090 - RNA, 19 nt, Artificial Sequence
  Description of Artificial Sequence: Synthetic oligonucleotide
auccgcuggcuuaccaaca

SEQ ID NO: 3131091 - RNA, 19 nt, Artificial Sequence
  Description of Artificial Sequence: Synthetic oligonucleotide
aucguccgccuuagacugg

SEQ ID NO: 3131092 - RNA, 19 nt, Artificial Sequence
  Description of Artificial Sequence: Synthetic oligonucleotide
gcuggcuuaccaacaggac

SEQ ID NO: 3131093 - RNA, 19 nt, Artificial Sequence
  Description of Artificial Sequence: Synthetic oligonucleotide
ggaccacuguccacacugc

SEQ ID NO: 3131094 - RNA, 19 nt, Artificial Sequence
  Description of Artificial Sequence: Synthetic oligonucleotide
cgcuggcuuaccaacagga

SEQ ID NO: 3131095 - RNA, 19 nt, Artificial Sequence
  Description of Artificial Sequence: Synthetic oligonucleotide
guacuucggaccagaggua

SEQ ID NO: 3131096 - RNA, 19 nt, Artificial Sequence
  Description of Artificial Sequence: Synthetic oligonucleotide
ggaccacaagcaccaccac

SEQ ID NO: 3131097 - RNA, 19 nt, Artificial Sequence
  Description of Artificial Sequence: Synthetic oligonucleotide
ccgcuggcuuaccaacagg

SEQ ID NO: 3131098 - RNA, 19 nt, Artificial Sequence
  Description of Artificial Sequence: Synthetic oligonucleotide
uagggaccacaagcaccac

SEQ ID NO: 3131099 - RNA, 19 nt, Artificial Sequence
  Description of Artificial Sequence: Synthetic oligonucleotide
gguaggcgaucagcaucag

SEQ ID NO: 3131100 - RNA, 19 nt, Artificial Sequence
  Description of Artificial Sequence: Synthetic oligonucleotide
cgaucagcaucagagcaca

SEQ ID NO: 3131101 - RNA, 19 nt, Artificial Sequence
  Description of Artificial Sequence: Synthetic oligonucleotide
caagcaccaccacuuucau

SEQ ID NO: 3131102 - RNA, 19 nt, Artificial Sequence
  Description of Artificial Sequence: Synthetic oligonucleotide
ggcuuaccaacaggaccac

SEQ ID NO: 3131103 - RNA, 19 nt, Artificial Sequence
  Description of Artificial Sequence: Synthetic oligonucleotide
guccgccuuagacuggguu

SEQ ID NO: 3131104 - RNA, 19 nt, Artificial Sequence
  Description of Artificial Sequence: Synthetic oligonucleotide
ggaccagagguaggcgauc

SEQ ID NO: 3131105 - RNA, 19 nt, Artificial Sequence
  Description of Artificial Sequence: Synthetic oligonucleotide
cucccuggagauacugcuu

SEQ ID NO: 3131106 - RNA, 19 nt, Artificial Sequence
  Description of Artificial Sequence: Synthetic oligonucleotide
caccaccacuuucauguuu

SEQ ID NO: 3131107 - RNA, 19 nt, Artificial Sequence
  Description of Artificial Sequence: Synthetic oligonucleotide
cgauccgcuggcuuaccaa

SEQ ID NO: 3131108 - RNA, 19 nt, Artificial Sequence
  Description of Artificial Sequence: Synthetic oligonucleotide
gccuuagacuggguuuugu

SEQ ID NO: 3131109 - RNA, 19 nt, Artificial Sequence
  Description of Artificial Sequence: Synthetic oligonucleotide
gcuuaccaacaggaccacu

SEQ ID NO: 3131110 - RNA, 19 nt, Artificial Sequence
  Description of Artificial Sequence: Synthetic oligonucleotide
cccuggagauacugcuucu

SEQ ID NO: 3131111 - RNA, 19 nt, Artificial Sequence
  Description of Artificial Sequence: Synthetic oligonucleotide
cggaccagagguaggcgau

SEQ ID NO: 3131112 - RNA, 19 nt, Artificial Sequence
  Description of Artificial Sequence: Synthetic oligonucleotide
ccucaucguccgccuuaga

SEQ ID NO: 3131113 - RNA, 19 nt, Artificial Sequence
  Description of Artificial Sequence: Synthetic oligonucleotide
ccacaagcaccaccacuuu

SEQ ID NO: 3131114 - RNA, 19 nt, Artificial Sequence
  Description of Artificial Sequence: Synthetic oligonucleotide
cguccgccuuagacugggu

SEQ ID NO: 3131115 - RNA, 19 nt, Artificial Sequence
  Description of Artificial Sequence: Synthetic oligonucleotide
aaagagcacauccuggacc

SEQ ID NO: 3131116 - RNA, 19 nt, Artificial Sequence
  Description of Artificial Sequence: Synthetic oligonucleotide
aaggguuuccaccuccugc

SEQ ID NO: 3131117 - RNA, 19 nt, Artificial Sequence
  Description of Artificial Sequence: Synthetic oligonucleotide
accuccugcacgcagagcc

SEQ ID NO: 3131118 - RNA, 19 nt, Artificial Sequence
  Description of Artificial Sequence: Synthetic oligonucleotide
uucaaagagcacauccugg

SEQ ID NO: 3131119 - RNA, 19 nt, Artificial Sequence
  Description of Artificial Sequence: Synthetic oligonucleotide
ucugcaggguuucaaagag

SEQ ID NO: 3131120 - RNA, 19 nt, Artificial Sequence
  Description of Artificial Sequence: Synthetic oligonucleotide
uuucaaagagcacauccug

SEQ ID NO: 3131121 - RNA, 19 nt, Artificial Sequence
  Description of Artificial Sequence: Synthetic oligonucleotide
augaugaggaguuucuguc

SEQ ID NO: 3131122 - RNA, 19 nt, Artificial Sequence
  Description of Artificial Sequence: Synthetic oligonucleotide
gaugaggaguuucuguccg

SEQ ID NO: 3131123 - RNA, 19 nt, Artificial Sequence
  Description of Artificial Sequence: Synthetic oligonucleotide
ugcaggguuucaaagagca

SEQ ID NO: 3131124 - RNA, 19 nt, Artificial Sequence
  Description of Artificial Sequence: Synthetic oligonucleotide
aggggaaaggguuuccacc

SEQ ID NO: 3131125 - RNA, 19 nt, Artificial Sequence
  Description of Artificial Sequence: Synthetic oligonucleotide
aagagcacauccuggacca

SEQ ID NO: 3131126 - RNA, 19 nt, Artificial Sequence
  Description of Artificial Sequence: Synthetic oligonucleotide
ucaaagagcacauccugga

SEQ ID NO: 3131127 - RNA, 19 nt, Artificial Sequence
  Description of Artificial Sequence: Synthetic oligonucleotide
ugaugaggaguuucugucc

SEQ ID NO: 3131128 - RNA, 19 nt, Artificial Sequence
  Description of Artificial Sequence: Synthetic oligonucleotide
ugucugcaggguuucaaag

SEQ ID NO: 3131129 - RNA, 19 nt, Artificial Sequence
  Description of Artificial Sequence: Synthetic oligonucleotide
gucggcuccacucagcacc

SEQ ID NO: 3131130 - RNA, 19 nt, Artificial Sequence
  Description of Artificial Sequence: Synthetic oligonucleotide
guuucuguccgggugagcc

SEQ ID NO: 3131131 - RNA, 19 nt, Artificial Sequence
  Description of Artificial Sequence: Synthetic oligonucleotide
aggaguuucuguccgggug

SEQ ID NO: 3131132 - RNA, 19 nt, Artificial Sequence
  Description of Artificial Sequence: Synthetic oligonucleotide
ugaggaguuucuguccggg

SEQ ID NO: 3131133 - RNA, 19 nt, Artificial Sequence
  Description of Artificial Sequence: Synthetic oligonucleotide
ucagcaccagcacacucug

SEQ ID NO: 3131134 - RNA, 19 nt, Artificial Sequence
  Description of Artificial Sequence: Synthetic oligonucleotide
uccacucagcaccagcaca

SEQ ID NO: 3131135 - RNA, 19 nt, Artificial Sequence
  Description of Artificial Sequence: Synthetic oligonucleotide
aaaggguuuccaccuccug

SEQ ID NO: 3131136 - RNA, 19 nt, Artificial Sequence
  Description of Artificial Sequence: Synthetic oligonucleotide
gaugaugaggaguuucugu

SEQ ID NO: 3131137 - RNA, 19 nt, Artificial Sequence
  Description of Artificial Sequence: Synthetic oligonucleotide
caggucagccgcuggagcg

SEQ ID NO: 3131138 - RNA, 19 nt, Artificial Sequence
  Description of Artificial Sequence: Synthetic oligonucleotide
acucagcaccagcacacuc

SEQ ID NO: 3131139 - RNA, 19 nt, Artificial Sequence
  Description of Artificial Sequence: Synthetic oligonucleotide
guccgggugagccaguggc

SEQ ID NO: 3131140 - RNA, 19 nt, Artificial Sequence
  Description of Artificial Sequence: Synthetic oligonucleotide
caggguuucaaagagcaca

SEQ ID NO: 3131141 - RNA, 19 nt, Artificial Sequence
  Description of Artificial Sequence: Synthetic oligonucleotide
uccgggugagccaguggcg

SEQ ID NO: 3131142 - RNA, 19 nt, Artificial Sequence
  Description of Artificial Sequence: Synthetic oligonucleotide
gucaguccaggggaaaggg

SEQ ID NO: 3131143 - RNA, 19 nt, Artificial Sequence
  Description of Artificial Sequence: Synthetic oligonucleotide
augaggaguuucuguccgg

SEQ ID NO: 3131144 - RNA, 19 nt, Artificial Sequence
  Description of Artificial Sequence: Synthetic oligonucleotide
caaagagcacauccuggac

SEQ ID NO: 3131145 - RNA, 19 nt, Artificial Sequence
  Description of Artificial Sequence: Synthetic oligonucleotide
uucuguccgggugagccag

SEQ ID NO: 3131146 - RNA, 19 nt, Artificial Sequence
  Description of Artificial Sequence: Synthetic oligonucleotide
ucaguccaggggaaagggu

SEQ ID NO: 3131147 - RNA, 19 nt, Artificial Sequence
  Description of Artificial Sequence: Synthetic oligonucleotide
ggaaaggguuuccaccucc

SEQ ID NO: 3131148 - RNA, 19 nt, Artificial Sequence
  Description of Artificial Sequence: Synthetic oligonucleotide
ucugcagccccucgucugu

SEQ ID NO: 3131149 - RNA, 19 nt, Artificial Sequence
  Description of Artificial Sequence: Synthetic oligonucleotide
gucugcaggguuucaaaga

SEQ ID NO: 3131150 - RNA, 19 nt, Artificial Sequence
  Description of Artificial Sequence: Synthetic oligonucleotide
uguccgggugagccagugg

SEQ ID NO: 3131151 - RNA, 19 nt, Artificial Sequence
  Description of Artificial Sequence: Synthetic oligonucleotide
uuucuguccgggugagcca

SEQ ID NO: 3131152 - RNA, 19 nt, Artificial Sequence
  Description of Artificial Sequence: Synthetic oligonucleotide
cugcaggguuucaaagagc

SEQ ID NO: 3131153 - RNA, 19 nt, Artificial Sequence
  Description of Artificial Sequence: Synthetic oligonucleotide
ucugcucgccgucggcucc

SEQ ID NO: 3131154 - RNA, 19 nt, Artificial Sequence
  Description of Artificial Sequence: Synthetic oligonucleotide
gguuuccaccuccugcacg

SEQ ID NO: 3131155 - RNA, 19 nt, Artificial Sequence
  Description of Artificial Sequence: Synthetic oligonucleotide
ucgucugucugcaggguuu

SEQ ID NO: 3131156 - RNA, 19 nt, Artificial Sequence
  Description of Artificial Sequence: Synthetic oligonucleotide
ggcuccgucaguccagggg

SEQ ID NO: 3131157 - RNA, 19 nt, Artificial Sequence
  Description of Artificial Sequence: Synthetic oligonucleotide
cucgccgucggcuccacuc

SEQ ID NO: 3131158 - RNA, 19 nt, Artificial Sequence
  Description of Artificial Sequence: Synthetic oligonucleotide
aggucagccgcuggagcgc

SEQ ID NO: 3131159 - RNA, 19 nt, Artificial Sequence
  Description of Artificial Sequence: Synthetic oligonucleotide
uccugcagcgcugccgccg

SEQ ID NO: 3131160 - RNA, 19 nt, Artificial Sequence
  Description of Artificial Sequence: Synthetic oligonucleotide
guuucaaagagcacauccu

SEQ ID NO: 3131161 - RNA, 19 nt, Artificial Sequence
  Description of Artificial Sequence: Synthetic oligonucleotide
ucugucugcaggguuucaa

SEQ ID NO: 3131162 - RNA, 19 nt, Artificial Sequence
  Description of Artificial Sequence: Synthetic oligonucleotide
uccugcacgcagagccggg

SEQ ID NO: 3131163 - RNA, 19 nt, Artificial Sequence
  Description of Artificial Sequence: Synthetic oligonucleotide
gccgccguuguccagcagg

SEQ ID NO: 3131164 - RNA, 19 nt, Artificial Sequence
  Description of Artificial Sequence: Synthetic oligonucleotide
gcagagccgggucugcucg

SEQ ID NO: 3131165 - RNA, 19 nt, Artificial Sequence
  Description of Artificial Sequence: Synthetic oligonucleotide
ucggcuccacucagcacca

SEQ ID NO: 3131166 - RNA, 19 nt, Artificial Sequence
  Description of Artificial Sequence: Synthetic oligonucleotide
ggaguuucuguccggguga

SEQ ID NO: 3131167 - RNA, 19 nt, Artificial Sequence
  Description of Artificial Sequence: Synthetic oligonucleotide
gaguuucuguccgggugag

SEQ ID NO: 3131168 - RNA, 19 nt, Artificial Sequence
  Description of Artificial Sequence: Synthetic oligonucleotide
aguuucuguccgggugagc

SEQ ID NO: 3131169 - RNA, 19 nt, Artificial Sequence
  Description of Artificial Sequence: Synthetic oligonucleotide
aguggcggcuggcuccguc

SEQ ID NO: 3131170 - RNA, 19 nt, Artificial Sequence
  Description of Artificial Sequence: Synthetic oligonucleotide
cacacucugcagccccucg

SEQ ID NO: 3131171 - RNA, 19 nt, Artificial Sequence
  Description of Artificial Sequence: Synthetic oligonucleotide
agagccgggucugcucgcc

SEQ ID NO: 3131172 - RNA, 19 nt, Artificial Sequence
  Description of Artificial Sequence: Synthetic oligonucleotide
agccaguggcggcuggcuc

SEQ ID NO: 3131173 - RNA, 19 nt, Artificial Sequence
  Description of Artificial Sequence: Synthetic oligonucleotide
aggguuucaaagagcacau

SEQ ID NO: 3131174 - RNA, 19 nt, Artificial Sequence
  Description of Artificial Sequence: Synthetic oligonucleotide
ucgccgucggcuccacuca

SEQ ID NO: 3131175 - RNA, 19 nt, Artificial Sequence
  Description of Artificial Sequence: Synthetic oligonucleotide
uggagcgcugcggaugaug

SEQ ID NO: 3131176 - RNA, 19 nt, Artificial Sequence
  Description of Artificial Sequence: Synthetic oligonucleotide
acacucugcagccccucgu

SEQ ID NO: 3131177 - RNA, 19 nt, Artificial Sequence
  Description of Artificial Sequence: Synthetic oligonucleotide
agcaggucagccgcuggag

SEQ ID NO: 3131178 - RNA, 19 nt, Artificial Sequence
  Description of Artificial Sequence: Synthetic oligonucleotide
acucugcagccccucgucu

SEQ ID NO: 3131179 - RNA, 19 nt, Artificial Sequence
  Description of Artificial Sequence: Synthetic oligonucleotide
gccguuguccagcagguca

SEQ ID NO: 3131180 - RNA, 19 nt, Artificial Sequence
  Description of Artificial Sequence: Synthetic oligonucleotide
uggcggcuggcuccgucag

SEQ ID NO: 3131181 - RNA, 19 nt, Artificial Sequence
  Description of Artificial Sequence: Synthetic oligonucleotide
cucagcaccagcacacucu

SEQ ID NO: 3131182 - RNA, 19 nt, Artificial Sequence
  Description of Artificial Sequence: Synthetic oligonucleotide
uccaggggaaaggguuucc

SEQ ID NO: 3131183 - RNA, 19 nt, Artificial Sequence
  Description of Artificial Sequence: Synthetic oligonucleotide
gagcgcugcggaugaugag

SEQ ID NO: 3131184 - RNA, 19 nt, Artificial Sequence
  Description of Artificial Sequence: Synthetic oligonucleotide
gcuccgucaguccagggga

SEQ ID NO: 3131185 - RNA, 19 nt, Artificial Sequence
  Description of Artificial Sequence: Synthetic oligonucleotide
cuccugcacgcagagccgg

SEQ ID NO: 3131186 - RNA, 19 nt, Artificial Sequence
  Description of Artificial Sequence: Synthetic oligonucleotide
cacucugcagccccucguc

SEQ ID NO: 3131187 - RNA, 19 nt, Artificial Sequence
  Description of Artificial Sequence: Synthetic oligonucleotide
ggaugaugaggaguuucug

SEQ ID NO: 3131188 - RNA, 19 nt, Artificial Sequence
  Description of Artificial Sequence: Synthetic oligonucleotide
ugagccaguggcggcuggc

SEQ ID NO: 3131189 - RNA, 19 nt, Artificial Sequence
  Description of Artificial Sequence: Synthetic oligonucleotide
uccagcaggucagccgcug

SEQ ID NO: 3131190 - RNA, 19 nt, Artificial Sequence
  Description of Artificial Sequence: Synthetic oligonucleotide
cugucugcaggguuucaaa

SEQ ID NO: 3131191 - RNA, 19 nt, Artificial Sequence
  Description of Artificial Sequence: Synthetic oligonucleotide
gagccgggucugcucgccg

SEQ ID NO: 3131192 - RNA, 19 nt, Artificial Sequence
  Description of Artificial Sequence: Synthetic oligonucleotide
ggggaaaggguuuccaccu

SEQ ID NO: 3131193 - RNA, 19 nt, Artificial Sequence
  Description of Artificial Sequence: Synthetic oligonucleotide
cccucgucugucugcaggg

SEQ ID NO: 3131194 - RNA, 19 nt, Artificial Sequence
  Description of Artificial Sequence: Synthetic oligonucleotide
cuggcuccgucaguccagg

SEQ ID NO: 3131195 - RNA, 19 nt, Artificial Sequence
  Description of Artificial Sequence: Synthetic oligonucleotide
agagcacauccuggaccac

SEQ ID NO: 3131196 - RNA, 19 nt, Artificial Sequence
  Description of Artificial Sequence: Synthetic oligonucleotide
gccaguggcggcuggcucc

SEQ ID NO: 3131197 - RNA, 19 nt, Artificial Sequence
  Description of Artificial Sequence: Synthetic oligonucleotide
ugcagccccucgucugucu

SEQ ID NO: 3131198 - RNA, 19 nt, Artificial Sequence
  Description of Artificial Sequence: Synthetic oligonucleotide
ccguuguccagcaggucag

SEQ ID NO: 3131199 - RNA, 19 nt, Artificial Sequence
  Description of Artificial Sequence: Synthetic oligonucleotide
ggcuccacucagcaccagc

SEQ ID NO: 3131200 - RNA, 19 nt, Artificial Sequence
  Description of Artificial Sequence: Synthetic oligonucleotide
uggcuccgucaguccaggg

SEQ ID NO: 3131201 - RNA, 19 nt, Artificial Sequence
  Description of Artificial Sequence: Synthetic oligonucleotide
ccuccugcagcgcugccgc

SEQ ID NO: 3131202 - RNA, 19 nt, Artificial Sequence
  Description of Artificial Sequence: Synthetic oligonucleotide
cagccccucgucugucugc

SEQ ID NO: 3131203 - RNA, 19 nt, Artificial Sequence
  Description of Artificial Sequence: Synthetic oligonucleotide
gaaaggguuuccaccuccu

SEQ ID NO: 3131204 - RNA, 19 nt, Artificial Sequence
  Description of Artificial Sequence: Synthetic oligonucleotide
gcaggucagccgcuggagc

SEQ ID NO: 3131205 - RNA, 19 nt, Artificial Sequence
  Description of Artificial Sequence: Synthetic oligonucleotide
agccgggucugcucgccgu

SEQ ID NO: 3131206 - RNA, 19 nt, Artificial Sequence
  Description of Artificial Sequence: Synthetic oligonucleotide
ucuguccgggugagccagu

SEQ ID NO: 3131207 - RNA, 19 nt, Artificial Sequence
  Description of Artificial Sequence: Synthetic oligonucleotide
caguccaggggaaaggguu

SEQ ID NO: 3131208 - RNA, 19 nt, Artificial Sequence
  Description of Artificial Sequence: Synthetic oligonucleotide
ccccucgucugucugcagg

SEQ ID NO: 3131209 - RNA, 19 nt, Artificial Sequence
  Description of Artificial Sequence: Synthetic oligonucleotide
cagcaccagcacacucugc

SEQ ID NO: 3131210 - RNA, 19 nt, Artificial Sequence
  Description of Artificial Sequence: Synthetic oligonucleotide
gaggaguuucuguccgggu

SEQ ID NO: 3131211 - RNA, 19 nt, Artificial Sequence
  Description of Artificial Sequence: Synthetic oligonucleotide
gucugcucgccgucggcuc

SEQ ID NO: 3131212 - RNA, 19 nt, Artificial Sequence
  Description of Artificial Sequence: Synthetic oligonucleotide
guggcggcuggcuccguca

SEQ ID NO: 3131213 - RNA, 19 nt, Artificial Sequence
  Description of Artificial Sequence: Synthetic oligonucleotide
aguccaggggaaaggguuu

SEQ ID NO: 3131214 - RNA, 19 nt, Artificial Sequence
  Description of Artificial Sequence: Synthetic oligonucleotide
uccgucaguccaggggaaa

SEQ ID NO: 3131215 - RNA, 19 nt, Artificial Sequence
  Description of Artificial Sequence: Synthetic oligonucleotide
cugcacgcagagccggguc

SEQ ID NO: 3131216 - RNA, 19 nt, Artificial Sequence
  Description of Artificial Sequence: Synthetic oligonucleotide
cagagccgggucugcucgc

SEQ ID NO: 3131217 - RNA, 19 nt, Artificial Sequence
  Description of Artificial Sequence: Synthetic oligonucleotide
ggagcgcugcggaugauga

SEQ ID NO: 3131218 - RNA, 19 nt, Artificial Sequence
  Description of Artificial Sequence: Synthetic oligonucleotide
ccuccugcacgcagagccg

SEQ ID NO: 3131219 - RNA, 19 nt, Artificial Sequence
  Description of Artificial Sequence: Synthetic oligonucleotide
agccccucgucugucugca

SEQ ID NO: 3131220 - RNA, 19 nt, Artificial Sequence
  Description of Artificial Sequence: Synthetic oligonucleotide
gcggaugaugaggaguuuc

SEQ ID NO: 3131221 - RNA, 19 nt, Artificial Sequence
  Description of Artificial Sequence: Synthetic oligonucleotide
gcuggagcgcugcggauga

SEQ ID NO: 3131222 - RNA, 19 nt, Artificial Sequence
  Description of Artificial Sequence: Synthetic oligonucleotide
gcugccgccguuguccagc

SEQ ID NO: 3131223 - RNA, 19 nt, Artificial Sequence
  Description of Artificial Sequence: Synthetic oligonucleotide
cagcaggucagccgcugga

SEQ ID NO: 3131224 - RNA, 19 nt, Artificial Sequence
  Description of Artificial Sequence: Synthetic oligonucleotide
guccaggggaaaggguuuc

SEQ ID NO: 3131225 - RNA, 19 nt, Artificial Sequence
  Description of Artificial Sequence: Synthetic oligonucleotide
gggaaaggguuuccaccuc

SEQ ID NO: 3131226 - RNA, 19 nt, Artificial Sequence
  Description of Artificial Sequence: Synthetic oligonucleotide
cuguccgggugagccagug

SEQ ID NO: 3131227 - RNA, 19 nt, Artificial Sequence
  Description of Artificial Sequence: Synthetic oligonucleotide
gccuccugcagcgcugccg

SEQ ID NO: 3131228 - RNA, 19 nt, Artificial Sequence
  Description of Artificial Sequence: Synthetic oligonucleotide
ccgggugagccaguggcgg

SEQ ID NO: 3131229 - RNA, 19 nt, Artificial Sequence
  Description of Artificial Sequence: Synthetic oligonucleotide
ggcuggcuccgucagucca

SEQ ID NO: 3131230 - RNA, 19 nt, Artificial Sequence
  Description of Artificial Sequence: Synthetic oligonucleotide
gcuggcuccgucaguccag

SEQ ID NO: 3131231 - RNA, 19 nt, Artificial Sequence
  Description of Artificial Sequence: Synthetic oligonucleotide
agcacacucugcagccccu

SEQ ID NO: 3131232 - RNA, 19 nt, Artificial Sequence
  Description of Artificial Sequence: Synthetic oligonucleotide
ccagcaggucagccgcugg

SEQ ID NO: 3131233 - RNA, 19 nt, Artificial Sequence
  Description of Artificial Sequence: Synthetic oligonucleotide
ugcggaugaugaggaguuu

SEQ ID NO: 3131234 - RNA, 19 nt, Artificial Sequence
  Description of Artificial Sequence: Synthetic oligonucleotide
ggguuuccaccuccugcac

SEQ ID NO: 3131235 - RNA, 19 nt, Artificial Sequence
  Description of Artificial Sequence: Synthetic oligonucleotide
gcagccccucgucugucug

SEQ ID NO: 3131236 - RNA, 19 nt, Artificial Sequence
  Description of Artificial Sequence: Synthetic oligonucleotide
ccgucaguccaggggaaag

SEQ ID NO: 3131237 - RNA, 19 nt, Artificial Sequence
  Description of Artificial Sequence: Synthetic oligonucleotide
gcaggguuucaaagagcac

SEQ ID NO: 3131238 - RNA, 19 nt, Artificial Sequence
  Description of Artificial Sequence: Synthetic oligonucleotide
cuccgucaguccaggggaa

SEQ ID NO: 3131239 - RNA, 19 nt, Artificial Sequence
  Description of Artificial Sequence: Synthetic oligonucleotide
gcggcuggcuccgucaguc

SEQ ID NO: 3131240 - RNA, 19 nt, Artificial Sequence
  Description of Artificial Sequence: Synthetic oligonucleotide
acgcagagccgggucugcu

SEQ ID NO: 3131241 - RNA, 19 nt, Artificial Sequence
  Description of Artificial Sequence: Synthetic oligonucleotide
gggucugcucgccgucggc

SEQ ID NO: 3131242 - RNA, 19 nt, Artificial Sequence
  Description of Artificial Sequence: Synthetic oligonucleotide
ggguuucaaagagcacauc

SEQ ID NO: 3131243 - RNA, 19 nt, Artificial Sequence
  Description of Artificial Sequence: Synthetic oligonucleotide
ccaguggcggcuggcuccg

SEQ ID NO: 3131244 - RNA, 19 nt, Artificial Sequence
  Description of Artificial Sequence: Synthetic oligonucleotide
gagccaguggcggcuggcu

SEQ ID NO: 3131245 - RNA, 19 nt, Artificial Sequence
  Description of Artificial Sequence: Synthetic oligonucleotide
cucgucugucugcaggguu

SEQ ID NO: 3131246 - RNA, 19 nt, Artificial Sequence
  Description of Artificial Sequence: Synthetic oligonucleotide
gcgcugcggaugaugagga

SEQ ID NO: 3131247 - RNA, 19 nt, Artificial Sequence
  Description of Artificial Sequence: Synthetic oligonucleotide
gucugucugcaggguuuca

SEQ ID NO: 3131248 - RNA, 19 nt, Artificial Sequence
  Description of Artificial Sequence: Synthetic oligonucleotide
ccgucggcuccacucagca

SEQ ID NO: 3131249 - RNA, 19 nt, Artificial Sequence
  Description of Artificial Sequence: Synthetic oligonucleotide
cggaugaugaggaguuucu

SEQ ID NO: 3131250 - RNA, 19 nt, Artificial Sequence
  Description of Artificial Sequence: Synthetic oligonucleotide
cagcgcugccgccguuguc

SEQ ID NO: 3131251 - RNA, 19 nt, Artificial Sequence
  Description of Artificial Sequence: Synthetic oligonucleotide
ccgggucugcucgccgucg

SEQ ID NO: 3131252 - RNA, 19 nt, Artificial Sequence
  Description of Artificial Sequence: Synthetic oligonucleotide
gccgucggcuccacucagc

SEQ ID NO: 3131253 - RNA, 19 nt, Artificial Sequence
  Description of Artificial Sequence: Synthetic oligonucleotide
ggucugcucgccgucggcu

SEQ ID NO: 3131254 - RNA, 19 nt, Artificial Sequence
  Description of Artificial Sequence: Synthetic oligonucleotide
ugcucgccgucggcuccac

SEQ ID NO: 3131255 - RNA, 19 nt, Artificial Sequence
  Description of Artificial Sequence: Synthetic oligonucleotide
gucagccgcuggagcgcug

SEQ ID NO: 3131256 - RNA, 19 nt, Artificial Sequence
  Description of Artificial Sequence: Synthetic oligonucleotide
cgcuggagcgcugcggaug

SEQ ID NO: 3131257 - RNA, 19 nt, Artificial Sequence
  Description of Artificial Sequence: Synthetic oligonucleotide
cgggucugcucgccgucgg

SEQ ID NO: 3131258 - RNA, 19 nt, Artificial Sequence
  Description of Artificial Sequence: Synthetic oligonucleotide
cguuguccagcaggucagc

SEQ ID NO: 3131259 - RNA, 19 nt, Artificial Sequence
  Description of Artificial Sequence: Synthetic oligonucleotide
gccgggucugcucgccguc

SEQ ID NO: 3131260 - RNA, 19 nt, Artificial Sequence
  Description of Artificial Sequence: Synthetic oligonucleotide
cacucagcaccagcacacu

SEQ ID NO: 3131261 - RNA, 19 nt, Artificial Sequence
  Description of Artificial Sequence: Synthetic oligonucleotide
gcacacucugcagccccuc

SEQ ID NO: 3131262 - RNA, 19 nt, Artificial Sequence
  Description of Artificial Sequence: Synthetic oligonucleotide
cgucggcuccacucagcac

SEQ ID NO: 3131263 - RNA, 19 nt, Artificial Sequence
  Description of Artificial Sequence: Synthetic oligonucleotide
gccccucgucugucugcag

SEQ ID NO: 3131264 - RNA, 19 nt, Artificial Sequence
  Description of Artificial Sequence: Synthetic oligonucleotide
gcgcugccgccguugucca

SEQ ID NO: 3131265 - RNA, 19 nt, Artificial Sequence
  Description of Artificial Sequence: Synthetic oligonucleotide
gcagcgcugccgccguugu

SEQ ID NO: 3131266 - RNA, 19 nt, Artificial Sequence
  Description of Artificial Sequence: Synthetic oligonucleotide
cgccgucggcuccacucag

SEQ ID NO: 3131267 - RNA, 19 nt, Artificial Sequence
  Description of Artificial Sequence: Synthetic oligonucleotide
ggucagccgcuggagcgcu

SEQ ID NO: 3131268 - RNA, 19 nt, Artificial Sequence
  Description of Artificial Sequence: Synthetic oligonucleotide
ggcggcuggcuccgucagu

SEQ ID NO: 3131269 - RNA, 19 nt, Artificial Sequence
  Description of Artificial Sequence: Synthetic oligonucleotide
ccugcagcgcugccgccgu

SEQ ID NO: 3131270 - RNA, 19 nt, Artificial Sequence
  Description of Artificial Sequence: Synthetic oligonucleotide
ccugcacgcagagccgggu

SEQ ID NO: 3131271 - RNA, 19 nt, Artificial Sequence
  Description of Artificial Sequence: Synthetic oligonucleotide
ccucgucugucugcagggu

SEQ ID NO: 3131272 - RNA, 19 nt, Artificial Sequence
  Description of Artificial Sequence: Synthetic oligonucleotide
cgccguuguccagcagguc

SEQ ID NO: 3131273 - RNA, 19 nt, Artificial Sequence
  Description of Artificial Sequence: Synthetic oligonucleotide
cuggagcgcugcggaugau

SEQ ID NO: 3131274 - RNA, 19 nt, Artificial Sequence
  Description of Artificial Sequence: Synthetic oligonucleotide
cugcagcgcugccgccguu

SEQ ID NO: 3131275 - RNA, 19 nt, Artificial Sequence
  Description of Artificial Sequence: Synthetic oligonucleotide
ccgcuggagcgcugcggau

SEQ ID NO: 3131276 - RNA, 19 nt, Artificial Sequence
  Description of Artificial Sequence: Synthetic oligonucleotide
caguggcggcuggcuccgu

SEQ ID NO: 3131277 - RNA, 19 nt, Artificial Sequence
  Description of Artificial Sequence: Synthetic oligonucleotide
aacccugcaaauuugaugc

SEQ ID NO: 3131278 - RNA, 19 nt, Artificial Sequence
  Description of Artificial Sequence: Synthetic oligonucleotide
aaugauaucaagcuaaaug

SEQ ID NO: 3131279 - RNA, 19 nt, Artificial Sequence
  Description of Artificial Sequence: Synthetic oligonucleotide
auuuauauuaaauacuggg

SEQ ID NO: 3131280 - RNA, 19 nt, Artificial Sequence
  Description of Artificial Sequence: Synthetic oligonucleotide
aauacugggaaaccaaccc

SEQ ID NO: 3131281 - RNA, 19 nt, Artificial Sequence
  Description of Artificial Sequence: Synthetic oligonucleotide
uuaauaaggagauucauga

SEQ ID NO: 3131282 - RNA, 19 nt, Artificial Sequence
  Description of Artificial Sequence: Synthetic oligonucleotide
aauaaggagauucaugaug

SEQ ID NO: 3131283 - RNA, 19 nt, Artificial Sequence
  Description of Artificial Sequence: Synthetic oligonucleotide
uuuauauuaaauacuggga

SEQ ID NO: 3131284 - RNA, 19 nt, Artificial Sequence
  Description of Artificial Sequence: Synthetic oligonucleotide
aauuugaugcuuacaaugc

SEQ ID NO: 3131285 - RNA, 19 nt, Artificial Sequence
  Description of Artificial Sequence: Synthetic oligonucleotide
uuauauuaaauacugggaa

SEQ ID NO: 3131286 - RNA, 19 nt, Artificial Sequence
  Description of Artificial Sequence: Synthetic oligonucleotide
augauaucaagcuaaauga

SEQ ID NO: 3131287 - RNA, 19 nt, Artificial Sequence
  Description of Artificial Sequence: Synthetic oligonucleotide
uuuaauaaggagauucaug

SEQ ID NO: 3131288 - RNA, 19 nt, Artificial Sequence
  Description of Artificial Sequence: Synthetic oligonucleotide
auugcaucaaaugugcacc

SEQ ID NO: 3131289 - RNA, 19 nt, Artificial Sequence
  Description of Artificial Sequence: Synthetic oligonucleotide
aaugagagcacaaugauau

SEQ ID NO: 3131290 - RNA, 19 nt, Artificial Sequence
  Description of Artificial Sequence: Synthetic oligonucleotide
auauuaaauacugggaaac

SEQ ID NO: 3131291 - RNA, 19 nt, Artificial Sequence
  Description of Artificial Sequence: Synthetic oligonucleotide
ugcaccugauuuaauaagg

SEQ ID NO: 3131292 - RNA, 19 nt, Artificial Sequence
  Description of Artificial Sequence: Synthetic oligonucleotide
ugauuuaauaaggagauuc

SEQ ID NO: 3131293 - RNA, 19 nt, Artificial Sequence
  Description of Artificial Sequence: Synthetic oligonucleotide
auauuuauauuaaauacug

SEQ ID NO: 3131294 - RNA, 19 nt, Artificial Sequence
  Description of Artificial Sequence: Synthetic oligonucleotide
auucaugaugucuggaugg

SEQ ID NO: 3131295 - RNA, 19 nt, Artificial Sequence
  Description of Artificial Sequence: Synthetic oligonucleotide
caagcuaaaugaaugcugg

SEQ ID NO: 3131296 - RNA, 19 nt, Artificial Sequence
  Description of Artificial Sequence: Synthetic oligonucleotide
ucaaaugugcaccugauuu

SEQ ID NO: 3131297 - RNA, 19 nt, Artificial Sequence
  Description of Artificial Sequence: Synthetic oligonucleotide
aaauacugggaaaccaacc

SEQ ID NO: 3131298 - RNA, 19 nt, Artificial Sequence
  Description of Artificial Sequence: Synthetic oligonucleotide
aaugcuuuagccaaugaga

SEQ ID NO: 3131299 - RNA, 19 nt, Artificial Sequence
  Description of Artificial Sequence: Synthetic oligonucleotide
agcacaaugauaucaagcu

SEQ ID NO: 3131300 - RNA, 19 nt, Artificial Sequence
  Description of Artificial Sequence: Synthetic oligonucleotide
uggaugguuguucagagca

SEQ ID NO: 3131301 - RNA, 19 nt, Artificial Sequence
  Description of Artificial Sequence: Synthetic oligonucleotide
ucaagcuaaaugaaugcug

SEQ ID NO: 3131302 - RNA, 19 nt, Artificial Sequence
  Description of Artificial Sequence: Synthetic oligonucleotide
agagcagcaauauguaggg

SEQ ID NO: 3131303 - RNA, 19 nt, Artificial Sequence
  Description of Artificial Sequence: Synthetic oligonucleotide
augcuuacaaugcuuuagc

SEQ ID NO: 3131304 - RNA, 19 nt, Artificial Sequence
  Description of Artificial Sequence: Synthetic oligonucleotide
ugcucauugcaucaaaugu

SEQ ID NO: 3131305 - RNA, 19 nt, Artificial Sequence
  Description of Artificial Sequence: Synthetic oligonucleotide
uaucaagcuaaaugaaugc

SEQ ID NO: 3131306 - RNA, 19 nt, Artificial Sequence
  Description of Artificial Sequence: Synthetic oligonucleotide
aucacaacagugcucauug

SEQ ID NO: 3131307 - RNA, 19 nt, Artificial Sequence
  Description of Artificial Sequence: Synthetic oligonucleotide
uuaaauacugggaaaccaa

SEQ ID NO: 3131308 - RNA, 19 nt, Artificial Sequence
  Description of Artificial Sequence: Synthetic oligonucleotide
cucauugcaucaaaugugc

SEQ ID NO: 3131309 - RNA, 19 nt, Artificial Sequence
  Description of Artificial Sequence: Synthetic oligonucleotide
ucaucagagucccugacgu

SEQ ID NO: 3131310 - RNA, 19 nt, Artificial Sequence
  Description of Artificial Sequence: Synthetic oligonucleotide
gauucaugaugucuggaug

SEQ ID NO: 3131311 - RNA, 19 nt, Artificial Sequence
  Description of Artificial Sequence: Synthetic oligonucleotide
auaucaagcuaaaugaaug

SEQ ID NO: 3131312 - RNA, 19 nt, Artificial Sequence
  Description of Artificial Sequence: Synthetic oligonucleotide
ugguguuaucacaacagug

SEQ ID NO: 3131313 - RNA, 19 nt, Artificial Sequence
  Description of Artificial Sequence: Synthetic oligonucleotide
cuuacaaugcuuuagccaa

SEQ ID NO: 3131314 - RNA, 19 nt, Artificial Sequence
  Description of Artificial Sequence: Synthetic oligonucleotide
gaugcuuacaaugcuuuag

SEQ ID NO: 3131315 - RNA, 19 nt, Artificial Sequence
  Description of Artificial Sequence: Synthetic oligonucleotide
aaaccaacccugcaaauuu

SEQ ID NO: 3131316 - RNA, 19 nt, Artificial Sequence
  Description of Artificial Sequence: Synthetic oligonucleotide
auauguaggggacuguugu

SEQ ID NO: 3131317 - RNA, 19 nt, Artificial Sequence
  Description of Artificial Sequence: Synthetic oligonucleotide
ugagagcacaaugauauca

SEQ ID NO: 3131318 - RNA, 19 nt, Artificial Sequence
  Description of Artificial Sequence: Synthetic oligonucleotide
caugaugucuggaugguug

SEQ ID NO: 3131319 - RNA, 19 nt, Artificial Sequence
  Description of Artificial Sequence: Synthetic oligonucleotide
uauuaaauacugggaaacc

SEQ ID NO: 3131320 - RNA, 19 nt, Artificial Sequence
  Description of Artificial Sequence: Synthetic oligonucleotide
ucuggaugguuguucagag

SEQ ID NO: 3131321 - RNA, 19 nt, Artificial Sequence
  Description of Artificial Sequence: Synthetic oligonucleotide
ugauaucaagcuaaaugaa

SEQ ID NO: 3131322 - RNA, 19 nt, Artificial Sequence
  Description of Artificial Sequence: Synthetic oligonucleotide
auuaaauacugggaaacca

SEQ ID NO: 3131323 - RNA, 19 nt, Artificial Sequence
  Description of Artificial Sequence: Synthetic oligonucleotide
aaugaaugcugguguuauc

SEQ ID NO: 3131324 - RNA, 19 nt, Artificial Sequence
  Description of Artificial Sequence: Synthetic oligonucleotide
auaaggagauucaugaugu

SEQ ID NO: 3131325 - RNA, 19 nt, Artificial Sequence
  Description of Artificial Sequence: Synthetic oligonucleotide
guuaucacaacagugcuca

SEQ ID NO: 3131326 - RNA, 19 nt, Artificial Sequence
  Description of Artificial Sequence: Synthetic oligonucleotide
caaugcuuuagccaaugag

SEQ ID NO: 3131327 - RNA, 19 nt, Artificial Sequence
  Description of Artificial Sequence: Synthetic oligonucleotide
cauugcaucaaaugugcac

SEQ ID NO: 3131328 - RNA, 19 nt, Artificial Sequence
  Description of Artificial Sequence: Synthetic oligonucleotide
uacugggaaaccaacccug

SEQ ID NO: 3131329 - RNA, 19 nt, Artificial Sequence
  Description of Artificial Sequence: Synthetic oligonucleotide
aaggagauucaugaugucu

SEQ ID NO: 3131330 - RNA, 19 nt, Artificial Sequence
  Description of Artificial Sequence: Synthetic oligonucleotide
cacaaugauaucaagcuaa

SEQ ID NO: 3131331 - RNA, 19 nt, Artificial Sequence
  Description of Artificial Sequence: Synthetic oligonucleotide
uuugaugcuuacaaugcuu

SEQ ID NO: 3131332 - RNA, 19 nt, Artificial Sequence
  Description of Artificial Sequence: Synthetic oligonucleotide
gacuguugucaucagaguc

SEQ ID NO: 3131333 - RNA, 19 nt, Artificial Sequence
  Description of Artificial Sequence: Synthetic oligonucleotide
ugugcaccugauuuaauaa

SEQ ID NO: 3131334 - RNA, 19 nt, Artificial Sequence
  Description of Artificial Sequence: Synthetic oligonucleotide
gguguuaucacaacagugc

SEQ ID NO: 3131335 - RNA, 19 nt, Artificial Sequence
  Description of Artificial Sequence: Synthetic oligonucleotide
gauuuaauaaggagauuca

SEQ ID NO: 3131336 - RNA, 19 nt, Artificial Sequence
  Description of Artificial Sequence: Synthetic oligonucleotide
aaaugaaugcugguguuau

SEQ ID NO: 3131337 - RNA, 19 nt, Artificial Sequence
  Description of Artificial Sequence: Synthetic oligonucleotide
ugcuuacaaugcuuuagcc

SEQ ID NO: 3131338 - RNA, 19 nt, Artificial Sequence
  Description of Artificial Sequence: Synthetic oligonucleotide
auuugaugcuuacaaugcu

SEQ ID NO: 3131339 - RNA, 19 nt, Artificial Sequence
  Description of Artificial Sequence: Synthetic oligonucleotide
gagcacaaugauaucaagc

SEQ ID NO: 3131340 - RNA, 19 nt, Artificial Sequence
  Description of Artificial Sequence: Synthetic oligonucleotide
aaugcugguguuaucacaa

SEQ ID NO: 3131341 - RNA, 19 nt, Artificial Sequence
  Description of Artificial Sequence: Synthetic oligonucleotide
uguucagagcagcaauaug

SEQ ID NO: 3131342 - RNA, 19 nt, Artificial Sequence
  Description of Artificial Sequence: Synthetic oligonucleotide
accugauuuaauaaggaga

SEQ ID NO: 3131343 - RNA, 19 nt, Artificial Sequence
  Description of Artificial Sequence: Synthetic oligonucleotide
aucagagucccugacguuc

SEQ ID NO: 3131344 - RNA, 19 nt, Artificial Sequence
  Description of Artificial Sequence: Synthetic oligonucleotide
aauauguaggggacuguug

SEQ ID NO: 3131345 - RNA, 19 nt, Artificial Sequence
  Description of Artificial Sequence: Synthetic oligonucleotide
agauucaugaugucuggau

SEQ ID NO: 3131346 - RNA, 19 nt, Artificial Sequence
  Description of Artificial Sequence: Synthetic oligonucleotide
augaaugcugguguuauca

SEQ ID NO: 3131347 - RNA, 19 nt, Artificial Sequence
  Description of Artificial Sequence: Synthetic oligonucleotide
augcuuuagccaaugagag

SEQ ID NO: 3131348 - RNA, 19 nt, Artificial Sequence
  Description of Artificial Sequence: Synthetic oligonucleotide
agcuaaaugaaugcuggug

SEQ ID NO: 3131349 - RNA, 19 nt, Artificial Sequence
  Description of Artificial Sequence: Synthetic oligonucleotide
caccugauuuaauaaggag

SEQ ID NO: 3131350 - RNA, 19 nt, Artificial Sequence
  Description of Artificial Sequence: Synthetic oligonucleotide
uugaugcuuacaaugcuuu

SEQ ID NO: 3131351 - RNA, 19 nt, Artificial Sequence
  Description of Artificial Sequence: Synthetic oligonucleotide
aaaugugcaccugauuuaa

SEQ ID NO: 3131352 - RNA, 19 nt, Artificial Sequence
  Description of Artificial Sequence: Synthetic oligonucleotide
gcaaauuugaugcuuacaa

SEQ ID NO: 3131353 - RNA, 19 nt, Artificial Sequence
  Description of Artificial Sequence: Synthetic oligonucleotide
ugggaaaccaacccugcaa

SEQ ID NO: 3131354 - RNA, 19 nt, Artificial Sequence
  Description of Artificial Sequence: Synthetic oligonucleotide
ugcugguguuaucacaaca

SEQ ID NO: 3131355 - RNA, 19 nt, Artificial Sequence
  Description of Artificial Sequence: Synthetic oligonucleotide
uguuaucacaacagugcuc

SEQ ID NO: 3131356 - RNA, 19 nt, Artificial Sequence
  Description of Artificial Sequence: Synthetic oligonucleotide
gucaucagagucccugacg

SEQ ID NO: 3131357 - RNA, 19 nt, Artificial Sequence
  Description of Artificial Sequence: Synthetic oligonucleotide
guugucaucagagucccug

SEQ ID NO: 3131358 - RNA, 19 nt, Artificial Sequence
  Description of Artificial Sequence: Synthetic oligonucleotide
gaugguuguucagagcagc

SEQ ID NO: 3131359 - RNA, 19 nt, Artificial Sequence
  Description of Artificial Sequence: Synthetic oligonucleotide
caacccugcaaauuugaug

SEQ ID NO: 3131360 - RNA, 19 nt, Artificial Sequence
  Description of Artificial Sequence: Synthetic oligonucleotide
agccaaugagagcacaaug

SEQ ID NO: 3131361 - RNA, 19 nt, Artificial Sequence
  Description of Artificial Sequence: Synthetic oligonucleotide
agagcacaaugauaucaag

SEQ ID NO: 3131362 - RNA, 19 nt, Artificial Sequence
  Description of Artificial Sequence: Synthetic oligonucleotide
aggagauucaugaugucug

SEQ ID NO: 3131363 - RNA, 19 nt, Artificial Sequence
  Description of Artificial Sequence: Synthetic oligonucleotide
auacugggaaaccaacccu

SEQ ID NO: 3131364 - RNA, 19 nt, Artificial Sequence
  Description of Artificial Sequence: Synthetic oligonucleotide
uucagagcagcaauaugua

SEQ ID NO: 3131365 - RNA, 19 nt, Artificial Sequence
  Description of Artificial Sequence: Synthetic oligonucleotide
agcaauauguaggggacug

SEQ ID NO: 3131366 - RNA, 19 nt, Artificial Sequence
  Description of Artificial Sequence: Synthetic oligonucleotide
aagcuaaaugaaugcuggu

SEQ ID NO: 3131367 - RNA, 19 nt, Artificial Sequence
  Description of Artificial Sequence: Synthetic oligonucleotide
gugcaccugauuuaauaag

SEQ ID NO: 3131368 - RNA, 19 nt, Artificial Sequence
  Description of Artificial Sequence: Synthetic oligonucleotide
gucccugacguucacauca

SEQ ID NO: 3131369 - RNA, 19 nt, Artificial Sequence
  Description of Artificial Sequence: Synthetic oligonucleotide
uaauaaggagauucaugau

SEQ ID NO: 3131370 - RNA, 19 nt, Artificial Sequence
  Description of Artificial Sequence: Synthetic oligonucleotide
auuuaauaaggagauucau

SEQ ID NO: 3131371 - RNA, 19 nt, Artificial Sequence
  Description of Artificial Sequence: Synthetic oligonucleotide
uaggggacuguugucauca

SEQ ID NO: 3131372 - RNA, 19 nt, Artificial Sequence
  Description of Artificial Sequence: Synthetic oligonucleotide
gcuuuagccaaugagagca

SEQ ID NO: 3131373 - RNA, 19 nt, Artificial Sequence
  Description of Artificial Sequence: Synthetic oligonucleotide
ugcuuuagccaaugagagc

SEQ ID NO: 3131374 - RNA, 19 nt, Artificial Sequence
  Description of Artificial Sequence: Synthetic oligonucleotide
aucaagcuaaaugaaugcu

SEQ ID NO: 3131375 - RNA, 19 nt, Artificial Sequence
  Description of Artificial Sequence: Synthetic oligonucleotide
gaaugcugguguuaucaca

SEQ ID NO: 3131376 - RNA, 19 nt, Artificial Sequence
  Description of Artificial Sequence: Synthetic oligonucleotide
gugcucauugcaucaaaug

SEQ ID NO: 3131377 - RNA, 19 nt, Artificial Sequence
  Description of Artificial Sequence: Synthetic oligonucleotide
ugaaugcugguguuaucac

SEQ ID NO: 3131378 - RNA, 19 nt, Artificial Sequence
  Description of Artificial Sequence: Synthetic oligonucleotide
ucagagucccugacguuca

SEQ ID NO: 3131379 - RNA, 19 nt, Artificial Sequence
  Description of Artificial Sequence: Synthetic oligonucleotide
ugcaaauuugaugcuuaca

SEQ ID NO: 3131380 - RNA, 19 nt, Artificial Sequence
  Description of Artificial Sequence: Synthetic oligonucleotide
guucagagcagcaauaugu

SEQ ID NO: 3131381 - RNA, 19 nt, Artificial Sequence
  Description of Artificial Sequence: Synthetic oligonucleotide
uacaaugcuuuagccaaug

SEQ ID NO: 3131382 - RNA, 19 nt, Artificial Sequence
  Description of Artificial Sequence: Synthetic oligonucleotide
gggacuguugucaucagag

SEQ ID NO: 3131383 - RNA, 19 nt, Artificial Sequence
  Description of Artificial Sequence: Synthetic oligonucleotide
ggagauucaugaugucugg

SEQ ID NO: 3131384 - RNA, 19 nt, Artificial Sequence
  Description of Artificial Sequence: Synthetic oligonucleotide
acugggaaaccaacccugc

SEQ ID NO: 3131385 - RNA, 19 nt, Artificial Sequence
  Description of Artificial Sequence: Synthetic oligonucleotide
augagagcacaaugauauc

SEQ ID NO: 3131386 - RNA, 19 nt, Artificial Sequence
  Description of Artificial Sequence: Synthetic oligonucleotide
augucuggaugguuguuca

SEQ ID NO: 3131387 - RNA, 19 nt, Artificial Sequence
  Description of Artificial Sequence: Synthetic oligonucleotide
ugucaucagagucccugac

SEQ ID NO: 3131388 - RNA, 19 nt, Artificial Sequence
  Description of Artificial Sequence: Synthetic oligonucleotide
uuuagccaaugagagcaca

SEQ ID NO: 3131389 - RNA, 19 nt, Artificial Sequence
  Description of Artificial Sequence: Synthetic oligonucleotide
uugucaucagagucccuga

SEQ ID NO: 3131390 - RNA, 19 nt, Artificial Sequence
  Description of Artificial Sequence: Synthetic oligonucleotide
uaaaugaaugcugguguua

SEQ ID NO: 3131391 - RNA, 19 nt, Artificial Sequence
  Description of Artificial Sequence: Synthetic oligonucleotide
gaugucuggaugguuguuc

SEQ ID NO: 3131392 - RNA, 19 nt, Artificial Sequence
  Description of Artificial Sequence: Synthetic oligonucleotide
augaugucuggaugguugu

SEQ ID NO: 3131393 - RNA, 19 nt, Artificial Sequence
  Description of Artificial Sequence: Synthetic oligonucleotide
uugcaucaaaugugcaccu

SEQ ID NO: 3131394 - RNA, 19 nt, Artificial Sequence
  Description of Artificial Sequence: Synthetic oligonucleotide
gcuuacaaugcuuuagcca

SEQ ID NO: 3131395 - RNA, 19 nt, Artificial Sequence
  Description of Artificial Sequence: Synthetic oligonucleotide
gauaucaagcuaaaugaau

SEQ ID NO: 3131396 - RNA, 19 nt, Artificial Sequence
  Description of Artificial Sequence: Synthetic oligonucleotide
cuguugucaucagaguccc

SEQ ID NO: 3131397 - RNA, 19 nt, Artificial Sequence
  Description of Artificial Sequence: Synthetic oligonucleotide
cacaacagugcucauugca

SEQ ID NO: 3131398 - RNA, 19 nt, Artificial Sequence
  Description of Artificial Sequence: Synthetic oligonucleotide
uauguaggggacuguuguc

SEQ ID NO: 3131399 - RNA, 19 nt, Artificial Sequence
  Description of Artificial Sequence: Synthetic oligonucleotide
caacagugcucauugcauc

SEQ ID NO: 3131400 - RNA, 19 nt, Artificial Sequence
  Description of Artificial Sequence: Synthetic oligonucleotide
gcugguguuaucacaacag

SEQ ID NO: 3131401 - RNA, 19 nt, Artificial Sequence
  Description of Artificial Sequence: Synthetic oligonucleotide
auguaggggacuguuguca

SEQ ID NO: 3131402 - RNA, 19 nt, Artificial Sequence
  Description of Artificial Sequence: Synthetic oligonucleotide
augcugguguuaucacaac

SEQ ID NO: 3131403 - RNA, 19 nt, Artificial Sequence
  Description of Artificial Sequence: Synthetic oligonucleotide
ugucuggaugguuguucag

SEQ ID NO: 3131404 - RNA, 19 nt, Artificial Sequence
  Description of Artificial Sequence: Synthetic oligonucleotide
uuguucagagcagcaauau

SEQ ID NO: 3131405 - RNA, 19 nt, Artificial Sequence
  Description of Artificial Sequence: Synthetic oligonucleotide
uucaugaugucuggauggu

SEQ ID NO: 3131406 - RNA, 19 nt, Artificial Sequence
  Description of Artificial Sequence: Synthetic oligonucleotide
cugcaaauuugaugcuuac

SEQ ID NO: 3131407 - RNA, 19 nt, Artificial Sequence
  Description of Artificial Sequence: Synthetic oligonucleotide
uuacaaugcuuuagccaau

SEQ ID NO: 3131408 - RNA, 19 nt, Artificial Sequence
  Description of Artificial Sequence: Synthetic oligonucleotide
acaaugcuuuagccaauga

SEQ ID NO: 3131409 - RNA, 19 nt, Artificial Sequence
  Description of Artificial Sequence: Synthetic oligonucleotide
uguaggggacuguugucau

SEQ ID NO: 3131410 - RNA, 19 nt, Artificial Sequence
  Description of Artificial Sequence: Synthetic oligonucleotide
gcuaaaugaaugcuggugu

SEQ ID NO: 3131411 - RNA, 19 nt, Artificial Sequence
  Description of Artificial Sequence: Synthetic oligonucleotide
cuggaugguuguucagagc

SEQ ID NO: 3131412 - RNA, 19 nt, Artificial Sequence
  Description of Artificial Sequence: Synthetic oligonucleotide
ucccugacguucacaucag

SEQ ID NO: 3131413 - RNA, 19 nt, Artificial Sequence
  Description of Artificial Sequence: Synthetic oligonucleotide
aaccaacccugcaaauuug

SEQ ID NO: 3131414 - RNA, 19 nt, Artificial Sequence
  Description of Artificial Sequence: Synthetic oligonucleotide
ucacaacagugcucauugc

SEQ ID NO: 3131415 - RNA, 19 nt, Artificial Sequence
  Description of Artificial Sequence: Synthetic oligonucleotide
acaacagugcucauugcau

SEQ ID NO: 3131416 - RNA, 19 nt, Artificial Sequence
  Description of Artificial Sequence: Synthetic oligonucleotide
cuuuagccaaugagagcac

SEQ ID NO: 3131417 - RNA, 19 nt, Artificial Sequence
  Description of Artificial Sequence: Synthetic oligonucleotide
gagagcacaaugauaucaa

SEQ ID NO: 3131418 - RNA, 19 nt, Artificial Sequence
  Description of Artificial Sequence: Synthetic oligonucleotide
ugaugcuuacaaugcuuua

SEQ ID NO: 3131419 - RNA, 19 nt, Artificial Sequence
  Description of Artificial Sequence: Synthetic oligonucleotide
uaaggagauucaugauguc

SEQ ID NO: 3131420 - RNA, 19 nt, Artificial Sequence
  Description of Artificial Sequence: Synthetic oligonucleotide
aucaaaugugcaccugauu

SEQ ID NO: 3131421 - RNA, 19 nt, Artificial Sequence
  Description of Artificial Sequence: Synthetic oligonucleotide
agucccugacguucacauc

SEQ ID NO: 3131422 - RNA, 19 nt, Artificial Sequence
  Description of Artificial Sequence: Synthetic oligonucleotide
caaaugugcaccugauuua

SEQ ID NO: 3131423 - RNA, 19 nt, Artificial Sequence
  Description of Artificial Sequence: Synthetic oligonucleotide
uaucacaacagugcucauu

SEQ ID NO: 3131424 - RNA, 19 nt, Artificial Sequence
  Description of Artificial Sequence: Synthetic oligonucleotide
ugcaucaaaugugcaccug

SEQ ID NO: 3131425 - RNA, 19 nt, Artificial Sequence
  Description of Artificial Sequence: Synthetic oligonucleotide
guguuaucacaacagugcu

SEQ ID NO: 3131426 - RNA, 19 nt, Artificial Sequence
  Description of Artificial Sequence: Synthetic oligonucleotide
caaugagagcacaaugaua

SEQ ID NO: 3131427 - RNA, 19 nt, Artificial Sequence
  Description of Artificial Sequence: Synthetic oligonucleotide
acaaugauaucaagcuaaa

SEQ ID NO: 3131428 - RNA, 19 nt, Artificial Sequence
  Description of Artificial Sequence: Synthetic oligonucleotide
gcaucaaaugugcaccuga

SEQ ID NO: 3131429 - RNA, 19 nt, Artificial Sequence
  Description of Artificial Sequence: Synthetic oligonucleotide
ugguuguucagagcagcaa

SEQ ID NO: 3131430 - RNA, 19 nt, Artificial Sequence
  Description of Artificial Sequence: Synthetic oligonucleotide
gccaaugagagcacaauga

SEQ ID NO: 3131431 - RNA, 19 nt, Artificial Sequence
  Description of Artificial Sequence: Synthetic oligonucleotide
ccugauuuaauaaggagau

SEQ ID NO: 3131432 - RNA, 19 nt, Artificial Sequence
  Description of Artificial Sequence: Synthetic oligonucleotide
gagauucaugaugucugga

SEQ ID NO: 3131433 - RNA, 19 nt, Artificial Sequence
  Description of Artificial Sequence: Synthetic oligonucleotide
uagccaaugagagcacaau

SEQ ID NO: 3131434 - RNA, 19 nt, Artificial Sequence
  Description of Artificial Sequence: Synthetic oligonucleotide
caaauuugaugcuuacaau

SEQ ID NO: 3131435 - RNA, 19 nt, Artificial Sequence
  Description of Artificial Sequence: Synthetic oligonucleotide
gucuggaugguuguucaga

SEQ ID NO: 3131436 - RNA, 19 nt, Artificial Sequence
  Description of Artificial Sequence: Synthetic oligonucleotide
agugcucauugcaucaaau

SEQ ID NO: 3131437 - RNA, 19 nt, Artificial Sequence
  Description of Artificial Sequence: Synthetic oligonucleotide
gagucccugacguucacau

SEQ ID NO: 3131438 - RNA, 19 nt, Artificial Sequence
  Description of Artificial Sequence: Synthetic oligonucleotide
gcagcaauauguaggggac

SEQ ID NO: 3131439 - RNA, 19 nt, Artificial Sequence
  Description of Artificial Sequence: Synthetic oligonucleotide
gggaaaccaacccugcaaa

SEQ ID NO: 3131440 - RNA, 19 nt, Artificial Sequence
  Description of Artificial Sequence: Synthetic oligonucleotide
gaaaccaacccugcaaauu

SEQ ID NO: 3131441 - RNA, 19 nt, Artificial Sequence
  Description of Artificial Sequence: Synthetic oligonucleotide
aaugugcaccugauuuaau

SEQ ID NO: 3131442 - RNA, 19 nt, Artificial Sequence
  Description of Artificial Sequence: Synthetic oligonucleotide
guuguucagagcagcaaua

SEQ ID NO: 3131443 - RNA, 19 nt, Artificial Sequence
  Description of Artificial Sequence: Synthetic oligonucleotide
accaacccugcaaauuuga

SEQ ID NO: 3131444 - RNA, 19 nt, Artificial Sequence
  Description of Artificial Sequence: Synthetic oligonucleotide
ccugacguucacaucagca

SEQ ID NO: 3131445 - RNA, 19 nt, Artificial Sequence
  Description of Artificial Sequence: Synthetic oligonucleotide
augguuguucagagcagca

SEQ ID NO: 3131446 - RNA, 19 nt, Artificial Sequence
  Description of Artificial Sequence: Synthetic oligonucleotide
uguugucaucagagucccu

SEQ ID NO: 3131447 - RNA, 19 nt, Artificial Sequence
  Description of Artificial Sequence: Synthetic oligonucleotide
cuaaaugaaugcugguguu

SEQ ID NO: 3131448 - RNA, 19 nt, Artificial Sequence
  Description of Artificial Sequence: Synthetic oligonucleotide
uuaucacaacagugcucau

SEQ ID NO: 3131449 - RNA, 19 nt, Artificial Sequence
  Description of Artificial Sequence: Synthetic oligonucleotide
acccugcaaauuugaugcu

SEQ ID NO: 3131450 - RNA, 19 nt, Artificial Sequence
  Description of Artificial Sequence: Synthetic oligonucleotide
ucaugaugucuggaugguu

SEQ ID NO: 3131451 - RNA, 19 nt, Artificial Sequence
  Description of Artificial Sequence: Synthetic oligonucleotide
aggggacuguugucaucag

SEQ ID NO: 3131452 - RNA, 19 nt, Artificial Sequence
  Description of Artificial Sequence: Synthetic oligonucleotide
ggaugguuguucagagcag

SEQ ID NO: 3131453 - RNA, 19 nt, Artificial Sequence
  Description of Artificial Sequence: Synthetic oligonucleotide
gguuguucagagcagcaau

SEQ ID NO: 3131454 - RNA, 19 nt, Artificial Sequence
  Description of Artificial Sequence: Synthetic oligonucleotide
cugguguuaucacaacagu

SEQ ID NO: 3131455 - RNA, 19 nt, Artificial Sequence
  Description of Artificial Sequence: Synthetic oligonucleotide
cugggaaaccaacccugca

SEQ ID NO: 3131456 - RNA, 19 nt, Artificial Sequence
  Description of Artificial Sequence: Synthetic oligonucleotide
caucaaaugugcaccugau

SEQ ID NO: 3131457 - RNA, 19 nt, Artificial Sequence
  Description of Artificial Sequence: Synthetic oligonucleotide
gcaccugauuuaauaagga

SEQ ID NO: 3131458 - RNA, 19 nt, Artificial Sequence
  Description of Artificial Sequence: Synthetic oligonucleotide
agagucccugacguucaca

SEQ ID NO: 3131459 - RNA, 19 nt, Artificial Sequence
  Description of Artificial Sequence: Synthetic oligonucleotide
gcacaaugauaucaagcua

SEQ ID NO: 3131460 - RNA, 19 nt, Artificial Sequence
  Description of Artificial Sequence: Synthetic oligonucleotide
ccugcaaauuugaugcuua

SEQ ID NO: 3131461 - RNA, 19 nt, Artificial Sequence
  Description of Artificial Sequence: Synthetic oligonucleotide
caauauguaggggacuguu

SEQ ID NO: 3131462 - RNA, 19 nt, Artificial Sequence
  Description of Artificial Sequence: Synthetic oligonucleotide
ggggacuguugucaucaga

SEQ ID NO: 3131463 - RNA, 19 nt, Artificial Sequence
  Description of Artificial Sequence: Synthetic oligonucleotide
cagagucccugacguucac

SEQ ID NO: 3131464 - RNA, 19 nt, Artificial Sequence
  Description of Artificial Sequence: Synthetic oligonucleotide
cagugcucauugcaucaaa

SEQ ID NO: 3131465 - RNA, 19 nt, Artificial Sequence
  Description of Artificial Sequence: Synthetic oligonucleotide
ggacuguugucaucagagu

SEQ ID NO: 3131466 - RNA, 19 nt, Artificial Sequence
  Description of Artificial Sequence: Synthetic oligonucleotide
ccaaugagagcacaaugau

SEQ ID NO: 3131467 - RNA, 19 nt, Artificial Sequence
  Description of Artificial Sequence: Synthetic oligonucleotide
caaugauaucaagcuaaau

SEQ ID NO: 3131468 - RNA, 19 nt, Artificial Sequence
  Description of Artificial Sequence: Synthetic oligonucleotide
ggaaaccaacccugcaaau

SEQ ID NO: 3131469 - RNA, 19 nt, Artificial Sequence
  Description of Artificial Sequence: Synthetic oligonucleotide
cccugacguucacaucagc

SEQ ID NO: 3131470 - RNA, 19 nt, Artificial Sequence
  Description of Artificial Sequence: Synthetic oligonucleotide
cugauuuaauaaggagauu

SEQ ID NO: 3131471 - RNA, 19 nt, Artificial Sequence
  Description of Artificial Sequence: Synthetic oligonucleotide
cagcaauauguaggggacu

SEQ ID NO: 3131472 - RNA, 19 nt, Artificial Sequence
  Description of Artificial Sequence: Synthetic oligonucleotide
gcaauauguaggggacugu

SEQ ID NO: 3131473 - RNA, 19 nt, Artificial Sequence
  Description of Artificial Sequence: Synthetic oligonucleotide
caucagagucccugacguu

SEQ ID NO: 3131474 - RNA, 19 nt, Artificial Sequence
  Description of Artificial Sequence: Synthetic oligonucleotide
ccaacccugcaaauuugau

SEQ ID NO: 3131475 - RNA, 19 nt, Artificial Sequence
  Description of Artificial Sequence: Synthetic oligonucleotide
cccugcaaauuugaugcuu

SEQ ID NO: 3131476 - RNA, 19 nt, Artificial Sequence
  Description of Artificial Sequence: Synthetic oligonucleotide
uuaaaugucuuuccaaggg

SEQ ID NO: 3131477 - RNA, 19 nt, Artificial Sequence
  Description of Artificial Sequence: Synthetic oligonucleotide
agguccuugaguuuggucc

SEQ ID NO: 3131478 - RNA, 19 nt, Artificial Sequence
  Description of Artificial Sequence: Synthetic oligonucleotide
uuuaaaugucuuuccaagg

SEQ ID NO: 3131479 - RNA, 19 nt, Artificial Sequence
  Description of Artificial Sequence: Synthetic oligonucleotide
guccuuaucacuuuaaaug

SEQ ID NO: 3131480 - RNA, 19 nt, Artificial Sequence
  Description of Artificial Sequence: Synthetic oligonucleotide
cuuuaaaugucuuuccaag

SEQ ID NO: 3131481 - RNA, 19 nt, Artificial Sequence
  Description of Artificial Sequence: Synthetic oligonucleotide
aucacuuuaaaugucuuuc

SEQ ID NO: 3131482 - RNA, 19 nt, Artificial Sequence
  Description of Artificial Sequence: Synthetic oligonucleotide
cugacagugagccagcagg

SEQ ID NO: 3131483 - RNA, 19 nt, Artificial Sequence
  Description of Artificial Sequence: Synthetic oligonucleotide
acagugagccagcaggucc

SEQ ID NO: 3131484 - RNA, 19 nt, Artificial Sequence
  Description of Artificial Sequence: Synthetic oligonucleotide
uaaaugucuuuccaagggc

SEQ ID NO: 3131485 - RNA, 19 nt, Artificial Sequence
  Description of Artificial Sequence: Synthetic oligonucleotide
uccuuaucacuuuaaaugu

SEQ ID NO: 3131486 - RNA, 19 nt, Artificial Sequence
  Description of Artificial Sequence: Synthetic oligonucleotide
uccaacugcaugcacaaca

SEQ ID NO: 3131487 - RNA, 19 nt, Artificial Sequence
  Description of Artificial Sequence: Synthetic oligonucleotide
ugaaguacuggcccugggg

SEQ ID NO: 3131488 - RNA, 19 nt, Artificial Sequence
  Description of Artificial Sequence: Synthetic oligonucleotide
agggcugaaguacuggccc

SEQ ID NO: 3131489 - RNA, 19 nt, Artificial Sequence
  Description of Artificial Sequence: Synthetic oligonucleotide
gauaugggugcugaugugg

SEQ ID NO: 3131490 - RNA, 19 nt, Artificial Sequence
  Description of Artificial Sequence: Synthetic oligonucleotide
acaguucucuuccugcugg

SEQ ID NO: 3131491 - RNA, 19 nt, Artificial Sequence
  Description of Artificial Sequence: Synthetic oligonucleotide
ucacuuuaaaugucuuucc

SEQ ID NO: 3131492 - RNA, 19 nt, Artificial Sequence
  Description of Artificial Sequence: Synthetic oligonucleotide
gaaguacuggcccuggggc

SEQ ID NO: 3131493 - RNA, 19 nt, Artificial Sequence
  Description of Artificial Sequence: Synthetic oligonucleotide
uugaguuugguccgguggc

SEQ ID NO: 3131494 - RNA, 19 nt, Artificial Sequence
  Description of Artificial Sequence: Synthetic oligonucleotide
gauguggcgguccaacugc

SEQ ID NO: 3131495 - RNA, 19 nt, Artificial Sequence
  Description of Artificial Sequence: Synthetic oligonucleotide
aaaugucuuuccaagggcu

SEQ ID NO: 3131496 - RNA, 19 nt, Artificial Sequence
  Description of Artificial Sequence: Synthetic oligonucleotide
acuuuaaaugucuuuccaa

SEQ ID NO: 3131497 - RNA, 19 nt, Artificial Sequence
  Description of Artificial Sequence: Synthetic oligonucleotide
uuuccaagggcugaaguac

SEQ ID NO: 3131498 - RNA, 19 nt, Artificial Sequence
  Description of Artificial Sequence: Synthetic oligonucleotide
agagccuugggccacuuug

SEQ ID NO: 3131499 - RNA, 19 nt, Artificial Sequence
  Description of Artificial Sequence: Synthetic oligonucleotide
aagggcugaaguacuggcc

SEQ ID NO: 3131500 - RNA, 19 nt, Artificial Sequence
  Description of Artificial Sequence: Synthetic oligonucleotide
uguccuuaucacuuuaaau

SEQ ID NO: 3131501 - RNA, 19 nt, Artificial Sequence
  Description of Artificial Sequence: Synthetic oligonucleotide
ugauguggcgguccaacug

SEQ ID NO: 3131502 - RNA, 19 nt, Artificial Sequence
  Description of Artificial Sequence: Synthetic oligonucleotide
auaugggugcugauguggc

SEQ ID NO: 3131503 - RNA, 19 nt, Artificial Sequence
  Description of Artificial Sequence: Synthetic oligonucleotide
uucucuuccugcuggaguc

SEQ ID NO: 3131504 - RNA, 19 nt, Artificial Sequence
  Description of Artificial Sequence: Synthetic oligonucleotide
aaugucuuuccaagggcug

SEQ ID NO: 3131505 - RNA, 19 nt, Artificial Sequence
  Description of Artificial Sequence: Synthetic oligonucleotide
uuuguccuuaucacuuuaa

SEQ ID NO: 3131506 - RNA, 19 nt, Artificial Sequence
  Description of Artificial Sequence: Synthetic oligonucleotide
uaugggugcugauguggcg

SEQ ID NO: 3131507 - RNA, 19 nt, Artificial Sequence
  Description of Artificial Sequence: Synthetic oligonucleotide
uguaggucuggguggcuag

SEQ ID NO: 3131508 - RNA, 19 nt, Artificial Sequence
  Description of Artificial Sequence: Synthetic oligonucleotide
uuguccuuaucacuuuaaa

SEQ ID NO: 3131509 - RNA, 19 nt, Artificial Sequence
  Description of Artificial Sequence: Synthetic oligonucleotide
ccugcuggaguccagagcc

SEQ ID NO: 3131510 - RNA, 19 nt, Artificial Sequence
  Description of Artificial Sequence: Synthetic oligonucleotide
uccuacaguucucuuccug

SEQ ID NO: 3131511 - RNA, 19 nt, Artificial Sequence
  Description of Artificial Sequence: Synthetic oligonucleotide
cuuaucacuuuaaaugucu

SEQ ID NO: 3131512 - RNA, 19 nt, Artificial Sequence
  Description of Artificial Sequence: Synthetic oligonucleotide
uuaucacuuuaaaugucuu

SEQ ID NO: 3131513 - RNA, 19 nt, Artificial Sequence
  Description of Artificial Sequence: Synthetic oligonucleotide
ugagccagcagguccugcc

SEQ ID NO: 3131514 - RNA, 19 nt, Artificial Sequence
  Description of Artificial Sequence: Synthetic oligonucleotide
uaucacuuuaaaugucuuu

SEQ ID NO: 3131515 - RNA, 19 nt, Artificial Sequence
  Description of Artificial Sequence: Synthetic oligonucleotide
ugacagugagccagcaggu

SEQ ID NO: 3131516 - RNA, 19 nt, Artificial Sequence
  Description of Artificial Sequence: Synthetic oligonucleotide
augggugcugauguggcgg

SEQ ID NO: 3131517 - RNA, 19 nt, Artificial Sequence
  Description of Artificial Sequence: Synthetic oligonucleotide
cuggggcugacagugagcc

SEQ ID NO: 3131518 - RNA, 19 nt, Artificial Sequence
  Description of Artificial Sequence: Synthetic oligonucleotide
ugguccgguggccugcggg

SEQ ID NO: 3131519 - RNA, 19 nt, Artificial Sequence
  Description of Artificial Sequence: Synthetic oligonucleotide
uuccaagggcugaaguacu

SEQ ID NO: 3131520 - RNA, 19 nt, Artificial Sequence
  Description of Artificial Sequence: Synthetic oligonucleotide
gguccuugaguuugguccg

SEQ ID NO: 3131521 - RNA, 19 nt, Artificial Sequence
  Description of Artificial Sequence: Synthetic oligonucleotide
uccaagggcugaaguacug

SEQ ID NO: 3131522 - RNA, 19 nt, Artificial Sequence
  Description of Artificial Sequence: Synthetic oligonucleotide
cacuuuaaaugucuuucca

SEQ ID NO: 3131523 - RNA, 19 nt, Artificial Sequence
  Description of Artificial Sequence: Synthetic oligonucleotide
ccuacaguucucuuccugc

SEQ ID NO: 3131524 - RNA, 19 nt, Artificial Sequence
  Description of Artificial Sequence: Synthetic oligonucleotide
ccuccuacaguucucuucc

SEQ ID NO: 3131525 - RNA, 19 nt, Artificial Sequence
  Description of Artificial Sequence: Synthetic oligonucleotide
ugccagcggauguaggucu

SEQ ID NO: 3131526 - RNA, 19 nt, Artificial Sequence
  Description of Artificial Sequence: Synthetic oligonucleotide
uggaguccagagccuuggg

SEQ ID NO: 3131527 - RNA, 19 nt, Artificial Sequence
  Description of Artificial Sequence: Synthetic oligonucleotide
ggucuggguggcuaggucc

SEQ ID NO: 3131528 - RNA, 19 nt, Artificial Sequence
  Description of Artificial Sequence: Synthetic oligonucleotide
aguccagagccuugggcca

SEQ ID NO: 3131529 - RNA, 19 nt, Artificial Sequence
  Description of Artificial Sequence: Synthetic oligonucleotide
ugaguuugguccgguggcc

SEQ ID NO: 3131530 - RNA, 19 nt, Artificial Sequence
  Description of Artificial Sequence: Synthetic oligonucleotide
gccacuuuguccuuaucac

SEQ ID NO: 3131531 - RNA, 19 nt, Artificial Sequence
  Description of Artificial Sequence: Synthetic oligonucleotide
cucucccggauaugggugc

SEQ ID NO: 3131532 - RNA, 19 nt, Artificial Sequence
  Description of Artificial Sequence: Synthetic oligonucleotide
agccuugggccacuuuguc

SEQ ID NO: 3131533 - RNA, 19 nt, Artificial Sequence
  Description of Artificial Sequence: Synthetic oligonucleotide
aggucuggguggcuagguc

SEQ ID NO: 3131534 - RNA, 19 nt, Artificial Sequence
  Description of Artificial Sequence: Synthetic oligonucleotide
aguuugguccgguggccug

SEQ ID NO: 3131535 - RNA, 19 nt, Artificial Sequence
  Description of Artificial Sequence: Synthetic oligonucleotide
cuggaguccagagccuugg

SEQ ID NO: 3131536 - RNA, 19 nt, Artificial Sequence
  Description of Artificial Sequence: Synthetic oligonucleotide
guggcgguccaacugcaug

SEQ ID NO: 3131537 - RNA, 19 nt, Artificial Sequence
  Description of Artificial Sequence: Synthetic oligonucleotide
uggccugcgggcucucccg

SEQ ID NO: 3131538 - RNA, 19 nt, Artificial Sequence
  Description of Artificial Sequence: Synthetic oligonucleotide
uccugccagcggauguagg

SEQ ID NO: 3131539 - RNA, 19 nt, Artificial Sequence
  Description of Artificial Sequence: Synthetic oligonucleotide
ggggcugacagugagccag

SEQ ID NO: 3131540 - RNA, 19 nt, Artificial Sequence
  Description of Artificial Sequence: Synthetic oligonucleotide
ucaccuccuacaguucucu

SEQ ID NO: 3131541 - RNA, 19 nt, Artificial Sequence
  Description of Artificial Sequence: Synthetic oligonucleotide
cuggcccuggggcugacag

SEQ ID NO: 3131542 - RNA, 19 nt, Artificial Sequence
  Description of Artificial Sequence: Synthetic oligonucleotide
cugaaguacuggcccuggg

SEQ ID NO: 3131543 - RNA, 19 nt, Artificial Sequence
  Description of Artificial Sequence: Synthetic oligonucleotide
ggccacuuuguccuuauca

SEQ ID NO: 3131544 - RNA, 19 nt, Artificial Sequence
  Description of Artificial Sequence: Synthetic oligonucleotide
aguacuggcccuggggcug

SEQ ID NO: 3131545 - RNA, 19 nt, Artificial Sequence
  Description of Artificial Sequence: Synthetic oligonucleotide
guggcuagguccuugaguu

SEQ ID NO: 3131546 - RNA, 19 nt, Artificial Sequence
  Description of Artificial Sequence: Synthetic oligonucleotide
acuuuguccuuaucacuuu

SEQ ID NO: 3131547 - RNA, 19 nt, Artificial Sequence
  Description of Artificial Sequence: Synthetic oligonucleotide
ggaguccagagccuugggc

SEQ ID NO: 3131548 - RNA, 19 nt, Artificial Sequence
  Description of Artificial Sequence: Synthetic oligonucleotide
augucuuuccaagggcuga

SEQ ID NO: 3131549 - RNA, 19 nt, Artificial Sequence
  Description of Artificial Sequence: Synthetic oligonucleotide
uuugguccgguggccugcg

SEQ ID NO: 3131550 - RNA, 19 nt, Artificial Sequence
  Description of Artificial Sequence: Synthetic oligonucleotide
uagguccuugaguuugguc

SEQ ID NO: 3131551 - RNA, 19 nt, Artificial Sequence
  Description of Artificial Sequence: Synthetic oligonucleotide
ccuuaucacuuuaaauguc

SEQ ID NO: 3131552 - RNA, 19 nt, Artificial Sequence
  Description of Artificial Sequence: Synthetic oligonucleotide
agcggauguaggucugggu

SEQ ID NO: 3131553 - RNA, 19 nt, Artificial Sequence
  Description of Artificial Sequence: Synthetic oligonucleotide
ggcuagguccuugaguuug

SEQ ID NO: 3131554 - RNA, 19 nt, Artificial Sequence
  Description of Artificial Sequence: Synthetic oligonucleotide
ugucuuuccaagggcugaa

SEQ ID NO: 3131555 - RNA, 19 nt, Artificial Sequence
  Description of Artificial Sequence: Synthetic oligonucleotide
uggguggcuagguccuuga

SEQ ID NO: 3131556 - RNA, 19 nt, Artificial Sequence
  Description of Artificial Sequence: Synthetic oligonucleotide
ucucuuccugcuggagucc

SEQ ID NO: 3131557 - RNA, 19 nt, Artificial Sequence
  Description of Artificial Sequence: Synthetic oligonucleotide
ugcgggcucucccggauau

SEQ ID NO: 3131558 - RNA, 19 nt, Artificial Sequence
  Description of Artificial Sequence: Synthetic oligonucleotide
agguccugccagcggaugu

SEQ ID NO: 3131559 - RNA, 19 nt, Artificial Sequence
  Description of Artificial Sequence: Synthetic oligonucleotide
ucccggauaugggugcuga

SEQ ID NO: 3131560 - RNA, 19 nt, Artificial Sequence
  Description of Artificial Sequence: Synthetic oligonucleotide
guaggucuggguggcuagg

SEQ ID NO: 3131561 - RNA, 19 nt, Artificial Sequence
  Description of Artificial Sequence: Synthetic oligonucleotide
ugggugcugauguggcggu

SEQ ID NO: 3131562 - RNA, 19 nt, Artificial Sequence
  Description of Artificial Sequence: Synthetic oligonucleotide
cacuuuguccuuaucacuu

SEQ ID NO: 3131563 - RNA, 19 nt, Artificial Sequence
  Description of Artificial Sequence: Synthetic oligonucleotide
ggauaugggugcugaugug

SEQ ID NO: 3131564 - RNA, 19 nt, Artificial Sequence
  Description of Artificial Sequence: Synthetic oligonucleotide
cggauguaggucugggugg

SEQ ID NO: 3131565 - RNA, 19 nt, Artificial Sequence
  Description of Artificial Sequence: Synthetic oligonucleotide
guuugguccgguggccugc

SEQ ID NO: 3131566 - RNA, 19 nt, Artificial Sequence
  Description of Artificial Sequence: Synthetic oligonucleotide
cuuuguccuuaucacuuua

SEQ ID NO: 3131567 - RNA, 19 nt, Artificial Sequence
  Description of Artificial Sequence: Synthetic oligonucleotide
uaggucuggguggcuaggu

SEQ ID NO: 3131568 - RNA, 19 nt, Artificial Sequence
  Description of Artificial Sequence: Synthetic oligonucleotide
ggauguaggucuggguggc

SEQ ID NO: 3131569 - RNA, 19 nt, Artificial Sequence
  Description of Artificial Sequence: Synthetic oligonucleotide
gacagugagccagcagguc

SEQ ID NO: 3131570 - RNA, 19 nt, Artificial Sequence
  Description of Artificial Sequence: Synthetic oligonucleotide
ggugcugauguggcggucc

SEQ ID NO: 3131571 - RNA, 19 nt, Artificial Sequence
  Description of Artificial Sequence: Synthetic oligonucleotide
gccuugggccacuuugucc

SEQ ID NO: 3131572 - RNA, 19 nt, Artificial Sequence
  Description of Artificial Sequence: Synthetic oligonucleotide
cagcggauguaggucuggg

SEQ ID NO: 3131573 - RNA, 19 nt, Artificial Sequence
  Description of Artificial Sequence: Synthetic oligonucleotide
gucuuuccaagggcugaag

SEQ ID NO: 3131574 - RNA, 19 nt, Artificial Sequence
  Description of Artificial Sequence: Synthetic oligonucleotide
uguggcgguccaacugcau

SEQ ID NO: 3131575 - RNA, 19 nt, Artificial Sequence
  Description of Artificial Sequence: Synthetic oligonucleotide
cuacaguucucuuccugcu

SEQ ID NO: 3131576 - RNA, 19 nt, Artificial Sequence
  Description of Artificial Sequence: Synthetic oligonucleotide
ugggccacuuuguccuuau

SEQ ID NO: 3131577 - RNA, 19 nt, Artificial Sequence
  Description of Artificial Sequence: Synthetic oligonucleotide
guccuugaguuugguccgg

SEQ ID NO: 3131578 - RNA, 19 nt, Artificial Sequence
  Description of Artificial Sequence: Synthetic oligonucleotide
ggcccuggggcugacagug

SEQ ID NO: 3131579 - RNA, 19 nt, Artificial Sequence
  Description of Artificial Sequence: Synthetic oligonucleotide
uugguccgguggccugcgg

SEQ ID NO: 3131580 - RNA, 19 nt, Artificial Sequence
  Description of Artificial Sequence: Synthetic oligonucleotide
gguccgguggccugcgggc

SEQ ID NO: 3131581 - RNA, 19 nt, Artificial Sequence
  Description of Artificial Sequence: Synthetic oligonucleotide
gcugauguggcgguccaac

SEQ ID NO: 3131582 - RNA, 19 nt, Artificial Sequence
  Description of Artificial Sequence: Synthetic oligonucleotide
gcugaaguacuggcccugg

SEQ ID NO: 3131583 - RNA, 19 nt, Artificial Sequence
  Description of Artificial Sequence: Synthetic oligonucleotide
cugccagcggauguagguc

SEQ ID NO: 3131584 - RNA, 19 nt, Artificial Sequence
  Description of Artificial Sequence: Synthetic oligonucleotide
ccaagggcugaaguacugg

SEQ ID NO: 3131585 - RNA, 19 nt, Artificial Sequence
  Description of Artificial Sequence: Synthetic oligonucleotide
cagcagguccugccagcgg

SEQ ID NO: 3131586 - RNA, 19 nt, Artificial Sequence
  Description of Artificial Sequence: Synthetic oligonucleotide
uccuugaguuugguccggu

SEQ ID NO: 3131587 - RNA, 19 nt, Artificial Sequence
  Description of Artificial Sequence: Synthetic oligonucleotide
ugcuggaguccagagccuu

SEQ ID NO: 3131588 - RNA, 19 nt, Artificial Sequence
  Description of Artificial Sequence: Synthetic oligonucleotide
auguaggucuggguggcua

SEQ ID NO: 3131589 - RNA, 19 nt, Artificial Sequence
  Description of Artificial Sequence: Synthetic oligonucleotide
ucucccggauaugggugcu

SEQ ID NO: 3131590 - RNA, 19 nt, Artificial Sequence
  Description of Artificial Sequence: Synthetic oligonucleotide
uggggcugacagugagcca

SEQ ID NO: 3131591 - RNA, 19 nt, Artificial Sequence
  Description of Artificial Sequence: Synthetic oligonucleotide
guccugccagcggauguag

SEQ ID NO: 3131592 - RNA, 19 nt, Artificial Sequence
  Description of Artificial Sequence: Synthetic oligonucleotide
gguggcuagguccuugagu

SEQ ID NO: 3131593 - RNA, 19 nt, Artificial Sequence
  Description of Artificial Sequence: Synthetic oligonucleotide
ccuugggccacuuuguccu

SEQ ID NO: 3131594 - RNA, 19 nt, Artificial Sequence
  Description of Artificial Sequence: Synthetic oligonucleotide
ccggauaugggugcugaug

SEQ ID NO: 3131595 - RNA, 19 nt, Artificial Sequence
  Description of Artificial Sequence: Synthetic oligonucleotide
uccgguggccugcgggcuc

SEQ ID NO: 3131596 - RNA, 19 nt, Artificial Sequence
  Description of Artificial Sequence: Synthetic oligonucleotide
cuggguggcuagguccuug

SEQ ID NO: 3131597 - RNA, 19 nt, Artificial Sequence
  Description of Artificial Sequence: Synthetic oligonucleotide
uggcuagguccuugaguuu

SEQ ID NO: 3131598 - RNA, 19 nt, Artificial Sequence
  Description of Artificial Sequence: Synthetic oligonucleotide
agugagccagcagguccug

SEQ ID NO: 3131599 - RNA, 19 nt, Artificial Sequence
  Description of Artificial Sequence: Synthetic oligonucleotide
gcucucccggauaugggug

SEQ ID NO: 3131600 - RNA, 19 nt, Artificial Sequence
  Description of Artificial Sequence: Synthetic oligonucleotide
cagugagccagcagguccu

SEQ ID NO: 3131601 - RNA, 19 nt, Artificial Sequence
  Description of Artificial Sequence: Synthetic oligonucleotide
uggcccuggggcugacagu

SEQ ID NO: 3131602 - RNA, 19 nt, Artificial Sequence
  Description of Artificial Sequence: Synthetic oligonucleotide
ggcugaaguacuggcccug

SEQ ID NO: 3131603 - RNA, 19 nt, Artificial Sequence
  Description of Artificial Sequence: Synthetic oligonucleotide
ccagcagguccugccagcg

SEQ ID NO: 3131604 - RNA, 19 nt, Artificial Sequence
  Description of Artificial Sequence: Synthetic oligonucleotide
ccuggggcugacagugagc

SEQ ID NO: 3131605 - RNA, 19 nt, Artificial Sequence
  Description of Artificial Sequence: Synthetic oligonucleotide
uugggccacuuuguccuua

SEQ ID NO: 3131606 - RNA, 19 nt, Artificial Sequence
  Description of Artificial Sequence: Synthetic oligonucleotide
gccagcagguccugccagc

SEQ ID NO: 3131607 - RNA, 19 nt, Artificial Sequence
  Description of Artificial Sequence: Synthetic oligonucleotide
gaguuugguccgguggccu

SEQ ID NO: 3131608 - RNA, 19 nt, Artificial Sequence
  Description of Artificial Sequence: Synthetic oligonucleotide
cugauguggcgguccaacu

SEQ ID NO: 3131609 - RNA, 19 nt, Artificial Sequence
  Description of Artificial Sequence: Synthetic oligonucleotide
auguggcgguccaacugca

SEQ ID NO: 3131610 - RNA, 19 nt, Artificial Sequence
  Description of Artificial Sequence: Synthetic oligonucleotide
ggguggcuagguccuugag

SEQ ID NO: 3131611 - RNA, 19 nt, Artificial Sequence
  Description of Artificial Sequence: Synthetic oligonucleotide
cucuuccugcuggagucca

SEQ ID NO: 3131612 - RNA, 19 nt, Artificial Sequence
  Description of Artificial Sequence: Synthetic oligonucleotide
ggcucucccggauaugggu

SEQ ID NO: 3131613 - RNA, 19 nt, Artificial Sequence
  Description of Artificial Sequence: Synthetic oligonucleotide
cccuggggcugacagugag

SEQ ID NO: 3131614 - RNA, 19 nt, Artificial Sequence
  Description of Artificial Sequence: Synthetic oligonucleotide
ugcugauguggcgguccaa

SEQ ID NO: 3131615 - RNA, 19 nt, Artificial Sequence
  Description of Artificial Sequence: Synthetic oligonucleotide
cgggcucucccggauaugg

SEQ ID NO: 3131616 - RNA, 19 nt, Artificial Sequence
  Description of Artificial Sequence: Synthetic oligonucleotide
guccagagccuugggccac

SEQ ID NO: 3131617 - RNA, 19 nt, Artificial Sequence
  Description of Artificial Sequence: Synthetic oligonucleotide
cagguccugccagcggaug

SEQ ID NO: 3131618 - RNA, 19 nt, Artificial Sequence
  Description of Artificial Sequence: Synthetic oligonucleotide
gggcucucccggauauggg

SEQ ID NO: 3131619 - RNA, 19 nt, Artificial Sequence
  Description of Artificial Sequence: Synthetic oligonucleotide
ggccugcgggcucucccgg

SEQ ID NO: 3131620 - RNA, 19 nt, Artificial Sequence
  Description of Artificial Sequence: Synthetic oligonucleotide
gucuggguggcuagguccu

SEQ ID NO: 3131621 - RNA, 19 nt, Artificial Sequence
  Description of Artificial Sequence: Synthetic oligonucleotide
gcuggaguccagagccuug

SEQ ID NO: 3131622 - RNA, 19 nt, Artificial Sequence
  Description of Artificial Sequence: Synthetic oligonucleotide
guccaacugcaugcacaac

SEQ ID NO: 3131623 - RNA, 19 nt, Artificial Sequence
  Description of Artificial Sequence: Synthetic oligonucleotide
cucccggauaugggugcug

SEQ ID NO: 3131624 - RNA, 19 nt, Artificial Sequence
  Description of Artificial Sequence: Synthetic oligonucleotide
cgguccaacugcaugcaca

SEQ ID NO: 3131625 - RNA, 19 nt, Artificial Sequence
  Description of Artificial Sequence: Synthetic oligonucleotide
cggauaugggugcugaugu

SEQ ID NO: 3131626 - RNA, 19 nt, Artificial Sequence
  Description of Artificial Sequence: Synthetic oligonucleotide
ccagcggauguaggucugg

SEQ ID NO: 3131627 - RNA, 19 nt, Artificial Sequence
  Description of Artificial Sequence: Synthetic oligonucleotide
gauguaggucuggguggcu

SEQ ID NO: 3131628 - RNA, 19 nt, Artificial Sequence
  Description of Artificial Sequence: Synthetic oligonucleotide
ucuggguggcuagguccuu

SEQ ID NO: 3131629 - RNA, 19 nt, Artificial Sequence
  Description of Artificial Sequence: Synthetic oligonucleotide
ccugccagcggauguaggu

SEQ ID NO: 3131630 - RNA, 19 nt, Artificial Sequence
  Description of Artificial Sequence: Synthetic oligonucleotide
ggcgguccaacugcaugca

SEQ ID NO: 3131631 - RNA, 19 nt, Artificial Sequence
  Description of Artificial Sequence: Synthetic oligonucleotide
gcgguccaacugcaugcac

SEQ ID NO: 3131632 - RNA, 19 nt, Artificial Sequence
  Description of Artificial Sequence: Synthetic oligonucleotide
guacuggcccuggggcuga

SEQ ID NO: 3131633 - RNA, 19 nt, Artificial Sequence
  Description of Artificial Sequence: Synthetic oligonucleotide
gggcugaaguacuggcccu

SEQ ID NO: 3131634 - RNA, 19 nt, Artificial Sequence
  Description of Artificial Sequence: Synthetic oligonucleotide
gccagcggauguaggucug

SEQ ID NO: 3131635 - RNA, 19 nt, Artificial Sequence
  Description of Artificial Sequence: Synthetic oligonucleotide
cuccuacaguucucuuccu

SEQ ID NO: 3131636 - RNA, 19 nt, Artificial Sequence
  Description of Artificial Sequence: Synthetic oligonucleotide
acuggcccuggggcugaca

SEQ ID NO: 3131637 - RNA, 19 nt, Artificial Sequence
  Description of Artificial Sequence: Synthetic oligonucleotide
cuagguccuugaguuuggu

SEQ ID NO: 3131638 - RNA, 19 nt, Artificial Sequence
  Description of Artificial Sequence: Synthetic oligonucleotide
cugcuggaguccagagccu

SEQ ID NO: 3131639 - RNA, 19 nt, Artificial Sequence
  Description of Artificial Sequence: Synthetic oligonucleotide
gguccugccagcggaugua

SEQ ID NO: 3131640 - RNA, 19 nt, Artificial Sequence
  Description of Artificial Sequence: Synthetic oligonucleotide
ggcugacagugagccagca

SEQ ID NO: 3131641 - RNA, 19 nt, Artificial Sequence
  Description of Artificial Sequence: Synthetic oligonucleotide
gggccacuuuguccuuauc

SEQ ID NO: 3131642 - RNA, 19 nt, Artificial Sequence
  Description of Artificial Sequence: Synthetic oligonucleotide
uacuggcccuggggcugac

SEQ ID NO: 3131643 - RNA, 19 nt, Artificial Sequence
  Description of Artificial Sequence: Synthetic oligonucleotide
cugcgggcucucccggaua

SEQ ID NO: 3131644 - RNA, 19 nt, Artificial Sequence
  Description of Artificial Sequence: Synthetic oligonucleotide
cuugggccacuuuguccuu

SEQ ID NO: 3131645 - RNA, 19 nt, Artificial Sequence
  Description of Artificial Sequence: Synthetic oligonucleotide
guccgguggccugcgggcu

SEQ ID NO: 3131646 - RNA, 19 nt, Artificial Sequence
  Description of Artificial Sequence: Synthetic oligonucleotide
gggugcugauguggcgguc

SEQ ID NO: 3131647 - RNA, 19 nt, Artificial Sequence
  Description of Artificial Sequence: Synthetic oligonucleotide
gccugcgggcucucccgga

SEQ ID NO: 3131648 - RNA, 19 nt, Artificial Sequence
  Description of Artificial Sequence: Synthetic oligonucleotide
caccuccuacaguucucuu

SEQ ID NO: 3131649 - RNA, 19 nt, Artificial Sequence
  Description of Artificial Sequence: Synthetic oligonucleotide
gcgggcucucccggauaug

SEQ ID NO: 3131650 - RNA, 19 nt, Artificial Sequence
  Description of Artificial Sequence: Synthetic oligonucleotide
gcccuggggcugacaguga

SEQ ID NO: 3131651 - RNA, 19 nt, Artificial Sequence
  Description of Artificial Sequence: Synthetic oligonucleotide
ccugcgggcucucccggau

SEQ ID NO: 3131652 - RNA, 19 nt, Artificial Sequence
  Description of Artificial Sequence: Synthetic oligonucleotide
cccggauaugggugcugau

SEQ ID NO: 3131653 - RNA, 19 nt, Artificial Sequence
  Description of Artificial Sequence: Synthetic oligonucleotide
ccagagccuugggccacuu

SEQ ID NO: 3131654 - RNA, 19 nt, Artificial Sequence
  Description of Artificial Sequence: Synthetic oligonucleotide
auuucuacauguuauuuuc

SEQ ID NO: 3131655 - RNA, 19 nt, Artificial Sequence
  Description of Artificial Sequence: Synthetic oligonucleotide
ucugauaugacacaugcau

SEQ ID NO: 3131656 - RNA, 19 nt, Artificial Sequence
  Description of Artificial Sequence: Synthetic oligonucleotide
gauaauggugcguauacag

SEQ ID NO: 3131657 - RNA, 19 nt, Artificial Sequence
  Description of Artificial Sequence: Synthetic oligonucleotide
uaauaauuuccucugauau

SEQ ID NO: 3131658 - RNA, 19 nt, Artificial Sequence
  Description of Artificial Sequence: Synthetic oligonucleotide
cauguuauuuucuuguugc

SEQ ID NO: 3131659 - RNA, 19 nt, Artificial Sequence
  Description of Artificial Sequence: Synthetic oligonucleotide
acugauauucaacugauga

SEQ ID NO: 3131660 - RNA, 19 nt, Artificial Sequence
  Description of Artificial Sequence: Synthetic oligonucleotide
aauaauuuccucugauaug

SEQ ID NO: 3131661 - RNA, 19 nt, Artificial Sequence
  Description of Artificial Sequence: Synthetic oligonucleotide
caacugaugauaauggugc

SEQ ID NO: 3131662 - RNA, 19 nt, Artificial Sequence
  Description of Artificial Sequence: Synthetic oligonucleotide
ucaacugaugauaauggug

SEQ ID NO: 3131663 - RNA, 19 nt, Artificial Sequence
  Description of Artificial Sequence: Synthetic oligonucleotide
augauaauggugcguauac

SEQ ID NO: 3131664 - RNA, 19 nt, Artificial Sequence
  Description of Artificial Sequence: Synthetic oligonucleotide
uauucaacugaugauaaug

SEQ ID NO: 3131665 - RNA, 19 nt, Artificial Sequence
  Description of Artificial Sequence: Synthetic oligonucleotide
uaauggugcguauacagag

SEQ ID NO: 3131666 - RNA, 19 nt, Artificial Sequence
  Description of Artificial Sequence: Synthetic oligonucleotide
ugauaugacacaugcaugu

SEQ ID NO: 3131667 - RNA, 19 nt, Artificial Sequence
  Description of Artificial Sequence: Synthetic oligonucleotide
uuuaauaauuuccucugau

SEQ ID NO: 3131668 - RNA, 19 nt, Artificial Sequence
  Description of Artificial Sequence: Synthetic oligonucleotide
auaauuuccucugauauga

SEQ ID NO: 3131669 - RNA, 19 nt, Artificial Sequence
  Description of Artificial Sequence: Synthetic oligonucleotide
uauacagagggaaggaggu

SEQ ID NO: 3131670 - RNA, 19 nt, Artificial Sequence
  Description of Artificial Sequence: Synthetic oligonucleotide
aggacuggcacugauauuc

SEQ ID NO: 3131671 - RNA, 19 nt, Artificial Sequence
  Description of Artificial Sequence: Synthetic oligonucleotide
uuuuaauaauuuccucuga

SEQ ID NO: 3131672 - RNA, 19 nt, Artificial Sequence
  Description of Artificial Sequence: Synthetic oligonucleotide
aauuuccucugauaugaca

SEQ ID NO: 3131673 - RNA, 19 nt, Artificial Sequence
  Description of Artificial Sequence: Synthetic oligonucleotide
ucuacauguuauuuucuug

SEQ ID NO: 3131674 - RNA, 19 nt, Artificial Sequence
  Description of Artificial Sequence: Synthetic oligonucleotide
auguuauuuucuuguugcc

SEQ ID NO: 3131675 - RNA, 19 nt, Artificial Sequence
  Description of Artificial Sequence: Synthetic oligonucleotide
auucaacugaugauaaugg

SEQ ID NO: 3131676 - RNA, 19 nt, Artificial Sequence
  Description of Artificial Sequence: Synthetic oligonucleotide
aacugaugauaauggugcg

SEQ ID NO: 3131677 - RNA, 19 nt, Artificial Sequence
  Description of Artificial Sequence: Synthetic oligonucleotide
uuucuuguugcccugcagu

SEQ ID NO: 3131678 - RNA, 19 nt, Artificial Sequence
  Description of Artificial Sequence: Synthetic oligonucleotide
uaugacacaugcauguaaa

SEQ ID NO: 3131679 - RNA, 19 nt, Artificial Sequence
  Description of Artificial Sequence: Synthetic oligonucleotide
ugauauucaacugaugaua

SEQ ID NO: 3131680 - RNA, 19 nt, Artificial Sequence
  Description of Artificial Sequence: Synthetic oligonucleotide
uguuauuuucuuguugccc

SEQ ID NO: 3131681 - RNA, 19 nt, Artificial Sequence
  Description of Artificial Sequence: Synthetic oligonucleotide
auggugcguauacagaggg

SEQ ID NO: 3131682 - RNA, 19 nt, Artificial Sequence
  Description of Artificial Sequence: Synthetic oligonucleotide
uuaauaauuuccucugaua

SEQ ID NO: 3131683 - RNA, 19 nt, Artificial Sequence
  Description of Artificial Sequence: Synthetic oligonucleotide
ugcguauacagagggaagg

SEQ ID NO: 3131684 - RNA, 19 nt, Artificial Sequence
  Description of Artificial Sequence: Synthetic oligonucleotide
cuuguugcccugcaguugg

SEQ ID NO: 3131685 - RNA, 19 nt, Artificial Sequence
  Description of Artificial Sequence: Synthetic oligonucleotide
guauacagagggaaggagg

SEQ ID NO: 3131686 - RNA, 19 nt, Artificial Sequence
  Description of Artificial Sequence: Synthetic oligonucleotide
aguugguacaaggacuggc

SEQ ID NO: 3131687 - RNA, 19 nt, Artificial Sequence
  Description of Artificial Sequence: Synthetic oligonucleotide
acauguuauuuucuuguug

SEQ ID NO: 3131688 - RNA, 19 nt, Artificial Sequence
  Description of Artificial Sequence: Synthetic oligonucleotide
ucuguaaguuauguuaugu

SEQ ID NO: 3131689 - RNA, 19 nt, Artificial Sequence
  Description of Artificial Sequence: Synthetic oligonucleotide
ugacacaugcauguaaaca

SEQ ID NO: 3131690 - RNA, 19 nt, Artificial Sequence
  Description of Artificial Sequence: Synthetic oligonucleotide
aauggugcguauacagagg

SEQ ID NO: 3131691 - RNA, 19 nt, Artificial Sequence
  Description of Artificial Sequence: Synthetic oligonucleotide
augacacaugcauguaaac

SEQ ID NO: 3131692 - RNA, 19 nt, Artificial Sequence
  Description of Artificial Sequence: Synthetic oligonucleotide
uuuucuuguugcccugcag

SEQ ID NO: 3131693 - RNA, 19 nt, Artificial Sequence
  Description of Artificial Sequence: Synthetic oligonucleotide
uucaacugaugauaauggu

SEQ ID NO: 3131694 - RNA, 19 nt, Artificial Sequence
  Description of Artificial Sequence: Synthetic oligonucleotide
uuucuacauguuauuuucu

SEQ ID NO: 3131695 - RNA, 19 nt, Artificial Sequence
  Description of Artificial Sequence: Synthetic oligonucleotide
cugauaugacacaugcaug

SEQ ID NO: 3131696 - RNA, 19 nt, Artificial Sequence
  Description of Artificial Sequence: Synthetic oligonucleotide
uaaguuauguuaugucuuu

SEQ ID NO: 3131697 - RNA, 19 nt, Artificial Sequence
  Description of Artificial Sequence: Synthetic oligonucleotide
ucuccauuucuacauguua

SEQ ID NO: 3131698 - RNA, 19 nt, Artificial Sequence
  Description of Artificial Sequence: Synthetic oligonucleotide
guuauuuucuuguugcccu

SEQ ID NO: 3131699 - RNA, 19 nt, Artificial Sequence
  Description of Artificial Sequence: Synthetic oligonucleotide
cuguaaguuauguuauguc

SEQ ID NO: 3131700 - RNA, 19 nt, Artificial Sequence
  Description of Artificial Sequence: Synthetic oligonucleotide
gacacaugcauguaaacau

SEQ ID NO: 3131701 - RNA, 19 nt, Artificial Sequence
  Description of Artificial Sequence: Synthetic oligonucleotide
uuauuuucuuguugcccug

SEQ ID NO: 3131702 - RNA, 19 nt, Artificial Sequence
  Description of Artificial Sequence: Synthetic oligonucleotide
auaugacacaugcauguaa

SEQ ID NO: 3131703 - RNA, 19 nt, Artificial Sequence
  Description of Artificial Sequence: Synthetic oligonucleotide
acuggcacugauauucaac

SEQ ID NO: 3131704 - RNA, 19 nt, Artificial Sequence
  Description of Artificial Sequence: Synthetic oligonucleotide
uuuccucugauaugacaca

SEQ ID NO: 3131705 - RNA, 19 nt, Artificial Sequence
  Description of Artificial Sequence: Synthetic oligonucleotide
uucuacauguuauuuucuu

SEQ ID NO: 3131706 - RNA, 19 nt, Artificial Sequence
  Description of Artificial Sequence: Synthetic oligonucleotide
uugguacaaggacuggcac

SEQ ID NO: 3131707 - RNA, 19 nt, Artificial Sequence
  Description of Artificial Sequence: Synthetic oligonucleotide
aucuguaaguuauguuaug

SEQ ID NO: 3131708 - RNA, 19 nt, Artificial Sequence
  Description of Artificial Sequence: Synthetic oligonucleotide
ugguacaaggacuggcacu

SEQ ID NO: 3131709 - RNA, 19 nt, Artificial Sequence
  Description of Artificial Sequence: Synthetic oligonucleotide
ccucugauaugacacaugc

SEQ ID NO: 3131710 - RNA, 19 nt, Artificial Sequence
  Description of Artificial Sequence: Synthetic oligonucleotide
cuacauguuauuuucuugu

SEQ ID NO: 3131711 - RNA, 19 nt, Artificial Sequence
  Description of Artificial Sequence: Synthetic oligonucleotide
cugcaguugguacaaggac

SEQ ID NO: 3131712 - RNA, 19 nt, Artificial Sequence
  Description of Artificial Sequence: Synthetic oligonucleotide
acucuccauuucuacaugu

SEQ ID NO: 3131713 - RNA, 19 nt, Artificial Sequence
  Description of Artificial Sequence: Synthetic oligonucleotide
uccucugauaugacacaug

SEQ ID NO: 3131714 - RNA, 19 nt, Artificial Sequence
  Description of Artificial Sequence: Synthetic oligonucleotide
uauuuucuuguugcccugc

SEQ ID NO: 3131715 - RNA, 19 nt, Artificial Sequence
  Description of Artificial Sequence: Synthetic oligonucleotide
ugauaauggugcguauaca

SEQ ID NO: 3131716 - RNA, 19 nt, Artificial Sequence
  Description of Artificial Sequence: Synthetic oligonucleotide
accacucuccauuucuaca

SEQ ID NO: 3131717 - RNA, 19 nt, Artificial Sequence
  Description of Artificial Sequence: Synthetic oligonucleotide
uccauuucuacauguuauu

SEQ ID NO: 3131718 - RNA, 19 nt, Artificial Sequence
  Description of Artificial Sequence: Synthetic oligonucleotide
uaauuuccucugauaugac

SEQ ID NO: 3131719 - RNA, 19 nt, Artificial Sequence
  Description of Artificial Sequence: Synthetic oligonucleotide
uacauguuauuuucuuguu

SEQ ID NO: 3131720 - RNA, 19 nt, Artificial Sequence
  Description of Artificial Sequence: Synthetic oligonucleotide
uggcacugauauucaacug

SEQ ID NO: 3131721 - RNA, 19 nt, Artificial Sequence
  Description of Artificial Sequence: Synthetic oligonucleotide
uuugguggcucagaccacu

SEQ ID NO: 3131722 - RNA, 19 nt, Artificial Sequence
  Description of Artificial Sequence: Synthetic oligonucleotide
auuuucuuguugcccugca

SEQ ID NO: 3131723 - RNA, 19 nt, Artificial Sequence
  Description of Artificial Sequence: Synthetic oligonucleotide
auaauggugcguauacaga

SEQ ID NO: 3131724 - RNA, 19 nt, Artificial Sequence
  Description of Artificial Sequence: Synthetic oligonucleotide
ucuuguugcccugcaguug

SEQ ID NO: 3131725 - RNA, 19 nt, Artificial Sequence
  Description of Artificial Sequence: Synthetic oligonucleotide
uugcccugcaguugguaca

SEQ ID NO: 3131726 - RNA, 19 nt, Artificial Sequence
  Description of Artificial Sequence: Synthetic oligonucleotide
uacaaggacuggcacugau

SEQ ID NO: 3131727 - RNA, 19 nt, Artificial Sequence
  Description of Artificial Sequence: Synthetic oligonucleotide
uucuuguugcccugcaguu

SEQ ID NO: 3131728 - RNA, 19 nt, Artificial Sequence
  Description of Artificial Sequence: Synthetic oligonucleotide
gaccacucuccauuucuac

SEQ ID NO: 3131729 - RNA, 19 nt, Artificial Sequence
  Description of Artificial Sequence: Synthetic oligonucleotide
guugcccugcaguugguac

SEQ ID NO: 3131730 - RNA, 19 nt, Artificial Sequence
  Description of Artificial Sequence: Synthetic oligonucleotide
gaugauaauggugcguaua

SEQ ID NO: 3131731 - RNA, 19 nt, Artificial Sequence
  Description of Artificial Sequence: Synthetic oligonucleotide
uccaucuguaaguuauguu

SEQ ID NO: 3131732 - RNA, 19 nt, Artificial Sequence
  Description of Artificial Sequence: Synthetic oligonucleotide
guugguacaaggacuggca

SEQ ID NO: 3131733 - RNA, 19 nt, Artificial Sequence
  Description of Artificial Sequence: Synthetic oligonucleotide
ccaucuguaaguuauguua

SEQ ID NO: 3131734 - RNA, 19 nt, Artificial Sequence
  Description of Artificial Sequence: Synthetic oligonucleotide
ugaugauaauggugcguau

SEQ ID NO: 3131735 - RNA, 19 nt, Artificial Sequence
  Description of Artificial Sequence: Synthetic oligonucleotide
cuggcacugauauucaacu

SEQ ID NO: 3131736 - RNA, 19 nt, Artificial Sequence
  Description of Artificial Sequence: Synthetic oligonucleotide
uuuugguggcucagaccac

SEQ ID NO: 3131737 - RNA, 19 nt, Artificial Sequence
  Description of Artificial Sequence: Synthetic oligonucleotide
cacugauauucaacugaug

SEQ ID NO: 3131738 - RNA, 19 nt, Artificial Sequence
  Description of Artificial Sequence: Synthetic oligonucleotide
aaguuauguuaugucuuuu

SEQ ID NO: 3131739 - RNA, 19 nt, Artificial Sequence
  Description of Artificial Sequence: Synthetic oligonucleotide
uggugcguauacagaggga

SEQ ID NO: 3131740 - RNA, 19 nt, Artificial Sequence
  Description of Artificial Sequence: Synthetic oligonucleotide
gcaguugguacaaggacug

SEQ ID NO: 3131741 - RNA, 19 nt, Artificial Sequence
  Description of Artificial Sequence: Synthetic oligonucleotide
cugauauucaacugaugau

SEQ ID NO: 3131742 - RNA, 19 nt, Artificial Sequence
  Description of Artificial Sequence: Synthetic oligonucleotide
cuccauuucuacauguuau

SEQ ID NO: 3131743 - RNA, 19 nt, Artificial Sequence
  Description of Artificial Sequence: Synthetic oligonucleotide
ugguggcucagaccacucu

SEQ ID NO: 3131744 - RNA, 19 nt, Artificial Sequence
  Description of Artificial Sequence: Synthetic oligonucleotide
guaaguuauguuaugucuu

SEQ ID NO: 3131745 - RNA, 19 nt, Artificial Sequence
  Description of Artificial Sequence: Synthetic oligonucleotide
cauuucuacauguuauuuu

SEQ ID NO: 3131746 - RNA, 19 nt, Artificial Sequence
  Description of Artificial Sequence: Synthetic oligonucleotide
caaggacuggcacugauau

SEQ ID NO: 3131747 - RNA, 19 nt, Artificial Sequence
  Description of Artificial Sequence: Synthetic oligonucleotide
gugcguauacagagggaag

SEQ ID NO: 3131748 - RNA, 19 nt, Artificial Sequence
  Description of Artificial Sequence: Synthetic oligonucleotide
gauaugacacaugcaugua

SEQ ID NO: 3131749 - RNA, 19 nt, Artificial Sequence
  Description of Artificial Sequence: Synthetic oligonucleotide
cacucuccauuucuacaug

SEQ ID NO: 3131750 - RNA, 19 nt, Artificial Sequence
  Description of Artificial Sequence: Synthetic oligonucleotide
cucugauaugacacaugca

SEQ ID NO: 3131751 - RNA, 19 nt, Artificial Sequence
  Description of Artificial Sequence: Synthetic oligonucleotide
ggugcguauacagagggaa

SEQ ID NO: 3131752 - RNA, 19 nt, Artificial Sequence
  Description of Artificial Sequence: Synthetic oligonucleotide
guggcucagaccacucucc

SEQ ID NO: 3131753 - RNA, 19 nt, Artificial Sequence
  Description of Artificial Sequence: Synthetic oligonucleotide
auacagagggaaggaggug

SEQ ID NO: 3131754 - RNA, 19 nt, Artificial Sequence
  Description of Artificial Sequence: Synthetic oligonucleotide
gguggcucagaccacucuc

SEQ ID NO: 3131755 - RNA, 19 nt, Artificial Sequence
  Description of Artificial Sequence: Synthetic oligonucleotide
uugguggcucagaccacuc

SEQ ID NO: 3131756 - RNA, 19 nt, Artificial Sequence
  Description of Artificial Sequence: Synthetic oligonucleotide
caguugguacaaggacugg

SEQ ID NO: 3131757 - RNA, 19 nt, Artificial Sequence
  Description of Artificial Sequence: Synthetic oligonucleotide
ugcccugcaguugguacaa

SEQ ID NO: 3131758 - RNA, 19 nt, Artificial Sequence
  Description of Artificial Sequence: Synthetic oligonucleotide
gacuggcacugauauucaa

SEQ ID NO: 3131759 - RNA, 19 nt, Artificial Sequence
  Description of Artificial Sequence: Synthetic oligonucleotide
cagaccacucuccauuucu

SEQ ID NO: 3131760 - RNA, 19 nt, Artificial Sequence
  Description of Artificial Sequence: Synthetic oligonucleotide
cacaugcauguaaacauuu

SEQ ID NO: 3131761 - RNA, 19 nt, Artificial Sequence
  Description of Artificial Sequence: Synthetic oligonucleotide
acaaggacuggcacugaua

SEQ ID NO: 3131762 - RNA, 19 nt, Artificial Sequence
  Description of Artificial Sequence: Synthetic oligonucleotide
uuguugcccugcaguuggu

SEQ ID NO: 3131763 - RNA, 19 nt, Artificial Sequence
  Description of Artificial Sequence: Synthetic oligonucleotide
uguugcccugcaguuggua

SEQ ID NO: 3131764 - RNA, 19 nt, Artificial Sequence
  Description of Artificial Sequence: Synthetic oligonucleotide
agaccacucuccauuucua

SEQ ID NO: 3131765 - RNA, 19 nt, Artificial Sequence
  Description of Artificial Sequence: Synthetic oligonucleotide
gcguauacagagggaagga

SEQ ID NO: 3131766 - RNA, 19 nt, Artificial Sequence
  Description of Artificial Sequence: Synthetic oligonucleotide
gcucagaccacucuccauu

SEQ ID NO: 3131767 - RNA, 19 nt, Artificial Sequence
  Description of Artificial Sequence: Synthetic oligonucleotide
cucagaccacucuccauuu

SEQ ID NO: 3131768 - RNA, 19 nt, Artificial Sequence
  Description of Artificial Sequence: Synthetic oligonucleotide
guacaaggacuggcacuga

SEQ ID NO: 3131769 - RNA, 19 nt, Artificial Sequence
  Description of Artificial Sequence: Synthetic oligonucleotide
gcacugauauucaacugau

SEQ ID NO: 3131770 - RNA, 19 nt, Artificial Sequence
  Description of Artificial Sequence: Synthetic oligonucleotide
ggacuggcacugauauuca

SEQ ID NO: 3131771 - RNA, 19 nt, Artificial Sequence
  Description of Artificial Sequence: Synthetic oligonucleotide
ccacucuccauuucuacau

SEQ ID NO: 3131772 - RNA, 19 nt, Artificial Sequence
  Description of Artificial Sequence: Synthetic oligonucleotide
gcccugcaguugguacaag

SEQ ID NO: 3131773 - RNA, 19 nt, Artificial Sequence
  Description of Artificial Sequence: Synthetic oligonucleotide
uuuauuuugaacauugggg

SEQ ID NO: 3131774 - RNA, 19 nt, Artificial Sequence
  Description of Artificial Sequence: Synthetic oligonucleotide
uuuuauuuugaacauuggg

SEQ ID NO: 3131775 - RNA, 19 nt, Artificial Sequence
  Description of Artificial Sequence: Synthetic oligonucleotide
uuauuuugaacauugggga

SEQ ID NO: 3131776 - RNA, 19 nt, Artificial Sequence
  Description of Artificial Sequence: Synthetic oligonucleotide
uugaacauuggggaggugg

SEQ ID NO: 3131777 - RNA, 19 nt, Artificial Sequence
  Description of Artificial Sequence: Synthetic oligonucleotide
uauuuugaacauuggggag

SEQ ID NO: 3131778 - RNA, 19 nt, Artificial Sequence
  Description of Artificial Sequence: Synthetic oligonucleotide
auuuugaacauuggggagg

SEQ ID NO: 3131779 - RNA, 19 nt, Artificial Sequence
  Description of Artificial Sequence: Synthetic oligonucleotide
uggugaguucaaaugaccc

SEQ ID NO: 3131780 - RNA, 19 nt, Artificial Sequence
  Description of Artificial Sequence: Synthetic oligonucleotide
uuuuccgaguaaaccauug

SEQ ID NO: 3131781 - RNA, 19 nt, Artificial Sequence
  Description of Artificial Sequence: Synthetic oligonucleotide
ugaacauuggggagguggc

SEQ ID NO: 3131782 - RNA, 19 nt, Artificial Sequence
  Description of Artificial Sequence: Synthetic oligonucleotide
ucuggugaguucaaaugac

SEQ ID NO: 3131783 - RNA, 19 nt, Artificial Sequence
  Description of Artificial Sequence: Synthetic oligonucleotide
uccgaguaaaccauuguuu

SEQ ID NO: 3131784 - RNA, 19 nt, Artificial Sequence
  Description of Artificial Sequence: Synthetic oligonucleotide
aacauuggggagguggcug

SEQ ID NO: 3131785 - RNA, 19 nt, Artificial Sequence
  Description of Artificial Sequence: Synthetic oligonucleotide
cuggugaguucaaaugacc

SEQ ID NO: 3131786 - RNA, 19 nt, Artificial Sequence
  Description of Artificial Sequence: Synthetic oligonucleotide
uuuccgaguaaaccauugu

SEQ ID NO: 3131787 - RNA, 19 nt, Artificial Sequence
  Description of Artificial Sequence: Synthetic oligonucleotide
uuccgaguaaaccauuguu

SEQ ID NO: 3131788 - RNA, 19 nt, Artificial Sequence
  Description of Artificial Sequence: Synthetic oligonucleotide
uuuugaacauuggggaggu

SEQ ID NO: 3131789 - RNA, 19 nt, Artificial Sequence
  Description of Artificial Sequence: Synthetic oligonucleotide
acauuggggagguggcugg

SEQ ID NO: 3131790 - RNA, 19 nt, Artificial Sequence
  Description of Artificial Sequence: Synthetic oligonucleotide
gucuggugaguucaaauga

SEQ ID NO: 3131791 - RNA, 19 nt, Artificial Sequence
  Description of Artificial Sequence: Synthetic oligonucleotide
gaguucaaaugacccagca

SEQ ID NO: 3131792 - RNA, 19 nt, Artificial Sequence
  Description of Artificial Sequence: Synthetic oligonucleotide
ggugaguucaaaugaccca

SEQ ID NO: 3131793 - RNA, 19 nt, Artificial Sequence
  Description of Artificial Sequence: Synthetic oligonucleotide
uuggggagguggcuggagu

SEQ ID NO: 3131794 - RNA, 19 nt, Artificial Sequence
  Description of Artificial Sequence: Synthetic oligonucleotide
uuugaacauuggggaggug

SEQ ID NO: 3131795 - RNA, 19 nt, Artificial Sequence
  Description of Artificial Sequence: Synthetic oligonucleotide
gaacauuggggagguggcu

SEQ ID NO: 3131796 - RNA, 19 nt, Artificial Sequence
  Description of Artificial Sequence: Synthetic oligonucleotide
ccgaguaaaccauuguuuu

SEQ ID NO: 3131797 - RNA, 19 nt, Artificial Sequence
  Description of Artificial Sequence: Synthetic oligonucleotide
cgaguaaaccauuguuuua

SEQ ID NO: 3131798 - RNA, 19 nt, Artificial Sequence
  Description of Artificial Sequence: Synthetic oligonucleotide
cauuggggagguggcugga

SEQ ID NO: 3131799 - RNA, 19 nt, Artificial Sequence
  Description of Artificial Sequence: Synthetic oligonucleotide
aaucuuucgagccaucucc

SEQ ID NO: 3131800 - RNA, 19 nt, Artificial Sequence
  Description of Artificial Sequence: Synthetic oligonucleotide
aagaaguuaaucuuucgag

SEQ ID NO: 3131801 - RNA, 19 nt, Artificial Sequence
  Description of Artificial Sequence: Synthetic oligonucleotide
agaaguuaaucuuucgagc

SEQ ID NO: 3131802 - RNA, 19 nt, Artificial Sequence
  Description of Artificial Sequence: Synthetic oligonucleotide
gaaguuaaucuuucgagcc

SEQ ID NO: 3131803 - RNA, 19 nt, Artificial Sequence
  Description of Artificial Sequence: Synthetic oligonucleotide
uaugacuucgguaagccca

SEQ ID NO: 3131804 - RNA, 19 nt, Artificial Sequence
  Description of Artificial Sequence: Synthetic oligonucleotide
uguuucauagcucucccgc

SEQ ID NO: 3131805 - RNA, 19 nt, Artificial Sequence
  Description of Artificial Sequence: Synthetic oligonucleotide
ucaguagcgaggauucugg

SEQ ID NO: 3131806 - RNA, 19 nt, Artificial Sequence
  Description of Artificial Sequence: Synthetic oligonucleotide
auguuguagauccuccggc

SEQ ID NO: 3131807 - RNA, 19 nt, Artificial Sequence
  Description of Artificial Sequence: Synthetic oligonucleotide
ucaagaaguuaaucuuucg

SEQ ID NO: 3131808 - RNA, 19 nt, Artificial Sequence
  Description of Artificial Sequence: Synthetic oligonucleotide
auuuaugacuucgguaagc

SEQ ID NO: 3131809 - RNA, 19 nt, Artificial Sequence
  Description of Artificial Sequence: Synthetic oligonucleotide
uuuaugacuucgguaagcc

SEQ ID NO: 3131810 - RNA, 19 nt, Artificial Sequence
  Description of Artificial Sequence: Synthetic oligonucleotide
uucuuccgcaucaagaagu

SEQ ID NO: 3131811 - RNA, 19 nt, Artificial Sequence
  Description of Artificial Sequence: Synthetic oligonucleotide
uccggcauguuucauagcu

SEQ ID NO: 3131812 - RNA, 19 nt, Artificial Sequence
  Description of Artificial Sequence: Synthetic oligonucleotide
ucaggauccuguaugcacc

SEQ ID NO: 3131813 - RNA, 19 nt, Artificial Sequence
  Description of Artificial Sequence: Synthetic oligonucleotide
agcgccuucgauuuaugac

SEQ ID NO: 3131814 - RNA, 19 nt, Artificial Sequence
  Description of Artificial Sequence: Synthetic oligonucleotide
uuccgcaucaagaaguuaa

SEQ ID NO: 3131815 - RNA, 19 nt, Artificial Sequence
  Description of Artificial Sequence: Synthetic oligonucleotide
ucucauaauagcgccuucg

SEQ ID NO: 3131816 - RNA, 19 nt, Artificial Sequence
  Description of Artificial Sequence: Synthetic oligonucleotide
aaguuaaucuuucgagcca

SEQ ID NO: 3131817 - RNA, 19 nt, Artificial Sequence
  Description of Artificial Sequence: Synthetic oligonucleotide
uuucgagccaucuccaugu

SEQ ID NO: 3131818 - RNA, 19 nt, Artificial Sequence
  Description of Artificial Sequence: Synthetic oligonucleotide
aggauucuggucaggaucc

SEQ ID NO: 3131819 - RNA, 19 nt, Artificial Sequence
  Description of Artificial Sequence: Synthetic oligonucleotide
auaauagcgccuucgauuu

SEQ ID NO: 3131820 - RNA, 19 nt, Artificial Sequence
  Description of Artificial Sequence: Synthetic oligonucleotide
guagcgaggauucugguca

SEQ ID NO: 3131821 - RNA, 19 nt, Artificial Sequence
  Description of Artificial Sequence: Synthetic oligonucleotide
uucgauuuaugacuucggu

SEQ ID NO: 3131822 - RNA, 19 nt, Artificial Sequence
  Description of Artificial Sequence: Synthetic oligonucleotide
uucauagcucucccgcugg

SEQ ID NO: 3131823 - RNA, 19 nt, Artificial Sequence
  Description of Artificial Sequence: Synthetic oligonucleotide
aggguuucucauaauagcg

SEQ ID NO: 3131824 - RNA, 19 nt, Artificial Sequence
  Description of Artificial Sequence: Synthetic oligonucleotide
caggguuucucauaauagc

SEQ ID NO: 3131825 - RNA, 19 nt, Artificial Sequence
  Description of Artificial Sequence: Synthetic oligonucleotide
uucgguaagcccaucagua

SEQ ID NO: 3131826 - RNA, 19 nt, Artificial Sequence
  Description of Artificial Sequence: Synthetic oligonucleotide
uuucauagcucucccgcug

SEQ ID NO: 3131827 - RNA, 19 nt, Artificial Sequence
  Description of Artificial Sequence: Synthetic oligonucleotide
gauuuaugacuucgguaag

SEQ ID NO: 3131828 - RNA, 19 nt, Artificial Sequence
  Description of Artificial Sequence: Synthetic oligonucleotide
cauguuguagauccuccgg

SEQ ID NO: 3131829 - RNA, 19 nt, Artificial Sequence
  Description of Artificial Sequence: Synthetic oligonucleotide
aguagcgaggauucugguc

SEQ ID NO: 3131830 - RNA, 19 nt, Artificial Sequence
  Description of Artificial Sequence: Synthetic oligonucleotide
uccauguuguagauccucc

SEQ ID NO: 3131831 - RNA, 19 nt, Artificial Sequence
  Description of Artificial Sequence: Synthetic oligonucleotide
gaggauucuggucaggauc

SEQ ID NO: 3131832 - RNA, 19 nt, Artificial Sequence
  Description of Artificial Sequence: Synthetic oligonucleotide
auagcucucccgcuggcgg

SEQ ID NO: 3131833 - RNA, 19 nt, Artificial Sequence
  Description of Artificial Sequence: Synthetic oligonucleotide
aucaagaaguuaaucuuuc

SEQ ID NO: 3131834 - RNA, 19 nt, Artificial Sequence
  Description of Artificial Sequence: Synthetic oligonucleotide
uguuguagauccuccggca

SEQ ID NO: 3131835 - RNA, 19 nt, Artificial Sequence
  Description of Artificial Sequence: Synthetic oligonucleotide
cuucgauuuaugacuucgg

SEQ ID NO: 3131836 - RNA, 19 nt, Artificial Sequence
  Description of Artificial Sequence: Synthetic oligonucleotide
aagcccaucaguagcgagg

SEQ ID NO: 3131837 - RNA, 19 nt, Artificial Sequence
  Description of Artificial Sequence: Synthetic oligonucleotide
gguuucucauaauagcgcc

SEQ ID NO: 3131838 - RNA, 19 nt, Artificial Sequence
  Description of Artificial Sequence: Synthetic oligonucleotide
ucgauuuaugacuucggua

SEQ ID NO: 3131839 - RNA, 19 nt, Artificial Sequence
  Description of Artificial Sequence: Synthetic oligonucleotide
uccuguaugcaccuuccac

SEQ ID NO: 3131840 - RNA, 19 nt, Artificial Sequence
  Description of Artificial Sequence: Synthetic oligonucleotide
cacguucccguccugaacc

SEQ ID NO: 3131841 - RNA, 19 nt, Artificial Sequence
  Description of Artificial Sequence: Synthetic oligonucleotide
uuguagauccuccggcaug

SEQ ID NO: 3131842 - RNA, 19 nt, Artificial Sequence
  Description of Artificial Sequence: Synthetic oligonucleotide
caagaaguuaaucuuucga

SEQ ID NO: 3131843 - RNA, 19 nt, Artificial Sequence
  Description of Artificial Sequence: Synthetic oligonucleotide
cauguuucauagcucuccc

SEQ ID NO: 3131844 - RNA, 19 nt, Artificial Sequence
  Description of Artificial Sequence: Synthetic oligonucleotide
uuaaucuuucgagccaucu

SEQ ID NO: 3131845 - RNA, 19 nt, Artificial Sequence
  Description of Artificial Sequence: Synthetic oligonucleotide
uaaucuuucgagccaucuc

SEQ ID NO: 3131846 - RNA, 19 nt, Artificial Sequence
  Description of Artificial Sequence: Synthetic oligonucleotide
agauccuccggcauguuuc

SEQ ID NO: 3131847 - RNA, 19 nt, Artificial Sequence
  Description of Artificial Sequence: Synthetic oligonucleotide
uuaugacuucgguaagccc

SEQ ID NO: 3131848 - RNA, 19 nt, Artificial Sequence
  Description of Artificial Sequence: Synthetic oligonucleotide
ucauaauagcgccuucgau

SEQ ID NO: 3131849 - RNA, 19 nt, Artificial Sequence
  Description of Artificial Sequence: Synthetic oligonucleotide
cuggucaggauccuguaug

SEQ ID NO: 3131850 - RNA, 19 nt, Artificial Sequence
  Description of Artificial Sequence: Synthetic oligonucleotide
ucgguaagcccaucaguag

SEQ ID NO: 3131851 - RNA, 19 nt, Artificial Sequence
  Description of Artificial Sequence: Synthetic oligonucleotide
ccuguaugcaccuuccacg

SEQ ID NO: 3131852 - RNA, 19 nt, Artificial Sequence
  Description of Artificial Sequence: Synthetic oligonucleotide
auguuucauagcucucccg

SEQ ID NO: 3131853 - RNA, 19 nt, Artificial Sequence
  Description of Artificial Sequence: Synthetic oligonucleotide
uaugcaccuuccacguucc

SEQ ID NO: 3131854 - RNA, 19 nt, Artificial Sequence
  Description of Artificial Sequence: Synthetic oligonucleotide
aauagcgccuucgauuuau

SEQ ID NO: 3131855 - RNA, 19 nt, Artificial Sequence
  Description of Artificial Sequence: Synthetic oligonucleotide
ugcaccuuccacguucccg

SEQ ID NO: 3131856 - RNA, 19 nt, Artificial Sequence
  Description of Artificial Sequence: Synthetic oligonucleotide
gucaggauccuguaugcac

SEQ ID NO: 3131857 - RNA, 19 nt, Artificial Sequence
  Description of Artificial Sequence: Synthetic oligonucleotide
guaugcaccuuccacguuc

SEQ ID NO: 3131858 - RNA, 19 nt, Artificial Sequence
  Description of Artificial Sequence: Synthetic oligonucleotide
uggucaggauccuguaugc

SEQ ID NO: 3131859 - RNA, 19 nt, Artificial Sequence
  Description of Artificial Sequence: Synthetic oligonucleotide
uguagauccuccggcaugu

SEQ ID NO: 3131860 - RNA, 19 nt, Artificial Sequence
  Description of Artificial Sequence: Synthetic oligonucleotide
uaagcccaucaguagcgag

SEQ ID NO: 3131861 - RNA, 19 nt, Artificial Sequence
  Description of Artificial Sequence: Synthetic oligonucleotide
guucuuccgcaucaagaag

SEQ ID NO: 3131862 - RNA, 19 nt, Artificial Sequence
  Description of Artificial Sequence: Synthetic oligonucleotide
cuuucgagccaucuccaug

SEQ ID NO: 3131863 - RNA, 19 nt, Artificial Sequence
  Description of Artificial Sequence: Synthetic oligonucleotide
accuuccacguucccgucc

SEQ ID NO: 3131864 - RNA, 19 nt, Artificial Sequence
  Description of Artificial Sequence: Synthetic oligonucleotide
gauccuguaugcaccuucc

SEQ ID NO: 3131865 - RNA, 19 nt, Artificial Sequence
  Description of Artificial Sequence: Synthetic oligonucleotide
aucugcccgguucuuccgc

SEQ ID NO: 3131866 - RNA, 19 nt, Artificial Sequence
  Description of Artificial Sequence: Synthetic oligonucleotide
uuucucauaauagcgccuu

SEQ ID NO: 3131867 - RNA, 19 nt, Artificial Sequence
  Description of Artificial Sequence: Synthetic oligonucleotide
gguaagcccaucaguagcg

SEQ ID NO: 3131868 - RNA, 19 nt, Artificial Sequence
  Description of Artificial Sequence: Synthetic oligonucleotide
aucaguagcgaggauucug

SEQ ID NO: 3131869 - RNA, 19 nt, Artificial Sequence
  Description of Artificial Sequence: Synthetic oligonucleotide
uucccguccugaaccauca

SEQ ID NO: 3131870 - RNA, 19 nt, Artificial Sequence
  Description of Artificial Sequence: Synthetic oligonucleotide
cuuagcugcccugccacgg

SEQ ID NO: 3131871 - RNA, 19 nt, Artificial Sequence
  Description of Artificial Sequence: Synthetic oligonucleotide
aguuaaucuuucgagccau

SEQ ID NO: 3131872 - RNA, 19 nt, Artificial Sequence
  Description of Artificial Sequence: Synthetic oligonucleotide
cauaauagcgccuucgauu

SEQ ID NO: 3131873 - RNA, 19 nt, Artificial Sequence
  Description of Artificial Sequence: Synthetic oligonucleotide
gaucugcccgguucuuccg

SEQ ID NO: 3131874 - RNA, 19 nt, Artificial Sequence
  Description of Artificial Sequence: Synthetic oligonucleotide
ucgagccaucuccauguug

SEQ ID NO: 3131875 - RNA, 19 nt, Artificial Sequence
  Description of Artificial Sequence: Synthetic oligonucleotide
uccgcaucaagaaguuaau

SEQ ID NO: 3131876 - RNA, 19 nt, Artificial Sequence
  Description of Artificial Sequence: Synthetic oligonucleotide
ucuggucaggauccuguau

SEQ ID NO: 3131877 - RNA, 19 nt, Artificial Sequence
  Description of Artificial Sequence: Synthetic oligonucleotide
ucuuccgcaucaagaaguu

SEQ ID NO: 3131878 - RNA, 19 nt, Artificial Sequence
  Description of Artificial Sequence: Synthetic oligonucleotide
gguucuuccgcaucaagaa

SEQ ID NO: 3131879 - RNA, 19 nt, Artificial Sequence
  Description of Artificial Sequence: Synthetic oligonucleotide
ccugccacggaucugcccg

SEQ ID NO: 3131880 - RNA, 19 nt, Artificial Sequence
  Description of Artificial Sequence: Synthetic oligonucleotide
ugcccugccacggaucugc

SEQ ID NO: 3131881 - RNA, 19 nt, Artificial Sequence
  Description of Artificial Sequence: Synthetic oligonucleotide
ccuucgauuuaugacuucg

SEQ ID NO: 3131882 - RNA, 19 nt, Artificial Sequence
  Description of Artificial Sequence: Synthetic oligonucleotide
gacuucgguaagcccauca

SEQ ID NO: 3131883 - RNA, 19 nt, Artificial Sequence
  Description of Artificial Sequence: Synthetic oligonucleotide
uuagcugcccugccacgga

SEQ ID NO: 3131884 - RNA, 19 nt, Artificial Sequence
  Description of Artificial Sequence: Synthetic oligonucleotide
ucauagcucucccgcuggc

SEQ ID NO: 3131885 - RNA, 19 nt, Artificial Sequence
  Description of Artificial Sequence: Synthetic oligonucleotide
cucauaauagcgccuucga

SEQ ID NO: 3131886 - RNA, 19 nt, Artificial Sequence
  Description of Artificial Sequence: Synthetic oligonucleotide
auucuggucaggauccugu

SEQ ID NO: 3131887 - RNA, 19 nt, Artificial Sequence
  Description of Artificial Sequence: Synthetic oligonucleotide
cgauuuaugacuucgguaa

SEQ ID NO: 3131888 - RNA, 19 nt, Artificial Sequence
  Description of Artificial Sequence: Synthetic oligonucleotide
gcaggguuucucauaauag

SEQ ID NO: 3131889 - RNA, 19 nt, Artificial Sequence
  Description of Artificial Sequence: Synthetic oligonucleotide
gcauguuucauagcucucc

SEQ ID NO: 3131890 - RNA, 19 nt, Artificial Sequence
  Description of Artificial Sequence: Synthetic oligonucleotide
uagcgccuucgauuuauga

SEQ ID NO: 3131891 - RNA, 19 nt, Artificial Sequence
  Description of Artificial Sequence: Synthetic oligonucleotide
ggguuucucauaauagcgc

SEQ ID NO: 3131892 - RNA, 19 nt, Artificial Sequence
  Description of Artificial Sequence: Synthetic oligonucleotide
ggaucugcccgguucuucc

SEQ ID NO: 3131893 - RNA, 19 nt, Artificial Sequence
  Description of Artificial Sequence: Synthetic oligonucleotide
ccaucaguagcgaggauuc

SEQ ID NO: 3131894 - RNA, 19 nt, Artificial Sequence
  Description of Artificial Sequence: Synthetic oligonucleotide
cauagcucucccgcuggcg

SEQ ID NO: 3131895 - RNA, 19 nt, Artificial Sequence
  Description of Artificial Sequence: Synthetic oligonucleotide
ccauguuguagauccuccg

SEQ ID NO: 3131896 - RNA, 19 nt, Artificial Sequence
  Description of Artificial Sequence: Synthetic oligonucleotide
uagcgaggauucuggucag

SEQ ID NO: 3131897 - RNA, 19 nt, Artificial Sequence
  Description of Artificial Sequence: Synthetic oligonucleotide
gauccuccggcauguuuca

SEQ ID NO: 3131898 - RNA, 19 nt, Artificial Sequence
  Description of Artificial Sequence: Synthetic oligonucleotide
uagauccuccggcauguuu

SEQ ID NO: 3131899 - RNA, 19 nt, Artificial Sequence
  Description of Artificial Sequence: Synthetic oligonucleotide
ucuuucgagccaucuccau

SEQ ID NO: 3131900 - RNA, 19 nt, Artificial Sequence
  Description of Artificial Sequence: Synthetic oligonucleotide
ucugcccgguucuuccgca

SEQ ID NO: 3131901 - RNA, 19 nt, Artificial Sequence
  Description of Artificial Sequence: Synthetic oligonucleotide
ccuccggcauguuucauag

SEQ ID NO: 3131902 - RNA, 19 nt, Artificial Sequence
  Description of Artificial Sequence: Synthetic oligonucleotide
uccuccggcauguuucaua

SEQ ID NO: 3131903 - RNA, 19 nt, Artificial Sequence
  Description of Artificial Sequence: Synthetic oligonucleotide
caucaagaaguuaaucuuu

SEQ ID NO: 3131904 - RNA, 19 nt, Artificial Sequence
  Description of Artificial Sequence: Synthetic oligonucleotide
agcccaucaguagcgagga

SEQ ID NO: 3131905 - RNA, 19 nt, Artificial Sequence
  Description of Artificial Sequence: Synthetic oligonucleotide
uccacguucccguccugaa

SEQ ID NO: 3131906 - RNA, 19 nt, Artificial Sequence
  Description of Artificial Sequence: Synthetic oligonucleotide
ggauccuguaugcaccuuc

SEQ ID NO: 3131907 - RNA, 19 nt, Artificial Sequence
  Description of Artificial Sequence: Synthetic oligonucleotide
augcaccuuccacguuccc

SEQ ID NO: 3131908 - RNA, 19 nt, Artificial Sequence
  Description of Artificial Sequence: Synthetic oligonucleotide
uagcucucccgcuggcggc

SEQ ID NO: 3131909 - RNA, 19 nt, Artificial Sequence
  Description of Artificial Sequence: Synthetic oligonucleotide
uucuggucaggauccugua

SEQ ID NO: 3131910 - RNA, 19 nt, Artificial Sequence
  Description of Artificial Sequence: Synthetic oligonucleotide
uuccacguucccguccuga

SEQ ID NO: 3131911 - RNA, 19 nt, Artificial Sequence
  Description of Artificial Sequence: Synthetic oligonucleotide
auccuguaugcaccuucca

SEQ ID NO: 3131912 - RNA, 19 nt, Artificial Sequence
  Description of Artificial Sequence: Synthetic oligonucleotide
uguaugcaccuuccacguu

SEQ ID NO: 3131913 - RNA, 19 nt, Artificial Sequence
  Description of Artificial Sequence: Synthetic oligonucleotide
guuucauagcucucccgcu

SEQ ID NO: 3131914 - RNA, 19 nt, Artificial Sequence
  Description of Artificial Sequence: Synthetic oligonucleotide
gcaucaagaaguuaaucuu

SEQ ID NO: 3131915 - RNA, 19 nt, Artificial Sequence
  Description of Artificial Sequence: Synthetic oligonucleotide
aucuuucgagccaucucca

SEQ ID NO: 3131916 - RNA, 19 nt, Artificial Sequence
  Description of Artificial Sequence: Synthetic oligonucleotide
cuguaugcaccuuccacgu

SEQ ID NO: 3131917 - RNA, 19 nt, Artificial Sequence
  Description of Artificial Sequence: Synthetic oligonucleotide
ggcaggguuucucauaaua

SEQ ID NO: 3131918 - RNA, 19 nt, Artificial Sequence
  Description of Artificial Sequence: Synthetic oligonucleotide
uaauagcgccuucgauuua

SEQ ID NO: 3131919 - RNA, 19 nt, Artificial Sequence
  Description of Artificial Sequence: Synthetic oligonucleotide
cugccacggaucugcccgg

SEQ ID NO: 3131920 - RNA, 19 nt, Artificial Sequence
  Description of Artificial Sequence: Synthetic oligonucleotide
acguucccguccugaacca

SEQ ID NO: 3131921 - RNA, 19 nt, Artificial Sequence
  Description of Artificial Sequence: Synthetic oligonucleotide
gcgccuucgauuuaugacu

SEQ ID NO: 3131922 - RNA, 19 nt, Artificial Sequence
  Description of Artificial Sequence: Synthetic oligonucleotide
cuucgguaagcccaucagu

SEQ ID NO: 3131923 - RNA, 19 nt, Artificial Sequence
  Description of Artificial Sequence: Synthetic oligonucleotide
augacuucgguaagcccau

SEQ ID NO: 3131924 - RNA, 19 nt, Artificial Sequence
  Description of Artificial Sequence: Synthetic oligonucleotide
ucucccgcuggcggcggcg

SEQ ID NO: 3131925 - RNA, 19 nt, Artificial Sequence
  Description of Artificial Sequence: Synthetic oligonucleotide
guuaaucuuucgagccauc

SEQ ID NO: 3131926 - RNA, 19 nt, Artificial Sequence
  Description of Artificial Sequence: Synthetic oligonucleotide
cgguaagcccaucaguagc

SEQ ID NO: 3131927 - RNA, 19 nt, Artificial Sequence
  Description of Artificial Sequence: Synthetic oligonucleotide
agcgaggauucuggucagg

SEQ ID NO: 3131928 - RNA, 19 nt, Artificial Sequence
  Description of Artificial Sequence: Synthetic oligonucleotide
gccuuagcugcccugccac

SEQ ID NO: 3131929 - RNA, 19 nt, Artificial Sequence
  Description of Artificial Sequence: Synthetic oligonucleotide
cgcaucaagaaguuaaucu

SEQ ID NO: 3131930 - RNA, 19 nt, Artificial Sequence
  Description of Artificial Sequence: Synthetic oligonucleotide
ugcccgguucuuccgcauc

SEQ ID NO: 3131931 - RNA, 19 nt, Artificial Sequence
  Description of Artificial Sequence: Synthetic oligonucleotide
guuguagauccuccggcau

SEQ ID NO: 3131932 - RNA, 19 nt, Artificial Sequence
  Description of Artificial Sequence: Synthetic oligonucleotide
guucccguccugaaccauc

SEQ ID NO: 3131933 - RNA, 19 nt, Artificial Sequence
  Description of Artificial Sequence: Synthetic oligonucleotide
uagcugcccugccacggau

SEQ ID NO: 3131934 - RNA, 19 nt, Artificial Sequence
  Description of Artificial Sequence: Synthetic oligonucleotide
guuucucauaauagcgccu

SEQ ID NO: 3131935 - RNA, 19 nt, Artificial Sequence
  Description of Artificial Sequence: Synthetic oligonucleotide
caucuccauguuguagauc

SEQ ID NO: 3131936 - RNA, 19 nt, Artificial Sequence
  Description of Artificial Sequence: Synthetic oligonucleotide
cuccggcauguuucauagc

SEQ ID NO: 3131937 - RNA, 19 nt, Artificial Sequence
  Description of Artificial Sequence: Synthetic oligonucleotide
uucgagccaucuccauguu

SEQ ID NO: 3131938 - RNA, 19 nt, Artificial Sequence
  Description of Artificial Sequence: Synthetic oligonucleotide
guaagcccaucaguagcga

SEQ ID NO: 3131939 - RNA, 19 nt, Artificial Sequence
  Description of Artificial Sequence: Synthetic oligonucleotide
auagcgccuucgauuuaug

SEQ ID NO: 3131940 - RNA, 19 nt, Artificial Sequence
  Description of Artificial Sequence: Synthetic oligonucleotide
ccuuagcugcccugccacg

SEQ ID NO: 3131941 - RNA, 19 nt, Artificial Sequence
  Description of Artificial Sequence: Synthetic oligonucleotide
agcugcccugccacggauc

SEQ ID NO: 3131942 - RNA, 19 nt, Artificial Sequence
  Description of Artificial Sequence: Synthetic oligonucleotide
gcggcaggguuucucauaa

SEQ ID NO: 3131943 - RNA, 19 nt, Artificial Sequence
  Description of Artificial Sequence: Synthetic oligonucleotide
gcaccuuccacguucccgu

SEQ ID NO: 3131944 - RNA, 19 nt, Artificial Sequence
  Description of Artificial Sequence: Synthetic oligonucleotide
gagccaucuccauguugua

SEQ ID NO: 3131945 - RNA, 19 nt, Artificial Sequence
  Description of Artificial Sequence: Synthetic oligonucleotide
ccacggaucugcccgguuc

SEQ ID NO: 3131946 - RNA, 19 nt, Artificial Sequence
  Description of Artificial Sequence: Synthetic oligonucleotide
caggauccuguaugcaccu

SEQ ID NO: 3131947 - RNA, 19 nt, Artificial Sequence
  Description of Artificial Sequence: Synthetic oligonucleotide
cgagccaucuccauguugu

SEQ ID NO: 3131948 - RNA, 19 nt, Artificial Sequence
  Description of Artificial Sequence: Synthetic oligonucleotide
ccggcauguuucauagcuc

SEQ ID NO: 3131949 - RNA, 19 nt, Artificial Sequence
  Description of Artificial Sequence: Synthetic oligonucleotide
caccuuccacguucccguc

SEQ ID NO: 3131950 - RNA, 19 nt, Artificial Sequence
  Description of Artificial Sequence: Synthetic oligonucleotide
gcgaggauucuggucagga

SEQ ID NO: 3131951 - RNA, 19 nt, Artificial Sequence
  Description of Artificial Sequence: Synthetic oligonucleotide
cuuccacguucccguccug

SEQ ID NO: 3131952 - RNA, 19 nt, Artificial Sequence
  Description of Artificial Sequence: Synthetic oligonucleotide
cacggaucugcccgguucu

SEQ ID NO: 3131953 - RNA, 19 nt, Artificial Sequence
  Description of Artificial Sequence: Synthetic oligonucleotide
ggcauguuucauagcucuc

SEQ ID NO: 3131954 - RNA, 19 nt, Artificial Sequence
  Description of Artificial Sequence: Synthetic oligonucleotide
gcuggcggcggcggcaggg

SEQ ID NO: 3131955 - RNA, 19 nt, Artificial Sequence
  Description of Artificial Sequence: Synthetic oligonucleotide
ccgguucuuccgcaucaag

SEQ ID NO: 3131956 - RNA, 19 nt, Artificial Sequence
  Description of Artificial Sequence: Synthetic oligonucleotide
ccacguucccguccugaac

SEQ ID NO: 3131957 - RNA, 19 nt, Artificial Sequence
  Description of Artificial Sequence: Synthetic oligonucleotide
ugacuucgguaagcccauc

SEQ ID NO: 3131958 - RNA, 19 nt, Artificial Sequence
  Description of Artificial Sequence: Synthetic oligonucleotide
gcccgguucuuccgcauca

SEQ ID NO: 3131959 - RNA, 19 nt, Artificial Sequence
  Description of Artificial Sequence: Synthetic oligonucleotide
cucccgcuggcggcggcgg

SEQ ID NO: 3131960 - RNA, 19 nt, Artificial Sequence
  Description of Artificial Sequence: Synthetic oligonucleotide
ccgcaucaagaaguuaauc

SEQ ID NO: 3131961 - RNA, 19 nt, Artificial Sequence
  Description of Artificial Sequence: Synthetic oligonucleotide
ugccacggaucugcccggu

SEQ ID NO: 3131962 - RNA, 19 nt, Artificial Sequence
  Description of Artificial Sequence: Synthetic oligonucleotide
gcggcggcaggguuucuca

SEQ ID NO: 3131963 - RNA, 19 nt, Artificial Sequence
  Description of Artificial Sequence: Synthetic oligonucleotide
caguagcgaggauucuggu

SEQ ID NO: 3131964 - RNA, 19 nt, Artificial Sequence
  Description of Artificial Sequence: Synthetic oligonucleotide
gccuucgauuuaugacuuc

SEQ ID NO: 3131965 - RNA, 19 nt, Artificial Sequence
  Description of Artificial Sequence: Synthetic oligonucleotide
gcugcccugccacggaucu

SEQ ID NO: 3131966 - RNA, 19 nt, Artificial Sequence
  Description of Artificial Sequence: Synthetic oligonucleotide
cuuccgcaucaagaaguua

SEQ ID NO: 3131967 - RNA, 19 nt, Artificial Sequence
  Description of Artificial Sequence: Synthetic oligonucleotide
cucucccgcuggcggcggc

SEQ ID NO: 3131968 - RNA, 19 nt, Artificial Sequence
  Description of Artificial Sequence: Synthetic oligonucleotide
ggcggcaggguuucucaua

SEQ ID NO: 3131969 - RNA, 19 nt, Artificial Sequence
  Description of Artificial Sequence: Synthetic oligonucleotide
aggauccuguaugcaccuu

SEQ ID NO: 3131970 - RNA, 19 nt, Artificial Sequence
  Description of Artificial Sequence: Synthetic oligonucleotide
cggcauguuucauagcucu

SEQ ID NO: 3131971 - RNA, 19 nt, Artificial Sequence
  Description of Artificial Sequence: Synthetic oligonucleotide
cccugccacggaucugccc

SEQ ID NO: 3131972 - RNA, 19 nt, Artificial Sequence
  Description of Artificial Sequence: Synthetic oligonucleotide
auccuccggcauguuucau

SEQ ID NO: 3131973 - RNA, 19 nt, Artificial Sequence
  Description of Artificial Sequence: Synthetic oligonucleotide
acggaucugcccgguucuu

SEQ ID NO: 3131974 - RNA, 19 nt, Artificial Sequence
  Description of Artificial Sequence: Synthetic oligonucleotide
cugcccugccacggaucug

SEQ ID NO: 3131975 - RNA, 19 nt, Artificial Sequence
  Description of Artificial Sequence: Synthetic oligonucleotide
caucaguagcgaggauucu

SEQ ID NO: 3131976 - RNA, 19 nt, Artificial Sequence
  Description of Artificial Sequence: Synthetic oligonucleotide
ccuuccacguucccguccu

SEQ ID NO: 3131977 - RNA, 19 nt, Artificial Sequence
  Description of Artificial Sequence: Synthetic oligonucleotide
cccaucaguagcgaggauu

SEQ ID NO: 3131978 - RNA, 19 nt, Artificial Sequence
  Description of Artificial Sequence: Synthetic oligonucleotide
ggcggcggcaggguuucuc

SEQ ID NO: 3131979 - RNA, 19 nt, Artificial Sequence
  Description of Artificial Sequence: Synthetic oligonucleotide
ccaucuccauguuguagau

SEQ ID NO: 3131980 - RNA, 19 nt, Artificial Sequence
  Description of Artificial Sequence: Synthetic oligonucleotide
gcucucccgcuggcggcgg

SEQ ID NO: 3131981 - RNA, 19 nt, Artificial Sequence
  Description of Artificial Sequence: Synthetic oligonucleotide
ggauucuggucaggauccu

SEQ ID NO: 3131982 - RNA, 19 nt, Artificial Sequence
  Description of Artificial Sequence: Synthetic oligonucleotide
gcggcggcggcaggguuuc

SEQ ID NO: 3131983 - RNA, 19 nt, Artificial Sequence
  Description of Artificial Sequence: Synthetic oligonucleotide
cggaucugcccgguucuuc

SEQ ID NO: 3131984 - RNA, 19 nt, Artificial Sequence
  Description of Artificial Sequence: Synthetic oligonucleotide
cugcccgguucuuccgcau

SEQ ID NO: 3131985 - RNA, 19 nt, Artificial Sequence
  Description of Artificial Sequence: Synthetic oligonucleotide
gcccugccacggaucugcc

SEQ ID NO: 3131986 - RNA, 19 nt, Artificial Sequence
  Description of Artificial Sequence: Synthetic oligonucleotide
guagauccuccggcauguu

SEQ ID NO: 3131987 - RNA, 19 nt, Artificial Sequence
  Description of Artificial Sequence: Synthetic oligonucleotide
cgaggauucuggucaggau

SEQ ID NO: 3131988 - RNA, 19 nt, Artificial Sequence
  Description of Artificial Sequence: Synthetic oligonucleotide
ccgcuggcggcggcggcag

SEQ ID NO: 3131989 - RNA, 19 nt, Artificial Sequence
  Description of Artificial Sequence: Synthetic oligonucleotide
cgccuucgauuuaugacuu

SEQ ID NO: 3131990 - RNA, 19 nt, Artificial Sequence
  Description of Artificial Sequence: Synthetic oligonucleotide
cccgguucuuccgcaucaa

SEQ ID NO: 3131991 - RNA, 19 nt, Artificial Sequence
  Description of Artificial Sequence: Synthetic oligonucleotide
gccacggaucugcccgguu

SEQ ID NO: 3131992 - RNA, 19 nt, Artificial Sequence
  Description of Artificial Sequence: Synthetic oligonucleotide
gcccaucaguagcgaggau

SEQ ID NO: 3131993 - RNA, 19 nt, Artificial Sequence
  Description of Artificial Sequence: Synthetic oligonucleotide
cguucccguccugaaccau

SEQ ID NO: 3131994 - RNA, 19 nt, Artificial Sequence
  Description of Artificial Sequence: Synthetic oligonucleotide
cggcggcaggguuucucau

SEQ ID NO: 3131995 - RNA, 19 nt, Artificial Sequence
  Description of Artificial Sequence: Synthetic oligonucleotide
cggcaggguuucucauaau

SEQ ID NO: 3131996 - RNA, 19 nt, Artificial Sequence
  Description of Artificial Sequence: Synthetic oligonucleotide
cggcggcggcaggguuucu

SEQ ID NO: 3131997 - RNA, 19 nt, Artificial Sequence
  Description of Artificial Sequence: Synthetic oligonucleotide
ugugccagggucuagcugg

SEQ ID NO: 3131998 - RNA, 19 nt, Artificial Sequence
  Description of Artificial Sequence: Synthetic oligonucleotide
uucacaugagcacacagaa

SEQ ID NO: 3131999 - RNA, 19 nt, Artificial Sequence
  Description of Artificial Sequence: Synthetic oligonucleotide
agacucuugcuccaacucc

SEQ ID NO: 3132000 - RNA, 19 nt, Artificial Sequence
  Description of Artificial Sequence: Synthetic oligonucleotide
uggcacauugcucugguag

SEQ ID NO: 3132001 - RNA, 19 nt, Artificial Sequence
  Description of Artificial Sequence: Synthetic oligonucleotide
ugguaggcugcucagaaug

SEQ ID NO: 3132002 - RNA, 19 nt, Artificial Sequence
  Description of Artificial Sequence: Synthetic oligonucleotide
uucucaaagcucuggaucu

SEQ ID NO: 3132003 - RNA, 19 nt, Artificial Sequence
  Description of Artificial Sequence: Synthetic oligonucleotide
aauggucuccagguugugc

SEQ ID NO: 3132004 - RNA, 19 nt, Artificial Sequence
  Description of Artificial Sequence: Synthetic oligonucleotide
aaggucauucucaaagcuc

SEQ ID NO: 3132005 - RNA, 19 nt, Artificial Sequence
  Description of Artificial Sequence: Synthetic oligonucleotide
aacagcaagguggggaggg

SEQ ID NO: 3132006 - RNA, 19 nt, Artificial Sequence
  Description of Artificial Sequence: Synthetic oligonucleotide
uccagguugugcuugucag

SEQ ID NO: 3132007 - RNA, 19 nt, Artificial Sequence
  Description of Artificial Sequence: Synthetic oligonucleotide
ggcaggaacagcaaggugg

SEQ ID NO: 3132008 - RNA, 19 nt, Artificial Sequence
  Description of Artificial Sequence: Synthetic oligonucleotide
aacucccucaguuugcgau

SEQ ID NO: 3132009 - RNA, 19 nt, Artificial Sequence
  Description of Artificial Sequence: Synthetic oligonucleotide
aagguggggagggugugcc

SEQ ID NO: 3132010 - RNA, 19 nt, Artificial Sequence
  Description of Artificial Sequence: Synthetic oligonucleotide
aagcucuggaucugcagcu

SEQ ID NO: 3132011 - RNA, 19 nt, Artificial Sequence
  Description of Artificial Sequence: Synthetic oligonucleotide
ucugguaggcugcucagaa

SEQ ID NO: 3132012 - RNA, 19 nt, Artificial Sequence
  Description of Artificial Sequence: Synthetic oligonucleotide
auggggagugggcaggaac

SEQ ID NO: 3132013 - RNA, 19 nt, Artificial Sequence
  Description of Artificial Sequence: Synthetic oligonucleotide
uggggagugggcaggaaca

SEQ ID NO: 3132014 - RNA, 19 nt, Artificial Sequence
  Description of Artificial Sequence: Synthetic oligonucleotide
cagaauggucuccagguug

SEQ ID NO: 3132015 - RNA, 19 nt, Artificial Sequence
  Description of Artificial Sequence: Synthetic oligonucleotide
cauucacaugagcacacag

SEQ ID NO: 3132016 - RNA, 19 nt, Artificial Sequence
  Description of Artificial Sequence: Synthetic oligonucleotide
gaucucagcaaggucauuc

SEQ ID NO: 3132017 - RNA, 19 nt, Artificial Sequence
  Description of Artificial Sequence: Synthetic oligonucleotide
gacaccuauggggaguggg

SEQ ID NO: 3132018 - RNA, 19 nt, Artificial Sequence
  Description of Artificial Sequence: Synthetic oligonucleotide
gguugugcuugucagcgcg

SEQ ID NO: 3132019 - RNA, 19 nt, Artificial Sequence
  Description of Artificial Sequence: Synthetic oligonucleotide
caugagcacacagaaggcc

SEQ ID NO: 3132020 - RNA, 19 nt, Artificial Sequence
  Description of Artificial Sequence: Synthetic oligonucleotide
ugcuugucagcgcggaucu

SEQ ID NO: 3132021 - RNA, 19 nt, Artificial Sequence
  Description of Artificial Sequence: Synthetic oligonucleotide
acaugagcacacagaaggc

SEQ ID NO: 3132022 - RNA, 19 nt, Artificial Sequence
  Description of Artificial Sequence: Synthetic oligonucleotide
gacucuugcuccaacuccc

SEQ ID NO: 3132023 - RNA, 19 nt, Artificial Sequence
  Description of Artificial Sequence: Synthetic oligonucleotide
aggucauucucaaagcucu

SEQ ID NO: 3132024 - RNA, 19 nt, Artificial Sequence
  Description of Artificial Sequence: Synthetic oligonucleotide
ugcuccaacucccucaguu

SEQ ID NO: 3132025 - RNA, 19 nt, Artificial Sequence
  Description of Artificial Sequence: Synthetic oligonucleotide
ucuagcuggcacauugcuc

SEQ ID NO: 3132026 - RNA, 19 nt, Artificial Sequence
  Description of Artificial Sequence: Synthetic oligonucleotide
acacagaaggccgacccgg

SEQ ID NO: 3132027 - RNA, 19 nt, Artificial Sequence
  Description of Artificial Sequence: Synthetic oligonucleotide
ucaaagcucuggaucugca

SEQ ID NO: 3132028 - RNA, 19 nt, Artificial Sequence
  Description of Artificial Sequence: Synthetic oligonucleotide
acauugcucugguaggcug

SEQ ID NO: 3132029 - RNA, 19 nt, Artificial Sequence
  Description of Artificial Sequence: Synthetic oligonucleotide
uccaacucccucaguuugc

SEQ ID NO: 3132030 - RNA, 19 nt, Artificial Sequence
  Description of Artificial Sequence: Synthetic oligonucleotide
cauugcucugguaggcugc

SEQ ID NO: 3132031 - RNA, 19 nt, Artificial Sequence
  Description of Artificial Sequence: Synthetic oligonucleotide
cuagcuggcacauugcucu

SEQ ID NO: 3132032 - RNA, 19 nt, Artificial Sequence
  Description of Artificial Sequence: Synthetic oligonucleotide
ugagcacacagaaggccga

SEQ ID NO: 3132033 - RNA, 19 nt, Artificial Sequence
  Description of Artificial Sequence: Synthetic oligonucleotide
caaagcucuggaucugcag

SEQ ID NO: 3132034 - RNA, 19 nt, Artificial Sequence
  Description of Artificial Sequence: Synthetic oligonucleotide
cuugcuccaacucccucag

SEQ ID NO: 3132035 - RNA, 19 nt, Artificial Sequence
  Description of Artificial Sequence: Synthetic oligonucleotide
acaccuauggggagugggc

SEQ ID NO: 3132036 - RNA, 19 nt, Artificial Sequence
  Description of Artificial Sequence: Synthetic oligonucleotide
aggaacagcaaggugggga

SEQ ID NO: 3132037 - RNA, 19 nt, Artificial Sequence
  Description of Artificial Sequence: Synthetic oligonucleotide
ggcacauugcucugguagg

SEQ ID NO: 3132038 - RNA, 19 nt, Artificial Sequence
  Description of Artificial Sequence: Synthetic oligonucleotide
ggaucugcagcuccugccg

SEQ ID NO: 3132039 - RNA, 19 nt, Artificial Sequence
  Description of Artificial Sequence: Synthetic oligonucleotide
aucucagcaaggucauucu

SEQ ID NO: 3132040 - RNA, 19 nt, Artificial Sequence
  Description of Artificial Sequence: Synthetic oligonucleotide
uugucagcgcggaucucag

SEQ ID NO: 3132041 - RNA, 19 nt, Artificial Sequence
  Description of Artificial Sequence: Synthetic oligonucleotide
agguugugcuugucagcgc

SEQ ID NO: 3132042 - RNA, 19 nt, Artificial Sequence
  Description of Artificial Sequence: Synthetic oligonucleotide
gucagcgcggaucucagca

SEQ ID NO: 3132043 - RNA, 19 nt, Artificial Sequence
  Description of Artificial Sequence: Synthetic oligonucleotide
cucagaauggucuccaggu

SEQ ID NO: 3132044 - RNA, 19 nt, Artificial Sequence
  Description of Artificial Sequence: Synthetic oligonucleotide
accuauggggagugggcag

SEQ ID NO: 3132045 - RNA, 19 nt, Artificial Sequence
  Description of Artificial Sequence: Synthetic oligonucleotide
gggucuagcuggcacauug

SEQ ID NO: 3132046 - RNA, 19 nt, Artificial Sequence
  Description of Artificial Sequence: Synthetic oligonucleotide
ucagaauggucuccagguu

SEQ ID NO: 3132047 - RNA, 19 nt, Artificial Sequence
  Description of Artificial Sequence: Synthetic oligonucleotide
uaggcugcucagaaugguc

SEQ ID NO: 3132048 - RNA, 19 nt, Artificial Sequence
  Description of Artificial Sequence: Synthetic oligonucleotide
gcaaggucauucucaaagc

SEQ ID NO: 3132049 - RNA, 19 nt, Artificial Sequence
  Description of Artificial Sequence: Synthetic oligonucleotide
cacacagaaggccgacccg

SEQ ID NO: 3132050 - RNA, 19 nt, Artificial Sequence
  Description of Artificial Sequence: Synthetic oligonucleotide
agcacacagaaggccgacc

SEQ ID NO: 3132051 - RNA, 19 nt, Artificial Sequence
  Description of Artificial Sequence: Synthetic oligonucleotide
cugccgugcagacucuugc

SEQ ID NO: 3132052 - RNA, 19 nt, Artificial Sequence
  Description of Artificial Sequence: Synthetic oligonucleotide
agaauggucuccagguugu

SEQ ID NO: 3132053 - RNA, 19 nt, Artificial Sequence
  Description of Artificial Sequence: Synthetic oligonucleotide
cucaaagcucuggaucugc

SEQ ID NO: 3132054 - RNA, 19 nt, Artificial Sequence
  Description of Artificial Sequence: Synthetic oligonucleotide
cagacucuugcuccaacuc

SEQ ID NO: 3132055 - RNA, 19 nt, Artificial Sequence
  Description of Artificial Sequence: Synthetic oligonucleotide
ugcagcuccugccgugcag

SEQ ID NO: 3132056 - RNA, 19 nt, Artificial Sequence
  Description of Artificial Sequence: Synthetic oligonucleotide
cacagaaggccgacccggg

SEQ ID NO: 3132057 - RNA, 19 nt, Artificial Sequence
  Description of Artificial Sequence: Synthetic oligonucleotide
cagaaggccgacccgggac

SEQ ID NO: 3132058 - RNA, 19 nt, Artificial Sequence
  Description of Artificial Sequence: Synthetic oligonucleotide
gcacacagaaggccgaccc

SEQ ID NO: 3132059 - RNA, 19 nt, Artificial Sequence
  Description of Artificial Sequence: Synthetic oligonucleotide
ugcagacucuugcuccaac

SEQ ID NO: 3132060 - RNA, 19 nt, Artificial Sequence
  Description of Artificial Sequence: Synthetic oligonucleotide
gacccgggacaccuauggg

SEQ ID NO: 3132061 - RNA, 19 nt, Artificial Sequence
  Description of Artificial Sequence: Synthetic oligonucleotide
ucucaaagcucuggaucug

SEQ ID NO: 3132062 - RNA, 19 nt, Artificial Sequence
  Description of Artificial Sequence: Synthetic oligonucleotide
gaacagcaagguggggagg

SEQ ID NO: 3132063 - RNA, 19 nt, Artificial Sequence
  Description of Artificial Sequence: Synthetic oligonucleotide
gcaggaacagcaagguggg

SEQ ID NO: 3132064 - RNA, 19 nt, Artificial Sequence
  Description of Artificial Sequence: Synthetic oligonucleotide
ucugcagcuccugccgugc

SEQ ID NO: 3132065 - RNA, 19 nt, Artificial Sequence
  Description of Artificial Sequence: Synthetic oligonucleotide
cuugucagcgcggaucuca

SEQ ID NO: 3132066 - RNA, 19 nt, Artificial Sequence
  Description of Artificial Sequence: Synthetic oligonucleotide
gguaggcugcucagaaugg

SEQ ID NO: 3132067 - RNA, 19 nt, Artificial Sequence
  Description of Artificial Sequence: Synthetic oligonucleotide
aucugcagcuccugccgug

SEQ ID NO: 3132068 - RNA, 19 nt, Artificial Sequence
  Description of Artificial Sequence: Synthetic oligonucleotide
ugccgugcagacucuugcu

SEQ ID NO: 3132069 - RNA, 19 nt, Artificial Sequence
  Description of Artificial Sequence: Synthetic oligonucleotide
guugugcuugucagcgcgg

SEQ ID NO: 3132070 - RNA, 19 nt, Artificial Sequence
  Description of Artificial Sequence: Synthetic oligonucleotide
aaggccgacccgggacacc

SEQ ID NO: 3132071 - RNA, 19 nt, Artificial Sequence
  Description of Artificial Sequence: Synthetic oligonucleotide
gcggaucucagcaagguca

SEQ ID NO: 3132072 - RNA, 19 nt, Artificial Sequence
  Description of Artificial Sequence: Synthetic oligonucleotide
uugugcuugucagcgcgga

SEQ ID NO: 3132073 - RNA, 19 nt, Artificial Sequence
  Description of Artificial Sequence: Synthetic oligonucleotide
aggcugcucagaauggucu

SEQ ID NO: 3132074 - RNA, 19 nt, Artificial Sequence
  Description of Artificial Sequence: Synthetic oligonucleotide
ucagcgcggaucucagcaa

SEQ ID NO: 3132075 - RNA, 19 nt, Artificial Sequence
  Description of Artificial Sequence: Synthetic oligonucleotide
cucccucaguuugcgaugc

SEQ ID NO: 3132076 - RNA, 19 nt, Artificial Sequence
  Description of Artificial Sequence: Synthetic oligonucleotide
caaggucauucucaaagcu

SEQ ID NO: 3132077 - RNA, 19 nt, Artificial Sequence
  Description of Artificial Sequence: Synthetic oligonucleotide
acagaaggccgacccggga

SEQ ID NO: 3132078 - RNA, 19 nt, Artificial Sequence
  Description of Artificial Sequence: Synthetic oligonucleotide
cagcgcggaucucagcaag

SEQ ID NO: 3132079 - RNA, 19 nt, Artificial Sequence
  Description of Artificial Sequence: Synthetic oligonucleotide
agcuggcacauugcucugg

SEQ ID NO: 3132080 - RNA, 19 nt, Artificial Sequence
  Description of Artificial Sequence: Synthetic oligonucleotide
ugugcuugucagcgcggau

SEQ ID NO: 3132081 - RNA, 19 nt, Artificial Sequence
  Description of Artificial Sequence: Synthetic oligonucleotide
ugucagcgcggaucucagc

SEQ ID NO: 3132082 - RNA, 19 nt, Artificial Sequence
  Description of Artificial Sequence: Synthetic oligonucleotide
ccgugcagacucuugcucc

SEQ ID NO: 3132083 - RNA, 19 nt, Artificial Sequence
  Description of Artificial Sequence: Synthetic oligonucleotide
guggggagggugugccagg

SEQ ID NO: 3132084 - RNA, 19 nt, Artificial Sequence
  Description of Artificial Sequence: Synthetic oligonucleotide
gugcuugucagcgcggauc

SEQ ID NO: 3132085 - RNA, 19 nt, Artificial Sequence
  Description of Artificial Sequence: Synthetic oligonucleotide
auugcucugguaggcugcu

SEQ ID NO: 3132086 - RNA, 19 nt, Artificial Sequence
  Description of Artificial Sequence: Synthetic oligonucleotide
agcaagguggggagggugu

SEQ ID NO: 3132087 - RNA, 19 nt, Artificial Sequence
  Description of Artificial Sequence: Synthetic oligonucleotide
uagcuggcacauugcucug

SEQ ID NO: 3132088 - RNA, 19 nt, Artificial Sequence
  Description of Artificial Sequence: Synthetic oligonucleotide
agcgcggaucucagcaagg

SEQ ID NO: 3132089 - RNA, 19 nt, Artificial Sequence
  Description of Artificial Sequence: Synthetic oligonucleotide
gggagggugugccaggguc

SEQ ID NO: 3132090 - RNA, 19 nt, Artificial Sequence
  Description of Artificial Sequence: Synthetic oligonucleotide
gugugccagggucuagcug

SEQ ID NO: 3132091 - RNA, 19 nt, Artificial Sequence
  Description of Artificial Sequence: Synthetic oligonucleotide
cuccagguugugcuuguca

SEQ ID NO: 3132092 - RNA, 19 nt, Artificial Sequence
  Description of Artificial Sequence: Synthetic oligonucleotide
gaauggucuccagguugug

SEQ ID NO: 3132093 - RNA, 19 nt, Artificial Sequence
  Description of Artificial Sequence: Synthetic oligonucleotide
gcucuggaucugcagcucc

SEQ ID NO: 3132094 - RNA, 19 nt, Artificial Sequence
  Description of Artificial Sequence: Synthetic oligonucleotide
caagguggggagggugugc

SEQ ID NO: 3132095 - RNA, 19 nt, Artificial Sequence
  Description of Artificial Sequence: Synthetic oligonucleotide
gucuagcuggcacauugcu

SEQ ID NO: 3132096 - RNA, 19 nt, Artificial Sequence
  Description of Artificial Sequence: Synthetic oligonucleotide
cucuugcuccaacucccuc

SEQ ID NO: 3132097 - RNA, 19 nt, Artificial Sequence
  Description of Artificial Sequence: Synthetic oligonucleotide
gcacauugcucugguaggc

SEQ ID NO: 3132098 - RNA, 19 nt, Artificial Sequence
  Description of Artificial Sequence: Synthetic oligonucleotide
ccaacucccucaguuugcg

SEQ ID NO: 3132099 - RNA, 19 nt, Artificial Sequence
  Description of Artificial Sequence: Synthetic oligonucleotide
ccuauggggagugggcagg

SEQ ID NO: 3132100 - RNA, 19 nt, Artificial Sequence
  Description of Artificial Sequence: Synthetic oligonucleotide
gcucugguaggcugcucag

SEQ ID NO: 3132101 - RNA, 19 nt, Artificial Sequence
  Description of Artificial Sequence: Synthetic oligonucleotide
gagcacacagaaggccgac

SEQ ID NO: 3132102 - RNA, 19 nt, Artificial Sequence
  Description of Artificial Sequence: Synthetic oligonucleotide
cagcaagguggggagggug

SEQ ID NO: 3132103 - RNA, 19 nt, Artificial Sequence
  Description of Artificial Sequence: Synthetic oligonucleotide
uggucuccagguugugcuu

SEQ ID NO: 3132104 - RNA, 19 nt, Artificial Sequence
  Description of Artificial Sequence: Synthetic oligonucleotide
cgacccgggacaccuaugg

SEQ ID NO: 3132105 - RNA, 19 nt, Artificial Sequence
  Description of Artificial Sequence: Synthetic oligonucleotide
gcugcucagaauggucucc

SEQ ID NO: 3132106 - RNA, 19 nt, Artificial Sequence
  Description of Artificial Sequence: Synthetic oligonucleotide
gccagggucuagcuggcac

SEQ ID NO: 3132107 - RNA, 19 nt, Artificial Sequence
  Description of Artificial Sequence: Synthetic oligonucleotide
caccuauggggagugggca

SEQ ID NO: 3132108 - RNA, 19 nt, Artificial Sequence
  Description of Artificial Sequence: Synthetic oligonucleotide
aggccgacccgggacaccu

SEQ ID NO: 3132109 - RNA, 19 nt, Artificial Sequence
  Description of Artificial Sequence: Synthetic oligonucleotide
gaaggccgacccgggacac

SEQ ID NO: 3132110 - RNA, 19 nt, Artificial Sequence
  Description of Artificial Sequence: Synthetic oligonucleotide
ggucuagcuggcacauugc

SEQ ID NO: 3132111 - RNA, 19 nt, Artificial Sequence
  Description of Artificial Sequence: Synthetic oligonucleotide
ggucuccagguugugcuug

SEQ ID NO: 3132112 - RNA, 19 nt, Artificial Sequence
  Description of Artificial Sequence: Synthetic oligonucleotide
gaucugcagcuccugccgu

SEQ ID NO: 3132113 - RNA, 19 nt, Artificial Sequence
  Description of Artificial Sequence: Synthetic oligonucleotide
caggaacagcaaggugggg

SEQ ID NO: 3132114 - RNA, 19 nt, Artificial Sequence
  Description of Artificial Sequence: Synthetic oligonucleotide
acucuugcuccaacucccu

SEQ ID NO: 3132115 - RNA, 19 nt, Artificial Sequence
  Description of Artificial Sequence: Synthetic oligonucleotide
gggcaggaacagcaaggug

SEQ ID NO: 3132116 - RNA, 19 nt, Artificial Sequence
  Description of Artificial Sequence: Synthetic oligonucleotide
cugcucagaauggucucca

SEQ ID NO: 3132117 - RNA, 19 nt, Artificial Sequence
  Description of Artificial Sequence: Synthetic oligonucleotide
gggugugccagggucuagc

SEQ ID NO: 3132118 - RNA, 19 nt, Artificial Sequence
  Description of Artificial Sequence: Synthetic oligonucleotide
ggcugcucagaauggucuc

SEQ ID NO: 3132119 - RNA, 19 nt, Artificial Sequence
  Description of Artificial Sequence: Synthetic oligonucleotide
uauggggagugggcaggaa

SEQ ID NO: 3132120 - RNA, 19 nt, Artificial Sequence
  Description of Artificial Sequence: Synthetic oligonucleotide
ggucauucucaaagcucug

SEQ ID NO: 3132121 - RNA, 19 nt, Artificial Sequence
  Description of Artificial Sequence: Synthetic oligonucleotide
ggggagugggcaggaacag

SEQ ID NO: 3132122 - RNA, 19 nt, Artificial Sequence
  Description of Artificial Sequence: Synthetic oligonucleotide
gccgugcagacucuugcuc

SEQ ID NO: 3132123 - RNA, 19 nt, Artificial Sequence
  Description of Artificial Sequence: Synthetic oligonucleotide
cccgggacaccuaugggga

SEQ ID NO: 3132124 - RNA, 19 nt, Artificial Sequence
  Description of Artificial Sequence: Synthetic oligonucleotide
guaggcugcucagaauggu

SEQ ID NO: 3132125 - RNA, 19 nt, Artificial Sequence
  Description of Artificial Sequence: Synthetic oligonucleotide
cucuggaucugcagcuccu

SEQ ID NO: 3132126 - RNA, 19 nt, Artificial Sequence
  Description of Artificial Sequence: Synthetic oligonucleotide
cuauggggagugggcagga

SEQ ID NO: 3132127 - RNA, 19 nt, Artificial Sequence
  Description of Artificial Sequence: Synthetic oligonucleotide
cucugguaggcugcucaga

SEQ ID NO: 3132128 - RNA, 19 nt, Artificial Sequence
  Description of Artificial Sequence: Synthetic oligonucleotide
agcuccugccgugcagacu

SEQ ID NO: 3132129 - RNA, 19 nt, Artificial Sequence
  Description of Artificial Sequence: Synthetic oligonucleotide
ccagggucuagcuggcaca

SEQ ID NO: 3132130 - RNA, 19 nt, Artificial Sequence
  Description of Artificial Sequence: Synthetic oligonucleotide
ccugccgugcagacucuug

SEQ ID NO: 3132131 - RNA, 19 nt, Artificial Sequence
  Description of Artificial Sequence: Synthetic oligonucleotide
gagggugugccagggucua

SEQ ID NO: 3132132 - RNA, 19 nt, Artificial Sequence
  Description of Artificial Sequence: Synthetic oligonucleotide
agggugugccagggucuag

SEQ ID NO: 3132133 - RNA, 19 nt, Artificial Sequence
  Description of Artificial Sequence: Synthetic oligonucleotide
gcaagguggggagggugug

SEQ ID NO: 3132134 - RNA, 19 nt, Artificial Sequence
  Description of Artificial Sequence: Synthetic oligonucleotide
ugccagggucuagcuggca

SEQ ID NO: 3132135 - RNA, 19 nt, Artificial Sequence
  Description of Artificial Sequence: Synthetic oligonucleotide
cagcaaggucauucucaaa

SEQ ID NO: 3132136 - RNA, 19 nt, Artificial Sequence
  Description of Artificial Sequence: Synthetic oligonucleotide
cacauugcucugguaggcu

SEQ ID NO: 3132137 - RNA, 19 nt, Artificial Sequence
  Description of Artificial Sequence: Synthetic oligonucleotide
ggacaccuauggggagugg

SEQ ID NO: 3132138 - RNA, 19 nt, Artificial Sequence
  Description of Artificial Sequence: Synthetic oligonucleotide
uugcucugguaggcugcuc

SEQ ID NO: 3132139 - RNA, 19 nt, Artificial Sequence
  Description of Artificial Sequence: Synthetic oligonucleotide
ggugugccagggucuagcu

SEQ ID NO: 3132140 - RNA, 19 nt, Artificial Sequence
  Description of Artificial Sequence: Synthetic oligonucleotide
ccgggacaccuauggggag

SEQ ID NO: 3132141 - RNA, 19 nt, Artificial Sequence
  Description of Artificial Sequence: Synthetic oligonucleotide
uccugccgugcagacucuu

SEQ ID NO: 3132142 - RNA, 19 nt, Artificial Sequence
  Description of Artificial Sequence: Synthetic oligonucleotide
cugguaggcugcucagaau

SEQ ID NO: 3132143 - RNA, 19 nt, Artificial Sequence
  Description of Artificial Sequence: Synthetic oligonucleotide
cgugcagacucuugcucca

SEQ ID NO: 3132144 - RNA, 19 nt, Artificial Sequence
  Description of Artificial Sequence: Synthetic oligonucleotide
cugcagcuccugccgugca

SEQ ID NO: 3132145 - RNA, 19 nt, Artificial Sequence
  Description of Artificial Sequence: Synthetic oligonucleotide
ggagggugugccagggucu

SEQ ID NO: 3132146 - RNA, 19 nt, Artificial Sequence
  Description of Artificial Sequence: Synthetic oligonucleotide
gugcagacucuugcuccaa

SEQ ID NO: 3132147 - RNA, 19 nt, Artificial Sequence
  Description of Artificial Sequence: Synthetic oligonucleotide
cgcggaucucagcaagguc

SEQ ID NO: 3132148 - RNA, 19 nt, Artificial Sequence
  Description of Artificial Sequence: Synthetic oligonucleotide
agggucuagcuggcacauu

SEQ ID NO: 3132149 - RNA, 19 nt, Artificial Sequence
  Description of Artificial Sequence: Synthetic oligonucleotide
cagggucuagcuggcacau

SEQ ID NO: 3132150 - RNA, 19 nt, Artificial Sequence
  Description of Artificial Sequence: Synthetic oligonucleotide
ccgacccgggacaccuaug

SEQ ID NO: 3132151 - RNA, 19 nt, Artificial Sequence
  Description of Artificial Sequence: Synthetic oligonucleotide
gcgcggaucucagcaaggu

SEQ ID NO: 3132152 - RNA, 19 nt, Artificial Sequence
  Description of Artificial Sequence: Synthetic oligonucleotide
gccgacccgggacaccuau

SEQ ID NO: 3132153 - RNA, 19 nt, Artificial Sequence
  Description of Artificial Sequence: Synthetic oligonucleotide
gcuugucagcgcggaucuc

SEQ ID NO: 3132154 - RNA, 19 nt, Artificial Sequence
  Description of Artificial Sequence: Synthetic oligonucleotide
cuccugccgugcagacucu

SEQ ID NO: 3132155 - RNA, 19 nt, Artificial Sequence
  Description of Artificial Sequence: Synthetic oligonucleotide
ggggagggugugccagggu

SEQ ID NO: 3132156 - RNA, 19 nt, Artificial Sequence
  Description of Artificial Sequence: Synthetic oligonucleotide
cggaucucagcaaggucau

SEQ ID NO: 3132157 - RNA, 19 nt, Artificial Sequence
  Description of Artificial Sequence: Synthetic oligonucleotide
ggaucucagcaaggucauu

SEQ ID NO: 3132158 - RNA, 19 nt, Artificial Sequence
  Description of Artificial Sequence: Synthetic oligonucleotide
cgggacaccuauggggagu

SEQ ID NO: 3132159 - RNA, 19 nt, Artificial Sequence
  Description of Artificial Sequence: Synthetic oligonucleotide
ggccgacccgggacaccua

SEQ ID NO: 3132160 - RNA, 19 nt, Artificial Sequence
  Description of Artificial Sequence: Synthetic oligonucleotide
agcuuugucacuuucuucc

SEQ ID NO: 3132161 - RNA, 19 nt, Artificial Sequence
  Description of Artificial Sequence: Synthetic oligonucleotide
cuagaaaugggucaggacc

SEQ ID NO: 3132162 - RNA, 19 nt, Artificial Sequence
  Description of Artificial Sequence: Synthetic oligonucleotide
uuacagaugaccuugccug

SEQ ID NO: 3132163 - RNA, 19 nt, Artificial Sequence
  Description of Artificial Sequence: Synthetic oligonucleotide
ugguacacaaacuugagcu

SEQ ID NO: 3132164 - RNA, 19 nt, Artificial Sequence
  Description of Artificial Sequence: Synthetic oligonucleotide
ucaaggcugaacaagauuc

SEQ ID NO: 3132165 - RNA, 19 nt, Artificial Sequence
  Description of Artificial Sequence: Synthetic oligonucleotide
acaaacuugagcuuuguca

SEQ ID NO: 3132166 - RNA, 19 nt, Artificial Sequence
  Description of Artificial Sequence: Synthetic oligonucleotide
ucugccaagaaauggcuag

SEQ ID NO: 3132167 - RNA, 19 nt, Artificial Sequence
  Description of Artificial Sequence: Synthetic oligonucleotide
acagaugacuuccauaucu

SEQ ID NO: 3132168 - RNA, 19 nt, Artificial Sequence
  Description of Artificial Sequence: Synthetic oligonucleotide
aauggcuagagacuaggga

SEQ ID NO: 3132169 - RNA, 19 nt, Artificial Sequence
  Description of Artificial Sequence: Synthetic oligonucleotide
aguguagcaggguucaggg

SEQ ID NO: 3132170 - RNA, 19 nt, Artificial Sequence
  Description of Artificial Sequence: Synthetic oligonucleotide
aaugggucaggaccuuggc

SEQ ID NO: 3132171 - RNA, 19 nt, Artificial Sequence
  Description of Artificial Sequence: Synthetic oligonucleotide
uguagcaggguucaggguc

SEQ ID NO: 3132172 - RNA, 19 nt, Artificial Sequence
  Description of Artificial Sequence: Synthetic oligonucleotide
uaucuuacagaugaccuug

SEQ ID NO: 3132173 - RNA, 19 nt, Artificial Sequence
  Description of Artificial Sequence: Synthetic oligonucleotide
gauucugccaagaaauggc

SEQ ID NO: 3132174 - RNA, 19 nt, Artificial Sequence
  Description of Artificial Sequence: Synthetic oligonucleotide
acuagaaaugggucaggac

SEQ ID NO: 3132175 - RNA, 19 nt, Artificial Sequence
  Description of Artificial Sequence: Synthetic oligonucleotide
gaaauggcuagagacuagg

SEQ ID NO: 3132176 - RNA, 19 nt, Artificial Sequence
  Description of Artificial Sequence: Synthetic oligonucleotide
cuccauaucuuacagauga

SEQ ID NO: 3132177 - RNA, 19 nt, Artificial Sequence
  Description of Artificial Sequence: Synthetic oligonucleotide
uaucugguacacaaacuug

SEQ ID NO: 3132178 - RNA, 19 nt, Artificial Sequence
  Description of Artificial Sequence: Synthetic oligonucleotide
uuccauaucugguacacaa

SEQ ID NO: 3132179 - RNA, 19 nt, Artificial Sequence
  Description of Artificial Sequence: Synthetic oligonucleotide
acuuucuuccacuagccca

SEQ ID NO: 3132180 - RNA, 19 nt, Artificial Sequence
  Description of Artificial Sequence: Synthetic oligonucleotide
auaucugguacacaaacuu

SEQ ID NO: 3132181 - RNA, 19 nt, Artificial Sequence
  Description of Artificial Sequence: Synthetic oligonucleotide
agagacuagggauccuggc

SEQ ID NO: 3132182 - RNA, 19 nt, Artificial Sequence
  Description of Artificial Sequence: Synthetic oligonucleotide
gucacuuucuuccacuagc

SEQ ID NO: 3132183 - RNA, 19 nt, Artificial Sequence
  Description of Artificial Sequence: Synthetic oligonucleotide
ucugguacacaaacuugag

SEQ ID NO: 3132184 - RNA, 19 nt, Artificial Sequence
  Description of Artificial Sequence: Synthetic oligonucleotide
auggcuagagacuagggau

SEQ ID NO: 3132185 - RNA, 19 nt, Artificial Sequence
  Description of Artificial Sequence: Synthetic oligonucleotide
agaugacuuccauaucugg

SEQ ID NO: 3132186 - RNA, 19 nt, Artificial Sequence
  Description of Artificial Sequence: Synthetic oligonucleotide
agauucugccaagaaaugg

SEQ ID NO: 3132187 - RNA, 19 nt, Artificial Sequence
  Description of Artificial Sequence: Synthetic oligonucleotide
ccaagaaauggcuagagac

SEQ ID NO: 3132188 - RNA, 19 nt, Artificial Sequence
  Description of Artificial Sequence: Synthetic oligonucleotide
ucacuuucuuccacuagcc

SEQ ID NO: 3132189 - RNA, 19 nt, Artificial Sequence
  Description of Artificial Sequence: Synthetic oligonucleotide
aacagaugacuuccauauc

SEQ ID NO: 3132190 - RNA, 19 nt, Artificial Sequence
  Description of Artificial Sequence: Synthetic oligonucleotide
aaguguagcaggguucagg

SEQ ID NO: 3132191 - RNA, 19 nt, Artificial Sequence
  Description of Artificial Sequence: Synthetic oligonucleotide
ugaacaagauucugccaag

SEQ ID NO: 3132192 - RNA, 19 nt, Artificial Sequence
  Description of Artificial Sequence: Synthetic oligonucleotide
uuugucacuuucuuccacu

SEQ ID NO: 3132193 - RNA, 19 nt, Artificial Sequence
  Description of Artificial Sequence: Synthetic oligonucleotide
uagagacuagggauccugg

SEQ ID NO: 3132194 - RNA, 19 nt, Artificial Sequence
  Description of Artificial Sequence: Synthetic oligonucleotide
gagacuagggauccuggcc

SEQ ID NO: 3132195 - RNA, 19 nt, Artificial Sequence
  Description of Artificial Sequence: Synthetic oligonucleotide
acuuccauaucugguacac

SEQ ID NO: 3132196 - RNA, 19 nt, Artificial Sequence
  Description of Artificial Sequence: Synthetic oligonucleotide
aacaagauucugccaagaa

SEQ ID NO: 3132197 - RNA, 19 nt, Artificial Sequence
  Description of Artificial Sequence: Synthetic oligonucleotide
acaagauucugccaagaaa

SEQ ID NO: 3132198 - RNA, 19 nt, Artificial Sequence
  Description of Artificial Sequence: Synthetic oligonucleotide
aaaugggucaggaccuugg

SEQ ID NO: 3132199 - RNA, 19 nt, Artificial Sequence
  Description of Artificial Sequence: Synthetic oligonucleotide
aagaaauggcuagagacua

SEQ ID NO: 3132200 - RNA, 19 nt, Artificial Sequence
  Description of Artificial Sequence: Synthetic oligonucleotide
ucaggacuagaaauggguc

SEQ ID NO: 3132201 - RNA, 19 nt, Artificial Sequence
  Description of Artificial Sequence: Synthetic oligonucleotide
agacuagggauccuggccu

SEQ ID NO: 3132202 - RNA, 19 nt, Artificial Sequence
  Description of Artificial Sequence: Synthetic oligonucleotide
ugacuuccauaucugguac

SEQ ID NO: 3132203 - RNA, 19 nt, Artificial Sequence
  Description of Artificial Sequence: Synthetic oligonucleotide
aaauggcuagagacuaggg

SEQ ID NO: 3132204 - RNA, 19 nt, Artificial Sequence
  Description of Artificial Sequence: Synthetic oligonucleotide
cuacccaaguguagcaggg

SEQ ID NO: 3132205 - RNA, 19 nt, Artificial Sequence
  Description of Artificial Sequence: Synthetic oligonucleotide
uacacaaacuugagcuuug

SEQ ID NO: 3132206 - RNA, 19 nt, Artificial Sequence
  Description of Artificial Sequence: Synthetic oligonucleotide
agggauccuggccuggggc

SEQ ID NO: 3132207 - RNA, 19 nt, Artificial Sequence
  Description of Artificial Sequence: Synthetic oligonucleotide
ucuuacagaugaccuugcc

SEQ ID NO: 3132208 - RNA, 19 nt, Artificial Sequence
  Description of Artificial Sequence: Synthetic oligonucleotide
ugucacuuucuuccacuag

SEQ ID NO: 3132209 - RNA, 19 nt, Artificial Sequence
  Description of Artificial Sequence: Synthetic oligonucleotide
aggcugaacaagauucugc

SEQ ID NO: 3132210 - RNA, 19 nt, Artificial Sequence
  Description of Artificial Sequence: Synthetic oligonucleotide
caagauucugccaagaaau

SEQ ID NO: 3132211 - RNA, 19 nt, Artificial Sequence
  Description of Artificial Sequence: Synthetic oligonucleotide
uugagcuuugucacuuucu

SEQ ID NO: 3132212 - RNA, 19 nt, Artificial Sequence
  Description of Artificial Sequence: Synthetic oligonucleotide
cugaacaagauucugccaa

SEQ ID NO: 3132213 - RNA, 19 nt, Artificial Sequence
  Description of Artificial Sequence: Synthetic oligonucleotide
aggacuagaaaugggucag

SEQ ID NO: 3132214 - RNA, 19 nt, Artificial Sequence
  Description of Artificial Sequence: Synthetic oligonucleotide
augacuuccauaucuggua

SEQ ID NO: 3132215 - RNA, 19 nt, Artificial Sequence
  Description of Artificial Sequence: Synthetic oligonucleotide
cugguacacaaacuugagc

SEQ ID NO: 3132216 - RNA, 19 nt, Artificial Sequence
  Description of Artificial Sequence: Synthetic oligonucleotide
cauaucuuacagaugaccu

SEQ ID NO: 3132217 - RNA, 19 nt, Artificial Sequence
  Description of Artificial Sequence: Synthetic oligonucleotide
ggcugaacaagauucugcc

SEQ ID NO: 3132218 - RNA, 19 nt, Artificial Sequence
  Description of Artificial Sequence: Synthetic oligonucleotide
aaggcugaacaagauucug

SEQ ID NO: 3132219 - RNA, 19 nt, Artificial Sequence
  Description of Artificial Sequence: Synthetic oligonucleotide
aagauucugccaagaaaug

SEQ ID NO: 3132220 - RNA, 19 nt, Artificial Sequence
  Description of Artificial Sequence: Synthetic oligonucleotide
acagaugaccuugccugcc

SEQ ID NO: 3132221 - RNA, 19 nt, Artificial Sequence
  Description of Artificial Sequence: Synthetic oligonucleotide
uacagaugaccuugccugc

SEQ ID NO: 3132222 - RNA, 19 nt, Artificial Sequence
  Description of Artificial Sequence: Synthetic oligonucleotide
cucucuacccaaguguagc

SEQ ID NO: 3132223 - RNA, 19 nt, Artificial Sequence
  Description of Artificial Sequence: Synthetic oligonucleotide
ucucuacccaaguguagca

SEQ ID NO: 3132224 - RNA, 19 nt, Artificial Sequence
  Description of Artificial Sequence: Synthetic oligonucleotide
aucugguacacaaacuuga

SEQ ID NO: 3132225 - RNA, 19 nt, Artificial Sequence
  Description of Artificial Sequence: Synthetic oligonucleotide
cagaugacuuccauaucug

SEQ ID NO: 3132226 - RNA, 19 nt, Artificial Sequence
  Description of Artificial Sequence: Synthetic oligonucleotide
cuugccugcccucucuacc

SEQ ID NO: 3132227 - RNA, 19 nt, Artificial Sequence
  Description of Artificial Sequence: Synthetic oligonucleotide
aggguucagggucaggacu

SEQ ID NO: 3132228 - RNA, 19 nt, Artificial Sequence
  Description of Artificial Sequence: Synthetic oligonucleotide
uugccugcccucucuaccc

SEQ ID NO: 3132229 - RNA, 19 nt, Artificial Sequence
  Description of Artificial Sequence: Synthetic oligonucleotide
ugccaagaaauggcuagag

SEQ ID NO: 3132230 - RNA, 19 nt, Artificial Sequence
  Description of Artificial Sequence: Synthetic oligonucleotide
uggcuagagacuagggauc

SEQ ID NO: 3132231 - RNA, 19 nt, Artificial Sequence
  Description of Artificial Sequence: Synthetic oligonucleotide
aacuugagcuuugucacuu

SEQ ID NO: 3132232 - RNA, 19 nt, Artificial Sequence
  Description of Artificial Sequence: Synthetic oligonucleotide
caacagaugacuuccauau

SEQ ID NO: 3132233 - RNA, 19 nt, Artificial Sequence
  Description of Artificial Sequence: Synthetic oligonucleotide
uccauaucugguacacaaa

SEQ ID NO: 3132234 - RNA, 19 nt, Artificial Sequence
  Description of Artificial Sequence: Synthetic oligonucleotide
cuagagacuagggauccug

SEQ ID NO: 3132235 - RNA, 19 nt, Artificial Sequence
  Description of Artificial Sequence: Synthetic oligonucleotide
uccauaucuuacagaugac

SEQ ID NO: 3132236 - RNA, 19 nt, Artificial Sequence
  Description of Artificial Sequence: Synthetic oligonucleotide
caggacuagaaauggguca

SEQ ID NO: 3132237 - RNA, 19 nt, Artificial Sequence
  Description of Artificial Sequence: Synthetic oligonucleotide
aucuuacagaugaccuugc

SEQ ID NO: 3132238 - RNA, 19 nt, Artificial Sequence
  Description of Artificial Sequence: Synthetic oligonucleotide
ccauaucugguacacaaac

SEQ ID NO: 3132239 - RNA, 19 nt, Artificial Sequence
  Description of Artificial Sequence: Synthetic oligonucleotide
cuuugucacuuucuuccac

SEQ ID NO: 3132240 - RNA, 19 nt, Artificial Sequence
  Description of Artificial Sequence: Synthetic oligonucleotide
uagggauccuggccugggg

SEQ ID NO: 3132241 - RNA, 19 nt, Artificial Sequence
  Description of Artificial Sequence: Synthetic oligonucleotide
caagaaauggcuagagacu

SEQ ID NO: 3132242 - RNA, 19 nt, Artificial Sequence
  Description of Artificial Sequence: Synthetic oligonucleotide
agggucaggacuagaaaug

SEQ ID NO: 3132243 - RNA, 19 nt, Artificial Sequence
  Description of Artificial Sequence: Synthetic oligonucleotide
cacuuucuuccacuagccc

SEQ ID NO: 3132244 - RNA, 19 nt, Artificial Sequence
  Description of Artificial Sequence: Synthetic oligonucleotide
cuugagcuuugucacuuuc

SEQ ID NO: 3132245 - RNA, 19 nt, Artificial Sequence
  Description of Artificial Sequence: Synthetic oligonucleotide
cuggggucaaggcugaaca

SEQ ID NO: 3132246 - RNA, 19 nt, Artificial Sequence
  Description of Artificial Sequence: Synthetic oligonucleotide
gacuagaaaugggucagga

SEQ ID NO: 3132247 - RNA, 19 nt, Artificial Sequence
  Description of Artificial Sequence: Synthetic oligonucleotide
ugcccucucuacccaagug

SEQ ID NO: 3132248 - RNA, 19 nt, Artificial Sequence
  Description of Artificial Sequence: Synthetic oligonucleotide
uucugccaagaaauggcua

SEQ ID NO: 3132249 - RNA, 19 nt, Artificial Sequence
  Description of Artificial Sequence: Synthetic oligonucleotide
uguggggcccagcaacaga

SEQ ID NO: 3132250 - RNA, 19 nt, Artificial Sequence
  Description of Artificial Sequence: Synthetic oligonucleotide
ccagcaacagaugacuucc

SEQ ID NO: 3132251 - RNA, 19 nt, Artificial Sequence
  Description of Artificial Sequence: Synthetic oligonucleotide
ccauaucuuacagaugacc

SEQ ID NO: 3132252 - RNA, 19 nt, Artificial Sequence
  Description of Artificial Sequence: Synthetic oligonucleotide
agcaacagaugacuuccau

SEQ ID NO: 3132253 - RNA, 19 nt, Artificial Sequence
  Description of Artificial Sequence: Synthetic oligonucleotide
gaugacuuccauaucuggu

SEQ ID NO: 3132254 - RNA, 19 nt, Artificial Sequence
  Description of Artificial Sequence: Synthetic oligonucleotide
augggucaggaccuuggcu

SEQ ID NO: 3132255 - RNA, 19 nt, Artificial Sequence
  Description of Artificial Sequence: Synthetic oligonucleotide
auucugccaagaaauggcu

SEQ ID NO: 3132256 - RNA, 19 nt, Artificial Sequence
  Description of Artificial Sequence: Synthetic oligonucleotide
gggucaggacuagaaaugg

SEQ ID NO: 3132257 - RNA, 19 nt, Artificial Sequence
  Description of Artificial Sequence: Synthetic oligonucleotide
gaaaugggucaggaccuug

SEQ ID NO: 3132258 - RNA, 19 nt, Artificial Sequence
  Description of Artificial Sequence: Synthetic oligonucleotide
uugucacuuucuuccacua

SEQ ID NO: 3132259 - RNA, 19 nt, Artificial Sequence
  Description of Artificial Sequence: Synthetic oligonucleotide
gacuagggauccuggccug

SEQ ID NO: 3132260 - RNA, 19 nt, Artificial Sequence
  Description of Artificial Sequence: Synthetic oligonucleotide
agaaauggcuagagacuag

SEQ ID NO: 3132261 - RNA, 19 nt, Artificial Sequence
  Description of Artificial Sequence: Synthetic oligonucleotide
cuuacagaugaccuugccu

SEQ ID NO: 3132262 - RNA, 19 nt, Artificial Sequence
  Description of Artificial Sequence: Synthetic oligonucleotide
aggaccuuggcugggguca

SEQ ID NO: 3132263 - RNA, 19 nt, Artificial Sequence
  Description of Artificial Sequence: Synthetic oligonucleotide
gacuuccauaucugguaca

SEQ ID NO: 3132264 - RNA, 19 nt, Artificial Sequence
  Description of Artificial Sequence: Synthetic oligonucleotide
cagaugaccuugccugccc

SEQ ID NO: 3132265 - RNA, 19 nt, Artificial Sequence
  Description of Artificial Sequence: Synthetic oligonucleotide
gaacaagauucugccaaga

SEQ ID NO: 3132266 - RNA, 19 nt, Artificial Sequence
  Description of Artificial Sequence: Synthetic oligonucleotide
cacaaacuugagcuuuguc

SEQ ID NO: 3132267 - RNA, 19 nt, Artificial Sequence
  Description of Artificial Sequence: Synthetic oligonucleotide
cauaucugguacacaaacu

SEQ ID NO: 3132268 - RNA, 19 nt, Artificial Sequence
  Description of Artificial Sequence: Synthetic oligonucleotide
agaugaccuugccugcccu

SEQ ID NO: 3132269 - RNA, 19 nt, Artificial Sequence
  Description of Artificial Sequence: Synthetic oligonucleotide
acccaaguguagcaggguu

SEQ ID NO: 3132270 - RNA, 19 nt, Artificial Sequence
  Description of Artificial Sequence: Synthetic oligonucleotide
ucaggaccuuggcuggggu

SEQ ID NO: 3132271 - RNA, 19 nt, Artificial Sequence
  Description of Artificial Sequence: Synthetic oligonucleotide
accuuggcuggggucaagg

SEQ ID NO: 3132272 - RNA, 19 nt, Artificial Sequence
  Description of Artificial Sequence: Synthetic oligonucleotide
ggcuccauaucuuacagau

SEQ ID NO: 3132273 - RNA, 19 nt, Artificial Sequence
  Description of Artificial Sequence: Synthetic oligonucleotide
gaugaccuugccugcccuc

SEQ ID NO: 3132274 - RNA, 19 nt, Artificial Sequence
  Description of Artificial Sequence: Synthetic oligonucleotide
gucaggacuagaaaugggu

SEQ ID NO: 3132275 - RNA, 19 nt, Artificial Sequence
  Description of Artificial Sequence: Synthetic oligonucleotide
ggggucaaggcugaacaag

SEQ ID NO: 3132276 - RNA, 19 nt, Artificial Sequence
  Description of Artificial Sequence: Synthetic oligonucleotide
caggguucagggucaggac

SEQ ID NO: 3132277 - RNA, 19 nt, Artificial Sequence
  Description of Artificial Sequence: Synthetic oligonucleotide
uggggucaaggcugaacaa

SEQ ID NO: 3132278 - RNA, 19 nt, Artificial Sequence
  Description of Artificial Sequence: Synthetic oligonucleotide
cuagggauccuggccuggg

SEQ ID NO: 3132279 - RNA, 19 nt, Artificial Sequence
  Description of Artificial Sequence: Synthetic oligonucleotide
ggucaggacuagaaauggg

SEQ ID NO: 3132280 - RNA, 19 nt, Artificial Sequence
  Description of Artificial Sequence: Synthetic oligonucleotide
acuagggauccuggccugg

SEQ ID NO: 3132281 - RNA, 19 nt, Artificial Sequence
  Description of Artificial Sequence: Synthetic oligonucleotide
gggucaggaccuuggcugg

SEQ ID NO: 3132282 - RNA, 19 nt, Artificial Sequence
  Description of Artificial Sequence: Synthetic oligonucleotide
augaccuugccugcccucu

SEQ ID NO: 3132283 - RNA, 19 nt, Artificial Sequence
  Description of Artificial Sequence: Synthetic oligonucleotide
ggcuguggggcccagcaac

SEQ ID NO: 3132284 - RNA, 19 nt, Artificial Sequence
  Description of Artificial Sequence: Synthetic oligonucleotide
ggcuagagacuagggaucc

SEQ ID NO: 3132285 - RNA, 19 nt, Artificial Sequence
  Description of Artificial Sequence: Synthetic oligonucleotide
cagggucaggacuagaaau

SEQ ID NO: 3132286 - RNA, 19 nt, Artificial Sequence
  Description of Artificial Sequence: Synthetic oligonucleotide
guagcaggguucaggguca

SEQ ID NO: 3132287 - RNA, 19 nt, Artificial Sequence
  Description of Artificial Sequence: Synthetic oligonucleotide
uggggcccagcaacagaug

SEQ ID NO: 3132288 - RNA, 19 nt, Artificial Sequence
  Description of Artificial Sequence: Synthetic oligonucleotide
acacaaacuugagcuuugu

SEQ ID NO: 3132289 - RNA, 19 nt, Artificial Sequence
  Description of Artificial Sequence: Synthetic oligonucleotide
cuuggcuggggucaaggcu

SEQ ID NO: 3132290 - RNA, 19 nt, Artificial Sequence
  Description of Artificial Sequence: Synthetic oligonucleotide
uacccaaguguagcagggu

SEQ ID NO: 3132291 - RNA, 19 nt, Artificial Sequence
  Description of Artificial Sequence: Synthetic oligonucleotide
ugccugcccucucuaccca

SEQ ID NO: 3132292 - RNA, 19 nt, Artificial Sequence
  Description of Artificial Sequence: Synthetic oligonucleotide
gcaacagaugacuuccaua

SEQ ID NO: 3132293 - RNA, 19 nt, Artificial Sequence
  Description of Artificial Sequence: Synthetic oligonucleotide
uggcuggggucaaggcuga

SEQ ID NO: 3132294 - RNA, 19 nt, Artificial Sequence
  Description of Artificial Sequence: Synthetic oligonucleotide
gcugaacaagauucugcca

SEQ ID NO: 3132295 - RNA, 19 nt, Artificial Sequence
  Description of Artificial Sequence: Synthetic oligonucleotide
caaggcugaacaagauucu

SEQ ID NO: 3132296 - RNA, 19 nt, Artificial Sequence
  Description of Artificial Sequence: Synthetic oligonucleotide
ggacuagaaaugggucagg

SEQ ID NO: 3132297 - RNA, 19 nt, Artificial Sequence
  Description of Artificial Sequence: Synthetic oligonucleotide
ugaccuugccugcccucuc

SEQ ID NO: 3132298 - RNA, 19 nt, Artificial Sequence
  Description of Artificial Sequence: Synthetic oligonucleotide
acuugagcuuugucacuuu

SEQ ID NO: 3132299 - RNA, 19 nt, Artificial Sequence
  Description of Artificial Sequence: Synthetic oligonucleotide
gcaggguucagggucagga

SEQ ID NO: 3132300 - RNA, 19 nt, Artificial Sequence
  Description of Artificial Sequence: Synthetic oligonucleotide
gccaagaaauggcuagaga

SEQ ID NO: 3132301 - RNA, 19 nt, Artificial Sequence
  Description of Artificial Sequence: Synthetic oligonucleotide
gggucaaggcugaacaaga

SEQ ID NO: 3132302 - RNA, 19 nt, Artificial Sequence
  Description of Artificial Sequence: Synthetic oligonucleotide
guacacaaacuugagcuuu

SEQ ID NO: 3132303 - RNA, 19 nt, Artificial Sequence
  Description of Artificial Sequence: Synthetic oligonucleotide
cccaaguguagcaggguuc

SEQ ID NO: 3132304 - RNA, 19 nt, Artificial Sequence
  Description of Artificial Sequence: Synthetic oligonucleotide
cccagcaacagaugacuuc

SEQ ID NO: 3132305 - RNA, 19 nt, Artificial Sequence
  Description of Artificial Sequence: Synthetic oligonucleotide
caggaccuuggcugggguc

SEQ ID NO: 3132306 - RNA, 19 nt, Artificial Sequence
  Description of Artificial Sequence: Synthetic oligonucleotide
ggggcccagcaacagauga

SEQ ID NO: 3132307 - RNA, 19 nt, Artificial Sequence
  Description of Artificial Sequence: Synthetic oligonucleotide
gucaaggcugaacaagauu

SEQ ID NO: 3132308 - RNA, 19 nt, Artificial Sequence
  Description of Artificial Sequence: Synthetic oligonucleotide
gcuuugucacuuucuucca

SEQ ID NO: 3132309 - RNA, 19 nt, Artificial Sequence
  Description of Artificial Sequence: Synthetic oligonucleotide
ccucucuacccaaguguag

SEQ ID NO: 3132310 - RNA, 19 nt, Artificial Sequence
  Description of Artificial Sequence: Synthetic oligonucleotide
caaguguagcaggguucag

SEQ ID NO: 3132311 - RNA, 19 nt, Artificial Sequence
  Description of Artificial Sequence: Synthetic oligonucleotide
ccuuggcuggggucaaggc

SEQ ID NO: 3132312 - RNA, 19 nt, Artificial Sequence
  Description of Artificial Sequence: Synthetic oligonucleotide
cuuccauaucugguacaca

SEQ ID NO: 3132313 - RNA, 19 nt, Artificial Sequence
  Description of Artificial Sequence: Synthetic oligonucleotide
cuguggggcccagcaacag

SEQ ID NO: 3132314 - RNA, 19 nt, Artificial Sequence
  Description of Artificial Sequence: Synthetic oligonucleotide
cugccaagaaauggcuaga

SEQ ID NO: 3132315 - RNA, 19 nt, Artificial Sequence
  Description of Artificial Sequence: Synthetic oligonucleotide
uagcaggguucagggucag

SEQ ID NO: 3132316 - RNA, 19 nt, Artificial Sequence
  Description of Artificial Sequence: Synthetic oligonucleotide
gguucagggucaggacuag

SEQ ID NO: 3132317 - RNA, 19 nt, Artificial Sequence
  Description of Artificial Sequence: Synthetic oligonucleotide
ggggcuguggggcccagca

SEQ ID NO: 3132318 - RNA, 19 nt, Artificial Sequence
  Description of Artificial Sequence: Synthetic oligonucleotide
gguacacaaacuugagcuu

SEQ ID NO: 3132319 - RNA, 19 nt, Artificial Sequence
  Description of Artificial Sequence: Synthetic oligonucleotide
gcuccauaucuuacagaug

SEQ ID NO: 3132320 - RNA, 19 nt, Artificial Sequence
  Description of Artificial Sequence: Synthetic oligonucleotide
ccaaguguagcaggguuca

SEQ ID NO: 3132321 - RNA, 19 nt, Artificial Sequence
  Description of Artificial Sequence: Synthetic oligonucleotide
cagcaacagaugacuucca

SEQ ID NO: 3132322 - RNA, 19 nt, Artificial Sequence
  Description of Artificial Sequence: Synthetic oligonucleotide
gaccuugccugcccucucu

SEQ ID NO: 3132323 - RNA, 19 nt, Artificial Sequence
  Description of Artificial Sequence: Synthetic oligonucleotide
accuugccugcccucucua

SEQ ID NO: 3132324 - RNA, 19 nt, Artificial Sequence
  Description of Artificial Sequence: Synthetic oligonucleotide
ggucaggaccuuggcuggg

SEQ ID NO: 3132325 - RNA, 19 nt, Artificial Sequence
  Description of Artificial Sequence: Synthetic oligonucleotide
gcccucucuacccaagugu

SEQ ID NO: 3132326 - RNA, 19 nt, Artificial Sequence
  Description of Artificial Sequence: Synthetic oligonucleotide
gggcuccauaucuuacaga

SEQ ID NO: 3132327 - RNA, 19 nt, Artificial Sequence
  Description of Artificial Sequence: Synthetic oligonucleotide
gaccuuggcuggggucaag

SEQ ID NO: 3132328 - RNA, 19 nt, Artificial Sequence
  Description of Artificial Sequence: Synthetic oligonucleotide
gcuggggucaaggcugaac

SEQ ID NO: 3132329 - RNA, 19 nt, Artificial Sequence
  Description of Artificial Sequence: Synthetic oligonucleotide
ggauccuggccuggggcug

SEQ ID NO: 3132330 - RNA, 19 nt, Artificial Sequence
  Description of Artificial Sequence: Synthetic oligonucleotide
guucagggucaggacuaga

SEQ ID NO: 3132331 - RNA, 19 nt, Artificial Sequence
  Description of Artificial Sequence: Synthetic oligonucleotide
guggggcccagcaacagau

SEQ ID NO: 3132332 - RNA, 19 nt, Artificial Sequence
  Description of Artificial Sequence: Synthetic oligonucleotide
guguagcaggguucagggu

SEQ ID NO: 3132333 - RNA, 19 nt, Artificial Sequence
  Description of Artificial Sequence: Synthetic oligonucleotide
ccuugccugcccucucuac

SEQ ID NO: 3132334 - RNA, 19 nt, Artificial Sequence
  Description of Artificial Sequence: Synthetic oligonucleotide
cccucucuacccaagugua

SEQ ID NO: 3132335 - RNA, 19 nt, Artificial Sequence
  Description of Artificial Sequence: Synthetic oligonucleotide
gggauccuggccuggggcu

SEQ ID NO: 3132336 - RNA, 19 nt, Artificial Sequence
  Description of Artificial Sequence: Synthetic oligonucleotide
uggggcuguggggcccagc

SEQ ID NO: 3132337 - RNA, 19 nt, Artificial Sequence
  Description of Artificial Sequence: Synthetic oligonucleotide
gcuguggggcccagcaaca

SEQ ID NO: 3132338 - RNA, 19 nt, Artificial Sequence
  Description of Artificial Sequence: Synthetic oligonucleotide
gauccuggccuggggcugu

SEQ ID NO: 3132339 - RNA, 19 nt, Artificial Sequence
  Description of Artificial Sequence: Synthetic oligonucleotide
cugcccucucuacccaagu

SEQ ID NO: 3132340 - RNA, 19 nt, Artificial Sequence
  Description of Artificial Sequence: Synthetic oligonucleotide
ggucaaggcugaacaagau

SEQ ID NO: 3132341 - RNA, 19 nt, Artificial Sequence
  Description of Artificial Sequence: Synthetic oligonucleotide
gggcuguggggcccagcaa

SEQ ID NO: 3132342 - RNA, 19 nt, Artificial Sequence
  Description of Artificial Sequence: Synthetic oligonucleotide
gccugcccucucuacccaa

SEQ ID NO: 3132343 - RNA, 19 nt, Artificial Sequence
  Description of Artificial Sequence: Synthetic oligonucleotide
gcuagagacuagggauccu

SEQ ID NO: 3132344 - RNA, 19 nt, Artificial Sequence
  Description of Artificial Sequence: Synthetic oligonucleotide
ggaccuuggcuggggucaa

SEQ ID NO: 3132345 - RNA, 19 nt, Artificial Sequence
  Description of Artificial Sequence: Synthetic oligonucleotide
gcccagcaacagaugacuu

SEQ ID NO: 3132346 - RNA, 19 nt, Artificial Sequence
  Description of Artificial Sequence: Synthetic oligonucleotide
ggcuggggucaaggcugaa

SEQ ID NO: 3132347 - RNA, 19 nt, Artificial Sequence
  Description of Artificial Sequence: Synthetic oligonucleotide
ugugaaguacuucagcucc

SEQ ID NO: 3132348 - RNA, 19 nt, Artificial Sequence
  Description of Artificial Sequence: Synthetic oligonucleotide
aguuguuugaucuccuuuc

SEQ ID NO: 3132349 - RNA, 19 nt, Artificial Sequence
  Description of Artificial Sequence: Synthetic oligonucleotide
ucugugaguuguuugaucu

SEQ ID NO: 3132350 - RNA, 19 nt, Artificial Sequence
  Description of Artificial Sequence: Synthetic oligonucleotide
cuguauaccaccucgggag

SEQ ID NO: 3132351 - RNA, 19 nt, Artificial Sequence
  Description of Artificial Sequence: Synthetic oligonucleotide
uguuugaucuccuuucgga

SEQ ID NO: 3132352 - RNA, 19 nt, Artificial Sequence
  Description of Artificial Sequence: Synthetic oligonucleotide
uucguggcugcucagcacg

SEQ ID NO: 3132353 - RNA, 19 nt, Artificial Sequence
  Description of Artificial Sequence: Synthetic oligonucleotide
aaguacuucagcuccucug

SEQ ID NO: 3132354 - RNA, 19 nt, Artificial Sequence
  Description of Artificial Sequence: Synthetic oligonucleotide
uugaucuccuuucggagag

SEQ ID NO: 3132355 - RNA, 19 nt, Artificial Sequence
  Description of Artificial Sequence: Synthetic oligonucleotide
ugucuggaaguucagggcu

SEQ ID NO: 3132356 - RNA, 19 nt, Artificial Sequence
  Description of Artificial Sequence: Synthetic oligonucleotide
ugugaguuguuugaucucc

SEQ ID NO: 3132357 - RNA, 19 nt, Artificial Sequence
  Description of Artificial Sequence: Synthetic oligonucleotide
acggaugugaaguacuuca

SEQ ID NO: 3132358 - RNA, 19 nt, Artificial Sequence
  Description of Artificial Sequence: Synthetic oligonucleotide
uuguuugaucuccuuucgg

SEQ ID NO: 3132359 - RNA, 19 nt, Artificial Sequence
  Description of Artificial Sequence: Synthetic oligonucleotide
augugaaguacuucagcuc

SEQ ID NO: 3132360 - RNA, 19 nt, Artificial Sequence
  Description of Artificial Sequence: Synthetic oligonucleotide
uguauaccaccucgggagg

SEQ ID NO: 3132361 - RNA, 19 nt, Artificial Sequence
  Description of Artificial Sequence: Synthetic oligonucleotide
agcugcauucuguuucucc

SEQ ID NO: 3132362 - RNA, 19 nt, Artificial Sequence
  Description of Artificial Sequence: Synthetic oligonucleotide
guuguuugaucuccuuucg

SEQ ID NO: 3132363 - RNA, 19 nt, Artificial Sequence
  Description of Artificial Sequence: Synthetic oligonucleotide
gaaguucagggcuggaagc

SEQ ID NO: 3132364 - RNA, 19 nt, Artificial Sequence
  Description of Artificial Sequence: Synthetic oligonucleotide
aagucuucgcucuccaagu

SEQ ID NO: 3132365 - RNA, 19 nt, Artificial Sequence
  Description of Artificial Sequence: Synthetic oligonucleotide
uuugaucuccuuucggaga

SEQ ID NO: 3132366 - RNA, 19 nt, Artificial Sequence
  Description of Artificial Sequence: Synthetic oligonucleotide
guuugaucuccuuucggag

SEQ ID NO: 3132367 - RNA, 19 nt, Artificial Sequence
  Description of Artificial Sequence: Synthetic oligonucleotide
uucuguuucuccaagucuu

SEQ ID NO: 3132368 - RNA, 19 nt, Artificial Sequence
  Description of Artificial Sequence: Synthetic oligonucleotide
aaguucagggcuggaagcg

SEQ ID NO: 3132369 - RNA, 19 nt, Artificial Sequence
  Description of Artificial Sequence: Synthetic oligonucleotide
ugcauucuguuucuccaag

SEQ ID NO: 3132370 - RNA, 19 nt, Artificial Sequence
  Description of Artificial Sequence: Synthetic oligonucleotide
caagucuucgcucuccaag

SEQ ID NO: 3132371 - RNA, 19 nt, Artificial Sequence
  Description of Artificial Sequence: Synthetic oligonucleotide
auucuguuucuccaagucu

SEQ ID NO: 3132372 - RNA, 19 nt, Artificial Sequence
  Description of Artificial Sequence: Synthetic oligonucleotide
uguuucuccaagucuucgc

SEQ ID NO: 3132373 - RNA, 19 nt, Artificial Sequence
  Description of Artificial Sequence: Synthetic oligonucleotide
ggcacuguauaccaccucg

SEQ ID NO: 3132374 - RNA, 19 nt, Artificial Sequence
  Description of Artificial Sequence: Synthetic oligonucleotide
uccucugugaguuguuuga

SEQ ID NO: 3132375 - RNA, 19 nt, Artificial Sequence
  Description of Artificial Sequence: Synthetic oligonucleotide
cuuucggagagcugcauuc

SEQ ID NO: 3132376 - RNA, 19 nt, Artificial Sequence
  Description of Artificial Sequence: Synthetic oligonucleotide
gcuggugugaggcuggugg

SEQ ID NO: 3132377 - RNA, 19 nt, Artificial Sequence
  Description of Artificial Sequence: Synthetic oligonucleotide
uucuccaagucuucgcucu

SEQ ID NO: 3132378 - RNA, 19 nt, Artificial Sequence
  Description of Artificial Sequence: Synthetic oligonucleotide
acuguauaccaccucggga

SEQ ID NO: 3132379 - RNA, 19 nt, Artificial Sequence
  Description of Artificial Sequence: Synthetic oligonucleotide
cauucuguuucuccaaguc

SEQ ID NO: 3132380 - RNA, 19 nt, Artificial Sequence
  Description of Artificial Sequence: Synthetic oligonucleotide
ggaaguucagggcuggaag

SEQ ID NO: 3132381 - RNA, 19 nt, Artificial Sequence
  Description of Artificial Sequence: Synthetic oligonucleotide
cugucuggaaguucagggc

SEQ ID NO: 3132382 - RNA, 19 nt, Artificial Sequence
  Description of Artificial Sequence: Synthetic oligonucleotide
ccugucuggaaguucaggg

SEQ ID NO: 3132383 - RNA, 19 nt, Artificial Sequence
  Description of Artificial Sequence: Synthetic oligonucleotide
cacuguauaccaccucggg

SEQ ID NO: 3132384 - RNA, 19 nt, Artificial Sequence
  Description of Artificial Sequence: Synthetic oligonucleotide
aagcguggcgagcuggugu

SEQ ID NO: 3132385 - RNA, 19 nt, Artificial Sequence
  Description of Artificial Sequence: Synthetic oligonucleotide
cuuccugucuggaaguuca

SEQ ID NO: 3132386 - RNA, 19 nt, Artificial Sequence
  Description of Artificial Sequence: Synthetic oligonucleotide
ucuggaaguucagggcugg

SEQ ID NO: 3132387 - RNA, 19 nt, Artificial Sequence
  Description of Artificial Sequence: Synthetic oligonucleotide
ucggagagcugcauucugu

SEQ ID NO: 3132388 - RNA, 19 nt, Artificial Sequence
  Description of Artificial Sequence: Synthetic oligonucleotide
ucuguuucuccaagucuuc

SEQ ID NO: 3132389 - RNA, 19 nt, Artificial Sequence
  Description of Artificial Sequence: Synthetic oligonucleotide
ugaggcugguggaaggcgu

SEQ ID NO: 3132390 - RNA, 19 nt, Artificial Sequence
  Description of Artificial Sequence: Synthetic oligonucleotide
uucggagagcugcauucug

SEQ ID NO: 3132391 - RNA, 19 nt, Artificial Sequence
  Description of Artificial Sequence: Synthetic oligonucleotide
uucagcuccucugugaguu

SEQ ID NO: 3132392 - RNA, 19 nt, Artificial Sequence
  Description of Artificial Sequence: Synthetic oligonucleotide
aaggcgugggcacuguaua

SEQ ID NO: 3132393 - RNA, 19 nt, Artificial Sequence
  Description of Artificial Sequence: Synthetic oligonucleotide
gccagcacggagcacaggg

SEQ ID NO: 3132394 - RNA, 19 nt, Artificial Sequence
  Description of Artificial Sequence: Synthetic oligonucleotide
gagcacagggguucguggc

SEQ ID NO: 3132395 - RNA, 19 nt, Artificial Sequence
  Description of Artificial Sequence: Synthetic oligonucleotide
ggaugugaaguacuucagc

SEQ ID NO: 3132396 - RNA, 19 nt, Artificial Sequence
  Description of Artificial Sequence: Synthetic oligonucleotide
uccugucuggaaguucagg

SEQ ID NO: 3132397 - RNA, 19 nt, Artificial Sequence
  Description of Artificial Sequence: Synthetic oligonucleotide
aggcgugggcacuguauac

SEQ ID NO: 3132398 - RNA, 19 nt, Artificial Sequence
  Description of Artificial Sequence: Synthetic oligonucleotide
ggugccgcuggccagcacg

SEQ ID NO: 3132399 - RNA, 19 nt, Artificial Sequence
  Description of Artificial Sequence: Synthetic oligonucleotide
uggaagcguggcgagcugg

SEQ ID NO: 3132400 - RNA, 19 nt, Artificial Sequence
  Description of Artificial Sequence: Synthetic oligonucleotide
gugugaggcugguggaagg

SEQ ID NO: 3132401 - RNA, 19 nt, Artificial Sequence
  Description of Artificial Sequence: Synthetic oligonucleotide
ugugaggcugguggaaggc

SEQ ID NO: 3132402 - RNA, 19 nt, Artificial Sequence
  Description of Artificial Sequence: Synthetic oligonucleotide
uauaccaccucgggaggug

SEQ ID NO: 3132403 - RNA, 19 nt, Artificial Sequence
  Description of Artificial Sequence: Synthetic oligonucleotide
agucuucgcucuccaagug

SEQ ID NO: 3132404 - RNA, 19 nt, Artificial Sequence
  Description of Artificial Sequence: Synthetic oligonucleotide
aaggggugccgcuggccag

SEQ ID NO: 3132405 - RNA, 19 nt, Artificial Sequence
  Description of Artificial Sequence: Synthetic oligonucleotide
uggcugcucagcacggaug

SEQ ID NO: 3132406 - RNA, 19 nt, Artificial Sequence
  Description of Artificial Sequence: Synthetic oligonucleotide
cucugugaguuguuugauc

SEQ ID NO: 3132407 - RNA, 19 nt, Artificial Sequence
  Description of Artificial Sequence: Synthetic oligonucleotide
ucguggcugcucagcacgg

SEQ ID NO: 3132408 - RNA, 19 nt, Artificial Sequence
  Description of Artificial Sequence: Synthetic oligonucleotide
agcguggcgagcuggugug

SEQ ID NO: 3132409 - RNA, 19 nt, Artificial Sequence
  Description of Artificial Sequence: Synthetic oligonucleotide
ugcucagcacggaugugaa

SEQ ID NO: 3132410 - RNA, 19 nt, Artificial Sequence
  Description of Artificial Sequence: Synthetic oligonucleotide
ggagcacagggguucgugg

SEQ ID NO: 3132411 - RNA, 19 nt, Artificial Sequence
  Description of Artificial Sequence: Synthetic oligonucleotide
cuccucugugaguuguuug

SEQ ID NO: 3132412 - RNA, 19 nt, Artificial Sequence
  Description of Artificial Sequence: Synthetic oligonucleotide
agggguucguggcugcuca

SEQ ID NO: 3132413 - RNA, 19 nt, Artificial Sequence
  Description of Artificial Sequence: Synthetic oligonucleotide
uuucggagagcugcauucu

SEQ ID NO: 3132414 - RNA, 19 nt, Artificial Sequence
  Description of Artificial Sequence: Synthetic oligonucleotide
uuccugucuggaaguucag

SEQ ID NO: 3132415 - RNA, 19 nt, Artificial Sequence
  Description of Artificial Sequence: Synthetic oligonucleotide
ugaguuguuugaucuccuu

SEQ ID NO: 3132416 - RNA, 19 nt, Artificial Sequence
  Description of Artificial Sequence: Synthetic oligonucleotide
accucgggaggugaagggg

SEQ ID NO: 3132417 - RNA, 19 nt, Artificial Sequence
  Description of Artificial Sequence: Synthetic oligonucleotide
caccucgggaggugaaggg

SEQ ID NO: 3132418 - RNA, 19 nt, Artificial Sequence
  Description of Artificial Sequence: Synthetic oligonucleotide
ucagcacggaugugaagua

SEQ ID NO: 3132419 - RNA, 19 nt, Artificial Sequence
  Description of Artificial Sequence: Synthetic oligonucleotide
agcacagggguucguggcu

SEQ ID NO: 3132420 - RNA, 19 nt, Artificial Sequence
  Description of Artificial Sequence: Synthetic oligonucleotide
agggcuggaagcguggcga

SEQ ID NO: 3132421 - RNA, 19 nt, Artificial Sequence
  Description of Artificial Sequence: Synthetic oligonucleotide
guacuucagcuccucugug

SEQ ID NO: 3132422 - RNA, 19 nt, Artificial Sequence
  Description of Artificial Sequence: Synthetic oligonucleotide
cugugaguuguuugaucuc

SEQ ID NO: 3132423 - RNA, 19 nt, Artificial Sequence
  Description of Artificial Sequence: Synthetic oligonucleotide
agcacggaugugaaguacu

SEQ ID NO: 3132424 - RNA, 19 nt, Artificial Sequence
  Description of Artificial Sequence: Synthetic oligonucleotide
gugaggcugguggaaggcg

SEQ ID NO: 3132425 - RNA, 19 nt, Artificial Sequence
  Description of Artificial Sequence: Synthetic oligonucleotide
cucagcacggaugugaagu

SEQ ID NO: 3132426 - RNA, 19 nt, Artificial Sequence
  Description of Artificial Sequence: Synthetic oligonucleotide
ucuccaagucuucgcucuc

SEQ ID NO: 3132427 - RNA, 19 nt, Artificial Sequence
  Description of Artificial Sequence: Synthetic oligonucleotide
cuccaagucuucgcucucc

SEQ ID NO: 3132428 - RNA, 19 nt, Artificial Sequence
  Description of Artificial Sequence: Synthetic oligonucleotide
aggggugccgcuggccagc

SEQ ID NO: 3132429 - RNA, 19 nt, Artificial Sequence
  Description of Artificial Sequence: Synthetic oligonucleotide
cagggcuggaagcguggcg

SEQ ID NO: 3132430 - RNA, 19 nt, Artificial Sequence
  Description of Artificial Sequence: Synthetic oligonucleotide
gaguuguuugaucuccuuu

SEQ ID NO: 3132431 - RNA, 19 nt, Artificial Sequence
  Description of Artificial Sequence: Synthetic oligonucleotide
gucuggaaguucagggcug

SEQ ID NO: 3132432 - RNA, 19 nt, Artificial Sequence
  Description of Artificial Sequence: Synthetic oligonucleotide
guucagggcuggaagcgug

SEQ ID NO: 3132433 - RNA, 19 nt, Artificial Sequence
  Description of Artificial Sequence: Synthetic oligonucleotide
cucgggaggugaaggggug

SEQ ID NO: 3132434 - RNA, 19 nt, Artificial Sequence
  Description of Artificial Sequence: Synthetic oligonucleotide
aguucagggcuggaagcgu

SEQ ID NO: 3132435 - RNA, 19 nt, Artificial Sequence
  Description of Artificial Sequence: Synthetic oligonucleotide
guucguggcugcucagcac

SEQ ID NO: 3132436 - RNA, 19 nt, Artificial Sequence
  Description of Artificial Sequence: Synthetic oligonucleotide
ggugugaggcugguggaag

SEQ ID NO: 3132437 - RNA, 19 nt, Artificial Sequence
  Description of Artificial Sequence: Synthetic oligonucleotide
gaaguacuucagcuccucu

SEQ ID NO: 3132438 - RNA, 19 nt, Artificial Sequence
  Description of Artificial Sequence: Synthetic oligonucleotide
cacagggguucguggcugc

SEQ ID NO: 3132439 - RNA, 19 nt, Artificial Sequence
  Description of Artificial Sequence: Synthetic oligonucleotide
cugcucagcacggauguga

SEQ ID NO: 3132440 - RNA, 19 nt, Artificial Sequence
  Description of Artificial Sequence: Synthetic oligonucleotide
ugaucuccuuucggagagc

SEQ ID NO: 3132441 - RNA, 19 nt, Artificial Sequence
  Description of Artificial Sequence: Synthetic oligonucleotide
gguucguggcugcucagca

SEQ ID NO: 3132442 - RNA, 19 nt, Artificial Sequence
  Description of Artificial Sequence: Synthetic oligonucleotide
ucgggaggugaaggggugc

SEQ ID NO: 3132443 - RNA, 19 nt, Artificial Sequence
  Description of Artificial Sequence: Synthetic oligonucleotide
cacggaugugaaguacuuc

SEQ ID NO: 3132444 - RNA, 19 nt, Artificial Sequence
  Description of Artificial Sequence: Synthetic oligonucleotide
accaccucgggaggugaag

SEQ ID NO: 3132445 - RNA, 19 nt, Artificial Sequence
  Description of Artificial Sequence: Synthetic oligonucleotide
gaagcguggcgagcuggug

SEQ ID NO: 3132446 - RNA, 19 nt, Artificial Sequence
  Description of Artificial Sequence: Synthetic oligonucleotide
uggugugaggcugguggaa

SEQ ID NO: 3132447 - RNA, 19 nt, Artificial Sequence
  Description of Artificial Sequence: Synthetic oligonucleotide
ggaggugaaggggugccgc

SEQ ID NO: 3132448 - RNA, 19 nt, Artificial Sequence
  Description of Artificial Sequence: Synthetic oligonucleotide
ggcgugggcacuguauacc

SEQ ID NO: 3132449 - RNA, 19 nt, Artificial Sequence
  Description of Artificial Sequence: Synthetic oligonucleotide
cagcacggaugugaaguac

SEQ ID NO: 3132450 - RNA, 19 nt, Artificial Sequence
  Description of Artificial Sequence: Synthetic oligonucleotide
cugcauucuguuucuccaa

SEQ ID NO: 3132451 - RNA, 19 nt, Artificial Sequence
  Description of Artificial Sequence: Synthetic oligonucleotide
cuggugugaggcuggugga

SEQ ID NO: 3132452 - RNA, 19 nt, Artificial Sequence
  Description of Artificial Sequence: Synthetic oligonucleotide
ccagcacggagcacagggg

SEQ ID NO: 3132453 - RNA, 19 nt, Artificial Sequence
  Description of Artificial Sequence: Synthetic oligonucleotide
auaccaccucgggagguga

SEQ ID NO: 3132454 - RNA, 19 nt, Artificial Sequence
  Description of Artificial Sequence: Synthetic oligonucleotide
uaccaccucgggaggugaa

SEQ ID NO: 3132455 - RNA, 19 nt, Artificial Sequence
  Description of Artificial Sequence: Synthetic oligonucleotide
cacggagcacagggguucg

SEQ ID NO: 3132456 - RNA, 19 nt, Artificial Sequence
  Description of Artificial Sequence: Synthetic oligonucleotide
gugccgcuggccagcacgg

SEQ ID NO: 3132457 - RNA, 19 nt, Artificial Sequence
  Description of Artificial Sequence: Synthetic oligonucleotide
guggaaggcgugggcacug

SEQ ID NO: 3132458 - RNA, 19 nt, Artificial Sequence
  Description of Artificial Sequence: Synthetic oligonucleotide
cuccuuucggagagcugca

SEQ ID NO: 3132459 - RNA, 19 nt, Artificial Sequence
  Description of Artificial Sequence: Synthetic oligonucleotide
cggaugugaaguacuucag

SEQ ID NO: 3132460 - RNA, 19 nt, Artificial Sequence
  Description of Artificial Sequence: Synthetic oligonucleotide
cuggaagcguggcgagcug

SEQ ID NO: 3132461 - RNA, 19 nt, Artificial Sequence
  Description of Artificial Sequence: Synthetic oligonucleotide
gaaggcgugggcacuguau

SEQ ID NO: 3132462 - RNA, 19 nt, Artificial Sequence
  Description of Artificial Sequence: Synthetic oligonucleotide
uccuuucggagagcugcau

SEQ ID NO: 3132463 - RNA, 19 nt, Artificial Sequence
  Description of Artificial Sequence: Synthetic oligonucleotide
gcgugggcacuguauacca

SEQ ID NO: 3132464 - RNA, 19 nt, Artificial Sequence
  Description of Artificial Sequence: Synthetic oligonucleotide
gaggugaaggggugccgcu

SEQ ID NO: 3132465 - RNA, 19 nt, Artificial Sequence
  Description of Artificial Sequence: Synthetic oligonucleotide
ccaccucgggaggugaagg

SEQ ID NO: 3132466 - RNA, 19 nt, Artificial Sequence
  Description of Artificial Sequence: Synthetic oligonucleotide
gcucagcacggaugugaag

SEQ ID NO: 3132467 - RNA, 19 nt, Artificial Sequence
  Description of Artificial Sequence: Synthetic oligonucleotide
gcgagcuggugugaggcug

SEQ ID NO: 3132468 - RNA, 19 nt, Artificial Sequence
  Description of Artificial Sequence: Synthetic oligonucleotide
uggaaggcgugggcacugu

SEQ ID NO: 3132469 - RNA, 19 nt, Artificial Sequence
  Description of Artificial Sequence: Synthetic oligonucleotide
ggcugcucagcacggaugu

SEQ ID NO: 3132470 - RNA, 19 nt, Artificial Sequence
  Description of Artificial Sequence: Synthetic oligonucleotide
ccgcuggccagcacggagc

SEQ ID NO: 3132471 - RNA, 19 nt, Artificial Sequence
  Description of Artificial Sequence: Synthetic oligonucleotide
gggaggugaaggggugccg

SEQ ID NO: 3132472 - RNA, 19 nt, Artificial Sequence
  Description of Artificial Sequence: Synthetic oligonucleotide
cagcacggagcacaggggu

SEQ ID NO: 3132473 - RNA, 19 nt, Artificial Sequence
  Description of Artificial Sequence: Synthetic oligonucleotide
gggcuggaagcguggcgag

SEQ ID NO: 3132474 - RNA, 19 nt, Artificial Sequence
  Description of Artificial Sequence: Synthetic oligonucleotide
ggguucguggcugcucagc

SEQ ID NO: 3132475 - RNA, 19 nt, Artificial Sequence
  Description of Artificial Sequence: Synthetic oligonucleotide
gcauucuguuucuccaagu

SEQ ID NO: 3132476 - RNA, 19 nt, Artificial Sequence
  Description of Artificial Sequence: Synthetic oligonucleotide
gugaguuguuugaucuccu

SEQ ID NO: 3132477 - RNA, 19 nt, Artificial Sequence
  Description of Artificial Sequence: Synthetic oligonucleotide
guauaccaccucgggaggu

SEQ ID NO: 3132478 - RNA, 19 nt, Artificial Sequence
  Description of Artificial Sequence: Synthetic oligonucleotide
gugaaguacuucagcuccu

SEQ ID NO: 3132479 - RNA, 19 nt, Artificial Sequence
  Description of Artificial Sequence: Synthetic oligonucleotide
agcacggagcacagggguu

SEQ ID NO: 3132480 - RNA, 19 nt, Artificial Sequence
  Description of Artificial Sequence: Synthetic oligonucleotide
acagggguucguggcugcu

SEQ ID NO: 3132481 - RNA, 19 nt, Artificial Sequence
  Description of Artificial Sequence: Synthetic oligonucleotide
gcacggagcacagggguuc

SEQ ID NO: 3132482 - RNA, 19 nt, Artificial Sequence
  Description of Artificial Sequence: Synthetic oligonucleotide
cagggguucguggcugcuc

SEQ ID NO: 3132483 - RNA, 19 nt, Artificial Sequence
  Description of Artificial Sequence: Synthetic oligonucleotide
gcacagggguucguggcug

SEQ ID NO: 3132484 - RNA, 19 nt, Artificial Sequence
  Description of Artificial Sequence: Synthetic oligonucleotide
agcuggugugaggcuggug

SEQ ID NO: 3132485 - RNA, 19 nt, Artificial Sequence
  Description of Artificial Sequence: Synthetic oligonucleotide
guggcugcucagcacggau

SEQ ID NO: 3132486 - RNA, 19 nt, Artificial Sequence
  Description of Artificial Sequence: Synthetic oligonucleotide
cuucagcuccucugugagu

SEQ ID NO: 3132487 - RNA, 19 nt, Artificial Sequence
  Description of Artificial Sequence: Synthetic oligonucleotide
gggguucguggcugcucag

SEQ ID NO: 3132488 - RNA, 19 nt, Artificial Sequence
  Description of Artificial Sequence: Synthetic oligonucleotide
gcuggaagcguggcgagcu

SEQ ID NO: 3132489 - RNA, 19 nt, Artificial Sequence
  Description of Artificial Sequence: Synthetic oligonucleotide
ggcuggaagcguggcgagc

SEQ ID NO: 3132490 - RNA, 19 nt, Artificial Sequence
  Description of Artificial Sequence: Synthetic oligonucleotide
ugccgcuggccagcacgga

SEQ ID NO: 3132491 - RNA, 19 nt, Artificial Sequence
  Description of Artificial Sequence: Synthetic oligonucleotide
cgugggcacuguauaccac

SEQ ID NO: 3132492 - RNA, 19 nt, Artificial Sequence
  Description of Artificial Sequence: Synthetic oligonucleotide
cuggaaguucagggcugga

SEQ ID NO: 3132493 - RNA, 19 nt, Artificial Sequence
  Description of Artificial Sequence: Synthetic oligonucleotide
acggagcacagggguucgu

SEQ ID NO: 3132494 - RNA, 19 nt, Artificial Sequence
  Description of Artificial Sequence: Synthetic oligonucleotide
cagcuccucugugaguugu

SEQ ID NO: 3132495 - RNA, 19 nt, Artificial Sequence
  Description of Artificial Sequence: Synthetic oligonucleotide
cgggaggugaaggggugcc

SEQ ID NO: 3132496 - RNA, 19 nt, Artificial Sequence
  Description of Artificial Sequence: Synthetic oligonucleotide
gcugcucagcacggaugug

SEQ ID NO: 3132497 - RNA, 19 nt, Artificial Sequence
  Description of Artificial Sequence: Synthetic oligonucleotide
ggaaggcgugggcacugua

SEQ ID NO: 3132498 - RNA, 19 nt, Artificial Sequence
  Description of Artificial Sequence: Synthetic oligonucleotide
cguggcgagcuggugugag

SEQ ID NO: 3132499 - RNA, 19 nt, Artificial Sequence
  Description of Artificial Sequence: Synthetic oligonucleotide
ccaagucuucgcucuccaa

SEQ ID NO: 3132500 - RNA, 19 nt, Artificial Sequence
  Description of Artificial Sequence: Synthetic oligonucleotide
gguggaaggcgugggcacu

SEQ ID NO: 3132501 - RNA, 19 nt, Artificial Sequence
  Description of Artificial Sequence: Synthetic oligonucleotide
ggccagcacggagcacagg

SEQ ID NO: 3132502 - RNA, 19 nt, Artificial Sequence
  Description of Artificial Sequence: Synthetic oligonucleotide
gagcuggugugaggcuggu

SEQ ID NO: 3132503 - RNA, 19 nt, Artificial Sequence
  Description of Artificial Sequence: Synthetic oligonucleotide
ggcgagcuggugugaggcu

SEQ ID NO: 3132504 - RNA, 19 nt, Artificial Sequence
  Description of Artificial Sequence: Synthetic oligonucleotide
gcacggaugugaaguacuu

SEQ ID NO: 3132505 - RNA, 19 nt, Artificial Sequence
  Description of Artificial Sequence: Synthetic oligonucleotide
ccuuucggagagcugcauu

SEQ ID NO: 3132506 - RNA, 19 nt, Artificial Sequence
  Description of Artificial Sequence: Synthetic oligonucleotide
ccucugugaguuguuugau

SEQ ID NO: 3132507 - RNA, 19 nt, Artificial Sequence
  Description of Artificial Sequence: Synthetic oligonucleotide
gggugccgcuggccagcac

SEQ ID NO: 3132508 - RNA, 19 nt, Artificial Sequence
  Description of Artificial Sequence: Synthetic oligonucleotide
ggggugccgcuggccagca

SEQ ID NO: 3132509 - RNA, 19 nt, Artificial Sequence
  Description of Artificial Sequence: Synthetic oligonucleotide
gcguggcgagcugguguga

SEQ ID NO: 3132510 - RNA, 19 nt, Artificial Sequence
  Description of Artificial Sequence: Synthetic oligonucleotide
aaagagaaaagccuguggc

SEQ ID NO: 3132511 - RNA, 19 nt, Artificial Sequence
  Description of Artificial Sequence: Synthetic oligonucleotide
aauuccaagucauagucac

SEQ ID NO: 3132512 - RNA, 19 nt, Artificial Sequence
  Description of Artificial Sequence: Synthetic oligonucleotide
acugcaagcacucuguucc

SEQ ID NO: 3132513 - RNA, 19 nt, Artificial Sequence
  Description of Artificial Sequence: Synthetic oligonucleotide
aaaguuuugcuuuugugug

SEQ ID NO: 3132514 - RNA, 19 nt, Artificial Sequence
  Description of Artificial Sequence: Synthetic oligonucleotide
ucauaaaucacaucaaaga

SEQ ID NO: 3132515 - RNA, 19 nt, Artificial Sequence
  Description of Artificial Sequence: Synthetic oligonucleotide
uucauaaaucacaucaaag

SEQ ID NO: 3132516 - RNA, 19 nt, Artificial Sequence
  Description of Artificial Sequence: Synthetic oligonucleotide
ugauaugcuucauaaauca

SEQ ID NO: 3132517 - RNA, 19 nt, Artificial Sequence
  Description of Artificial Sequence: Synthetic oligonucleotide
aagccuguggcauuuucgc

SEQ ID NO: 3132518 - RNA, 19 nt, Artificial Sequence
  Description of Artificial Sequence: Synthetic oligonucleotide
agaacagcugaccugagag

SEQ ID NO: 3132519 - RNA, 19 nt, Artificial Sequence
  Description of Artificial Sequence: Synthetic oligonucleotide
ugugacaguacuuuagggc

SEQ ID NO: 3132520 - RNA, 19 nt, Artificial Sequence
  Description of Artificial Sequence: Synthetic oligonucleotide
ugugugacaguacuuuagg

SEQ ID NO: 3132521 - RNA, 19 nt, Artificial Sequence
  Description of Artificial Sequence: Synthetic oligonucleotide
  modified_base (10)..(10): a, c, u, g, unknown or other
uaagcagccnucagcagag

SEQ ID NO: 3132522 - RNA, 19 nt, Artificial Sequence
  Description of Artificial Sequence: Synthetic oligonucleotide
uuuagcacgguccagggaa

SEQ ID NO: 3132523 - RNA, 19 nt, Artificial Sequence
  Description of Artificial Sequence: Synthetic oligonucleotide
auagucacuacacuguuga

SEQ ID NO: 3132524 - RNA, 19 nt, Artificial Sequence
  Description of Artificial Sequence: Synthetic oligonucleotide
uuuagggccaacugcaagc

SEQ ID NO: 3132525 - RNA, 19 nt, Artificial Sequence
  Description of Artificial Sequence: Synthetic oligonucleotide
uccaaauuccaagucauag

SEQ ID NO: 3132526 - RNA, 19 nt, Artificial Sequence
  Description of Artificial Sequence: Synthetic oligonucleotide
uaaaaguuuugcuuuugug

SEQ ID NO: 3132527 - RNA, 19 nt, Artificial Sequence
  Description of Artificial Sequence: Synthetic oligonucleotide
agucauagucacuacacug

SEQ ID NO: 3132528 - RNA, 19 nt, Artificial Sequence
  Description of Artificial Sequence: Synthetic oligonucleotide
uaugcuucauaaaucacau

SEQ ID NO: 3132529 - RNA, 19 nt, Artificial Sequence
  Description of Artificial Sequence: Synthetic oligonucleotide
gugacaguacuuuagggcc

SEQ ID NO: 3132530 - RNA, 19 nt, Artificial Sequence
  Description of Artificial Sequence: Synthetic oligonucleotide
uacuuuagggccaacugca

SEQ ID NO: 3132531 - RNA, 19 nt, Artificial Sequence
  Description of Artificial Sequence: Synthetic oligonucleotide
aagagaaaagccuguggca

SEQ ID NO: 3132532 - RNA, 19 nt, Artificial Sequence
  Description of Artificial Sequence: Synthetic oligonucleotide
caucaaagagaaaagccug

SEQ ID NO: 3132533 - RNA, 19 nt, Artificial Sequence
  Description of Artificial Sequence: Synthetic oligonucleotide
aguacuuuagggccaacug

SEQ ID NO: 3132534 - RNA, 19 nt, Artificial Sequence
  Description of Artificial Sequence: Synthetic oligonucleotide
uugauaugcuucauaaauc

SEQ ID NO: 3132535 - RNA, 19 nt, Artificial Sequence
  Description of Artificial Sequence: Synthetic oligonucleotide
caagucauagucacuacac

SEQ ID NO: 3132536 - RNA, 19 nt, Artificial Sequence
  Description of Artificial Sequence: Synthetic oligonucleotide
aaaagccuguggcauuuuc

SEQ ID NO: 3132537 - RNA, 19 nt, Artificial Sequence
  Description of Artificial Sequence: Synthetic oligonucleotide
aacugcaagcacucuguuc

SEQ ID NO: 3132538 - RNA, 19 nt, Artificial Sequence
  Description of Artificial Sequence: Synthetic oligonucleotide
uugugugacaguacuuuag

SEQ ID NO: 3132539 - RNA, 19 nt, Artificial Sequence
  Description of Artificial Sequence: Synthetic oligonucleotide
cagggaauggucuaagcag

SEQ ID NO: 3132540 - RNA, 19 nt, Artificial Sequence
  Description of Artificial Sequence: Synthetic oligonucleotide
auaaaucacaucaaagaga

SEQ ID NO: 3132541 - RNA, 19 nt, Artificial Sequence
  Description of Artificial Sequence: Synthetic oligonucleotide
caaagagaaaagccugugg

SEQ ID NO: 3132542 - RNA, 19 nt, Artificial Sequence
  Description of Artificial Sequence: Synthetic oligonucleotide
uggcauuuucgcuugcccg

SEQ ID NO: 3132543 - RNA, 19 nt, Artificial Sequence
  Description of Artificial Sequence: Synthetic oligonucleotide
ucacaucaaagagaaaagc

SEQ ID NO: 3132544 - RNA, 19 nt, Artificial Sequence
  Description of Artificial Sequence: Synthetic oligonucleotide
aaagccuguggcauuuucg

SEQ ID NO: 3132545 - RNA, 19 nt, Artificial Sequence
  Description of Artificial Sequence: Synthetic oligonucleotide
uguuuagcacgguccaggg

SEQ ID NO: 3132546 - RNA, 19 nt, Artificial Sequence
  Description of Artificial Sequence: Synthetic oligonucleotide
cacuacacuguugauaugc

SEQ ID NO: 3132547 - RNA, 19 nt, Artificial Sequence
  Description of Artificial Sequence: Synthetic oligonucleotide
guacuuuagggccaacugc

SEQ ID NO: 3132548 - RNA, 19 nt, Artificial Sequence
  Description of Artificial Sequence: Synthetic oligonucleotide
guugauaugcuucauaaau

SEQ ID NO: 3132549 - RNA, 19 nt, Artificial Sequence
  Description of Artificial Sequence: Synthetic oligonucleotide
aaguuuugcuuuuguguga

SEQ ID NO: 3132550 - RNA, 19 nt, Artificial Sequence
  Description of Artificial Sequence: Synthetic oligonucleotide
agggaauggucuaagcagc

SEQ ID NO: 3132551 - RNA, 19 nt, Artificial Sequence
  Description of Artificial Sequence: Synthetic oligonucleotide
auaugcuucauaaaucaca

SEQ ID NO: 3132552 - RNA, 19 nt, Artificial Sequence
  Description of Artificial Sequence: Synthetic oligonucleotide
  modified_base (17)..(17): a, c, u, g, unknown or other
aauggucuaagcagccnuc

SEQ ID NO: 3132553 - RNA, 19 nt, Artificial Sequence
  Description of Artificial Sequence: Synthetic oligonucleotide
uugcccgguguuuagcacg

SEQ ID NO: 3132554 - RNA, 19 nt, Artificial Sequence
  Description of Artificial Sequence: Synthetic oligonucleotide
uuuugugugacaguacuuu

SEQ ID NO: 3132555 - RNA, 19 nt, Artificial Sequence
  Description of Artificial Sequence: Synthetic oligonucleotide
ucaaagagaaaagccugug

SEQ ID NO: 3132556 - RNA, 19 nt, Artificial Sequence
  Description of Artificial Sequence: Synthetic oligonucleotide
aucacaucaaagagaaaag

SEQ ID NO: 3132557 - RNA, 19 nt, Artificial Sequence
  Description of Artificial Sequence: Synthetic oligonucleotide
gugugacaguacuuuaggg

SEQ ID NO: 3132558 - RNA, 19 nt, Artificial Sequence
  Description of Artificial Sequence: Synthetic oligonucleotide
aaauuccaagucauaguca

SEQ ID NO: 3132559 - RNA, 19 nt, Artificial Sequence
  Description of Artificial Sequence: Synthetic oligonucleotide
ucuaaaaguuuugcuuuug

SEQ ID NO: 3132560 - RNA, 19 nt, Artificial Sequence
  Description of Artificial Sequence: Synthetic oligonucleotide
acccuucuaaaaguuuugc

SEQ ID NO: 3132561 - RNA, 19 nt, Artificial Sequence
  Description of Artificial Sequence: Synthetic oligonucleotide
aagaacagcugaccugaga

SEQ ID NO: 3132562 - RNA, 19 nt, Artificial Sequence
  Description of Artificial Sequence: Synthetic oligonucleotide
  modified_base (14)..(14): a, c, u, g, unknown or other
ggucuaagcagccnucagc

SEQ ID NO: 3132563 - RNA, 19 nt, Artificial Sequence
  Description of Artificial Sequence: Synthetic oligonucleotide
uuugcuuuugugugacagu

SEQ ID NO: 3132564 - RNA, 19 nt, Artificial Sequence
  Description of Artificial Sequence: Synthetic oligonucleotide
  modified_base (8)..(8): a, c, u, g, unknown or other
agcagccnucagcagaggg

SEQ ID NO: 3132565 - RNA, 19 nt, Artificial Sequence
  Description of Artificial Sequence: Synthetic oligonucleotide
uguugauaugcuucauaaa

SEQ ID NO: 3132566 - RNA, 19 nt, Artificial Sequence
  Description of Artificial Sequence: Synthetic oligonucleotide
cuguugauaugcuucauaa

SEQ ID NO: 3132567 - RNA, 19 nt, Artificial Sequence
  Description of Artificial Sequence: Synthetic oligonucleotide
ugacaguacuuuagggcca

SEQ ID NO: 3132568 - RNA, 19 nt, Artificial Sequence
  Description of Artificial Sequence: Synthetic oligonucleotide
  modified_base (12)..(12): a, c, u, g, unknown or other
ucuaagcagccnucagcag

SEQ ID NO: 3132569 - RNA, 19 nt, Artificial Sequence
  Description of Artificial Sequence: Synthetic oligonucleotide
guguuuagcacgguccagg

SEQ ID NO: 3132570 - RNA, 19 nt, Artificial Sequence
  Description of Artificial Sequence: Synthetic oligonucleotide
ggcauuuucgcuugcccgg

SEQ ID NO: 3132571 - RNA, 19 nt, Artificial Sequence
  Description of Artificial Sequence: Synthetic oligonucleotide
  modified_base (11)..(11): a, c, u, g, unknown or other
cuaagcagccnucagcaga

SEQ ID NO: 3132572 - RNA, 19 nt, Artificial Sequence
  Description of Artificial Sequence: Synthetic oligonucleotide
caggggacccuucuaaaag

SEQ ID NO: 3132573 - RNA, 19 nt, Artificial Sequence
  Description of Artificial Sequence: Synthetic oligonucleotide
gauaugcuucauaaaucac

SEQ ID NO: 3132574 - RNA, 19 nt, Artificial Sequence
  Description of Artificial Sequence: Synthetic oligonucleotide
uuugugugacaguacuuua

SEQ ID NO: 3132575 - RNA, 19 nt, Artificial Sequence
  Description of Artificial Sequence: Synthetic oligonucleotide
ucauagucacuacacuguu

SEQ ID NO: 3132576 - RNA, 19 nt, Artificial Sequence
  Description of Artificial Sequence: Synthetic oligonucleotide
gucacuacacuguugauau

SEQ ID NO: 3132577 - RNA, 19 nt, Artificial Sequence
  Description of Artificial Sequence: Synthetic oligonucleotide
  modified_base (13)..(13): a, c, u, g, unknown or other
gucuaagcagccnucagca

SEQ ID NO: 3132578 - RNA, 19 nt, Artificial Sequence
  Description of Artificial Sequence: Synthetic oligonucleotide
ugcccgguguuuagcacgg

SEQ ID NO: 3132579 - RNA, 19 nt, Artificial Sequence
  Description of Artificial Sequence: Synthetic oligonucleotide
gaccugagagaggucaggg

SEQ ID NO: 3132580 - RNA, 19 nt, Artificial Sequence
  Description of Artificial Sequence: Synthetic oligonucleotide
  modified_base (15)..(15): a, c, u, g, unknown or other
uggucuaagcagccnucag

SEQ ID NO: 3132581 - RNA, 19 nt, Artificial Sequence
  Description of Artificial Sequence: Synthetic oligonucleotide
cauagucacuacacuguug

SEQ ID NO: 3132582 - RNA, 19 nt, Artificial Sequence
  Description of Artificial Sequence: Synthetic oligonucleotide
uucuaaaaguuuugcuuuu

SEQ ID NO: 3132583 - RNA, 19 nt, Artificial Sequence
  Description of Artificial Sequence: Synthetic oligonucleotide
uugcuuuugugugacagua

SEQ ID NO: 3132584 - RNA, 19 nt, Artificial Sequence
  Description of Artificial Sequence: Synthetic oligonucleotide
acuguugauaugcuucaua

SEQ ID NO: 3132585 - RNA, 19 nt, Artificial Sequence
  Description of Artificial Sequence: Synthetic oligonucleotide
cugagagaggucaggggac

SEQ ID NO: 3132586 - RNA, 19 nt, Artificial Sequence
  Description of Artificial Sequence: Synthetic oligonucleotide
uuagggccaacugcaagca

SEQ ID NO: 3132587 - RNA, 19 nt, Artificial Sequence
  Description of Artificial Sequence: Synthetic oligonucleotide
ucaggggacccuucuaaaa

SEQ ID NO: 3132588 - RNA, 19 nt, Artificial Sequence
  Description of Artificial Sequence: Synthetic oligonucleotide
ugcuuuugugugacaguac

SEQ ID NO: 3132589 - RNA, 19 nt, Artificial Sequence
  Description of Artificial Sequence: Synthetic oligonucleotide
ugaccugagagaggucagg

SEQ ID NO: 3132590 - RNA, 19 nt, Artificial Sequence
  Description of Artificial Sequence: Synthetic oligonucleotide
auuuucgcuugcccggugu

SEQ ID NO: 3132591 - RNA, 19 nt, Artificial Sequence
  Description of Artificial Sequence: Synthetic oligonucleotide
aggggacccuucuaaaagu

SEQ ID NO: 3132592 - RNA, 19 nt, Artificial Sequence
  Description of Artificial Sequence: Synthetic oligonucleotide
guggcauuuucgcuugccc

SEQ ID NO: 3132593 - RNA, 19 nt, Artificial Sequence
  Description of Artificial Sequence: Synthetic oligonucleotide
uccagggaauggucuaagc

SEQ ID NO: 3132594 - RNA, 19 nt, Artificial Sequence
  Description of Artificial Sequence: Synthetic oligonucleotide
aucaaagagaaaagccugu

SEQ ID NO: 3132595 - RNA, 19 nt, Artificial Sequence
  Description of Artificial Sequence: Synthetic oligonucleotide
cuucuaaaaguuuugcuuu

SEQ ID NO: 3132596 - RNA, 19 nt, Artificial Sequence
  Description of Artificial Sequence: Synthetic oligonucleotide
uccaagucauagucacuac

SEQ ID NO: 3132597 - RNA, 19 nt, Artificial Sequence
  Description of Artificial Sequence: Synthetic oligonucleotide
uguggcauuuucgcuugcc

SEQ ID NO: 3132598 - RNA, 19 nt, Artificial Sequence
  Description of Artificial Sequence: Synthetic oligonucleotide
gaacagcugaccugagaga

SEQ ID NO: 3132599 - RNA, 19 nt, Artificial Sequence
  Description of Artificial Sequence: Synthetic oligonucleotide
  modified_base (16)..(16): a, c, u, g, unknown or other
auggucuaagcagccnuca

SEQ ID NO: 3132600 - RNA, 19 nt, Artificial Sequence
  Description of Artificial Sequence: Synthetic oligonucleotide
gacccuucuaaaaguuuug

SEQ ID NO: 3132601 - RNA, 19 nt, Artificial Sequence
  Description of Artificial Sequence: Synthetic oligonucleotide
agucacuacacuguugaua

SEQ ID NO: 3132602 - RNA, 19 nt, Artificial Sequence
  Description of Artificial Sequence: Synthetic oligonucleotide
cacucuguuccaaauucca

SEQ ID NO: 3132603 - RNA, 19 nt, Artificial Sequence
  Description of Artificial Sequence: Synthetic oligonucleotide
  modified_base (18)..(18): a, c, u, g, unknown or other
gaauggucuaagcagccnu

SEQ ID NO: 3132604 - RNA, 19 nt, Artificial Sequence
  Description of Artificial Sequence: Synthetic oligonucleotide
  modified_base (6)..(6): a, c, u, g, unknown or other
cagccnucagcagagggac

SEQ ID NO: 3132605 - RNA, 19 nt, Artificial Sequence
  Description of Artificial Sequence: Synthetic oligonucleotide
uuccaaauuccaagucaua

SEQ ID NO: 3132606 - RNA, 19 nt, Artificial Sequence
  Description of Artificial Sequence: Synthetic oligonucleotide
cugaccugagagaggucag

SEQ ID NO: 3132607 - RNA, 19 nt, Artificial Sequence
  Description of Artificial Sequence: Synthetic oligonucleotide
agggccaacugcaagcacu

SEQ ID NO: 3132608 - RNA, 19 nt, Artificial Sequence
  Description of Artificial Sequence: Synthetic oligonucleotide
cuaaaaguuuugcuuuugu

SEQ ID NO: 3132609 - RNA, 19 nt, Artificial Sequence
  Description of Artificial Sequence: Synthetic oligonucleotide
ccgguguuuagcacggucc

SEQ ID NO: 3132610 - RNA, 19 nt, Artificial Sequence
  Description of Artificial Sequence: Synthetic oligonucleotide
agaaaagccuguggcauuu

SEQ ID NO: 3132611 - RNA, 19 nt, Artificial Sequence
  Description of Artificial Sequence: Synthetic oligonucleotide
uuagcacgguccagggaau

SEQ ID NO: 3132612 - RNA, 19 nt, Artificial Sequence
  Description of Artificial Sequence: Synthetic oligonucleotide
gucauagucacuacacugu

SEQ ID NO: 3132613 - RNA, 19 nt, Artificial Sequence
  Description of Artificial Sequence: Synthetic oligonucleotide
cuugcccgguguuuagcac

SEQ ID NO: 3132614 - RNA, 19 nt, Artificial Sequence
  Description of Artificial Sequence: Synthetic oligonucleotide
uuuucgcuugcccgguguu

SEQ ID NO: 3132615 - RNA, 19 nt, Artificial Sequence
  Description of Artificial Sequence: Synthetic oligonucleotide
ucacuacacuguugauaug

SEQ ID NO: 3132616 - RNA, 19 nt, Artificial Sequence
  Description of Artificial Sequence: Synthetic oligonucleotide
acuacacuguugauaugcu

SEQ ID NO: 3132617 - RNA, 19 nt, Artificial Sequence
  Description of Artificial Sequence: Synthetic oligonucleotide
agccuguggcauuuucgcu

SEQ ID NO: 3132618 - RNA, 19 nt, Artificial Sequence
  Description of Artificial Sequence: Synthetic oligonucleotide
caagaacagcugaccugag

SEQ ID NO: 3132619 - RNA, 19 nt, Artificial Sequence
  Description of Artificial Sequence: Synthetic oligonucleotide
  modified_base (9)..(9): a, c, u, g, unknown or other
aagcagccnucagcagagg

SEQ ID NO: 3132620 - RNA, 19 nt, Artificial Sequence
  Description of Artificial Sequence: Synthetic oligonucleotide
ccugagagaggucagggga

SEQ ID NO: 3132621 - RNA, 19 nt, Artificial Sequence
  Description of Artificial Sequence: Synthetic oligonucleotide
uucgcuugcccgguguuua

SEQ ID NO: 3132622 - RNA, 19 nt, Artificial Sequence
  Description of Artificial Sequence: Synthetic oligonucleotide
  modified_base (4)..(4): a, c, u, g, unknown or other
gccnucagcagagggacug

SEQ ID NO: 3132623 - RNA, 19 nt, Artificial Sequence
  Description of Artificial Sequence: Synthetic oligonucleotide
guuccaaauuccaagucau

SEQ ID NO: 3132624 - RNA, 19 nt, Artificial Sequence
  Description of Artificial Sequence: Synthetic oligonucleotide
guuuagcacgguccaggga

SEQ ID NO: 3132625 - RNA, 19 nt, Artificial Sequence
  Description of Artificial Sequence: Synthetic oligonucleotide
cacgguccagggaaugguc

SEQ ID NO: 3132626 - RNA, 19 nt, Artificial Sequence
  Description of Artificial Sequence: Synthetic oligonucleotide
uagggccaacugcaagcac

SEQ ID NO: 3132627 - RNA, 19 nt, Artificial Sequence
  Description of Artificial Sequence: Synthetic oligonucleotide
ucgcuugcccgguguuuag

SEQ ID NO: 3132628 - RNA, 19 nt, Artificial Sequence
  Description of Artificial Sequence: Synthetic oligonucleotide
aaaucacaucaaagagaaa

SEQ ID NO: 3132629 - RNA, 19 nt, Artificial Sequence
  Description of Artificial Sequence: Synthetic oligonucleotide
uagucacuacacuguugau

SEQ ID NO: 3132630 - RNA, 19 nt, Artificial Sequence
  Description of Artificial Sequence: Synthetic oligonucleotide
acucuguuccaaauuccaa

SEQ ID NO: 3132631 - RNA, 19 nt, Artificial Sequence
  Description of Artificial Sequence: Synthetic oligonucleotide
auuccaagucauagucacu

SEQ ID NO: 3132632 - RNA, 19 nt, Artificial Sequence
  Description of Artificial Sequence: Synthetic oligonucleotide
ccuucuaaaaguuuugcuu

SEQ ID NO: 3132633 - RNA, 19 nt, Artificial Sequence
  Description of Artificial Sequence: Synthetic oligonucleotide
gacaguacuuuagggccaa

SEQ ID NO: 3132634 - RNA, 19 nt, Artificial Sequence
  Description of Artificial Sequence: Synthetic oligonucleotide
guccagggaauggucuaag

SEQ ID NO: 3132635 - RNA, 19 nt, Artificial Sequence
  Description of Artificial Sequence: Synthetic oligonucleotide
ugcaagcacucuguuccaa

SEQ ID NO: 3132636 - RNA, 19 nt, Artificial Sequence
  Description of Artificial Sequence: Synthetic oligonucleotide
cauuuucgcuugcccggug

SEQ ID NO: 3132637 - RNA, 19 nt, Artificial Sequence
  Description of Artificial Sequence: Synthetic oligonucleotide
gggaauggucuaagcagcc

SEQ ID NO: 3132638 - RNA, 19 nt, Artificial Sequence
  Description of Artificial Sequence: Synthetic oligonucleotide
ccaagucauagucacuaca

SEQ ID NO: 3132639 - RNA, 19 nt, Artificial Sequence
  Description of Artificial Sequence: Synthetic oligonucleotide
ggucaggggacccuucuaa

SEQ ID NO: 3132640 - RNA, 19 nt, Artificial Sequence
  Description of Artificial Sequence: Synthetic oligonucleotide
  modified_base (7)..(7): a, c, u, g, unknown or other
gcagccnucagcagaggga

SEQ ID NO: 3132641 - RNA, 19 nt, Artificial Sequence
  Description of Artificial Sequence: Synthetic oligonucleotide
guuuugcuuuugugugaca

SEQ ID NO: 3132642 - RNA, 19 nt, Artificial Sequence
  Description of Artificial Sequence: Synthetic oligonucleotide
uagcacgguccagggaaug

SEQ ID NO: 3132643 - RNA, 19 nt, Artificial Sequence
  Description of Artificial Sequence: Synthetic oligonucleotide
acgguccagggaauggucu

SEQ ID NO: 3132644 - RNA, 19 nt, Artificial Sequence
  Description of Artificial Sequence: Synthetic oligonucleotide
gucaggggacccuucuaaa

SEQ ID NO: 3132645 - RNA, 19 nt, Artificial Sequence
  Description of Artificial Sequence: Synthetic oligonucleotide
gcacucuguuccaaauucc

SEQ ID NO: 3132646 - RNA, 19 nt, Artificial Sequence
  Description of Artificial Sequence: Synthetic oligonucleotide
gguguuuagcacgguccag

SEQ ID NO: 3132647 - RNA, 19 nt, Artificial Sequence
  Description of Artificial Sequence: Synthetic oligonucleotide
acaguacuuuagggccaac

SEQ ID NO: 3132648 - RNA, 19 nt, Artificial Sequence
  Description of Artificial Sequence: Synthetic oligonucleotide
gagaaaagccuguggcauu

SEQ ID NO: 3132649 - RNA, 19 nt, Artificial Sequence
  Description of Artificial Sequence: Synthetic oligonucleotide
uuucgcuugcccgguguuu

SEQ ID NO: 3132650 - RNA, 19 nt, Artificial Sequence
  Description of Artificial Sequence: Synthetic oligonucleotide
gaggucaggggacccuucu

SEQ ID NO: 3132651 - RNA, 19 nt, Artificial Sequence
  Description of Artificial Sequence: Synthetic oligonucleotide
acuuuagggccaacugcaa

SEQ ID NO: 3132652 - RNA, 19 nt, Artificial Sequence
  Description of Artificial Sequence: Synthetic oligonucleotide
gcuugcccgguguuuagca

SEQ ID NO: 3132653 - RNA, 19 nt, Artificial Sequence
  Description of Artificial Sequence: Synthetic oligonucleotide
caagcacucuguuccaaau

SEQ ID NO: 3132654 - RNA, 19 nt, Artificial Sequence
  Description of Artificial Sequence: Synthetic oligonucleotide
  modified_base (19)..(19): a, c, u, g, unknown or other
ggaauggucuaagcagccn

SEQ ID NO: 3132655 - RNA, 19 nt, Artificial Sequence
  Description of Artificial Sequence: Synthetic oligonucleotide
cuuuugugugacaguacuu

SEQ ID NO: 3132656 - RNA, 19 nt, Artificial Sequence
  Description of Artificial Sequence: Synthetic oligonucleotide
ccaaauuccaagucauagu

SEQ ID NO: 3132657 - RNA, 19 nt, Artificial Sequence
  Description of Artificial Sequence: Synthetic oligonucleotide
cuguggcauuuucgcuugc

SEQ ID NO: 3132658 - RNA, 19 nt, Artificial Sequence
  Description of Artificial Sequence: Synthetic oligonucleotide
aggucaggggacccuucua

SEQ ID NO: 3132659 - RNA, 19 nt, Artificial Sequence
  Description of Artificial Sequence: Synthetic oligonucleotide
cugcaagcacucuguucca

SEQ ID NO: 3132660 - RNA, 19 nt, Artificial Sequence
  Description of Artificial Sequence: Synthetic oligonucleotide
ccaacugcaagcacucugu

SEQ ID NO: 3132661 - RNA, 19 nt, Artificial Sequence
  Description of Artificial Sequence: Synthetic oligonucleotide
cuacacuguugauaugcuu

SEQ ID NO: 3132662 - RNA, 19 nt, Artificial Sequence
  Description of Artificial Sequence: Synthetic oligonucleotide
caguacuuuagggccaacu

SEQ ID NO: 3132663 - RNA, 19 nt, Artificial Sequence
  Description of Artificial Sequence: Synthetic oligonucleotide
agcugaccugagagagguc

SEQ ID NO: 3132664 - RNA, 19 nt, Artificial Sequence
  Description of Artificial Sequence: Synthetic oligonucleotide
ggacccuucuaaaaguuuu

SEQ ID NO: 3132665 - RNA, 19 nt, Artificial Sequence
  Description of Artificial Sequence: Synthetic oligonucleotide
gggccaacugcaagcacuc

SEQ ID NO: 3132666 - RNA, 19 nt, Artificial Sequence
  Description of Artificial Sequence: Synthetic oligonucleotide
cccgguguuuagcacgguc

SEQ ID NO: 3132667 - RNA, 19 nt, Artificial Sequence
  Description of Artificial Sequence: Synthetic oligonucleotide
cccuucuaaaaguuuugcu

SEQ ID NO: 3132668 - RNA, 19 nt, Artificial Sequence
  Description of Artificial Sequence: Synthetic oligonucleotide
  modified_base (5)..(5): a, c, u, g, unknown or other
agccnucagcagagggacu

SEQ ID NO: 3132669 - RNA, 19 nt, Artificial Sequence
  Description of Artificial Sequence: Synthetic oligonucleotide
gccuguggcauuuucgcuu

SEQ ID NO: 3132670 - RNA, 19 nt, Artificial Sequence
  Description of Artificial Sequence: Synthetic oligonucleotide
gguccagggaauggucuaa

SEQ ID NO: 3132671 - RNA, 19 nt, Artificial Sequence
  Description of Artificial Sequence: Synthetic oligonucleotide
gagaggucaggggacccuu

SEQ ID NO: 3132672 - RNA, 19 nt, Artificial Sequence
  Description of Artificial Sequence: Synthetic oligonucleotide
cgguguuuagcacggucca

SEQ ID NO: 3132673 - RNA, 19 nt, Artificial Sequence
  Description of Artificial Sequence: Synthetic oligonucleotide
gaaaagccuguggcauuuu

SEQ ID NO: 3132674 - RNA, 19 nt, Artificial Sequence
  Description of Artificial Sequence: Synthetic oligonucleotide
caacugcaagcacucuguu

SEQ ID NO: 3132675 - RNA, 19 nt, Artificial Sequence
  Description of Artificial Sequence: Synthetic oligonucleotide
gcauuuucgcuugcccggu

SEQ ID NO: 3132676 - RNA, 19 nt, Artificial Sequence
  Description of Artificial Sequence: Synthetic oligonucleotide
gcacgguccagggaauggu

SEQ ID NO: 3132677 - RNA, 19 nt, Artificial Sequence
  Description of Artificial Sequence: Synthetic oligonucleotide
cacuguugauaugcuucau

SEQ ID NO: 3132678 - RNA, 19 nt, Artificial Sequence
  Description of Artificial Sequence: Synthetic oligonucleotide
ggggacccuucuaaaaguu

SEQ ID NO: 3132679 - RNA, 19 nt, Artificial Sequence
  Description of Artificial Sequence: Synthetic oligonucleotide
gggacccuucuaaaaguuu

SEQ ID NO: 3132680 - RNA, 19 nt, Artificial Sequence
  Description of Artificial Sequence: Synthetic oligonucleotide
cgcuugcccgguguuuagc

SEQ ID NO: 3132681 - RNA, 19 nt, Artificial Sequence
  Description of Artificial Sequence: Synthetic oligonucleotide
cgguccagggaauggucua

SEQ ID NO: 3132682 - RNA, 19 nt, Artificial Sequence
  Description of Artificial Sequence: Synthetic oligonucleotide
gcccgguguuuagcacggu

SEQ ID NO: 3132683 - RNA, 19 nt, Artificial Sequence
  Description of Artificial Sequence: Synthetic oligonucleotide
ucuuuaaagaccaggcugg

SEQ ID NO: 3132684 - RNA, 19 nt, Artificial Sequence
  Description of Artificial Sequence: Synthetic oligonucleotide
aaugcagcgaucugccugc

SEQ ID NO: 3132685 - RNA, 19 nt, Artificial Sequence
  Description of Artificial Sequence: Synthetic oligonucleotide
uaaagauuugccuaucucu

SEQ ID NO: 3132686 - RNA, 19 nt, Artificial Sequence
  Description of Artificial Sequence: Synthetic oligonucleotide
uuaaagaccaggcuggccu

SEQ ID NO: 3132687 - RNA, 19 nt, Artificial Sequence
  Description of Artificial Sequence: Synthetic oligonucleotide
aacucauaaagauuugccu

SEQ ID NO: 3132688 - RNA, 19 nt, Artificial Sequence
  Description of Artificial Sequence: Synthetic oligonucleotide
uaaaggauggccuuccucu

SEQ ID NO: 3132689 - RNA, 19 nt, Artificial Sequence
  Description of Artificial Sequence: Synthetic oligonucleotide
auaaagauuugccuaucuc

SEQ ID NO: 3132690 - RNA, 19 nt, Artificial Sequence
  Description of Artificial Sequence: Synthetic oligonucleotide
uaggauuaaaggauggccu

SEQ ID NO: 3132691 - RNA, 19 nt, Artificial Sequence
  Description of Artificial Sequence: Synthetic oligonucleotide
aaagauuugccuaucucug

SEQ ID NO: 3132692 - RNA, 19 nt, Artificial Sequence
  Description of Artificial Sequence: Synthetic oligonucleotide
cucucuuuaaagaccaggc

SEQ ID NO: 3132693 - RNA, 19 nt, Artificial Sequence
  Description of Artificial Sequence: Synthetic oligonucleotide
uacuaggauuaaaggaugg

SEQ ID NO: 3132694 - RNA, 19 nt, Artificial Sequence
  Description of Artificial Sequence: Synthetic oligonucleotide
uggaacucucuuuaaagac

SEQ ID NO: 3132695 - RNA, 19 nt, Artificial Sequence
  Description of Artificial Sequence: Synthetic oligonucleotide
gaacucauaaagauuugcc

SEQ ID NO: 3132696 - RNA, 19 nt, Artificial Sequence
  Description of Artificial Sequence: Synthetic oligonucleotide
cuaggauuaaaggauggcc

SEQ ID NO: 3132697 - RNA, 19 nt, Artificial Sequence
  Description of Artificial Sequence: Synthetic oligonucleotide
acuaggauuaaaggauggc

SEQ ID NO: 3132698 - RNA, 19 nt, Artificial Sequence
  Description of Artificial Sequence: Synthetic oligonucleotide
gaaugcagcgaucugccug

SEQ ID NO: 3132699 - RNA, 19 nt, Artificial Sequence
  Description of Artificial Sequence: Synthetic oligonucleotide
acucauaaagauuugccua

SEQ ID NO: 3132700 - RNA, 19 nt, Artificial Sequence
  Description of Artificial Sequence: Synthetic oligonucleotide
ucgaaugcagcgaucugcc

SEQ ID NO: 3132701 - RNA, 19 nt, Artificial Sequence
  Description of Artificial Sequence: Synthetic oligonucleotide
auuugccuaucucugccuc

SEQ ID NO: 3132702 - RNA, 19 nt, Artificial Sequence
  Description of Artificial Sequence: Synthetic oligonucleotide
gauuaaaggauggccuucc

SEQ ID NO: 3132703 - RNA, 19 nt, Artificial Sequence
  Description of Artificial Sequence: Synthetic oligonucleotide
ucuguguagccccuugcug

SEQ ID NO: 3132704 - RNA, 19 nt, Artificial Sequence
  Description of Artificial Sequence: Synthetic oligonucleotide
acucucuuuaaagaccagg

SEQ ID NO: 3132705 - RNA, 19 nt, Artificial Sequence
  Description of Artificial Sequence: Synthetic oligonucleotide
uuaaaggauggccuuccuc

SEQ ID NO: 3132706 - RNA, 19 nt, Artificial Sequence
  Description of Artificial Sequence: Synthetic oligonucleotide
aucucugccucccggguac

SEQ ID NO: 3132707 - RNA, 19 nt, Artificial Sequence
  Description of Artificial Sequence: Synthetic oligonucleotide
gaacucucuuuaaagacca

SEQ ID NO: 3132708 - RNA, 19 nt, Artificial Sequence
  Description of Artificial Sequence: Synthetic oligonucleotide
uuuaaagaccaggcuggcc

SEQ ID NO: 3132709 - RNA, 19 nt, Artificial Sequence
  Description of Artificial Sequence: Synthetic oligonucleotide
ucaggcuggccucgaaugc

SEQ ID NO: 3132710 - RNA, 19 nt, Artificial Sequence
  Description of Artificial Sequence: Synthetic oligonucleotide
uuugccuaucucugccucc

SEQ ID NO: 3132711 - RNA, 19 nt, Artificial Sequence
  Description of Artificial Sequence: Synthetic oligonucleotide
ucgaacucauaaagauuug

SEQ ID NO: 3132712 - RNA, 19 nt, Artificial Sequence
  Description of Artificial Sequence: Synthetic oligonucleotide
ggguacuaggauuaaagga

SEQ ID NO: 3132713 - RNA, 19 nt, Artificial Sequence
  Description of Artificial Sequence: Synthetic oligonucleotide
ucucuguguagccccuugc

SEQ ID NO: 3132714 - RNA, 19 nt, Artificial Sequence
  Description of Artificial Sequence: Synthetic oligonucleotide
guacuaggauuaaaggaug

SEQ ID NO: 3132715 - RNA, 19 nt, Artificial Sequence
  Description of Artificial Sequence: Synthetic oligonucleotide
cuggaacucucuuuaaaga

SEQ ID NO: 3132716 - RNA, 19 nt, Artificial Sequence
  Description of Artificial Sequence: Synthetic oligonucleotide
uccuggaacucucuuuaaa

SEQ ID NO: 3132717 - RNA, 19 nt, Artificial Sequence
  Description of Artificial Sequence: Synthetic oligonucleotide
ccuggaacucucuuuaaag

SEQ ID NO: 3132718 - RNA, 19 nt, Artificial Sequence
  Description of Artificial Sequence: Synthetic oligonucleotide
ggaacucucuuuaaagacc

SEQ ID NO: 3132719 - RNA, 19 nt, Artificial Sequence
  Description of Artificial Sequence: Synthetic oligonucleotide
aggauuaaaggauggccuu

SEQ ID NO: 3132720 - RNA, 19 nt, Artificial Sequence
  Description of Artificial Sequence: Synthetic oligonucleotide
cucgaacucauaaagauuu

SEQ ID NO: 3132721 - RNA, 19 nt, Artificial Sequence
  Description of Artificial Sequence: Synthetic oligonucleotide
uucucuguguagccccuug

SEQ ID NO: 3132722 - RNA, 19 nt, Artificial Sequence
  Description of Artificial Sequence: Synthetic oligonucleotide
auuaaaggauggccuuccu

SEQ ID NO: 3132723 - RNA, 19 nt, Artificial Sequence
  Description of Artificial Sequence: Synthetic oligonucleotide
cuuuaaagaccaggcuggc

SEQ ID NO: 3132724 - RNA, 19 nt, Artificial Sequence
  Description of Artificial Sequence: Synthetic oligonucleotide
ccggguacuaggauuaaag

SEQ ID NO: 3132725 - RNA, 19 nt, Artificial Sequence
  Description of Artificial Sequence: Synthetic oligonucleotide
uugccuaucucugccuccc

SEQ ID NO: 3132726 - RNA, 19 nt, Artificial Sequence
  Description of Artificial Sequence: Synthetic oligonucleotide
uguagccccuugcuguccu

SEQ ID NO: 3132727 - RNA, 19 nt, Artificial Sequence
  Description of Artificial Sequence: Synthetic oligonucleotide
uaaagaccaggcuggccuc

SEQ ID NO: 3132728 - RNA, 19 nt, Artificial Sequence
  Description of Artificial Sequence: Synthetic oligonucleotide
ucauaaagauuugccuauc

SEQ ID NO: 3132729 - RNA, 19 nt, Artificial Sequence
  Description of Artificial Sequence: Synthetic oligonucleotide
gguacuaggauuaaaggau

SEQ ID NO: 3132730 - RNA, 19 nt, Artificial Sequence
  Description of Artificial Sequence: Synthetic oligonucleotide
uguguagccccuugcuguc

SEQ ID NO: 3132731 - RNA, 19 nt, Artificial Sequence
  Description of Artificial Sequence: Synthetic oligonucleotide
cucauaaagauuugccuau

SEQ ID NO: 3132732 - RNA, 19 nt, Artificial Sequence
  Description of Artificial Sequence: Synthetic oligonucleotide
aggauggccuuccucuggu

SEQ ID NO: 3132733 - RNA, 19 nt, Artificial Sequence
  Description of Artificial Sequence: Synthetic oligonucleotide
ucugccucccggguacuag

SEQ ID NO: 3132734 - RNA, 19 nt, Artificial Sequence
  Description of Artificial Sequence: Synthetic oligonucleotide
uaucucugccucccgggua

SEQ ID NO: 3132735 - RNA, 19 nt, Artificial Sequence
  Description of Artificial Sequence: Synthetic oligonucleotide
aacucucuuuaaagaccag

SEQ ID NO: 3132736 - RNA, 19 nt, Artificial Sequence
  Description of Artificial Sequence: Synthetic oligonucleotide
ugccuaucucugccucccg

SEQ ID NO: 3132737 - RNA, 19 nt, Artificial Sequence
  Description of Artificial Sequence: Synthetic oligonucleotide
gauggccuuccucuggucu

SEQ ID NO: 3132738 - RNA, 19 nt, Artificial Sequence
  Description of Artificial Sequence: Synthetic oligonucleotide
gcuggccucgaaugcagcg

SEQ ID NO: 3132739 - RNA, 19 nt, Artificial Sequence
  Description of Artificial Sequence: Synthetic oligonucleotide
cauaaagauuugccuaucu

SEQ ID NO: 3132740 - RNA, 19 nt, Artificial Sequence
  Description of Artificial Sequence: Synthetic oligonucleotide
uggccucgaaugcagcgau

SEQ ID NO: 3132741 - RNA, 19 nt, Artificial Sequence
  Description of Artificial Sequence: Synthetic oligonucleotide
ccuaucucugccucccggg

SEQ ID NO: 3132742 - RNA, 19 nt, Artificial Sequence
  Description of Artificial Sequence: Synthetic oligonucleotide
uagccccuugcuguccugg

SEQ ID NO: 3132743 - RNA, 19 nt, Artificial Sequence
  Description of Artificial Sequence: Synthetic oligonucleotide
uugcuguccuggaacucuc

SEQ ID NO: 3132744 - RNA, 19 nt, Artificial Sequence
  Description of Artificial Sequence: Synthetic oligonucleotide
cggguacuaggauuaaagg

SEQ ID NO: 3132745 - RNA, 19 nt, Artificial Sequence
  Description of Artificial Sequence: Synthetic oligonucleotide
cuguguagccccuugcugu

SEQ ID NO: 3132746 - RNA, 19 nt, Artificial Sequence
  Description of Artificial Sequence: Synthetic oligonucleotide
gguuaagacaggguuucuc

SEQ ID NO: 3132747 - RNA, 19 nt, Artificial Sequence
  Description of Artificial Sequence: Synthetic oligonucleotide
cgaacucauaaagauuugc

SEQ ID NO: 3132748 - RNA, 19 nt, Artificial Sequence
  Description of Artificial Sequence: Synthetic oligonucleotide
gggguuaagacaggguuuc

SEQ ID NO: 3132749 - RNA, 19 nt, Artificial Sequence
  Description of Artificial Sequence: Synthetic oligonucleotide
gccuaucucugccucccgg

SEQ ID NO: 3132750 - RNA, 19 nt, Artificial Sequence
  Description of Artificial Sequence: Synthetic oligonucleotide
cuggccucgaacucauaaa

SEQ ID NO: 3132751 - RNA, 19 nt, Artificial Sequence
  Description of Artificial Sequence: Synthetic oligonucleotide
ggauuaaaggauggccuuc

SEQ ID NO: 3132752 - RNA, 19 nt, Artificial Sequence
  Description of Artificial Sequence: Synthetic oligonucleotide
ugcugggaguaaaggcuuu

SEQ ID NO: 3132753 - RNA, 19 nt, Artificial Sequence
  Description of Artificial Sequence: Synthetic oligonucleotide
ugcagcgaucugccugccu

SEQ ID NO: 3132754 - RNA, 19 nt, Artificial Sequence
  Description of Artificial Sequence: Synthetic oligonucleotide
cucccggguacuaggauua

SEQ ID NO: 3132755 - RNA, 19 nt, Artificial Sequence
  Description of Artificial Sequence: Synthetic oligonucleotide
augcagcgaucugccugcc

SEQ ID NO: 3132756 - RNA, 19 nt, Artificial Sequence
  Description of Artificial Sequence: Synthetic oligonucleotide
agccccuugcuguccugga

SEQ ID NO: 3132757 - RNA, 19 nt, Artificial Sequence
  Description of Artificial Sequence: Synthetic oligonucleotide
cucuguguagccccuugcu

SEQ ID NO: 3132758 - RNA, 19 nt, Artificial Sequence
  Description of Artificial Sequence: Synthetic oligonucleotide
agcgaucugccugccucug

SEQ ID NO: 3132759 - RNA, 19 nt, Artificial Sequence
  Description of Artificial Sequence: Synthetic oligonucleotide
ccccuugcuguccuggaac

SEQ ID NO: 3132760 - RNA, 19 nt, Artificial Sequence
  Description of Artificial Sequence: Synthetic oligonucleotide
cuggccucgaaugcagcga

SEQ ID NO: 3132761 - RNA, 19 nt, Artificial Sequence
  Description of Artificial Sequence: Synthetic oligonucleotide
guagccccuugcuguccug

SEQ ID NO: 3132762 - RNA, 19 nt, Artificial Sequence
  Description of Artificial Sequence: Synthetic oligonucleotide
guguagccccuugcugucc

SEQ ID NO: 3132763 - RNA, 19 nt, Artificial Sequence
  Description of Artificial Sequence: Synthetic oligonucleotide
cuaucucugccucccgggu

SEQ ID NO: 3132764 - RNA, 19 nt, Artificial Sequence
  Description of Artificial Sequence: Synthetic oligonucleotide
gcgaucugccugccucugc

SEQ ID NO: 3132765 - RNA, 19 nt, Artificial Sequence
  Description of Artificial Sequence: Synthetic oligonucleotide
ucccggguacuaggauuaa

SEQ ID NO: 3132766 - RNA, 19 nt, Artificial Sequence
  Description of Artificial Sequence: Synthetic oligonucleotide
cagcgaucugccugccucu

SEQ ID NO: 3132767 - RNA, 19 nt, Artificial Sequence
  Description of Artificial Sequence: Synthetic oligonucleotide
ggcuggccucgaaugcagc

SEQ ID NO: 3132768 - RNA, 19 nt, Artificial Sequence
  Description of Artificial Sequence: Synthetic oligonucleotide
ccuugcuguccuggaacuc

SEQ ID NO: 3132769 - RNA, 19 nt, Artificial Sequence
  Description of Artificial Sequence: Synthetic oligonucleotide
gccuuccucuggucucuuc

SEQ ID NO: 3132770 - RNA, 19 nt, Artificial Sequence
  Description of Artificial Sequence: Synthetic oligonucleotide
gccccuugcuguccuggaa

SEQ ID NO: 3132771 - RNA, 19 nt, Artificial Sequence
  Description of Artificial Sequence: Synthetic oligonucleotide
cccuugcuguccuggaacu

SEQ ID NO: 3132772 - RNA, 19 nt, Artificial Sequence
  Description of Artificial Sequence: Synthetic oligonucleotide
ggccucgaaugcagcgauc

SEQ ID NO: 3132773 - RNA, 19 nt, Artificial Sequence
  Description of Artificial Sequence: Synthetic oligonucleotide
ccucccggguacuaggauu

SEQ ID NO: 3132774 - RNA, 19 nt, Artificial Sequence
  Description of Artificial Sequence: Synthetic oligonucleotide
ggguuaagacaggguuucu

SEQ ID NO: 3132775 - RNA, 19 nt, Artificial Sequence
  Description of Artificial Sequence: Synthetic oligonucleotide
gcugggaguaaaggcuuuu

SEQ ID NO: 3132776 - RNA, 19 nt, Artificial Sequence
  Description of Artificial Sequence: Synthetic oligonucleotide
cccggguacuaggauuaaa

SEQ ID NO: 3132777 - RNA, 19 nt, Artificial Sequence
  Description of Artificial Sequence: Synthetic oligonucleotide
gccucccggguacuaggau

SEQ ID NO: 3132778 - RNA, 19 nt, Artificial Sequence
  Description of Artificial Sequence: Synthetic oligonucleotide
cgaaugcagcgaucugccu

SEQ ID NO: 3132779 - RNA, 19 nt, Artificial Sequence
  Description of Artificial Sequence: Synthetic oligonucleotide
ggccuuccucuggucucuu

SEQ ID NO: 3132780 - RNA, 19 nt, Artificial Sequence
  Description of Artificial Sequence: Synthetic oligonucleotide
uccaaaacaagucuggucg

SEQ ID NO: 3132781 - RNA, 19 nt, Artificial Sequence
  Description of Artificial Sequence: Synthetic oligonucleotide
aaugaucucagccaguuca

SEQ ID NO: 3132782 - RNA, 19 nt, Artificial Sequence
  Description of Artificial Sequence: Synthetic oligonucleotide
uuagcagucuuuaccaugg

SEQ ID NO: 3132783 - RNA, 19 nt, Artificial Sequence
  Description of Artificial Sequence: Synthetic oligonucleotide
aauuaccuuccccacgacc

SEQ ID NO: 3132784 - RNA, 19 nt, Artificial Sequence
  Description of Artificial Sequence: Synthetic oligonucleotide
guuucacaugcuuugaucg

SEQ ID NO: 3132785 - RNA, 19 nt, Artificial Sequence
  Description of Artificial Sequence: Synthetic oligonucleotide
aaguacuuuagcaaguagg

SEQ ID NO: 3132786 - RNA, 19 nt, Artificial Sequence
  Description of Artificial Sequence: Synthetic oligonucleotide
guugaaguacuuuagcaag

SEQ ID NO: 3132787 - RNA, 19 nt, Artificial Sequence
  Description of Artificial Sequence: Synthetic oligonucleotide
uacuuuagcagucuuuacc

SEQ ID NO: 3132788 - RNA, 19 nt, Artificial Sequence
  Description of Artificial Sequence: Synthetic oligonucleotide
auuaccuuccccacgaccc

SEQ ID NO: 3132789 - RNA, 19 nt, Artificial Sequence
  Description of Artificial Sequence: Synthetic oligonucleotide
uuccccacgacccauuugg

SEQ ID NO: 3132790 - RNA, 19 nt, Artificial Sequence
  Description of Artificial Sequence: Synthetic oligonucleotide
aguacuuuagcaaguaggg

SEQ ID NO: 3132791 - RNA, 19 nt, Artificial Sequence
  Description of Artificial Sequence: Synthetic oligonucleotide
uacuuuagcaaguagggau

SEQ ID NO: 3132792 - RNA, 19 nt, Artificial Sequence
  Description of Artificial Sequence: Synthetic oligonucleotide
caguucauguuucacaugc

SEQ ID NO: 3132793 - RNA, 19 nt, Artificial Sequence
  Description of Artificial Sequence: Synthetic oligonucleotide
ucauguuucacaugcuuug

SEQ ID NO: 3132794 - RNA, 19 nt, Artificial Sequence
  Description of Artificial Sequence: Synthetic oligonucleotide
uuguugaaguacuuuagca

SEQ ID NO: 3132795 - RNA, 19 nt, Artificial Sequence
  Description of Artificial Sequence: Synthetic oligonucleotide
acuuuagcagucuuuacca

SEQ ID NO: 3132796 - RNA, 19 nt, Artificial Sequence
  Description of Artificial Sequence: Synthetic oligonucleotide
agcacgauguccccgacac

SEQ ID NO: 3132797 - RNA, 19 nt, Artificial Sequence
  Description of Artificial Sequence: Synthetic oligonucleotide
uguaccaauuaccuucccc

SEQ ID NO: 3132798 - RNA, 19 nt, Artificial Sequence
  Description of Artificial Sequence: Synthetic oligonucleotide
caugcuuugaucgugcagc

SEQ ID NO: 3132799 - RNA, 19 nt, Artificial Sequence
  Description of Artificial Sequence: Synthetic oligonucleotide
ucaugggcaaaguaggucu

SEQ ID NO: 3132800 - RNA, 19 nt, Artificial Sequence
  Description of Artificial Sequence: Synthetic oligonucleotide
uuuagcagucuuuaccaug

SEQ ID NO: 3132801 - RNA, 19 nt, Artificial Sequence
  Description of Artificial Sequence: Synthetic oligonucleotide
cuuguugaaguacuuuagc

SEQ ID NO: 3132802 - RNA, 19 nt, Artificial Sequence
  Description of Artificial Sequence: Synthetic oligonucleotide
cauggcuguaccaauuacc

SEQ ID NO: 3132803 - RNA, 19 nt, Artificial Sequence
  Description of Artificial Sequence: Synthetic oligonucleotide
aaaugaucucagccaguuc

SEQ ID NO: 3132804 - RNA, 19 nt, Artificial Sequence
  Description of Artificial Sequence: Synthetic oligonucleotide
aaaacaagucuggucgcuc

SEQ ID NO: 3132805 - RNA, 19 nt, Artificial Sequence
  Description of Artificial Sequence: Synthetic oligonucleotide
cugaggagcacgauguccc

SEQ ID NO: 3132806 - RNA, 19 nt, Artificial Sequence
  Description of Artificial Sequence: Synthetic oligonucleotide
uuuaccauggcuguaccaa

SEQ ID NO: 3132807 - RNA, 19 nt, Artificial Sequence
  Description of Artificial Sequence: Synthetic oligonucleotide
aaacaagucuggucgcucu

SEQ ID NO: 3132808 - RNA, 19 nt, Artificial Sequence
  Description of Artificial Sequence: Synthetic oligonucleotide
guaccaauuaccuucccca

SEQ ID NO: 3132809 - RNA, 19 nt, Artificial Sequence
  Description of Artificial Sequence: Synthetic oligonucleotide
uugaaguacuuuagcaagu

SEQ ID NO: 3132810 - RNA, 19 nt, Artificial Sequence
  Description of Artificial Sequence: Synthetic oligonucleotide
aaaguaggucuuccgcuug

SEQ ID NO: 3132811 - RNA, 19 nt, Artificial Sequence
  Description of Artificial Sequence: Synthetic oligonucleotide
caaguagggauccaaaaca

SEQ ID NO: 3132812 - RNA, 19 nt, Artificial Sequence
  Description of Artificial Sequence: Synthetic oligonucleotide
uagggauccaaaacaaguc

SEQ ID NO: 3132813 - RNA, 19 nt, Artificial Sequence
  Description of Artificial Sequence: Synthetic oligonucleotide
uguuucacaugcuuugauc

SEQ ID NO: 3132814 - RNA, 19 nt, Artificial Sequence
  Description of Artificial Sequence: Synthetic oligonucleotide
aaaaugaucucagccaguu

SEQ ID NO: 3132815 - RNA, 19 nt, Artificial Sequence
  Description of Artificial Sequence: Synthetic oligonucleotide
gucgcucuuacuuuagcag

SEQ ID NO: 3132816 - RNA, 19 nt, Artificial Sequence
  Description of Artificial Sequence: Synthetic oligonucleotide
accaauuaccuuccccacg

SEQ ID NO: 3132817 - RNA, 19 nt, Artificial Sequence
  Description of Artificial Sequence: Synthetic oligonucleotide
uaggucuuccgcuuguuga

SEQ ID NO: 3132818 - RNA, 19 nt, Artificial Sequence
  Description of Artificial Sequence: Synthetic oligonucleotide
gcuuugaucgugcagcggg

SEQ ID NO: 3132819 - RNA, 19 nt, Artificial Sequence
  Description of Artificial Sequence: Synthetic oligonucleotide
agggauccaaaacaagucu

SEQ ID NO: 3132820 - RNA, 19 nt, Artificial Sequence
  Description of Artificial Sequence: Synthetic oligonucleotide
aagggcaucaugggcaaag

SEQ ID NO: 3132821 - RNA, 19 nt, Artificial Sequence
  Description of Artificial Sequence: Synthetic oligonucleotide
uucauguuucacaugcuuu

SEQ ID NO: 3132822 - RNA, 19 nt, Artificial Sequence
  Description of Artificial Sequence: Synthetic oligonucleotide
acuuuagcaaguagggauc

SEQ ID NO: 3132823 - RNA, 19 nt, Artificial Sequence
  Description of Artificial Sequence: Synthetic oligonucleotide
ucacaugcuuugaucgugc

SEQ ID NO: 3132824 - RNA, 19 nt, Artificial Sequence
  Description of Artificial Sequence: Synthetic oligonucleotide
ucgugcagcgggcagagcu

SEQ ID NO: 3132825 - RNA, 19 nt, Artificial Sequence
  Description of Artificial Sequence: Synthetic oligonucleotide
ggcuguaccaauuaccuuc

SEQ ID NO: 3132826 - RNA, 19 nt, Artificial Sequence
  Description of Artificial Sequence: Synthetic oligonucleotide
ucuuuaccauggcuguacc

SEQ ID NO: 3132827 - RNA, 19 nt, Artificial Sequence
  Description of Artificial Sequence: Synthetic oligonucleotide
ucuuacuuuagcagucuuu

SEQ ID NO: 3132828 - RNA, 19 nt, Artificial Sequence
  Description of Artificial Sequence: Synthetic oligonucleotide
uucacaugcuuugaucgug

SEQ ID NO: 3132829 - RNA, 19 nt, Artificial Sequence
  Description of Artificial Sequence: Synthetic oligonucleotide
aucaugggcaaaguagguc

SEQ ID NO: 3132830 - RNA, 19 nt, Artificial Sequence
  Description of Artificial Sequence: Synthetic oligonucleotide
cacgauguccccgacacag

SEQ ID NO: 3132831 - RNA, 19 nt, Artificial Sequence
  Description of Artificial Sequence: Synthetic oligonucleotide
uuucacaugcuuugaucgu

SEQ ID NO: 3132832 - RNA, 19 nt, Artificial Sequence
  Description of Artificial Sequence: Synthetic oligonucleotide
ucgcucuuacuuuagcagu

SEQ ID NO: 3132833 - RNA, 19 nt, Artificial Sequence
  Description of Artificial Sequence: Synthetic oligonucleotide
augcuuugaucgugcagcg

SEQ ID NO: 3132834 - RNA, 19 nt, Artificial Sequence
  Description of Artificial Sequence: Synthetic oligonucleotide
agucuggucgcucuuacuu

SEQ ID NO: 3132835 - RNA, 19 nt, Artificial Sequence
  Description of Artificial Sequence: Synthetic oligonucleotide
cuuuagcaaguagggaucc

SEQ ID NO: 3132836 - RNA, 19 nt, Artificial Sequence
  Description of Artificial Sequence: Synthetic oligonucleotide
acaugcuuugaucgugcag

SEQ ID NO: 3132837 - RNA, 19 nt, Artificial Sequence
  Description of Artificial Sequence: Synthetic oligonucleotide
uuccgcuuguugaaguacu

SEQ ID NO: 3132838 - RNA, 19 nt, Artificial Sequence
  Description of Artificial Sequence: Synthetic oligonucleotide
agcucugaggagcacgaug

SEQ ID NO: 3132839 - RNA, 19 nt, Artificial Sequence
  Description of Artificial Sequence: Synthetic oligonucleotide
uuacuuuagcagucuuuac

SEQ ID NO: 3132840 - RNA, 19 nt, Artificial Sequence
  Description of Artificial Sequence: Synthetic oligonucleotide
agcaaguagggauccaaaa

SEQ ID NO: 3132841 - RNA, 19 nt, Artificial Sequence
  Description of Artificial Sequence: Synthetic oligonucleotide
aaguagggauccaaaacaa

SEQ ID NO: 3132842 - RNA, 19 nt, Artificial Sequence
  Description of Artificial Sequence: Synthetic oligonucleotide
uuagcaaguagggauccaa

SEQ ID NO: 3132843 - RNA, 19 nt, Artificial Sequence
  Description of Artificial Sequence: Synthetic oligonucleotide
ggauccaaaacaagucugg

SEQ ID NO: 3132844 - RNA, 19 nt, Artificial Sequence
  Description of Artificial Sequence: Synthetic oligonucleotide
uugaucgugcagcgggcag

SEQ ID NO: 3132845 - RNA, 19 nt, Artificial Sequence
  Description of Artificial Sequence: Synthetic oligonucleotide
auggcuguaccaauuaccu

SEQ ID NO: 3132846 - RNA, 19 nt, Artificial Sequence
  Description of Artificial Sequence: Synthetic oligonucleotide
aaguaggucuuccgcuugu

SEQ ID NO: 3132847 - RNA, 19 nt, Artificial Sequence
  Description of Artificial Sequence: Synthetic oligonucleotide
cuuugaucgugcagcgggc

SEQ ID NO: 3132848 - RNA, 19 nt, Artificial Sequence
  Description of Artificial Sequence: Synthetic oligonucleotide
ggcaaaguaggucuuccgc

SEQ ID NO: 3132849 - RNA, 19 nt, Artificial Sequence
  Description of Artificial Sequence: Synthetic oligonucleotide
agcagucuuuaccauggcu

SEQ ID NO: 3132850 - RNA, 19 nt, Artificial Sequence
  Description of Artificial Sequence: Synthetic oligonucleotide
ugaaguacuuuagcaagua

SEQ ID NO: 3132851 - RNA, 19 nt, Artificial Sequence
  Description of Artificial Sequence: Synthetic oligonucleotide
uaccaauuaccuuccccac

SEQ ID NO: 3132852 - RNA, 19 nt, Artificial Sequence
  Description of Artificial Sequence: Synthetic oligonucleotide
gcaaguagggauccaaaac

SEQ ID NO: 3132853 - RNA, 19 nt, Artificial Sequence
  Description of Artificial Sequence: Synthetic oligonucleotide
cuuacuuuagcagucuuua

SEQ ID NO: 3132854 - RNA, 19 nt, Artificial Sequence
  Description of Artificial Sequence: Synthetic oligonucleotide
gcagucuuuaccauggcug

SEQ ID NO: 3132855 - RNA, 19 nt, Artificial Sequence
  Description of Artificial Sequence: Synthetic oligonucleotide
aguagggauccaaaacaag

SEQ ID NO: 3132856 - RNA, 19 nt, Artificial Sequence
  Description of Artificial Sequence: Synthetic oligonucleotide
ucagccaguucauguuuca

SEQ ID NO: 3132857 - RNA, 19 nt, Artificial Sequence
  Description of Artificial Sequence: Synthetic oligonucleotide
uuaccuuccccacgaccca

SEQ ID NO: 3132858 - RNA, 19 nt, Artificial Sequence
  Description of Artificial Sequence: Synthetic oligonucleotide
gaucucagccaguucaugu

SEQ ID NO: 3132859 - RNA, 19 nt, Artificial Sequence
  Description of Artificial Sequence: Synthetic oligonucleotide
uagcaaguagggauccaaa

SEQ ID NO: 3132860 - RNA, 19 nt, Artificial Sequence
  Description of Artificial Sequence: Synthetic oligonucleotide
ucuggucgcucuuacuuua

SEQ ID NO: 3132861 - RNA, 19 nt, Artificial Sequence
  Description of Artificial Sequence: Synthetic oligonucleotide
ugggcaaaguaggucuucc

SEQ ID NO: 3132862 - RNA, 19 nt, Artificial Sequence
  Description of Artificial Sequence: Synthetic oligonucleotide
guagggauccaaaacaagu

SEQ ID NO: 3132863 - RNA, 19 nt, Artificial Sequence
  Description of Artificial Sequence: Synthetic oligonucleotide
aagucuggucgcucuuacu

SEQ ID NO: 3132864 - RNA, 19 nt, Artificial Sequence
  Description of Artificial Sequence: Synthetic oligonucleotide
gucuuuaccauggcuguac

SEQ ID NO: 3132865 - RNA, 19 nt, Artificial Sequence
  Description of Artificial Sequence: Synthetic oligonucleotide
uuaccauggcuguaccaau

SEQ ID NO: 3132866 - RNA, 19 nt, Artificial Sequence
  Description of Artificial Sequence: Synthetic oligonucleotide
uggucgcucuuacuuuagc

SEQ ID NO: 3132867 - RNA, 19 nt, Artificial Sequence
  Description of Artificial Sequence: Synthetic oligonucleotide
acacagcauugcugaaggg

SEQ ID NO: 3132868 - RNA, 19 nt, Artificial Sequence
  Description of Artificial Sequence: Synthetic oligonucleotide
uuugaucgugcagcgggca

SEQ ID NO: 3132869 - RNA, 19 nt, Artificial Sequence
  Description of Artificial Sequence: Synthetic oligonucleotide
cagagcucugaggagcacg

SEQ ID NO: 3132870 - RNA, 19 nt, Artificial Sequence
  Description of Artificial Sequence: Synthetic oligonucleotide
guaggucuuccgcuuguug

SEQ ID NO: 3132871 - RNA, 19 nt, Artificial Sequence
  Description of Artificial Sequence: Synthetic oligonucleotide
aacaagucuggucgcucuu

SEQ ID NO: 3132872 - RNA, 19 nt, Artificial Sequence
  Description of Artificial Sequence: Synthetic oligonucleotide
aucucagccaguucauguu

SEQ ID NO: 3132873 - RNA, 19 nt, Artificial Sequence
  Description of Artificial Sequence: Synthetic oligonucleotide
gcugaagggcaucaugggc

SEQ ID NO: 3132874 - RNA, 19 nt, Artificial Sequence
  Description of Artificial Sequence: Synthetic oligonucleotide
gcuuguugaaguacuuuag

SEQ ID NO: 3132875 - RNA, 19 nt, Artificial Sequence
  Description of Artificial Sequence: Synthetic oligonucleotide
agcauugcugaagggcauc

SEQ ID NO: 3132876 - RNA, 19 nt, Artificial Sequence
  Description of Artificial Sequence: Synthetic oligonucleotide
aggagcacgauguccccga

SEQ ID NO: 3132877 - RNA, 19 nt, Artificial Sequence
  Description of Artificial Sequence: Synthetic oligonucleotide
gaucgugcagcgggcagag

SEQ ID NO: 3132878 - RNA, 19 nt, Artificial Sequence
  Description of Artificial Sequence: Synthetic oligonucleotide
agcgggcagagcucugagg

SEQ ID NO: 3132879 - RNA, 19 nt, Artificial Sequence
  Description of Artificial Sequence: Synthetic oligonucleotide
cucagccaguucauguuuc

SEQ ID NO: 3132880 - RNA, 19 nt, Artificial Sequence
  Description of Artificial Sequence: Synthetic oligonucleotide
ugcuuugaucgugcagcgg

SEQ ID NO: 3132881 - RNA, 19 nt, Artificial Sequence
  Description of Artificial Sequence: Synthetic oligonucleotide
ucuuccgcuuguugaagua

SEQ ID NO: 3132882 - RNA, 19 nt, Artificial Sequence
  Description of Artificial Sequence: Synthetic oligonucleotide
caagucuggucgcucuuac

SEQ ID NO: 3132883 - RNA, 19 nt, Artificial Sequence
  Description of Artificial Sequence: Synthetic oligonucleotide
ugaucucagccaguucaug

SEQ ID NO: 3132884 - RNA, 19 nt, Artificial Sequence
  Description of Artificial Sequence: Synthetic oligonucleotide
gaggagcacgauguccccg

SEQ ID NO: 3132885 - RNA, 19 nt, Artificial Sequence
  Description of Artificial Sequence: Synthetic oligonucleotide
uccccgacacagcauugcu

SEQ ID NO: 3132886 - RNA, 19 nt, Artificial Sequence
  Description of Artificial Sequence: Synthetic oligonucleotide
ugaucgugcagcgggcaga

SEQ ID NO: 3132887 - RNA, 19 nt, Artificial Sequence
  Description of Artificial Sequence: Synthetic oligonucleotide
uaccauggcuguaccaauu

SEQ ID NO: 3132888 - RNA, 19 nt, Artificial Sequence
  Description of Artificial Sequence: Synthetic oligonucleotide
gggauccaaaacaagucug

SEQ ID NO: 3132889 - RNA, 19 nt, Artificial Sequence
  Description of Artificial Sequence: Synthetic oligonucleotide
auguccccgacacagcauu

SEQ ID NO: 3132890 - RNA, 19 nt, Artificial Sequence
  Description of Artificial Sequence: Synthetic oligonucleotide
cuuccgcuuguugaaguac

SEQ ID NO: 3132891 - RNA, 19 nt, Artificial Sequence
  Description of Artificial Sequence: Synthetic oligonucleotide
uagcagucuuuaccauggc

SEQ ID NO: 3132892 - RNA, 19 nt, Artificial Sequence
  Description of Artificial Sequence: Synthetic oligonucleotide
augggcaaaguaggucuuc

SEQ ID NO: 3132893 - RNA, 19 nt, Artificial Sequence
  Description of Artificial Sequence: Synthetic oligonucleotide
accauggcuguaccaauua

SEQ ID NO: 3132894 - RNA, 19 nt, Artificial Sequence
  Description of Artificial Sequence: Synthetic oligonucleotide
cuuuaccauggcuguacca

SEQ ID NO: 3132895 - RNA, 19 nt, Artificial Sequence
  Description of Artificial Sequence: Synthetic oligonucleotide
guacuuuagcaaguaggga

SEQ ID NO: 3132896 - RNA, 19 nt, Artificial Sequence
  Description of Artificial Sequence: Synthetic oligonucleotide
ccaaaacaagucuggucgc

SEQ ID NO: 3132897 - RNA, 19 nt, Artificial Sequence
  Description of Artificial Sequence: Synthetic oligonucleotide
gggcaaaguaggucuuccg

SEQ ID NO: 3132898 - RNA, 19 nt, Artificial Sequence
  Description of Artificial Sequence: Synthetic oligonucleotide
ggucgcucuuacuuuagca

SEQ ID NO: 3132899 - RNA, 19 nt, Artificial Sequence
  Description of Artificial Sequence: Synthetic oligonucleotide
cuggucgcucuuacuuuag

SEQ ID NO: 3132900 - RNA, 19 nt, Artificial Sequence
  Description of Artificial Sequence: Synthetic oligonucleotide
agagcucugaggagcacga

SEQ ID NO: 3132901 - RNA, 19 nt, Artificial Sequence
  Description of Artificial Sequence: Synthetic oligonucleotide
uccgcuuguugaaguacuu

SEQ ID NO: 3132902 - RNA, 19 nt, Artificial Sequence
  Description of Artificial Sequence: Synthetic oligonucleotide
acgauguccccgacacagc

SEQ ID NO: 3132903 - RNA, 19 nt, Artificial Sequence
  Description of Artificial Sequence: Synthetic oligonucleotide
uccccacgacccauuuggc

SEQ ID NO: 3132904 - RNA, 19 nt, Artificial Sequence
  Description of Artificial Sequence: Synthetic oligonucleotide
gauccaaaacaagucuggu

SEQ ID NO: 3132905 - RNA, 19 nt, Artificial Sequence
  Description of Artificial Sequence: Synthetic oligonucleotide
ccaauuaccuuccccacga

SEQ ID NO: 3132906 - RNA, 19 nt, Artificial Sequence
  Description of Artificial Sequence: Synthetic oligonucleotide
cauguuucacaugcuuuga

SEQ ID NO: 3132907 - RNA, 19 nt, Artificial Sequence
  Description of Artificial Sequence: Synthetic oligonucleotide
gcgggcagagcucugagga

SEQ ID NO: 3132908 - RNA, 19 nt, Artificial Sequence
  Description of Artificial Sequence: Synthetic oligonucleotide
guucauguuucacaugcuu

SEQ ID NO: 3132909 - RNA, 19 nt, Artificial Sequence
  Description of Artificial Sequence: Synthetic oligonucleotide
aguucauguuucacaugcu

SEQ ID NO: 3132910 - RNA, 19 nt, Artificial Sequence
  Description of Artificial Sequence: Synthetic oligonucleotide
gcuguaccaauuaccuucc

SEQ ID NO: 3132911 - RNA, 19 nt, Artificial Sequence
  Description of Artificial Sequence: Synthetic oligonucleotide
gcaaaguaggucuuccgcu

SEQ ID NO: 3132912 - RNA, 19 nt, Artificial Sequence
  Description of Artificial Sequence: Synthetic oligonucleotide
cuguaccaauuaccuuccc

SEQ ID NO: 3132913 - RNA, 19 nt, Artificial Sequence
  Description of Artificial Sequence: Synthetic oligonucleotide
gaaaaugaucucagccagu

SEQ ID NO: 3132914 - RNA, 19 nt, Artificial Sequence
  Description of Artificial Sequence: Synthetic oligonucleotide
cccgacacagcauugcuga

SEQ ID NO: 3132915 - RNA, 19 nt, Artificial Sequence
  Description of Artificial Sequence: Synthetic oligonucleotide
caauuaccuuccccacgac

SEQ ID NO: 3132916 - RNA, 19 nt, Artificial Sequence
  Description of Artificial Sequence: Synthetic oligonucleotide
uggcuguaccaauuaccuu

SEQ ID NO: 3132917 - RNA, 19 nt, Artificial Sequence
  Description of Artificial Sequence: Synthetic oligonucleotide
cagucuuuaccauggcugu

SEQ ID NO: 3132918 - RNA, 19 nt, Artificial Sequence
  Description of Artificial Sequence: Synthetic oligonucleotide
cuuccccacgacccauuug

SEQ ID NO: 3132919 - RNA, 19 nt, Artificial Sequence
  Description of Artificial Sequence: Synthetic oligonucleotide
gggcagagcucugaggagc

SEQ ID NO: 3132920 - RNA, 19 nt, Artificial Sequence
  Description of Artificial Sequence: Synthetic oligonucleotide
gagcacgauguccccgaca

SEQ ID NO: 3132921 - RNA, 19 nt, Artificial Sequence
  Description of Artificial Sequence: Synthetic oligonucleotide
guccccgacacagcauugc

SEQ ID NO: 3132922 - RNA, 19 nt, Artificial Sequence
  Description of Artificial Sequence: Synthetic oligonucleotide
augaucucagccaguucau

SEQ ID NO: 3132923 - RNA, 19 nt, Artificial Sequence
  Description of Artificial Sequence: Synthetic oligonucleotide
caaaguaggucuuccgcuu

SEQ ID NO: 3132924 - RNA, 19 nt, Artificial Sequence
  Description of Artificial Sequence: Synthetic oligonucleotide
cucugaggagcacgauguc

SEQ ID NO: 3132925 - RNA, 19 nt, Artificial Sequence
  Description of Artificial Sequence: Synthetic oligonucleotide
cacaugcuuugaucgugca

SEQ ID NO: 3132926 - RNA, 19 nt, Artificial Sequence
  Description of Artificial Sequence: Synthetic oligonucleotide
cagccaguucauguuucac

SEQ ID NO: 3132927 - RNA, 19 nt, Artificial Sequence
  Description of Artificial Sequence: Synthetic oligonucleotide
caucaugggcaaaguaggu

SEQ ID NO: 3132928 - RNA, 19 nt, Artificial Sequence
  Description of Artificial Sequence: Synthetic oligonucleotide
acaagucuggucgcucuua

SEQ ID NO: 3132929 - RNA, 19 nt, Artificial Sequence
  Description of Artificial Sequence: Synthetic oligonucleotide
agggcaucaugggcaaagu

SEQ ID NO: 3132930 - RNA, 19 nt, Artificial Sequence
  Description of Artificial Sequence: Synthetic oligonucleotide
ugcagcgggcagagcucug

SEQ ID NO: 3132931 - RNA, 19 nt, Artificial Sequence
  Description of Artificial Sequence: Synthetic oligonucleotide
cagcgggcagagcucugag

SEQ ID NO: 3132932 - RNA, 19 nt, Artificial Sequence
  Description of Artificial Sequence: Synthetic oligonucleotide
ccauggcuguaccaauuac

SEQ ID NO: 3132933 - RNA, 19 nt, Artificial Sequence
  Description of Artificial Sequence: Synthetic oligonucleotide
cuuuagcagucuuuaccau

SEQ ID NO: 3132934 - RNA, 19 nt, Artificial Sequence
  Description of Artificial Sequence: Synthetic oligonucleotide
ccaguucauguuucacaug

SEQ ID NO: 3132935 - RNA, 19 nt, Artificial Sequence
  Description of Artificial Sequence: Synthetic oligonucleotide
caaaacaagucuggucgcu

SEQ ID NO: 3132936 - RNA, 19 nt, Artificial Sequence
  Description of Artificial Sequence: Synthetic oligonucleotide
agucuuuaccauggcugua

SEQ ID NO: 3132937 - RNA, 19 nt, Artificial Sequence
  Description of Artificial Sequence: Synthetic oligonucleotide
gcucugaggagcacgaugu

SEQ ID NO: 3132938 - RNA, 19 nt, Artificial Sequence
  Description of Artificial Sequence: Synthetic oligonucleotide
cgcucuuacuuuagcaguc

SEQ ID NO: 3132939 - RNA, 19 nt, Artificial Sequence
  Description of Artificial Sequence: Synthetic oligonucleotide
aucgugcagcgggcagagc

SEQ ID NO: 3132940 - RNA, 19 nt, Artificial Sequence
  Description of Artificial Sequence: Synthetic oligonucleotide
aguaggucuuccgcuuguu

SEQ ID NO: 3132941 - RNA, 19 nt, Artificial Sequence
  Description of Artificial Sequence: Synthetic oligonucleotide
uaccuuccccacgacccau

SEQ ID NO: 3132942 - RNA, 19 nt, Artificial Sequence
  Description of Artificial Sequence: Synthetic oligonucleotide
cgacacagcauugcugaag

SEQ ID NO: 3132943 - RNA, 19 nt, Artificial Sequence
  Description of Artificial Sequence: Synthetic oligonucleotide
gcauugcugaagggcauca

SEQ ID NO: 3132944 - RNA, 19 nt, Artificial Sequence
  Description of Artificial Sequence: Synthetic oligonucleotide
ccccgacacagcauugcug

SEQ ID NO: 3132945 - RNA, 19 nt, Artificial Sequence
  Description of Artificial Sequence: Synthetic oligonucleotide
gucuggucgcucuuacuuu

SEQ ID NO: 3132946 - RNA, 19 nt, Artificial Sequence
  Description of Artificial Sequence: Synthetic oligonucleotide
cgcuuguugaaguacuuua

SEQ ID NO: 3132947 - RNA, 19 nt, Artificial Sequence
  Description of Artificial Sequence: Synthetic oligonucleotide
ggcagagcucugaggagca

SEQ ID NO: 3132948 - RNA, 19 nt, Artificial Sequence
  Description of Artificial Sequence: Synthetic oligonucleotide
gauguccccgacacagcau

SEQ ID NO: 3132949 - RNA, 19 nt, Artificial Sequence
  Description of Artificial Sequence: Synthetic oligonucleotide
caugggcaaaguaggucuu

SEQ ID NO: 3132950 - RNA, 19 nt, Artificial Sequence
  Description of Artificial Sequence: Synthetic oligonucleotide
ggagcacgauguccccgac

SEQ ID NO: 3132951 - RNA, 19 nt, Artificial Sequence
  Description of Artificial Sequence: Synthetic oligonucleotide
cucuuacuuuagcagucuu

SEQ ID NO: 3132952 - RNA, 19 nt, Artificial Sequence
  Description of Artificial Sequence: Synthetic oligonucleotide
cgauguccccgacacagca

SEQ ID NO: 3132953 - RNA, 19 nt, Artificial Sequence
  Description of Artificial Sequence: Synthetic oligonucleotide
cagcauugcugaagggcau

SEQ ID NO: 3132954 - RNA, 19 nt, Artificial Sequence
  Description of Artificial Sequence: Synthetic oligonucleotide
cgugcagcgggcagagcuc

SEQ ID NO: 3132955 - RNA, 19 nt, Artificial Sequence
  Description of Artificial Sequence: Synthetic oligonucleotide
gcucuuacuuuagcagucu

SEQ ID NO: 3132956 - RNA, 19 nt, Artificial Sequence
  Description of Artificial Sequence: Synthetic oligonucleotide
gcagcgggcagagcucuga

SEQ ID NO: 3132957 - RNA, 19 nt, Artificial Sequence
  Description of Artificial Sequence: Synthetic oligonucleotide
gugcagcgggcagagcucu

SEQ ID NO: 3132958 - RNA, 19 nt, Artificial Sequence
  Description of Artificial Sequence: Synthetic oligonucleotide
accuuccccacgacccauu

SEQ ID NO: 3132959 - RNA, 19 nt, Artificial Sequence
  Description of Artificial Sequence: Synthetic oligonucleotide
gcacgauguccccgacaca

SEQ ID NO: 3132960 - RNA, 19 nt, Artificial Sequence
  Description of Artificial Sequence: Synthetic oligonucleotide
cauugcugaagggcaucau

SEQ ID NO: 3132961 - RNA, 19 nt, Artificial Sequence
  Description of Artificial Sequence: Synthetic oligonucleotide
gcagagcucugaggagcac

SEQ ID NO: 3132962 - RNA, 19 nt, Artificial Sequence
  Description of Artificial Sequence: Synthetic oligonucleotide
gagcucugaggagcacgau

SEQ ID NO: 3132963 - RNA, 19 nt, Artificial Sequence
  Description of Artificial Sequence: Synthetic oligonucleotide
ccgacacagcauugcugaa

SEQ ID NO: 3132964 - RNA, 19 nt, Artificial Sequence
  Description of Artificial Sequence: Synthetic oligonucleotide
ccgcuuguugaaguacuuu

SEQ ID NO: 3132965 - RNA, 19 nt, Artificial Sequence
  Description of Artificial Sequence: Synthetic oligonucleotide
ccuuccccacgacccauuu

SEQ ID NO: 3132966 - RNA, 19 nt, Artificial Sequence
  Description of Artificial Sequence: Synthetic oligonucleotide
acugauguccuccagcugc

SEQ ID NO: 3132967 - RNA, 19 nt, Artificial Sequence
  Description of Artificial Sequence: Synthetic oligonucleotide
gacuuuaugcauaaaagcc

SEQ ID NO: 3132968 - RNA, 19 nt, Artificial Sequence
  Description of Artificial Sequence: Synthetic oligonucleotide
aaccagagaaggcaccugc

SEQ ID NO: 3132969 - RNA, 19 nt, Artificial Sequence
  Description of Artificial Sequence: Synthetic oligonucleotide
acuuuaugcauaaaagccc

SEQ ID NO: 3132970 - RNA, 19 nt, Artificial Sequence
  Description of Artificial Sequence: Synthetic oligonucleotide
cuuuaugcauaaaagcccc

SEQ ID NO: 3132971 - RNA, 19 nt, Artificial Sequence
  Description of Artificial Sequence: Synthetic oligonucleotide
ugcauaaaagccccagagg

SEQ ID NO: 3132972 - RNA, 19 nt, Artificial Sequence
  Description of Artificial Sequence: Synthetic oligonucleotide
uugcucauuccacagaacc

SEQ ID NO: 3132973 - RNA, 19 nt, Artificial Sequence
  Description of Artificial Sequence: Synthetic oligonucleotide
auaaaagccccagaggaac

SEQ ID NO: 3132974 - RNA, 19 nt, Artificial Sequence
  Description of Artificial Sequence: Synthetic oligonucleotide
agguugacgacacgggccc

SEQ ID NO: 3132975 - RNA, 19 nt, Artificial Sequence
  Description of Artificial Sequence: Synthetic oligonucleotide
uugagguugacgacacggg

SEQ ID NO: 3132976 - RNA, 19 nt, Artificial Sequence
  Description of Artificial Sequence: Synthetic oligonucleotide
guugagguugacgacacgg

SEQ ID NO: 3132977 - RNA, 19 nt, Artificial Sequence
  Description of Artificial Sequence: Synthetic oligonucleotide
auuccacagaaccagagaa

SEQ ID NO: 3132978 - RNA, 19 nt, Artificial Sequence
  Description of Artificial Sequence: Synthetic oligonucleotide
uagguggaggacuuccugg

SEQ ID NO: 3132979 - RNA, 19 nt, Artificial Sequence
  Description of Artificial Sequence: Synthetic oligonucleotide
uuaugcauaaaagccccag

SEQ ID NO: 3132980 - RNA, 19 nt, Artificial Sequence
  Description of Artificial Sequence: Synthetic oligonucleotide
uaugcauaaaagccccaga

SEQ ID NO: 3132981 - RNA, 19 nt, Artificial Sequence
  Description of Artificial Sequence: Synthetic oligonucleotide
agggcguugagguugacga

SEQ ID NO: 3132982 - RNA, 19 nt, Artificial Sequence
  Description of Artificial Sequence: Synthetic oligonucleotide
ugagguugacgacacgggc

SEQ ID NO: 3132983 - RNA, 19 nt, Artificial Sequence
  Description of Artificial Sequence: Synthetic oligonucleotide
aggguccucacugaugucc

SEQ ID NO: 3132984 - RNA, 19 nt, Artificial Sequence
  Description of Artificial Sequence: Synthetic oligonucleotide
aaaagccccagaggaacac

SEQ ID NO: 3132985 - RNA, 19 nt, Artificial Sequence
  Description of Artificial Sequence: Synthetic oligonucleotide
ucacugauguccuccagcu

SEQ ID NO: 3132986 - RNA, 19 nt, Artificial Sequence
  Description of Artificial Sequence: Synthetic oligonucleotide
gaggaacacagccacaguc

SEQ ID NO: 3132987 - RNA, 19 nt, Artificial Sequence
  Description of Artificial Sequence: Synthetic oligonucleotide
agagaaggcaccugcugag

SEQ ID NO: 3132988 - RNA, 19 nt, Artificial Sequence
  Description of Artificial Sequence: Synthetic oligonucleotide
ugcucauuccacagaacca

SEQ ID NO: 3132989 - RNA, 19 nt, Artificial Sequence
  Description of Artificial Sequence: Synthetic oligonucleotide
gcauaaaagccccagagga

SEQ ID NO: 3132990 - RNA, 19 nt, Artificial Sequence
  Description of Artificial Sequence: Synthetic oligonucleotide
ugcugagcaggcuuggcgc

SEQ ID NO: 3132991 - RNA, 19 nt, Artificial Sequence
  Description of Artificial Sequence: Synthetic oligonucleotide
uguugcagccaccuccuca

SEQ ID NO: 3132992 - RNA, 19 nt, Artificial Sequence
  Description of Artificial Sequence: Synthetic oligonucleotide
uuuaugcauaaaagcccca

SEQ ID NO: 3132993 - RNA, 19 nt, Artificial Sequence
  Description of Artificial Sequence: Synthetic oligonucleotide
aaggcaccugcugagcagg

SEQ ID NO: 3132994 - RNA, 19 nt, Artificial Sequence
  Description of Artificial Sequence: Synthetic oligonucleotide
acucuugcucauuccacag

SEQ ID NO: 3132995 - RNA, 19 nt, Artificial Sequence
  Description of Artificial Sequence: Synthetic oligonucleotide
uaaaagccccagaggaaca

SEQ ID NO: 3132996 - RNA, 19 nt, Artificial Sequence
  Description of Artificial Sequence: Synthetic oligonucleotide
acagaaccagagaaggcac

SEQ ID NO: 3132997 - RNA, 19 nt, Artificial Sequence
  Description of Artificial Sequence: Synthetic oligonucleotide
cucacuaguagguggagga

SEQ ID NO: 3132998 - RNA, 19 nt, Artificial Sequence
  Description of Artificial Sequence: Synthetic oligonucleotide
gaaggcaccugcugagcag

SEQ ID NO: 3132999 - RNA, 19 nt, Artificial Sequence
  Description of Artificial Sequence: Synthetic oligonucleotide
gagguugacgacacgggcc

SEQ ID NO: 3133000 - RNA, 19 nt, Artificial Sequence
  Description of Artificial Sequence: Synthetic oligonucleotide
guugcagccaccuccucac

SEQ ID NO: 3133001 - RNA, 19 nt, Artificial Sequence
  Description of Artificial Sequence: Synthetic oligonucleotide
cagaggaacacagccacag

SEQ ID NO: 3133002 - RNA, 19 nt, Artificial Sequence
  Description of Artificial Sequence: Synthetic oligonucleotide
uaguagguggaggacuucc

SEQ ID NO: 3133003 - RNA, 19 nt, Artificial Sequence
  Description of Artificial Sequence: Synthetic oligonucleotide
cugcugagcaggcuuggcg

SEQ ID NO: 3133004 - RNA, 19 nt, Artificial Sequence
  Description of Artificial Sequence: Synthetic oligonucleotide
acgacacgggcccagcgag

SEQ ID NO: 3133005 - RNA, 19 nt, Artificial Sequence
  Description of Artificial Sequence: Synthetic oligonucleotide
cacagaaccagagaaggca

SEQ ID NO: 3133006 - RNA, 19 nt, Artificial Sequence
  Description of Artificial Sequence: Synthetic oligonucleotide
cuuccuggcccacucuugc

SEQ ID NO: 3133007 - RNA, 19 nt, Artificial Sequence
  Description of Artificial Sequence: Synthetic oligonucleotide
cugccuaguuguugcagcc

SEQ ID NO: 3133008 - RNA, 19 nt, Artificial Sequence
  Description of Artificial Sequence: Synthetic oligonucleotide
ugacgacacgggcccagcg

SEQ ID NO: 3133009 - RNA, 19 nt, Artificial Sequence
  Description of Artificial Sequence: Synthetic oligonucleotide
guagguggaggacuuccug

SEQ ID NO: 3133010 - RNA, 19 nt, Artificial Sequence
  Description of Artificial Sequence: Synthetic oligonucleotide
cagaaccagagaaggcacc

SEQ ID NO: 3133011 - RNA, 19 nt, Artificial Sequence
  Description of Artificial Sequence: Synthetic oligonucleotide
ucaugagcagggcguugag

SEQ ID NO: 3133012 - RNA, 19 nt, Artificial Sequence
  Description of Artificial Sequence: Synthetic oligonucleotide
gacacgggcccagcgaggg

SEQ ID NO: 3133013 - RNA, 19 nt, Artificial Sequence
  Description of Artificial Sequence: Synthetic oligonucleotide
agaaccagagaaggcaccu

SEQ ID NO: 3133014 - RNA, 19 nt, Artificial Sequence
  Description of Artificial Sequence: Synthetic oligonucleotide
gcucauuccacagaaccag

SEQ ID NO: 3133015 - RNA, 19 nt, Artificial Sequence
  Description of Artificial Sequence: Synthetic oligonucleotide
cugauguccuccagcugcc

SEQ ID NO: 3133016 - RNA, 19 nt, Artificial Sequence
  Description of Artificial Sequence: Synthetic oligonucleotide
cauaaaagccccagaggaa

SEQ ID NO: 3133017 - RNA, 19 nt, Artificial Sequence
  Description of Artificial Sequence: Synthetic oligonucleotide
gagcagggcguugagguug

SEQ ID NO: 3133018 - RNA, 19 nt, Artificial Sequence
  Description of Artificial Sequence: Synthetic oligonucleotide
cacagccacagucaucaug

SEQ ID NO: 3133019 - RNA, 19 nt, Artificial Sequence
  Description of Artificial Sequence: Synthetic oligonucleotide
aggaacacagccacaguca

SEQ ID NO: 3133020 - RNA, 19 nt, Artificial Sequence
  Description of Artificial Sequence: Synthetic oligonucleotide
cacagucaucaugagcagg

SEQ ID NO: 3133021 - RNA, 19 nt, Artificial Sequence
  Description of Artificial Sequence: Synthetic oligonucleotide
aggcuuggcgcguggggac

SEQ ID NO: 3133022 - RNA, 19 nt, Artificial Sequence
  Description of Artificial Sequence: Synthetic oligonucleotide
cuugcucauuccacagaac

SEQ ID NO: 3133023 - RNA, 19 nt, Artificial Sequence
  Description of Artificial Sequence: Synthetic oligonucleotide
cagagaaggcaccugcuga

SEQ ID NO: 3133024 - RNA, 19 nt, Artificial Sequence
  Description of Artificial Sequence: Synthetic oligonucleotide
uccucacugauguccucca

SEQ ID NO: 3133025 - RNA, 19 nt, Artificial Sequence
  Description of Artificial Sequence: Synthetic oligonucleotide
caugagcagggcguugagg

SEQ ID NO: 3133026 - RNA, 19 nt, Artificial Sequence
  Description of Artificial Sequence: Synthetic oligonucleotide
cauuccacagaaccagaga

SEQ ID NO: 3133027 - RNA, 19 nt, Artificial Sequence
  Description of Artificial Sequence: Synthetic oligonucleotide
aucaugagcagggcguuga

SEQ ID NO: 3133028 - RNA, 19 nt, Artificial Sequence
  Description of Artificial Sequence: Synthetic oligonucleotide
aaagccccagaggaacaca

SEQ ID NO: 3133029 - RNA, 19 nt, Artificial Sequence
  Description of Artificial Sequence: Synthetic oligonucleotide
uccuggcccacucuugcuc

SEQ ID NO: 3133030 - RNA, 19 nt, Artificial Sequence
  Description of Artificial Sequence: Synthetic oligonucleotide
ccagcugccuaguuguugc

SEQ ID NO: 3133031 - RNA, 19 nt, Artificial Sequence
  Description of Artificial Sequence: Synthetic oligonucleotide
cacucuugcucauuccaca

SEQ ID NO: 3133032 - RNA, 19 nt, Artificial Sequence
  Description of Artificial Sequence: Synthetic oligonucleotide
agaggaacacagccacagu

SEQ ID NO: 3133033 - RNA, 19 nt, Artificial Sequence
  Description of Artificial Sequence: Synthetic oligonucleotide
ccuccucacuaguaggugg

SEQ ID NO: 3133034 - RNA, 19 nt, Artificial Sequence
  Description of Artificial Sequence: Synthetic oligonucleotide
ucacuaguagguggaggac

SEQ ID NO: 3133035 - RNA, 19 nt, Artificial Sequence
  Description of Artificial Sequence: Synthetic oligonucleotide
gccccagaggaacacagcc

SEQ ID NO: 3133036 - RNA, 19 nt, Artificial Sequence
  Description of Artificial Sequence: Synthetic oligonucleotide
gccaccuccucacuaguag

SEQ ID NO: 3133037 - RNA, 19 nt, Artificial Sequence
  Description of Artificial Sequence: Synthetic oligonucleotide
gacgacacgggcccagcga

SEQ ID NO: 3133038 - RNA, 19 nt, Artificial Sequence
  Description of Artificial Sequence: Synthetic oligonucleotide
guccucacugauguccucc

SEQ ID NO: 3133039 - RNA, 19 nt, Artificial Sequence
  Description of Artificial Sequence: Synthetic oligonucleotide
ugcagccaccuccucacua

SEQ ID NO: 3133040 - RNA, 19 nt, Artificial Sequence
  Description of Artificial Sequence: Synthetic oligonucleotide
gaaccagagaaggcaccug

SEQ ID NO: 3133041 - RNA, 19 nt, Artificial Sequence
  Description of Artificial Sequence: Synthetic oligonucleotide
gucaucaugagcagggcgu

SEQ ID NO: 3133042 - RNA, 19 nt, Artificial Sequence
  Description of Artificial Sequence: Synthetic oligonucleotide
gcagccaccuccucacuag

SEQ ID NO: 3133043 - RNA, 19 nt, Artificial Sequence
  Description of Artificial Sequence: Synthetic oligonucleotide
cuccucacuaguaggugga

SEQ ID NO: 3133044 - RNA, 19 nt, Artificial Sequence
  Description of Artificial Sequence: Synthetic oligonucleotide
acuaguagguggaggacuu

SEQ ID NO: 3133045 - RNA, 19 nt, Artificial Sequence
  Description of Artificial Sequence: Synthetic oligonucleotide
gcugagcaggcuuggcgcg

SEQ ID NO: 3133046 - RNA, 19 nt, Artificial Sequence
  Description of Artificial Sequence: Synthetic oligonucleotide
guugacgacacgggcccag

SEQ ID NO: 3133047 - RNA, 19 nt, Artificial Sequence
  Description of Artificial Sequence: Synthetic oligonucleotide
uaguuguugcagccaccuc

SEQ ID NO: 3133048 - RNA, 19 nt, Artificial Sequence
  Description of Artificial Sequence: Synthetic oligonucleotide
cucauuccacagaaccaga

SEQ ID NO: 3133049 - RNA, 19 nt, Artificial Sequence
  Description of Artificial Sequence: Synthetic oligonucleotide
agccccagaggaacacagc

SEQ ID NO: 3133050 - RNA, 19 nt, Artificial Sequence
  Description of Artificial Sequence: Synthetic oligonucleotide
ugccuaguuguugcagcca

SEQ ID NO: 3133051 - RNA, 19 nt, Artificial Sequence
  Description of Artificial Sequence: Synthetic oligonucleotide
cagggcguugagguugacg

SEQ ID NO: 3133052 - RNA, 19 nt, Artificial Sequence
  Description of Artificial Sequence: Synthetic oligonucleotide
caccugcugagcaggcuug

SEQ ID NO: 3133053 - RNA, 19 nt, Artificial Sequence
  Description of Artificial Sequence: Synthetic oligonucleotide
aguagguggaggacuuccu

SEQ ID NO: 3133054 - RNA, 19 nt, Artificial Sequence
  Description of Artificial Sequence: Synthetic oligonucleotide
ucaucaugagcagggcguu

SEQ ID NO: 3133055 - RNA, 19 nt, Artificial Sequence
  Description of Artificial Sequence: Synthetic oligonucleotide
ccaccuccucacuaguagg

SEQ ID NO: 3133056 - RNA, 19 nt, Artificial Sequence
  Description of Artificial Sequence: Synthetic oligonucleotide
accuccucacuaguaggug

SEQ ID NO: 3133057 - RNA, 19 nt, Artificial Sequence
  Description of Artificial Sequence: Synthetic oligonucleotide
uuccuggcccacucuugcu

SEQ ID NO: 3133058 - RNA, 19 nt, Artificial Sequence
  Description of Artificial Sequence: Synthetic oligonucleotide
gccuaguuguugcagccac

SEQ ID NO: 3133059 - RNA, 19 nt, Artificial Sequence
  Description of Artificial Sequence: Synthetic oligonucleotide
gauguccuccagcugccua

SEQ ID NO: 3133060 - RNA, 19 nt, Artificial Sequence
  Description of Artificial Sequence: Synthetic oligonucleotide
agcgaggguccucacugau

SEQ ID NO: 3133061 - RNA, 19 nt, Artificial Sequence
  Description of Artificial Sequence: Synthetic oligonucleotide
ugagcaggcuuggcgcgug

SEQ ID NO: 3133062 - RNA, 19 nt, Artificial Sequence
  Description of Artificial Sequence: Synthetic oligonucleotide
uugacgacacgggcccagc

SEQ ID NO: 3133063 - RNA, 19 nt, Artificial Sequence
  Description of Artificial Sequence: Synthetic oligonucleotide
cuaguuguugcagccaccu

SEQ ID NO: 3133064 - RNA, 19 nt, Artificial Sequence
  Description of Artificial Sequence: Synthetic oligonucleotide
cacugauguccuccagcug

SEQ ID NO: 3133065 - RNA, 19 nt, Artificial Sequence
  Description of Artificial Sequence: Synthetic oligonucleotide
gaacacagccacagucauc

SEQ ID NO: 3133066 - RNA, 19 nt, Artificial Sequence
  Description of Artificial Sequence: Synthetic oligonucleotide
cucuugcucauuccacaga

SEQ ID NO: 3133067 - RNA, 19 nt, Artificial Sequence
  Description of Artificial Sequence: Synthetic oligonucleotide
gcaggcuuggcgcgugggg

SEQ ID NO: 3133068 - RNA, 19 nt, Artificial Sequence
  Description of Artificial Sequence: Synthetic oligonucleotide
ggcguugagguugacgaca

SEQ ID NO: 3133069 - RNA, 19 nt, Artificial Sequence
  Description of Artificial Sequence: Synthetic oligonucleotide
gagcaggcuuggcgcgugg

SEQ ID NO: 3133070 - RNA, 19 nt, Artificial Sequence
  Description of Artificial Sequence: Synthetic oligonucleotide
accagagaaggcaccugcu

SEQ ID NO: 3133071 - RNA, 19 nt, Artificial Sequence
  Description of Artificial Sequence: Synthetic oligonucleotide
agcaggcuuggcgcguggg

SEQ ID NO: 3133072 - RNA, 19 nt, Artificial Sequence
  Description of Artificial Sequence: Synthetic oligonucleotide
ccuaguuguugcagccacc

SEQ ID NO: 3133073 - RNA, 19 nt, Artificial Sequence
  Description of Artificial Sequence: Synthetic oligonucleotide
ccacucuugcucauuccac

SEQ ID NO: 3133074 - RNA, 19 nt, Artificial Sequence
  Description of Artificial Sequence: Synthetic oligonucleotide
uguccuccagcugccuagu

SEQ ID NO: 3133075 - RNA, 19 nt, Artificial Sequence
  Description of Artificial Sequence: Synthetic oligonucleotide
cagccacagucaucaugag

SEQ ID NO: 3133076 - RNA, 19 nt, Artificial Sequence
  Description of Artificial Sequence: Synthetic oligonucleotide
guuguugcagccaccuccu

SEQ ID NO: 3133077 - RNA, 19 nt, Artificial Sequence
  Description of Artificial Sequence: Synthetic oligonucleotide
ccucacuaguagguggagg

SEQ ID NO: 3133078 - RNA, 19 nt, Artificial Sequence
  Description of Artificial Sequence: Synthetic oligonucleotide
caucaugagcagggcguug

SEQ ID NO: 3133079 - RNA, 19 nt, Artificial Sequence
  Description of Artificial Sequence: Synthetic oligonucleotide
aggcaccugcugagcaggc

SEQ ID NO: 3133080 - RNA, 19 nt, Artificial Sequence
  Description of Artificial Sequence: Synthetic oligonucleotide
uggcgcguggggacuggac

SEQ ID NO: 3133081 - RNA, 19 nt, Artificial Sequence
  Description of Artificial Sequence: Synthetic oligonucleotide
cacgggcccagcgaggguc

SEQ ID NO: 3133082 - RNA, 19 nt, Artificial Sequence
  Description of Artificial Sequence: Synthetic oligonucleotide
cuaguagguggaggacuuc

SEQ ID NO: 3133083 - RNA, 19 nt, Artificial Sequence
  Description of Artificial Sequence: Synthetic oligonucleotide
acgggcccagcgagggucc

SEQ ID NO: 3133084 - RNA, 19 nt, Artificial Sequence
  Description of Artificial Sequence: Synthetic oligonucleotide
uuguugcagccaccuccuc

SEQ ID NO: 3133085 - RNA, 19 nt, Artificial Sequence
  Description of Artificial Sequence: Synthetic oligonucleotide
ggcgcguggggacuggaca

SEQ ID NO: 3133086 - RNA, 19 nt, Artificial Sequence
  Description of Artificial Sequence: Synthetic oligonucleotide
cacuaguagguggaggacu

SEQ ID NO: 3133087 - RNA, 19 nt, Artificial Sequence
  Description of Artificial Sequence: Synthetic oligonucleotide
caccuccucacuaguaggu

SEQ ID NO: 3133088 - RNA, 19 nt, Artificial Sequence
  Description of Artificial Sequence: Synthetic oligonucleotide
gacuuccuggcccacucuu

SEQ ID NO: 3133089 - RNA, 19 nt, Artificial Sequence
  Description of Artificial Sequence: Synthetic oligonucleotide
cuuggcgcguggggacugg

SEQ ID NO: 3133090 - RNA, 19 nt, Artificial Sequence
  Description of Artificial Sequence: Synthetic oligonucleotide
gaggguccucacugauguc

SEQ ID NO: 3133091 - RNA, 19 nt, Artificial Sequence
  Description of Artificial Sequence: Synthetic oligonucleotide
caggcuuggcgcgugggga

SEQ ID NO: 3133092 - RNA, 19 nt, Artificial Sequence
  Description of Artificial Sequence: Synthetic oligonucleotide
ggaacacagccacagucau

SEQ ID NO: 3133093 - RNA, 19 nt, Artificial Sequence
  Description of Artificial Sequence: Synthetic oligonucleotide
cccacucuugcucauucca

SEQ ID NO: 3133094 - RNA, 19 nt, Artificial Sequence
  Description of Artificial Sequence: Synthetic oligonucleotide
agcagggcguugagguuga

SEQ ID NO: 3133095 - RNA, 19 nt, Artificial Sequence
  Description of Artificial Sequence: Synthetic oligonucleotide
gcguugagguugacgacac

SEQ ID NO: 3133096 - RNA, 19 nt, Artificial Sequence
  Description of Artificial Sequence: Synthetic oligonucleotide
gggcguugagguugacgac

SEQ ID NO: 3133097 - RNA, 19 nt, Artificial Sequence
  Description of Artificial Sequence: Synthetic oligonucleotide
uuggcgcguggggacugga

SEQ ID NO: 3133098 - RNA, 19 nt, Artificial Sequence
  Description of Artificial Sequence: Synthetic oligonucleotide
acacgggcccagcgagggu

SEQ ID NO: 3133099 - RNA, 19 nt, Artificial Sequence
  Description of Artificial Sequence: Synthetic oligonucleotide
acacagccacagucaucau

SEQ ID NO: 3133100 - RNA, 19 nt, Artificial Sequence
  Description of Artificial Sequence: Synthetic oligonucleotide
cagcgaggguccucacuga

SEQ ID NO: 3133101 - RNA, 19 nt, Artificial Sequence
  Description of Artificial Sequence: Synthetic oligonucleotide
ccccagaggaacacagcca

SEQ ID NO: 3133102 - RNA, 19 nt, Artificial Sequence
  Description of Artificial Sequence: Synthetic oligonucleotide
cagcugccuaguuguugca

SEQ ID NO: 3133103 - RNA, 19 nt, Artificial Sequence
  Description of Artificial Sequence: Synthetic oligonucleotide
gcgaggguccucacugaug

SEQ ID NO: 3133104 - RNA, 19 nt, Artificial Sequence
  Description of Artificial Sequence: Synthetic oligonucleotide
ccuggcccacucuugcuca

SEQ ID NO: 3133105 - RNA, 19 nt, Artificial Sequence
  Description of Artificial Sequence: Synthetic oligonucleotide
cgaggguccucacugaugu

SEQ ID NO: 3133106 - RNA, 19 nt, Artificial Sequence
  Description of Artificial Sequence: Synthetic oligonucleotide
agccaccuccucacuagua

SEQ ID NO: 3133107 - RNA, 19 nt, Artificial Sequence
  Description of Artificial Sequence: Synthetic oligonucleotide
cguugagguugacgacacg

SEQ ID NO: 3133108 - RNA, 19 nt, Artificial Sequence
  Description of Artificial Sequence: Synthetic oligonucleotide
ccugcugagcaggcuuggc

SEQ ID NO: 3133109 - RNA, 19 nt, Artificial Sequence
  Description of Artificial Sequence: Synthetic oligonucleotide
ccagaggaacacagccaca

SEQ ID NO: 3133110 - RNA, 19 nt, Artificial Sequence
  Description of Artificial Sequence: Synthetic oligonucleotide
uggcccacucuugcucauu

SEQ ID NO: 3133111 - RNA, 19 nt, Artificial Sequence
  Description of Artificial Sequence: Synthetic oligonucleotide
ggcccagcgaggguccuca

SEQ ID NO: 3133112 - RNA, 19 nt, Artificial Sequence
  Description of Artificial Sequence: Synthetic oligonucleotide
gcaccugcugagcaggcuu

SEQ ID NO: 3133113 - RNA, 19 nt, Artificial Sequence
  Description of Artificial Sequence: Synthetic oligonucleotide
cgacacgggcccagcgagg

SEQ ID NO: 3133114 - RNA, 19 nt, Artificial Sequence
  Description of Artificial Sequence: Synthetic oligonucleotide
gcuuggcgcguggggacug

SEQ ID NO: 3133115 - RNA, 19 nt, Artificial Sequence
  Description of Artificial Sequence: Synthetic oligonucleotide
cagccaccuccucacuagu

SEQ ID NO: 3133116 - RNA, 19 nt, Artificial Sequence
  Description of Artificial Sequence: Synthetic oligonucleotide
ggacuuccuggcccacucu

SEQ ID NO: 3133117 - RNA, 19 nt, Artificial Sequence
  Description of Artificial Sequence: Synthetic oligonucleotide
gguugacgacacgggccca

SEQ ID NO: 3133118 - RNA, 19 nt, Artificial Sequence
  Description of Artificial Sequence: Synthetic oligonucleotide
gcgcguggggacuggacau

SEQ ID NO: 3133119 - RNA, 19 nt, Artificial Sequence
  Description of Artificial Sequence: Synthetic oligonucleotide
cugagcaggcuuggcgcgu

SEQ ID NO: 3133120 - RNA, 19 nt, Artificial Sequence
  Description of Artificial Sequence: Synthetic oligonucleotide
gcguggggacuggacaucu

SEQ ID NO: 3133121 - RNA, 19 nt, Artificial Sequence
  Description of Artificial Sequence: Synthetic oligonucleotide
cuggcccacucuugcucau

SEQ ID NO: 3133122 - RNA, 19 nt, Artificial Sequence
  Description of Artificial Sequence: Synthetic oligonucleotide
guccuccagcugccuaguu

SEQ ID NO: 3133123 - RNA, 19 nt, Artificial Sequence
  Description of Artificial Sequence: Synthetic oligonucleotide
gcccagcgaggguccucac

SEQ ID NO: 3133124 - RNA, 19 nt, Artificial Sequence
  Description of Artificial Sequence: Synthetic oligonucleotide
ggcuuggcgcguggggacu

SEQ ID NO: 3133125 - RNA, 19 nt, Artificial Sequence
  Description of Artificial Sequence: Synthetic oligonucleotide
cgcguggggacuggacauc

SEQ ID NO: 3133126 - RNA, 19 nt, Artificial Sequence
  Description of Artificial Sequence: Synthetic oligonucleotide
cccagcgaggguccucacu

SEQ ID NO: 3133127 - RNA, 19 nt, Artificial Sequence
  Description of Artificial Sequence: Synthetic oligonucleotide
gggcccagcgaggguccuc

SEQ ID NO: 3133128 - RNA, 19 nt, Artificial Sequence
  Description of Artificial Sequence: Synthetic oligonucleotide
gcagggcguugagguugac

SEQ ID NO: 3133129 - RNA, 19 nt, Artificial Sequence
  Description of Artificial Sequence: Synthetic oligonucleotide
cgggcccagcgaggguccu

SEQ ID NO: 3133130 - RNA, 19 nt, Artificial Sequence
  Description of Artificial Sequence: Synthetic oligonucleotide
aauuaacccauuuauuucu

SEQ ID NO: 3133131 - RNA, 19 nt, Artificial Sequence
  Description of Artificial Sequence: Synthetic oligonucleotide
uuggucuugccacagaagg

SEQ ID NO: 3133132 - RNA, 19 nt, Artificial Sequence
  Description of Artificial Sequence: Synthetic oligonucleotide
aauuccuucagucuucuga

SEQ ID NO: 3133133 - RNA, 19 nt, Artificial Sequence
  Description of Artificial Sequence: Synthetic oligonucleotide
auuucuaguggcuaggcag

SEQ ID NO: 3133134 - RNA, 19 nt, Artificial Sequence
  Description of Artificial Sequence: Synthetic oligonucleotide
gauguaguguuguaggucc

SEQ ID NO: 3133135 - RNA, 19 nt, Artificial Sequence
  Description of Artificial Sequence: Synthetic oligonucleotide
aacccauuuauuucuagug

SEQ ID NO: 3133136 - RNA, 19 nt, Artificial Sequence
  Description of Artificial Sequence: Synthetic oligonucleotide
aguguuguagguccaggcc

SEQ ID NO: 3133137 - RNA, 19 nt, Artificial Sequence
  Description of Artificial Sequence: Synthetic oligonucleotide
uuucuaguggcuaggcagg

SEQ ID NO: 3133138 - RNA, 19 nt, Artificial Sequence
  Description of Artificial Sequence: Synthetic oligonucleotide
auuuauuucuaguggcuag

SEQ ID NO: 3133139 - RNA, 19 nt, Artificial Sequence
  Description of Artificial Sequence: Synthetic oligonucleotide
uuuucaugcaggaaccaca

SEQ ID NO: 3133140 - RNA, 19 nt, Artificial Sequence
  Description of Artificial Sequence: Synthetic oligonucleotide
ugugacagcagauguagug

SEQ ID NO: 3133141 - RNA, 19 nt, Artificial Sequence
  Description of Artificial Sequence: Synthetic oligonucleotide
uuucaugcaggaaccacag

SEQ ID NO: 3133142 - RNA, 19 nt, Artificial Sequence
  Description of Artificial Sequence: Synthetic oligonucleotide
aaggagcagguauacuugg

SEQ ID NO: 3133143 - RNA, 19 nt, Artificial Sequence
  Description of Artificial Sequence: Synthetic oligonucleotide
uuuauuucuaguggcuagg

SEQ ID NO: 3133144 - RNA, 19 nt, Artificial Sequence
  Description of Artificial Sequence: Synthetic oligonucleotide
agugccagaugccaacagc

SEQ ID NO: 3133145 - RNA, 19 nt, Artificial Sequence
  Description of Artificial Sequence: Synthetic oligonucleotide
aacagcucgucucuucauc

SEQ ID NO: 3133146 - RNA, 19 nt, Artificial Sequence
  Description of Artificial Sequence: Synthetic oligonucleotide
uggucuuucaauuccuuca

SEQ ID NO: 3133147 - RNA, 19 nt, Artificial Sequence
  Description of Artificial Sequence: Synthetic oligonucleotide
uuucaauuccuucagucuu

SEQ ID NO: 3133148 - RNA, 19 nt, Artificial Sequence
  Description of Artificial Sequence: Synthetic oligonucleotide
ucugauggcagacuucacu

SEQ ID NO: 3133149 - RNA, 19 nt, Artificial Sequence
  Description of Artificial Sequence: Synthetic oligonucleotide
gaaccacagugccagaugc

SEQ ID NO: 3133150 - RNA, 19 nt, Artificial Sequence
  Description of Artificial Sequence: Synthetic oligonucleotide
agaaggagcagguauacuu

SEQ ID NO: 3133151 - RNA, 19 nt, Artificial Sequence
  Description of Artificial Sequence: Synthetic oligonucleotide
cuguuuucaugcaggaacc

SEQ ID NO: 3133152 - RNA, 19 nt, Artificial Sequence
  Description of Artificial Sequence: Synthetic oligonucleotide
gaugccaacagcucgucuc

SEQ ID NO: 3133153 - RNA, 19 nt, Artificial Sequence
  Description of Artificial Sequence: Synthetic oligonucleotide
uuaacccauuuauuucuag

SEQ ID NO: 3133154 - RNA, 19 nt, Artificial Sequence
  Description of Artificial Sequence: Synthetic oligonucleotide
gcagacuucacugugacag

SEQ ID NO: 3133155 - RNA, 19 nt, Artificial Sequence
  Description of Artificial Sequence: Synthetic oligonucleotide
gcagauguaguguuguagg

SEQ ID NO: 3133156 - RNA, 19 nt, Artificial Sequence
  Description of Artificial Sequence: Synthetic oligonucleotide
uguuguagguccaggcccc

SEQ ID NO: 3133157 - RNA, 19 nt, Artificial Sequence
  Description of Artificial Sequence: Synthetic oligonucleotide
cugauggcagacuucacug

SEQ ID NO: 3133158 - RNA, 19 nt, Artificial Sequence
  Description of Artificial Sequence: Synthetic oligonucleotide
cuacuggucuuucaauucc

SEQ ID NO: 3133159 - RNA, 19 nt, Artificial Sequence
  Description of Artificial Sequence: Synthetic oligonucleotide
uauuucuaguggcuaggca

SEQ ID NO: 3133160 - RNA, 19 nt, Artificial Sequence
  Description of Artificial Sequence: Synthetic oligonucleotide
gauggcagacuucacugug

SEQ ID NO: 3133161 - RNA, 19 nt, Artificial Sequence
  Description of Artificial Sequence: Synthetic oligonucleotide
ucuacuggucuuucaauuc

SEQ ID NO: 3133162 - RNA, 19 nt, Artificial Sequence
  Description of Artificial Sequence: Synthetic oligonucleotide
uaacccauuuauuucuagu

SEQ ID NO: 3133163 - RNA, 19 nt, Artificial Sequence
  Description of Artificial Sequence: Synthetic oligonucleotide
uucagucuucugauggcag

SEQ ID NO: 3133164 - RNA, 19 nt, Artificial Sequence
  Description of Artificial Sequence: Synthetic oligonucleotide
uucacugugacagcagaug

SEQ ID NO: 3133165 - RNA, 19 nt, Artificial Sequence
  Description of Artificial Sequence: Synthetic oligonucleotide
guguuguagguccaggccc

SEQ ID NO: 3133166 - RNA, 19 nt, Artificial Sequence
  Description of Artificial Sequence: Synthetic oligonucleotide
agauguaguguuguagguc

SEQ ID NO: 3133167 - RNA, 19 nt, Artificial Sequence
  Description of Artificial Sequence: Synthetic oligonucleotide
ucuuggucuugccacagaa

SEQ ID NO: 3133168 - RNA, 19 nt, Artificial Sequence
  Description of Artificial Sequence: Synthetic oligonucleotide
uaguguuguagguccaggc

SEQ ID NO: 3133169 - RNA, 19 nt, Artificial Sequence
  Description of Artificial Sequence: Synthetic oligonucleotide
auuccuucagucuucugau

SEQ ID NO: 3133170 - RNA, 19 nt, Artificial Sequence
  Description of Artificial Sequence: Synthetic oligonucleotide
uucaauuccuucagucuuc

SEQ ID NO: 3133171 - RNA, 19 nt, Artificial Sequence
  Description of Artificial Sequence: Synthetic oligonucleotide
acagaaggagcagguauac

SEQ ID NO: 3133172 - RNA, 19 nt, Artificial Sequence
  Description of Artificial Sequence: Synthetic oligonucleotide
caggcagucacacuucuac

SEQ ID NO: 3133173 - RNA, 19 nt, Artificial Sequence
  Description of Artificial Sequence: Synthetic oligonucleotide
gaaggagcagguauacuug

SEQ ID NO: 3133174 - RNA, 19 nt, Artificial Sequence
  Description of Artificial Sequence: Synthetic oligonucleotide
acuucuacuggucuuucaa

SEQ ID NO: 3133175 - RNA, 19 nt, Artificial Sequence
  Description of Artificial Sequence: Synthetic oligonucleotide
uuauuucuaguggcuaggc

SEQ ID NO: 3133176 - RNA, 19 nt, Artificial Sequence
  Description of Artificial Sequence: Synthetic oligonucleotide
ggagcagguauacuuggcg

SEQ ID NO: 3133177 - RNA, 19 nt, Artificial Sequence
  Description of Artificial Sequence: Synthetic oligonucleotide
agcagauguaguguuguag

SEQ ID NO: 3133178 - RNA, 19 nt, Artificial Sequence
  Description of Artificial Sequence: Synthetic oligonucleotide
uguagguccaggccccacc

SEQ ID NO: 3133179 - RNA, 19 nt, Artificial Sequence
  Description of Artificial Sequence: Synthetic oligonucleotide
uucuacuggucuuucaauu

SEQ ID NO: 3133180 - RNA, 19 nt, Artificial Sequence
  Description of Artificial Sequence: Synthetic oligonucleotide
ccagccacuguuuucaugc

SEQ ID NO: 3133181 - RNA, 19 nt, Artificial Sequence
  Description of Artificial Sequence: Synthetic oligonucleotide
ucagucuucugauggcaga

SEQ ID NO: 3133182 - RNA, 19 nt, Artificial Sequence
  Description of Artificial Sequence: Synthetic oligonucleotide
aaccacagugccagaugcc

SEQ ID NO: 3133183 - RNA, 19 nt, Artificial Sequence
  Description of Artificial Sequence: Synthetic oligonucleotide
cccauuuauuucuaguggc

SEQ ID NO: 3133184 - RNA, 19 nt, Artificial Sequence
  Description of Artificial Sequence: Synthetic oligonucleotide
uacuggucuuucaauuccu

SEQ ID NO: 3133185 - RNA, 19 nt, Artificial Sequence
  Description of Artificial Sequence: Synthetic oligonucleotide
uggucuugccacagaagga

SEQ ID NO: 3133186 - RNA, 19 nt, Artificial Sequence
  Description of Artificial Sequence: Synthetic oligonucleotide
uguaguguuguagguccag

SEQ ID NO: 3133187 - RNA, 19 nt, Artificial Sequence
  Description of Artificial Sequence: Synthetic oligonucleotide
cuuggucuugccacagaag

SEQ ID NO: 3133188 - RNA, 19 nt, Artificial Sequence
  Description of Artificial Sequence: Synthetic oligonucleotide
ggucuuucaauuccuucag

SEQ ID NO: 3133189 - RNA, 19 nt, Artificial Sequence
  Description of Artificial Sequence: Synthetic oligonucleotide
gcagucacacuucuacugg

SEQ ID NO: 3133190 - RNA, 19 nt, Artificial Sequence
  Description of Artificial Sequence: Synthetic oligonucleotide
ucuucugauggcagacuuc

SEQ ID NO: 3133191 - RNA, 19 nt, Artificial Sequence
  Description of Artificial Sequence: Synthetic oligonucleotide
aggucucaggcagucacac

SEQ ID NO: 3133192 - RNA, 19 nt, Artificial Sequence
  Description of Artificial Sequence: Synthetic oligonucleotide
uggcagacuucacugugac

SEQ ID NO: 3133193 - RNA, 19 nt, Artificial Sequence
  Description of Artificial Sequence: Synthetic oligonucleotide
gccagaugccaacagcucg

SEQ ID NO: 3133194 - RNA, 19 nt, Artificial Sequence
  Description of Artificial Sequence: Synthetic oligonucleotide
ugcaggaaccacagugcca

SEQ ID NO: 3133195 - RNA, 19 nt, Artificial Sequence
  Description of Artificial Sequence: Synthetic oligonucleotide
ugauggcagacuucacugu

SEQ ID NO: 3133196 - RNA, 19 nt, Artificial Sequence
  Description of Artificial Sequence: Synthetic oligonucleotide
ggucuugccacagaaggag

SEQ ID NO: 3133197 - RNA, 19 nt, Artificial Sequence
  Description of Artificial Sequence: Synthetic oligonucleotide
agcucgucucuucaucuug

SEQ ID NO: 3133198 - RNA, 19 nt, Artificial Sequence
  Description of Artificial Sequence: Synthetic oligonucleotide
ggcagucacacuucuacug

SEQ ID NO: 3133199 - RNA, 19 nt, Artificial Sequence
  Description of Artificial Sequence: Synthetic oligonucleotide
guaguguuguagguccagg

SEQ ID NO: 3133200 - RNA, 19 nt, Artificial Sequence
  Description of Artificial Sequence: Synthetic oligonucleotide
cacagugccagaugccaac

SEQ ID NO: 3133201 - RNA, 19 nt, Artificial Sequence
  Description of Artificial Sequence: Synthetic oligonucleotide
uguuuucaugcaggaacca

SEQ ID NO: 3133202 - RNA, 19 nt, Artificial Sequence
  Description of Artificial Sequence: Synthetic oligonucleotide
ugacagcagauguaguguu

SEQ ID NO: 3133203 - RNA, 19 nt, Artificial Sequence
  Description of Artificial Sequence: Synthetic oligonucleotide
guuuucaugcaggaaccac

SEQ ID NO: 3133204 - RNA, 19 nt, Artificial Sequence
  Description of Artificial Sequence: Synthetic oligonucleotide
ucaauuccuucagucuucu

SEQ ID NO: 3133205 - RNA, 19 nt, Artificial Sequence
  Description of Artificial Sequence: Synthetic oligonucleotide
aggagcagguauacuuggc

SEQ ID NO: 3133206 - RNA, 19 nt, Artificial Sequence
  Description of Artificial Sequence: Synthetic oligonucleotide
augccaacagcucgucucu

SEQ ID NO: 3133207 - RNA, 19 nt, Artificial Sequence
  Description of Artificial Sequence: Synthetic oligonucleotide
uggcuaggcaggucucagg

SEQ ID NO: 3133208 - RNA, 19 nt, Artificial Sequence
  Description of Artificial Sequence: Synthetic oligonucleotide
ucucaggcagucacacuuc

SEQ ID NO: 3133209 - RNA, 19 nt, Artificial Sequence
  Description of Artificial Sequence: Synthetic oligonucleotide
ggcuaggcaggucucaggc

SEQ ID NO: 3133210 - RNA, 19 nt, Artificial Sequence
  Description of Artificial Sequence: Synthetic oligonucleotide
agacuucacugugacagca

SEQ ID NO: 3133211 - RNA, 19 nt, Artificial Sequence
  Description of Artificial Sequence: Synthetic oligonucleotide
ucgucucuucaucuugguc

SEQ ID NO: 3133212 - RNA, 19 nt, Artificial Sequence
  Description of Artificial Sequence: Synthetic oligonucleotide
cagacuucacugugacagc

SEQ ID NO: 3133213 - RNA, 19 nt, Artificial Sequence
  Description of Artificial Sequence: Synthetic oligonucleotide
uuccuucagucuucugaug

SEQ ID NO: 3133214 - RNA, 19 nt, Artificial Sequence
  Description of Artificial Sequence: Synthetic oligonucleotide
accacagugccagaugcca

SEQ ID NO: 3133215 - RNA, 19 nt, Artificial Sequence
  Description of Artificial Sequence: Synthetic oligonucleotide
gacuucacugugacagcag

SEQ ID NO: 3133216 - RNA, 19 nt, Artificial Sequence
  Description of Artificial Sequence: Synthetic oligonucleotide
aggcagucacacuucuacu

SEQ ID NO: 3133217 - RNA, 19 nt, Artificial Sequence
  Description of Artificial Sequence: Synthetic oligonucleotide
ggaaccacagugccagaug

SEQ ID NO: 3133218 - RNA, 19 nt, Artificial Sequence
  Description of Artificial Sequence: Synthetic oligonucleotide
uccaggccccaccagccac

SEQ ID NO: 3133219 - RNA, 19 nt, Artificial Sequence
  Description of Artificial Sequence: Synthetic oligonucleotide
cuaguggcuaggcaggucu

SEQ ID NO: 3133220 - RNA, 19 nt, Artificial Sequence
  Description of Artificial Sequence: Synthetic oligonucleotide
cagucuucugauggcagac

SEQ ID NO: 3133221 - RNA, 19 nt, Artificial Sequence
  Description of Artificial Sequence: Synthetic oligonucleotide
uucugauggcagacuucac

SEQ ID NO: 3133222 - RNA, 19 nt, Artificial Sequence
  Description of Artificial Sequence: Synthetic oligonucleotide
cauuuauuucuaguggcua

SEQ ID NO: 3133223 - RNA, 19 nt, Artificial Sequence
  Description of Artificial Sequence: Synthetic oligonucleotide
acacuucuacuggucuuuc

SEQ ID NO: 3133224 - RNA, 19 nt, Artificial Sequence
  Description of Artificial Sequence: Synthetic oligonucleotide
uagguccaggccccaccag

SEQ ID NO: 3133225 - RNA, 19 nt, Artificial Sequence
  Description of Artificial Sequence: Synthetic oligonucleotide
gcaggucucaggcagucac

SEQ ID NO: 3133226 - RNA, 19 nt, Artificial Sequence
  Description of Artificial Sequence: Synthetic oligonucleotide
cacagaaggagcagguaua

SEQ ID NO: 3133227 - RNA, 19 nt, Artificial Sequence
  Description of Artificial Sequence: Synthetic oligonucleotide
agaugccaacagcucgucu

SEQ ID NO: 3133228 - RNA, 19 nt, Artificial Sequence
  Description of Artificial Sequence: Synthetic oligonucleotide
gucucaggcagucacacuu

SEQ ID NO: 3133229 - RNA, 19 nt, Artificial Sequence
  Description of Artificial Sequence: Synthetic oligonucleotide
caucuuggucuugccacag

SEQ ID NO: 3133230 - RNA, 19 nt, Artificial Sequence
  Description of Artificial Sequence: Synthetic oligonucleotide
cuucagucuucugauggca

SEQ ID NO: 3133231 - RNA, 19 nt, Artificial Sequence
  Description of Artificial Sequence: Synthetic oligonucleotide
guagguccaggccccacca

SEQ ID NO: 3133232 - RNA, 19 nt, Artificial Sequence
  Description of Artificial Sequence: Synthetic oligonucleotide
uaggcaggucucaggcagu

SEQ ID NO: 3133233 - RNA, 19 nt, Artificial Sequence
  Description of Artificial Sequence: Synthetic oligonucleotide
uucuaguggcuaggcaggu

SEQ ID NO: 3133234 - RNA, 19 nt, Artificial Sequence
  Description of Artificial Sequence: Synthetic oligonucleotide
cagugccagaugccaacag

SEQ ID NO: 3133235 - RNA, 19 nt, Artificial Sequence
  Description of Artificial Sequence: Synthetic oligonucleotide
auuaacccauuuauuucua

SEQ ID NO: 3133236 - RNA, 19 nt, Artificial Sequence
  Description of Artificial Sequence: Synthetic oligonucleotide
ucaggcagucacacuucua

SEQ ID NO: 3133237 - RNA, 19 nt, Artificial Sequence
  Description of Artificial Sequence: Synthetic oligonucleotide
aucuuggucuugccacaga

SEQ ID NO: 3133238 - RNA, 19 nt, Artificial Sequence
  Description of Artificial Sequence: Synthetic oligonucleotide
agucuucugauggcagacu

SEQ ID NO: 3133239 - RNA, 19 nt, Artificial Sequence
  Description of Artificial Sequence: Synthetic oligonucleotide
uaguggcuaggcaggucuc

SEQ ID NO: 3133240 - RNA, 19 nt, Artificial Sequence
  Description of Artificial Sequence: Synthetic oligonucleotide
aggaaccacagugccagau

SEQ ID NO: 3133241 - RNA, 19 nt, Artificial Sequence
  Description of Artificial Sequence: Synthetic oligonucleotide
acagugccagaugccaaca

SEQ ID NO: 3133242 - RNA, 19 nt, Artificial Sequence
  Description of Artificial Sequence: Synthetic oligonucleotide
gcucgucucuucaucuugg

SEQ ID NO: 3133243 - RNA, 19 nt, Artificial Sequence
  Description of Artificial Sequence: Synthetic oligonucleotide
guggcuaggcaggucucag

SEQ ID NO: 3133244 - RNA, 19 nt, Artificial Sequence
  Description of Artificial Sequence: Synthetic oligonucleotide
aguggcuaggcaggucuca

SEQ ID NO: 3133245 - RNA, 19 nt, Artificial Sequence
  Description of Artificial Sequence: Synthetic oligonucleotide
gugacagcagauguagugu

SEQ ID NO: 3133246 - RNA, 19 nt, Artificial Sequence
  Description of Artificial Sequence: Synthetic oligonucleotide
ucuaguggcuaggcagguc

SEQ ID NO: 3133247 - RNA, 19 nt, Artificial Sequence
  Description of Artificial Sequence: Synthetic oligonucleotide
caauuccuucagucuucug

SEQ ID NO: 3133248 - RNA, 19 nt, Artificial Sequence
  Description of Artificial Sequence: Synthetic oligonucleotide
cagauguaguguuguaggu

SEQ ID NO: 3133249 - RNA, 19 nt, Artificial Sequence
  Description of Artificial Sequence: Synthetic oligonucleotide
gugccagaugccaacagcu

SEQ ID NO: 3133250 - RNA, 19 nt, Artificial Sequence
  Description of Artificial Sequence: Synthetic oligonucleotide
cacuucuacuggucuuuca

SEQ ID NO: 3133251 - RNA, 19 nt, Artificial Sequence
  Description of Artificial Sequence: Synthetic oligonucleotide
cgucucuucaucuuggucu

SEQ ID NO: 3133252 - RNA, 19 nt, Artificial Sequence
  Description of Artificial Sequence: Synthetic oligonucleotide
cacugugacagcagaugua

SEQ ID NO: 3133253 - RNA, 19 nt, Artificial Sequence
  Description of Artificial Sequence: Synthetic oligonucleotide
cuucuacuggucuuucaau

SEQ ID NO: 3133254 - RNA, 19 nt, Artificial Sequence
  Description of Artificial Sequence: Synthetic oligonucleotide
auguaguguuguaggucca

SEQ ID NO: 3133255 - RNA, 19 nt, Artificial Sequence
  Description of Artificial Sequence: Synthetic oligonucleotide
gucuuucaauuccuucagu

SEQ ID NO: 3133256 - RNA, 19 nt, Artificial Sequence
  Description of Artificial Sequence: Synthetic oligonucleotide
caggucucaggcagucaca

SEQ ID NO: 3133257 - RNA, 19 nt, Artificial Sequence
  Description of Artificial Sequence: Synthetic oligonucleotide
uuguagguccaggccccac

SEQ ID NO: 3133258 - RNA, 19 nt, Artificial Sequence
  Description of Artificial Sequence: Synthetic oligonucleotide
gucucuucaucuuggucuu

SEQ ID NO: 3133259 - RNA, 19 nt, Artificial Sequence
  Description of Artificial Sequence: Synthetic oligonucleotide
cuucacugugacagcagau

SEQ ID NO: 3133260 - RNA, 19 nt, Artificial Sequence
  Description of Artificial Sequence: Synthetic oligonucleotide
ccauuuauuucuaguggcu

SEQ ID NO: 3133261 - RNA, 19 nt, Artificial Sequence
  Description of Artificial Sequence: Synthetic oligonucleotide
cagaugccaacagcucguc

SEQ ID NO: 3133262 - RNA, 19 nt, Artificial Sequence
  Description of Artificial Sequence: Synthetic oligonucleotide
ccaacagcucgucucuuca

SEQ ID NO: 3133263 - RNA, 19 nt, Artificial Sequence
  Description of Artificial Sequence: Synthetic oligonucleotide
gccaacagcucgucucuuc

SEQ ID NO: 3133264 - RNA, 19 nt, Artificial Sequence
  Description of Artificial Sequence: Synthetic oligonucleotide
gcuaggcaggucucaggca

SEQ ID NO: 3133265 - RNA, 19 nt, Artificial Sequence
  Description of Artificial Sequence: Synthetic oligonucleotide
ccaccagccacuguuuuca

SEQ ID NO: 3133266 - RNA, 19 nt, Artificial Sequence
  Description of Artificial Sequence: Synthetic oligonucleotide
cucaggcagucacacuucu

SEQ ID NO: 3133267 - RNA, 19 nt, Artificial Sequence
  Description of Artificial Sequence: Synthetic oligonucleotide
ggcagacuucacugugaca

SEQ ID NO: 3133268 - RNA, 19 nt, Artificial Sequence
  Description of Artificial Sequence: Synthetic oligonucleotide
cccaccagccacuguuuuc

SEQ ID NO: 3133269 - RNA, 19 nt, Artificial Sequence
  Description of Artificial Sequence: Synthetic oligonucleotide
guuguagguccaggcccca

SEQ ID NO: 3133270 - RNA, 19 nt, Artificial Sequence
  Description of Artificial Sequence: Synthetic oligonucleotide
cucgucucuucaucuuggu

SEQ ID NO: 3133271 - RNA, 19 nt, Artificial Sequence
  Description of Artificial Sequence: Synthetic oligonucleotide
ccacagaaggagcagguau

SEQ ID NO: 3133272 - RNA, 19 nt, Artificial Sequence
  Description of Artificial Sequence: Synthetic oligonucleotide
cacacuucuacuggucuuu

SEQ ID NO: 3133273 - RNA, 19 nt, Artificial Sequence
  Description of Artificial Sequence: Synthetic oligonucleotide
ccagaugccaacagcucgu

SEQ ID NO: 3133274 - RNA, 19 nt, Artificial Sequence
  Description of Artificial Sequence: Synthetic oligonucleotide
ugccaacagcucgucucuu

SEQ ID NO: 3133275 - RNA, 19 nt, Artificial Sequence
  Description of Artificial Sequence: Synthetic oligonucleotide
caacagcucgucucuucau

SEQ ID NO: 3133276 - RNA, 19 nt, Artificial Sequence
  Description of Artificial Sequence: Synthetic oligonucleotide
caggaaccacagugccaga

SEQ ID NO: 3133277 - RNA, 19 nt, Artificial Sequence
  Description of Artificial Sequence: Synthetic oligonucleotide
ccacagugccagaugccaa

SEQ ID NO: 3133278 - RNA, 19 nt, Artificial Sequence
  Description of Artificial Sequence: Synthetic oligonucleotide
ggucucaggcagucacacu

SEQ ID NO: 3133279 - RNA, 19 nt, Artificial Sequence
  Description of Artificial Sequence: Synthetic oligonucleotide
ggcaggucucaggcaguca

SEQ ID NO: 3133280 - RNA, 19 nt, Artificial Sequence
  Description of Artificial Sequence: Synthetic oligonucleotide
ccaggccccaccagccacu

SEQ ID NO: 3133281 - RNA, 19 nt, Artificial Sequence
  Description of Artificial Sequence: Synthetic oligonucleotide
ccccaccagccacuguuuu

SEQ ID NO: 3133282 - RNA, 19 nt, Artificial Sequence
  Description of Artificial Sequence: Synthetic oligonucleotide
gccccaccagccacuguuu

SEQ ID NO: 3133283 - RNA, 19 nt, Artificial Sequence
  Description of Artificial Sequence: Synthetic oligonucleotide
aauacaaauagccauaauc

SEQ ID NO: 3133284 - RNA, 19 nt, Artificial Sequence
  Description of Artificial Sequence: Synthetic oligonucleotide
aaaauagugacuaauacac

SEQ ID NO: 3133285 - RNA, 19 nt, Artificial Sequence
  Description of Artificial Sequence: Synthetic oligonucleotide
cauaagaauacaaauagcc

SEQ ID NO: 3133286 - RNA, 19 nt, Artificial Sequence
  Description of Artificial Sequence: Synthetic oligonucleotide
aucauaagaauacaaauag

SEQ ID NO: 3133287 - RNA, 19 nt, Artificial Sequence
  Description of Artificial Sequence: Synthetic oligonucleotide
aaacuuuuaccucagaaga

SEQ ID NO: 3133288 - RNA, 19 nt, Artificial Sequence
  Description of Artificial Sequence: Synthetic oligonucleotide
uaagcaaugacuuuaaaau

SEQ ID NO: 3133289 - RNA, 19 nt, Artificial Sequence
  Description of Artificial Sequence: Synthetic oligonucleotide
aaaguaaacuuuuaccuca

SEQ ID NO: 3133290 - RNA, 19 nt, Artificial Sequence
  Description of Artificial Sequence: Synthetic oligonucleotide
uuugagaaacucaauaaug

SEQ ID NO: 3133291 - RNA, 19 nt, Artificial Sequence
  Description of Artificial Sequence: Synthetic oligonucleotide
aauucuuuuacauuccuaa

SEQ ID NO: 3133292 - RNA, 19 nt, Artificial Sequence
  Description of Artificial Sequence: Synthetic oligonucleotide
uaaacuuuuaccucagaag

SEQ ID NO: 3133293 - RNA, 19 nt, Artificial Sequence
  Description of Artificial Sequence: Synthetic oligonucleotide
uuaaaauagugacuaauac

SEQ ID NO: 3133294 - RNA, 19 nt, Artificial Sequence
  Description of Artificial Sequence: Synthetic oligonucleotide
uaaaauagugacuaauaca

SEQ ID NO: 3133295 - RNA, 19 nt, Artificial Sequence
  Description of Artificial Sequence: Synthetic oligonucleotide
acuuucucucuuuuaagcc

SEQ ID NO: 3133296 - RNA, 19 nt, Artificial Sequence
  Description of Artificial Sequence: Synthetic oligonucleotide
aauagugacuaauacacuu

SEQ ID NO: 3133297 - RNA, 19 nt, Artificial Sequence
  Description of Artificial Sequence: Synthetic oligonucleotide
uuuucuuuugagaaacuca

SEQ ID NO: 3133298 - RNA, 19 nt, Artificial Sequence
  Description of Artificial Sequence: Synthetic oligonucleotide
ucucuuuuaagccaaagua

SEQ ID NO: 3133299 - RNA, 19 nt, Artificial Sequence
  Description of Artificial Sequence: Synthetic oligonucleotide
uaaucauuaauaaaauuuu

SEQ ID NO: 3133300 - RNA, 19 nt, Artificial Sequence
  Description of Artificial Sequence: Synthetic oligonucleotide
aaucauuaauaaaauuuuc

SEQ ID NO: 3133301 - RNA, 19 nt, Artificial Sequence
  Description of Artificial Sequence: Synthetic oligonucleotide
auaaaauuuucuuuugaga

SEQ ID NO: 3133302 - RNA, 19 nt, Artificial Sequence
  Description of Artificial Sequence: Synthetic oligonucleotide
ucuuuuacauuccuaauau

SEQ ID NO: 3133303 - RNA, 19 nt, Artificial Sequence
  Description of Artificial Sequence: Synthetic oligonucleotide
uaauaaaauuuucuuuuga

SEQ ID NO: 3133304 - RNA, 19 nt, Artificial Sequence
  Description of Artificial Sequence: Synthetic oligonucleotide
auuccuaauauccucuguc

SEQ ID NO: 3133305 - RNA, 19 nt, Artificial Sequence
  Description of Artificial Sequence: Synthetic oligonucleotide
ucuuuuaagccaaaguaaa

SEQ ID NO: 3133306 - RNA, 19 nt, Artificial Sequence
  Description of Artificial Sequence: Synthetic oligonucleotide
aaugacuuuaaaauaguga

SEQ ID NO: 3133307 - RNA, 19 nt, Artificial Sequence
  Description of Artificial Sequence: Synthetic oligonucleotide
auaaucauuaauaaaauuu

SEQ ID NO: 3133308 - RNA, 19 nt, Artificial Sequence
  Description of Artificial Sequence: Synthetic oligonucleotide
aaaauaagcaaugacuuua

SEQ ID NO: 3133309 - RNA, 19 nt, Artificial Sequence
  Description of Artificial Sequence: Synthetic oligonucleotide
aaaauuuucuuuugagaaa

SEQ ID NO: 3133310 - RNA, 19 nt, Artificial Sequence
  Description of Artificial Sequence: Synthetic oligonucleotide
ucuuuugagaaacucaaua

SEQ ID NO: 3133311 - RNA, 19 nt, Artificial Sequence
  Description of Artificial Sequence: Synthetic oligonucleotide
uuuuaagccaaaguaaacu

SEQ ID NO: 3133312 - RNA, 19 nt, Artificial Sequence
  Description of Artificial Sequence: Synthetic oligonucleotide
agaaacucaauaaugcuuc

SEQ ID NO: 3133313 - RNA, 19 nt, Artificial Sequence
  Description of Artificial Sequence: Synthetic oligonucleotide
ucauaagaauacaaauagc

SEQ ID NO: 3133314 - RNA, 19 nt, Artificial Sequence
  Description of Artificial Sequence: Synthetic oligonucleotide
uuuugagaaacucaauaau

SEQ ID NO: 3133315 - RNA, 19 nt, Artificial Sequence
  Description of Artificial Sequence: Synthetic oligonucleotide
uucaaggcuaacaucauaa

SEQ ID NO: 3133316 - RNA, 19 nt, Artificial Sequence
  Description of Artificial Sequence: Synthetic oligonucleotide
auacaaauagccauaauca

SEQ ID NO: 3133317 - RNA, 19 nt, Artificial Sequence
  Description of Artificial Sequence: Synthetic oligonucleotide
cagaagauaauucuuuuac

SEQ ID NO: 3133318 - RNA, 19 nt, Artificial Sequence
  Description of Artificial Sequence: Synthetic oligonucleotide
aaggcuaacaucauaagaa

SEQ ID NO: 3133319 - RNA, 19 nt, Artificial Sequence
  Description of Artificial Sequence: Synthetic oligonucleotide
auauccucuguccagagcu

SEQ ID NO: 3133320 - RNA, 19 nt, Artificial Sequence
  Description of Artificial Sequence: Synthetic oligonucleotide
auaagcaaugacuuuaaaa

SEQ ID NO: 3133321 - RNA, 19 nt, Artificial Sequence
  Description of Artificial Sequence: Synthetic oligonucleotide
cucaauaaugcuuccauuc

SEQ ID NO: 3133322 - RNA, 19 nt, Artificial Sequence
  Description of Artificial Sequence: Synthetic oligonucleotide
acaucauaagaauacaaau

SEQ ID NO: 3133323 - RNA, 19 nt, Artificial Sequence
  Description of Artificial Sequence: Synthetic oligonucleotide
agcaaugacuuuaaaauag

SEQ ID NO: 3133324 - RNA, 19 nt, Artificial Sequence
  Description of Artificial Sequence: Synthetic oligonucleotide
gacuaauacacuuucucuc

SEQ ID NO: 3133325 - RNA, 19 nt, Artificial Sequence
  Description of Artificial Sequence: Synthetic oligonucleotide
agccaaaguaaacuuuuac

SEQ ID NO: 3133326 - RNA, 19 nt, Artificial Sequence
  Description of Artificial Sequence: Synthetic oligonucleotide
uacacuuucucucuuuuaa

SEQ ID NO: 3133327 - RNA, 19 nt, Artificial Sequence
  Description of Artificial Sequence: Synthetic oligonucleotide
uucuuuuacauuccuaaua

SEQ ID NO: 3133328 - RNA, 19 nt, Artificial Sequence
  Description of Artificial Sequence: Synthetic oligonucleotide
acuaauacacuuucucucu

SEQ ID NO: 3133329 - RNA, 19 nt, Artificial Sequence
  Description of Artificial Sequence: Synthetic oligonucleotide
ugacuaauacacuuucucu

SEQ ID NO: 3133330 - RNA, 19 nt, Artificial Sequence
  Description of Artificial Sequence: Synthetic oligonucleotide
auuuucuuuugagaaacuc

SEQ ID NO: 3133331 - RNA, 19 nt, Artificial Sequence
  Description of Artificial Sequence: Synthetic oligonucleotide
uuuaagccaaaguaaacuu

SEQ ID NO: 3133332 - RNA, 19 nt, Artificial Sequence
  Description of Artificial Sequence: Synthetic oligonucleotide
aauagccauaaucauuaau

SEQ ID NO: 3133333 - RNA, 19 nt, Artificial Sequence
  Description of Artificial Sequence: Synthetic oligonucleotide
ugacuuuaaaauagugacu

SEQ ID NO: 3133334 - RNA, 19 nt, Artificial Sequence
  Description of Artificial Sequence: Synthetic oligonucleotide
aucauuaauaaaauuuucu

SEQ ID NO: 3133335 - RNA, 19 nt, Artificial Sequence
  Description of Artificial Sequence: Synthetic oligonucleotide
agaagauaauucuuuuaca

SEQ ID NO: 3133336 - RNA, 19 nt, Artificial Sequence
  Description of Artificial Sequence: Synthetic oligonucleotide
caaaguaaacuuuuaccuc

SEQ ID NO: 3133337 - RNA, 19 nt, Artificial Sequence
  Description of Artificial Sequence: Synthetic oligonucleotide
aacaucauaagaauacaaa

SEQ ID NO: 3133338 - RNA, 19 nt, Artificial Sequence
  Description of Artificial Sequence: Synthetic oligonucleotide
uuccuaauauccucugucc

SEQ ID NO: 3133339 - RNA, 19 nt, Artificial Sequence
  Description of Artificial Sequence: Synthetic oligonucleotide
cacuuucucucuuuuaagc

SEQ ID NO: 3133340 - RNA, 19 nt, Artificial Sequence
  Description of Artificial Sequence: Synthetic oligonucleotide
uacauuccuaauauccucu

SEQ ID NO: 3133341 - RNA, 19 nt, Artificial Sequence
  Description of Artificial Sequence: Synthetic oligonucleotide
uaagccaaaguaaacuuuu

SEQ ID NO: 3133342 - RNA, 19 nt, Artificial Sequence
  Description of Artificial Sequence: Synthetic oligonucleotide
uuaccucagaagauaauuc

SEQ ID NO: 3133343 - RNA, 19 nt, Artificial Sequence
  Description of Artificial Sequence: Synthetic oligonucleotide
gacuuuaaaauagugacua

SEQ ID NO: 3133344 - RNA, 19 nt, Artificial Sequence
  Description of Artificial Sequence: Synthetic oligonucleotide
aagcaaugacuuuaaaaua

SEQ ID NO: 3133345 - RNA, 19 nt, Artificial Sequence
  Description of Artificial Sequence: Synthetic oligonucleotide
auagccauaaucauuaaua

SEQ ID NO: 3133346 - RNA, 19 nt, Artificial Sequence
  Description of Artificial Sequence: Synthetic oligonucleotide
uaccucagaagauaauucu

SEQ ID NO: 3133347 - RNA, 19 nt, Artificial Sequence
  Description of Artificial Sequence: Synthetic oligonucleotide
auaagaauacaaauagcca

SEQ ID NO: 3133348 - RNA, 19 nt, Artificial Sequence
  Description of Artificial Sequence: Synthetic oligonucleotide
cuuuuaagccaaaguaaac

SEQ ID NO: 3133349 - RNA, 19 nt, Artificial Sequence
  Description of Artificial Sequence: Synthetic oligonucleotide
uuacauuccuaauauccuc

SEQ ID NO: 3133350 - RNA, 19 nt, Artificial Sequence
  Description of Artificial Sequence: Synthetic oligonucleotide
uacaaauagccauaaucau

SEQ ID NO: 3133351 - RNA, 19 nt, Artificial Sequence
  Description of Artificial Sequence: Synthetic oligonucleotide
uccuaauauccucugucca

SEQ ID NO: 3133352 - RNA, 19 nt, Artificial Sequence
  Description of Artificial Sequence: Synthetic oligonucleotide
uuuaccucagaagauaauu

SEQ ID NO: 3133353 - RNA, 19 nt, Artificial Sequence
  Description of Artificial Sequence: Synthetic oligonucleotide
aauacacuuucucucuuuu

SEQ ID NO: 3133354 - RNA, 19 nt, Artificial Sequence
  Description of Artificial Sequence: Synthetic oligonucleotide
ucaaggcuaacaucauaag

SEQ ID NO: 3133355 - RNA, 19 nt, Artificial Sequence
  Description of Artificial Sequence: Synthetic oligonucleotide
cuuuugagaaacucaauaa

SEQ ID NO: 3133356 - RNA, 19 nt, Artificial Sequence
  Description of Artificial Sequence: Synthetic oligonucleotide
uuaagccaaaguaaacuuu

SEQ ID NO: 3133357 - RNA, 19 nt, Artificial Sequence
  Description of Artificial Sequence: Synthetic oligonucleotide
uagccauaaucauuaauaa

SEQ ID NO: 3133358 - RNA, 19 nt, Artificial Sequence
  Description of Artificial Sequence: Synthetic oligonucleotide
gccaaaguaaacuuuuacc

SEQ ID NO: 3133359 - RNA, 19 nt, Artificial Sequence
  Description of Artificial Sequence: Synthetic oligonucleotide
gugacuaauacacuuucuc

SEQ ID NO: 3133360 - RNA, 19 nt, Artificial Sequence
  Description of Artificial Sequence: Synthetic oligonucleotide
uaaugcuuccauuccaaaa

SEQ ID NO: 3133361 - RNA, 19 nt, Artificial Sequence
  Description of Artificial Sequence: Synthetic oligonucleotide
guaaacuuuuaccucagaa

SEQ ID NO: 3133362 - RNA, 19 nt, Artificial Sequence
  Description of Artificial Sequence: Synthetic oligonucleotide
uagugacuaauacacuuuc

SEQ ID NO: 3133363 - RNA, 19 nt, Artificial Sequence
  Description of Artificial Sequence: Synthetic oligonucleotide
caucauaagaauacaaaua

SEQ ID NO: 3133364 - RNA, 19 nt, Artificial Sequence
  Description of Artificial Sequence: Synthetic oligonucleotide
gaaacucaauaaugcuucc

SEQ ID NO: 3133365 - RNA, 19 nt, Artificial Sequence
  Description of Artificial Sequence: Synthetic oligonucleotide
guguucaaggcuaacauca

SEQ ID NO: 3133366 - RNA, 19 nt, Artificial Sequence
  Description of Artificial Sequence: Synthetic oligonucleotide
aauaaugcuuccauuccaa

SEQ ID NO: 3133367 - RNA, 19 nt, Artificial Sequence
  Description of Artificial Sequence: Synthetic oligonucleotide
ucagaagauaauucuuuua

SEQ ID NO: 3133368 - RNA, 19 nt, Artificial Sequence
  Description of Artificial Sequence: Synthetic oligonucleotide
aauaagcaaugacuuuaaa

SEQ ID NO: 3133369 - RNA, 19 nt, Artificial Sequence
  Description of Artificial Sequence: Synthetic oligonucleotide
gcuaacaucauaagaauac

SEQ ID NO: 3133370 - RNA, 19 nt, Artificial Sequence
  Description of Artificial Sequence: Synthetic oligonucleotide
cucuuuuaagccaaaguaa

SEQ ID NO: 3133371 - RNA, 19 nt, Artificial Sequence
  Description of Artificial Sequence: Synthetic oligonucleotide
ucuguccagagcugaaccc

SEQ ID NO: 3133372 - RNA, 19 nt, Artificial Sequence
  Description of Artificial Sequence: Synthetic oligonucleotide
aagaauacaaauagccaua

SEQ ID NO: 3133373 - RNA, 19 nt, Artificial Sequence
  Description of Artificial Sequence: Synthetic oligonucleotide
gccauaaucauuaauaaaa

SEQ ID NO: 3133374 - RNA, 19 nt, Artificial Sequence
  Description of Artificial Sequence: Synthetic oligonucleotide
ugaaccccauuuuaaacua

SEQ ID NO: 3133375 - RNA, 19 nt, Artificial Sequence
  Description of Artificial Sequence: Synthetic oligonucleotide
uguguucaaggcuaacauc

SEQ ID NO: 3133376 - RNA, 19 nt, Artificial Sequence
  Description of Artificial Sequence: Synthetic oligonucleotide
uaauauccucuguccagag

SEQ ID NO: 3133377 - RNA, 19 nt, Artificial Sequence
  Description of Artificial Sequence: Synthetic oligonucleotide
aaacucaauaaugcuucca

SEQ ID NO: 3133378 - RNA, 19 nt, Artificial Sequence
  Description of Artificial Sequence: Synthetic oligonucleotide
aaauagugacuaauacacu

SEQ ID NO: 3133379 - RNA, 19 nt, Artificial Sequence
  Description of Artificial Sequence: Synthetic oligonucleotide
aaguaaacuuuuaccucag

SEQ ID NO: 3133380 - RNA, 19 nt, Artificial Sequence
  Description of Artificial Sequence: Synthetic oligonucleotide
aaauaagcaaugacuuuaa

SEQ ID NO: 3133381 - RNA, 19 nt, Artificial Sequence
  Description of Artificial Sequence: Synthetic oligonucleotide
cucuguccagagcugaacc

SEQ ID NO: 3133382 - RNA, 19 nt, Artificial Sequence
  Description of Artificial Sequence: Synthetic oligonucleotide
cuuuuacauuccuaauauc

SEQ ID NO: 3133383 - RNA, 19 nt, Artificial Sequence
  Description of Artificial Sequence: Synthetic oligonucleotide
agccauaaucauuaauaaa

SEQ ID NO: 3133384 - RNA, 19 nt, Artificial Sequence
  Description of Artificial Sequence: Synthetic oligonucleotide
cauuaauaaaauuuucuuu

SEQ ID NO: 3133385 - RNA, 19 nt, Artificial Sequence
  Description of Artificial Sequence: Synthetic oligonucleotide
caaggcuaacaucauaaga

SEQ ID NO: 3133386 - RNA, 19 nt, Artificial Sequence
  Description of Artificial Sequence: Synthetic oligonucleotide
uuuuaccucagaagauaau

SEQ ID NO: 3133387 - RNA, 19 nt, Artificial Sequence
  Description of Artificial Sequence: Synthetic oligonucleotide
acauuccuaauauccucug

SEQ ID NO: 3133388 - RNA, 19 nt, Artificial Sequence
  Description of Artificial Sequence: Synthetic oligonucleotide
aggcuaacaucauaagaau

SEQ ID NO: 3133389 - RNA, 19 nt, Artificial Sequence
  Description of Artificial Sequence: Synthetic oligonucleotide
agagcugaaccccauuuua

SEQ ID NO: 3133390 - RNA, 19 nt, Artificial Sequence
  Description of Artificial Sequence: Synthetic oligonucleotide
aauuuucuuuugagaaacu

SEQ ID NO: 3133391 - RNA, 19 nt, Artificial Sequence
  Description of Artificial Sequence: Synthetic oligonucleotide
aacuuuuaccucagaagau

SEQ ID NO: 3133392 - RNA, 19 nt, Artificial Sequence
  Description of Artificial Sequence: Synthetic oligonucleotide
aaauagccauaaucauuaa

SEQ ID NO: 3133393 - RNA, 19 nt, Artificial Sequence
  Description of Artificial Sequence: Synthetic oligonucleotide
acaaauagccauaaucauu

SEQ ID NO: 3133394 - RNA, 19 nt, Artificial Sequence
  Description of Artificial Sequence: Synthetic oligonucleotide
ucucucuuuuaagccaaag

SEQ ID NO: 3133395 - RNA, 19 nt, Artificial Sequence
  Description of Artificial Sequence: Synthetic oligonucleotide
agaauacaaauagccauaa

SEQ ID NO: 3133396 - RNA, 19 nt, Artificial Sequence
  Description of Artificial Sequence: Synthetic oligonucleotide
caauaaugcuuccauucca

SEQ ID NO: 3133397 - RNA, 19 nt, Artificial Sequence
  Description of Artificial Sequence: Synthetic oligonucleotide
uguccagagcugaacccca

SEQ ID NO: 3133398 - RNA, 19 nt, Artificial Sequence
  Description of Artificial Sequence: Synthetic oligonucleotide
acuuuuaccucagaagaua

SEQ ID NO: 3133399 - RNA, 19 nt, Artificial Sequence
  Description of Artificial Sequence: Synthetic oligonucleotide
ccuaauauccucuguccag

SEQ ID NO: 3133400 - RNA, 19 nt, Artificial Sequence
  Description of Artificial Sequence: Synthetic oligonucleotide
cuuuuaccucagaagauaa

SEQ ID NO: 3133401 - RNA, 19 nt, Artificial Sequence
  Description of Artificial Sequence: Synthetic oligonucleotide
uaauacacuuucucucuuu

SEQ ID NO: 3133402 - RNA, 19 nt, Artificial Sequence
  Description of Artificial Sequence: Synthetic oligonucleotide
uguucaaggcuaacaucau

SEQ ID NO: 3133403 - RNA, 19 nt, Artificial Sequence
  Description of Artificial Sequence: Synthetic oligonucleotide
cuaacaucauaagaauaca

SEQ ID NO: 3133404 - RNA, 19 nt, Artificial Sequence
  Description of Artificial Sequence: Synthetic oligonucleotide
agcugaaccccauuuuaaa

SEQ ID NO: 3133405 - RNA, 19 nt, Artificial Sequence
  Description of Artificial Sequence: Synthetic oligonucleotide
ccaaaguaaacuuuuaccu

SEQ ID NO: 3133406 - RNA, 19 nt, Artificial Sequence
  Description of Artificial Sequence: Synthetic oligonucleotide
aguaaacuuuuaccucaga

SEQ ID NO: 3133407 - RNA, 19 nt, Artificial Sequence
  Description of Artificial Sequence: Synthetic oligonucleotide
auaaugcuuccauuccaaa

SEQ ID NO: 3133408 - RNA, 19 nt, Artificial Sequence
  Description of Artificial Sequence: Synthetic oligonucleotide
cuguccagagcugaacccc

SEQ ID NO: 3133409 - RNA, 19 nt, Artificial Sequence
  Description of Artificial Sequence: Synthetic oligonucleotide
cugaaccccauuuuaaacu

SEQ ID NO: 3133410 - RNA, 19 nt, Artificial Sequence
  Description of Artificial Sequence: Synthetic oligonucleotide
gcugaaccccauuuuaaac

SEQ ID NO: 3133411 - RNA, 19 nt, Artificial Sequence
  Description of Artificial Sequence: Synthetic oligonucleotide
gagaaacucaauaaugcuu

SEQ ID NO: 3133412 - RNA, 19 nt, Artificial Sequence
  Description of Artificial Sequence: Synthetic oligonucleotide
cauaaucauuaauaaaauu

SEQ ID NO: 3133413 - RNA, 19 nt, Artificial Sequence
  Description of Artificial Sequence: Synthetic oligonucleotide
agugacuaauacacuuucu

SEQ ID NO: 3133414 - RNA, 19 nt, Artificial Sequence
  Description of Artificial Sequence: Synthetic oligonucleotide
auacacuuucucucuuuua

SEQ ID NO: 3133415 - RNA, 19 nt, Artificial Sequence
  Description of Artificial Sequence: Synthetic oligonucleotide
gaaccccauuuuaaacuac

SEQ ID NO: 3133416 - RNA, 19 nt, Artificial Sequence
  Description of Artificial Sequence: Synthetic oligonucleotide
uucucucuuuuaagccaaa

SEQ ID NO: 3133417 - RNA, 19 nt, Artificial Sequence
  Description of Artificial Sequence: Synthetic oligonucleotide
guucaaggcuaacaucaua

SEQ ID NO: 3133418 - RNA, 19 nt, Artificial Sequence
  Description of Artificial Sequence: Synthetic oligonucleotide
aagccaaaguaaacuuuua

SEQ ID NO: 3133419 - RNA, 19 nt, Artificial Sequence
  Description of Artificial Sequence: Synthetic oligonucleotide
uccucuguccagagcugaa

SEQ ID NO: 3133420 - RNA, 19 nt, Artificial Sequence
  Description of Artificial Sequence: Synthetic oligonucleotide
accucagaagauaauucuu

SEQ ID NO: 3133421 - RNA, 19 nt, Artificial Sequence
  Description of Artificial Sequence: Synthetic oligonucleotide
gagcugaaccccauuuuaa

SEQ ID NO: 3133422 - RNA, 19 nt, Artificial Sequence
  Description of Artificial Sequence: Synthetic oligonucleotide
agcuguguucaaggcuaac

SEQ ID NO: 3133423 - RNA, 19 nt, Artificial Sequence
  Description of Artificial Sequence: Synthetic oligonucleotide
gaauacaaauagccauaau

SEQ ID NO: 3133424 - RNA, 19 nt, Artificial Sequence
  Description of Artificial Sequence: Synthetic oligonucleotide
cuguguucaaggcuaacau

SEQ ID NO: 3133425 - RNA, 19 nt, Artificial Sequence
  Description of Artificial Sequence: Synthetic oligonucleotide
gcuguguucaaggcuaaca

SEQ ID NO: 3133426 - RNA, 19 nt, Artificial Sequence
  Description of Artificial Sequence: Synthetic oligonucleotide
uccagagcugaaccccauu

SEQ ID NO: 3133427 - RNA, 19 nt, Artificial Sequence
  Description of Artificial Sequence: Synthetic oligonucleotide
auccucuguccagagcuga

SEQ ID NO: 3133428 - RNA, 19 nt, Artificial Sequence
  Description of Artificial Sequence: Synthetic oligonucleotide
ccauaaucauuaauaaaau

SEQ ID NO: 3133429 - RNA, 19 nt, Artificial Sequence
  Description of Artificial Sequence: Synthetic oligonucleotide
cauuccuaauauccucugu

SEQ ID NO: 3133430 - RNA, 19 nt, Artificial Sequence
  Description of Artificial Sequence: Synthetic oligonucleotide
ggcuaacaucauaagaaua

SEQ ID NO: 3133431 - RNA, 19 nt, Artificial Sequence
  Description of Artificial Sequence: Synthetic oligonucleotide
gcaaugacuuuaaaauagu

SEQ ID NO: 3133432 - RNA, 19 nt, Artificial Sequence
  Description of Artificial Sequence: Synthetic oligonucleotide
ccucuguccagagcugaac

SEQ ID NO: 3133433 - RNA, 19 nt, Artificial Sequence
  Description of Artificial Sequence: Synthetic oligonucleotide
cagagcugaaccccauuuu

SEQ ID NO: 3133434 - RNA, 19 nt, Artificial Sequence
  Description of Artificial Sequence: Synthetic oligonucleotide
ccagagcugaaccccauuu

SEQ ID NO: 3133435 - RNA, 19 nt, Artificial Sequence
  Description of Artificial Sequence: Synthetic oligonucleotide
uuuaggauaguaauguugu

SEQ ID NO: 3133436 - RNA, 19 nt, Artificial Sequence
  Description of Artificial Sequence: Synthetic oligonucleotide
uuuuaggauaguaauguug

SEQ ID NO: 3133437 - RNA, 19 nt, Artificial Sequence
  Description of Artificial Sequence: Synthetic oligonucleotide
auaucucuggugcagaugg

SEQ ID NO: 3133438 - RNA, 19 nt, Artificial Sequence
  Description of Artificial Sequence: Synthetic oligonucleotide
aguaauguuguccauggag

SEQ ID NO: 3133439 - RNA, 19 nt, Artificial Sequence
  Description of Artificial Sequence: Synthetic oligonucleotide
auaguaauguuguccaugg

SEQ ID NO: 3133440 - RNA, 19 nt, Artificial Sequence
  Description of Artificial Sequence: Synthetic oligonucleotide
uuugcuugaauaucucugg

SEQ ID NO: 3133441 - RNA, 19 nt, Artificial Sequence
  Description of Artificial Sequence: Synthetic oligonucleotide
auaggcuucugcuauuugc

SEQ ID NO: 3133442 - RNA, 19 nt, Artificial Sequence
  Description of Artificial Sequence: Synthetic oligonucleotide
gaugccucucuucacaggg

SEQ ID NO: 3133443 - RNA, 19 nt, Artificial Sequence
  Description of Artificial Sequence: Synthetic oligonucleotide
ucugcuauuugcuugaaua

SEQ ID NO: 3133444 - RNA, 19 nt, Artificial Sequence
  Description of Artificial Sequence: Synthetic oligonucleotide
aaucccaccuuucaggccu

SEQ ID NO: 3133445 - RNA, 19 nt, Artificial Sequence
  Description of Artificial Sequence: Synthetic oligonucleotide
aacgggugguucuucaggg

SEQ ID NO: 3133446 - RNA, 19 nt, Artificial Sequence
  Description of Artificial Sequence: Synthetic oligonucleotide
uuccucgccaaacuugucg

SEQ ID NO: 3133447 - RNA, 19 nt, Artificial Sequence
  Description of Artificial Sequence: Synthetic oligonucleotide
gcucauuugacuucaacgg

SEQ ID NO: 3133448 - RNA, 19 nt, Artificial Sequence
  Description of Artificial Sequence: Synthetic oligonucleotide
uaggauaguaauguugucc

SEQ ID NO: 3133449 - RNA, 19 nt, Artificial Sequence
  Description of Artificial Sequence: Synthetic oligonucleotide
aggauaguaauguugucca

SEQ ID NO: 3133450 - RNA, 19 nt, Artificial Sequence
  Description of Artificial Sequence: Synthetic oligonucleotide
ucauuugacuucaacgggu

SEQ ID NO: 3133451 - RNA, 19 nt, Artificial Sequence
  Description of Artificial Sequence: Synthetic oligonucleotide
ccaaacuugucguagaugc

SEQ ID NO: 3133452 - RNA, 19 nt, Artificial Sequence
  Description of Artificial Sequence: Synthetic oligonucleotide
gauaguaauguuguccaug

SEQ ID NO: 3133453 - RNA, 19 nt, Artificial Sequence
  Description of Artificial Sequence: Synthetic oligonucleotide
ggcucauuugacuucaacg

SEQ ID NO: 3133454 - RNA, 19 nt, Artificial Sequence
  Description of Artificial Sequence: Synthetic oligonucleotide
cucauuugacuucaacggg

SEQ ID NO: 3133455 - RNA, 19 nt, Artificial Sequence
  Description of Artificial Sequence: Synthetic oligonucleotide
gagucugggauccaaacuc

SEQ ID NO: 3133456 - RNA, 19 nt, Artificial Sequence
  Description of Artificial Sequence: Synthetic oligonucleotide
uugaauaucucuggugcag

SEQ ID NO: 3133457 - RNA, 19 nt, Artificial Sequence
  Description of Artificial Sequence: Synthetic oligonucleotide
gcuugaauaucucuggugc

SEQ ID NO: 3133458 - RNA, 19 nt, Artificial Sequence
  Description of Artificial Sequence: Synthetic oligonucleotide
ucguagaugccucucuuca

SEQ ID NO: 3133459 - RNA, 19 nt, Artificial Sequence
  Description of Artificial Sequence: Synthetic oligonucleotide
ugggauccaaacuccagag

SEQ ID NO: 3133460 - RNA, 19 nt, Artificial Sequence
  Description of Artificial Sequence: Synthetic oligonucleotide
uguccauggagucugggau

SEQ ID NO: 3133461 - RNA, 19 nt, Artificial Sequence
  Description of Artificial Sequence: Synthetic oligonucleotide
auuugcuugaauaucucug

SEQ ID NO: 3133462 - RNA, 19 nt, Artificial Sequence
  Description of Artificial Sequence: Synthetic oligonucleotide
ugcuugaauaucucuggug

SEQ ID NO: 3133463 - RNA, 19 nt, Artificial Sequence
  Description of Artificial Sequence: Synthetic oligonucleotide
acuccagaggaaucccacc

SEQ ID NO: 3133464 - RNA, 19 nt, Artificial Sequence
  Description of Artificial Sequence: Synthetic oligonucleotide
uuugacuucaacggguggu

SEQ ID NO: 3133465 - RNA, 19 nt, Artificial Sequence
  Description of Artificial Sequence: Synthetic oligonucleotide
aacuccagaggaaucccac

SEQ ID NO: 3133466 - RNA, 19 nt, Artificial Sequence
  Description of Artificial Sequence: Synthetic oligonucleotide
uucacagggucgcucagca

SEQ ID NO: 3133467 - RNA, 19 nt, Artificial Sequence
  Description of Artificial Sequence: Synthetic oligonucleotide
ucugggauccaaacuccag

SEQ ID NO: 3133468 - RNA, 19 nt, Artificial Sequence
  Description of Artificial Sequence: Synthetic oligonucleotide
aauaucucuggugcagaug

SEQ ID NO: 3133469 - RNA, 19 nt, Artificial Sequence
  Description of Artificial Sequence: Synthetic oligonucleotide
cuucagggcaaguuuccgg

SEQ ID NO: 3133470 - RNA, 19 nt, Artificial Sequence
  Description of Artificial Sequence: Synthetic oligonucleotide
agauggcucauuugacuuc

SEQ ID NO: 3133471 - RNA, 19 nt, Artificial Sequence
  Description of Artificial Sequence: Synthetic oligonucleotide
ucgcucagcacaucauagg

SEQ ID NO: 3133472 - RNA, 19 nt, Artificial Sequence
  Description of Artificial Sequence: Synthetic oligonucleotide
cauuugacuucaacgggug

SEQ ID NO: 3133473 - RNA, 19 nt, Artificial Sequence
  Description of Artificial Sequence: Synthetic oligonucleotide
agaggaaucccaccuuuca

SEQ ID NO: 3133474 - RNA, 19 nt, Artificial Sequence
  Description of Artificial Sequence: Synthetic oligonucleotide
uagaugccucucuucacag

SEQ ID NO: 3133475 - RNA, 19 nt, Artificial Sequence
  Description of Artificial Sequence: Synthetic oligonucleotide
ggauccaaacuccagagga

SEQ ID NO: 3133476 - RNA, 19 nt, Artificial Sequence
  Description of Artificial Sequence: Synthetic oligonucleotide
uuucaggccuuccucgcca

SEQ ID NO: 3133477 - RNA, 19 nt, Artificial Sequence
  Description of Artificial Sequence: Synthetic oligonucleotide
agucugggauccaaacucc

SEQ ID NO: 3133478 - RNA, 19 nt, Artificial Sequence
  Description of Artificial Sequence: Synthetic oligonucleotide
aacuugucguagaugccuc

SEQ ID NO: 3133479 - RNA, 19 nt, Artificial Sequence
  Description of Artificial Sequence: Synthetic oligonucleotide
ugcagauggcucauuugac

SEQ ID NO: 3133480 - RNA, 19 nt, Artificial Sequence
  Description of Artificial Sequence: Synthetic oligonucleotide
uuguccauggagucuggga

SEQ ID NO: 3133481 - RNA, 19 nt, Artificial Sequence
  Description of Artificial Sequence: Synthetic oligonucleotide
caaacuugucguagaugcc

SEQ ID NO: 3133482 - RNA, 19 nt, Artificial Sequence
  Description of Artificial Sequence: Synthetic oligonucleotide
ugcuauuugcuugaauauc

SEQ ID NO: 3133483 - RNA, 19 nt, Artificial Sequence
  Description of Artificial Sequence: Synthetic oligonucleotide
uccauggagucugggaucc

SEQ ID NO: 3133484 - RNA, 19 nt, Artificial Sequence
  Description of Artificial Sequence: Synthetic oligonucleotide
gugcagauggcucauuuga

SEQ ID NO: 3133485 - RNA, 19 nt, Artificial Sequence
  Description of Artificial Sequence: Synthetic oligonucleotide
guagaugccucucuucaca

SEQ ID NO: 3133486 - RNA, 19 nt, Artificial Sequence
  Description of Artificial Sequence: Synthetic oligonucleotide
cuauuugcuugaauaucuc

SEQ ID NO: 3133487 - RNA, 19 nt, Artificial Sequence
  Description of Artificial Sequence: Synthetic oligonucleotide
caacgggugguucuucagg

SEQ ID NO: 3133488 - RNA, 19 nt, Artificial Sequence
  Description of Artificial Sequence: Synthetic oligonucleotide
ugaauaucucuggugcaga

SEQ ID NO: 3133489 - RNA, 19 nt, Artificial Sequence
  Description of Artificial Sequence: Synthetic oligonucleotide
ucaacgggugguucuucag

SEQ ID NO: 3133490 - RNA, 19 nt, Artificial Sequence
  Description of Artificial Sequence: Synthetic oligonucleotide
uggagucugggauccaaac

SEQ ID NO: 3133491 - RNA, 19 nt, Artificial Sequence
  Description of Artificial Sequence: Synthetic oligonucleotide
uugucguagaugccucucu

SEQ ID NO: 3133492 - RNA, 19 nt, Artificial Sequence
  Description of Artificial Sequence: Synthetic oligonucleotide
uuaggauaguaauguuguc

SEQ ID NO: 3133493 - RNA, 19 nt, Artificial Sequence
  Description of Artificial Sequence: Synthetic oligonucleotide
auguuguccauggagucug

SEQ ID NO: 3133494 - RNA, 19 nt, Artificial Sequence
  Description of Artificial Sequence: Synthetic oligonucleotide
ggaaucccaccuuucaggc

SEQ ID NO: 3133495 - RNA, 19 nt, Artificial Sequence
  Description of Artificial Sequence: Synthetic oligonucleotide
uucaacgggugguucuuca

SEQ ID NO: 3133496 - RNA, 19 nt, Artificial Sequence
  Description of Artificial Sequence: Synthetic oligonucleotide
agaugccucucuucacagg

SEQ ID NO: 3133497 - RNA, 19 nt, Artificial Sequence
  Description of Artificial Sequence: Synthetic oligonucleotide
acgggugguucuucagggc

SEQ ID NO: 3133498 - RNA, 19 nt, Artificial Sequence
  Description of Artificial Sequence: Synthetic oligonucleotide
uccaaacuccagaggaauc

SEQ ID NO: 3133499 - RNA, 19 nt, Artificial Sequence
  Description of Artificial Sequence: Synthetic oligonucleotide
uccucgccaaacuugucgu

SEQ ID NO: 3133500 - RNA, 19 nt, Artificial Sequence
  Description of Artificial Sequence: Synthetic oligonucleotide
acaucauaggcuucugcua

SEQ ID NO: 3133501 - RNA, 19 nt, Artificial Sequence
  Description of Artificial Sequence: Synthetic oligonucleotide
gauggcucauuugacuuca

SEQ ID NO: 3133502 - RNA, 19 nt, Artificial Sequence
  Description of Artificial Sequence: Synthetic oligonucleotide
ucucuggugcagauggcuc

SEQ ID NO: 3133503 - RNA, 19 nt, Artificial Sequence
  Description of Artificial Sequence: Synthetic oligonucleotide
cuugaauaucucuggugca

SEQ ID NO: 3133504 - RNA, 19 nt, Artificial Sequence
  Description of Artificial Sequence: Synthetic oligonucleotide
uguuguccauggagucugg

SEQ ID NO: 3133505 - RNA, 19 nt, Artificial Sequence
  Description of Artificial Sequence: Synthetic oligonucleotide
ucuucacagggucgcucag

SEQ ID NO: 3133506 - RNA, 19 nt, Artificial Sequence
  Description of Artificial Sequence: Synthetic oligonucleotide
caaacuccagaggaauccc

SEQ ID NO: 3133507 - RNA, 19 nt, Artificial Sequence
  Description of Artificial Sequence: Synthetic oligonucleotide
cacagggucgcucagcaca

SEQ ID NO: 3133508 - RNA, 19 nt, Artificial Sequence
  Description of Artificial Sequence: Synthetic oligonucleotide
guaauguuguccauggagu

SEQ ID NO: 3133509 - RNA, 19 nt, Artificial Sequence
  Description of Artificial Sequence: Synthetic oligonucleotide
uaguaauguuguccaugga

SEQ ID NO: 3133510 - RNA, 19 nt, Artificial Sequence
  Description of Artificial Sequence: Synthetic oligonucleotide
gucgcucagcacaucauag

SEQ ID NO: 3133511 - RNA, 19 nt, Artificial Sequence
  Description of Artificial Sequence: Synthetic oligonucleotide
cucgccaaacuugucguag

SEQ ID NO: 3133512 - RNA, 19 nt, Artificial Sequence
  Description of Artificial Sequence: Synthetic oligonucleotide
uggcucauuugacuucaac

SEQ ID NO: 3133513 - RNA, 19 nt, Artificial Sequence
  Description of Artificial Sequence: Synthetic oligonucleotide
ugccucucuucacaggguc

SEQ ID NO: 3133514 - RNA, 19 nt, Artificial Sequence
  Description of Artificial Sequence: Synthetic oligonucleotide
cuuucaggccuuccucgcc

SEQ ID NO: 3133515 - RNA, 19 nt, Artificial Sequence
  Description of Artificial Sequence: Synthetic oligonucleotide
aaacuccagaggaauccca

SEQ ID NO: 3133516 - RNA, 19 nt, Artificial Sequence
  Description of Artificial Sequence: Synthetic oligonucleotide
ugucguagaugccucucuu

SEQ ID NO: 3133517 - RNA, 19 nt, Artificial Sequence
  Description of Artificial Sequence: Synthetic oligonucleotide
guucuucagggcaaguuuc

SEQ ID NO: 3133518 - RNA, 19 nt, Artificial Sequence
  Description of Artificial Sequence: Synthetic oligonucleotide
agggucgcucagcacauca

SEQ ID NO: 3133519 - RNA, 19 nt, Artificial Sequence
  Description of Artificial Sequence: Synthetic oligonucleotide
cacaucauaggcuucugcu

SEQ ID NO: 3133520 - RNA, 19 nt, Artificial Sequence
  Description of Artificial Sequence: Synthetic oligonucleotide
ggcuucugcuauuugcuug

SEQ ID NO: 3133521 - RNA, 19 nt, Artificial Sequence
  Description of Artificial Sequence: Synthetic oligonucleotide
ucgccaaacuugucguaga

SEQ ID NO: 3133522 - RNA, 19 nt, Artificial Sequence
  Description of Artificial Sequence: Synthetic oligonucleotide
ccaaacuccagaggaaucc

SEQ ID NO: 3133523 - RNA, 19 nt, Artificial Sequence
  Description of Artificial Sequence: Synthetic oligonucleotide
cugggauccaaacuccaga

SEQ ID NO: 3133524 - RNA, 19 nt, Artificial Sequence
  Description of Artificial Sequence: Synthetic oligonucleotide
aucucuggugcagauggcu

SEQ ID NO: 3133525 - RNA, 19 nt, Artificial Sequence
  Description of Artificial Sequence: Synthetic oligonucleotide
uggugcagauggcucauuu

SEQ ID NO: 3133526 - RNA, 19 nt, Artificial Sequence
  Description of Artificial Sequence: Synthetic oligonucleotide
gggauccaaacuccagagg

SEQ ID NO: 3133527 - RNA, 19 nt, Artificial Sequence
  Description of Artificial Sequence: Synthetic oligonucleotide
auccaaacuccagaggaau

SEQ ID NO: 3133528 - RNA, 19 nt, Artificial Sequence
  Description of Artificial Sequence: Synthetic oligonucleotide
uucugcuauuugcuugaau

SEQ ID NO: 3133529 - RNA, 19 nt, Artificial Sequence
  Description of Artificial Sequence: Synthetic oligonucleotide
ucagcacaucauaggcuuc

SEQ ID NO: 3133530 - RNA, 19 nt, Artificial Sequence
  Description of Artificial Sequence: Synthetic oligonucleotide
acuugucguagaugccucu

SEQ ID NO: 3133531 - RNA, 19 nt, Artificial Sequence
  Description of Artificial Sequence: Synthetic oligonucleotide
uccagaggaaucccaccuu

SEQ ID NO: 3133532 - RNA, 19 nt, Artificial Sequence
  Description of Artificial Sequence: Synthetic oligonucleotide
ggugcagauggcucauuug

SEQ ID NO: 3133533 - RNA, 19 nt, Artificial Sequence
  Description of Artificial Sequence: Synthetic oligonucleotide
cucuucacagggucgcuca

SEQ ID NO: 3133534 - RNA, 19 nt, Artificial Sequence
  Description of Artificial Sequence: Synthetic oligonucleotide
gucguagaugccucucuuc

SEQ ID NO: 3133535 - RNA, 19 nt, Artificial Sequence
  Description of Artificial Sequence: Synthetic oligonucleotide
uugacuucaacgggugguu

SEQ ID NO: 3133536 - RNA, 19 nt, Artificial Sequence
  Description of Artificial Sequence: Synthetic oligonucleotide
caccuuucaggccuuccuc

SEQ ID NO: 3133537 - RNA, 19 nt, Artificial Sequence
  Description of Artificial Sequence: Synthetic oligonucleotide
guuguccauggagucuggg

SEQ ID NO: 3133538 - RNA, 19 nt, Artificial Sequence
  Description of Artificial Sequence: Synthetic oligonucleotide
ucauaggcuucugcuauuu

SEQ ID NO: 3133539 - RNA, 19 nt, Artificial Sequence
  Description of Artificial Sequence: Synthetic oligonucleotide
gacuucaacgggugguucu

SEQ ID NO: 3133540 - RNA, 19 nt, Artificial Sequence
  Description of Artificial Sequence: Synthetic oligonucleotide
aggccuuccucgccaaacu

SEQ ID NO: 3133541 - RNA, 19 nt, Artificial Sequence
  Description of Artificial Sequence: Synthetic oligonucleotide
cuucacagggucgcucagc

SEQ ID NO: 3133542 - RNA, 19 nt, Artificial Sequence
  Description of Artificial Sequence: Synthetic oligonucleotide
cucuggugcagauggcuca

SEQ ID NO: 3133543 - RNA, 19 nt, Artificial Sequence
  Description of Artificial Sequence: Synthetic oligonucleotide
ugguucuucagggcaaguu

SEQ ID NO: 3133544 - RNA, 19 nt, Artificial Sequence
  Description of Artificial Sequence: Synthetic oligonucleotide
gcuucugcuauuugcuuga

SEQ ID NO: 3133545 - RNA, 19 nt, Artificial Sequence
  Description of Artificial Sequence: Synthetic oligonucleotide
guccauggagucugggauc

SEQ ID NO: 3133546 - RNA, 19 nt, Artificial Sequence
  Description of Artificial Sequence: Synthetic oligonucleotide
cuugucguagaugccucuc

SEQ ID NO: 3133547 - RNA, 19 nt, Artificial Sequence
  Description of Artificial Sequence: Synthetic oligonucleotide
cucagcacaucauaggcuu

SEQ ID NO: 3133548 - RNA, 19 nt, Artificial Sequence
  Description of Artificial Sequence: Synthetic oligonucleotide
gaauaucucuggugcagau

SEQ ID NO: 3133549 - RNA, 19 nt, Artificial Sequence
  Description of Artificial Sequence: Synthetic oligonucleotide
caucauaggcuucugcuau

SEQ ID NO: 3133550 - RNA, 19 nt, Artificial Sequence
  Description of Artificial Sequence: Synthetic oligonucleotide
aucauaggcuucugcuauu

SEQ ID NO: 3133551 - RNA, 19 nt, Artificial Sequence
  Description of Artificial Sequence: Synthetic oligonucleotide
cgcucagcacaucauaggc

SEQ ID NO: 3133552 - RNA, 19 nt, Artificial Sequence
  Description of Artificial Sequence: Synthetic oligonucleotide
ugacuucaacgggugguuc

SEQ ID NO: 3133553 - RNA, 19 nt, Artificial Sequence
  Description of Artificial Sequence: Synthetic oligonucleotide
gcacaucauaggcuucugc

SEQ ID NO: 3133554 - RNA, 19 nt, Artificial Sequence
  Description of Artificial Sequence: Synthetic oligonucleotide
cugcuauuugcuugaauau

SEQ ID NO: 3133555 - RNA, 19 nt, Artificial Sequence
  Description of Artificial Sequence: Synthetic oligonucleotide
ucuggugcagauggcucau

SEQ ID NO: 3133556 - RNA, 19 nt, Artificial Sequence
  Description of Artificial Sequence: Synthetic oligonucleotide
caggccuuccucgccaaac

SEQ ID NO: 3133557 - RNA, 19 nt, Artificial Sequence
  Description of Artificial Sequence: Synthetic oligonucleotide
ccuuucaggccuuccucgc

SEQ ID NO: 3133558 - RNA, 19 nt, Artificial Sequence
  Description of Artificial Sequence: Synthetic oligonucleotide
ucacagggucgcucagcac

SEQ ID NO: 3133559 - RNA, 19 nt, Artificial Sequence
  Description of Artificial Sequence: Synthetic oligonucleotide
cuccagaggaaucccaccu

SEQ ID NO: 3133560 - RNA, 19 nt, Artificial Sequence
  Description of Artificial Sequence: Synthetic oligonucleotide
uucaggccuuccucgccaa

SEQ ID NO: 3133561 - RNA, 19 nt, Artificial Sequence
  Description of Artificial Sequence: Synthetic oligonucleotide
cagauggcucauuugacuu

SEQ ID NO: 3133562 - RNA, 19 nt, Artificial Sequence
  Description of Artificial Sequence: Synthetic oligonucleotide
acuucaacgggugguucuu

SEQ ID NO: 3133563 - RNA, 19 nt, Artificial Sequence
  Description of Artificial Sequence: Synthetic oligonucleotide
ggugguucuucagggcaag

SEQ ID NO: 3133564 - RNA, 19 nt, Artificial Sequence
  Description of Artificial Sequence: Synthetic oligonucleotide
gcagauggcucauuugacu

SEQ ID NO: 3133565 - RNA, 19 nt, Artificial Sequence
  Description of Artificial Sequence: Synthetic oligonucleotide
cuuccucgccaaacuuguc

SEQ ID NO: 3133566 - RNA, 19 nt, Artificial Sequence
  Description of Artificial Sequence: Synthetic oligonucleotide
gguucuucagggcaaguuu

SEQ ID NO: 3133567 - RNA, 19 nt, Artificial Sequence
  Description of Artificial Sequence: Synthetic oligonucleotide
ccucucuucacagggucgc

SEQ ID NO: 3133568 - RNA, 19 nt, Artificial Sequence
  Description of Artificial Sequence: Synthetic oligonucleotide
gccaaacuugucguagaug

SEQ ID NO: 3133569 - RNA, 19 nt, Artificial Sequence
  Description of Artificial Sequence: Synthetic oligonucleotide
ggagucugggauccaaacu

SEQ ID NO: 3133570 - RNA, 19 nt, Artificial Sequence
  Description of Artificial Sequence: Synthetic oligonucleotide
ucaggccuuccucgccaaa

SEQ ID NO: 3133571 - RNA, 19 nt, Artificial Sequence
  Description of Artificial Sequence: Synthetic oligonucleotide
gccuuccucgccaaacuug

SEQ ID NO: 3133572 - RNA, 19 nt, Artificial Sequence
  Description of Artificial Sequence: Synthetic oligonucleotide
cuucaacgggugguucuuc

SEQ ID NO: 3133573 - RNA, 19 nt, Artificial Sequence
  Description of Artificial Sequence: Synthetic oligonucleotide
gccucucuucacagggucg

SEQ ID NO: 3133574 - RNA, 19 nt, Artificial Sequence
  Description of Artificial Sequence: Synthetic oligonucleotide
acagggucgcucagcacau

SEQ ID NO: 3133575 - RNA, 19 nt, Artificial Sequence
  Description of Artificial Sequence: Synthetic oligonucleotide
ggucgcucagcacaucaua

SEQ ID NO: 3133576 - RNA, 19 nt, Artificial Sequence
  Description of Artificial Sequence: Synthetic oligonucleotide
auggagucugggauccaaa

SEQ ID NO: 3133577 - RNA, 19 nt, Artificial Sequence
  Description of Artificial Sequence: Synthetic oligonucleotide
cguagaugccucucuucac

SEQ ID NO: 3133578 - RNA, 19 nt, Artificial Sequence
  Description of Artificial Sequence: Synthetic oligonucleotide
augccucucuucacagggu

SEQ ID NO: 3133579 - RNA, 19 nt, Artificial Sequence
  Description of Artificial Sequence: Synthetic oligonucleotide
cagcacaucauaggcuucu

SEQ ID NO: 3133580 - RNA, 19 nt, Artificial Sequence
  Description of Artificial Sequence: Synthetic oligonucleotide
ccuuccucgccaaacuugu

SEQ ID NO: 3133581 - RNA, 19 nt, Artificial Sequence
  Description of Artificial Sequence: Synthetic oligonucleotide
ggauaguaauguuguccau

SEQ ID NO: 3133582 - RNA, 19 nt, Artificial Sequence
  Description of Artificial Sequence: Synthetic oligonucleotide
cgggugguucuucagggca

SEQ ID NO: 3133583 - RNA, 19 nt, Artificial Sequence
  Description of Artificial Sequence: Synthetic oligonucleotide
cuucugcuauuugcuugaa

SEQ ID NO: 3133584 - RNA, 19 nt, Artificial Sequence
  Description of Artificial Sequence: Synthetic oligonucleotide
gggugguucuucagggcaa

SEQ ID NO: 3133585 - RNA, 19 nt, Artificial Sequence
  Description of Artificial Sequence: Synthetic oligonucleotide
cccaccuuucaggccuucc

SEQ ID NO: 3133586 - RNA, 19 nt, Artificial Sequence
  Description of Artificial Sequence: Synthetic oligonucleotide
ucccaccuuucaggccuuc

SEQ ID NO: 3133587 - RNA, 19 nt, Artificial Sequence
  Description of Artificial Sequence: Synthetic oligonucleotide
auggcucauuugacuucaa

SEQ ID NO: 3133588 - RNA, 19 nt, Artificial Sequence
  Description of Artificial Sequence: Synthetic oligonucleotide
ccaccuuucaggccuuccu

SEQ ID NO: 3133589 - RNA, 19 nt, Artificial Sequence
  Description of Artificial Sequence: Synthetic oligonucleotide
cagggucgcucagcacauc

SEQ ID NO: 3133590 - RNA, 19 nt, Artificial Sequence
  Description of Artificial Sequence: Synthetic oligonucleotide
gugguucuucagggcaagu

SEQ ID NO: 3133591 - RNA, 19 nt, Artificial Sequence
  Description of Artificial Sequence: Synthetic oligonucleotide
cucucuucacagggucgcu

SEQ ID NO: 3133592 - RNA, 19 nt, Artificial Sequence
  Description of Artificial Sequence: Synthetic oligonucleotide
aucccaccuuucaggccuu

SEQ ID NO: 3133593 - RNA, 19 nt, Artificial Sequence
  Description of Artificial Sequence: Synthetic oligonucleotide
ggccuuccucgccaaacuu

SEQ ID NO: 3133594 - RNA, 19 nt, Artificial Sequence
  Description of Artificial Sequence: Synthetic oligonucleotide
ccucgccaaacuugucgua

SEQ ID NO: 3133595 - RNA, 19 nt, Artificial Sequence
  Description of Artificial Sequence: Synthetic oligonucleotide
gggucgcucagcacaucau

SEQ ID NO: 3133596 - RNA, 19 nt, Artificial Sequence
  Description of Artificial Sequence: Synthetic oligonucleotide
cgccaaacuugucguagau

SEQ ID NO: 3133597 - RNA, 19 nt, Artificial Sequence
  Description of Artificial Sequence: Synthetic oligonucleotide
ccauggagucugggaucca

SEQ ID NO: 3133598 - RNA, 19 nt, Artificial Sequence
  Description of Artificial Sequence: Synthetic oligonucleotide
cuggugcagauggcucauu

SEQ ID NO: 3133599 - RNA, 19 nt, Artificial Sequence
  Description of Artificial Sequence: Synthetic oligonucleotide
aauucauucugcuuccagc

SEQ ID NO: 3133600 - RNA, 19 nt, Artificial Sequence
  Description of Artificial Sequence: Synthetic oligonucleotide
aacuuggucauuuuguggg

SEQ ID NO: 3133601 - RNA, 19 nt, Artificial Sequence
  Description of Artificial Sequence: Synthetic oligonucleotide
agaacaaucgaagaagucc

SEQ ID NO: 3133602 - RNA, 19 nt, Artificial Sequence
  Description of Artificial Sequence: Synthetic oligonucleotide
aaaucuuuguaacaacuug

SEQ ID NO: 3133603 - RNA, 19 nt, Artificial Sequence
  Description of Artificial Sequence: Synthetic oligonucleotide
aucuccgugauacaggucg

SEQ ID NO: 3133604 - RNA, 19 nt, Artificial Sequence
  Description of Artificial Sequence: Synthetic oligonucleotide
aaucuuuguaacaacuugg

SEQ ID NO: 3133605 - RNA, 19 nt, Artificial Sequence
  Description of Artificial Sequence: Synthetic oligonucleotide
cuuuguaacaacuugguca

SEQ ID NO: 3133606 - RNA, 19 nt, Artificial Sequence
  Description of Artificial Sequence: Synthetic oligonucleotide
uuuucugcacgccucgucg

SEQ ID NO: 3133607 - RNA, 19 nt, Artificial Sequence
  Description of Artificial Sequence: Synthetic oligonucleotide
uaaacucgcagacuguucc

SEQ ID NO: 3133608 - RNA, 19 nt, Artificial Sequence
  Description of Artificial Sequence: Synthetic oligonucleotide
auugaucucaucuucccag

SEQ ID NO: 3133609 - RNA, 19 nt, Artificial Sequence
  Description of Artificial Sequence: Synthetic oligonucleotide
aucgacaucuccgugauac

SEQ ID NO: 3133610 - RNA, 19 nt, Artificial Sequence
  Description of Artificial Sequence: Synthetic oligonucleotide
cagcaagccaucaucaucg

SEQ ID NO: 3133611 - RNA, 19 nt, Artificial Sequence
  Description of Artificial Sequence: Synthetic oligonucleotide
gagguaaacucgcagacug

SEQ ID NO: 3133612 - RNA, 19 nt, Artificial Sequence
  Description of Artificial Sequence: Synthetic oligonucleotide
uuuguaacaacuuggucau

SEQ ID NO: 3133613 - RNA, 19 nt, Artificial Sequence
  Description of Artificial Sequence: Synthetic oligonucleotide
ucugcuuccagcaagccau

SEQ ID NO: 3133614 - RNA, 19 nt, Artificial Sequence
  Description of Artificial Sequence: Synthetic oligonucleotide
aucgaagaaguccuggauc

SEQ ID NO: 3133615 - RNA, 19 nt, Artificial Sequence
  Description of Artificial Sequence: Synthetic oligonucleotide
ugaggugagauuuguuggg

SEQ ID NO: 3133616 - RNA, 19 nt, Artificial Sequence
  Description of Artificial Sequence: Synthetic oligonucleotide
uccuggauugaucucaucu

SEQ ID NO: 3133617 - RNA, 19 nt, Artificial Sequence
  Description of Artificial Sequence: Synthetic oligonucleotide
uggaagaacaaucgaagaa

SEQ ID NO: 3133618 - RNA, 19 nt, Artificial Sequence
  Description of Artificial Sequence: Synthetic oligonucleotide
uggaucucuuuucugcacg

SEQ ID NO: 3133619 - RNA, 19 nt, Artificial Sequence
  Description of Artificial Sequence: Synthetic oligonucleotide
ucauucugcuuccagcaag

SEQ ID NO: 3133620 - RNA, 19 nt, Artificial Sequence
  Description of Artificial Sequence: Synthetic oligonucleotide
ucgaagaaguccuggaucu

SEQ ID NO: 3133621 - RNA, 19 nt, Artificial Sequence
  Description of Artificial Sequence: Synthetic oligonucleotide
auucauucugcuuccagca

SEQ ID NO: 3133622 - RNA, 19 nt, Artificial Sequence
  Description of Artificial Sequence: Synthetic oligonucleotide
uccagagucuccuggauug

SEQ ID NO: 3133623 - RNA, 19 nt, Artificial Sequence
  Description of Artificial Sequence: Synthetic oligonucleotide
uguugggaaaucuuuguaa

SEQ ID NO: 3133624 - RNA, 19 nt, Artificial Sequence
  Description of Artificial Sequence: Synthetic oligonucleotide
cuucccagcuuucugagcc

SEQ ID NO: 3133625 - RNA, 19 nt, Artificial Sequence
  Description of Artificial Sequence: Synthetic oligonucleotide
uuuguugggaaaucuuugu

SEQ ID NO: 3133626 - RNA, 19 nt, Artificial Sequence
  Description of Artificial Sequence: Synthetic oligonucleotide
aacaacuuggucauuuugu

SEQ ID NO: 3133627 - RNA, 19 nt, Artificial Sequence
  Description of Artificial Sequence: Synthetic oligonucleotide
uuuguggggagguaaacuc

SEQ ID NO: 3133628 - RNA, 19 nt, Artificial Sequence
  Description of Artificial Sequence: Synthetic oligonucleotide
uuguggggagguaaacucg

SEQ ID NO: 3133629 - RNA, 19 nt, Artificial Sequence
  Description of Artificial Sequence: Synthetic oligonucleotide
uaacaacuuggucauuuug

SEQ ID NO: 3133630 - RNA, 19 nt, Artificial Sequence
  Description of Artificial Sequence: Synthetic oligonucleotide
acaacuuggucauuuugug

SEQ ID NO: 3133631 - RNA, 19 nt, Artificial Sequence
  Description of Artificial Sequence: Synthetic oligonucleotide
uccuggaucucuuuucugc

SEQ ID NO: 3133632 - RNA, 19 nt, Artificial Sequence
  Description of Artificial Sequence: Synthetic oligonucleotide
uggauugaucucaucuucc

SEQ ID NO: 3133633 - RNA, 19 nt, Artificial Sequence
  Description of Artificial Sequence: Synthetic oligonucleotide
guugggaaaucuuuguaac

SEQ ID NO: 3133634 - RNA, 19 nt, Artificial Sequence
  Description of Artificial Sequence: Synthetic oligonucleotide
aaucgaagaaguccuggau

SEQ ID NO: 3133635 - RNA, 19 nt, Artificial Sequence
  Description of Artificial Sequence: Synthetic oligonucleotide
ggaagaacaaucgaagaag

SEQ ID NO: 3133636 - RNA, 19 nt, Artificial Sequence
  Description of Artificial Sequence: Synthetic oligonucleotide
gaauucauucugcuuccag

SEQ ID NO: 3133637 - RNA, 19 nt, Artificial Sequence
  Description of Artificial Sequence: Synthetic oligonucleotide
uguggggagguaaacucgc

SEQ ID NO: 3133638 - RNA, 19 nt, Artificial Sequence
  Description of Artificial Sequence: Synthetic oligonucleotide
caacuuggucauuuugugg

SEQ ID NO: 3133639 - RNA, 19 nt, Artificial Sequence
  Description of Artificial Sequence: Synthetic oligonucleotide
ugggaaaucuuuguaacaa

SEQ ID NO: 3133640 - RNA, 19 nt, Artificial Sequence
  Description of Artificial Sequence: Synthetic oligonucleotide
ucuuuguaacaacuugguc

SEQ ID NO: 3133641 - RNA, 19 nt, Artificial Sequence
  Description of Artificial Sequence: Synthetic oligonucleotide
uugggaaaucuuuguaaca

SEQ ID NO: 3133642 - RNA, 19 nt, Artificial Sequence
  Description of Artificial Sequence: Synthetic oligonucleotide
aucaucgacaucuccguga

SEQ ID NO: 3133643 - RNA, 19 nt, Artificial Sequence
  Description of Artificial Sequence: Synthetic oligonucleotide
acaaucgaagaaguccugg

SEQ ID NO: 3133644 - RNA, 19 nt, Artificial Sequence
  Description of Artificial Sequence: Synthetic oligonucleotide
uuccagcaagccaucauca

SEQ ID NO: 3133645 - RNA, 19 nt, Artificial Sequence
  Description of Artificial Sequence: Synthetic oligonucleotide
aagccaucaucaucgacau

SEQ ID NO: 3133646 - RNA, 19 nt, Artificial Sequence
  Description of Artificial Sequence: Synthetic oligonucleotide
ucaucuucccagcuuucug

SEQ ID NO: 3133647 - RNA, 19 nt, Artificial Sequence
  Description of Artificial Sequence: Synthetic oligonucleotide
acuuggucauuuugugggg

SEQ ID NO: 3133648 - RNA, 19 nt, Artificial Sequence
  Description of Artificial Sequence: Synthetic oligonucleotide
uguaacaacuuggucauuu

SEQ ID NO: 3133649 - RNA, 19 nt, Artificial Sequence
  Description of Artificial Sequence: Synthetic oligonucleotide
acaucuccgugauacaggu

SEQ ID NO: 3133650 - RNA, 19 nt, Artificial Sequence
  Description of Artificial Sequence: Synthetic oligonucleotide
gacaucuccgugauacagg

SEQ ID NO: 3133651 - RNA, 19 nt, Artificial Sequence
  Description of Artificial Sequence: Synthetic oligonucleotide
uggggagguaaacucgcag

SEQ ID NO: 3133652 - RNA, 19 nt, Artificial Sequence
  Description of Artificial Sequence: Synthetic oligonucleotide
uuggucauuuuguggggag

SEQ ID NO: 3133653 - RNA, 19 nt, Artificial Sequence
  Description of Artificial Sequence: Synthetic oligonucleotide
auuuguugggaaaucuuug

SEQ ID NO: 3133654 - RNA, 19 nt, Artificial Sequence
  Description of Artificial Sequence: Synthetic oligonucleotide
uuuuguggggagguaaacu

SEQ ID NO: 3133655 - RNA, 19 nt, Artificial Sequence
  Description of Artificial Sequence: Synthetic oligonucleotide
uugaucucaucuucccagc

SEQ ID NO: 3133656 - RNA, 19 nt, Artificial Sequence
  Description of Artificial Sequence: Synthetic oligonucleotide
cucgucgcggaauucauuc

SEQ ID NO: 3133657 - RNA, 19 nt, Artificial Sequence
  Description of Artificial Sequence: Synthetic oligonucleotide
auuuuguggggagguaaac

SEQ ID NO: 3133658 - RNA, 19 nt, Artificial Sequence
  Description of Artificial Sequence: Synthetic oligonucleotide
uguuccagagucuccugga

SEQ ID NO: 3133659 - RNA, 19 nt, Artificial Sequence
  Description of Artificial Sequence: Synthetic oligonucleotide
ccuggaagaacaaucgaag

SEQ ID NO: 3133660 - RNA, 19 nt, Artificial Sequence
  Description of Artificial Sequence: Synthetic oligonucleotide
ucucuuuucugcacgccuc

SEQ ID NO: 3133661 - RNA, 19 nt, Artificial Sequence
  Description of Artificial Sequence: Synthetic oligonucleotide
gauugaucucaucuuccca

SEQ ID NO: 3133662 - RNA, 19 nt, Artificial Sequence
  Description of Artificial Sequence: Synthetic oligonucleotide
cuuucugagcccuggaaga

SEQ ID NO: 3133663 - RNA, 19 nt, Artificial Sequence
  Description of Artificial Sequence: Synthetic oligonucleotide
cuuccagcaagccaucauc

SEQ ID NO: 3133664 - RNA, 19 nt, Artificial Sequence
  Description of Artificial Sequence: Synthetic oligonucleotide
cuggauugaucucaucuuc

SEQ ID NO: 3133665 - RNA, 19 nt, Artificial Sequence
  Description of Artificial Sequence: Synthetic oligonucleotide
ucauuuuguggggagguaa

SEQ ID NO: 3133666 - RNA, 19 nt, Artificial Sequence
  Description of Artificial Sequence: Synthetic oligonucleotide
uucugcacgccucgucgcg

SEQ ID NO: 3133667 - RNA, 19 nt, Artificial Sequence
  Description of Artificial Sequence: Synthetic oligonucleotide
aaacucgcagacuguucca

SEQ ID NO: 3133668 - RNA, 19 nt, Artificial Sequence
  Description of Artificial Sequence: Synthetic oligonucleotide
uuguugggaaaucuuugua

SEQ ID NO: 3133669 - RNA, 19 nt, Artificial Sequence
  Description of Artificial Sequence: Synthetic oligonucleotide
ucaucgacaucuccgugau

SEQ ID NO: 3133670 - RNA, 19 nt, Artificial Sequence
  Description of Artificial Sequence: Synthetic oligonucleotide
cucgcagacuguuccagag

SEQ ID NO: 3133671 - RNA, 19 nt, Artificial Sequence
  Description of Artificial Sequence: Synthetic oligonucleotide
aacucgcagacuguuccag

SEQ ID NO: 3133672 - RNA, 19 nt, Artificial Sequence
  Description of Artificial Sequence: Synthetic oligonucleotide
cucuuuucugcacgccucg

SEQ ID NO: 3133673 - RNA, 19 nt, Artificial Sequence
  Description of Artificial Sequence: Synthetic oligonucleotide
ugaucucaucuucccagcu

SEQ ID NO: 3133674 - RNA, 19 nt, Artificial Sequence
  Description of Artificial Sequence: Synthetic oligonucleotide
gcggaauucauucugcuuc

SEQ ID NO: 3133675 - RNA, 19 nt, Artificial Sequence
  Description of Artificial Sequence: Synthetic oligonucleotide
agcccuggaagaacaaucg

SEQ ID NO: 3133676 - RNA, 19 nt, Artificial Sequence
  Description of Artificial Sequence: Synthetic oligonucleotide
cuguuccagagucuccugg

SEQ ID NO: 3133677 - RNA, 19 nt, Artificial Sequence
  Description of Artificial Sequence: Synthetic oligonucleotide
gaacaaucgaagaaguccu

SEQ ID NO: 3133678 - RNA, 19 nt, Artificial Sequence
  Description of Artificial Sequence: Synthetic oligonucleotide
uggucauuuuguggggagg

SEQ ID NO: 3133679 - RNA, 19 nt, Artificial Sequence
  Description of Artificial Sequence: Synthetic oligonucleotide
aucuuuguaacaacuuggu

SEQ ID NO: 3133680 - RNA, 19 nt, Artificial Sequence
  Description of Artificial Sequence: Synthetic oligonucleotide
ggauugaucucaucuuccc

SEQ ID NO: 3133681 - RNA, 19 nt, Artificial Sequence
  Description of Artificial Sequence: Synthetic oligonucleotide
cuggaagaacaaucgaaga

SEQ ID NO: 3133682 - RNA, 19 nt, Artificial Sequence
  Description of Artificial Sequence: Synthetic oligonucleotide
ugagauuuguugggaaauc

SEQ ID NO: 3133683 - RNA, 19 nt, Artificial Sequence
  Description of Artificial Sequence: Synthetic oligonucleotide
uuucugcacgccucgucgc

SEQ ID NO: 3133684 - RNA, 19 nt, Artificial Sequence
  Description of Artificial Sequence: Synthetic oligonucleotide
uucauucugcuuccagcaa

SEQ ID NO: 3133685 - RNA, 19 nt, Artificial Sequence
  Description of Artificial Sequence: Synthetic oligonucleotide
gaagaacaaucgaagaagu

SEQ ID NO: 3133686 - RNA, 19 nt, Artificial Sequence
  Description of Artificial Sequence: Synthetic oligonucleotide
aacaaucgaagaaguccug

SEQ ID NO: 3133687 - RNA, 19 nt, Artificial Sequence
  Description of Artificial Sequence: Synthetic oligonucleotide
ucuccgugauacaggucgc

SEQ ID NO: 3133688 - RNA, 19 nt, Artificial Sequence
  Description of Artificial Sequence: Synthetic oligonucleotide
caaucgaagaaguccugga

SEQ ID NO: 3133689 - RNA, 19 nt, Artificial Sequence
  Description of Artificial Sequence: Synthetic oligonucleotide
ucuucccagcuuucugagc

SEQ ID NO: 3133690 - RNA, 19 nt, Artificial Sequence
  Description of Artificial Sequence: Synthetic oligonucleotide
cuggaucucuuuucugcac

SEQ ID NO: 3133691 - RNA, 19 nt, Artificial Sequence
  Description of Artificial Sequence: Synthetic oligonucleotide
agagucuccuggauugauc

SEQ ID NO: 3133692 - RNA, 19 nt, Artificial Sequence
  Description of Artificial Sequence: Synthetic oligonucleotide
gagcccuggaagaacaauc

SEQ ID NO: 3133693 - RNA, 19 nt, Artificial Sequence
  Description of Artificial Sequence: Synthetic oligonucleotide
gggagguaaacucgcagac

SEQ ID NO: 3133694 - RNA, 19 nt, Artificial Sequence
  Description of Artificial Sequence: Synthetic oligonucleotide
cagacuguuccagagucuc

SEQ ID NO: 3133695 - RNA, 19 nt, Artificial Sequence
  Description of Artificial Sequence: Synthetic oligonucleotide
agacuguuccagagucucc

SEQ ID NO: 3133696 - RNA, 19 nt, Artificial Sequence
  Description of Artificial Sequence: Synthetic oligonucleotide
uuccagagucuccuggauu

SEQ ID NO: 3133697 - RNA, 19 nt, Artificial Sequence
  Description of Artificial Sequence: Synthetic oligonucleotide
cuuuucugcacgccucguc

SEQ ID NO: 3133698 - RNA, 19 nt, Artificial Sequence
  Description of Artificial Sequence: Synthetic oligonucleotide
gauuuguugggaaaucuuu

SEQ ID NO: 3133699 - RNA, 19 nt, Artificial Sequence
  Description of Artificial Sequence: Synthetic oligonucleotide
ucgcagacuguuccagagu

SEQ ID NO: 3133700 - RNA, 19 nt, Artificial Sequence
  Description of Artificial Sequence: Synthetic oligonucleotide
gggaaaucuuuguaacaac

SEQ ID NO: 3133701 - RNA, 19 nt, Artificial Sequence
  Description of Artificial Sequence: Synthetic oligonucleotide
ucgcggaauucauucugcu

SEQ ID NO: 3133702 - RNA, 19 nt, Artificial Sequence
  Description of Artificial Sequence: Synthetic oligonucleotide
uuucugagcccuggaagaa

SEQ ID NO: 3133703 - RNA, 19 nt, Artificial Sequence
  Description of Artificial Sequence: Synthetic oligonucleotide
acuguuccagagucuccug

SEQ ID NO: 3133704 - RNA, 19 nt, Artificial Sequence
  Description of Artificial Sequence: Synthetic oligonucleotide
ucugcacgccucgucgcgg

SEQ ID NO: 3133705 - RNA, 19 nt, Artificial Sequence
  Description of Artificial Sequence: Synthetic oligonucleotide
aggugagauuuguugggaa

SEQ ID NO: 3133706 - RNA, 19 nt, Artificial Sequence
  Description of Artificial Sequence: Synthetic oligonucleotide
gagauuuguugggaaaucu

SEQ ID NO: 3133707 - RNA, 19 nt, Artificial Sequence
  Description of Artificial Sequence: Synthetic oligonucleotide
agcuuucugagcccuggaa

SEQ ID NO: 3133708 - RNA, 19 nt, Artificial Sequence
  Description of Artificial Sequence: Synthetic oligonucleotide
ggaucucuuuucugcacgc

SEQ ID NO: 3133709 - RNA, 19 nt, Artificial Sequence
  Description of Artificial Sequence: Synthetic oligonucleotide
gaaaucuuuguaacaacuu

SEQ ID NO: 3133710 - RNA, 19 nt, Artificial Sequence
  Description of Artificial Sequence: Synthetic oligonucleotide
uccagcaagccaucaucau

SEQ ID NO: 3133711 - RNA, 19 nt, Artificial Sequence
  Description of Artificial Sequence: Synthetic oligonucleotide
gaagaaguccuggaucucu

SEQ ID NO: 3133712 - RNA, 19 nt, Artificial Sequence
  Description of Artificial Sequence: Synthetic oligonucleotide
cauuuuguggggagguaaa

SEQ ID NO: 3133713 - RNA, 19 nt, Artificial Sequence
  Description of Artificial Sequence: Synthetic oligonucleotide
uucccagcuuucugagccc

SEQ ID NO: 3133714 - RNA, 19 nt, Artificial Sequence
  Description of Artificial Sequence: Synthetic oligonucleotide
uccgugauacaggucgccu

SEQ ID NO: 3133715 - RNA, 19 nt, Artificial Sequence
  Description of Artificial Sequence: Synthetic oligonucleotide
ucgacaucuccgugauaca

SEQ ID NO: 3133716 - RNA, 19 nt, Artificial Sequence
  Description of Artificial Sequence: Synthetic oligonucleotide
agauuuguugggaaaucuu

SEQ ID NO: 3133717 - RNA, 19 nt, Artificial Sequence
  Description of Artificial Sequence: Synthetic oligonucleotide
gaggugagauuuguuggga

SEQ ID NO: 3133718 - RNA, 19 nt, Artificial Sequence
  Description of Artificial Sequence: Synthetic oligonucleotide
gucgcggaauucauucugc

SEQ ID NO: 3133719 - RNA, 19 nt, Artificial Sequence
  Description of Artificial Sequence: Synthetic oligonucleotide
ucgucgcggaauucauucu

SEQ ID NO: 3133720 - RNA, 19 nt, Artificial Sequence
  Description of Artificial Sequence: Synthetic oligonucleotide
caucaucgacaucuccgug

SEQ ID NO: 3133721 - RNA, 19 nt, Artificial Sequence
  Description of Artificial Sequence: Synthetic oligonucleotide
uucugagcccuggaagaac

SEQ ID NO: 3133722 - RNA, 19 nt, Artificial Sequence
  Description of Artificial Sequence: Synthetic oligonucleotide
ggugagauuuguugggaaa

SEQ ID NO: 3133723 - RNA, 19 nt, Artificial Sequence
  Description of Artificial Sequence: Synthetic oligonucleotide
acucgcagacuguuccaga

SEQ ID NO: 3133724 - RNA, 19 nt, Artificial Sequence
  Description of Artificial Sequence: Synthetic oligonucleotide
ggaaaucuuuguaacaacu

SEQ ID NO: 3133725 - RNA, 19 nt, Artificial Sequence
  Description of Artificial Sequence: Synthetic oligonucleotide
ggggagguaaacucgcaga

SEQ ID NO: 3133726 - RNA, 19 nt, Artificial Sequence
  Description of Artificial Sequence: Synthetic oligonucleotide
guaaacucgcagacuguuc

SEQ ID NO: 3133727 - RNA, 19 nt, Artificial Sequence
  Description of Artificial Sequence: Synthetic oligonucleotide
ugagcccuggaagaacaau

SEQ ID NO: 3133728 - RNA, 19 nt, Artificial Sequence
  Description of Artificial Sequence: Synthetic oligonucleotide
gacuguuccagagucuccu

SEQ ID NO: 3133729 - RNA, 19 nt, Artificial Sequence
  Description of Artificial Sequence: Synthetic oligonucleotide
ucuuuucugcacgccucgu

SEQ ID NO: 3133730 - RNA, 19 nt, Artificial Sequence
  Description of Artificial Sequence: Synthetic oligonucleotide
agcaagccaucaucaucga

SEQ ID NO: 3133731 - RNA, 19 nt, Artificial Sequence
  Description of Artificial Sequence: Synthetic oligonucleotide
cuuggucauuuugugggga

SEQ ID NO: 3133732 - RNA, 19 nt, Artificial Sequence
  Description of Artificial Sequence: Synthetic oligonucleotide
gaaguccuggaucucuuuu

SEQ ID NO: 3133733 - RNA, 19 nt, Artificial Sequence
  Description of Artificial Sequence: Synthetic oligonucleotide
ccagcaagccaucaucauc

SEQ ID NO: 3133734 - RNA, 19 nt, Artificial Sequence
  Description of Artificial Sequence: Synthetic oligonucleotide
cggaauucauucugcuucc

SEQ ID NO: 3133735 - RNA, 19 nt, Artificial Sequence
  Description of Artificial Sequence: Synthetic oligonucleotide
cuccgugauacaggucgcc

SEQ ID NO: 3133736 - RNA, 19 nt, Artificial Sequence
  Description of Artificial Sequence: Synthetic oligonucleotide
ugcuuccagcaagccauca

SEQ ID NO: 3133737 - RNA, 19 nt, Artificial Sequence
  Description of Artificial Sequence: Synthetic oligonucleotide
ucccagcuuucugagcccu

SEQ ID NO: 3133738 - RNA, 19 nt, Artificial Sequence
  Description of Artificial Sequence: Synthetic oligonucleotide
gaucucaucuucccagcuu

SEQ ID NO: 3133739 - RNA, 19 nt, Artificial Sequence
  Description of Artificial Sequence: Synthetic oligonucleotide
gugagauuuguugggaaau

SEQ ID NO: 3133740 - RNA, 19 nt, Artificial Sequence
  Description of Artificial Sequence: Synthetic oligonucleotide
agguaaacucgcagacugu

SEQ ID NO: 3133741 - RNA, 19 nt, Artificial Sequence
  Description of Artificial Sequence: Synthetic oligonucleotide
guaacaacuuggucauuuu

SEQ ID NO: 3133742 - RNA, 19 nt, Artificial Sequence
  Description of Artificial Sequence: Synthetic oligonucleotide
cccuggaagaacaaucgaa

SEQ ID NO: 3133743 - RNA, 19 nt, Artificial Sequence
  Description of Artificial Sequence: Synthetic oligonucleotide
cgcagacuguuccagaguc

SEQ ID NO: 3133744 - RNA, 19 nt, Artificial Sequence
  Description of Artificial Sequence: Synthetic oligonucleotide
caucuccgugauacagguc

SEQ ID NO: 3133745 - RNA, 19 nt, Artificial Sequence
  Description of Artificial Sequence: Synthetic oligonucleotide
ccuggaucucuuuucugca

SEQ ID NO: 3133746 - RNA, 19 nt, Artificial Sequence
  Description of Artificial Sequence: Synthetic oligonucleotide
cugcuuccagcaagccauc

SEQ ID NO: 3133747 - RNA, 19 nt, Artificial Sequence
  Description of Artificial Sequence: Synthetic oligonucleotide
cgacaucuccgugauacag

SEQ ID NO: 3133748 - RNA, 19 nt, Artificial Sequence
  Description of Artificial Sequence: Synthetic oligonucleotide
ccgugauacaggucgccuc

SEQ ID NO: 3133749 - RNA, 19 nt, Artificial Sequence
  Description of Artificial Sequence: Synthetic oligonucleotide
cgucgcggaauucauucug

SEQ ID NO: 3133750 - RNA, 19 nt, Artificial Sequence
  Description of Artificial Sequence: Synthetic oligonucleotide
ggucauuuuguggggaggu

SEQ ID NO: 3133751 - RNA, 19 nt, Artificial Sequence
  Description of Artificial Sequence: Synthetic oligonucleotide
gucauuuuguggggaggua

SEQ ID NO: 3133752 - RNA, 19 nt, Artificial Sequence
  Description of Artificial Sequence: Synthetic oligonucleotide
ugcacgccucgucgcggaa

SEQ ID NO: 3133753 - RNA, 19 nt, Artificial Sequence
  Description of Artificial Sequence: Synthetic oligonucleotide
gcccuggaagaacaaucga

SEQ ID NO: 3133754 - RNA, 19 nt, Artificial Sequence
  Description of Artificial Sequence: Synthetic oligonucleotide
uuguaacaacuuggucauu

SEQ ID NO: 3133755 - RNA, 19 nt, Artificial Sequence
  Description of Artificial Sequence: Synthetic oligonucleotide
gguaaacucgcagacuguu

SEQ ID NO: 3133756 - RNA, 19 nt, Artificial Sequence
  Description of Artificial Sequence: Synthetic oligonucleotide
ggaauucauucugcuucca

SEQ ID NO: 3133757 - RNA, 19 nt, Artificial Sequence
  Description of Artificial Sequence: Synthetic oligonucleotide
cugagcccuggaagaacaa

SEQ ID NO: 3133758 - RNA, 19 nt, Artificial Sequence
  Description of Artificial Sequence: Synthetic oligonucleotide
guggggagguaaacucgca

SEQ ID NO: 3133759 - RNA, 19 nt, Artificial Sequence
  Description of Artificial Sequence: Synthetic oligonucleotide
cagcuuucugagcccugga

SEQ ID NO: 3133760 - RNA, 19 nt, Artificial Sequence
  Description of Artificial Sequence: Synthetic oligonucleotide
cugcacgccucgucgcgga

SEQ ID NO: 3133761 - RNA, 19 nt, Artificial Sequence
  Description of Artificial Sequence: Synthetic oligonucleotide
ggagguaaacucgcagacu

SEQ ID NO: 3133762 - RNA, 19 nt, Artificial Sequence
  Description of Artificial Sequence: Synthetic oligonucleotide
acgccucgucgcggaauuc

SEQ ID NO: 3133763 - RNA, 19 nt, Artificial Sequence
  Description of Artificial Sequence: Synthetic oligonucleotide
ccuggauugaucucaucuu

SEQ ID NO: 3133764 - RNA, 19 nt, Artificial Sequence
  Description of Artificial Sequence: Synthetic oligonucleotide
gcuuccagcaagccaucau

SEQ ID NO: 3133765 - RNA, 19 nt, Artificial Sequence
  Description of Artificial Sequence: Synthetic oligonucleotide
cccagcuuucugagcccug

SEQ ID NO: 3133766 - RNA, 19 nt, Artificial Sequence
  Description of Artificial Sequence: Synthetic oligonucleotide
cagagucuccuggauugau

SEQ ID NO: 3133767 - RNA, 19 nt, Artificial Sequence
  Description of Artificial Sequence: Synthetic oligonucleotide
cacgccucgucgcggaauu

SEQ ID NO: 3133768 - RNA, 19 nt, Artificial Sequence
  Description of Artificial Sequence: Synthetic oligonucleotide
caucgacaucuccgugaua

SEQ ID NO: 3133769 - RNA, 19 nt, Artificial Sequence
  Description of Artificial Sequence: Synthetic oligonucleotide
gcagacuguuccagagucu

SEQ ID NO: 3133770 - RNA, 19 nt, Artificial Sequence
  Description of Artificial Sequence: Synthetic oligonucleotide
cgaagaaguccuggaucuc

SEQ ID NO: 3133771 - RNA, 19 nt, Artificial Sequence
  Description of Artificial Sequence: Synthetic oligonucleotide
ccagagucuccuggauuga

SEQ ID NO: 3133772 - RNA, 19 nt, Artificial Sequence
  Description of Artificial Sequence: Synthetic oligonucleotide
cgccucgucgcggaauuca

SEQ ID NO: 3133773 - RNA, 19 nt, Artificial Sequence
  Description of Artificial Sequence: Synthetic oligonucleotide
cgcggaauucauucugcuu

SEQ ID NO: 3133774 - RNA, 19 nt, Artificial Sequence
  Description of Artificial Sequence: Synthetic oligonucleotide
gccucgucgcggaauucau

SEQ ID NO: 3133775 - RNA, 19 nt, Artificial Sequence
  Description of Artificial Sequence: Synthetic oligonucleotide
ccucgucgcggaauucauu

SEQ ID NO: 3133776 - RNA, 19 nt, Artificial Sequence
  Description of Artificial Sequence: Synthetic oligonucleotide
gcacgccucgucgcggaau

SEQ ID NO: 3133777 - RNA, 19 nt, Artificial Sequence
  Description of Artificial Sequence: Synthetic oligonucleotide
aauauucucaaacaaaaca

SEQ ID NO: 3133778 - RNA, 19 nt, Artificial Sequence
  Description of Artificial Sequence: Synthetic oligonucleotide
uauauauauauauauaugu

SEQ ID NO: 3133779 - RNA, 19 nt, Artificial Sequence
  Description of Artificial Sequence: Synthetic oligonucleotide
uauauauauauauauauau

SEQ ID NO: 3133780 - RNA, 19 nt, Artificial Sequence
  Description of Artificial Sequence: Synthetic oligonucleotide
uuuagaaagaaaauauucu

SEQ ID NO: 3133781 - RNA, 19 nt, Artificial Sequence
  Description of Artificial Sequence: Synthetic oligonucleotide
uauauauauauauaugugu

SEQ ID NO: 3133782 - RNA, 19 nt, Artificial Sequence
  Description of Artificial Sequence: Synthetic oligonucleotide
aagaaaauauucucaaaca

SEQ ID NO: 3133783 - RNA, 19 nt, Artificial Sequence
  Description of Artificial Sequence: Synthetic oligonucleotide
aaugcuacagacaugcagg

SEQ ID NO: 3133784 - RNA, 19 nt, Artificial Sequence
  Description of Artificial Sequence: Synthetic oligonucleotide
auuuagaaagaaaauauuc

SEQ ID NO: 3133785 - RNA, 19 nt, Artificial Sequence
  Description of Artificial Sequence: Synthetic oligonucleotide
auauucucaaacaaaacac

SEQ ID NO: 3133786 - RNA, 19 nt, Artificial Sequence
  Description of Artificial Sequence: Synthetic oligonucleotide
uuagaaagaaaauauucuc

SEQ ID NO: 3133787 - RNA, 19 nt, Artificial Sequence
  Description of Artificial Sequence: Synthetic oligonucleotide
uauucucaaacaaaacacc

SEQ ID NO: 3133788 - RNA, 19 nt, Artificial Sequence
  Description of Artificial Sequence: Synthetic oligonucleotide
acugacuuccaucuguccc

SEQ ID NO: 3133789 - RNA, 19 nt, Artificial Sequence
  Description of Artificial Sequence: Synthetic oligonucleotide
uaaugcuacagacaugcag

SEQ ID NO: 3133790 - RNA, 19 nt, Artificial Sequence
  Description of Artificial Sequence: Synthetic oligonucleotide
gauauauauauauauauau

SEQ ID NO: 3133791 - RNA, 19 nt, Artificial Sequence
  Description of Artificial Sequence: Synthetic oligonucleotide
aaauauucucaaacaaaac

SEQ ID NO: 3133792 - RNA, 19 nt, Artificial Sequence
  Description of Artificial Sequence: Synthetic oligonucleotide
auucucaaacaaaacaccc

SEQ ID NO: 3133793 - RNA, 19 nt, Artificial Sequence
  Description of Artificial Sequence: Synthetic oligonucleotide
ucucaaacaaaacacccac

SEQ ID NO: 3133794 - RNA, 19 nt, Artificial Sequence
  Description of Artificial Sequence: Synthetic oligonucleotide
aacacccacagauauauau

SEQ ID NO: 3133795 - RNA, 19 nt, Artificial Sequence
  Description of Artificial Sequence: Synthetic oligonucleotide
uucucagcagcauucacag

SEQ ID NO: 3133796 - RNA, 19 nt, Artificial Sequence
  Description of Artificial Sequence: Synthetic oligonucleotide
aaaacacccacagauauau

SEQ ID NO: 3133797 - RNA, 19 nt, Artificial Sequence
  Description of Artificial Sequence: Synthetic oligonucleotide
agaaagaaaauauucucaa

SEQ ID NO: 3133798 - RNA, 19 nt, Artificial Sequence
  Description of Artificial Sequence: Synthetic oligonucleotide
aaaagccauccauggaggg

SEQ ID NO: 3133799 - RNA, 19 nt, Artificial Sequence
  Description of Artificial Sequence: Synthetic oligonucleotide
auauauauauauauaugug

SEQ ID NO: 3133800 - RNA, 19 nt, Artificial Sequence
  Description of Artificial Sequence: Synthetic oligonucleotide
auauauauauauauauaug

SEQ ID NO: 3133801 - RNA, 19 nt, Artificial Sequence
  Description of Artificial Sequence: Synthetic oligonucleotide
cucagcagcauucacagug

SEQ ID NO: 3133802 - RNA, 19 nt, Artificial Sequence
  Description of Artificial Sequence: Synthetic oligonucleotide
acaaaacacccacagauau

SEQ ID NO: 3133803 - RNA, 19 nt, Artificial Sequence
  Description of Artificial Sequence: Synthetic oligonucleotide
acauuuagaaagaaaauau

SEQ ID NO: 3133804 - RNA, 19 nt, Artificial Sequence
  Description of Artificial Sequence: Synthetic oligonucleotide
uauauauauauauguguuu

SEQ ID NO: 3133805 - RNA, 19 nt, Artificial Sequence
  Description of Artificial Sequence: Synthetic oligonucleotide
uucuccuaaugcuacagac

SEQ ID NO: 3133806 - RNA, 19 nt, Artificial Sequence
  Description of Artificial Sequence: Synthetic oligonucleotide
auauauauauauguguuuu

SEQ ID NO: 3133807 - RNA, 19 nt, Artificial Sequence
  Description of Artificial Sequence: Synthetic oligonucleotide
ucuccuaaugcuacagaca

SEQ ID NO: 3133808 - RNA, 19 nt, Artificial Sequence
  Description of Artificial Sequence: Synthetic oligonucleotide
aagccauccauggagggag

SEQ ID NO: 3133809 - RNA, 19 nt, Artificial Sequence
  Description of Artificial Sequence: Synthetic oligonucleotide
auauauauauauauguguu

SEQ ID NO: 3133810 - RNA, 19 nt, Artificial Sequence
  Description of Artificial Sequence: Synthetic oligonucleotide
ugcagcaggagccaugccu

SEQ ID NO: 3133811 - RNA, 19 nt, Artificial Sequence
  Description of Artificial Sequence: Synthetic oligonucleotide
uggagggagguucucagca

SEQ ID NO: 3133812 - RNA, 19 nt, Artificial Sequence
  Description of Artificial Sequence: Synthetic oligonucleotide
gucccuguaauccacagga

SEQ ID NO: 3133813 - RNA, 19 nt, Artificial Sequence
  Description of Artificial Sequence: Synthetic oligonucleotide
ccuaaugcuacagacaugc

SEQ ID NO: 3133814 - RNA, 19 nt, Artificial Sequence
  Description of Artificial Sequence: Synthetic oligonucleotide
agacaugcagggugaaggg

SEQ ID NO: 3133815 - RNA, 19 nt, Artificial Sequence
  Description of Artificial Sequence: Synthetic oligonucleotide
ucacaguguuugcagcagg

SEQ ID NO: 3133816 - RNA, 19 nt, Artificial Sequence
  Description of Artificial Sequence: Synthetic oligonucleotide
ugucccuguaauccacagg

SEQ ID NO: 3133817 - RNA, 19 nt, Artificial Sequence
  Description of Artificial Sequence: Synthetic oligonucleotide
gcuacagacaugcagggug

SEQ ID NO: 3133818 - RNA, 19 nt, Artificial Sequence
  Description of Artificial Sequence: Synthetic oligonucleotide
auucacaguguuugcagca

SEQ ID NO: 3133819 - RNA, 19 nt, Artificial Sequence
  Description of Artificial Sequence: Synthetic oligonucleotide
auauauauauauauauaua

SEQ ID NO: 3133820 - RNA, 19 nt, Artificial Sequence
  Description of Artificial Sequence: Synthetic oligonucleotide
cauucacaguguuugcagc

SEQ ID NO: 3133821 - RNA, 19 nt, Artificial Sequence
  Description of Artificial Sequence: Synthetic oligonucleotide
uuugcagcaggagccaugc

SEQ ID NO: 3133822 - RNA, 19 nt, Artificial Sequence
  Description of Artificial Sequence: Synthetic oligonucleotide
cagauauauauauauauau

SEQ ID NO: 3133823 - RNA, 19 nt, Artificial Sequence
  Description of Artificial Sequence: Synthetic oligonucleotide
acaugcagggugaagggac

SEQ ID NO: 3133824 - RNA, 19 nt, Artificial Sequence
  Description of Artificial Sequence: Synthetic oligonucleotide
agauauauauauauauaua

SEQ ID NO: 3133825 - RNA, 19 nt, Artificial Sequence
  Description of Artificial Sequence: Synthetic oligonucleotide
gaagggacugacuuccauc

SEQ ID NO: 3133826 - RNA, 19 nt, Artificial Sequence
  Description of Artificial Sequence: Synthetic oligonucleotide
cacagauauauauauauau

SEQ ID NO: 3133827 - RNA, 19 nt, Artificial Sequence
  Description of Artificial Sequence: Synthetic oligonucleotide
auggagggagguucucagc

SEQ ID NO: 3133828 - RNA, 19 nt, Artificial Sequence
  Description of Artificial Sequence: Synthetic oligonucleotide
agaaagacauuuagaaaga

SEQ ID NO: 3133829 - RNA, 19 nt, Artificial Sequence
  Description of Artificial Sequence: Synthetic oligonucleotide
cauggagggagguucucag

SEQ ID NO: 3133830 - RNA, 19 nt, Artificial Sequence
  Description of Artificial Sequence: Synthetic oligonucleotide
ucagcagcauucacagugu

SEQ ID NO: 3133831 - RNA, 19 nt, Artificial Sequence
  Description of Artificial Sequence: Synthetic oligonucleotide
acagauauauauauauaua

SEQ ID NO: 3133832 - RNA, 19 nt, Artificial Sequence
  Description of Artificial Sequence: Synthetic oligonucleotide
agggugaagggacugacuu

SEQ ID NO: 3133833 - RNA, 19 nt, Artificial Sequence
  Description of Artificial Sequence: Synthetic oligonucleotide
uucacaguguuugcagcag

SEQ ID NO: 3133834 - RNA, 19 nt, Artificial Sequence
  Description of Artificial Sequence: Synthetic oligonucleotide
aaagccauccauggaggga

SEQ ID NO: 3133835 - RNA, 19 nt, Artificial Sequence
  Description of Artificial Sequence: Synthetic oligonucleotide
gagggagguucucagcagc

SEQ ID NO: 3133836 - RNA, 19 nt, Artificial Sequence
  Description of Artificial Sequence: Synthetic oligonucleotide
ggugaagggacugacuucc

SEQ ID NO: 3133837 - RNA, 19 nt, Artificial Sequence
  Description of Artificial Sequence: Synthetic oligonucleotide
ugccuucuccuaaugcuac

SEQ ID NO: 3133838 - RNA, 19 nt, Artificial Sequence
  Description of Artificial Sequence: Synthetic oligonucleotide
aacaaaacacccacagaua

SEQ ID NO: 3133839 - RNA, 19 nt, Artificial Sequence
  Description of Artificial Sequence: Synthetic oligonucleotide
uccuaaugcuacagacaug

SEQ ID NO: 3133840 - RNA, 19 nt, Artificial Sequence
  Description of Artificial Sequence: Synthetic oligonucleotide
ucugucccuguaauccaca

SEQ ID NO: 3133841 - RNA, 19 nt, Artificial Sequence
  Description of Artificial Sequence: Synthetic oligonucleotide
ucccuguaauccacaggag

SEQ ID NO: 3133842 - RNA, 19 nt, Artificial Sequence
  Description of Artificial Sequence: Synthetic oligonucleotide
ccaucugucccuguaaucc

SEQ ID NO: 3133843 - RNA, 19 nt, Artificial Sequence
  Description of Artificial Sequence: Synthetic oligonucleotide
ugaagggacugacuuccau

SEQ ID NO: 3133844 - RNA, 19 nt, Artificial Sequence
  Description of Artificial Sequence: Synthetic oligonucleotide
gagguucucagcagcauuc

SEQ ID NO: 3133845 - RNA, 19 nt, Artificial Sequence
  Description of Artificial Sequence: Synthetic oligonucleotide
cauccauggagggagguuc

SEQ ID NO: 3133846 - RNA, 19 nt, Artificial Sequence
  Description of Artificial Sequence: Synthetic oligonucleotide
gacugacuuccaucugucc

SEQ ID NO: 3133847 - RNA, 19 nt, Artificial Sequence
  Description of Artificial Sequence: Synthetic oligonucleotide
agcauucacaguguuugca

SEQ ID NO: 3133848 - RNA, 19 nt, Artificial Sequence
  Description of Artificial Sequence: Synthetic oligonucleotide
guucucagcagcauucaca

SEQ ID NO: 3133849 - RNA, 19 nt, Artificial Sequence
  Description of Artificial Sequence: Synthetic oligonucleotide
cucaaacaaaacacccaca

SEQ ID NO: 3133850 - RNA, 19 nt, Artificial Sequence
  Description of Artificial Sequence: Synthetic oligonucleotide
caugccuucuccuaaugcu

SEQ ID NO: 3133851 - RNA, 19 nt, Artificial Sequence
  Description of Artificial Sequence: Synthetic oligonucleotide
aucugucccuguaauccac

SEQ ID NO: 3133852 - RNA, 19 nt, Artificial Sequence
  Description of Artificial Sequence: Synthetic oligonucleotide
cuacagacaugcaggguga

SEQ ID NO: 3133853 - RNA, 19 nt, Artificial Sequence
  Description of Artificial Sequence: Synthetic oligonucleotide
cuccuaaugcuacagacau

SEQ ID NO: 3133854 - RNA, 19 nt, Artificial Sequence
  Description of Artificial Sequence: Synthetic oligonucleotide
acuuccaucugucccugua

SEQ ID NO: 3133855 - RNA, 19 nt, Artificial Sequence
  Description of Artificial Sequence: Synthetic oligonucleotide
cagcauucacaguguuugc

SEQ ID NO: 3133856 - RNA, 19 nt, Artificial Sequence
  Description of Artificial Sequence: Synthetic oligonucleotide
cacaguguuugcagcagga

SEQ ID NO: 3133857 - RNA, 19 nt, Artificial Sequence
  Description of Artificial Sequence: Synthetic oligonucleotide
acagacaugcagggugaag

SEQ ID NO: 3133858 - RNA, 19 nt, Artificial Sequence
  Description of Artificial Sequence: Synthetic oligonucleotide
caucugucccuguaaucca

SEQ ID NO: 3133859 - RNA, 19 nt, Artificial Sequence
  Description of Artificial Sequence: Synthetic oligonucleotide
gacaugcagggugaaggga

SEQ ID NO: 3133860 - RNA, 19 nt, Artificial Sequence
  Description of Artificial Sequence: Synthetic oligonucleotide
cugacuuccaucugucccu

SEQ ID NO: 3133861 - RNA, 19 nt, Artificial Sequence
  Description of Artificial Sequence: Synthetic oligonucleotide
caaaacacccacagauaua

SEQ ID NO: 3133862 - RNA, 19 nt, Artificial Sequence
  Description of Artificial Sequence: Synthetic oligonucleotide
guuugcagcaggagccaug

SEQ ID NO: 3133863 - RNA, 19 nt, Artificial Sequence
  Description of Artificial Sequence: Synthetic oligonucleotide
cuucuccuaaugcuacaga

SEQ ID NO: 3133864 - RNA, 19 nt, Artificial Sequence
  Description of Artificial Sequence: Synthetic oligonucleotide
ugcagggugaagggacuga

SEQ ID NO: 3133865 - RNA, 19 nt, Artificial Sequence
  Description of Artificial Sequence: Synthetic oligonucleotide
agggacugacuuccaucug

SEQ ID NO: 3133866 - RNA, 19 nt, Artificial Sequence
  Description of Artificial Sequence: Synthetic oligonucleotide
cacccacagauauauauau

SEQ ID NO: 3133867 - RNA, 19 nt, Artificial Sequence
  Description of Artificial Sequence: Synthetic oligonucleotide
ugcuacagacaugcagggu

SEQ ID NO: 3133868 - RNA, 19 nt, Artificial Sequence
  Description of Artificial Sequence: Synthetic oligonucleotide
caggagccaugccuucucc

SEQ ID NO: 3133869 - RNA, 19 nt, Artificial Sequence
  Description of Artificial Sequence: Synthetic oligonucleotide
gagccaugccuucuccuaa

SEQ ID NO: 3133870 - RNA, 19 nt, Artificial Sequence
  Description of Artificial Sequence: Synthetic oligonucleotide
ucucagcagcauucacagu

SEQ ID NO: 3133871 - RNA, 19 nt, Artificial Sequence
  Description of Artificial Sequence: Synthetic oligonucleotide
cccacagauauauauauau

SEQ ID NO: 3133872 - RNA, 19 nt, Artificial Sequence
  Description of Artificial Sequence: Synthetic oligonucleotide
cuaaugcuacagacaugca

SEQ ID NO: 3133873 - RNA, 19 nt, Artificial Sequence
  Description of Artificial Sequence: Synthetic oligonucleotide
cuuccaucugucccuguaa

SEQ ID NO: 3133874 - RNA, 19 nt, Artificial Sequence
  Description of Artificial Sequence: Synthetic oligonucleotide
ccaugccuucuccuaaugc

SEQ ID NO: 3133875 - RNA, 19 nt, Artificial Sequence
  Description of Artificial Sequence: Synthetic oligonucleotide
agguucucagcagcauuca

SEQ ID NO: 3133876 - RNA, 19 nt, Artificial Sequence
  Description of Artificial Sequence: Synthetic oligonucleotide
agccaugccuucuccuaau

SEQ ID NO: 3133877 - RNA, 19 nt, Artificial Sequence
  Description of Artificial Sequence: Synthetic oligonucleotide
gguucucagcagcauucac

SEQ ID NO: 3133878 - RNA, 19 nt, Artificial Sequence
  Description of Artificial Sequence: Synthetic oligonucleotide
uguuugcagcaggagccau

SEQ ID NO: 3133879 - RNA, 19 nt, Artificial Sequence
  Description of Artificial Sequence: Synthetic oligonucleotide
ccuucuccuaaugcuacag

SEQ ID NO: 3133880 - RNA, 19 nt, Artificial Sequence
  Description of Artificial Sequence: Synthetic oligonucleotide
augccuucuccuaaugcua

SEQ ID NO: 3133881 - RNA, 19 nt, Artificial Sequence
  Description of Artificial Sequence: Synthetic oligonucleotide
agggagguucucagcagca

SEQ ID NO: 3133882 - RNA, 19 nt, Artificial Sequence
  Description of Artificial Sequence: Synthetic oligonucleotide
augcagggugaagggacug

SEQ ID NO: 3133883 - RNA, 19 nt, Artificial Sequence
  Description of Artificial Sequence: Synthetic oligonucleotide
uacagacaugcagggugaa

SEQ ID NO: 3133884 - RNA, 19 nt, Artificial Sequence
  Description of Artificial Sequence: Synthetic oligonucleotide
gggacugacuuccaucugu

SEQ ID NO: 3133885 - RNA, 19 nt, Artificial Sequence
  Description of Artificial Sequence: Synthetic oligonucleotide
agcaggagccaugccuucu

SEQ ID NO: 3133886 - RNA, 19 nt, Artificial Sequence
  Description of Artificial Sequence: Synthetic oligonucleotide
agcagcauucacaguguuu

SEQ ID NO: 3133887 - RNA, 19 nt, Artificial Sequence
  Description of Artificial Sequence: Synthetic oligonucleotide
aaacacccacagauauaua

SEQ ID NO: 3133888 - RNA, 19 nt, Artificial Sequence
  Description of Artificial Sequence: Synthetic oligonucleotide
ccacagauauauauauaua

SEQ ID NO: 3133889 - RNA, 19 nt, Artificial Sequence
  Description of Artificial Sequence: Synthetic oligonucleotide
uccauggagggagguucuc

SEQ ID NO: 3133890 - RNA, 19 nt, Artificial Sequence
  Description of Artificial Sequence: Synthetic oligonucleotide
acccacagauauauauaua

SEQ ID NO: 3133891 - RNA, 19 nt, Artificial Sequence
  Description of Artificial Sequence: Synthetic oligonucleotide
ggacugacuuccaucuguc

SEQ ID NO: 3133892 - RNA, 19 nt, Artificial Sequence
  Description of Artificial Sequence: Synthetic oligonucleotide
caugcagggugaagggacu

SEQ ID NO: 3133893 - RNA, 19 nt, Artificial Sequence
  Description of Artificial Sequence: Synthetic oligonucleotide
agccauccauggagggagg

SEQ ID NO: 3133894 - RNA, 19 nt, Artificial Sequence
  Description of Artificial Sequence: Synthetic oligonucleotide
cagcaggagccaugccuuc

SEQ ID NO: 3133895 - RNA, 19 nt, Artificial Sequence
  Description of Artificial Sequence: Synthetic oligonucleotide
gccaugccuucuccuaaug

SEQ ID NO: 3133896 - RNA, 19 nt, Artificial Sequence
  Description of Artificial Sequence: Synthetic oligonucleotide
gcagggugaagggacugac

SEQ ID NO: 3133897 - RNA, 19 nt, Artificial Sequence
  Description of Artificial Sequence: Synthetic oligonucleotide
gugaagggacugacuucca

SEQ ID NO: 3133898 - RNA, 19 nt, Artificial Sequence
  Description of Artificial Sequence: Synthetic oligonucleotide
cagggugaagggacugacu

SEQ ID NO: 3133899 - RNA, 19 nt, Artificial Sequence
  Description of Artificial Sequence: Synthetic oligonucleotide
ggagguucucagcagcauu

SEQ ID NO: 3133900 - RNA, 19 nt, Artificial Sequence
  Description of Artificial Sequence: Synthetic oligonucleotide
gacuuccaucugucccugu

SEQ ID NO: 3133901 - RNA, 19 nt, Artificial Sequence
  Description of Artificial Sequence: Synthetic oligonucleotide
ccauggagggagguucuca

SEQ ID NO: 3133902 - RNA, 19 nt, Artificial Sequence
  Description of Artificial Sequence: Synthetic oligonucleotide
gcagcaggagccaugccuu

SEQ ID NO: 3133903 - RNA, 19 nt, Artificial Sequence
  Description of Artificial Sequence: Synthetic oligonucleotide
cagcagcauucacaguguu

SEQ ID NO: 3133904 - RNA, 19 nt, Artificial Sequence
  Description of Artificial Sequence: Synthetic oligonucleotide
gggagguucucagcagcau

SEQ ID NO: 3133905 - RNA, 19 nt, Artificial Sequence
  Description of Artificial Sequence: Synthetic oligonucleotide
gccauccauggagggaggu

SEQ ID NO: 3133906 - RNA, 19 nt, Artificial Sequence
  Description of Artificial Sequence: Synthetic oligonucleotide
ccauccauggagggagguu

SEQ ID NO: 3133907 - RNA, 19 nt, Artificial Sequence
  Description of Artificial Sequence: Synthetic oligonucleotide
uuuguuuuagcauaaaagg

SEQ ID NO: 3133908 - RNA, 19 nt, Artificial Sequence
  Description of Artificial Sequence: Synthetic oligonucleotide
acaauaauaaaauauaggu

SEQ ID NO: 3133909 - RNA, 19 nt, Artificial Sequence
  Description of Artificial Sequence: Synthetic oligonucleotide
uaaaauauagguaacauua

SEQ ID NO: 3133910 - RNA, 19 nt, Artificial Sequence
  Description of Artificial Sequence: Synthetic oligonucleotide
uuuuguuuuagcauaaaag

SEQ ID NO: 3133911 - RNA, 19 nt, Artificial Sequence
  Description of Artificial Sequence: Synthetic oligonucleotide
auacacaugacauuuaaac

SEQ ID NO: 3133912 - RNA, 19 nt, Artificial Sequence
  Description of Artificial Sequence: Synthetic oligonucleotide
aauauagguaacauuauac

SEQ ID NO: 3133913 - RNA, 19 nt, Artificial Sequence
  Description of Artificial Sequence: Synthetic oligonucleotide
gucauaacccauuagaugg

SEQ ID NO: 3133914 - RNA, 19 nt, Artificial Sequence
  Description of Artificial Sequence: Synthetic oligonucleotide
uaacaauaauaaaauauag

SEQ ID NO: 3133915 - RNA, 19 nt, Artificial Sequence
  Description of Artificial Sequence: Synthetic oligonucleotide
uguuuuagcauaaaaggug

SEQ ID NO: 3133916 - RNA, 19 nt, Artificial Sequence
  Description of Artificial Sequence: Synthetic oligonucleotide
aacaauaauaaaauauagg

SEQ ID NO: 3133917 - RNA, 19 nt, Artificial Sequence
  Description of Artificial Sequence: Synthetic oligonucleotide
acauuauacaccgaaauac

SEQ ID NO: 3133918 - RNA, 19 nt, Artificial Sequence
  Description of Artificial Sequence: Synthetic oligonucleotide
augguuauaguccucaggg

SEQ ID NO: 3133919 - RNA, 19 nt, Artificial Sequence
  Description of Artificial Sequence: Synthetic oligonucleotide
aacuucuacauucaaaagu

SEQ ID NO: 3133920 - RNA, 19 nt, Artificial Sequence
  Description of Artificial Sequence: Synthetic oligonucleotide
uagguaacauuauacaccg

SEQ ID NO: 3133921 - RNA, 19 nt, Artificial Sequence
  Description of Artificial Sequence: Synthetic oligonucleotide
auagguaacauuauacacc

SEQ ID NO: 3133922 - RNA, 19 nt, Artificial Sequence
  Description of Artificial Sequence: Synthetic oligonucleotide
cauuagaugguuauagucc

SEQ ID NO: 3133923 - RNA, 19 nt, Artificial Sequence
  Description of Artificial Sequence: Synthetic oligonucleotide
uucacuaacuucuacauuc

SEQ ID NO: 3133924 - RNA, 19 nt, Artificial Sequence
  Description of Artificial Sequence: Synthetic oligonucleotide
uuucuguucacuaacuucu

SEQ ID NO: 3133925 - RNA, 19 nt, Artificial Sequence
  Description of Artificial Sequence: Synthetic oligonucleotide
aaugguuugucauaaccca

SEQ ID NO: 3133926 - RNA, 19 nt, Artificial Sequence
  Description of Artificial Sequence: Synthetic oligonucleotide
aagagauuuuguuuuagca

SEQ ID NO: 3133927 - RNA, 19 nt, Artificial Sequence
  Description of Artificial Sequence: Synthetic oligonucleotide
ucaggguuuggaaagagcc

SEQ ID NO: 3133928 - RNA, 19 nt, Artificial Sequence
  Description of Artificial Sequence: Synthetic oligonucleotide
uacaccgaaauacacauga

SEQ ID NO: 3133929 - RNA, 19 nt, Artificial Sequence
  Description of Artificial Sequence: Synthetic oligonucleotide
ugaaugguuugucauaacc

SEQ ID NO: 3133930 - RNA, 19 nt, Artificial Sequence
  Description of Artificial Sequence: Synthetic oligonucleotide
uauagguaacauuauacac

SEQ ID NO: 3133931 - RNA, 19 nt, Artificial Sequence
  Description of Artificial Sequence: Synthetic oligonucleotide
cauggauugacuaauaaga

SEQ ID NO: 3133932 - RNA, 19 nt, Artificial Sequence
  Description of Artificial Sequence: Synthetic oligonucleotide
aauaaaauauagguaacau

SEQ ID NO: 3133933 - RNA, 19 nt, Artificial Sequence
  Description of Artificial Sequence: Synthetic oligonucleotide
uuguuuuagcauaaaaggu

SEQ ID NO: 3133934 - RNA, 19 nt, Artificial Sequence
  Description of Artificial Sequence: Synthetic oligonucleotide
uuuggaaagagccauggau

SEQ ID NO: 3133935 - RNA, 19 nt, Artificial Sequence
  Description of Artificial Sequence: Synthetic oligonucleotide
uaauaagagauuuuguuuu

SEQ ID NO: 3133936 - RNA, 19 nt, Artificial Sequence
  Description of Artificial Sequence: Synthetic oligonucleotide
aaaagugaaugguuuguca

SEQ ID NO: 3133937 - RNA, 19 nt, Artificial Sequence
  Description of Artificial Sequence: Synthetic oligonucleotide
uuauacaccgaaauacaca

SEQ ID NO: 3133938 - RNA, 19 nt, Artificial Sequence
  Description of Artificial Sequence: Synthetic oligonucleotide
uacauucaaaagugaaugg

SEQ ID NO: 3133939 - RNA, 19 nt, Artificial Sequence
  Description of Artificial Sequence: Synthetic oligonucleotide
auauagguaacauuauaca

SEQ ID NO: 3133940 - RNA, 19 nt, Artificial Sequence
  Description of Artificial Sequence: Synthetic oligonucleotide
uauacaccgaaauacacau

SEQ ID NO: 3133941 - RNA, 19 nt, Artificial Sequence
  Description of Artificial Sequence: Synthetic oligonucleotide
acacaugacauuuaaacaa

SEQ ID NO: 3133942 - RNA, 19 nt, Artificial Sequence
  Description of Artificial Sequence: Synthetic oligonucleotide
acuaauaagagauuuuguu

SEQ ID NO: 3133943 - RNA, 19 nt, Artificial Sequence
  Description of Artificial Sequence: Synthetic oligonucleotide
aaagugaaugguuugucau

SEQ ID NO: 3133944 - RNA, 19 nt, Artificial Sequence
  Description of Artificial Sequence: Synthetic oligonucleotide
uaacauuauacaccgaaau

SEQ ID NO: 3133945 - RNA, 19 nt, Artificial Sequence
  Description of Artificial Sequence: Synthetic oligonucleotide
aaauacacaugacauuuaa

SEQ ID NO: 3133946 - RNA, 19 nt, Artificial Sequence
  Description of Artificial Sequence: Synthetic oligonucleotide
ugacuaauaagagauuuug

SEQ ID NO: 3133947 - RNA, 19 nt, Artificial Sequence
  Description of Artificial Sequence: Synthetic oligonucleotide
ugucauaacccauuagaug

SEQ ID NO: 3133948 - RNA, 19 nt, Artificial Sequence
  Description of Artificial Sequence: Synthetic oligonucleotide
aaauauagguaacauuaua

SEQ ID NO: 3133949 - RNA, 19 nt, Artificial Sequence
  Description of Artificial Sequence: Synthetic oligonucleotide
uaauaaaauauagguaaca

SEQ ID NO: 3133950 - RNA, 19 nt, Artificial Sequence
  Description of Artificial Sequence: Synthetic oligonucleotide
cuacauucaaaagugaaug

SEQ ID NO: 3133951 - RNA, 19 nt, Artificial Sequence
  Description of Artificial Sequence: Synthetic oligonucleotide
gaugguuauaguccucagg

SEQ ID NO: 3133952 - RNA, 19 nt, Artificial Sequence
  Description of Artificial Sequence: Synthetic oligonucleotide
auaauaaaauauagguaac

SEQ ID NO: 3133953 - RNA, 19 nt, Artificial Sequence
  Description of Artificial Sequence: Synthetic oligonucleotide
auuagaugguuauaguccu

SEQ ID NO: 3133954 - RNA, 19 nt, Artificial Sequence
  Description of Artificial Sequence: Synthetic oligonucleotide
cuaacuucuacauucaaaa

SEQ ID NO: 3133955 - RNA, 19 nt, Artificial Sequence
  Description of Artificial Sequence: Synthetic oligonucleotide
gaaugguuugucauaaccc

SEQ ID NO: 3133956 - RNA, 19 nt, Artificial Sequence
  Description of Artificial Sequence: Synthetic oligonucleotide
acuucuacauucaaaagug

SEQ ID NO: 3133957 - RNA, 19 nt, Artificial Sequence
  Description of Artificial Sequence: Synthetic oligonucleotide
auuauacaccgaaauacac

SEQ ID NO: 3133958 - RNA, 19 nt, Artificial Sequence
  Description of Artificial Sequence: Synthetic oligonucleotide
uucaaaagugaaugguuug

SEQ ID NO: 3133959 - RNA, 19 nt, Artificial Sequence
  Description of Artificial Sequence: Synthetic oligonucleotide
uaagagauuuuguuuuagc

SEQ ID NO: 3133960 - RNA, 19 nt, Artificial Sequence
  Description of Artificial Sequence: Synthetic oligonucleotide
agagauuuuguuuuagcau

SEQ ID NO: 3133961 - RNA, 19 nt, Artificial Sequence
  Description of Artificial Sequence: Synthetic oligonucleotide
auaaaauauagguaacauu

SEQ ID NO: 3133962 - RNA, 19 nt, Artificial Sequence
  Description of Artificial Sequence: Synthetic oligonucleotide
uggaaagagccauggauug

SEQ ID NO: 3133963 - RNA, 19 nt, Artificial Sequence
  Description of Artificial Sequence: Synthetic oligonucleotide
uuagcauaaaaggugguaa

SEQ ID NO: 3133964 - RNA, 19 nt, Artificial Sequence
  Description of Artificial Sequence: Synthetic oligonucleotide
gagauuuuguuuuagcaua

SEQ ID NO: 3133965 - RNA, 19 nt, Artificial Sequence
  Description of Artificial Sequence: Synthetic oligonucleotide
uaacuucuacauucaaaag

SEQ ID NO: 3133966 - RNA, 19 nt, Artificial Sequence
  Description of Artificial Sequence: Synthetic oligonucleotide
uguucacuaacuucuacau

SEQ ID NO: 3133967 - RNA, 19 nt, Artificial Sequence
  Description of Artificial Sequence: Synthetic oligonucleotide
aauaagagauuuuguuuua

SEQ ID NO: 3133968 - RNA, 19 nt, Artificial Sequence
  Description of Artificial Sequence: Synthetic oligonucleotide
uugucauaacccauuagau

SEQ ID NO: 3133969 - RNA, 19 nt, Artificial Sequence
  Description of Artificial Sequence: Synthetic oligonucleotide
uuggaaagagccauggauu

SEQ ID NO: 3133970 - RNA, 19 nt, Artificial Sequence
  Description of Artificial Sequence: Synthetic oligonucleotide
uucauccucaugcaguuuc

SEQ ID NO: 3133971 - RNA, 19 nt, Artificial Sequence
  Description of Artificial Sequence: Synthetic oligonucleotide
caauaauaaaauauaggua

SEQ ID NO: 3133972 - RNA, 19 nt, Artificial Sequence
  Description of Artificial Sequence: Synthetic oligonucleotide
ucaaaagugaaugguuugu

SEQ ID NO: 3133973 - RNA, 19 nt, Artificial Sequence
  Description of Artificial Sequence: Synthetic oligonucleotide
guuucuguucacuaacuuc

SEQ ID NO: 3133974 - RNA, 19 nt, Artificial Sequence
  Description of Artificial Sequence: Synthetic oligonucleotide
aaaauauagguaacauuau

SEQ ID NO: 3133975 - RNA, 19 nt, Artificial Sequence
  Description of Artificial Sequence: Synthetic oligonucleotide
auugacuaauaagagauuu

SEQ ID NO: 3133976 - RNA, 19 nt, Artificial Sequence
  Description of Artificial Sequence: Synthetic oligonucleotide
acauucaaaagugaauggu

SEQ ID NO: 3133977 - RNA, 19 nt, Artificial Sequence
  Description of Artificial Sequence: Synthetic oligonucleotide
cauuauacaccgaaauaca

SEQ ID NO: 3133978 - RNA, 19 nt, Artificial Sequence
  Description of Artificial Sequence: Synthetic oligonucleotide
acccauuagaugguuauag

SEQ ID NO: 3133979 - RNA, 19 nt, Artificial Sequence
  Description of Artificial Sequence: Synthetic oligonucleotide
ucacuaacuucuacauuca

SEQ ID NO: 3133980 - RNA, 19 nt, Artificial Sequence
  Description of Artificial Sequence: Synthetic oligonucleotide
uaacccauuagaugguuau

SEQ ID NO: 3133981 - RNA, 19 nt, Artificial Sequence
  Description of Artificial Sequence: Synthetic oligonucleotide
gaaagagccauggauugac

SEQ ID NO: 3133982 - RNA, 19 nt, Artificial Sequence
  Description of Artificial Sequence: Synthetic oligonucleotide
auggauugacuaauaagag

SEQ ID NO: 3133983 - RNA, 19 nt, Artificial Sequence
  Description of Artificial Sequence: Synthetic oligonucleotide
uuuuagcauaaaagguggu

SEQ ID NO: 3133984 - RNA, 19 nt, Artificial Sequence
  Description of Artificial Sequence: Synthetic oligonucleotide
auaagagauuuuguuuuag

SEQ ID NO: 3133985 - RNA, 19 nt, Artificial Sequence
  Description of Artificial Sequence: Synthetic oligonucleotide
uuuagcauaaaagguggua

SEQ ID NO: 3133986 - RNA, 19 nt, Artificial Sequence
  Description of Artificial Sequence: Synthetic oligonucleotide
ucuguucacuaacuucuac

SEQ ID NO: 3133987 - RNA, 19 nt, Artificial Sequence
  Description of Artificial Sequence: Synthetic oligonucleotide
gguaacauuauacaccgaa

SEQ ID NO: 3133988 - RNA, 19 nt, Artificial Sequence
  Description of Artificial Sequence: Synthetic oligonucleotide
uagaugguuauaguccuca

SEQ ID NO: 3133989 - RNA, 19 nt, Artificial Sequence
  Description of Artificial Sequence: Synthetic oligonucleotide
aagugaaugguuugucaua

SEQ ID NO: 3133990 - RNA, 19 nt, Artificial Sequence
  Description of Artificial Sequence: Synthetic oligonucleotide
uuuucauccucaugcaguu

SEQ ID NO: 3133991 - RNA, 19 nt, Artificial Sequence
  Description of Artificial Sequence: Synthetic oligonucleotide
accgaaauacacaugacau

SEQ ID NO: 3133992 - RNA, 19 nt, Artificial Sequence
  Description of Artificial Sequence: Synthetic oligonucleotide
uugacuaauaagagauuuu

SEQ ID NO: 3133993 - RNA, 19 nt, Artificial Sequence
  Description of Artificial Sequence: Synthetic oligonucleotide
ucauaacccauuagauggu

SEQ ID NO: 3133994 - RNA, 19 nt, Artificial Sequence
  Description of Artificial Sequence: Synthetic oligonucleotide
aagagccauggauugacua

SEQ ID NO: 3133995 - RNA, 19 nt, Artificial Sequence
  Description of Artificial Sequence: Synthetic oligonucleotide
guuugucauaacccauuag

SEQ ID NO: 3133996 - RNA, 19 nt, Artificial Sequence
  Description of Artificial Sequence: Synthetic oligonucleotide
guccucaggguuuggaaag

SEQ ID NO: 3133997 - RNA, 19 nt, Artificial Sequence
  Description of Artificial Sequence: Synthetic oligonucleotide
ugcaguuucuguucacuaa

SEQ ID NO: 3133998 - RNA, 19 nt, Artificial Sequence
  Description of Artificial Sequence: Synthetic oligonucleotide
agugaaugguuugucauaa

SEQ ID NO: 3133999 - RNA, 19 nt, Artificial Sequence
  Description of Artificial Sequence: Synthetic oligonucleotide
aauacacaugacauuuaaa

SEQ ID NO: 3134000 - RNA, 19 nt, Artificial Sequence
  Description of Artificial Sequence: Synthetic oligonucleotide
agagccauggauugacuaa

SEQ ID NO: 3134001 - RNA, 19 nt, Artificial Sequence
  Description of Artificial Sequence: Synthetic oligonucleotide
cuguucacuaacuucuaca

SEQ ID NO: 3134002 - RNA, 19 nt, Artificial Sequence
  Description of Artificial Sequence: Synthetic oligonucleotide
cuaauaagagauuuuguuu

SEQ ID NO: 3134003 - RNA, 19 nt, Artificial Sequence
  Description of Artificial Sequence: Synthetic oligonucleotide
uuauaguccucaggguuug

SEQ ID NO: 3134004 - RNA, 19 nt, Artificial Sequence
  Description of Artificial Sequence: Synthetic oligonucleotide
auucaaaagugaaugguuu

SEQ ID NO: 3134005 - RNA, 19 nt, Artificial Sequence
  Description of Artificial Sequence: Synthetic oligonucleotide
gguuuggaaagagccaugg

SEQ ID NO: 3134006 - RNA, 19 nt, Artificial Sequence
  Description of Artificial Sequence: Synthetic oligonucleotide
cucaggguuuggaaagagc

SEQ ID NO: 3134007 - RNA, 19 nt, Artificial Sequence
  Description of Artificial Sequence: Synthetic oligonucleotide
uccucaugcaguuucuguu

SEQ ID NO: 3134008 - RNA, 19 nt, Artificial Sequence
  Description of Artificial Sequence: Synthetic oligonucleotide
ugguuugucauaacccauu

SEQ ID NO: 3134009 - RNA, 19 nt, Artificial Sequence
  Description of Artificial Sequence: Synthetic oligonucleotide
ccauggauugacuaauaag

SEQ ID NO: 3134010 - RNA, 19 nt, Artificial Sequence
  Description of Artificial Sequence: Synthetic oligonucleotide
ccauuagaugguuauaguc

SEQ ID NO: 3134011 - RNA, 19 nt, Artificial Sequence
  Description of Artificial Sequence: Synthetic oligonucleotide
ugguuauaguccucagggu

SEQ ID NO: 3134012 - RNA, 19 nt, Artificial Sequence
  Description of Artificial Sequence: Synthetic oligonucleotide
aguuucuguucacuaacuu

SEQ ID NO: 3134013 - RNA, 19 nt, Artificial Sequence
  Description of Artificial Sequence: Synthetic oligonucleotide
acuaacuucuacauucaaa

SEQ ID NO: 3134014 - RNA, 19 nt, Artificial Sequence
  Description of Artificial Sequence: Synthetic oligonucleotide
caccgaaauacacaugaca

SEQ ID NO: 3134015 - RNA, 19 nt, Artificial Sequence
  Description of Artificial Sequence: Synthetic oligonucleotide
uuagaugguuauaguccuc

SEQ ID NO: 3134016 - RNA, 19 nt, Artificial Sequence
  Description of Artificial Sequence: Synthetic oligonucleotide
ucauccucaugcaguuucu

SEQ ID NO: 3134017 - RNA, 19 nt, Artificial Sequence
  Description of Artificial Sequence: Synthetic oligonucleotide
auccucaugcaguuucugu

SEQ ID NO: 3134018 - RNA, 19 nt, Artificial Sequence
  Description of Artificial Sequence: Synthetic oligonucleotide
caaaagugaaugguuuguc

SEQ ID NO: 3134019 - RNA, 19 nt, Artificial Sequence
  Description of Artificial Sequence: Synthetic oligonucleotide
uaguccucaggguuuggaa

SEQ ID NO: 3134020 - RNA, 19 nt, Artificial Sequence
  Description of Artificial Sequence: Synthetic oligonucleotide
aggguuuggaaagagccau

SEQ ID NO: 3134021 - RNA, 19 nt, Artificial Sequence
  Description of Artificial Sequence: Synthetic oligonucleotide
gcaguuucuguucacuaac

SEQ ID NO: 3134022 - RNA, 19 nt, Artificial Sequence
  Description of Artificial Sequence: Synthetic oligonucleotide
cuucuacauucaaaaguga

SEQ ID NO: 3134023 - RNA, 19 nt, Artificial Sequence
  Description of Artificial Sequence: Synthetic oligonucleotide
acaccgaaauacacaugac

SEQ ID NO: 3134024 - RNA, 19 nt, Artificial Sequence
  Description of Artificial Sequence: Synthetic oligonucleotide
agauuuuguuuuagcauaa

SEQ ID NO: 3134025 - RNA, 19 nt, Artificial Sequence
  Description of Artificial Sequence: Synthetic oligonucleotide
uucuguucacuaacuucua

SEQ ID NO: 3134026 - RNA, 19 nt, Artificial Sequence
  Description of Artificial Sequence: Synthetic oligonucleotide
cauucaaaagugaaugguu

SEQ ID NO: 3134027 - RNA, 19 nt, Artificial Sequence
  Description of Artificial Sequence: Synthetic oligonucleotide
ucaugcaguuucuguucac

SEQ ID NO: 3134028 - RNA, 19 nt, Artificial Sequence
  Description of Artificial Sequence: Synthetic oligonucleotide
gacuaauaagagauuuugu

SEQ ID NO: 3134029 - RNA, 19 nt, Artificial Sequence
  Description of Artificial Sequence: Synthetic oligonucleotide
aaagagccauggauugacu

SEQ ID NO: 3134030 - RNA, 19 nt, Artificial Sequence
  Description of Artificial Sequence: Synthetic oligonucleotide
guuuggaaagagccaugga

SEQ ID NO: 3134031 - RNA, 19 nt, Artificial Sequence
  Description of Artificial Sequence: Synthetic oligonucleotide
cucaugcaguuucuguuca

SEQ ID NO: 3134032 - RNA, 19 nt, Artificial Sequence
  Description of Artificial Sequence: Synthetic oligonucleotide
caggguuuggaaagagcca

SEQ ID NO: 3134033 - RNA, 19 nt, Artificial Sequence
  Description of Artificial Sequence: Synthetic oligonucleotide
gugaaugguuugucauaac

SEQ ID NO: 3134034 - RNA, 19 nt, Artificial Sequence
  Description of Artificial Sequence: Synthetic oligonucleotide
aacccauuagaugguuaua

SEQ ID NO: 3134035 - RNA, 19 nt, Artificial Sequence
  Description of Artificial Sequence: Synthetic oligonucleotide
gguuauaguccucaggguu

SEQ ID NO: 3134036 - RNA, 19 nt, Artificial Sequence
  Description of Artificial Sequence: Synthetic oligonucleotide
uccucaggguuuggaaaga

SEQ ID NO: 3134037 - RNA, 19 nt, Artificial Sequence
  Description of Artificial Sequence: Synthetic oligonucleotide
augguuugucauaacccau

SEQ ID NO: 3134038 - RNA, 19 nt, Artificial Sequence
  Description of Artificial Sequence: Synthetic oligonucleotide
ccucaugcaguuucuguuc

SEQ ID NO: 3134039 - RNA, 19 nt, Artificial Sequence
  Description of Artificial Sequence: Synthetic oligonucleotide
auacaccgaaauacacaug

SEQ ID NO: 3134040 - RNA, 19 nt, Artificial Sequence
  Description of Artificial Sequence: Synthetic oligonucleotide
gguuugucauaacccauua

SEQ ID NO: 3134041 - RNA, 19 nt, Artificial Sequence
  Description of Artificial Sequence: Synthetic oligonucleotide
auaacccauuagaugguua

SEQ ID NO: 3134042 - RNA, 19 nt, Artificial Sequence
  Description of Artificial Sequence: Synthetic oligonucleotide
guuauaguccucaggguuu

SEQ ID NO: 3134043 - RNA, 19 nt, Artificial Sequence
  Description of Artificial Sequence: Synthetic oligonucleotide
cauccucaugcaguuucug

SEQ ID NO: 3134044 - RNA, 19 nt, Artificial Sequence
  Description of Artificial Sequence: Synthetic oligonucleotide
caguuucuguucacuaacu

SEQ ID NO: 3134045 - RNA, 19 nt, Artificial Sequence
  Description of Artificial Sequence: Synthetic oligonucleotide
gauugacuaauaagagauu

SEQ ID NO: 3134046 - RNA, 19 nt, Artificial Sequence
  Description of Artificial Sequence: Synthetic oligonucleotide
cacuaacuucuacauucaa

SEQ ID NO: 3134047 - RNA, 19 nt, Artificial Sequence
  Description of Artificial Sequence: Synthetic oligonucleotide
gccauggauugacuaauaa

SEQ ID NO: 3134048 - RNA, 19 nt, Artificial Sequence
  Description of Artificial Sequence: Synthetic oligonucleotide
gagccauggauugacuaau

SEQ ID NO: 3134049 - RNA, 19 nt, Artificial Sequence
  Description of Artificial Sequence: Synthetic oligonucleotide
uuucauccucaugcaguuu

SEQ ID NO: 3134050 - RNA, 19 nt, Artificial Sequence
  Description of Artificial Sequence: Synthetic oligonucleotide
guucacuaacuucuacauu

SEQ ID NO: 3134051 - RNA, 19 nt, Artificial Sequence
  Description of Artificial Sequence: Synthetic oligonucleotide
caugcaguuucuguucacu

SEQ ID NO: 3134052 - RNA, 19 nt, Artificial Sequence
  Description of Artificial Sequence: Synthetic oligonucleotide
ggaaagagccauggauuga

SEQ ID NO: 3134053 - RNA, 19 nt, Artificial Sequence
  Description of Artificial Sequence: Synthetic oligonucleotide
ggguuuggaaagagccaug

SEQ ID NO: 3134054 - RNA, 19 nt, Artificial Sequence
  Description of Artificial Sequence: Synthetic oligonucleotide
agguaacauuauacaccga

SEQ ID NO: 3134055 - RNA, 19 nt, Artificial Sequence
  Description of Artificial Sequence: Synthetic oligonucleotide
ccucaggguuuggaaagag

SEQ ID NO: 3134056 - RNA, 19 nt, Artificial Sequence
  Description of Artificial Sequence: Synthetic oligonucleotide
agccauggauugacuaaua

SEQ ID NO: 3134057 - RNA, 19 nt, Artificial Sequence
  Description of Artificial Sequence: Synthetic oligonucleotide
cauaacccauuagaugguu

SEQ ID NO: 3134058 - RNA, 19 nt, Artificial Sequence
  Description of Artificial Sequence: Synthetic oligonucleotide
cccauuagaugguuauagu

SEQ ID NO: 3134059 - RNA, 19 nt, Artificial Sequence
  Description of Artificial Sequence: Synthetic oligonucleotide
ccgaaauacacaugacauu

SEQ ID NO: 3134060 - RNA, 19 nt, Artificial Sequence
  Description of Artificial Sequence: Synthetic oligonucleotide
aacaacaacaacaacaaac

SEQ ID NO: 3134061 - RNA, 19 nt, Artificial Sequence
  Description of Artificial Sequence: Synthetic oligonucleotide
uacaacaacaacaacaaca

SEQ ID NO: 3134062 - RNA, 19 nt, Artificial Sequence
  Description of Artificial Sequence: Synthetic oligonucleotide
aaaacccuaacccuacaac

SEQ ID NO: 3134063 - RNA, 19 nt, Artificial Sequence
  Description of Artificial Sequence: Synthetic oligonucleotide
aacaacaacaacaacaaca

SEQ ID NO: 3134064 - RNA, 19 nt, Artificial Sequence
  Description of Artificial Sequence: Synthetic oligonucleotide
gggaguaagagacagaugg

SEQ ID NO: 3134065 - RNA, 19 nt, Artificial Sequence
  Description of Artificial Sequence: Synthetic oligonucleotide
uaacccuacaacaacaaca

SEQ ID NO: 3134066 - RNA, 19 nt, Artificial Sequence
  Description of Artificial Sequence: Synthetic oligonucleotide
aaacccuaacccuacaaca

SEQ ID NO: 3134067 - RNA, 19 nt, Artificial Sequence
  Description of Artificial Sequence: Synthetic oligonucleotide
uugagauauggucucaugu

SEQ ID NO: 3134068 - RNA, 19 nt, Artificial Sequence
  Description of Artificial Sequence: Synthetic oligonucleotide
gagauauggucucauguag

SEQ ID NO: 3134069 - RNA, 19 nt, Artificial Sequence
  Description of Artificial Sequence: Synthetic oligonucleotide
ggccuuaagguguagaugg

SEQ ID NO: 3134070 - RNA, 19 nt, Artificial Sequence
  Description of Artificial Sequence: Synthetic oligonucleotide
uuuaugaauucaaggccug

SEQ ID NO: 3134071 - RNA, 19 nt, Artificial Sequence
  Description of Artificial Sequence: Synthetic oligonucleotide
acaacaacaacaacaaaca

SEQ ID NO: 3134072 - RNA, 19 nt, Artificial Sequence
  Description of Artificial Sequence: Synthetic oligonucleotide
agacagauggaucuuuaug

SEQ ID NO: 3134073 - RNA, 19 nt, Artificial Sequence
  Description of Artificial Sequence: Synthetic oligonucleotide
ugagauauggucucaugua

SEQ ID NO: 3134074 - RNA, 19 nt, Artificial Sequence
  Description of Artificial Sequence: Synthetic oligonucleotide
agauauggucucauguagc

SEQ ID NO: 3134075 - RNA, 19 nt, Artificial Sequence
  Description of Artificial Sequence: Synthetic oligonucleotide
uuugagauauggucucaug

SEQ ID NO: 3134076 - RNA, 19 nt, Artificial Sequence
  Description of Artificial Sequence: Synthetic oligonucleotide
aguaagagacagauggauc

SEQ ID NO: 3134077 - RNA, 19 nt, Artificial Sequence
  Description of Artificial Sequence: Synthetic oligonucleotide
acaacaacaacaacaacaa

SEQ ID NO: 3134078 - RNA, 19 nt, Artificial Sequence
  Description of Artificial Sequence: Synthetic oligonucleotide
guaagagacagauggaucu

SEQ ID NO: 3134079 - RNA, 19 nt, Artificial Sequence
  Description of Artificial Sequence: Synthetic oligonucleotide
acccuaacccuacaacaac

SEQ ID NO: 3134080 - RNA, 19 nt, Artificial Sequence
  Description of Artificial Sequence: Synthetic oligonucleotide
aacccuacaacaacaacaa

SEQ ID NO: 3134081 - RNA, 19 nt, Artificial Sequence
  Description of Artificial Sequence: Synthetic oligonucleotide
ucaggcuggccuuaaggug

SEQ ID NO: 3134082 - RNA, 19 nt, Artificial Sequence
  Description of Artificial Sequence: Synthetic oligonucleotide
cuuuaugaauucaaggccu

SEQ ID NO: 3134083 - RNA, 19 nt, Artificial Sequence
  Description of Artificial Sequence: Synthetic oligonucleotide
gauauggucucauguagcu

SEQ ID NO: 3134084 - RNA, 19 nt, Artificial Sequence
  Description of Artificial Sequence: Synthetic oligonucleotide
ucgggaguaagagacagau

SEQ ID NO: 3134085 - RNA, 19 nt, Artificial Sequence
  Description of Artificial Sequence: Synthetic oligonucleotide
uuaagguguagauggcaua

SEQ ID NO: 3134086 - RNA, 19 nt, Artificial Sequence
  Description of Artificial Sequence: Synthetic oligonucleotide
cuaacccuacaacaacaac

SEQ ID NO: 3134087 - RNA, 19 nt, Artificial Sequence
  Description of Artificial Sequence: Synthetic oligonucleotide
cccuacaacaacaacaaca

SEQ ID NO: 3134088 - RNA, 19 nt, Artificial Sequence
  Description of Artificial Sequence: Synthetic oligonucleotide
gcauucgggaguaagagac

SEQ ID NO: 3134089 - RNA, 19 nt, Artificial Sequence
  Description of Artificial Sequence: Synthetic oligonucleotide
ggucucaacaacaacaaaa

SEQ ID NO: 3134090 - RNA, 19 nt, Artificial Sequence
  Description of Artificial Sequence: Synthetic oligonucleotide
auauggucucauguagcuc

SEQ ID NO: 3134091 - RNA, 19 nt, Artificial Sequence
  Description of Artificial Sequence: Synthetic oligonucleotide
agcauucgggaguaagaga

SEQ ID NO: 3134092 - RNA, 19 nt, Artificial Sequence
  Description of Artificial Sequence: Synthetic oligonucleotide
acccuacaacaacaacaac

SEQ ID NO: 3134093 - RNA, 19 nt, Artificial Sequence
  Description of Artificial Sequence: Synthetic oligonucleotide
uggccuuaagguguagaug

SEQ ID NO: 3134094 - RNA, 19 nt, Artificial Sequence
  Description of Artificial Sequence: Synthetic oligonucleotide
ccuacaacaacaacaacaa

SEQ ID NO: 3134095 - RNA, 19 nt, Artificial Sequence
  Description of Artificial Sequence: Synthetic oligonucleotide
cuacaacaacaacaacaac

SEQ ID NO: 3134096 - RNA, 19 nt, Artificial Sequence
  Description of Artificial Sequence: Synthetic oligonucleotide
gcucaggcuggccuuaagg

SEQ ID NO: 3134097 - RNA, 19 nt, Artificial Sequence
  Description of Artificial Sequence: Synthetic oligonucleotide
caacaacaacaacaacaac

SEQ ID NO: 3134098 - RNA, 19 nt, Artificial Sequence
  Description of Artificial Sequence: Synthetic oligonucleotide
uucgggaguaagagacaga

SEQ ID NO: 3134099 - RNA, 19 nt, Artificial Sequence
  Description of Artificial Sequence: Synthetic oligonucleotide
aagagacagauggaucuuu

SEQ ID NO: 3134100 - RNA, 19 nt, Artificial Sequence
  Description of Artificial Sequence: Synthetic oligonucleotide
uggucucaacaacaacaaa

SEQ ID NO: 3134101 - RNA, 19 nt, Artificial Sequence
  Description of Artificial Sequence: Synthetic oligonucleotide
ugccuggucucaacaacaa

SEQ ID NO: 3134102 - RNA, 19 nt, Artificial Sequence
  Description of Artificial Sequence: Synthetic oligonucleotide
gauggcauacgccuuuaau

SEQ ID NO: 3134103 - RNA, 19 nt, Artificial Sequence
  Description of Artificial Sequence: Synthetic oligonucleotide
gaguaagagacagauggau

SEQ ID NO: 3134104 - RNA, 19 nt, Artificial Sequence
  Description of Artificial Sequence: Synthetic oligonucleotide
cuuaagguguagauggcau

SEQ ID NO: 3134105 - RNA, 19 nt, Artificial Sequence
  Description of Artificial Sequence: Synthetic oligonucleotide
caacaacaacaacaaacaa

SEQ ID NO: 3134106 - RNA, 19 nt, Artificial Sequence
  Description of Artificial Sequence: Synthetic oligonucleotide
cugccuggucucaacaaca

SEQ ID NO: 3134107 - RNA, 19 nt, Artificial Sequence
  Description of Artificial Sequence: Synthetic oligonucleotide
uaagagacagauggaucuu

SEQ ID NO: 3134108 - RNA, 19 nt, Artificial Sequence
  Description of Artificial Sequence: Synthetic oligonucleotide
aggccugccuggucucaac

SEQ ID NO: 3134109 - RNA, 19 nt, Artificial Sequence
  Description of Artificial Sequence: Synthetic oligonucleotide
cucaggcuggccuuaaggu

SEQ ID NO: 3134110 - RNA, 19 nt, Artificial Sequence
  Description of Artificial Sequence: Synthetic oligonucleotide
caggcuggccuuaaggugu

SEQ ID NO: 3134111 - RNA, 19 nt, Artificial Sequence
  Description of Artificial Sequence: Synthetic oligonucleotide
gucucauguagcucaggcu

SEQ ID NO: 3134112 - RNA, 19 nt, Artificial Sequence
  Description of Artificial Sequence: Synthetic oligonucleotide
gagacagauggaucuuuau

SEQ ID NO: 3134113 - RNA, 19 nt, Artificial Sequence
  Description of Artificial Sequence: Synthetic oligonucleotide
agcucaggcuggccuuaag

SEQ ID NO: 3134114 - RNA, 19 nt, Artificial Sequence
  Description of Artificial Sequence: Synthetic oligonucleotide
agagacagauggaucuuua

SEQ ID NO: 3134115 - RNA, 19 nt, Artificial Sequence
  Description of Artificial Sequence: Synthetic oligonucleotide
agauggcauacgccuuuaa

SEQ ID NO: 3134116 - RNA, 19 nt, Artificial Sequence
  Description of Artificial Sequence: Synthetic oligonucleotide
auggucucauguagcucag

SEQ ID NO: 3134117 - RNA, 19 nt, Artificial Sequence
  Description of Artificial Sequence: Synthetic oligonucleotide
caacaacaacaacaacaaa

SEQ ID NO: 3134118 - RNA, 19 nt, Artificial Sequence
  Description of Artificial Sequence: Synthetic oligonucleotide
ggaguaagagacagaugga

SEQ ID NO: 3134119 - RNA, 19 nt, Artificial Sequence
  Description of Artificial Sequence: Synthetic oligonucleotide
ccugccuggucucaacaac

SEQ ID NO: 3134120 - RNA, 19 nt, Artificial Sequence
  Description of Artificial Sequence: Synthetic oligonucleotide
cuggccuuaagguguagau

SEQ ID NO: 3134121 - RNA, 19 nt, Artificial Sequence
  Description of Artificial Sequence: Synthetic oligonucleotide
cccuaacccuacaacaaca

SEQ ID NO: 3134122 - RNA, 19 nt, Artificial Sequence
  Description of Artificial Sequence: Synthetic oligonucleotide
ccuaacccuacaacaacaa

SEQ ID NO: 3134123 - RNA, 19 nt, Artificial Sequence
  Description of Artificial Sequence: Synthetic oligonucleotide
aucccagcauucgggagua

SEQ ID NO: 3134124 - RNA, 19 nt, Artificial Sequence
  Description of Artificial Sequence: Synthetic oligonucleotide
cccagcauucgggaguaag

SEQ ID NO: 3134125 - RNA, 19 nt, Artificial Sequence
  Description of Artificial Sequence: Synthetic oligonucleotide
ccuuaagguguagauggca

SEQ ID NO: 3134126 - RNA, 19 nt, Artificial Sequence
  Description of Artificial Sequence: Synthetic oligonucleotide
gccuggucucaacaacaac

SEQ ID NO: 3134127 - RNA, 19 nt, Artificial Sequence
  Description of Artificial Sequence: Synthetic oligonucleotide
gccuuaagguguagauggc

SEQ ID NO: 3134128 - RNA, 19 nt, Artificial Sequence
  Description of Artificial Sequence: Synthetic oligonucleotide
ggccugccuggucucaaca

SEQ ID NO: 3134129 - RNA, 19 nt, Artificial Sequence
  Description of Artificial Sequence: Synthetic oligonucleotide
gcuggccuuaagguguaga

SEQ ID NO: 3134130 - RNA, 19 nt, Artificial Sequence
  Description of Artificial Sequence: Synthetic oligonucleotide
cgggaguaagagacagaug

SEQ ID NO: 3134131 - RNA, 19 nt, Artificial Sequence
  Description of Artificial Sequence: Synthetic oligonucleotide
aggcuggccuuaaggugua

SEQ ID NO: 3134132 - RNA, 19 nt, Artificial Sequence
  Description of Artificial Sequence: Synthetic oligonucleotide
ucccagcauucgggaguaa

SEQ ID NO: 3134133 - RNA, 19 nt, Artificial Sequence
  Description of Artificial Sequence: Synthetic oligonucleotide
uguugaagcacucacuugc

SEQ ID NO: 3134134 - RNA, 19 nt, Artificial Sequence
  Description of Artificial Sequence: Synthetic oligonucleotide
ucugcugacaggauggagg

SEQ ID NO: 3134135 - RNA, 19 nt, Artificial Sequence
  Description of Artificial Sequence: Synthetic oligonucleotide
gaggagguugcacaggagg

SEQ ID NO: 3134136 - RNA, 19 nt, Artificial Sequence
  Description of Artificial Sequence: Synthetic oligonucleotide
ugaagcacucacuugcucu

SEQ ID NO: 3134137 - RNA, 19 nt, Artificial Sequence
  Description of Artificial Sequence: Synthetic oligonucleotide
gaggacaaggcucaggaca

SEQ ID NO: 3134138 - RNA, 19 nt, Artificial Sequence
  Description of Artificial Sequence: Synthetic oligonucleotide
cucacuugcucuugggugg

SEQ ID NO: 3134139 - RNA, 19 nt, Artificial Sequence
  Description of Artificial Sequence: Synthetic oligonucleotide
aggcucaggacauuugggg

SEQ ID NO: 3134140 - RNA, 19 nt, Artificial Sequence
  Description of Artificial Sequence: Synthetic oligonucleotide
cuuuggaggaggacaaggc

SEQ ID NO: 3134141 - RNA, 19 nt, Artificial Sequence
  Description of Artificial Sequence: Synthetic oligonucleotide
acucacuugcucuugggug

SEQ ID NO: 3134142 - RNA, 19 nt, Artificial Sequence
  Description of Artificial Sequence: Synthetic oligonucleotide
ugacuguugaagcacucac

SEQ ID NO: 3134143 - RNA, 19 nt, Artificial Sequence
  Description of Artificial Sequence: Synthetic oligonucleotide
gacaggauggaggagguug

SEQ ID NO: 3134144 - RNA, 19 nt, Artificial Sequence
  Description of Artificial Sequence: Synthetic oligonucleotide
gaggacaaggcucugggca

SEQ ID NO: 3134145 - RNA, 19 nt, Artificial Sequence
  Description of Artificial Sequence: Synthetic oligonucleotide
caaggcucaggacauuugg

SEQ ID NO: 3134146 - RNA, 19 nt, Artificial Sequence
  Description of Artificial Sequence: Synthetic oligonucleotide
aggaggacaaggcucuggg

SEQ ID NO: 3134147 - RNA, 19 nt, Artificial Sequence
  Description of Artificial Sequence: Synthetic oligonucleotide
acuguugaagcacucacuu

SEQ ID NO: 3134148 - RNA, 19 nt, Artificial Sequence
  Description of Artificial Sequence: Synthetic oligonucleotide
acuuuggaggaggacaagg

SEQ ID NO: 3134149 - RNA, 19 nt, Artificial Sequence
  Description of Artificial Sequence: Synthetic oligonucleotide
aggacaaggcucugggcac

SEQ ID NO: 3134150 - RNA, 19 nt, Artificial Sequence
  Description of Artificial Sequence: Synthetic oligonucleotide
aggagggcauuucugcugg

SEQ ID NO: 3134151 - RNA, 19 nt, Artificial Sequence
  Description of Artificial Sequence: Synthetic oligonucleotide
uggaggaggacaaggcucu

SEQ ID NO: 3134152 - RNA, 19 nt, Artificial Sequence
  Description of Artificial Sequence: Synthetic oligonucleotide
aaggcucaggacauuuggg

SEQ ID NO: 3134153 - RNA, 19 nt, Artificial Sequence
  Description of Artificial Sequence: Synthetic oligonucleotide
auuucugcuggcauggcug

SEQ ID NO: 3134154 - RNA, 19 nt, Artificial Sequence
  Description of Artificial Sequence: Synthetic oligonucleotide
gcucugggcacuuuggagg

SEQ ID NO: 3134155 - RNA, 19 nt, Artificial Sequence
  Description of Artificial Sequence: Synthetic oligonucleotide
ugggcacuucugcugacag

SEQ ID NO: 3134156 - RNA, 19 nt, Artificial Sequence
  Description of Artificial Sequence: Synthetic oligonucleotide
ugcacaggagggcauuucu

SEQ ID NO: 3134157 - RNA, 19 nt, Artificial Sequence
  Description of Artificial Sequence: Synthetic oligonucleotide
gcuggcauggcugaggagg

SEQ ID NO: 3134158 - RNA, 19 nt, Artificial Sequence
  Description of Artificial Sequence: Synthetic oligonucleotide
cuugggugggcacuucugc

SEQ ID NO: 3134159 - RNA, 19 nt, Artificial Sequence
  Description of Artificial Sequence: Synthetic oligonucleotide
ucugcuggcauggcugagg

SEQ ID NO: 3134160 - RNA, 19 nt, Artificial Sequence
  Description of Artificial Sequence: Synthetic oligonucleotide
agcacucacuugcucuugg

SEQ ID NO: 3134161 - RNA, 19 nt, Artificial Sequence
  Description of Artificial Sequence: Synthetic oligonucleotide
ucuugggugggcacuucug

SEQ ID NO: 3134162 - RNA, 19 nt, Artificial Sequence
  Description of Artificial Sequence: Synthetic oligonucleotide
gcugacaggauggaggagg

SEQ ID NO: 3134163 - RNA, 19 nt, Artificial Sequence
  Description of Artificial Sequence: Synthetic oligonucleotide
aggagguugcacaggaggg

SEQ ID NO: 3134164 - RNA, 19 nt, Artificial Sequence
  Description of Artificial Sequence: Synthetic oligonucleotide
aaggcucugggcacuuugg

SEQ ID NO: 3134165 - RNA, 19 nt, Artificial Sequence
  Description of Artificial Sequence: Synthetic oligonucleotide
ugggugggcacuucugcug

SEQ ID NO: 3134166 - RNA, 19 nt, Artificial Sequence
  Description of Artificial Sequence: Synthetic oligonucleotide
cacuucugcugacaggaug

SEQ ID NO: 3134167 - RNA, 19 nt, Artificial Sequence
  Description of Artificial Sequence: Synthetic oligonucleotide
uugaagcacucacuugcuc

SEQ ID NO: 3134168 - RNA, 19 nt, Artificial Sequence
  Description of Artificial Sequence: Synthetic oligonucleotide
ggcauuucugcuggcaugg

SEQ ID NO: 3134169 - RNA, 19 nt, Artificial Sequence
  Description of Artificial Sequence: Synthetic oligonucleotide
gggaggacaaggcucuggg

SEQ ID NO: 3134170 - RNA, 19 nt, Artificial Sequence
  Description of Artificial Sequence: Synthetic oligonucleotide
cuguugaagcacucacuug

SEQ ID NO: 3134171 - RNA, 19 nt, Artificial Sequence
  Description of Artificial Sequence: Synthetic oligonucleotide
cugaggaggacaaggcuca

SEQ ID NO: 3134172 - RNA, 19 nt, Artificial Sequence
  Description of Artificial Sequence: Synthetic oligonucleotide
uugggugggcacuucugcu

SEQ ID NO: 3134173 - RNA, 19 nt, Artificial Sequence
  Description of Artificial Sequence: Synthetic oligonucleotide
aggauggaggagguugcac

SEQ ID NO: 3134174 - RNA, 19 nt, Artificial Sequence
  Description of Artificial Sequence: Synthetic oligonucleotide
ucacuugcucuuggguggg

SEQ ID NO: 3134175 - RNA, 19 nt, Artificial Sequence
  Description of Artificial Sequence: Synthetic oligonucleotide
cuugcucuugggugggcac

SEQ ID NO: 3134176 - RNA, 19 nt, Artificial Sequence
  Description of Artificial Sequence: Synthetic oligonucleotide
caaggcucugggcacuuug

SEQ ID NO: 3134177 - RNA, 19 nt, Artificial Sequence
  Description of Artificial Sequence: Synthetic oligonucleotide
uucugcugacaggauggag

SEQ ID NO: 3134178 - RNA, 19 nt, Artificial Sequence
  Description of Artificial Sequence: Synthetic oligonucleotide
gaggaggacaaggcucagg

SEQ ID NO: 3134179 - RNA, 19 nt, Artificial Sequence
  Description of Artificial Sequence: Synthetic oligonucleotide
cugggcacuuuggaggagg

SEQ ID NO: 3134180 - RNA, 19 nt, Artificial Sequence
  Description of Artificial Sequence: Synthetic oligonucleotide
agggcauuucugcuggcau

SEQ ID NO: 3134181 - RNA, 19 nt, Artificial Sequence
  Description of Artificial Sequence: Synthetic oligonucleotide
ggcacuucugcugacagga

SEQ ID NO: 3134182 - RNA, 19 nt, Artificial Sequence
  Description of Artificial Sequence: Synthetic oligonucleotide
cugcugacaggauggagga

SEQ ID NO: 3134183 - RNA, 19 nt, Artificial Sequence
  Description of Artificial Sequence: Synthetic oligonucleotide
ggcacuuuggaggaggaca

SEQ ID NO: 3134184 - RNA, 19 nt, Artificial Sequence
  Description of Artificial Sequence: Synthetic oligonucleotide
gagguugcacaggagggca

SEQ ID NO: 3134185 - RNA, 19 nt, Artificial Sequence
  Description of Artificial Sequence: Synthetic oligonucleotide
ugggcacuuuggaggagga

SEQ ID NO: 3134186 - RNA, 19 nt, Artificial Sequence
  Description of Artificial Sequence: Synthetic oligonucleotide
ggcucugggcacuuuggag

SEQ ID NO: 3134187 - RNA, 19 nt, Artificial Sequence
  Description of Artificial Sequence: Synthetic oligonucleotide
aagcacucacuugcucuug

SEQ ID NO: 3134188 - RNA, 19 nt, Artificial Sequence
  Description of Artificial Sequence: Synthetic oligonucleotide
aggacaaggcucaggacau

SEQ ID NO: 3134189 - RNA, 19 nt, Artificial Sequence
  Description of Artificial Sequence: Synthetic oligonucleotide
cucugggcacuuuggagga

SEQ ID NO: 3134190 - RNA, 19 nt, Artificial Sequence
  Description of Artificial Sequence: Synthetic oligonucleotide
aggcucugggcacuuugga

SEQ ID NO: 3134191 - RNA, 19 nt, Artificial Sequence
  Description of Artificial Sequence: Synthetic oligonucleotide
acaaggcucaggacauuug

SEQ ID NO: 3134192 - RNA, 19 nt, Artificial Sequence
  Description of Artificial Sequence: Synthetic oligonucleotide
gggcauuucugcuggcaug

SEQ ID NO: 3134193 - RNA, 19 nt, Artificial Sequence
  Description of Artificial Sequence: Synthetic oligonucleotide
uugcucuugggugggcacu

SEQ ID NO: 3134194 - RNA, 19 nt, Artificial Sequence
  Description of Artificial Sequence: Synthetic oligonucleotide
gaagcacucacuugcucuu

SEQ ID NO: 3134195 - RNA, 19 nt, Artificial Sequence
  Description of Artificial Sequence: Synthetic oligonucleotide
ggagguugcacaggagggc

SEQ ID NO: 3134196 - RNA, 19 nt, Artificial Sequence
  Description of Artificial Sequence: Synthetic oligonucleotide
gcacucacuugcucuuggg

SEQ ID NO: 3134197 - RNA, 19 nt, Artificial Sequence
  Description of Artificial Sequence: Synthetic oligonucleotide
ugcuggcauggcugaggag

SEQ ID NO: 3134198 - RNA, 19 nt, Artificial Sequence
  Description of Artificial Sequence: Synthetic oligonucleotide
gagggcauuucugcuggca

SEQ ID NO: 3134199 - RNA, 19 nt, Artificial Sequence
  Description of Artificial Sequence: Synthetic oligonucleotide
cuggcauggcugaggagga

SEQ ID NO: 3134200 - RNA, 19 nt, Artificial Sequence
  Description of Artificial Sequence: Synthetic oligonucleotide
ggaggacaaggcucugggc

SEQ ID NO: 3134201 - RNA, 19 nt, Artificial Sequence
  Description of Artificial Sequence: Synthetic oligonucleotide
gacuguugaagcacucacu

SEQ ID NO: 3134202 - RNA, 19 nt, Artificial Sequence
  Description of Artificial Sequence: Synthetic oligonucleotide
ucugggcacuuuggaggag

SEQ ID NO: 3134203 - RNA, 19 nt, Artificial Sequence
  Description of Artificial Sequence: Synthetic oligonucleotide
gggcacuucugcugacagg

SEQ ID NO: 3134204 - RNA, 19 nt, Artificial Sequence
  Description of Artificial Sequence: Synthetic oligonucleotide
uucugcuggcauggcugag

SEQ ID NO: 3134205 - RNA, 19 nt, Artificial Sequence
  Description of Artificial Sequence: Synthetic oligonucleotide
uugcacaggagggcauuuc

SEQ ID NO: 3134206 - RNA, 19 nt, Artificial Sequence
  Description of Artificial Sequence: Synthetic oligonucleotide
cacuuuggaggaggacaag

SEQ ID NO: 3134207 - RNA, 19 nt, Artificial Sequence
  Description of Artificial Sequence: Synthetic oligonucleotide
cauggcugaggaggacaag

SEQ ID NO: 3134208 - RNA, 19 nt, Artificial Sequence
  Description of Artificial Sequence: Synthetic oligonucleotide
ggaggacaaggcucaggac

SEQ ID NO: 3134209 - RNA, 19 nt, Artificial Sequence
  Description of Artificial Sequence: Synthetic oligonucleotide
cauuucugcuggcauggcu

SEQ ID NO: 3134210 - RNA, 19 nt, Artificial Sequence
  Description of Artificial Sequence: Synthetic oligonucleotide
guugaagcacucacuugcu

SEQ ID NO: 3134211 - RNA, 19 nt, Artificial Sequence
  Description of Artificial Sequence: Synthetic oligonucleotide
gacaaggcucaggacauuu

SEQ ID NO: 3134212 - RNA, 19 nt, Artificial Sequence
  Description of Artificial Sequence: Synthetic oligonucleotide
ugcucuugggugggcacuu

SEQ ID NO: 3134213 - RNA, 19 nt, Artificial Sequence
  Description of Artificial Sequence: Synthetic oligonucleotide
cugacaggauggaggaggu

SEQ ID NO: 3134214 - RNA, 19 nt, Artificial Sequence
  Description of Artificial Sequence: Synthetic oligonucleotide
gggugggcacuucugcuga

SEQ ID NO: 3134215 - RNA, 19 nt, Artificial Sequence
  Description of Artificial Sequence: Synthetic oligonucleotide
cacucacuugcucuugggu

SEQ ID NO: 3134216 - RNA, 19 nt, Artificial Sequence
  Description of Artificial Sequence: Synthetic oligonucleotide
gcacaggagggcauuucug

SEQ ID NO: 3134217 - RNA, 19 nt, Artificial Sequence
  Description of Artificial Sequence: Synthetic oligonucleotide
gcacuuuggaggaggacaa

SEQ ID NO: 3134218 - RNA, 19 nt, Artificial Sequence
  Description of Artificial Sequence: Synthetic oligonucleotide
ggaggagguugcacaggag

SEQ ID NO: 3134219 - RNA, 19 nt, Artificial Sequence
  Description of Artificial Sequence: Synthetic oligonucleotide
cuucugcugacaggaugga

SEQ ID NO: 3134220 - RNA, 19 nt, Artificial Sequence
  Description of Artificial Sequence: Synthetic oligonucleotide
uggcauggcugaggaggac

SEQ ID NO: 3134221 - RNA, 19 nt, Artificial Sequence
  Description of Artificial Sequence: Synthetic oligonucleotide
gugggcacuucugcugaca

SEQ ID NO: 3134222 - RNA, 19 nt, Artificial Sequence
  Description of Artificial Sequence: Synthetic oligonucleotide
ggcugaggaggacaaggcu

SEQ ID NO: 3134223 - RNA, 19 nt, Artificial Sequence
  Description of Artificial Sequence: Synthetic oligonucleotide
ugacaggauggaggagguu

SEQ ID NO: 3134224 - RNA, 19 nt, Artificial Sequence
  Description of Artificial Sequence: Synthetic oligonucleotide
cacuugcucuugggugggc

SEQ ID NO: 3134225 - RNA, 19 nt, Artificial Sequence
  Description of Artificial Sequence: Synthetic oligonucleotide
ggagggcauuucugcuggc

SEQ ID NO: 3134226 - RNA, 19 nt, Artificial Sequence
  Description of Artificial Sequence: Synthetic oligonucleotide
cucuugggugggcacuucu

SEQ ID NO: 3134227 - RNA, 19 nt, Artificial Sequence
  Description of Artificial Sequence: Synthetic oligonucleotide
ggugggcacuucugcugac

SEQ ID NO: 3134228 - RNA, 19 nt, Artificial Sequence
  Description of Artificial Sequence: Synthetic oligonucleotide
caggauggaggagguugca

SEQ ID NO: 3134229 - RNA, 19 nt, Artificial Sequence
  Description of Artificial Sequence: Synthetic oligonucleotide
agguugcacaggagggcau

SEQ ID NO: 3134230 - RNA, 19 nt, Artificial Sequence
  Description of Artificial Sequence: Synthetic oligonucleotide
gcauggcugaggaggacaa

SEQ ID NO: 3134231 - RNA, 19 nt, Artificial Sequence
  Description of Artificial Sequence: Synthetic oligonucleotide
ggaggaggacaaggcucug

SEQ ID NO: 3134232 - RNA, 19 nt, Artificial Sequence
  Description of Artificial Sequence: Synthetic oligonucleotide
acaaggcucugggcacuuu

SEQ ID NO: 3134233 - RNA, 19 nt, Artificial Sequence
  Description of Artificial Sequence: Synthetic oligonucleotide
gggcacuuuggaggaggac

SEQ ID NO: 3134234 - RNA, 19 nt, Artificial Sequence
  Description of Artificial Sequence: Synthetic oligonucleotide
guugcacaggagggcauuu

SEQ ID NO: 3134235 - RNA, 19 nt, Artificial Sequence
  Description of Artificial Sequence: Synthetic oligonucleotide
gacaaggcucugggcacuu

SEQ ID NO: 3134236 - RNA, 19 nt, Artificial Sequence
  Description of Artificial Sequence: Synthetic oligonucleotide
ggacaaggcucugggcacu

SEQ ID NO: 3134237 - RNA, 19 nt, Artificial Sequence
  Description of Artificial Sequence: Synthetic oligonucleotide
gguugcacaggagggcauu

SEQ ID NO: 3134238 - RNA, 19 nt, Artificial Sequence
  Description of Artificial Sequence: Synthetic oligonucleotide
gcacuucugcugacaggau

SEQ ID NO: 3134239 - RNA, 19 nt, Artificial Sequence
  Description of Artificial Sequence: Synthetic oligonucleotide
ggacaaggcucaggacauu

SEQ ID NO: 3134240 - RNA, 19 nt, Artificial Sequence
  Description of Artificial Sequence: Synthetic oligonucleotide
auaauguucccauuuguac

SEQ ID NO: 3134241 - RNA, 19 nt, Artificial Sequence
  Description of Artificial Sequence: Synthetic oligonucleotide
gagacugaggcucagagag

SEQ ID NO: 3134242 - RNA, 19 nt, Artificial Sequence
  Description of Artificial Sequence: Synthetic oligonucleotide
ucaucaauuccucacaaca

SEQ ID NO: 3134243 - RNA, 19 nt, Artificial Sequence
  Description of Artificial Sequence: Synthetic oligonucleotide
aauguucccauuuguacag

SEQ ID NO: 3134244 - RNA, 19 nt, Artificial Sequence
  Description of Artificial Sequence: Synthetic oligonucleotide
aucaauuccucacaacagc

SEQ ID NO: 3134245 - RNA, 19 nt, Artificial Sequence
  Description of Artificial Sequence: Synthetic oligonucleotide
uuuucuuacaugugcacag

SEQ ID NO: 3134246 - RNA, 19 nt, Artificial Sequence
  Description of Artificial Sequence: Synthetic oligonucleotide
uguuucacauacaucaucu

SEQ ID NO: 3134247 - RNA, 19 nt, Artificial Sequence
  Description of Artificial Sequence: Synthetic oligonucleotide
acaucaucucaucaauucc

SEQ ID NO: 3134248 - RNA, 19 nt, Artificial Sequence
  Description of Artificial Sequence: Synthetic oligonucleotide
uuuacagauuacaaagugu

SEQ ID NO: 3134249 - RNA, 19 nt, Artificial Sequence
  Description of Artificial Sequence: Synthetic oligonucleotide
uucccauuuguacagaugu

SEQ ID NO: 3134250 - RNA, 19 nt, Artificial Sequence
  Description of Artificial Sequence: Synthetic oligonucleotide
acagauuacaaaguguuuc

SEQ ID NO: 3134251 - RNA, 19 nt, Artificial Sequence
  Description of Artificial Sequence: Synthetic oligonucleotide
aacagugagcagcagagcu

SEQ ID NO: 3134252 - RNA, 19 nt, Artificial Sequence
  Description of Artificial Sequence: Synthetic oligonucleotide
uuacagauuacaaaguguu

SEQ ID NO: 3134253 - RNA, 19 nt, Artificial Sequence
  Description of Artificial Sequence: Synthetic oligonucleotide
ucaauuccucacaacagcc

SEQ ID NO: 3134254 - RNA, 19 nt, Artificial Sequence
  Description of Artificial Sequence: Synthetic oligonucleotide
uaauguucccauuuguaca

SEQ ID NO: 3134255 - RNA, 19 nt, Artificial Sequence
  Description of Artificial Sequence: Synthetic oligonucleotide
aauuccucacaacagcccu

SEQ ID NO: 3134256 - RNA, 19 nt, Artificial Sequence
  Description of Artificial Sequence: Synthetic oligonucleotide
ugcuugaagucacacaaca

SEQ ID NO: 3134257 - RNA, 19 nt, Artificial Sequence
  Description of Artificial Sequence: Synthetic oligonucleotide
uucuuacaugugcacagcg

SEQ ID NO: 3134258 - RNA, 19 nt, Artificial Sequence
  Description of Artificial Sequence: Synthetic oligonucleotide
agaggagaagacucaggcc

SEQ ID NO: 3134259 - RNA, 19 nt, Artificial Sequence
  Description of Artificial Sequence: Synthetic oligonucleotide
uacaucaucucaucaauuc

SEQ ID NO: 3134260 - RNA, 19 nt, Artificial Sequence
  Description of Artificial Sequence: Synthetic oligonucleotide
uguacagauguggagacug

SEQ ID NO: 3134261 - RNA, 19 nt, Artificial Sequence
  Description of Artificial Sequence: Synthetic oligonucleotide
agucacacaacagugagca

SEQ ID NO: 3134262 - RNA, 19 nt, Artificial Sequence
  Description of Artificial Sequence: Synthetic oligonucleotide
gauuacaaaguguuucaca

SEQ ID NO: 3134263 - RNA, 19 nt, Artificial Sequence
  Description of Artificial Sequence: Synthetic oligonucleotide
ucuuacaugugcacagcgc

SEQ ID NO: 3134264 - RNA, 19 nt, Artificial Sequence
  Description of Artificial Sequence: Synthetic oligonucleotide
auuuguacagauguggaga

SEQ ID NO: 3134265 - RNA, 19 nt, Artificial Sequence
  Description of Artificial Sequence: Synthetic oligonucleotide
uuuguacagauguggagac

SEQ ID NO: 3134266 - RNA, 19 nt, Artificial Sequence
  Description of Artificial Sequence: Synthetic oligonucleotide
cagaggagaagacucaggc

SEQ ID NO: 3134267 - RNA, 19 nt, Artificial Sequence
  Description of Artificial Sequence: Synthetic oligonucleotide
caucaauuccucacaacag

SEQ ID NO: 3134268 - RNA, 19 nt, Artificial Sequence
  Description of Artificial Sequence: Synthetic oligonucleotide
ugugagguaggcagggcag

SEQ ID NO: 3134269 - RNA, 19 nt, Artificial Sequence
  Description of Artificial Sequence: Synthetic oligonucleotide
agggcagggauaauguucc

SEQ ID NO: 3134270 - RNA, 19 nt, Artificial Sequence
  Description of Artificial Sequence: Synthetic oligonucleotide
cauuuguacagauguggag

SEQ ID NO: 3134271 - RNA, 19 nt, Artificial Sequence
  Description of Artificial Sequence: Synthetic oligonucleotide
ugugcacagcgcuuuacag

SEQ ID NO: 3134272 - RNA, 19 nt, Artificial Sequence
  Description of Artificial Sequence: Synthetic oligonucleotide
acaacagugagcagcagag

SEQ ID NO: 3134273 - RNA, 19 nt, Artificial Sequence
  Description of Artificial Sequence: Synthetic oligonucleotide
gauguggagacugaggcuc

SEQ ID NO: 3134274 - RNA, 19 nt, Artificial Sequence
  Description of Artificial Sequence: Synthetic oligonucleotide
gaggagaagacucaggccu

SEQ ID NO: 3134275 - RNA, 19 nt, Artificial Sequence
  Description of Artificial Sequence: Synthetic oligonucleotide
ugcacagcgcuuuacagau

SEQ ID NO: 3134276 - RNA, 19 nt, Artificial Sequence
  Description of Artificial Sequence: Synthetic oligonucleotide
aagucacacaacagugagc

SEQ ID NO: 3134277 - RNA, 19 nt, Artificial Sequence
  Description of Artificial Sequence: Synthetic oligonucleotide
agauuacaaaguguuucac

SEQ ID NO: 3134278 - RNA, 19 nt, Artificial Sequence
  Description of Artificial Sequence: Synthetic oligonucleotide
cugaggcucagagagagcc

SEQ ID NO: 3134279 - RNA, 19 nt, Artificial Sequence
  Description of Artificial Sequence: Synthetic oligonucleotide
gagagagccagugaccugc

SEQ ID NO: 3134280 - RNA, 19 nt, Artificial Sequence
  Description of Artificial Sequence: Synthetic oligonucleotide
caauuccucacaacagccc

SEQ ID NO: 3134281 - RNA, 19 nt, Artificial Sequence
  Description of Artificial Sequence: Synthetic oligonucleotide
gaagacucaggccugccuc

SEQ ID NO: 3134282 - RNA, 19 nt, Artificial Sequence
  Description of Artificial Sequence: Synthetic oligonucleotide
ucucaucaauuccucacaa

SEQ ID NO: 3134283 - RNA, 19 nt, Artificial Sequence
  Description of Artificial Sequence: Synthetic oligonucleotide
cgcuuuacagauuacaaag

SEQ ID NO: 3134284 - RNA, 19 nt, Artificial Sequence
  Description of Artificial Sequence: Synthetic oligonucleotide
agggauaauguucccauuu

SEQ ID NO: 3134285 - RNA, 19 nt, Artificial Sequence
  Description of Artificial Sequence: Synthetic oligonucleotide
aagacucaggccugccucu

SEQ ID NO: 3134286 - RNA, 19 nt, Artificial Sequence
  Description of Artificial Sequence: Synthetic oligonucleotide
cuugaagucacacaacagu

SEQ ID NO: 3134287 - RNA, 19 nt, Artificial Sequence
  Description of Artificial Sequence: Synthetic oligonucleotide
cagauuacaaaguguuuca

SEQ ID NO: 3134288 - RNA, 19 nt, Artificial Sequence
  Description of Artificial Sequence: Synthetic oligonucleotide
uacagauguggagacugag

SEQ ID NO: 3134289 - RNA, 19 nt, Artificial Sequence
  Description of Artificial Sequence: Synthetic oligonucleotide
gauaauguucccauuugua

SEQ ID NO: 3134290 - RNA, 19 nt, Artificial Sequence
  Description of Artificial Sequence: Synthetic oligonucleotide
uuucuuacaugugcacagc

SEQ ID NO: 3134291 - RNA, 19 nt, Artificial Sequence
  Description of Artificial Sequence: Synthetic oligonucleotide
aucaucucaucaauuccuc

SEQ ID NO: 3134292 - RNA, 19 nt, Artificial Sequence
  Description of Artificial Sequence: Synthetic oligonucleotide
cagggcagggauaauguuc

SEQ ID NO: 3134293 - RNA, 19 nt, Artificial Sequence
  Description of Artificial Sequence: Synthetic oligonucleotide
ucccauuuguacagaugug

SEQ ID NO: 3134294 - RNA, 19 nt, Artificial Sequence
  Description of Artificial Sequence: Synthetic oligonucleotide
cucaucaauuccucacaac

SEQ ID NO: 3134295 - RNA, 19 nt, Artificial Sequence
  Description of Artificial Sequence: Synthetic oligonucleotide
ugagguaggcagggcaggg

SEQ ID NO: 3134296 - RNA, 19 nt, Artificial Sequence
  Description of Artificial Sequence: Synthetic oligonucleotide
guguuucacauacaucauc

SEQ ID NO: 3134297 - RNA, 19 nt, Artificial Sequence
  Description of Artificial Sequence: Synthetic oligonucleotide
cccauuuguacagaugugg

SEQ ID NO: 3134298 - RNA, 19 nt, Artificial Sequence
  Description of Artificial Sequence: Synthetic oligonucleotide
uguucccauuuguacagau

SEQ ID NO: 3134299 - RNA, 19 nt, Artificial Sequence
  Description of Artificial Sequence: Synthetic oligonucleotide
augugcacagcgcuuuaca

SEQ ID NO: 3134300 - RNA, 19 nt, Artificial Sequence
  Description of Artificial Sequence: Synthetic oligonucleotide
agaagacucaggccugccu

SEQ ID NO: 3134301 - RNA, 19 nt, Artificial Sequence
  Description of Artificial Sequence: Synthetic oligonucleotide
cuuacaugugcacagcgcu

SEQ ID NO: 3134302 - RNA, 19 nt, Artificial Sequence
  Description of Artificial Sequence: Synthetic oligonucleotide
gggauaauguucccauuug

SEQ ID NO: 3134303 - RNA, 19 nt, Artificial Sequence
  Description of Artificial Sequence: Synthetic oligonucleotide
caucaucucaucaauuccu

SEQ ID NO: 3134304 - RNA, 19 nt, Artificial Sequence
  Description of Artificial Sequence: Synthetic oligonucleotide
gagccagugaccugcuuga

SEQ ID NO: 3134305 - RNA, 19 nt, Artificial Sequence
  Description of Artificial Sequence: Synthetic oligonucleotide
uuacaugugcacagcgcuu

SEQ ID NO: 3134306 - RNA, 19 nt, Artificial Sequence
  Description of Artificial Sequence: Synthetic oligonucleotide
cacauacaucaucucauca

SEQ ID NO: 3134307 - RNA, 19 nt, Artificial Sequence
  Description of Artificial Sequence: Synthetic oligonucleotide
agugaccugcuugaaguca

SEQ ID NO: 3134308 - RNA, 19 nt, Artificial Sequence
  Description of Artificial Sequence: Synthetic oligonucleotide
accugcuugaagucacaca

SEQ ID NO: 3134309 - RNA, 19 nt, Artificial Sequence
  Description of Artificial Sequence: Synthetic oligonucleotide
cacaacagugagcagcaga

SEQ ID NO: 3134310 - RNA, 19 nt, Artificial Sequence
  Description of Artificial Sequence: Synthetic oligonucleotide
agcgcuuuacagauuacaa

SEQ ID NO: 3134311 - RNA, 19 nt, Artificial Sequence
  Description of Artificial Sequence: Synthetic oligonucleotide
gacucaggccugccucugg

SEQ ID NO: 3134312 - RNA, 19 nt, Artificial Sequence
  Description of Artificial Sequence: Synthetic oligonucleotide
gugcacagcgcuuuacaga

SEQ ID NO: 3134313 - RNA, 19 nt, Artificial Sequence
  Description of Artificial Sequence: Synthetic oligonucleotide
uacaugugcacagcgcuuu

SEQ ID NO: 3134314 - RNA, 19 nt, Artificial Sequence
  Description of Artificial Sequence: Synthetic oligonucleotide
cugcuugaagucacacaac

SEQ ID NO: 3134315 - RNA, 19 nt, Artificial Sequence
  Description of Artificial Sequence: Synthetic oligonucleotide
acagugagcagcagagcug

SEQ ID NO: 3134316 - RNA, 19 nt, Artificial Sequence
  Description of Artificial Sequence: Synthetic oligonucleotide
ugggaccagaggagaagac

SEQ ID NO: 3134317 - RNA, 19 nt, Artificial Sequence
  Description of Artificial Sequence: Synthetic oligonucleotide
cauacaucaucucaucaau

SEQ ID NO: 3134318 - RNA, 19 nt, Artificial Sequence
  Description of Artificial Sequence: Synthetic oligonucleotide
acagcccugugagguaggc

SEQ ID NO: 3134319 - RNA, 19 nt, Artificial Sequence
  Description of Artificial Sequence: Synthetic oligonucleotide
agagagagccagugaccug

SEQ ID NO: 3134320 - RNA, 19 nt, Artificial Sequence
  Description of Artificial Sequence: Synthetic oligonucleotide
guucccauuuguacagaug

SEQ ID NO: 3134321 - RNA, 19 nt, Artificial Sequence
  Description of Artificial Sequence: Synthetic oligonucleotide
ccugcuugaagucacacaa

SEQ ID NO: 3134322 - RNA, 19 nt, Artificial Sequence
  Description of Artificial Sequence: Synthetic oligonucleotide
ugaccugcuugaagucaca

SEQ ID NO: 3134323 - RNA, 19 nt, Artificial Sequence
  Description of Artificial Sequence: Synthetic oligonucleotide
caacagcccugugagguag

SEQ ID NO: 3134324 - RNA, 19 nt, Artificial Sequence
  Description of Artificial Sequence: Synthetic oligonucleotide
cacagcgcuuuacagauua

SEQ ID NO: 3134325 - RNA, 19 nt, Artificial Sequence
  Description of Artificial Sequence: Synthetic oligonucleotide
gugagguaggcagggcagg

SEQ ID NO: 3134326 - RNA, 19 nt, Artificial Sequence
  Description of Artificial Sequence: Synthetic oligonucleotide
cugugagguaggcagggca

SEQ ID NO: 3134327 - RNA, 19 nt, Artificial Sequence
  Description of Artificial Sequence: Synthetic oligonucleotide
aggcagggcagggauaaug

SEQ ID NO: 3134328 - RNA, 19 nt, Artificial Sequence
  Description of Artificial Sequence: Synthetic oligonucleotide
aacagcccugugagguagg

SEQ ID NO: 3134329 - RNA, 19 nt, Artificial Sequence
  Description of Artificial Sequence: Synthetic oligonucleotide
aguguuucacauacaucau

SEQ ID NO: 3134330 - RNA, 19 nt, Artificial Sequence
  Description of Artificial Sequence: Synthetic oligonucleotide
acugaggcucagagagagc

SEQ ID NO: 3134331 - RNA, 19 nt, Artificial Sequence
  Description of Artificial Sequence: Synthetic oligonucleotide
uuguacagauguggagacu

SEQ ID NO: 3134332 - RNA, 19 nt, Artificial Sequence
  Description of Artificial Sequence: Synthetic oligonucleotide
uguggagacugaggcucag

SEQ ID NO: 3134333 - RNA, 19 nt, Artificial Sequence
  Description of Artificial Sequence: Synthetic oligonucleotide
caacagugagcagcagagc

SEQ ID NO: 3134334 - RNA, 19 nt, Artificial Sequence
  Description of Artificial Sequence: Synthetic oligonucleotide
guaggcagggcagggauaa

SEQ ID NO: 3134335 - RNA, 19 nt, Artificial Sequence
  Description of Artificial Sequence: Synthetic oligonucleotide
auuccucacaacagcccug

SEQ ID NO: 3134336 - RNA, 19 nt, Artificial Sequence
  Description of Artificial Sequence: Synthetic oligonucleotide
gagaagacucaggccugcc

SEQ ID NO: 3134337 - RNA, 19 nt, Artificial Sequence
  Description of Artificial Sequence: Synthetic oligonucleotide
cagugaccugcuugaaguc

SEQ ID NO: 3134338 - RNA, 19 nt, Artificial Sequence
  Description of Artificial Sequence: Synthetic oligonucleotide
cacaacagcccugugaggu

SEQ ID NO: 3134339 - RNA, 19 nt, Artificial Sequence
  Description of Artificial Sequence: Synthetic oligonucleotide
gaccugcuugaagucacac

SEQ ID NO: 3134340 - RNA, 19 nt, Artificial Sequence
  Description of Artificial Sequence: Synthetic oligonucleotide
auacaucaucucaucaauu

SEQ ID NO: 3134341 - RNA, 19 nt, Artificial Sequence
  Description of Artificial Sequence: Synthetic oligonucleotide
aggagaagacucaggccug

SEQ ID NO: 3134342 - RNA, 19 nt, Artificial Sequence
  Description of Artificial Sequence: Synthetic oligonucleotide
ggauaauguucccauuugu

SEQ ID NO: 3134343 - RNA, 19 nt, Artificial Sequence
  Description of Artificial Sequence: Synthetic oligonucleotide
acaacagcccugugaggua

SEQ ID NO: 3134344 - RNA, 19 nt, Artificial Sequence
  Description of Artificial Sequence: Synthetic oligonucleotide
ccauuuguacagaugugga

SEQ ID NO: 3134345 - RNA, 19 nt, Artificial Sequence
  Description of Artificial Sequence: Synthetic oligonucleotide
caugugcacagcgcuuuac

SEQ ID NO: 3134346 - RNA, 19 nt, Artificial Sequence
  Description of Artificial Sequence: Synthetic oligonucleotide
gccagugaccugcuugaag

SEQ ID NO: 3134347 - RNA, 19 nt, Artificial Sequence
  Description of Artificial Sequence: Synthetic oligonucleotide
acagcgcuuuacagauuac

SEQ ID NO: 3134348 - RNA, 19 nt, Artificial Sequence
  Description of Artificial Sequence: Synthetic oligonucleotide
ggcucagagagagccagug

SEQ ID NO: 3134349 - RNA, 19 nt, Artificial Sequence
  Description of Artificial Sequence: Synthetic oligonucleotide
cagcgcuuuacagauuaca

SEQ ID NO: 3134350 - RNA, 19 nt, Artificial Sequence
  Description of Artificial Sequence: Synthetic oligonucleotide
gcgcuuuacagauuacaaa

SEQ ID NO: 3134351 - RNA, 19 nt, Artificial Sequence
  Description of Artificial Sequence: Synthetic oligonucleotide
cugggaccagaggagaaga

SEQ ID NO: 3134352 - RNA, 19 nt, Artificial Sequence
  Description of Artificial Sequence: Synthetic oligonucleotide
ccagugaccugcuugaagu

SEQ ID NO: 3134353 - RNA, 19 nt, Artificial Sequence
  Description of Artificial Sequence: Synthetic oligonucleotide
gagcugggaccagaggaga

SEQ ID NO: 3134354 - RNA, 19 nt, Artificial Sequence
  Description of Artificial Sequence: Synthetic oligonucleotide
gcugggaccagaggagaag

SEQ ID NO: 3134355 - RNA, 19 nt, Artificial Sequence
  Description of Artificial Sequence: Synthetic oligonucleotide
cagagagagccagugaccu

SEQ ID NO: 3134356 - RNA, 19 nt, Artificial Sequence
  Description of Artificial Sequence: Synthetic oligonucleotide
guacagauguggagacuga

SEQ ID NO: 3134357 - RNA, 19 nt, Artificial Sequence
  Description of Artificial Sequence: Synthetic oligonucleotide
acaugugcacagcgcuuua

SEQ ID NO: 3134358 - RNA, 19 nt, Artificial Sequence
  Description of Artificial Sequence: Synthetic oligonucleotide
agacucaggccugccucug

SEQ ID NO: 3134359 - RNA, 19 nt, Artificial Sequence
  Description of Artificial Sequence: Synthetic oligonucleotide
gcagggauaauguucccau

SEQ ID NO: 3134360 - RNA, 19 nt, Artificial Sequence
  Description of Artificial Sequence: Synthetic oligonucleotide
gagguaggcagggcaggga

SEQ ID NO: 3134361 - RNA, 19 nt, Artificial Sequence
  Description of Artificial Sequence: Synthetic oligonucleotide
auguucccauuuguacaga

SEQ ID NO: 3134362 - RNA, 19 nt, Artificial Sequence
  Description of Artificial Sequence: Synthetic oligonucleotide
ggcagggauaauguuccca

SEQ ID NO: 3134363 - RNA, 19 nt, Artificial Sequence
  Description of Artificial Sequence: Synthetic oligonucleotide
auguggagacugaggcuca

SEQ ID NO: 3134364 - RNA, 19 nt, Artificial Sequence
  Description of Artificial Sequence: Synthetic oligonucleotide
agagagccagugaccugcu

SEQ ID NO: 3134365 - RNA, 19 nt, Artificial Sequence
  Description of Artificial Sequence: Synthetic oligonucleotide
agcugggaccagaggagaa

SEQ ID NO: 3134366 - RNA, 19 nt, Artificial Sequence
  Description of Artificial Sequence: Synthetic oligonucleotide
guggagacugaggcucaga

SEQ ID NO: 3134367 - RNA, 19 nt, Artificial Sequence
  Description of Artificial Sequence: Synthetic oligonucleotide
gggcagggauaauguuccc

SEQ ID NO: 3134368 - RNA, 19 nt, Artificial Sequence
  Description of Artificial Sequence: Synthetic oligonucleotide
ggcagggcagggauaaugu

SEQ ID NO: 3134369 - RNA, 19 nt, Artificial Sequence
  Description of Artificial Sequence: Synthetic oligonucleotide
aggcucagagagagccagu

SEQ ID NO: 3134370 - RNA, 19 nt, Artificial Sequence
  Description of Artificial Sequence: Synthetic oligonucleotide
agccagugaccugcuugaa

SEQ ID NO: 3134371 - RNA, 19 nt, Artificial Sequence
  Description of Artificial Sequence: Synthetic oligonucleotide
uaggcagggcagggauaau

SEQ ID NO: 3134372 - RNA, 19 nt, Artificial Sequence
  Description of Artificial Sequence: Synthetic oligonucleotide
cagggauaauguucccauu

SEQ ID NO: 3134373 - RNA, 19 nt, Artificial Sequence
  Description of Artificial Sequence: Synthetic oligonucleotide
cagcccugugagguaggca

SEQ ID NO: 3134374 - RNA, 19 nt, Artificial Sequence
  Description of Artificial Sequence: Synthetic oligonucleotide
gguaggcagggcagggaua

SEQ ID NO: 3134375 - RNA, 19 nt, Artificial Sequence
  Description of Artificial Sequence: Synthetic oligonucleotide
gagagccagugaccugcuu

SEQ ID NO: 3134376 - RNA, 19 nt, Artificial Sequence
  Description of Artificial Sequence: Synthetic oligonucleotide
gcagggcagggauaauguu

SEQ ID NO: 3134377 - RNA, 19 nt, Artificial Sequence
  Description of Artificial Sequence: Synthetic oligonucleotide
ucaaaacucaucuugauug

SEQ ID NO: 3134378 - RNA, 19 nt, Artificial Sequence
  Description of Artificial Sequence: Synthetic oligonucleotide
cucaaagccaccaaugccc

SEQ ID NO: 3134379 - RNA, 19 nt, Artificial Sequence
  Description of Artificial Sequence: Synthetic oligonucleotide
cuugucaaaacucaucuug

SEQ ID NO: 3134380 - RNA, 19 nt, Artificial Sequence
  Description of Artificial Sequence: Synthetic oligonucleotide
gauugggugccucaaagcc

SEQ ID NO: 3134381 - RNA, 19 nt, Artificial Sequence
  Description of Artificial Sequence: Synthetic oligonucleotide
accaaugcccugcugaugg

SEQ ID NO: 3134382 - RNA, 19 nt, Artificial Sequence
  Description of Artificial Sequence: Synthetic oligonucleotide
aacucaucuugauugggug

SEQ ID NO: 3134383 - RNA, 19 nt, Artificial Sequence
  Description of Artificial Sequence: Synthetic oligonucleotide
uugauugggugccucaaag

SEQ ID NO: 3134384 - RNA, 19 nt, Artificial Sequence
  Description of Artificial Sequence: Synthetic oligonucleotide
uuguugacugcuaaugcug

SEQ ID NO: 3134385 - RNA, 19 nt, Artificial Sequence
  Description of Artificial Sequence: Synthetic oligonucleotide
uuuguugacugcuaaugcu

SEQ ID NO: 3134386 - RNA, 19 nt, Artificial Sequence
  Description of Artificial Sequence: Synthetic oligonucleotide
cuaguuccaagccagcucc

SEQ ID NO: 3134387 - RNA, 19 nt, Artificial Sequence
  Description of Artificial Sequence: Synthetic oligonucleotide
acucaucuugauugggugc

SEQ ID NO: 3134388 - RNA, 19 nt, Artificial Sequence
  Description of Artificial Sequence: Synthetic oligonucleotide
uccuggagcacucuugucc

SEQ ID NO: 3134389 - RNA, 19 nt, Artificial Sequence
  Description of Artificial Sequence: Synthetic oligonucleotide
ucuuuguugacugcuaaug

SEQ ID NO: 3134390 - RNA, 19 nt, Artificial Sequence
  Description of Artificial Sequence: Synthetic oligonucleotide
uagagaucgaggcuggucu

SEQ ID NO: 3134391 - RNA, 19 nt, Artificial Sequence
  Description of Artificial Sequence: Synthetic oligonucleotide
caaagacaagcccagagug

SEQ ID NO: 3134392 - RNA, 19 nt, Artificial Sequence
  Description of Artificial Sequence: Synthetic oligonucleotide
aaaacucaucuugauuggg

SEQ ID NO: 3134393 - RNA, 19 nt, Artificial Sequence
  Description of Artificial Sequence: Synthetic oligonucleotide
uugucaaaacucaucuuga

SEQ ID NO: 3134394 - RNA, 19 nt, Artificial Sequence
  Description of Artificial Sequence: Synthetic oligonucleotide
auggcucccaaagacaagc

SEQ ID NO: 3134395 - RNA, 19 nt, Artificial Sequence
  Description of Artificial Sequence: Synthetic oligonucleotide
caaaacucaucuugauugg

SEQ ID NO: 3134396 - RNA, 19 nt, Artificial Sequence
  Description of Artificial Sequence: Synthetic oligonucleotide
cuuuguugacugcuaaugc

SEQ ID NO: 3134397 - RNA, 19 nt, Artificial Sequence
  Description of Artificial Sequence: Synthetic oligonucleotide
ugcugcuagagaucgaggc

SEQ ID NO: 3134398 - RNA, 19 nt, Artificial Sequence
  Description of Artificial Sequence: Synthetic oligonucleotide
uaaugcugcugcuagagau

SEQ ID NO: 3134399 - RNA, 19 nt, Artificial Sequence
  Description of Artificial Sequence: Synthetic oligonucleotide
aagacaagcccagagugug

SEQ ID NO: 3134400 - RNA, 19 nt, Artificial Sequence
  Description of Artificial Sequence: Synthetic oligonucleotide
uguugacugcuaaugcugc

SEQ ID NO: 3134401 - RNA, 19 nt, Artificial Sequence
  Description of Artificial Sequence: Synthetic oligonucleotide
ugcuguucuuuguugacug

SEQ ID NO: 3134402 - RNA, 19 nt, Artificial Sequence
  Description of Artificial Sequence: Synthetic oligonucleotide
ugauggcucccaaagacaa

SEQ ID NO: 3134403 - RNA, 19 nt, Artificial Sequence
  Description of Artificial Sequence: Synthetic oligonucleotide
aaugcugcugcuagagauc

SEQ ID NO: 3134404 - RNA, 19 nt, Artificial Sequence
  Description of Artificial Sequence: Synthetic oligonucleotide
ugacugcuaaugcugcugc

SEQ ID NO: 3134405 - RNA, 19 nt, Artificial Sequence
  Description of Artificial Sequence: Synthetic oligonucleotide
ucuaguuccaagccagcuc

SEQ ID NO: 3134406 - RNA, 19 nt, Artificial Sequence
  Description of Artificial Sequence: Synthetic oligonucleotide
agagugugcggcugaggcc

SEQ ID NO: 3134407 - RNA, 19 nt, Artificial Sequence
  Description of Artificial Sequence: Synthetic oligonucleotide
ugauugggugccucaaagc

SEQ ID NO: 3134408 - RNA, 19 nt, Artificial Sequence
  Description of Artificial Sequence: Synthetic oligonucleotide
uugggugccucaaagccac

SEQ ID NO: 3134409 - RNA, 19 nt, Artificial Sequence
  Description of Artificial Sequence: Synthetic oligonucleotide
cagagugugcggcugaggc

SEQ ID NO: 3134410 - RNA, 19 nt, Artificial Sequence
  Description of Artificial Sequence: Synthetic oligonucleotide
ugcuagagaucgaggcugg

SEQ ID NO: 3134411 - RNA, 19 nt, Artificial Sequence
  Description of Artificial Sequence: Synthetic oligonucleotide
gacaagcccagagugugcg

SEQ ID NO: 3134412 - RNA, 19 nt, Artificial Sequence
  Description of Artificial Sequence: Synthetic oligonucleotide
aaacucaucuugauugggu

SEQ ID NO: 3134413 - RNA, 19 nt, Artificial Sequence
  Description of Artificial Sequence: Synthetic oligonucleotide
cucaucuugauugggugcc

SEQ ID NO: 3134414 - RNA, 19 nt, Artificial Sequence
  Description of Artificial Sequence: Synthetic oligonucleotide
agcacucuuguccaugcug

SEQ ID NO: 3134415 - RNA, 19 nt, Artificial Sequence
  Description of Artificial Sequence: Synthetic oligonucleotide
uccaugcuguucuuuguug

SEQ ID NO: 3134416 - RNA, 19 nt, Artificial Sequence
  Description of Artificial Sequence: Synthetic oligonucleotide
aaagacaagcccagagugu

SEQ ID NO: 3134417 - RNA, 19 nt, Artificial Sequence
  Description of Artificial Sequence: Synthetic oligonucleotide
aaugcccugcugauggcuc

SEQ ID NO: 3134418 - RNA, 19 nt, Artificial Sequence
  Description of Artificial Sequence: Synthetic oligonucleotide
cugcugauggcucccaaag

SEQ ID NO: 3134419 - RNA, 19 nt, Artificial Sequence
  Description of Artificial Sequence: Synthetic oligonucleotide
ugucaaaacucaucuugau

SEQ ID NO: 3134420 - RNA, 19 nt, Artificial Sequence
  Description of Artificial Sequence: Synthetic oligonucleotide
cugcuaaugcugcugcuag

SEQ ID NO: 3134421 - RNA, 19 nt, Artificial Sequence
  Description of Artificial Sequence: Synthetic oligonucleotide
gucccgaugacuccuggag

SEQ ID NO: 3134422 - RNA, 19 nt, Artificial Sequence
  Description of Artificial Sequence: Synthetic oligonucleotide
uugacugcuaaugcugcug

SEQ ID NO: 3134423 - RNA, 19 nt, Artificial Sequence
  Description of Artificial Sequence: Synthetic oligonucleotide
augcugcugcuagagaucg

SEQ ID NO: 3134424 - RNA, 19 nt, Artificial Sequence
  Description of Artificial Sequence: Synthetic oligonucleotide
uguucuuuguugacugcua

SEQ ID NO: 3134425 - RNA, 19 nt, Artificial Sequence
  Description of Artificial Sequence: Synthetic oligonucleotide
cucccaaagacaagcccag

SEQ ID NO: 3134426 - RNA, 19 nt, Artificial Sequence
  Description of Artificial Sequence: Synthetic oligonucleotide
ucccgaugacuccuggagc

SEQ ID NO: 3134427 - RNA, 19 nt, Artificial Sequence
  Description of Artificial Sequence: Synthetic oligonucleotide
caugcuguucuuuguugac

SEQ ID NO: 3134428 - RNA, 19 nt, Artificial Sequence
  Description of Artificial Sequence: Synthetic oligonucleotide
agcucaugcuugccagggc

SEQ ID NO: 3134429 - RNA, 19 nt, Artificial Sequence
  Description of Artificial Sequence: Synthetic oligonucleotide
gcugauggcucccaaagac

SEQ ID NO: 3134430 - RNA, 19 nt, Artificial Sequence
  Description of Artificial Sequence: Synthetic oligonucleotide
cugcuagagaucgaggcug

SEQ ID NO: 3134431 - RNA, 19 nt, Artificial Sequence
  Description of Artificial Sequence: Synthetic oligonucleotide
uucuaguuccaagccagcu

SEQ ID NO: 3134432 - RNA, 19 nt, Artificial Sequence
  Description of Artificial Sequence: Synthetic oligonucleotide
ugcugauggcucccaaaga

SEQ ID NO: 3134433 - RNA, 19 nt, Artificial Sequence
  Description of Artificial Sequence: Synthetic oligonucleotide
cuugccagggccuugucaa

SEQ ID NO: 3134434 - RNA, 19 nt, Artificial Sequence
  Description of Artificial Sequence: Synthetic oligonucleotide
uucuuuguugacugcuaau

SEQ ID NO: 3134435 - RNA, 19 nt, Artificial Sequence
  Description of Artificial Sequence: Synthetic oligonucleotide
ugcggcugaggccuggggu

SEQ ID NO: 3134436 - RNA, 19 nt, Artificial Sequence
  Description of Artificial Sequence: Synthetic oligonucleotide
gcuaaugcugcugcuagag

SEQ ID NO: 3134437 - RNA, 19 nt, Artificial Sequence
  Description of Artificial Sequence: Synthetic oligonucleotide
gaucgaggcuggucuuagg

SEQ ID NO: 3134438 - RNA, 19 nt, Artificial Sequence
  Description of Artificial Sequence: Synthetic oligonucleotide
uggcucccaaagacaagcc

SEQ ID NO: 3134439 - RNA, 19 nt, Artificial Sequence
  Description of Artificial Sequence: Synthetic oligonucleotide
cagggccuugucaaaacuc

SEQ ID NO: 3134440 - RNA, 19 nt, Artificial Sequence
  Description of Artificial Sequence: Synthetic oligonucleotide
caagcccagagugugcggc

SEQ ID NO: 3134441 - RNA, 19 nt, Artificial Sequence
  Description of Artificial Sequence: Synthetic oligonucleotide
aggccuggggucccgauga

SEQ ID NO: 3134442 - RNA, 19 nt, Artificial Sequence
  Description of Artificial Sequence: Synthetic oligonucleotide
acaagcccagagugugcgg

SEQ ID NO: 3134443 - RNA, 19 nt, Artificial Sequence
  Description of Artificial Sequence: Synthetic oligonucleotide
agacaagcccagagugugc

SEQ ID NO: 3134444 - RNA, 19 nt, Artificial Sequence
  Description of Artificial Sequence: Synthetic oligonucleotide
ugcuaaugcugcugcuaga

SEQ ID NO: 3134445 - RNA, 19 nt, Artificial Sequence
  Description of Artificial Sequence: Synthetic oligonucleotide
cugcugcuagagaucgagg

SEQ ID NO: 3134446 - RNA, 19 nt, Artificial Sequence
  Description of Artificial Sequence: Synthetic oligonucleotide
ucuugauugggugccucaa

SEQ ID NO: 3134447 - RNA, 19 nt, Artificial Sequence
  Description of Artificial Sequence: Synthetic oligonucleotide
guucuuuguugacugcuaa

SEQ ID NO: 3134448 - RNA, 19 nt, Artificial Sequence
  Description of Artificial Sequence: Synthetic oligonucleotide
gacuccuggagcacucuug

SEQ ID NO: 3134449 - RNA, 19 nt, Artificial Sequence
  Description of Artificial Sequence: Synthetic oligonucleotide
cagcucaugcuugccaggg

SEQ ID NO: 3134450 - RNA, 19 nt, Artificial Sequence
  Description of Artificial Sequence: Synthetic oligonucleotide
cugauggcucccaaagaca

SEQ ID NO: 3134451 - RNA, 19 nt, Artificial Sequence
  Description of Artificial Sequence: Synthetic oligonucleotide
agggccuugucaaaacuca

SEQ ID NO: 3134452 - RNA, 19 nt, Artificial Sequence
  Description of Artificial Sequence: Synthetic oligonucleotide
gauggcucccaaagacaag

SEQ ID NO: 3134453 - RNA, 19 nt, Artificial Sequence
  Description of Artificial Sequence: Synthetic oligonucleotide
uaguuccaagccagcuccc

SEQ ID NO: 3134454 - RNA, 19 nt, Artificial Sequence
  Description of Artificial Sequence: Synthetic oligonucleotide
cuagagaucgaggcugguc

SEQ ID NO: 3134455 - RNA, 19 nt, Artificial Sequence
  Description of Artificial Sequence: Synthetic oligonucleotide
ccucaaagccaccaaugcc

SEQ ID NO: 3134456 - RNA, 19 nt, Artificial Sequence
  Description of Artificial Sequence: Synthetic oligonucleotide
agaucgaggcuggucuuag

SEQ ID NO: 3134457 - RNA, 19 nt, Artificial Sequence
  Description of Artificial Sequence: Synthetic oligonucleotide
cccaaagacaagcccagag

SEQ ID NO: 3134458 - RNA, 19 nt, Artificial Sequence
  Description of Artificial Sequence: Synthetic oligonucleotide
uggagcacucuuguccaug

SEQ ID NO: 3134459 - RNA, 19 nt, Artificial Sequence
  Description of Artificial Sequence: Synthetic oligonucleotide
uccaagccagcucccucca

SEQ ID NO: 3134460 - RNA, 19 nt, Artificial Sequence
  Description of Artificial Sequence: Synthetic oligonucleotide
ggagcacucuuguccaugc

SEQ ID NO: 3134461 - RNA, 19 nt, Artificial Sequence
  Description of Artificial Sequence: Synthetic oligonucleotide
gcugcugcuagagaucgag

SEQ ID NO: 3134462 - RNA, 19 nt, Artificial Sequence
  Description of Artificial Sequence: Synthetic oligonucleotide
augcuguucuuuguugacu

SEQ ID NO: 3134463 - RNA, 19 nt, Artificial Sequence
  Description of Artificial Sequence: Synthetic oligonucleotide
gaugacuccuggagcacuc

SEQ ID NO: 3134464 - RNA, 19 nt, Artificial Sequence
  Description of Artificial Sequence: Synthetic oligonucleotide
ggcucccaaagacaagccc

SEQ ID NO: 3134465 - RNA, 19 nt, Artificial Sequence
  Description of Artificial Sequence: Synthetic oligonucleotide
gccaccaaugcccugcuga

SEQ ID NO: 3134466 - RNA, 19 nt, Artificial Sequence
  Description of Artificial Sequence: Synthetic oligonucleotide
gaggccuggggucccgaug

SEQ ID NO: 3134467 - RNA, 19 nt, Artificial Sequence
  Description of Artificial Sequence: Synthetic oligonucleotide
gucaaaacucaucuugauu

SEQ ID NO: 3134468 - RNA, 19 nt, Artificial Sequence
  Description of Artificial Sequence: Synthetic oligonucleotide
gagugugcggcugaggccu

SEQ ID NO: 3134469 - RNA, 19 nt, Artificial Sequence
  Description of Artificial Sequence: Synthetic oligonucleotide
gccuugucaaaacucaucu

SEQ ID NO: 3134470 - RNA, 19 nt, Artificial Sequence
  Description of Artificial Sequence: Synthetic oligonucleotide
guuccaagccagcucccuc

SEQ ID NO: 3134471 - RNA, 19 nt, Artificial Sequence
  Description of Artificial Sequence: Synthetic oligonucleotide
cuaaugcugcugcuagaga

SEQ ID NO: 3134472 - RNA, 19 nt, Artificial Sequence
  Description of Artificial Sequence: Synthetic oligonucleotide
ucaucuugauugggugccu

SEQ ID NO: 3134473 - RNA, 19 nt, Artificial Sequence
  Description of Artificial Sequence: Synthetic oligonucleotide
cuggggucccgaugacucc

SEQ ID NO: 3134474 - RNA, 19 nt, Artificial Sequence
  Description of Artificial Sequence: Synthetic oligonucleotide
agagaucgaggcuggucuu

SEQ ID NO: 3134475 - RNA, 19 nt, Artificial Sequence
  Description of Artificial Sequence: Synthetic oligonucleotide
aguuccaagccagcucccu

SEQ ID NO: 3134476 - RNA, 19 nt, Artificial Sequence
  Description of Artificial Sequence: Synthetic oligonucleotide
ugacuccuggagcacucuu

SEQ ID NO: 3134477 - RNA, 19 nt, Artificial Sequence
  Description of Artificial Sequence: Synthetic oligonucleotide
ccuggggucccgaugacuc

SEQ ID NO: 3134478 - RNA, 19 nt, Artificial Sequence
  Description of Artificial Sequence: Synthetic oligonucleotide
uggggucccgaugacuccu

SEQ ID NO: 3134479 - RNA, 19 nt, Artificial Sequence
  Description of Artificial Sequence: Synthetic oligonucleotide
cuugauugggugccucaaa

SEQ ID NO: 3134480 - RNA, 19 nt, Artificial Sequence
  Description of Artificial Sequence: Synthetic oligonucleotide
gcuguucuuuguugacugc

SEQ ID NO: 3134481 - RNA, 19 nt, Artificial Sequence
  Description of Artificial Sequence: Synthetic oligonucleotide
caaagccaccaaugcccug

SEQ ID NO: 3134482 - RNA, 19 nt, Artificial Sequence
  Description of Artificial Sequence: Synthetic oligonucleotide
caucuugauugggugccuc

SEQ ID NO: 3134483 - RNA, 19 nt, Artificial Sequence
  Description of Artificial Sequence: Synthetic oligonucleotide
gccagcucccuccagcuca

SEQ ID NO: 3134484 - RNA, 19 nt, Artificial Sequence
  Description of Artificial Sequence: Synthetic oligonucleotide
ucccaaagacaagcccaga

SEQ ID NO: 3134485 - RNA, 19 nt, Artificial Sequence
  Description of Artificial Sequence: Synthetic oligonucleotide
ugcugcugcuagagaucga

SEQ ID NO: 3134486 - RNA, 19 nt, Artificial Sequence
  Description of Artificial Sequence: Synthetic oligonucleotide
cuccagcucaugcuugcca

SEQ ID NO: 3134487 - RNA, 19 nt, Artificial Sequence
  Description of Artificial Sequence: Synthetic oligonucleotide
guugacugcuaaugcugcu

SEQ ID NO: 3134488 - RNA, 19 nt, Artificial Sequence
  Description of Artificial Sequence: Synthetic oligonucleotide
cccgaugacuccuggagca

SEQ ID NO: 3134489 - RNA, 19 nt, Artificial Sequence
  Description of Artificial Sequence: Synthetic oligonucleotide
ccaugcuguucuuuguuga

SEQ ID NO: 3134490 - RNA, 19 nt, Artificial Sequence
  Description of Artificial Sequence: Synthetic oligonucleotide
cuguucuuuguugacugcu

SEQ ID NO: 3134491 - RNA, 19 nt, Artificial Sequence
  Description of Artificial Sequence: Synthetic oligonucleotide
augcuugccagggccuugu

SEQ ID NO: 3134492 - RNA, 19 nt, Artificial Sequence
  Description of Artificial Sequence: Synthetic oligonucleotide
ggccuugucaaaacucauc

SEQ ID NO: 3134493 - RNA, 19 nt, Artificial Sequence
  Description of Artificial Sequence: Synthetic oligonucleotide
ugggugccucaaagccacc

SEQ ID NO: 3134494 - RNA, 19 nt, Artificial Sequence
  Description of Artificial Sequence: Synthetic oligonucleotide
augacuccuggagcacucu

SEQ ID NO: 3134495 - RNA, 19 nt, Artificial Sequence
  Description of Artificial Sequence: Synthetic oligonucleotide
gacugcuaaugcugcugcu

SEQ ID NO: 3134496 - RNA, 19 nt, Artificial Sequence
  Description of Artificial Sequence: Synthetic oligonucleotide
caccaaugcccugcugaug

SEQ ID NO: 3134497 - RNA, 19 nt, Artificial Sequence
  Description of Artificial Sequence: Synthetic oligonucleotide
gcugcuagagaucgaggcu

SEQ ID NO: 3134498 - RNA, 19 nt, Artificial Sequence
  Description of Artificial Sequence: Synthetic oligonucleotide
gagaucgaggcuggucuua

SEQ ID NO: 3134499 - RNA, 19 nt, Artificial Sequence
  Description of Artificial Sequence: Synthetic oligonucleotide
ugaggccuggggucccgau

SEQ ID NO: 3134500 - RNA, 19 nt, Artificial Sequence
  Description of Artificial Sequence: Synthetic oligonucleotide
ggugccucaaagccaccaa

SEQ ID NO: 3134501 - RNA, 19 nt, Artificial Sequence
  Description of Artificial Sequence: Synthetic oligonucleotide
gcuugccagggccuuguca

SEQ ID NO: 3134502 - RNA, 19 nt, Artificial Sequence
  Description of Artificial Sequence: Synthetic oligonucleotide
gggucccgaugacuccugg

SEQ ID NO: 3134503 - RNA, 19 nt, Artificial Sequence
  Description of Artificial Sequence: Synthetic oligonucleotide
ccaaagacaagcccagagu

SEQ ID NO: 3134504 - RNA, 19 nt, Artificial Sequence
  Description of Artificial Sequence: Synthetic oligonucleotide
cucaugcuugccagggccu

SEQ ID NO: 3134505 - RNA, 19 nt, Artificial Sequence
  Description of Artificial Sequence: Synthetic oligonucleotide
ugcuugccagggccuuguc

SEQ ID NO: 3134506 - RNA, 19 nt, Artificial Sequence
  Description of Artificial Sequence: Synthetic oligonucleotide
gugccucaaagccaccaau

SEQ ID NO: 3134507 - RNA, 19 nt, Artificial Sequence
  Description of Artificial Sequence: Synthetic oligonucleotide
guccaugcuguucuuuguu

SEQ ID NO: 3134508 - RNA, 19 nt, Artificial Sequence
  Description of Artificial Sequence: Synthetic oligonucleotide
ggucccgaugacuccugga

SEQ ID NO: 3134509 - RNA, 19 nt, Artificial Sequence
  Description of Artificial Sequence: Synthetic oligonucleotide
ccaaugcccugcugauggc

SEQ ID NO: 3134510 - RNA, 19 nt, Artificial Sequence
  Description of Artificial Sequence: Synthetic oligonucleotide
gcacucuuguccaugcugu

SEQ ID NO: 3134511 - RNA, 19 nt, Artificial Sequence
  Description of Artificial Sequence: Synthetic oligonucleotide
gagcacucuuguccaugcu

SEQ ID NO: 3134512 - RNA, 19 nt, Artificial Sequence
  Description of Artificial Sequence: Synthetic oligonucleotide
gugugcggcugaggccugg

SEQ ID NO: 3134513 - RNA, 19 nt, Artificial Sequence
  Description of Artificial Sequence: Synthetic oligonucleotide
gggugccucaaagccacca

SEQ ID NO: 3134514 - RNA, 19 nt, Artificial Sequence
  Description of Artificial Sequence: Synthetic oligonucleotide
caaugcccugcugauggcu

SEQ ID NO: 3134515 - RNA, 19 nt, Artificial Sequence
  Description of Artificial Sequence: Synthetic oligonucleotide
agugugcggcugaggccug

SEQ ID NO: 3134516 - RNA, 19 nt, Artificial Sequence
  Description of Artificial Sequence: Synthetic oligonucleotide
ccugcugauggcucccaaa

SEQ ID NO: 3134517 - RNA, 19 nt, Artificial Sequence
  Description of Artificial Sequence: Synthetic oligonucleotide
gcugaggccuggggucccg

SEQ ID NO: 3134518 - RNA, 19 nt, Artificial Sequence
  Description of Artificial Sequence: Synthetic oligonucleotide
ccaagccagcucccuccag

SEQ ID NO: 3134519 - RNA, 19 nt, Artificial Sequence
  Description of Artificial Sequence: Synthetic oligonucleotide
cuuguccaugcuguucuuu

SEQ ID NO: 3134520 - RNA, 19 nt, Artificial Sequence
  Description of Artificial Sequence: Synthetic oligonucleotide
ccgaugacuccuggagcac

SEQ ID NO: 3134521 - RNA, 19 nt, Artificial Sequence
  Description of Artificial Sequence: Synthetic oligonucleotide
gcccagagugugcggcuga

SEQ ID NO: 3134522 - RNA, 19 nt, Artificial Sequence
  Description of Artificial Sequence: Synthetic oligonucleotide
cacucuuguccaugcuguu

SEQ ID NO: 3134523 - RNA, 19 nt, Artificial Sequence
  Description of Artificial Sequence: Synthetic oligonucleotide
ggggucccgaugacuccug

SEQ ID NO: 3134524 - RNA, 19 nt, Artificial Sequence
  Description of Artificial Sequence: Synthetic oligonucleotide
ccuugucaaaacucaucuu

SEQ ID NO: 3134525 - RNA, 19 nt, Artificial Sequence
  Description of Artificial Sequence: Synthetic oligonucleotide
ggcugaggccugggguccc

SEQ ID NO: 3134526 - RNA, 19 nt, Artificial Sequence
  Description of Artificial Sequence: Synthetic oligonucleotide
ggccuggggucccgaugac

SEQ ID NO: 3134527 - RNA, 19 nt, Artificial Sequence
  Description of Artificial Sequence: Synthetic oligonucleotide
ccagggccuugucaaaacu

SEQ ID NO: 3134528 - RNA, 19 nt, Artificial Sequence
  Description of Artificial Sequence: Synthetic oligonucleotide
cuggagcacucuuguccau

SEQ ID NO: 3134529 - RNA, 19 nt, Artificial Sequence
  Description of Artificial Sequence: Synthetic oligonucleotide
ccaccaaugcccugcugau

SEQ ID NO: 3134530 - RNA, 19 nt, Artificial Sequence
  Description of Artificial Sequence: Synthetic oligonucleotide
cugaggccuggggucccga

SEQ ID NO: 3134531 - RNA, 19 nt, Artificial Sequence
  Description of Artificial Sequence: Synthetic oligonucleotide
gggccuugucaaaacucau

SEQ ID NO: 3134532 - RNA, 19 nt, Artificial Sequence
  Description of Artificial Sequence: Synthetic oligonucleotide
gcuagagaucgaggcuggu

SEQ ID NO: 3134533 - RNA, 19 nt, Artificial Sequence
  Description of Artificial Sequence: Synthetic oligonucleotide
gccuggggucccgaugacu

SEQ ID NO: 3134534 - RNA, 19 nt, Artificial Sequence
  Description of Artificial Sequence: Synthetic oligonucleotide
cccugcugauggcucccaa

SEQ ID NO: 3134535 - RNA, 19 nt, Artificial Sequence
  Description of Artificial Sequence: Synthetic oligonucleotide
cgaugacuccuggagcacu

SEQ ID NO: 3134536 - RNA, 19 nt, Artificial Sequence
  Description of Artificial Sequence: Synthetic oligonucleotide
ccagcucccuccagcucau

SEQ ID NO: 3134537 - RNA, 19 nt, Artificial Sequence
  Description of Artificial Sequence: Synthetic oligonucleotide
uuuaucauaaucgucagca

SEQ ID NO: 3134538 - RNA, 19 nt, Artificial Sequence
  Description of Artificial Sequence: Synthetic oligonucleotide
aaucaucagugccagcagg

SEQ ID NO: 3134539 - RNA, 19 nt, Artificial Sequence
  Description of Artificial Sequence: Synthetic oligonucleotide
uucuggacagcagacaucg

SEQ ID NO: 3134540 - RNA, 19 nt, Artificial Sequence
  Description of Artificial Sequence: Synthetic oligonucleotide
guaguaagggucuuccugg

SEQ ID NO: 3134541 - RNA, 19 nt, Artificial Sequence
  Description of Artificial Sequence: Synthetic oligonucleotide
aguggaaauggccugcggg

SEQ ID NO: 3134542 - RNA, 19 nt, Artificial Sequence
  Description of Artificial Sequence: Synthetic oligonucleotide
aguaguaagggucuuccug

SEQ ID NO: 3134543 - RNA, 19 nt, Artificial Sequence
  Description of Artificial Sequence: Synthetic oligonucleotide
auaaucaucagugccagca

SEQ ID NO: 3134544 - RNA, 19 nt, Artificial Sequence
  Description of Artificial Sequence: Synthetic oligonucleotide
uuuucuguugaauucuuau

SEQ ID NO: 3134545 - RNA, 19 nt, Artificial Sequence
  Description of Artificial Sequence: Synthetic oligonucleotide
uaucauaaucgucagcaau

SEQ ID NO: 3134546 - RNA, 19 nt, Artificial Sequence
  Description of Artificial Sequence: Synthetic oligonucleotide
uccucaguggaaauggccu

SEQ ID NO: 3134547 - RNA, 19 nt, Artificial Sequence
  Description of Artificial Sequence: Synthetic oligonucleotide
aucgucagcaaucccuugg

SEQ ID NO: 3134548 - RNA, 19 nt, Artificial Sequence
  Description of Artificial Sequence: Synthetic oligonucleotide
auucuuucuccucagugga

SEQ ID NO: 3134549 - RNA, 19 nt, Artificial Sequence
  Description of Artificial Sequence: Synthetic oligonucleotide
auauaaucaucagugccag

SEQ ID NO: 3134550 - RNA, 19 nt, Artificial Sequence
  Description of Artificial Sequence: Synthetic oligonucleotide
uggacaguaguaagggucu

SEQ ID NO: 3134551 - RNA, 19 nt, Artificial Sequence
  Description of Artificial Sequence: Synthetic oligonucleotide
ucauaaucgucagcaaucc

SEQ ID NO: 3134552 - RNA, 19 nt, Artificial Sequence
  Description of Artificial Sequence: Synthetic oligonucleotide
auaaucgucagcaaucccu

SEQ ID NO: 3134553 - RNA, 19 nt, Artificial Sequence
  Description of Artificial Sequence: Synthetic oligonucleotide
uggacagcagacaucgcug

SEQ ID NO: 3134554 - RNA, 19 nt, Artificial Sequence
  Description of Artificial Sequence: Synthetic oligonucleotide
acaucgcugauucuuucuc

SEQ ID NO: 3134555 - RNA, 19 nt, Artificial Sequence
  Description of Artificial Sequence: Synthetic oligonucleotide
aagggguccaaagagugga

SEQ ID NO: 3134556 - RNA, 19 nt, Artificial Sequence
  Description of Artificial Sequence: Synthetic oligonucleotide
aauggccugcgggaggugg

SEQ ID NO: 3134557 - RNA, 19 nt, Artificial Sequence
  Description of Artificial Sequence: Synthetic oligonucleotide
aguaagggucuuccuggcg

SEQ ID NO: 3134558 - RNA, 19 nt, Artificial Sequence
  Description of Artificial Sequence: Synthetic oligonucleotide
uuaucauaaucgucagcaa

SEQ ID NO: 3134559 - RNA, 19 nt, Artificial Sequence
  Description of Artificial Sequence: Synthetic oligonucleotide
uaaucgucagcaaucccuu

SEQ ID NO: 3134560 - RNA, 19 nt, Artificial Sequence
  Description of Artificial Sequence: Synthetic oligonucleotide
gucagcaaucccuuggaca

SEQ ID NO: 3134561 - RNA, 19 nt, Artificial Sequence
  Description of Artificial Sequence: Synthetic oligonucleotide
caucgcugauucuuucucc

SEQ ID NO: 3134562 - RNA, 19 nt, Artificial Sequence
  Description of Artificial Sequence: Synthetic oligonucleotide
agacaucgcugauucuuuc

SEQ ID NO: 3134563 - RNA, 19 nt, Artificial Sequence
  Description of Artificial Sequence: Synthetic oligonucleotide
aucgcugauucuuucuccu

SEQ ID NO: 3134564 - RNA, 19 nt, Artificial Sequence
  Description of Artificial Sequence: Synthetic oligonucleotide
aaucgucagcaaucccuug

SEQ ID NO: 3134565 - RNA, 19 nt, Artificial Sequence
  Description of Artificial Sequence: Synthetic oligonucleotide
ucgucagcaaucccuugga

SEQ ID NO: 3134566 - RNA, 19 nt, Artificial Sequence
  Description of Artificial Sequence: Synthetic oligonucleotide
ucaguggaaauggccugcg

SEQ ID NO: 3134567 - RNA, 19 nt, Artificial Sequence
  Description of Artificial Sequence: Synthetic oligonucleotide
caucagugccagcaggaag

SEQ ID NO: 3134568 - RNA, 19 nt, Artificial Sequence
  Description of Artificial Sequence: Synthetic oligonucleotide
uauaaucaucagugccagc

SEQ ID NO: 3134569 - RNA, 19 nt, Artificial Sequence
  Description of Artificial Sequence: Synthetic oligonucleotide
cagcagacaucgcugauuc

SEQ ID NO: 3134570 - RNA, 19 nt, Artificial Sequence
  Description of Artificial Sequence: Synthetic oligonucleotide
guggaaauggccugcggga

SEQ ID NO: 3134571 - RNA, 19 nt, Artificial Sequence
  Description of Artificial Sequence: Synthetic oligonucleotide
guaagggucuuccuggcgu

SEQ ID NO: 3134572 - RNA, 19 nt, Artificial Sequence
  Description of Artificial Sequence: Synthetic oligonucleotide
aucaucagugccagcagga

SEQ ID NO: 3134573 - RNA, 19 nt, Artificial Sequence
  Description of Artificial Sequence: Synthetic oligonucleotide
guccaaagaguggagguuc

SEQ ID NO: 3134574 - RNA, 19 nt, Artificial Sequence
  Description of Artificial Sequence: Synthetic oligonucleotide
aucccuuggacaguaguaa

SEQ ID NO: 3134575 - RNA, 19 nt, Artificial Sequence
  Description of Artificial Sequence: Synthetic oligonucleotide
gacaguaguaagggucuuc

SEQ ID NO: 3134576 - RNA, 19 nt, Artificial Sequence
  Description of Artificial Sequence: Synthetic oligonucleotide
ucaucagugccagcaggaa

SEQ ID NO: 3134577 - RNA, 19 nt, Artificial Sequence
  Description of Artificial Sequence: Synthetic oligonucleotide
gacaucgcugauucuuucu

SEQ ID NO: 3134578 - RNA, 19 nt, Artificial Sequence
  Description of Artificial Sequence: Synthetic oligonucleotide
ucuggacagcagacaucgc

SEQ ID NO: 3134579 - RNA, 19 nt, Artificial Sequence
  Description of Artificial Sequence: Synthetic oligonucleotide
uaagggucuuccuggcguu

SEQ ID NO: 3134580 - RNA, 19 nt, Artificial Sequence
  Description of Artificial Sequence: Synthetic oligonucleotide
caguggaaauggccugcgg

SEQ ID NO: 3134581 - RNA, 19 nt, Artificial Sequence
  Description of Artificial Sequence: Synthetic oligonucleotide
cuggacagcagacaucgcu

SEQ ID NO: 3134582 - RNA, 19 nt, Artificial Sequence
  Description of Artificial Sequence: Synthetic oligonucleotide
ucgcugauucuuucuccuc

SEQ ID NO: 3134583 - RNA, 19 nt, Artificial Sequence
  Description of Artificial Sequence: Synthetic oligonucleotide
acagcagacaucgcugauu

SEQ ID NO: 3134584 - RNA, 19 nt, Artificial Sequence
  Description of Artificial Sequence: Synthetic oligonucleotide
auggccugcgggagguggc

SEQ ID NO: 3134585 - RNA, 19 nt, Artificial Sequence
  Description of Artificial Sequence: Synthetic oligonucleotide
gggguccaaagaguggagg

SEQ ID NO: 3134586 - RNA, 19 nt, Artificial Sequence
  Description of Artificial Sequence: Synthetic oligonucleotide
agcaaucccuuggacagua

SEQ ID NO: 3134587 - RNA, 19 nt, Artificial Sequence
  Description of Artificial Sequence: Synthetic oligonucleotide
gaaauggccugcgggaggu

SEQ ID NO: 3134588 - RNA, 19 nt, Artificial Sequence
  Description of Artificial Sequence: Synthetic oligonucleotide
agcagacaucgcugauucu

SEQ ID NO: 3134589 - RNA, 19 nt, Artificial Sequence
  Description of Artificial Sequence: Synthetic oligonucleotide
ggacagcagacaucgcuga

SEQ ID NO: 3134590 - RNA, 19 nt, Artificial Sequence
  Description of Artificial Sequence: Synthetic oligonucleotide
guucuggacagcagacauc

SEQ ID NO: 3134591 - RNA, 19 nt, Artificial Sequence
  Description of Artificial Sequence: Synthetic oligonucleotide
ccucaguggaaauggccug

SEQ ID NO: 3134592 - RNA, 19 nt, Artificial Sequence
  Description of Artificial Sequence: Synthetic oligonucleotide
aaauggccugcgggaggug

SEQ ID NO: 3134593 - RNA, 19 nt, Artificial Sequence
  Description of Artificial Sequence: Synthetic oligonucleotide
caaucccuuggacaguagu

SEQ ID NO: 3134594 - RNA, 19 nt, Artificial Sequence
  Description of Artificial Sequence: Synthetic oligonucleotide
agggguccaaagaguggag

SEQ ID NO: 3134595 - RNA, 19 nt, Artificial Sequence
  Description of Artificial Sequence: Synthetic oligonucleotide
ggguccaaagaguggaggu

SEQ ID NO: 3134596 - RNA, 19 nt, Artificial Sequence
  Description of Artificial Sequence: Synthetic oligonucleotide
gacagcagacaucgcugau

SEQ ID NO: 3134597 - RNA, 19 nt, Artificial Sequence
  Description of Artificial Sequence: Synthetic oligonucleotide
cagacaucgcugauucuuu

SEQ ID NO: 3134598 - RNA, 19 nt, Artificial Sequence
  Description of Artificial Sequence: Synthetic oligonucleotide
gcagacaucgcugauucuu

SEQ ID NO: 3134599 - RNA, 19 nt, Artificial Sequence
  Description of Artificial Sequence: Synthetic oligonucleotide
caguaguaagggucuuccu

SEQ ID NO: 3134600 - RNA, 19 nt, Artificial Sequence
  Description of Artificial Sequence: Synthetic oligonucleotide
cugauucuuucuccucagu

SEQ ID NO: 3134601 - RNA, 19 nt, Artificial Sequence
  Description of Artificial Sequence: Synthetic oligonucleotide
gccugcgggagguggcugc

SEQ ID NO: 3134602 - RNA, 19 nt, Artificial Sequence
  Description of Artificial Sequence: Synthetic oligonucleotide
cgcugauucuuucuccuca

SEQ ID NO: 3134603 - RNA, 19 nt, Artificial Sequence
  Description of Artificial Sequence: Synthetic oligonucleotide
cugcgggagguggcugcgg

SEQ ID NO: 3134604 - RNA, 19 nt, Artificial Sequence
  Description of Artificial Sequence: Synthetic oligonucleotide
gcaaucccuuggacaguag

SEQ ID NO: 3134605 - RNA, 19 nt, Artificial Sequence
  Description of Artificial Sequence: Synthetic oligonucleotide
cgucagcaaucccuuggac

SEQ ID NO: 3134606 - RNA, 19 nt, Artificial Sequence
  Description of Artificial Sequence: Synthetic oligonucleotide
ccugcgggagguggcugcg

SEQ ID NO: 3134607 - RNA, 19 nt, Artificial Sequence
  Description of Artificial Sequence: Synthetic oligonucleotide
gcgggagguggcugcggga

SEQ ID NO: 3134608 - RNA, 19 nt, Artificial Sequence
  Description of Artificial Sequence: Synthetic oligonucleotide
cagcaaucccuuggacagu

SEQ ID NO: 3134609 - RNA, 19 nt, Artificial Sequence
  Description of Artificial Sequence: Synthetic oligonucleotide
ggacaguaguaagggucuu

SEQ ID NO: 3134610 - RNA, 19 nt, Artificial Sequence
  Description of Artificial Sequence: Synthetic oligonucleotide
aaaaucauacuucaaauau

SEQ ID NO: 3134611 - RNA, 19 nt, Artificial Sequence
  Description of Artificial Sequence: Synthetic oligonucleotide
aauaaucugaaauuuaaaa

SEQ ID NO: 3134612 - RNA, 19 nt, Artificial Sequence
  Description of Artificial Sequence: Synthetic oligonucleotide
aaaguauucacucaauaga

SEQ ID NO: 3134613 - RNA, 19 nt, Artificial Sequence
  Description of Artificial Sequence: Synthetic oligonucleotide
auuaugucaaaaugugucc

SEQ ID NO: 3134614 - RNA, 19 nt, Artificial Sequence
  Description of Artificial Sequence: Synthetic oligonucleotide
uauuaugucaaaauguguc

SEQ ID NO: 3134615 - RNA, 19 nt, Artificial Sequence
  Description of Artificial Sequence: Synthetic oligonucleotide
aauauuaugucaaaaugug

SEQ ID NO: 3134616 - RNA, 19 nt, Artificial Sequence
  Description of Artificial Sequence: Synthetic oligonucleotide
aaauuaguacuaaauaauc

SEQ ID NO: 3134617 - RNA, 19 nt, Artificial Sequence
  Description of Artificial Sequence: Synthetic oligonucleotide
aaauauuaugucaaaaugu

SEQ ID NO: 3134618 - RNA, 19 nt, Artificial Sequence
  Description of Artificial Sequence: Synthetic oligonucleotide
uauuuugaagacuugagaa

SEQ ID NO: 3134619 - RNA, 19 nt, Artificial Sequence
  Description of Artificial Sequence: Synthetic oligonucleotide
ucauacuucaaauauuaug

SEQ ID NO: 3134620 - RNA, 19 nt, Artificial Sequence
  Description of Artificial Sequence: Synthetic oligonucleotide
auccauucaaaauuaguac

SEQ ID NO: 3134621 - RNA, 19 nt, Artificial Sequence
  Description of Artificial Sequence: Synthetic oligonucleotide
ucaaaauuaguacuaaaua

SEQ ID NO: 3134622 - RNA, 19 nt, Artificial Sequence
  Description of Artificial Sequence: Synthetic oligonucleotide
uucaaaauuaguacuaaau

SEQ ID NO: 3134623 - RNA, 19 nt, Artificial Sequence
  Description of Artificial Sequence: Synthetic oligonucleotide
caaauauuaugucaaaaug

SEQ ID NO: 3134624 - RNA, 19 nt, Artificial Sequence
  Description of Artificial Sequence: Synthetic oligonucleotide
ucaaauauuaugucaaaau

SEQ ID NO: 3134625 - RNA, 19 nt, Artificial Sequence
  Description of Artificial Sequence: Synthetic oligonucleotide
ugauuuguagcuauuuuga

SEQ ID NO: 3134626 - RNA, 19 nt, Artificial Sequence
  Description of Artificial Sequence: Synthetic oligonucleotide
agaaauaaacuuuucuuga

SEQ ID NO: 3134627 - RNA, 19 nt, Artificial Sequence
  Description of Artificial Sequence: Synthetic oligonucleotide
aaaauuaguacuaaauaau

SEQ ID NO: 3134628 - RNA, 19 nt, Artificial Sequence
  Description of Artificial Sequence: Synthetic oligonucleotide
uugauuuguagcuauuuug

SEQ ID NO: 3134629 - RNA, 19 nt, Artificial Sequence
  Description of Artificial Sequence: Synthetic oligonucleotide
ucacucaauagaaauaaac

SEQ ID NO: 3134630 - RNA, 19 nt, Artificial Sequence
  Description of Artificial Sequence: Synthetic oligonucleotide
caaaguauucacucaauag

SEQ ID NO: 3134631 - RNA, 19 nt, Artificial Sequence
  Description of Artificial Sequence: Synthetic oligonucleotide
aauuaguacuaaauaaucu

SEQ ID NO: 3134632 - RNA, 19 nt, Artificial Sequence
  Description of Artificial Sequence: Synthetic oligonucleotide
aaauaccucuaccauuguc

SEQ ID NO: 3134633 - RNA, 19 nt, Artificial Sequence
  Description of Artificial Sequence: Synthetic oligonucleotide
ucaauagaaauaaacuuuu

SEQ ID NO: 3134634 - RNA, 19 nt, Artificial Sequence
  Description of Artificial Sequence: Synthetic oligonucleotide
auuaguacuaaauaaucuu

SEQ ID NO: 3134635 - RNA, 19 nt, Artificial Sequence
  Description of Artificial Sequence: Synthetic oligonucleotide
aauaccucuaccauuguca

SEQ ID NO: 3134636 - RNA, 19 nt, Artificial Sequence
  Description of Artificial Sequence: Synthetic oligonucleotide
uacuucaaauauuauguca

SEQ ID NO: 3134637 - RNA, 19 nt, Artificial Sequence
  Description of Artificial Sequence: Synthetic oligonucleotide
uccauucaaaauuaguacu

SEQ ID NO: 3134638 - RNA, 19 nt, Artificial Sequence
  Description of Artificial Sequence: Synthetic oligonucleotide
ucaaaauguguccaaagua

SEQ ID NO: 3134639 - RNA, 19 nt, Artificial Sequence
  Description of Artificial Sequence: Synthetic oligonucleotide
ucagcagcuaauaaucuga

SEQ ID NO: 3134640 - RNA, 19 nt, Artificial Sequence
  Description of Artificial Sequence: Synthetic oligonucleotide
caaaauuaguacuaaauaa

SEQ ID NO: 3134641 - RNA, 19 nt, Artificial Sequence
  Description of Artificial Sequence: Synthetic oligonucleotide
aauccauucaaaauuagua

SEQ ID NO: 3134642 - RNA, 19 nt, Artificial Sequence
  Description of Artificial Sequence: Synthetic oligonucleotide
acucaauagaaauaaacuu

SEQ ID NO: 3134643 - RNA, 19 nt, Artificial Sequence
  Description of Artificial Sequence: Synthetic oligonucleotide
ucuaccauugucagcagcu

SEQ ID NO: 3134644 - RNA, 19 nt, Artificial Sequence
  Description of Artificial Sequence: Synthetic oligonucleotide
aaauguguccaaaguauuc

SEQ ID NO: 3134645 - RNA, 19 nt, Artificial Sequence
  Description of Artificial Sequence: Synthetic oligonucleotide
aaauaaacuuuucuugauu

SEQ ID NO: 3134646 - RNA, 19 nt, Artificial Sequence
  Description of Artificial Sequence: Synthetic oligonucleotide
uuaguacuaaauaaucuuu

SEQ ID NO: 3134647 - RNA, 19 nt, Artificial Sequence
  Description of Artificial Sequence: Synthetic oligonucleotide
uugucagcagcuaauaauc

SEQ ID NO: 3134648 - RNA, 19 nt, Artificial Sequence
  Description of Artificial Sequence: Synthetic oligonucleotide
auacuucaaauauuauguc

SEQ ID NO: 3134649 - RNA, 19 nt, Artificial Sequence
  Description of Artificial Sequence: Synthetic oligonucleotide
aaucauacuucaaauauua

SEQ ID NO: 3134650 - RNA, 19 nt, Artificial Sequence
  Description of Artificial Sequence: Synthetic oligonucleotide
ugucaaaauguguccaaag

SEQ ID NO: 3134651 - RNA, 19 nt, Artificial Sequence
  Description of Artificial Sequence: Synthetic oligonucleotide
aauguguccaaaguauuca

SEQ ID NO: 3134652 - RNA, 19 nt, Artificial Sequence
  Description of Artificial Sequence: Synthetic oligonucleotide
aauuccauugaugauuuaa

SEQ ID NO: 3134653 - RNA, 19 nt, Artificial Sequence
  Description of Artificial Sequence: Synthetic oligonucleotide
uaauaaucugaaauuuaaa

SEQ ID NO: 3134654 - RNA, 19 nt, Artificial Sequence
  Description of Artificial Sequence: Synthetic oligonucleotide
uaaacuuuucuugauuugu

SEQ ID NO: 3134655 - RNA, 19 nt, Artificial Sequence
  Description of Artificial Sequence: Synthetic oligonucleotide
auugucagcagcuaauaau

SEQ ID NO: 3134656 - RNA, 19 nt, Artificial Sequence
  Description of Artificial Sequence: Synthetic oligonucleotide
cuaauaaucugaaauuuaa

SEQ ID NO: 3134657 - RNA, 19 nt, Artificial Sequence
  Description of Artificial Sequence: Synthetic oligonucleotide
auaaacuuuucuugauuug

SEQ ID NO: 3134658 - RNA, 19 nt, Artificial Sequence
  Description of Artificial Sequence: Synthetic oligonucleotide
uauucacucaauagaaaua

SEQ ID NO: 3134659 - RNA, 19 nt, Artificial Sequence
  Description of Artificial Sequence: Synthetic oligonucleotide
aaguauucacucaauagaa

SEQ ID NO: 3134660 - RNA, 19 nt, Artificial Sequence
  Description of Artificial Sequence: Synthetic oligonucleotide
auuuugaagacuugagaaa

SEQ ID NO: 3134661 - RNA, 19 nt, Artificial Sequence
  Description of Artificial Sequence: Synthetic oligonucleotide
aaauccauucaaaauuagu

SEQ ID NO: 3134662 - RNA, 19 nt, Artificial Sequence
  Description of Artificial Sequence: Synthetic oligonucleotide
uuaugucaaaaugugucca

SEQ ID NO: 3134663 - RNA, 19 nt, Artificial Sequence
  Description of Artificial Sequence: Synthetic oligonucleotide
aaaauccauucaaaauuag

SEQ ID NO: 3134664 - RNA, 19 nt, Artificial Sequence
  Description of Artificial Sequence: Synthetic oligonucleotide
auucacucaauagaaauaa

SEQ ID NO: 3134665 - RNA, 19 nt, Artificial Sequence
  Description of Artificial Sequence: Synthetic oligonucleotide
accucuaccauugucagca

SEQ ID NO: 3134666 - RNA, 19 nt, Artificial Sequence
  Description of Artificial Sequence: Synthetic oligonucleotide
uucaaauauuaugucaaaa

SEQ ID NO: 3134667 - RNA, 19 nt, Artificial Sequence
  Description of Artificial Sequence: Synthetic oligonucleotide
auaccucuaccauugucag

SEQ ID NO: 3134668 - RNA, 19 nt, Artificial Sequence
  Description of Artificial Sequence: Synthetic oligonucleotide
aaaauuccauugaugauuu

SEQ ID NO: 3134669 - RNA, 19 nt, Artificial Sequence
  Description of Artificial Sequence: Synthetic oligonucleotide
acuucaaauauuaugucaa

SEQ ID NO: 3134670 - RNA, 19 nt, Artificial Sequence
  Description of Artificial Sequence: Synthetic oligonucleotide
aguacuaaauaaucuuuua

SEQ ID NO: 3134671 - RNA, 19 nt, Artificial Sequence
  Description of Artificial Sequence: Synthetic oligonucleotide
uguccaaaguauucacuca

SEQ ID NO: 3134672 - RNA, 19 nt, Artificial Sequence
  Description of Artificial Sequence: Synthetic oligonucleotide
uuccauugaugauuuaaaa

SEQ ID NO: 3134673 - RNA, 19 nt, Artificial Sequence
  Description of Artificial Sequence: Synthetic oligonucleotide
cuauuuugaagacuugaga

SEQ ID NO: 3134674 - RNA, 19 nt, Artificial Sequence
  Description of Artificial Sequence: Synthetic oligonucleotide
uuucuugauuuguagcuau

SEQ ID NO: 3134675 - RNA, 19 nt, Artificial Sequence
  Description of Artificial Sequence: Synthetic oligonucleotide
aaaucauacuucaaauauu

SEQ ID NO: 3134676 - RNA, 19 nt, Artificial Sequence
  Description of Artificial Sequence: Synthetic oligonucleotide
uaugucaaaauguguccaa

SEQ ID NO: 3134677 - RNA, 19 nt, Artificial Sequence
  Description of Artificial Sequence: Synthetic oligonucleotide
ugucagcagcuaauaaucu

SEQ ID NO: 3134678 - RNA, 19 nt, Artificial Sequence
  Description of Artificial Sequence: Synthetic oligonucleotide
cacucaauagaaauaaacu

SEQ ID NO: 3134679 - RNA, 19 nt, Artificial Sequence
  Description of Artificial Sequence: Synthetic oligonucleotide
aaaauaccucuaccauugu

SEQ ID NO: 3134680 - RNA, 19 nt, Artificial Sequence
  Description of Artificial Sequence: Synthetic oligonucleotide
gucagcagcuaauaaucug

SEQ ID NO: 3134681 - RNA, 19 nt, Artificial Sequence
  Description of Artificial Sequence: Synthetic oligonucleotide
aaaauguguccaaaguauu

SEQ ID NO: 3134682 - RNA, 19 nt, Artificial Sequence
  Description of Artificial Sequence: Synthetic oligonucleotide
cucaauagaaauaaacuuu

SEQ ID NO: 3134683 - RNA, 19 nt, Artificial Sequence
  Description of Artificial Sequence: Synthetic oligonucleotide
agcuauuuugaagacuuga

SEQ ID NO: 3134684 - RNA, 19 nt, Artificial Sequence
  Description of Artificial Sequence: Synthetic oligonucleotide
gauuuguagcuauuuugaa

SEQ ID NO: 3134685 - RNA, 19 nt, Artificial Sequence
  Description of Artificial Sequence: Synthetic oligonucleotide
guauucacucaauagaaau

SEQ ID NO: 3134686 - RNA, 19 nt, Artificial Sequence
  Description of Artificial Sequence: Synthetic oligonucleotide
uuugaagacuugagaaauu

SEQ ID NO: 3134687 - RNA, 19 nt, Artificial Sequence
  Description of Artificial Sequence: Synthetic oligonucleotide
auauuaugucaaaaugugu

SEQ ID NO: 3134688 - RNA, 19 nt, Artificial Sequence
  Description of Artificial Sequence: Synthetic oligonucleotide
caaaauguguccaaaguau

SEQ ID NO: 3134689 - RNA, 19 nt, Artificial Sequence
  Description of Artificial Sequence: Synthetic oligonucleotide
agcuaauaaucugaaauuu

SEQ ID NO: 3134690 - RNA, 19 nt, Artificial Sequence
  Description of Artificial Sequence: Synthetic oligonucleotide
uucacucaauagaaauaaa

SEQ ID NO: 3134691 - RNA, 19 nt, Artificial Sequence
  Description of Artificial Sequence: Synthetic oligonucleotide
uccaaaguauucacucaau

SEQ ID NO: 3134692 - RNA, 19 nt, Artificial Sequence
  Description of Artificial Sequence: Synthetic oligonucleotide
uuuucuugauuuguagcua

SEQ ID NO: 3134693 - RNA, 19 nt, Artificial Sequence
  Description of Artificial Sequence: Synthetic oligonucleotide
gcuauuuugaagacuugag

SEQ ID NO: 3134694 - RNA, 19 nt, Artificial Sequence
  Description of Artificial Sequence: Synthetic oligonucleotide
ucuugauuuguagcuauuu

SEQ ID NO: 3134695 - RNA, 19 nt, Artificial Sequence
  Description of Artificial Sequence: Synthetic oligonucleotide
uaccauugucagcagcuaa

SEQ ID NO: 3134696 - RNA, 19 nt, Artificial Sequence
  Description of Artificial Sequence: Synthetic oligonucleotide
gcagcuaauaaucugaaau

SEQ ID NO: 3134697 - RNA, 19 nt, Artificial Sequence
  Description of Artificial Sequence: Synthetic oligonucleotide
aaacuuuucuugauuugua

SEQ ID NO: 3134698 - RNA, 19 nt, Artificial Sequence
  Description of Artificial Sequence: Synthetic oligonucleotide
uagcuauuuugaagacuug

SEQ ID NO: 3134699 - RNA, 19 nt, Artificial Sequence
  Description of Artificial Sequence: Synthetic oligonucleotide
guccaaaguauucacucaa

SEQ ID NO: 3134700 - RNA, 19 nt, Artificial Sequence
  Description of Artificial Sequence: Synthetic oligonucleotide
cucuaccauugucagcagc

SEQ ID NO: 3134701 - RNA, 19 nt, Artificial Sequence
  Description of Artificial Sequence: Synthetic oligonucleotide
guagcuauuuugaagacuu

SEQ ID NO: 3134702 - RNA, 19 nt, Artificial Sequence
  Description of Artificial Sequence: Synthetic oligonucleotide
aguauucacucaauagaaa

SEQ ID NO: 3134703 - RNA, 19 nt, Artificial Sequence
  Description of Artificial Sequence: Synthetic oligonucleotide
uaccucuaccauugucagc

SEQ ID NO: 3134704 - RNA, 19 nt, Artificial Sequence
  Description of Artificial Sequence: Synthetic oligonucleotide
cauucaaaauuaguacuaa

SEQ ID NO: 3134705 - RNA, 19 nt, Artificial Sequence
  Description of Artificial Sequence: Synthetic oligonucleotide
uucuugauuuguagcuauu

SEQ ID NO: 3134706 - RNA, 19 nt, Artificial Sequence
  Description of Artificial Sequence: Synthetic oligonucleotide
agcagcuaauaaucugaaa

SEQ ID NO: 3134707 - RNA, 19 nt, Artificial Sequence
  Description of Artificial Sequence: Synthetic oligonucleotide
aaauuccauugaugauuua

SEQ ID NO: 3134708 - RNA, 19 nt, Artificial Sequence
  Description of Artificial Sequence: Synthetic oligonucleotide
augucaaaauguguccaaa

SEQ ID NO: 3134709 - RNA, 19 nt, Artificial Sequence
  Description of Artificial Sequence: Synthetic oligonucleotide
accauugucagcagcuaau

SEQ ID NO: 3134710 - RNA, 19 nt, Artificial Sequence
  Description of Artificial Sequence: Synthetic oligonucleotide
cauugucagcagcuaauaa

SEQ ID NO: 3134711 - RNA, 19 nt, Artificial Sequence
  Description of Artificial Sequence: Synthetic oligonucleotide
cagcuaauaaucugaaauu

SEQ ID NO: 3134712 - RNA, 19 nt, Artificial Sequence
  Description of Artificial Sequence: Synthetic oligonucleotide
aucauacuucaaauauuau

SEQ ID NO: 3134713 - RNA, 19 nt, Artificial Sequence
  Description of Artificial Sequence: Synthetic oligonucleotide
cuugauuuguagcuauuuu

SEQ ID NO: 3134714 - RNA, 19 nt, Artificial Sequence
  Description of Artificial Sequence: Synthetic oligonucleotide
ccauucaaaauuaguacua

SEQ ID NO: 3134715 - RNA, 19 nt, Artificial Sequence
  Description of Artificial Sequence: Synthetic oligonucleotide
gcuaauaaucugaaauuua

SEQ ID NO: 3134716 - RNA, 19 nt, Artificial Sequence
  Description of Artificial Sequence: Synthetic oligonucleotide
cagcagcuaauaaucugaa

SEQ ID NO: 3134717 - RNA, 19 nt, Artificial Sequence
  Description of Artificial Sequence: Synthetic oligonucleotide
ccaaaguauucacucaaua

SEQ ID NO: 3134718 - RNA, 19 nt, Artificial Sequence
  Description of Artificial Sequence: Synthetic oligonucleotide
cuaccauugucagcagcua

SEQ ID NO: 3134719 - RNA, 19 nt, Artificial Sequence
  Description of Artificial Sequence: Synthetic oligonucleotide
ccucuaccauugucagcag

SEQ ID NO: 3134720 - RNA, 19 nt, Artificial Sequence
  Description of Artificial Sequence: Synthetic oligonucleotide
ccauugucagcagcuaaua

SEQ ID NO: 3134721 - RNA, 19 nt, Artificial Sequence
  Description of Artificial Sequence: Synthetic oligonucleotide
ucauagaugcucuuguugg

SEQ ID NO: 3134722 - RNA, 19 nt, Artificial Sequence
  Description of Artificial Sequence: Synthetic oligonucleotide
acccacacaucauagaugc

SEQ ID NO: 3134723 - RNA, 19 nt, Artificial Sequence
  Description of Artificial Sequence: Synthetic oligonucleotide
gaaucuagaucacagagca

SEQ ID NO: 3134724 - RNA, 19 nt, Artificial Sequence
  Description of Artificial Sequence: Synthetic oligonucleotide
agagcagccagccuggggc

SEQ ID NO: 3134725 - RNA, 19 nt, Artificial Sequence
  Description of Artificial Sequence: Synthetic oligonucleotide
auccuugggauucaguacc

SEQ ID NO: 3134726 - RNA, 19 nt, Artificial Sequence
  Description of Artificial Sequence: Synthetic oligonucleotide
aucuagaucacagagcagg

SEQ ID NO: 3134727 - RNA, 19 nt, Artificial Sequence
  Description of Artificial Sequence: Synthetic oligonucleotide
aguaccuacacuccaguag

SEQ ID NO: 3134728 - RNA, 19 nt, Artificial Sequence
  Description of Artificial Sequence: Synthetic oligonucleotide
guaccuacacuccaguagg

SEQ ID NO: 3134729 - RNA, 19 nt, Artificial Sequence
  Description of Artificial Sequence: Synthetic oligonucleotide
aucauagaugcucuuguug

SEQ ID NO: 3134730 - RNA, 19 nt, Artificial Sequence
  Description of Artificial Sequence: Synthetic oligonucleotide
uucaguaccuacacuccag

SEQ ID NO: 3134731 - RNA, 19 nt, Artificial Sequence
  Description of Artificial Sequence: Synthetic oligonucleotide
ugaaggugggcacugggga

SEQ ID NO: 3134732 - RNA, 19 nt, Artificial Sequence
  Description of Artificial Sequence: Synthetic oligonucleotide
cuacacuccaguaggcugg

SEQ ID NO: 3134733 - RNA, 19 nt, Artificial Sequence
  Description of Artificial Sequence: Synthetic oligonucleotide
uugggauucaguaccuaca

SEQ ID NO: 3134734 - RNA, 19 nt, Artificial Sequence
  Description of Artificial Sequence: Synthetic oligonucleotide
gggaaucuagaucacagag

SEQ ID NO: 3134735 - RNA, 19 nt, Artificial Sequence
  Description of Artificial Sequence: Synthetic oligonucleotide
acaucauagaugcucuugu

SEQ ID NO: 3134736 - RNA, 19 nt, Artificial Sequence
  Description of Artificial Sequence: Synthetic oligonucleotide
gagggaaucuagaucacag

SEQ ID NO: 3134737 - RNA, 19 nt, Artificial Sequence
  Description of Artificial Sequence: Synthetic oligonucleotide
ugacccacacaucauagau

SEQ ID NO: 3134738 - RNA, 19 nt, Artificial Sequence
  Description of Artificial Sequence: Synthetic oligonucleotide
aaggguggcugacccacac

SEQ ID NO: 3134739 - RNA, 19 nt, Artificial Sequence
  Description of Artificial Sequence: Synthetic oligonucleotide
ugggauucaguaccuacac

SEQ ID NO: 3134740 - RNA, 19 nt, Artificial Sequence
  Description of Artificial Sequence: Synthetic oligonucleotide
ggauucaguaccuacacuc

SEQ ID NO: 3134741 - RNA, 19 nt, Artificial Sequence
  Description of Artificial Sequence: Synthetic oligonucleotide
cauagaugcucuuguuggg

SEQ ID NO: 3134742 - RNA, 19 nt, Artificial Sequence
  Description of Artificial Sequence: Synthetic oligonucleotide
gauucaguaccuacacucc

SEQ ID NO: 3134743 - RNA, 19 nt, Artificial Sequence
  Description of Artificial Sequence: Synthetic oligonucleotide
gauccuugggauucaguac

SEQ ID NO: 3134744 - RNA, 19 nt, Artificial Sequence
  Description of Artificial Sequence: Synthetic oligonucleotide
cuugggauucaguaccuac

SEQ ID NO: 3134745 - RNA, 19 nt, Artificial Sequence
  Description of Artificial Sequence: Synthetic oligonucleotide
uguugggugguacucccug

SEQ ID NO: 3134746 - RNA, 19 nt, Artificial Sequence
  Description of Artificial Sequence: Synthetic oligonucleotide
agaugcucuuguugggugg

SEQ ID NO: 3134747 - RNA, 19 nt, Artificial Sequence
  Description of Artificial Sequence: Synthetic oligonucleotide
ucuagaucacagagcaggu

SEQ ID NO: 3134748 - RNA, 19 nt, Artificial Sequence
  Description of Artificial Sequence: Synthetic oligonucleotide
ucacagagcagguccuggg

SEQ ID NO: 3134749 - RNA, 19 nt, Artificial Sequence
  Description of Artificial Sequence: Synthetic oligonucleotide
cuuguugggugguacuccc

SEQ ID NO: 3134750 - RNA, 19 nt, Artificial Sequence
  Description of Artificial Sequence: Synthetic oligonucleotide
guugaaggugggcacuggg

SEQ ID NO: 3134751 - RNA, 19 nt, Artificial Sequence
  Description of Artificial Sequence: Synthetic oligonucleotide
accacgagagcagccagcc

SEQ ID NO: 3134752 - RNA, 19 nt, Artificial Sequence
  Description of Artificial Sequence: Synthetic oligonucleotide
cacgagagcagccagccug

SEQ ID NO: 3134753 - RNA, 19 nt, Artificial Sequence
  Description of Artificial Sequence: Synthetic oligonucleotide
uagaugcucuuguugggug

SEQ ID NO: 3134754 - RNA, 19 nt, Artificial Sequence
  Description of Artificial Sequence: Synthetic oligonucleotide
uguaccacgagagcagcca

SEQ ID NO: 3134755 - RNA, 19 nt, Artificial Sequence
  Description of Artificial Sequence: Synthetic oligonucleotide
ucaguaccuacacuccagu

SEQ ID NO: 3134756 - RNA, 19 nt, Artificial Sequence
  Description of Artificial Sequence: Synthetic oligonucleotide
cugggcugguugaaggugg

SEQ ID NO: 3134757 - RNA, 19 nt, Artificial Sequence
  Description of Artificial Sequence: Synthetic oligonucleotide
guggcugacccacacauca

SEQ ID NO: 3134758 - RNA, 19 nt, Artificial Sequence
  Description of Artificial Sequence: Synthetic oligonucleotide
gacacgaggugggagguag

SEQ ID NO: 3134759 - RNA, 19 nt, Artificial Sequence
  Description of Artificial Sequence: Synthetic oligonucleotide
gguacucccuggaagaggg

SEQ ID NO: 3134760 - RNA, 19 nt, Artificial Sequence
  Description of Artificial Sequence: Synthetic oligonucleotide
acaggcuguaccacgagag

SEQ ID NO: 3134761 - RNA, 19 nt, Artificial Sequence
  Description of Artificial Sequence: Synthetic oligonucleotide
ggcaggagccgccagaucc

SEQ ID NO: 3134762 - RNA, 19 nt, Artificial Sequence
  Description of Artificial Sequence: Synthetic oligonucleotide
ucuuguugggugguacucc

SEQ ID NO: 3134763 - RNA, 19 nt, Artificial Sequence
  Description of Artificial Sequence: Synthetic oligonucleotide
uacaggcuguaccacgaga

SEQ ID NO: 3134764 - RNA, 19 nt, Artificial Sequence
  Description of Artificial Sequence: Synthetic oligonucleotide
ucccaaggguggcugaccc

SEQ ID NO: 3134765 - RNA, 19 nt, Artificial Sequence
  Description of Artificial Sequence: Synthetic oligonucleotide
aagagggaaucuagaucac

SEQ ID NO: 3134766 - RNA, 19 nt, Artificial Sequence
  Description of Artificial Sequence: Synthetic oligonucleotide
uuacaggcuguaccacgag

SEQ ID NO: 3134767 - RNA, 19 nt, Artificial Sequence
  Description of Artificial Sequence: Synthetic oligonucleotide
guugggugguacucccugg

SEQ ID NO: 3134768 - RNA, 19 nt, Artificial Sequence
  Description of Artificial Sequence: Synthetic oligonucleotide
agggaaucuagaucacaga

SEQ ID NO: 3134769 - RNA, 19 nt, Artificial Sequence
  Description of Artificial Sequence: Synthetic oligonucleotide
ugguacucccuggaagagg

SEQ ID NO: 3134770 - RNA, 19 nt, Artificial Sequence
  Description of Artificial Sequence: Synthetic oligonucleotide
aaucuagaucacagagcag

SEQ ID NO: 3134771 - RNA, 19 nt, Artificial Sequence
  Description of Artificial Sequence: Synthetic oligonucleotide
gaaggugggcacuggggac

SEQ ID NO: 3134772 - RNA, 19 nt, Artificial Sequence
  Description of Artificial Sequence: Synthetic oligonucleotide
auagaugcucuuguugggu

SEQ ID NO: 3134773 - RNA, 19 nt, Artificial Sequence
  Description of Artificial Sequence: Synthetic oligonucleotide
uaccuacacuccaguaggc

SEQ ID NO: 3134774 - RNA, 19 nt, Artificial Sequence
  Description of Artificial Sequence: Synthetic oligonucleotide
aucacagagcagguccugg

SEQ ID NO: 3134775 - RNA, 19 nt, Artificial Sequence
  Description of Artificial Sequence: Synthetic oligonucleotide
aguaggcugggcugguuga

SEQ ID NO: 3134776 - RNA, 19 nt, Artificial Sequence
  Description of Artificial Sequence: Synthetic oligonucleotide
gacccacacaucauagaug

SEQ ID NO: 3134777 - RNA, 19 nt, Artificial Sequence
  Description of Artificial Sequence: Synthetic oligonucleotide
uaccacgagagcagccagc

SEQ ID NO: 3134778 - RNA, 19 nt, Artificial Sequence
  Description of Artificial Sequence: Synthetic oligonucleotide
agguccugggauccuuggg

SEQ ID NO: 3134779 - RNA, 19 nt, Artificial Sequence
  Description of Artificial Sequence: Synthetic oligonucleotide
ggugguacucccuggaaga

SEQ ID NO: 3134780 - RNA, 19 nt, Artificial Sequence
  Description of Artificial Sequence: Synthetic oligonucleotide
ggggacacgaggugggagg

SEQ ID NO: 3134781 - RNA, 19 nt, Artificial Sequence
  Description of Artificial Sequence: Synthetic oligonucleotide
uccuugggauucaguaccu

SEQ ID NO: 3134782 - RNA, 19 nt, Artificial Sequence
  Description of Artificial Sequence: Synthetic oligonucleotide
agccgccagaucccaaggg

SEQ ID NO: 3134783 - RNA, 19 nt, Artificial Sequence
  Description of Artificial Sequence: Synthetic oligonucleotide
ccuggaagagggaaucuag

SEQ ID NO: 3134784 - RNA, 19 nt, Artificial Sequence
  Description of Artificial Sequence: Synthetic oligonucleotide
aggcuguaccacgagagca

SEQ ID NO: 3134785 - RNA, 19 nt, Artificial Sequence
  Description of Artificial Sequence: Synthetic oligonucleotide
ggauccuugggauucagua

SEQ ID NO: 3134786 - RNA, 19 nt, Artificial Sequence
  Description of Artificial Sequence: Synthetic oligonucleotide
gagccgccagaucccaagg

SEQ ID NO: 3134787 - RNA, 19 nt, Artificial Sequence
  Description of Artificial Sequence: Synthetic oligonucleotide
guaccacgagagcagccag

SEQ ID NO: 3134788 - RNA, 19 nt, Artificial Sequence
  Description of Artificial Sequence: Synthetic oligonucleotide
gaggugggagguagugugg

SEQ ID NO: 3134789 - RNA, 19 nt, Artificial Sequence
  Description of Artificial Sequence: Synthetic oligonucleotide
uacacuccaguaggcuggg

SEQ ID NO: 3134790 - RNA, 19 nt, Artificial Sequence
  Description of Artificial Sequence: Synthetic oligonucleotide
cuggaagagggaaucuaga

SEQ ID NO: 3134791 - RNA, 19 nt, Artificial Sequence
  Description of Artificial Sequence: Synthetic oligonucleotide
aucccaaggguggcugacc

SEQ ID NO: 3134792 - RNA, 19 nt, Artificial Sequence
  Description of Artificial Sequence: Synthetic oligonucleotide
cacuggggacacgaggugg

SEQ ID NO: 3134793 - RNA, 19 nt, Artificial Sequence
  Description of Artificial Sequence: Synthetic oligonucleotide
uacucccuggaagagggaa

SEQ ID NO: 3134794 - RNA, 19 nt, Artificial Sequence
  Description of Artificial Sequence: Synthetic oligonucleotide
agagggaaucuagaucaca

SEQ ID NO: 3134795 - RNA, 19 nt, Artificial Sequence
  Description of Artificial Sequence: Synthetic oligonucleotide
cuguaccacgagagcagcc

SEQ ID NO: 3134796 - RNA, 19 nt, Artificial Sequence
  Description of Artificial Sequence: Synthetic oligonucleotide
caggcuguaccacgagagc

SEQ ID NO: 3134797 - RNA, 19 nt, Artificial Sequence
  Description of Artificial Sequence: Synthetic oligonucleotide
gggugguacucccuggaag

SEQ ID NO: 3134798 - RNA, 19 nt, Artificial Sequence
  Description of Artificial Sequence: Synthetic oligonucleotide
ccuacacuccaguaggcug

SEQ ID NO: 3134799 - RNA, 19 nt, Artificial Sequence
  Description of Artificial Sequence: Synthetic oligonucleotide
caguaggcugggcugguug

SEQ ID NO: 3134800 - RNA, 19 nt, Artificial Sequence
  Description of Artificial Sequence: Synthetic oligonucleotide
ugguugaaggugggcacug

SEQ ID NO: 3134801 - RNA, 19 nt, Artificial Sequence
  Description of Artificial Sequence: Synthetic oligonucleotide
ugcucuuguugggugguac

SEQ ID NO: 3134802 - RNA, 19 nt, Artificial Sequence
  Description of Artificial Sequence: Synthetic oligonucleotide
cagguccugggauccuugg

SEQ ID NO: 3134803 - RNA, 19 nt, Artificial Sequence
  Description of Artificial Sequence: Synthetic oligonucleotide
cuagaucacagagcagguc

SEQ ID NO: 3134804 - RNA, 19 nt, Artificial Sequence
  Description of Artificial Sequence: Synthetic oligonucleotide
gaucacagagcagguccug

SEQ ID NO: 3134805 - RNA, 19 nt, Artificial Sequence
  Description of Artificial Sequence: Synthetic oligonucleotide
cuccaguaggcugggcugg

SEQ ID NO: 3134806 - RNA, 19 nt, Artificial Sequence
  Description of Artificial Sequence: Synthetic oligonucleotide
cacacaucauagaugcucu

SEQ ID NO: 3134807 - RNA, 19 nt, Artificial Sequence
  Description of Artificial Sequence: Synthetic oligonucleotide
acgagagcagccagccugg

SEQ ID NO: 3134808 - RNA, 19 nt, Artificial Sequence
  Description of Artificial Sequence: Synthetic oligonucleotide
uuguugggugguacucccu

SEQ ID NO: 3134809 - RNA, 19 nt, Artificial Sequence
  Description of Artificial Sequence: Synthetic oligonucleotide
gguccugggauccuuggga

SEQ ID NO: 3134810 - RNA, 19 nt, Artificial Sequence
  Description of Artificial Sequence: Synthetic oligonucleotide
uaggcugggcugguugaag

SEQ ID NO: 3134811 - RNA, 19 nt, Artificial Sequence
  Description of Artificial Sequence: Synthetic oligonucleotide
ggagccgccagaucccaag

SEQ ID NO: 3134812 - RNA, 19 nt, Artificial Sequence
  Description of Artificial Sequence: Synthetic oligonucleotide
ccacacaucauagaugcuc

SEQ ID NO: 3134813 - RNA, 19 nt, Artificial Sequence
  Description of Artificial Sequence: Synthetic oligonucleotide
uggggcaggagccgccaga

SEQ ID NO: 3134814 - RNA, 19 nt, Artificial Sequence
  Description of Artificial Sequence: Synthetic oligonucleotide
cucuuguugggugguacuc

SEQ ID NO: 3134815 - RNA, 19 nt, Artificial Sequence
  Description of Artificial Sequence: Synthetic oligonucleotide
ugggugguacucccuggaa

SEQ ID NO: 3134816 - RNA, 19 nt, Artificial Sequence
  Description of Artificial Sequence: Synthetic oligonucleotide
uggggacacgaggugggag

SEQ ID NO: 3134817 - RNA, 19 nt, Artificial Sequence
  Description of Artificial Sequence: Synthetic oligonucleotide
agaucacagagcagguccu

SEQ ID NO: 3134818 - RNA, 19 nt, Artificial Sequence
  Description of Artificial Sequence: Synthetic oligonucleotide
accuacacuccaguaggcu

SEQ ID NO: 3134819 - RNA, 19 nt, Artificial Sequence
  Description of Artificial Sequence: Synthetic oligonucleotide
gcugacccacacaucauag

SEQ ID NO: 3134820 - RNA, 19 nt, Artificial Sequence
  Description of Artificial Sequence: Synthetic oligonucleotide
agaucccaaggguggcuga

SEQ ID NO: 3134821 - RNA, 19 nt, Artificial Sequence
  Description of Artificial Sequence: Synthetic oligonucleotide
gaucccaaggguggcugac

SEQ ID NO: 3134822 - RNA, 19 nt, Artificial Sequence
  Description of Artificial Sequence: Synthetic oligonucleotide
cucccuggaagagggaauc

SEQ ID NO: 3134823 - RNA, 19 nt, Artificial Sequence
  Description of Artificial Sequence: Synthetic oligonucleotide
gugguacucccuggaagag

SEQ ID NO: 3134824 - RNA, 19 nt, Artificial Sequence
  Description of Artificial Sequence: Synthetic oligonucleotide
ccagccuggggcaggagcc

SEQ ID NO: 3134825 - RNA, 19 nt, Artificial Sequence
  Description of Artificial Sequence: Synthetic oligonucleotide
ggcuguaccacgagagcag

SEQ ID NO: 3134826 - RNA, 19 nt, Artificial Sequence
  Description of Artificial Sequence: Synthetic oligonucleotide
cugacccacacaucauaga

SEQ ID NO: 3134827 - RNA, 19 nt, Artificial Sequence
  Description of Artificial Sequence: Synthetic oligonucleotide
cacgaggugggagguagug

SEQ ID NO: 3134828 - RNA, 19 nt, Artificial Sequence
  Description of Artificial Sequence: Synthetic oligonucleotide
cagaucccaaggguggcug

SEQ ID NO: 3134829 - RNA, 19 nt, Artificial Sequence
  Description of Artificial Sequence: Synthetic oligonucleotide
ugggauccuugggauucag

SEQ ID NO: 3134830 - RNA, 19 nt, Artificial Sequence
  Description of Artificial Sequence: Synthetic oligonucleotide
uggcugacccacacaucau

SEQ ID NO: 3134831 - RNA, 19 nt, Artificial Sequence
  Description of Artificial Sequence: Synthetic oligonucleotide
cacagagcagguccuggga

SEQ ID NO: 3134832 - RNA, 19 nt, Artificial Sequence
  Description of Artificial Sequence: Synthetic oligonucleotide
acacaucauagaugcucuu

SEQ ID NO: 3134833 - RNA, 19 nt, Artificial Sequence
  Description of Artificial Sequence: Synthetic oligonucleotide
ucccuggaagagggaaucu

SEQ ID NO: 3134834 - RNA, 19 nt, Artificial Sequence
  Description of Artificial Sequence: Synthetic oligonucleotide
acgaggugggagguagugu

SEQ ID NO: 3134835 - RNA, 19 nt, Artificial Sequence
  Description of Artificial Sequence: Synthetic oligonucleotide
ggcugguugaaggugggca

SEQ ID NO: 3134836 - RNA, 19 nt, Artificial Sequence
  Description of Artificial Sequence: Synthetic oligonucleotide
aggguggcugacccacaca

SEQ ID NO: 3134837 - RNA, 19 nt, Artificial Sequence
  Description of Artificial Sequence: Synthetic oligonucleotide
gguugaaggugggcacugg

SEQ ID NO: 3134838 - RNA, 19 nt, Artificial Sequence
  Description of Artificial Sequence: Synthetic oligonucleotide
gugggcacuggggacacga

SEQ ID NO: 3134839 - RNA, 19 nt, Artificial Sequence
  Description of Artificial Sequence: Synthetic oligonucleotide
ccugggauccuugggauuc

SEQ ID NO: 3134840 - RNA, 19 nt, Artificial Sequence
  Description of Artificial Sequence: Synthetic oligonucleotide
uccugggauccuugggauu

SEQ ID NO: 3134841 - RNA, 19 nt, Artificial Sequence
  Description of Artificial Sequence: Synthetic oligonucleotide
cacuccaguaggcugggcu

SEQ ID NO: 3134842 - RNA, 19 nt, Artificial Sequence
  Description of Artificial Sequence: Synthetic oligonucleotide
ccaaggguggcugacccac

SEQ ID NO: 3134843 - RNA, 19 nt, Artificial Sequence
  Description of Artificial Sequence: Synthetic oligonucleotide
gccagccuggggcaggagc

SEQ ID NO: 3134844 - RNA, 19 nt, Artificial Sequence
  Description of Artificial Sequence: Synthetic oligonucleotide
acacuccaguaggcugggc

SEQ ID NO: 3134845 - RNA, 19 nt, Artificial Sequence
  Description of Artificial Sequence: Synthetic oligonucleotide
uccaguaggcugggcuggu

SEQ ID NO: 3134846 - RNA, 19 nt, Artificial Sequence
  Description of Artificial Sequence: Synthetic oligonucleotide
gcuguaccacgagagcagc

SEQ ID NO: 3134847 - RNA, 19 nt, Artificial Sequence
  Description of Artificial Sequence: Synthetic oligonucleotide
ccgccagaucccaagggug

SEQ ID NO: 3134848 - RNA, 19 nt, Artificial Sequence
  Description of Artificial Sequence: Synthetic oligonucleotide
caguaccuacacuccagua

SEQ ID NO: 3134849 - RNA, 19 nt, Artificial Sequence
  Description of Artificial Sequence: Synthetic oligonucleotide
caucauagaugcucuuguu

SEQ ID NO: 3134850 - RNA, 19 nt, Artificial Sequence
  Description of Artificial Sequence: Synthetic oligonucleotide
gcacuggggacacgaggug

SEQ ID NO: 3134851 - RNA, 19 nt, Artificial Sequence
  Description of Artificial Sequence: Synthetic oligonucleotide
ggcugacccacacaucaua

SEQ ID NO: 3134852 - RNA, 19 nt, Artificial Sequence
  Description of Artificial Sequence: Synthetic oligonucleotide
ggcacuggggacacgaggu

SEQ ID NO: 3134853 - RNA, 19 nt, Artificial Sequence
  Description of Artificial Sequence: Synthetic oligonucleotide
ggguggcugacccacacau

SEQ ID NO: 3134854 - RNA, 19 nt, Artificial Sequence
  Description of Artificial Sequence: Synthetic oligonucleotide
gcaggagccgccagauccc

SEQ ID NO: 3134855 - RNA, 19 nt, Artificial Sequence
  Description of Artificial Sequence: Synthetic oligonucleotide
cuggggcaggagccgccag

SEQ ID NO: 3134856 - RNA, 19 nt, Artificial Sequence
  Description of Artificial Sequence: Synthetic oligonucleotide
agcagguccugggauccuu

SEQ ID NO: 3134857 - RNA, 19 nt, Artificial Sequence
  Description of Artificial Sequence: Synthetic oligonucleotide
gccagaucccaaggguggc

SEQ ID NO: 3134858 - RNA, 19 nt, Artificial Sequence
  Description of Artificial Sequence: Synthetic oligonucleotide
guaggcugggcugguugaa

SEQ ID NO: 3134859 - RNA, 19 nt, Artificial Sequence
  Description of Artificial Sequence: Synthetic oligonucleotide
cugguugaaggugggcacu

SEQ ID NO: 3134860 - RNA, 19 nt, Artificial Sequence
  Description of Artificial Sequence: Synthetic oligonucleotide
gcagguccugggauccuug

SEQ ID NO: 3134861 - RNA, 19 nt, Artificial Sequence
  Description of Artificial Sequence: Synthetic oligonucleotide
gccgccagaucccaagggu

SEQ ID NO: 3134862 - RNA, 19 nt, Artificial Sequence
  Description of Artificial Sequence: Synthetic oligonucleotide
acacgaggugggagguagu

SEQ ID NO: 3134863 - RNA, 19 nt, Artificial Sequence
  Description of Artificial Sequence: Synthetic oligonucleotide
gcucuuguugggugguacu

SEQ ID NO: 3134864 - RNA, 19 nt, Artificial Sequence
  Description of Artificial Sequence: Synthetic oligonucleotide
cugggauccuugggauuca

SEQ ID NO: 3134865 - RNA, 19 nt, Artificial Sequence
  Description of Artificial Sequence: Synthetic oligonucleotide
gguggcugacccacacauc

SEQ ID NO: 3134866 - RNA, 19 nt, Artificial Sequence
  Description of Artificial Sequence: Synthetic oligonucleotide
guacucccuggaagaggga

SEQ ID NO: 3134867 - RNA, 19 nt, Artificial Sequence
  Description of Artificial Sequence: Synthetic oligonucleotide
ggcugggcugguugaaggu

SEQ ID NO: 3134868 - RNA, 19 nt, Artificial Sequence
  Description of Artificial Sequence: Synthetic oligonucleotide
caggagccgccagauccca

SEQ ID NO: 3134869 - RNA, 19 nt, Artificial Sequence
  Description of Artificial Sequence: Synthetic oligonucleotide
augcucuuguuggguggua

SEQ ID NO: 3134870 - RNA, 19 nt, Artificial Sequence
  Description of Artificial Sequence: Synthetic oligonucleotide
gggcugguugaaggugggc

SEQ ID NO: 3134871 - RNA, 19 nt, Artificial Sequence
  Description of Artificial Sequence: Synthetic oligonucleotide
agccagccuggggcaggag

SEQ ID NO: 3134872 - RNA, 19 nt, Artificial Sequence
  Description of Artificial Sequence: Synthetic oligonucleotide
ggugggcacuggggacacg

SEQ ID NO: 3134873 - RNA, 19 nt, Artificial Sequence
  Description of Artificial Sequence: Synthetic oligonucleotide
gggacacgaggugggaggu

SEQ ID NO: 3134874 - RNA, 19 nt, Artificial Sequence
  Description of Artificial Sequence: Synthetic oligonucleotide
aggagccgccagaucccaa

SEQ ID NO: 3134875 - RNA, 19 nt, Artificial Sequence
  Description of Artificial Sequence: Synthetic oligonucleotide
cccaaggguggcugaccca

SEQ ID NO: 3134876 - RNA, 19 nt, Artificial Sequence
  Description of Artificial Sequence: Synthetic oligonucleotide
cccuggaagagggaaucua

SEQ ID NO: 3134877 - RNA, 19 nt, Artificial Sequence
  Description of Artificial Sequence: Synthetic oligonucleotide
gggauccuugggauucagu

SEQ ID NO: 3134878 - RNA, 19 nt, Artificial Sequence
  Description of Artificial Sequence: Synthetic oligonucleotide
cgagagcagccagccuggg

SEQ ID NO: 3134879 - RNA, 19 nt, Artificial Sequence
  Description of Artificial Sequence: Synthetic oligonucleotide
ggggcaggagccgccagau

SEQ ID NO: 3134880 - RNA, 19 nt, Artificial Sequence
  Description of Artificial Sequence: Synthetic oligonucleotide
ggacacgaggugggaggua

SEQ ID NO: 3134881 - RNA, 19 nt, Artificial Sequence
  Description of Artificial Sequence: Synthetic oligonucleotide
ccuugggauucaguaccua

SEQ ID NO: 3134882 - RNA, 19 nt, Artificial Sequence
  Description of Artificial Sequence: Synthetic oligonucleotide
ccuggggcaggagccgcca

SEQ ID NO: 3134883 - RNA, 19 nt, Artificial Sequence
  Description of Artificial Sequence: Synthetic oligonucleotide
cccacacaucauagaugcu

SEQ ID NO: 3134884 - RNA, 19 nt, Artificial Sequence
  Description of Artificial Sequence: Synthetic oligonucleotide
ccagaucccaaggguggcu

SEQ ID NO: 3134885 - RNA, 19 nt, Artificial Sequence
  Description of Artificial Sequence: Synthetic oligonucleotide
ccacgagagcagccagccu

SEQ ID NO: 3134886 - RNA, 19 nt, Artificial Sequence
  Description of Artificial Sequence: Synthetic oligonucleotide
ccaguaggcugggcugguu

SEQ ID NO: 3134887 - RNA, 19 nt, Artificial Sequence
  Description of Artificial Sequence: Synthetic oligonucleotide
uccucuagagauaugaggg

SEQ ID NO: 3134888 - RNA, 19 nt, Artificial Sequence
  Description of Artificial Sequence: Synthetic oligonucleotide
cuagucuucacacacaucc

SEQ ID NO: 3134889 - RNA, 19 nt, Artificial Sequence
  Description of Artificial Sequence: Synthetic oligonucleotide
acaaagguuccccaugggc

SEQ ID NO: 3134890 - RNA, 19 nt, Artificial Sequence
  Description of Artificial Sequence: Synthetic oligonucleotide
acagcuuucaugcggcggc

SEQ ID NO: 3134891 - RNA, 19 nt, Artificial Sequence
  Description of Artificial Sequence: Synthetic oligonucleotide
gaacaaagguuccccaugg

SEQ ID NO: 3134892 - RNA, 19 nt, Artificial Sequence
  Description of Artificial Sequence: Synthetic oligonucleotide
gauaugagggcccugccug

SEQ ID NO: 3134893 - RNA, 19 nt, Artificial Sequence
  Description of Artificial Sequence: Synthetic oligonucleotide
ucuaggaacucugagguga

SEQ ID NO: 3134894 - RNA, 19 nt, Artificial Sequence
  Description of Artificial Sequence: Synthetic oligonucleotide
agagauaugagggcccugc

SEQ ID NO: 3134895 - RNA, 19 nt, Artificial Sequence
  Description of Artificial Sequence: Synthetic oligonucleotide
aacucugaggugaacacag

SEQ ID NO: 3134896 - RNA, 19 nt, Artificial Sequence
  Description of Artificial Sequence: Synthetic oligonucleotide
aaagguuccccaugggcug

SEQ ID NO: 3134897 - RNA, 19 nt, Artificial Sequence
  Description of Artificial Sequence: Synthetic oligonucleotide
ucuagagauaugagggccc

SEQ ID NO: 3134898 - RNA, 19 nt, Artificial Sequence
  Description of Artificial Sequence: Synthetic oligonucleotide
cuccucuagagauaugagg

SEQ ID NO: 3134899 - RNA, 19 nt, Artificial Sequence
  Description of Artificial Sequence: Synthetic oligonucleotide
uggcauuucucaucagugg

SEQ ID NO: 3134900 - RNA, 19 nt, Artificial Sequence
  Description of Artificial Sequence: Synthetic oligonucleotide
aacaaagguuccccauggg

SEQ ID NO: 3134901 - RNA, 19 nt, Artificial Sequence
  Description of Artificial Sequence: Synthetic oligonucleotide
agaacaaagguuccccaug

SEQ ID NO: 3134902 - RNA, 19 nt, Artificial Sequence
  Description of Artificial Sequence: Synthetic oligonucleotide
acacacauccugcagccuc

SEQ ID NO: 3134903 - RNA, 19 nt, Artificial Sequence
  Description of Artificial Sequence: Synthetic oligonucleotide
acagcuucuagucuucaca

SEQ ID NO: 3134904 - RNA, 19 nt, Artificial Sequence
  Description of Artificial Sequence: Synthetic oligonucleotide
ucacacacauccugcagcc

SEQ ID NO: 3134905 - RNA, 19 nt, Artificial Sequence
  Description of Artificial Sequence: Synthetic oligonucleotide
cagcugagaacaaagguuc

SEQ ID NO: 3134906 - RNA, 19 nt, Artificial Sequence
  Description of Artificial Sequence: Synthetic oligonucleotide
uuucucaucagugggcagc

SEQ ID NO: 3134907 - RNA, 19 nt, Artificial Sequence
  Description of Artificial Sequence: Synthetic oligonucleotide
cuggcauuucucaucagug

SEQ ID NO: 3134908 - RNA, 19 nt, Artificial Sequence
  Description of Artificial Sequence: Synthetic oligonucleotide
gugaacacagcuucuaguc

SEQ ID NO: 3134909 - RNA, 19 nt, Artificial Sequence
  Description of Artificial Sequence: Synthetic oligonucleotide
uucuagucuucacacacau

SEQ ID NO: 3134910 - RNA, 19 nt, Artificial Sequence
  Description of Artificial Sequence: Synthetic oligonucleotide
ggcauuucucaucaguggg

SEQ ID NO: 3134911 - RNA, 19 nt, Artificial Sequence
  Description of Artificial Sequence: Synthetic oligonucleotide
uggacagcuuucaugcggc

SEQ ID NO: 3134912 - RNA, 19 nt, Artificial Sequence
  Description of Artificial Sequence: Synthetic oligonucleotide
ucaucagugggcagcugag

SEQ ID NO: 3134913 - RNA, 19 nt, Artificial Sequence
  Description of Artificial Sequence: Synthetic oligonucleotide
cuggacagcuuucaugcgg

SEQ ID NO: 3134914 - RNA, 19 nt, Artificial Sequence
  Description of Artificial Sequence: Synthetic oligonucleotide
acuggcauuucucaucagu

SEQ ID NO: 3134915 - RNA, 19 nt, Artificial Sequence
  Description of Artificial Sequence: Synthetic oligonucleotide
cugaggugaacacagcuuc

SEQ ID NO: 3134916 - RNA, 19 nt, Artificial Sequence
  Description of Artificial Sequence: Synthetic oligonucleotide
cucuagagauaugagggcc

SEQ ID NO: 3134917 - RNA, 19 nt, Artificial Sequence
  Description of Artificial Sequence: Synthetic oligonucleotide
ugagaacaaagguucccca

SEQ ID NO: 3134918 - RNA, 19 nt, Artificial Sequence
  Description of Artificial Sequence: Synthetic oligonucleotide
ucaugcggcggccucuagg

SEQ ID NO: 3134919 - RNA, 19 nt, Artificial Sequence
  Description of Artificial Sequence: Synthetic oligonucleotide
ucuucacacacauccugca

SEQ ID NO: 3134920 - RNA, 19 nt, Artificial Sequence
  Description of Artificial Sequence: Synthetic oligonucleotide
cugagaacaaagguucccc

SEQ ID NO: 3134921 - RNA, 19 nt, Artificial Sequence
  Description of Artificial Sequence: Synthetic oligonucleotide
ucugaggugaacacagcuu

SEQ ID NO: 3134922 - RNA, 19 nt, Artificial Sequence
  Description of Artificial Sequence: Synthetic oligonucleotide
cagcuucuagucuucacac

SEQ ID NO: 3134923 - RNA, 19 nt, Artificial Sequence
  Description of Artificial Sequence: Synthetic oligonucleotide
uccccaugggcugacacag

SEQ ID NO: 3134924 - RNA, 19 nt, Artificial Sequence
  Description of Artificial Sequence: Synthetic oligonucleotide
aggugaacacagcuucuag

SEQ ID NO: 3134925 - RNA, 19 nt, Artificial Sequence
  Description of Artificial Sequence: Synthetic oligonucleotide
aacacagcuucuagucuuc

SEQ ID NO: 3134926 - RNA, 19 nt, Artificial Sequence
  Description of Artificial Sequence: Synthetic oligonucleotide
agauaugagggcccugccu

SEQ ID NO: 3134927 - RNA, 19 nt, Artificial Sequence
  Description of Artificial Sequence: Synthetic oligonucleotide
auaugagggcccugccugg

SEQ ID NO: 3134928 - RNA, 19 nt, Artificial Sequence
  Description of Artificial Sequence: Synthetic oligonucleotide
aggaugaccucacuggcau

SEQ ID NO: 3134929 - RNA, 19 nt, Artificial Sequence
  Description of Artificial Sequence: Synthetic oligonucleotide
gccuggacagcuuucaugc

SEQ ID NO: 3134930 - RNA, 19 nt, Artificial Sequence
  Description of Artificial Sequence: Synthetic oligonucleotide
ugccuggacagcuuucaug

SEQ ID NO: 3134931 - RNA, 19 nt, Artificial Sequence
  Description of Artificial Sequence: Synthetic oligonucleotide
gcuucuagucuucacacac

SEQ ID NO: 3134932 - RNA, 19 nt, Artificial Sequence
  Description of Artificial Sequence: Synthetic oligonucleotide
gccucuaggaacucugagg

SEQ ID NO: 3134933 - RNA, 19 nt, Artificial Sequence
  Description of Artificial Sequence: Synthetic oligonucleotide
ugaggugaacacagcuucu

SEQ ID NO: 3134934 - RNA, 19 nt, Artificial Sequence
  Description of Artificial Sequence: Synthetic oligonucleotide
ugcugucccuccucuagag

SEQ ID NO: 3134935 - RNA, 19 nt, Artificial Sequence
  Description of Artificial Sequence: Synthetic oligonucleotide
uagucuucacacacauccu

SEQ ID NO: 3134936 - RNA, 19 nt, Artificial Sequence
  Description of Artificial Sequence: Synthetic oligonucleotide
cuucacacacauccugcag

SEQ ID NO: 3134937 - RNA, 19 nt, Artificial Sequence
  Description of Artificial Sequence: Synthetic oligonucleotide
accucacuggcauuucuca

SEQ ID NO: 3134938 - RNA, 19 nt, Artificial Sequence
  Description of Artificial Sequence: Synthetic oligonucleotide
cacaggguggugcuguccc

SEQ ID NO: 3134939 - RNA, 19 nt, Artificial Sequence
  Description of Artificial Sequence: Synthetic oligonucleotide
agcugagaacaaagguucc

SEQ ID NO: 3134940 - RNA, 19 nt, Artificial Sequence
  Description of Artificial Sequence: Synthetic oligonucleotide
auuucucaucagugggcag

SEQ ID NO: 3134941 - RNA, 19 nt, Artificial Sequence
  Description of Artificial Sequence: Synthetic oligonucleotide
ucagugggcagcugagaac

SEQ ID NO: 3134942 - RNA, 19 nt, Artificial Sequence
  Description of Artificial Sequence: Synthetic oligonucleotide
aggguggugcugucccucc

SEQ ID NO: 3134943 - RNA, 19 nt, Artificial Sequence
  Description of Artificial Sequence: Synthetic oligonucleotide
gagauaugagggcccugcc

SEQ ID NO: 3134944 - RNA, 19 nt, Artificial Sequence
  Description of Artificial Sequence: Synthetic oligonucleotide
caaagguuccccaugggcu

SEQ ID NO: 3134945 - RNA, 19 nt, Artificial Sequence
  Description of Artificial Sequence: Synthetic oligonucleotide
ggaacucugaggugaacac

SEQ ID NO: 3134946 - RNA, 19 nt, Artificial Sequence
  Description of Artificial Sequence: Synthetic oligonucleotide
agccuccgcagccaccggc

SEQ ID NO: 3134947 - RNA, 19 nt, Artificial Sequence
  Description of Artificial Sequence: Synthetic oligonucleotide
ucuagucuucacacacauc

SEQ ID NO: 3134948 - RNA, 19 nt, Artificial Sequence
  Description of Artificial Sequence: Synthetic oligonucleotide
uuccccaugggcugacaca

SEQ ID NO: 3134949 - RNA, 19 nt, Artificial Sequence
  Description of Artificial Sequence: Synthetic oligonucleotide
ugcggcggccucuaggaac

SEQ ID NO: 3134950 - RNA, 19 nt, Artificial Sequence
  Description of Artificial Sequence: Synthetic oligonucleotide
ugagggcccugccuggaca

SEQ ID NO: 3134951 - RNA, 19 nt, Artificial Sequence
  Description of Artificial Sequence: Synthetic oligonucleotide
ggugcugucccuccucuag

SEQ ID NO: 3134952 - RNA, 19 nt, Artificial Sequence
  Description of Artificial Sequence: Synthetic oligonucleotide
agcuucuagucuucacaca

SEQ ID NO: 3134953 - RNA, 19 nt, Artificial Sequence
  Description of Artificial Sequence: Synthetic oligonucleotide
cauuucucaucagugggca

SEQ ID NO: 3134954 - RNA, 19 nt, Artificial Sequence
  Description of Artificial Sequence: Synthetic oligonucleotide
uucucaucagugggcagcu

SEQ ID NO: 3134955 - RNA, 19 nt, Artificial Sequence
  Description of Artificial Sequence: Synthetic oligonucleotide
caugcggcggccucuagga

SEQ ID NO: 3134956 - RNA, 19 nt, Artificial Sequence
  Description of Artificial Sequence: Synthetic oligonucleotide
gagggcccugccuggacag

SEQ ID NO: 3134957 - RNA, 19 nt, Artificial Sequence
  Description of Artificial Sequence: Synthetic oligonucleotide
gaacacagcuucuagucuu

SEQ ID NO: 3134958 - RNA, 19 nt, Artificial Sequence
  Description of Artificial Sequence: Synthetic oligonucleotide
gaacucugaggugaacaca

SEQ ID NO: 3134959 - RNA, 19 nt, Artificial Sequence
  Description of Artificial Sequence: Synthetic oligonucleotide
acucugaggugaacacagc

SEQ ID NO: 3134960 - RNA, 19 nt, Artificial Sequence
  Description of Artificial Sequence: Synthetic oligonucleotide
cuucuagucuucacacaca

SEQ ID NO: 3134961 - RNA, 19 nt, Artificial Sequence
  Description of Artificial Sequence: Synthetic oligonucleotide
acacaggguggugcugucc

SEQ ID NO: 3134962 - RNA, 19 nt, Artificial Sequence
  Description of Artificial Sequence: Synthetic oligonucleotide
augagggcccugccuggac

SEQ ID NO: 3134963 - RNA, 19 nt, Artificial Sequence
  Description of Artificial Sequence: Synthetic oligonucleotide
ugggcugacacaggguggu

SEQ ID NO: 3134964 - RNA, 19 nt, Artificial Sequence
  Description of Artificial Sequence: Synthetic oligonucleotide
cacagcuucuagucuucac

SEQ ID NO: 3134965 - RNA, 19 nt, Artificial Sequence
  Description of Artificial Sequence: Synthetic oligonucleotide
cucuaggaacucugaggug

SEQ ID NO: 3134966 - RNA, 19 nt, Artificial Sequence
  Description of Artificial Sequence: Synthetic oligonucleotide
cagugggcagcugagaaca

SEQ ID NO: 3134967 - RNA, 19 nt, Artificial Sequence
  Description of Artificial Sequence: Synthetic oligonucleotide
ccucuagagauaugagggc

SEQ ID NO: 3134968 - RNA, 19 nt, Artificial Sequence
  Description of Artificial Sequence: Synthetic oligonucleotide
gagaacaaagguuccccau

SEQ ID NO: 3134969 - RNA, 19 nt, Artificial Sequence
  Description of Artificial Sequence: Synthetic oligonucleotide
guuccccaugggcugacac

SEQ ID NO: 3134970 - RNA, 19 nt, Artificial Sequence
  Description of Artificial Sequence: Synthetic oligonucleotide
gcugagaacaaagguuccc

SEQ ID NO: 3134971 - RNA, 19 nt, Artificial Sequence
  Description of Artificial Sequence: Synthetic oligonucleotide
gcauuucucaucagugggc

SEQ ID NO: 3134972 - RNA, 19 nt, Artificial Sequence
  Description of Artificial Sequence: Synthetic oligonucleotide
gaccucacuggcauuucuc

SEQ ID NO: 3134973 - RNA, 19 nt, Artificial Sequence
  Description of Artificial Sequence: Synthetic oligonucleotide
uaugagggcccugccugga

SEQ ID NO: 3134974 - RNA, 19 nt, Artificial Sequence
  Description of Artificial Sequence: Synthetic oligonucleotide
ggccucuaggaacucugag

SEQ ID NO: 3134975 - RNA, 19 nt, Artificial Sequence
  Description of Artificial Sequence: Synthetic oligonucleotide
uagagauaugagggcccug

SEQ ID NO: 3134976 - RNA, 19 nt, Artificial Sequence
  Description of Artificial Sequence: Synthetic oligonucleotide
cucugaggugaacacagcu

SEQ ID NO: 3134977 - RNA, 19 nt, Artificial Sequence
  Description of Artificial Sequence: Synthetic oligonucleotide
uucaugcggcggccucuag

SEQ ID NO: 3134978 - RNA, 19 nt, Artificial Sequence
  Description of Artificial Sequence: Synthetic oligonucleotide
gaugaccucacuggcauuu

SEQ ID NO: 3134979 - RNA, 19 nt, Artificial Sequence
  Description of Artificial Sequence: Synthetic oligonucleotide
ugcagccuccgcagccacc

SEQ ID NO: 3134980 - RNA, 19 nt, Artificial Sequence
  Description of Artificial Sequence: Synthetic oligonucleotide
gcagccuccgcagccaccg

SEQ ID NO: 3134981 - RNA, 19 nt, Artificial Sequence
  Description of Artificial Sequence: Synthetic oligonucleotide
ggcagcugagaacaaaggu

SEQ ID NO: 3134982 - RNA, 19 nt, Artificial Sequence
  Description of Artificial Sequence: Synthetic oligonucleotide
gggcagcugagaacaaagg

SEQ ID NO: 3134983 - RNA, 19 nt, Artificial Sequence
  Description of Artificial Sequence: Synthetic oligonucleotide
gaggugaacacagcuucua

SEQ ID NO: 3134984 - RNA, 19 nt, Artificial Sequence
  Description of Artificial Sequence: Synthetic oligonucleotide
cuaggaacucugaggugaa

SEQ ID NO: 3134985 - RNA, 19 nt, Artificial Sequence
  Description of Artificial Sequence: Synthetic oligonucleotide
ccuccucuagagauaugag

SEQ ID NO: 3134986 - RNA, 19 nt, Artificial Sequence
  Description of Artificial Sequence: Synthetic oligonucleotide
cugucccuccucuagagau

SEQ ID NO: 3134987 - RNA, 19 nt, Artificial Sequence
  Description of Artificial Sequence: Synthetic oligonucleotide
ggacagcuuucaugcggcg

SEQ ID NO: 3134988 - RNA, 19 nt, Artificial Sequence
  Description of Artificial Sequence: Synthetic oligonucleotide
acaggguggugcugucccu

SEQ ID NO: 3134989 - RNA, 19 nt, Artificial Sequence
  Description of Artificial Sequence: Synthetic oligonucleotide
ccucuaggaacucugaggu

SEQ ID NO: 3134990 - RNA, 19 nt, Artificial Sequence
  Description of Artificial Sequence: Synthetic oligonucleotide
gacacaggguggugcuguc

SEQ ID NO: 3134991 - RNA, 19 nt, Artificial Sequence
  Description of Artificial Sequence: Synthetic oligonucleotide
uuucaugcggcggccucua

SEQ ID NO: 3134992 - RNA, 19 nt, Artificial Sequence
  Description of Artificial Sequence: Synthetic oligonucleotide
ccuggacagcuuucaugcg

SEQ ID NO: 3134993 - RNA, 19 nt, Artificial Sequence
  Description of Artificial Sequence: Synthetic oligonucleotide
acacagcuucuagucuuca

SEQ ID NO: 3134994 - RNA, 19 nt, Artificial Sequence
  Description of Artificial Sequence: Synthetic oligonucleotide
cagcuuucaugcggcggcc

SEQ ID NO: 3134995 - RNA, 19 nt, Artificial Sequence
  Description of Artificial Sequence: Synthetic oligonucleotide
ucucaucagugggcagcug

SEQ ID NO: 3134996 - RNA, 19 nt, Artificial Sequence
  Description of Artificial Sequence: Synthetic oligonucleotide
ucccuccucuagagauaug

SEQ ID NO: 3134997 - RNA, 19 nt, Artificial Sequence
  Description of Artificial Sequence: Synthetic oligonucleotide
agguuccccaugggcugac

SEQ ID NO: 3134998 - RNA, 19 nt, Artificial Sequence
  Description of Artificial Sequence: Synthetic oligonucleotide
cuagagauaugagggcccu

SEQ ID NO: 3134999 - RNA, 19 nt, Artificial Sequence
  Description of Artificial Sequence: Synthetic oligonucleotide
cugacacaggguggugcug

SEQ ID NO: 3135000 - RNA, 19 nt, Artificial Sequence
  Description of Artificial Sequence: Synthetic oligonucleotide
gcagcugagaacaaagguu

SEQ ID NO: 3135001 - RNA, 19 nt, Artificial Sequence
  Description of Artificial Sequence: Synthetic oligonucleotide
gguggugcugucccuccuc

SEQ ID NO: 3135002 - RNA, 19 nt, Artificial Sequence
  Description of Artificial Sequence: Synthetic oligonucleotide
caggguggugcugucccuc

SEQ ID NO: 3135003 - RNA, 19 nt, Artificial Sequence
  Description of Artificial Sequence: Synthetic oligonucleotide
agcuuucaugcggcggccu

SEQ ID NO: 3135004 - RNA, 19 nt, Artificial Sequence
  Description of Artificial Sequence: Synthetic oligonucleotide
gcuuucaugcggcggccuc

SEQ ID NO: 3135005 - RNA, 19 nt, Artificial Sequence
  Description of Artificial Sequence: Synthetic oligonucleotide
uggugcugucccuccucua

SEQ ID NO: 3135006 - RNA, 19 nt, Artificial Sequence
  Description of Artificial Sequence: Synthetic oligonucleotide
cugcagccuccgcagccac

SEQ ID NO: 3135007 - RNA, 19 nt, Artificial Sequence
  Description of Artificial Sequence: Synthetic oligonucleotide
gcggccucuaggaacucug

SEQ ID NO: 3135008 - RNA, 19 nt, Artificial Sequence
  Description of Artificial Sequence: Synthetic oligonucleotide
gcugacacaggguggugcu

SEQ ID NO: 3135009 - RNA, 19 nt, Artificial Sequence
  Description of Artificial Sequence: Synthetic oligonucleotide
guggugcugucccuccucu

SEQ ID NO: 3135010 - RNA, 19 nt, Artificial Sequence
  Description of Artificial Sequence: Synthetic oligonucleotide
gugggcagcugagaacaaa

SEQ ID NO: 3135011 - RNA, 19 nt, Artificial Sequence
  Description of Artificial Sequence: Synthetic oligonucleotide
ccccagggcuucaucuacc

SEQ ID NO: 3135012 - RNA, 19 nt, Artificial Sequence
  Description of Artificial Sequence: Synthetic oligonucleotide
ccagggcuucaucuaccag

SEQ ID NO: 3135013 - RNA, 19 nt, Artificial Sequence
  Description of Artificial Sequence: Synthetic oligonucleotide
gcugucccuccucuagaga

SEQ ID NO: 3135014 - RNA, 19 nt, Artificial Sequence
  Description of Artificial Sequence: Synthetic oligonucleotide
augcggcggccucuaggaa

SEQ ID NO: 3135015 - RNA, 19 nt, Artificial Sequence
  Description of Artificial Sequence: Synthetic oligonucleotide
cuuucaugcggcggccucu

SEQ ID NO: 3135016 - RNA, 19 nt, Artificial Sequence
  Description of Artificial Sequence: Synthetic oligonucleotide
gucccuccucuagagauau

SEQ ID NO: 3135017 - RNA, 19 nt, Artificial Sequence
  Description of Artificial Sequence: Synthetic oligonucleotide
ccccaugggcugacacagg

SEQ ID NO: 3135018 - RNA, 19 nt, Artificial Sequence
  Description of Artificial Sequence: Synthetic oligonucleotide
ccugccuggacagcuuuca

SEQ ID NO: 3135019 - RNA, 19 nt, Artificial Sequence
  Description of Artificial Sequence: Synthetic oligonucleotide
ccuccgcagccaccggccc

SEQ ID NO: 3135020 - RNA, 19 nt, Artificial Sequence
  Description of Artificial Sequence: Synthetic oligonucleotide
cccugccuggacagcuuuc

SEQ ID NO: 3135021 - RNA, 19 nt, Artificial Sequence
  Description of Artificial Sequence: Synthetic oligonucleotide
cugccuggacagcuuucau

SEQ ID NO: 3135022 - RNA, 19 nt, Artificial Sequence
  Description of Artificial Sequence: Synthetic oligonucleotide
cacacacauccugcagccu

SEQ ID NO: 3135023 - RNA, 19 nt, Artificial Sequence
  Description of Artificial Sequence: Synthetic oligonucleotide
gcggcggccucuaggaacu

SEQ ID NO: 3135024 - RNA, 19 nt, Artificial Sequence
  Description of Artificial Sequence: Synthetic oligonucleotide
ccucacuggcauuucucau

SEQ ID NO: 3135025 - RNA, 19 nt, Artificial Sequence
  Description of Artificial Sequence: Synthetic oligonucleotide
ggaugaccucacuggcauu

SEQ ID NO: 3135026 - RNA, 19 nt, Artificial Sequence
  Description of Artificial Sequence: Synthetic oligonucleotide
cggccucuaggaacucuga

SEQ ID NO: 3135027 - RNA, 19 nt, Artificial Sequence
  Description of Artificial Sequence: Synthetic oligonucleotide
ggcggccucuaggaacucu

SEQ ID NO: 3135028 - RNA, 19 nt, Artificial Sequence
  Description of Artificial Sequence: Synthetic oligonucleotide
gcccugccuggacagcuuu

SEQ ID NO: 3135029 - RNA, 19 nt, Artificial Sequence
  Description of Artificial Sequence: Synthetic oligonucleotide
ggcccugccuggacagcuu

SEQ ID NO: 3135030 - RNA, 19 nt, Artificial Sequence
  Description of Artificial Sequence: Synthetic oligonucleotide
cggcggccucuaggaacuc

SEQ ID NO: 3135031 - RNA, 19 nt, Artificial Sequence
  Description of Artificial Sequence: Synthetic oligonucleotide
aauaugugaaaagauagcg

SEQ ID NO: 3135032 - RNA, 19 nt, Artificial Sequence
  Description of Artificial Sequence: Synthetic oligonucleotide
uacacuuucuuaaucaucg

SEQ ID NO: 3135033 - RNA, 19 nt, Artificial Sequence
  Description of Artificial Sequence: Synthetic oligonucleotide
auccaugaaauccugaugc

SEQ ID NO: 3135034 - RNA, 19 nt, Artificial Sequence
  Description of Artificial Sequence: Synthetic oligonucleotide
uaugugaaaagauagcgag

SEQ ID NO: 3135035 - RNA, 19 nt, Artificial Sequence
  Description of Artificial Sequence: Synthetic oligonucleotide
cuaauaugugaaaagauag

SEQ ID NO: 3135036 - RNA, 19 nt, Artificial Sequence
  Description of Artificial Sequence: Synthetic oligonucleotide
aauuucuuccuugaugagc

SEQ ID NO: 3135037 - RNA, 19 nt, Artificial Sequence
  Description of Artificial Sequence: Synthetic oligonucleotide
uucuuaaucaucgaggaag

SEQ ID NO: 3135038 - RNA, 19 nt, Artificial Sequence
  Description of Artificial Sequence: Synthetic oligonucleotide
aaaagauagcgagauacac

SEQ ID NO: 3135039 - RNA, 19 nt, Artificial Sequence
  Description of Artificial Sequence: Synthetic oligonucleotide
ugaaaagauagcgagauac

SEQ ID NO: 3135040 - RNA, 19 nt, Artificial Sequence
  Description of Artificial Sequence: Synthetic oligonucleotide
ucuaauaugugaaaagaua

SEQ ID NO: 3135041 - RNA, 19 nt, Artificial Sequence
  Description of Artificial Sequence: Synthetic oligonucleotide
aagauagcgagauacacuu

SEQ ID NO: 3135042 - RNA, 19 nt, Artificial Sequence
  Description of Artificial Sequence: Synthetic oligonucleotide
uaauaugugaaaagauagc

SEQ ID NO: 3135043 - RNA, 19 nt, Artificial Sequence
  Description of Artificial Sequence: Synthetic oligonucleotide
uuguguuccucuaauaugu

SEQ ID NO: 3135044 - RNA, 19 nt, Artificial Sequence
  Description of Artificial Sequence: Synthetic oligonucleotide
agauacacuuucuuaauca

SEQ ID NO: 3135045 - RNA, 19 nt, Artificial Sequence
  Description of Artificial Sequence: Synthetic oligonucleotide
ucuuaaucaucgaggaagc

SEQ ID NO: 3135046 - RNA, 19 nt, Artificial Sequence
  Description of Artificial Sequence: Synthetic oligonucleotide
acuuucuuaaucaucgagg

SEQ ID NO: 3135047 - RNA, 19 nt, Artificial Sequence
  Description of Artificial Sequence: Synthetic oligonucleotide
ugucuacugaggaagguug

SEQ ID NO: 3135048 - RNA, 19 nt, Artificial Sequence
  Description of Artificial Sequence: Synthetic oligonucleotide
uccucuaauaugugaaaag

SEQ ID NO: 3135049 - RNA, 19 nt, Artificial Sequence
  Description of Artificial Sequence: Synthetic oligonucleotide
uguuccucuaauaugugaa

SEQ ID NO: 3135050 - RNA, 19 nt, Artificial Sequence
  Description of Artificial Sequence: Synthetic oligonucleotide
uaaucaucgaggaagcaau

SEQ ID NO: 3135051 - RNA, 19 nt, Artificial Sequence
  Description of Artificial Sequence: Synthetic oligonucleotide
agcaauuucuuccuugaug

SEQ ID NO: 3135052 - RNA, 19 nt, Artificial Sequence
  Description of Artificial Sequence: Synthetic oligonucleotide
ugugaaaagauagcgagau

SEQ ID NO: 3135053 - RNA, 19 nt, Artificial Sequence
  Description of Artificial Sequence: Synthetic oligonucleotide
gauagcgagauacacuuuc

SEQ ID NO: 3135054 - RNA, 19 nt, Artificial Sequence
  Description of Artificial Sequence: Synthetic oligonucleotide
uugguuucuccuuuccacg

SEQ ID NO: 3135055 - RNA, 19 nt, Artificial Sequence
  Description of Artificial Sequence: Synthetic oligonucleotide
ugaugucuacugaggaagg

SEQ ID NO: 3135056 - RNA, 19 nt, Artificial Sequence
  Description of Artificial Sequence: Synthetic oligonucleotide
cuugguuucuccuuuccac

SEQ ID NO: 3135057 - RNA, 19 nt, Artificial Sequence
  Description of Artificial Sequence: Synthetic oligonucleotide
gaaauccugaugcucaauc

SEQ ID NO: 3135058 - RNA, 19 nt, Artificial Sequence
  Description of Artificial Sequence: Synthetic oligonucleotide
ucuuugcucauccaugaaa

SEQ ID NO: 3135059 - RNA, 19 nt, Artificial Sequence
  Description of Artificial Sequence: Synthetic oligonucleotide
guuguguuccucuaauaug

SEQ ID NO: 3135060 - RNA, 19 nt, Artificial Sequence
  Description of Artificial Sequence: Synthetic oligonucleotide
aaagauagcgagauacacu

SEQ ID NO: 3135061 - RNA, 19 nt, Artificial Sequence
  Description of Artificial Sequence: Synthetic oligonucleotide
cuuucuuaaucaucgagga

SEQ ID NO: 3135062 - RNA, 19 nt, Artificial Sequence
  Description of Artificial Sequence: Synthetic oligonucleotide
uuaaucaucgaggaagcaa

SEQ ID NO: 3135063 - RNA, 19 nt, Artificial Sequence
  Description of Artificial Sequence: Synthetic oligonucleotide
ucaucgaggaagcaauuuc

SEQ ID NO: 3135064 - RNA, 19 nt, Artificial Sequence
  Description of Artificial Sequence: Synthetic oligonucleotide
ugcucauccaugaaauccu

SEQ ID NO: 3135065 - RNA, 19 nt, Artificial Sequence
  Description of Artificial Sequence: Synthetic oligonucleotide
caugaaauccugaugcuca

SEQ ID NO: 3135066 - RNA, 19 nt, Artificial Sequence
  Description of Artificial Sequence: Synthetic oligonucleotide
auuucuuccuugaugagcu

SEQ ID NO: 3135067 - RNA, 19 nt, Artificial Sequence
  Description of Artificial Sequence: Synthetic oligonucleotide
gaagcaauuucuuccuuga

SEQ ID NO: 3135068 - RNA, 19 nt, Artificial Sequence
  Description of Artificial Sequence: Synthetic oligonucleotide
ugguuucuccuuuccacgg

SEQ ID NO: 3135069 - RNA, 19 nt, Artificial Sequence
  Description of Artificial Sequence: Synthetic oligonucleotide
gcaauuucuuccuugauga

SEQ ID NO: 3135070 - RNA, 19 nt, Artificial Sequence
  Description of Artificial Sequence: Synthetic oligonucleotide
cuuuagucgucuuugcuca

SEQ ID NO: 3135071 - RNA, 19 nt, Artificial Sequence
  Description of Artificial Sequence: Synthetic oligonucleotide
acugaggaagguuguguuc

SEQ ID NO: 3135072 - RNA, 19 nt, Artificial Sequence
  Description of Artificial Sequence: Synthetic oligonucleotide
ucgucuuugcucauccaug

SEQ ID NO: 3135073 - RNA, 19 nt, Artificial Sequence
  Description of Artificial Sequence: Synthetic oligonucleotide
cacuuucuuaaucaucgag

SEQ ID NO: 3135074 - RNA, 19 nt, Artificial Sequence
  Description of Artificial Sequence: Synthetic oligonucleotide
uagucgucuuugcucaucc

SEQ ID NO: 3135075 - RNA, 19 nt, Artificial Sequence
  Description of Artificial Sequence: Synthetic oligonucleotide
aagguuguguuccucuaau

SEQ ID NO: 3135076 - RNA, 19 nt, Artificial Sequence
  Description of Artificial Sequence: Synthetic oligonucleotide
cugaggaagguuguguucc

SEQ ID NO: 3135077 - RNA, 19 nt, Artificial Sequence
  Description of Artificial Sequence: Synthetic oligonucleotide
ugagcuuauucuauucuuu

SEQ ID NO: 3135078 - RNA, 19 nt, Artificial Sequence
  Description of Artificial Sequence: Synthetic oligonucleotide
augggguugaugucuacug

SEQ ID NO: 3135079 - RNA, 19 nt, Artificial Sequence
  Description of Artificial Sequence: Synthetic oligonucleotide
cacggagcuucuuuagucg

SEQ ID NO: 3135080 - RNA, 19 nt, Artificial Sequence
  Description of Artificial Sequence: Synthetic oligonucleotide
uuccuugaugagcuuauuc

SEQ ID NO: 3135081 - RNA, 19 nt, Artificial Sequence
  Description of Artificial Sequence: Synthetic oligonucleotide
uucuccuuuccacggagcu

SEQ ID NO: 3135082 - RNA, 19 nt, Artificial Sequence
  Description of Artificial Sequence: Synthetic oligonucleotide
ugaugagcuuauucuauuc

SEQ ID NO: 3135083 - RNA, 19 nt, Artificial Sequence
  Description of Artificial Sequence: Synthetic oligonucleotide
uuucuuaaucaucgaggaa

SEQ ID NO: 3135084 - RNA, 19 nt, Artificial Sequence
  Description of Artificial Sequence: Synthetic oligonucleotide
auacacuuucuuaaucauc

SEQ ID NO: 3135085 - RNA, 19 nt, Artificial Sequence
  Description of Artificial Sequence: Synthetic oligonucleotide
cuucuuuagucgucuuugc

SEQ ID NO: 3135086 - RNA, 19 nt, Artificial Sequence
  Description of Artificial Sequence: Synthetic oligonucleotide
auaugugaaaagauagcga

SEQ ID NO: 3135087 - RNA, 19 nt, Artificial Sequence
  Description of Artificial Sequence: Synthetic oligonucleotide
uguguuccucuaauaugug

SEQ ID NO: 3135088 - RNA, 19 nt, Artificial Sequence
  Description of Artificial Sequence: Synthetic oligonucleotide
ucuuccuugaugagcuuau

SEQ ID NO: 3135089 - RNA, 19 nt, Artificial Sequence
  Description of Artificial Sequence: Synthetic oligonucleotide
gaaaagauagcgagauaca

SEQ ID NO: 3135090 - RNA, 19 nt, Artificial Sequence
  Description of Artificial Sequence: Synthetic oligonucleotide
guuucuccuuuccacggag

SEQ ID NO: 3135091 - RNA, 19 nt, Artificial Sequence
  Description of Artificial Sequence: Synthetic oligonucleotide
uguagcucuuuucccuucu

SEQ ID NO: 3135092 - RNA, 19 nt, Artificial Sequence
  Description of Artificial Sequence: Synthetic oligonucleotide
ucgaggaagcaauuucuuc

SEQ ID NO: 3135093 - RNA, 19 nt, Artificial Sequence
  Description of Artificial Sequence: Synthetic oligonucleotide
aggaagguuguguuccucu

SEQ ID NO: 3135094 - RNA, 19 nt, Artificial Sequence
  Description of Artificial Sequence: Synthetic oligonucleotide
uuuccuugguuucuccuuu

SEQ ID NO: 3135095 - RNA, 19 nt, Artificial Sequence
  Description of Artificial Sequence: Synthetic oligonucleotide
uuucuccuuuccacggagc

SEQ ID NO: 3135096 - RNA, 19 nt, Artificial Sequence
  Description of Artificial Sequence: Synthetic oligonucleotide
ggaagcaauuucuuccuug

SEQ ID NO: 3135097 - RNA, 19 nt, Artificial Sequence
  Description of Artificial Sequence: Synthetic oligonucleotide
ugggguugaugucuacuga

SEQ ID NO: 3135098 - RNA, 19 nt, Artificial Sequence
  Description of Artificial Sequence: Synthetic oligonucleotide
uuccucuaauaugugaaaa

SEQ ID NO: 3135099 - RNA, 19 nt, Artificial Sequence
  Description of Artificial Sequence: Synthetic oligonucleotide
agcgagauacacuuucuua

SEQ ID NO: 3135100 - RNA, 19 nt, Artificial Sequence
  Description of Artificial Sequence: Synthetic oligonucleotide
uuccacggagcuucuuuag

SEQ ID NO: 3135101 - RNA, 19 nt, Artificial Sequence
  Description of Artificial Sequence: Synthetic oligonucleotide
ucuacugaggaagguugug

SEQ ID NO: 3135102 - RNA, 19 nt, Artificial Sequence
  Description of Artificial Sequence: Synthetic oligonucleotide
uuuguagcucuuuucccuu

SEQ ID NO: 3135103 - RNA, 19 nt, Artificial Sequence
  Description of Artificial Sequence: Synthetic oligonucleotide
uuucccuucuccuuuccuu

SEQ ID NO: 3135104 - RNA, 19 nt, Artificial Sequence
  Description of Artificial Sequence: Synthetic oligonucleotide
uugaugagcuuauucuauu

SEQ ID NO: 3135105 - RNA, 19 nt, Artificial Sequence
  Description of Artificial Sequence: Synthetic oligonucleotide
uuugcucauccaugaaauc

SEQ ID NO: 3135106 - RNA, 19 nt, Artificial Sequence
  Description of Artificial Sequence: Synthetic oligonucleotide
uucuccuuuccuugguuuc

SEQ ID NO: 3135107 - RNA, 19 nt, Artificial Sequence
  Description of Artificial Sequence: Synthetic oligonucleotide
caauuucuuccuugaugag

SEQ ID NO: 3135108 - RNA, 19 nt, Artificial Sequence
  Description of Artificial Sequence: Synthetic oligonucleotide
uccacggagcuucuuuagu

SEQ ID NO: 3135109 - RNA, 19 nt, Artificial Sequence
  Description of Artificial Sequence: Synthetic oligonucleotide
aagcaauuucuuccuugau

SEQ ID NO: 3135110 - RNA, 19 nt, Artificial Sequence
  Description of Artificial Sequence: Synthetic oligonucleotide
gauacacuuucuuaaucau

SEQ ID NO: 3135111 - RNA, 19 nt, Artificial Sequence
  Description of Artificial Sequence: Synthetic oligonucleotide
gggguugaugucuacugag

SEQ ID NO: 3135112 - RNA, 19 nt, Artificial Sequence
  Description of Artificial Sequence: Synthetic oligonucleotide
uacugaggaagguuguguu

SEQ ID NO: 3135113 - RNA, 19 nt, Artificial Sequence
  Description of Artificial Sequence: Synthetic oligonucleotide
cuccuuuccacggagcuuc

SEQ ID NO: 3135114 - RNA, 19 nt, Artificial Sequence
  Description of Artificial Sequence: Synthetic oligonucleotide
gcuucuuuagucgucuuug

SEQ ID NO: 3135115 - RNA, 19 nt, Artificial Sequence
  Description of Artificial Sequence: Synthetic oligonucleotide
cuuugcucauccaugaaau

SEQ ID NO: 3135116 - RNA, 19 nt, Artificial Sequence
  Description of Artificial Sequence: Synthetic oligonucleotide
guguuccucuaauauguga

SEQ ID NO: 3135117 - RNA, 19 nt, Artificial Sequence
  Description of Artificial Sequence: Synthetic oligonucleotide
gaagguuguguuccucuaa

SEQ ID NO: 3135118 - RNA, 19 nt, Artificial Sequence
  Description of Artificial Sequence: Synthetic oligonucleotide
uccuuuccuugguuucucc

SEQ ID NO: 3135119 - RNA, 19 nt, Artificial Sequence
  Description of Artificial Sequence: Synthetic oligonucleotide
acacuuucuuaaucaucga

SEQ ID NO: 3135120 - RNA, 19 nt, Artificial Sequence
  Description of Artificial Sequence: Synthetic oligonucleotide
gcgagauacacuuucuuaa

SEQ ID NO: 3135121 - RNA, 19 nt, Artificial Sequence
  Description of Artificial Sequence: Synthetic oligonucleotide
acggagcuucuuuagucgu

SEQ ID NO: 3135122 - RNA, 19 nt, Artificial Sequence
  Description of Artificial Sequence: Synthetic oligonucleotide
ucuccuuuccuugguuucu

SEQ ID NO: 3135123 - RNA, 19 nt, Artificial Sequence
  Description of Artificial Sequence: Synthetic oligonucleotide
uagcgagauacacuuucuu

SEQ ID NO: 3135124 - RNA, 19 nt, Artificial Sequence
  Description of Artificial Sequence: Synthetic oligonucleotide
cucuaauaugugaaaagau

SEQ ID NO: 3135125 - RNA, 19 nt, Artificial Sequence
  Description of Artificial Sequence: Synthetic oligonucleotide
acaugggguugaugucuac

SEQ ID NO: 3135126 - RNA, 19 nt, Artificial Sequence
  Description of Artificial Sequence: Synthetic oligonucleotide
augaaauccugaugcucaa

SEQ ID NO: 3135127 - RNA, 19 nt, Artificial Sequence
  Description of Artificial Sequence: Synthetic oligonucleotide
ugaggaagguuguguuccu

SEQ ID NO: 3135128 - RNA, 19 nt, Artificial Sequence
  Description of Artificial Sequence: Synthetic oligonucleotide
gaacaugggguugaugucu

SEQ ID NO: 3135129 - RNA, 19 nt, Artificial Sequence
  Description of Artificial Sequence: Synthetic oligonucleotide
augugaaaagauagcgaga

SEQ ID NO: 3135130 - RNA, 19 nt, Artificial Sequence
  Description of Artificial Sequence: Synthetic oligonucleotide
uucuuccuugaugagcuua

SEQ ID NO: 3135131 - RNA, 19 nt, Artificial Sequence
  Description of Artificial Sequence: Synthetic oligonucleotide
guuccucuaauaugugaaa

SEQ ID NO: 3135132 - RNA, 19 nt, Artificial Sequence
  Description of Artificial Sequence: Synthetic oligonucleotide
cuugaugagcuuauucuau

SEQ ID NO: 3135133 - RNA, 19 nt, Artificial Sequence
  Description of Artificial Sequence: Synthetic oligonucleotide
ggguugaugucuacugagg

SEQ ID NO: 3135134 - RNA, 19 nt, Artificial Sequence
  Description of Artificial Sequence: Synthetic oligonucleotide
caucgaggaagcaauuucu

SEQ ID NO: 3135135 - RNA, 19 nt, Artificial Sequence
  Description of Artificial Sequence: Synthetic oligonucleotide
auagcgagauacacuuucu

SEQ ID NO: 3135136 - RNA, 19 nt, Artificial Sequence
  Description of Artificial Sequence: Synthetic oligonucleotide
agcuucuuuagucgucuuu

SEQ ID NO: 3135137 - RNA, 19 nt, Artificial Sequence
  Description of Artificial Sequence: Synthetic oligonucleotide
uuagucgucuuugcucauc

SEQ ID NO: 3135138 - RNA, 19 nt, Artificial Sequence
  Description of Artificial Sequence: Synthetic oligonucleotide
gagcuuauucuauucuuuu

SEQ ID NO: 3135139 - RNA, 19 nt, Artificial Sequence
  Description of Artificial Sequence: Synthetic oligonucleotide
aucaucgaggaagcaauuu

SEQ ID NO: 3135140 - RNA, 19 nt, Artificial Sequence
  Description of Artificial Sequence: Synthetic oligonucleotide
gguuguguuccucuaauau

SEQ ID NO: 3135141 - RNA, 19 nt, Artificial Sequence
  Description of Artificial Sequence: Synthetic oligonucleotide
aaucaucgaggaagcaauu

SEQ ID NO: 3135142 - RNA, 19 nt, Artificial Sequence
  Description of Artificial Sequence: Synthetic oligonucleotide
uuuagucgucuuugcucau

SEQ ID NO: 3135143 - RNA, 19 nt, Artificial Sequence
  Description of Artificial Sequence: Synthetic oligonucleotide
ugaaauccugaugcucaau

SEQ ID NO: 3135144 - RNA, 19 nt, Artificial Sequence
  Description of Artificial Sequence: Synthetic oligonucleotide
ccucuaauaugugaaaaga

SEQ ID NO: 3135145 - RNA, 19 nt, Artificial Sequence
  Description of Artificial Sequence: Synthetic oligonucleotide
aacaugggguugaugucua

SEQ ID NO: 3135146 - RNA, 19 nt, Artificial Sequence
  Description of Artificial Sequence: Synthetic oligonucleotide
agguuguguuccucuaaua

SEQ ID NO: 3135147 - RNA, 19 nt, Artificial Sequence
  Description of Artificial Sequence: Synthetic oligonucleotide
agucgucuuugcucaucca

SEQ ID NO: 3135148 - RNA, 19 nt, Artificial Sequence
  Description of Artificial Sequence: Synthetic oligonucleotide
cuuaaucaucgaggaagca

SEQ ID NO: 3135149 - RNA, 19 nt, Artificial Sequence
  Description of Artificial Sequence: Synthetic oligonucleotide
ccacggagcuucuuuaguc

SEQ ID NO: 3135150 - RNA, 19 nt, Artificial Sequence
  Description of Artificial Sequence: Synthetic oligonucleotide
gucgucuuugcucauccau

SEQ ID NO: 3135151 - RNA, 19 nt, Artificial Sequence
  Description of Artificial Sequence: Synthetic oligonucleotide
guagcucuuuucccuucuc

SEQ ID NO: 3135152 - RNA, 19 nt, Artificial Sequence
  Description of Artificial Sequence: Synthetic oligonucleotide
gaugucuacugaggaaggu

SEQ ID NO: 3135153 - RNA, 19 nt, Artificial Sequence
  Description of Artificial Sequence: Synthetic oligonucleotide
aucgaggaagcaauuucuu

SEQ ID NO: 3135154 - RNA, 19 nt, Artificial Sequence
  Description of Artificial Sequence: Synthetic oligonucleotide
gugaaaagauagcgagaua

SEQ ID NO: 3135155 - RNA, 19 nt, Artificial Sequence
  Description of Artificial Sequence: Synthetic oligonucleotide
uccuuuccacggagcuucu

SEQ ID NO: 3135156 - RNA, 19 nt, Artificial Sequence
  Description of Artificial Sequence: Synthetic oligonucleotide
ccaugaaauccugaugcuc

SEQ ID NO: 3135157 - RNA, 19 nt, Artificial Sequence
  Description of Artificial Sequence: Synthetic oligonucleotide
gaggaagguuguguuccuc

SEQ ID NO: 3135158 - RNA, 19 nt, Artificial Sequence
  Description of Artificial Sequence: Synthetic oligonucleotide
gguuucuccuuuccacgga

SEQ ID NO: 3135159 - RNA, 19 nt, Artificial Sequence
  Description of Artificial Sequence: Synthetic oligonucleotide
ccuugaugagcuuauucua

SEQ ID NO: 3135160 - RNA, 19 nt, Artificial Sequence
  Description of Artificial Sequence: Synthetic oligonucleotide
cuuuccuugguuucuccuu

SEQ ID NO: 3135161 - RNA, 19 nt, Artificial Sequence
  Description of Artificial Sequence: Synthetic oligonucleotide
gucuuugcucauccaugaa

SEQ ID NO: 3135162 - RNA, 19 nt, Artificial Sequence
  Description of Artificial Sequence: Synthetic oligonucleotide
cuacugaggaagguugugu

SEQ ID NO: 3135163 - RNA, 19 nt, Artificial Sequence
  Description of Artificial Sequence: Synthetic oligonucleotide
cuuuccacggagcuucuuu

SEQ ID NO: 3135164 - RNA, 19 nt, Artificial Sequence
  Description of Artificial Sequence: Synthetic oligonucleotide
ggaagguuguguuccucua

SEQ ID NO: 3135165 - RNA, 19 nt, Artificial Sequence
  Description of Artificial Sequence: Synthetic oligonucleotide
cgucuuugcucauccauga

SEQ ID NO: 3135166 - RNA, 19 nt, Artificial Sequence
  Description of Artificial Sequence: Synthetic oligonucleotide
caugggguugaugucuacu

SEQ ID NO: 3135167 - RNA, 19 nt, Artificial Sequence
  Description of Artificial Sequence: Synthetic oligonucleotide
agauagcgagauacacuuu

SEQ ID NO: 3135168 - RNA, 19 nt, Artificial Sequence
  Description of Artificial Sequence: Synthetic oligonucleotide
ggagcuucuuuagucgucu

SEQ ID NO: 3135169 - RNA, 19 nt, Artificial Sequence
  Description of Artificial Sequence: Synthetic oligonucleotide
gucuacugaggaagguugu

SEQ ID NO: 3135170 - RNA, 19 nt, Artificial Sequence
  Description of Artificial Sequence: Synthetic oligonucleotide
cggagcuucuuuagucguc

SEQ ID NO: 3135171 - RNA, 19 nt, Artificial Sequence
  Description of Artificial Sequence: Synthetic oligonucleotide
gagcuucuuuagucgucuu

SEQ ID NO: 3135172 - RNA, 19 nt, Artificial Sequence
  Description of Artificial Sequence: Synthetic oligonucleotide
ccuuuccuugguuucuccu

SEQ ID NO: 3135173 - RNA, 19 nt, Artificial Sequence
  Description of Artificial Sequence: Synthetic oligonucleotide
cgagauacacuuucuuaau

SEQ ID NO: 3135174 - RNA, 19 nt, Artificial Sequence
  Description of Artificial Sequence: Synthetic oligonucleotide
cuuccuugaugagcuuauu

SEQ ID NO: 3135175 - RNA, 19 nt, Artificial Sequence
  Description of Artificial Sequence: Synthetic oligonucleotide
ccuucuccuuuccuugguu

SEQ ID NO: 3135176 - RNA, 19 nt, Artificial Sequence
  Description of Artificial Sequence: Synthetic oligonucleotide
cccuucuccuuuccuuggu

SEQ ID NO: 3135177 - RNA, 19 nt, Artificial Sequence
  Description of Artificial Sequence: Synthetic oligonucleotide
ccuuuccacggagcuucuu

SEQ ID NO: 3135178 - RNA, 19 nt, Artificial Sequence
  Description of Artificial Sequence: Synthetic oligonucleotide
aguggagaagccccauggc

SEQ ID NO: 3135179 - RNA, 19 nt, Artificial Sequence
  Description of Artificial Sequence: Synthetic oligonucleotide
uggagaagccccauggcua

SEQ ID NO: 3135180 - RNA, 19 nt, Artificial Sequence
  Description of Artificial Sequence: Synthetic oligonucleotide
aagccccauggcuagaauu

SEQ ID NO: 3135181 - RNA, 19 nt, Artificial Sequence
  Description of Artificial Sequence: Synthetic oligonucleotide
ggagaagccccauggcuag

SEQ ID NO: 3135182 - RNA, 19 nt, Artificial Sequence
  Description of Artificial Sequence: Synthetic oligonucleotide
agccccauggcuagaauug

SEQ ID NO: 3135183 - RNA, 19 nt, Artificial Sequence
  Description of Artificial Sequence: Synthetic oligonucleotide
gguugggccaaguacccug

SEQ ID NO: 3135184 - RNA, 19 nt, Artificial Sequence
  Description of Artificial Sequence: Synthetic oligonucleotide
cccauggcuagaauugggg

SEQ ID NO: 3135185 - RNA, 19 nt, Artificial Sequence
  Description of Artificial Sequence: Synthetic oligonucleotide
uugggccaaguacccuggg

SEQ ID NO: 3135186 - RNA, 19 nt, Artificial Sequence
  Description of Artificial Sequence: Synthetic oligonucleotide
ugggccaaguacccugggu

SEQ ID NO: 3135187 - RNA, 19 nt, Artificial Sequence
  Description of Artificial Sequence: Synthetic oligonucleotide
guugggccaaguacccugg

SEQ ID NO: 3135188 - RNA, 19 nt, Artificial Sequence
  Description of Artificial Sequence: Synthetic oligonucleotide
guggagaagccccauggcu

SEQ ID NO: 3135189 - RNA, 19 nt, Artificial Sequence
  Description of Artificial Sequence: Synthetic oligonucleotide
ggccaaguacccuggguac

SEQ ID NO: 3135190 - RNA, 19 nt, Artificial Sequence
  Description of Artificial Sequence: Synthetic oligonucleotide
agaagccccauggcuagaa

SEQ ID NO: 3135191 - RNA, 19 nt, Artificial Sequence
  Description of Artificial Sequence: Synthetic oligonucleotide
ccccauggcuagaauuggg

SEQ ID NO: 3135192 - RNA, 19 nt, Artificial Sequence
  Description of Artificial Sequence: Synthetic oligonucleotide
gggccaaguacccugggua

SEQ ID NO: 3135193 - RNA, 19 nt, Artificial Sequence
  Description of Artificial Sequence: Synthetic oligonucleotide
gccccauggcuagaauugg

SEQ ID NO: 3135194 - RNA, 19 nt, Artificial Sequence
  Description of Artificial Sequence: Synthetic oligonucleotide
gaagccccauggcuagaau

SEQ ID NO: 3135195 - RNA, 19 nt, Artificial Sequence
  Description of Artificial Sequence: Synthetic oligonucleotide
gagaagccccauggcuaga

SEQ ID NO: 3135196 - RNA, 19 nt, Artificial Sequence
  Description of Artificial Sequence: Synthetic oligonucleotide
gccaaguacccuggguaca

SEQ ID NO: 3135197 - RNA, 19 nt, Artificial Sequence
  Description of Artificial Sequence: Synthetic oligonucleotide
caaguacccuggguacaua

SEQ ID NO: 3135198 - RNA, 19 nt, Artificial Sequence
  Description of Artificial Sequence: Synthetic oligonucleotide
ccaaguacccuggguacau

SEQ ID NO: 3135199 - RNA, 19 nt, Artificial Sequence
  Description of Artificial Sequence: Synthetic oligonucleotide
ggguugggccaaguacccu

SEQ ID NO: 3135200 - RNA, 19 nt, Artificial Sequence
  Description of Artificial Sequence: Synthetic oligonucleotide
uaaguuagcaaacugaucg

SEQ ID NO: 3135201 - RNA, 19 nt, Artificial Sequence
  Description of Artificial Sequence: Synthetic oligonucleotide
auauaguucauuuugagcu

SEQ ID NO: 3135202 - RNA, 19 nt, Artificial Sequence
  Description of Artificial Sequence: Synthetic oligonucleotide
ucuuagaaaaccuauaagu

SEQ ID NO: 3135203 - RNA, 19 nt, Artificial Sequence
  Description of Artificial Sequence: Synthetic oligonucleotide
ugaugcagcacuaaguuag

SEQ ID NO: 3135204 - RNA, 19 nt, Artificial Sequence
  Description of Artificial Sequence: Synthetic oligonucleotide
aaaccuauaaguguccuuc

SEQ ID NO: 3135205 - RNA, 19 nt, Artificial Sequence
  Description of Artificial Sequence: Synthetic oligonucleotide
cuuagaaaaccuauaagug

SEQ ID NO: 3135206 - RNA, 19 nt, Artificial Sequence
  Description of Artificial Sequence: Synthetic oligonucleotide
uuagcaaacugaucgaugc

SEQ ID NO: 3135207 - RNA, 19 nt, Artificial Sequence
  Description of Artificial Sequence: Synthetic oligonucleotide
uuagaaaaccuauaagugu

SEQ ID NO: 3135208 - RNA, 19 nt, Artificial Sequence
  Description of Artificial Sequence: Synthetic oligonucleotide
uagaaaaccuauaaguguc

SEQ ID NO: 3135209 - RNA, 19 nt, Artificial Sequence
  Description of Artificial Sequence: Synthetic oligonucleotide
uucauuuugagcucaggca

SEQ ID NO: 3135210 - RNA, 19 nt, Artificial Sequence
  Description of Artificial Sequence: Synthetic oligonucleotide
cauauaguucauuuugagc

SEQ ID NO: 3135211 - RNA, 19 nt, Artificial Sequence
  Description of Artificial Sequence: Synthetic oligonucleotide
ucauuuugagcucaggcaa

SEQ ID NO: 3135212 - RNA, 19 nt, Artificial Sequence
  Description of Artificial Sequence: Synthetic oligonucleotide
acaguuuugaugcagcacu

SEQ ID NO: 3135213 - RNA, 19 nt, Artificial Sequence
  Description of Artificial Sequence: Synthetic oligonucleotide
aaccuauaaguguccuucc

SEQ ID NO: 3135214 - RNA, 19 nt, Artificial Sequence
  Description of Artificial Sequence: Synthetic oligonucleotide
uccucgaugaggcuggcgg

SEQ ID NO: 3135215 - RNA, 19 nt, Artificial Sequence
  Description of Artificial Sequence: Synthetic oligonucleotide
uuuugaugcagcacuaagu

SEQ ID NO: 3135216 - RNA, 19 nt, Artificial Sequence
  Description of Artificial Sequence: Synthetic oligonucleotide
uuugaugcagcacuaaguu

SEQ ID NO: 3135217 - RNA, 19 nt, Artificial Sequence
  Description of Artificial Sequence: Synthetic oligonucleotide
ugaucgaugcuucuuagaa

SEQ ID NO: 3135218 - RNA, 19 nt, Artificial Sequence
  Description of Artificial Sequence: Synthetic oligonucleotide
uugucgauguccucgauga

SEQ ID NO: 3135219 - RNA, 19 nt, Artificial Sequence
  Description of Artificial Sequence: Synthetic oligonucleotide
guucauuuugagcucaggc

SEQ ID NO: 3135220 - RNA, 19 nt, Artificial Sequence
  Description of Artificial Sequence: Synthetic oligonucleotide
uauaaguguccuuccaucu

SEQ ID NO: 3135221 - RNA, 19 nt, Artificial Sequence
  Description of Artificial Sequence: Synthetic oligonucleotide
ucgauguccucgaugaggc

SEQ ID NO: 3135222 - RNA, 19 nt, Artificial Sequence
  Description of Artificial Sequence: Synthetic oligonucleotide
aucgaugcuucuuagaaaa

SEQ ID NO: 3135223 - RNA, 19 nt, Artificial Sequence
  Description of Artificial Sequence: Synthetic oligonucleotide
uuugagcucaggcaaggcu

SEQ ID NO: 3135224 - RNA, 19 nt, Artificial Sequence
  Description of Artificial Sequence: Synthetic oligonucleotide
uuugucgauguccucgaug

SEQ ID NO: 3135225 - RNA, 19 nt, Artificial Sequence
  Description of Artificial Sequence: Synthetic oligonucleotide
guuuugaugcagcacuaag

SEQ ID NO: 3135226 - RNA, 19 nt, Artificial Sequence
  Description of Artificial Sequence: Synthetic oligonucleotide
aaguuagcaaacugaucga

SEQ ID NO: 3135227 - RNA, 19 nt, Artificial Sequence
  Description of Artificial Sequence: Synthetic oligonucleotide
agaaaaccuauaagugucc

SEQ ID NO: 3135228 - RNA, 19 nt, Artificial Sequence
  Description of Artificial Sequence: Synthetic oligonucleotide
ucucguagcaggccaagug

SEQ ID NO: 3135229 - RNA, 19 nt, Artificial Sequence
  Description of Artificial Sequence: Synthetic oligonucleotide
uggacagccacggugggcg

SEQ ID NO: 3135230 - RNA, 19 nt, Artificial Sequence
  Description of Artificial Sequence: Synthetic oligonucleotide
ugcuucuuagaaaaccuau

SEQ ID NO: 3135231 - RNA, 19 nt, Artificial Sequence
  Description of Artificial Sequence: Synthetic oligonucleotide
cuauaaguguccuuccauc

SEQ ID NO: 3135232 - RNA, 19 nt, Artificial Sequence
  Description of Artificial Sequence: Synthetic oligonucleotide
uccaucucguagcaggcca

SEQ ID NO: 3135233 - RNA, 19 nt, Artificial Sequence
  Description of Artificial Sequence: Synthetic oligonucleotide
aacugaucgaugcuucuua

SEQ ID NO: 3135234 - RNA, 19 nt, Artificial Sequence
  Description of Artificial Sequence: Synthetic oligonucleotide
cacuaaguuagcaaacuga

SEQ ID NO: 3135235 - RNA, 19 nt, Artificial Sequence
  Description of Artificial Sequence: Synthetic oligonucleotide
cucguagcaggccaagugc

SEQ ID NO: 3135236 - RNA, 19 nt, Artificial Sequence
  Description of Artificial Sequence: Synthetic oligonucleotide
gggcauauaguucauuuug

SEQ ID NO: 3135237 - RNA, 19 nt, Artificial Sequence
  Description of Artificial Sequence: Synthetic oligonucleotide
gauguccucgaugaggcug

SEQ ID NO: 3135238 - RNA, 19 nt, Artificial Sequence
  Description of Artificial Sequence: Synthetic oligonucleotide
aaaaccuauaaguguccuu

SEQ ID NO: 3135239 - RNA, 19 nt, Artificial Sequence
  Description of Artificial Sequence: Synthetic oligonucleotide
acuaaguuagcaaacugau

SEQ ID NO: 3135240 - RNA, 19 nt, Artificial Sequence
  Description of Artificial Sequence: Synthetic oligonucleotide
auuuugagcucaggcaagg

SEQ ID NO: 3135241 - RNA, 19 nt, Artificial Sequence
  Description of Artificial Sequence: Synthetic oligonucleotide
acugaucgaugcuucuuag

SEQ ID NO: 3135242 - RNA, 19 nt, Artificial Sequence
  Description of Artificial Sequence: Synthetic oligonucleotide
gucgauguccucgaugagg

SEQ ID NO: 3135243 - RNA, 19 nt, Artificial Sequence
  Description of Artificial Sequence: Synthetic oligonucleotide
cauuuugagcucaggcaag

SEQ ID NO: 3135244 - RNA, 19 nt, Artificial Sequence
  Description of Artificial Sequence: Synthetic oligonucleotide
cuaaguuagcaaacugauc

SEQ ID NO: 3135245 - RNA, 19 nt, Artificial Sequence
  Description of Artificial Sequence: Synthetic oligonucleotide
guguccuuccaucucguag

SEQ ID NO: 3135246 - RNA, 19 nt, Artificial Sequence
  Description of Artificial Sequence: Synthetic oligonucleotide
ccuuccaucucguagcagg

SEQ ID NO: 3135247 - RNA, 19 nt, Artificial Sequence
  Description of Artificial Sequence: Synthetic oligonucleotide
gcauauaguucauuuugag

SEQ ID NO: 3135248 - RNA, 19 nt, Artificial Sequence
  Description of Artificial Sequence: Synthetic oligonucleotide
gagggcauccagucgcccg

SEQ ID NO: 3135249 - RNA, 19 nt, Artificial Sequence
  Description of Artificial Sequence: Synthetic oligonucleotide
ucaggcaaggcugcccugg

SEQ ID NO: 3135250 - RNA, 19 nt, Artificial Sequence
  Description of Artificial Sequence: Synthetic oligonucleotide
ucguagcaggccaagugcu

SEQ ID NO: 3135251 - RNA, 19 nt, Artificial Sequence
  Description of Artificial Sequence: Synthetic oligonucleotide
cuuccaucucguagcaggc

SEQ ID NO: 3135252 - RNA, 19 nt, Artificial Sequence
  Description of Artificial Sequence: Synthetic oligonucleotide
guuagcaaacugaucgaug

SEQ ID NO: 3135253 - RNA, 19 nt, Artificial Sequence
  Description of Artificial Sequence: Synthetic oligonucleotide
uaguucauuuugagcucag

SEQ ID NO: 3135254 - RNA, 19 nt, Artificial Sequence
  Description of Artificial Sequence: Synthetic oligonucleotide
agcacuaaguuagcaaacu

SEQ ID NO: 3135255 - RNA, 19 nt, Artificial Sequence
  Description of Artificial Sequence: Synthetic oligonucleotide
auaguucauuuugagcuca

SEQ ID NO: 3135256 - RNA, 19 nt, Artificial Sequence
  Description of Artificial Sequence: Synthetic oligonucleotide
gucggcgggacacggacgg

SEQ ID NO: 3135257 - RNA, 19 nt, Artificial Sequence
  Description of Artificial Sequence: Synthetic oligonucleotide
gaugcuucuuagaaaaccu

SEQ ID NO: 3135258 - RNA, 19 nt, Artificial Sequence
  Description of Artificial Sequence: Synthetic oligonucleotide
accuauaaguguccuucca

SEQ ID NO: 3135259 - RNA, 19 nt, Artificial Sequence
  Description of Artificial Sequence: Synthetic oligonucleotide
aguucauuuugagcucagg

SEQ ID NO: 3135260 - RNA, 19 nt, Artificial Sequence
  Description of Artificial Sequence: Synthetic oligonucleotide
gaucgaugcuucuuagaaa

SEQ ID NO: 3135261 - RNA, 19 nt, Artificial Sequence
  Description of Artificial Sequence: Synthetic oligonucleotide
uugaugcagcacuaaguua

SEQ ID NO: 3135262 - RNA, 19 nt, Artificial Sequence
  Description of Artificial Sequence: Synthetic oligonucleotide
cagcacuaaguuagcaaac

SEQ ID NO: 3135263 - RNA, 19 nt, Artificial Sequence
  Description of Artificial Sequence: Synthetic oligonucleotide
gugccgggcauauaguuca

SEQ ID NO: 3135264 - RNA, 19 nt, Artificial Sequence
  Description of Artificial Sequence: Synthetic oligonucleotide
uuuugagcucaggcaaggc

SEQ ID NO: 3135265 - RNA, 19 nt, Artificial Sequence
  Description of Artificial Sequence: Synthetic oligonucleotide
aguuagcaaacugaucgau

SEQ ID NO: 3135266 - RNA, 19 nt, Artificial Sequence
  Description of Artificial Sequence: Synthetic oligonucleotide
ucgaugcuucuuagaaaac

SEQ ID NO: 3135267 - RNA, 19 nt, Artificial Sequence
  Description of Artificial Sequence: Synthetic oligonucleotide
aaacugaucgaugcuucuu

SEQ ID NO: 3135268 - RNA, 19 nt, Artificial Sequence
  Description of Artificial Sequence: Synthetic oligonucleotide
ggcggugccgggcauauag

SEQ ID NO: 3135269 - RNA, 19 nt, Artificial Sequence
  Description of Artificial Sequence: Synthetic oligonucleotide
auguccucgaugaggcugg

SEQ ID NO: 3135270 - RNA, 19 nt, Artificial Sequence
  Description of Artificial Sequence: Synthetic oligonucleotide
ugucgauguccucgaugag

SEQ ID NO: 3135271 - RNA, 19 nt, Artificial Sequence
  Description of Artificial Sequence: Synthetic oligonucleotide
ugggcgagggcauccaguc

SEQ ID NO: 3135272 - RNA, 19 nt, Artificial Sequence
  Description of Artificial Sequence: Synthetic oligonucleotide
gaugcagcacuaaguuagc

SEQ ID NO: 3135273 - RNA, 19 nt, Artificial Sequence
  Description of Artificial Sequence: Synthetic oligonucleotide
agcucaggcaaggcugccc

SEQ ID NO: 3135274 - RNA, 19 nt, Artificial Sequence
  Description of Artificial Sequence: Synthetic oligonucleotide
agcaaacugaucgaugcuu

SEQ ID NO: 3135275 - RNA, 19 nt, Artificial Sequence
  Description of Artificial Sequence: Synthetic oligonucleotide
cauccagucgcccgucggc

SEQ ID NO: 3135276 - RNA, 19 nt, Artificial Sequence
  Description of Artificial Sequence: Synthetic oligonucleotide
ggcgagggcauccagucgc

SEQ ID NO: 3135277 - RNA, 19 nt, Artificial Sequence
  Description of Artificial Sequence: Synthetic oligonucleotide
cacaguuuugaugcagcac

SEQ ID NO: 3135278 - RNA, 19 nt, Artificial Sequence
  Description of Artificial Sequence: Synthetic oligonucleotide
gaugaggcuggcggugccg

SEQ ID NO: 3135279 - RNA, 19 nt, Artificial Sequence
  Description of Artificial Sequence: Synthetic oligonucleotide
gcagcacuaaguuagcaaa

SEQ ID NO: 3135280 - RNA, 19 nt, Artificial Sequence
  Description of Artificial Sequence: Synthetic oligonucleotide
gcacuaaguuagcaaacug

SEQ ID NO: 3135281 - RNA, 19 nt, Artificial Sequence
  Description of Artificial Sequence: Synthetic oligonucleotide
uccagucgcccgucggcgg

SEQ ID NO: 3135282 - RNA, 19 nt, Artificial Sequence
  Description of Artificial Sequence: Synthetic oligonucleotide
auccagucgcccgucggcg

SEQ ID NO: 3135283 - RNA, 19 nt, Artificial Sequence
  Description of Artificial Sequence: Synthetic oligonucleotide
uuccaucucguagcaggcc

SEQ ID NO: 3135284 - RNA, 19 nt, Artificial Sequence
  Description of Artificial Sequence: Synthetic oligonucleotide
gaaaaccuauaaguguccu

SEQ ID NO: 3135285 - RNA, 19 nt, Artificial Sequence
  Description of Artificial Sequence: Synthetic oligonucleotide
aggcaaggcugcccuggac

SEQ ID NO: 3135286 - RNA, 19 nt, Artificial Sequence
  Description of Artificial Sequence: Synthetic oligonucleotide
agggcauccagucgcccgu

SEQ ID NO: 3135287 - RNA, 19 nt, Artificial Sequence
  Description of Artificial Sequence: Synthetic oligonucleotide
augaggcuggcggugccgg

SEQ ID NO: 3135288 - RNA, 19 nt, Artificial Sequence
  Description of Artificial Sequence: Synthetic oligonucleotide
uuuugucgauguccucgau

SEQ ID NO: 3135289 - RNA, 19 nt, Artificial Sequence
  Description of Artificial Sequence: Synthetic oligonucleotide
ucgaugaggcuggcggugc

SEQ ID NO: 3135290 - RNA, 19 nt, Artificial Sequence
  Description of Artificial Sequence: Synthetic oligonucleotide
cccuggacagccacggugg

SEQ ID NO: 3135291 - RNA, 19 nt, Artificial Sequence
  Description of Artificial Sequence: Synthetic oligonucleotide
aguuuugaugcagcacuaa

SEQ ID NO: 3135292 - RNA, 19 nt, Artificial Sequence
  Description of Artificial Sequence: Synthetic oligonucleotide
cugcccuggacagccacgg

SEQ ID NO: 3135293 - RNA, 19 nt, Artificial Sequence
  Description of Artificial Sequence: Synthetic oligonucleotide
cugaucgaugcuucuuaga

SEQ ID NO: 3135294 - RNA, 19 nt, Artificial Sequence
  Description of Artificial Sequence: Synthetic oligonucleotide
ggcauauaguucauuuuga

SEQ ID NO: 3135295 - RNA, 19 nt, Artificial Sequence
  Description of Artificial Sequence: Synthetic oligonucleotide
acggugggcgagggcaucc

SEQ ID NO: 3135296 - RNA, 19 nt, Artificial Sequence
  Description of Artificial Sequence: Synthetic oligonucleotide
cgaugcuucuuagaaaacc

SEQ ID NO: 3135297 - RNA, 19 nt, Artificial Sequence
  Description of Artificial Sequence: Synthetic oligonucleotide
acagccacggugggcgagg

SEQ ID NO: 3135298 - RNA, 19 nt, Artificial Sequence
  Description of Artificial Sequence: Synthetic oligonucleotide
ggcaaggcugcccuggaca

SEQ ID NO: 3135299 - RNA, 19 nt, Artificial Sequence
  Description of Artificial Sequence: Synthetic oligonucleotide
ugaggcuggcggugccggg

SEQ ID NO: 3135300 - RNA, 19 nt, Artificial Sequence
  Description of Artificial Sequence: Synthetic oligonucleotide
aaguguccuuccaucucgu

SEQ ID NO: 3135301 - RNA, 19 nt, Artificial Sequence
  Description of Artificial Sequence: Synthetic oligonucleotide
cucgaugaggcuggcggug

SEQ ID NO: 3135302 - RNA, 19 nt, Artificial Sequence
  Description of Artificial Sequence: Synthetic oligonucleotide
caucucguagcaggccaag

SEQ ID NO: 3135303 - RNA, 19 nt, Artificial Sequence
  Description of Artificial Sequence: Synthetic oligonucleotide
uccuuccaucucguagcag

SEQ ID NO: 3135304 - RNA, 19 nt, Artificial Sequence
  Description of Artificial Sequence: Synthetic oligonucleotide
gcaaacugaucgaugcuuc

SEQ ID NO: 3135305 - RNA, 19 nt, Artificial Sequence
  Description of Artificial Sequence: Synthetic oligonucleotide
augcagcacuaaguuagca

SEQ ID NO: 3135306 - RNA, 19 nt, Artificial Sequence
  Description of Artificial Sequence: Synthetic oligonucleotide
gaggcuggcggugccgggc

SEQ ID NO: 3135307 - RNA, 19 nt, Artificial Sequence
  Description of Artificial Sequence: Synthetic oligonucleotide
gcauccagucgcccgucgg

SEQ ID NO: 3135308 - RNA, 19 nt, Artificial Sequence
  Description of Artificial Sequence: Synthetic oligonucleotide
agccacggugggcgagggc

SEQ ID NO: 3135309 - RNA, 19 nt, Artificial Sequence
  Description of Artificial Sequence: Synthetic oligonucleotide
gcccuggacagccacggug

SEQ ID NO: 3135310 - RNA, 19 nt, Artificial Sequence
  Description of Artificial Sequence: Synthetic oligonucleotide
gacagccacggugggcgag

SEQ ID NO: 3135311 - RNA, 19 nt, Artificial Sequence
  Description of Artificial Sequence: Synthetic oligonucleotide
guccuuccaucucguagca

SEQ ID NO: 3135312 - RNA, 19 nt, Artificial Sequence
  Description of Artificial Sequence: Synthetic oligonucleotide
caaacugaucgaugcuucu

SEQ ID NO: 3135313 - RNA, 19 nt, Artificial Sequence
  Description of Artificial Sequence: Synthetic oligonucleotide
caguuuugaugcagcacua

SEQ ID NO: 3135314 - RNA, 19 nt, Artificial Sequence
  Description of Artificial Sequence: Synthetic oligonucleotide
aucucguagcaggccaagu

SEQ ID NO: 3135315 - RNA, 19 nt, Artificial Sequence
  Description of Artificial Sequence: Synthetic oligonucleotide
ucgcccgucggcgggacac

SEQ ID NO: 3135316 - RNA, 19 nt, Artificial Sequence
  Description of Artificial Sequence: Synthetic oligonucleotide
aguguccuuccaucucgua

SEQ ID NO: 3135317 - RNA, 19 nt, Artificial Sequence
  Description of Artificial Sequence: Synthetic oligonucleotide
cucaggcaaggcugcccug

SEQ ID NO: 3135318 - RNA, 19 nt, Artificial Sequence
  Description of Artificial Sequence: Synthetic oligonucleotide
ggcauccagucgcccgucg

SEQ ID NO: 3135319 - RNA, 19 nt, Artificial Sequence
  Description of Artificial Sequence: Synthetic oligonucleotide
ggugccgggcauauaguuc

SEQ ID NO: 3135320 - RNA, 19 nt, Artificial Sequence
  Description of Artificial Sequence: Synthetic oligonucleotide
guccucgaugaggcuggcg

SEQ ID NO: 3135321 - RNA, 19 nt, Artificial Sequence
  Description of Artificial Sequence: Synthetic oligonucleotide
gccacggugggcgagggca

SEQ ID NO: 3135322 - RNA, 19 nt, Artificial Sequence
  Description of Artificial Sequence: Synthetic oligonucleotide
gggcgagggcauccagucg

SEQ ID NO: 3135323 - RNA, 19 nt, Artificial Sequence
  Description of Artificial Sequence: Synthetic oligonucleotide
ugcccuggacagccacggu

SEQ ID NO: 3135324 - RNA, 19 nt, Artificial Sequence
  Description of Artificial Sequence: Synthetic oligonucleotide
gagcucaggcaaggcugcc

SEQ ID NO: 3135325 - RNA, 19 nt, Artificial Sequence
  Description of Artificial Sequence: Synthetic oligonucleotide
ugccgggcauauaguucau

SEQ ID NO: 3135326 - RNA, 19 nt, Artificial Sequence
  Description of Artificial Sequence: Synthetic oligonucleotide
ggugggcgagggcauccag

SEQ ID NO: 3135327 - RNA, 19 nt, Artificial Sequence
  Description of Artificial Sequence: Synthetic oligonucleotide
ucggcgggacacggacggg

SEQ ID NO: 3135328 - RNA, 19 nt, Artificial Sequence
  Description of Artificial Sequence: Synthetic oligonucleotide
ccacaguuuugaugcagca

SEQ ID NO: 3135329 - RNA, 19 nt, Artificial Sequence
  Description of Artificial Sequence: Synthetic oligonucleotide
uguccucgaugaggcuggc

SEQ ID NO: 3135330 - RNA, 19 nt, Artificial Sequence
  Description of Artificial Sequence: Synthetic oligonucleotide
agucgcccgucggcgggac

SEQ ID NO: 3135331 - RNA, 19 nt, Artificial Sequence
  Description of Artificial Sequence: Synthetic oligonucleotide
gcugcccuggacagccacg

SEQ ID NO: 3135332 - RNA, 19 nt, Artificial Sequence
  Description of Artificial Sequence: Synthetic oligonucleotide
ccagucgcccgucggcggg

SEQ ID NO: 3135333 - RNA, 19 nt, Artificial Sequence
  Description of Artificial Sequence: Synthetic oligonucleotide
guagcaggccaagugcuuu

SEQ ID NO: 3135334 - RNA, 19 nt, Artificial Sequence
  Description of Artificial Sequence: Synthetic oligonucleotide
ggcugcccuggacagccac

SEQ ID NO: 3135335 - RNA, 19 nt, Artificial Sequence
  Description of Artificial Sequence: Synthetic oligonucleotide
ccuauaaguguccuuccau

SEQ ID NO: 3135336 - RNA, 19 nt, Artificial Sequence
  Description of Artificial Sequence: Synthetic oligonucleotide
gcucaggcaaggcugcccu

SEQ ID NO: 3135337 - RNA, 19 nt, Artificial Sequence
  Description of Artificial Sequence: Synthetic oligonucleotide
ccgucggcgggacacggac

SEQ ID NO: 3135338 - RNA, 19 nt, Artificial Sequence
  Description of Artificial Sequence: Synthetic oligonucleotide
cagccacggugggcgaggg

SEQ ID NO: 3135339 - RNA, 19 nt, Artificial Sequence
  Description of Artificial Sequence: Synthetic oligonucleotide
caggcaaggcugcccugga

SEQ ID NO: 3135340 - RNA, 19 nt, Artificial Sequence
  Description of Artificial Sequence: Synthetic oligonucleotide
gugggcgagggcauccagu

SEQ ID NO: 3135341 - RNA, 19 nt, Artificial Sequence
  Description of Artificial Sequence: Synthetic oligonucleotide
cacggugggcgagggcauc

SEQ ID NO: 3135342 - RNA, 19 nt, Artificial Sequence
  Description of Artificial Sequence: Synthetic oligonucleotide
cgucggcgggacacggacg

SEQ ID NO: 3135343 - RNA, 19 nt, Artificial Sequence
  Description of Artificial Sequence: Synthetic oligonucleotide
ccgggcauauaguucauuu

SEQ ID NO: 3135344 - RNA, 19 nt, Artificial Sequence
  Description of Artificial Sequence: Synthetic oligonucleotide
gcgagggcauccagucgcc

SEQ ID NO: 3135345 - RNA, 19 nt, Artificial Sequence
  Description of Artificial Sequence: Synthetic oligonucleotide
ccaucucguagcaggccaa

SEQ ID NO: 3135346 - RNA, 19 nt, Artificial Sequence
  Description of Artificial Sequence: Synthetic oligonucleotide
cgaugaggcuggcggugcc

SEQ ID NO: 3135347 - RNA, 19 nt, Artificial Sequence
  Description of Artificial Sequence: Synthetic oligonucleotide
gcccgucggcgggacacgg

SEQ ID NO: 3135348 - RNA, 19 nt, Artificial Sequence
  Description of Artificial Sequence: Synthetic oligonucleotide
ggacagccacggugggcga

SEQ ID NO: 3135349 - RNA, 19 nt, Artificial Sequence
  Description of Artificial Sequence: Synthetic oligonucleotide
gucgcccgucggcgggaca

SEQ ID NO: 3135350 - RNA, 19 nt, Artificial Sequence
  Description of Artificial Sequence: Synthetic oligonucleotide
ccucgaugaggcuggcggu

SEQ ID NO: 3135351 - RNA, 19 nt, Artificial Sequence
  Description of Artificial Sequence: Synthetic oligonucleotide
cagucgcccgucggcggga

SEQ ID NO: 3135352 - RNA, 19 nt, Artificial Sequence
  Description of Artificial Sequence: Synthetic oligonucleotide
cgagggcauccagucgccc

SEQ ID NO: 3135353 - RNA, 19 nt, Artificial Sequence
  Description of Artificial Sequence: Synthetic oligonucleotide
cuggcggugccgggcauau

SEQ ID NO: 3135354 - RNA, 19 nt, Artificial Sequence
  Description of Artificial Sequence: Synthetic oligonucleotide
gggcauccagucgcccguc

SEQ ID NO: 3135355 - RNA, 19 nt, Artificial Sequence
  Description of Artificial Sequence: Synthetic oligonucleotide
uggcggugccgggcauaua

SEQ ID NO: 3135356 - RNA, 19 nt, Artificial Sequence
  Description of Artificial Sequence: Synthetic oligonucleotide
cgggcauauaguucauuuu

SEQ ID NO: 3135357 - RNA, 19 nt, Artificial Sequence
  Description of Artificial Sequence: Synthetic oligonucleotide
cccgucggcgggacacgga

SEQ ID NO: 3135358 - RNA, 19 nt, Artificial Sequence
  Description of Artificial Sequence: Synthetic oligonucleotide
gcuggcggugccgggcaua

SEQ ID NO: 3135359 - RNA, 19 nt, Artificial Sequence
  Description of Artificial Sequence: Synthetic oligonucleotide
gcggugccgggcauauagu

SEQ ID NO: 3135360 - RNA, 19 nt, Artificial Sequence
  Description of Artificial Sequence: Synthetic oligonucleotide
cguagcaggccaagugcuu

SEQ ID NO: 3135361 - RNA, 19 nt, Artificial Sequence
  Description of Artificial Sequence: Synthetic oligonucleotide
cggcgggacacggacggga

SEQ ID NO: 3135362 - RNA, 19 nt, Artificial Sequence
  Description of Artificial Sequence: Synthetic oligonucleotide
cggugccgggcauauaguu

SEQ ID NO: 3135363 - RNA, 19 nt, Artificial Sequence
  Description of Artificial Sequence: Synthetic oligonucleotide
cgcccgucggcgggacacg

SEQ ID NO: 3135364 - RNA, 19 nt, Artificial Sequence
  Description of Artificial Sequence: Synthetic oligonucleotide
ccacggugggcgagggcau

SEQ ID NO: 3135365 - RNA, 19 nt, Artificial Sequence
  Description of Artificial Sequence: Synthetic oligonucleotide
cgauguccucgaugaggcu

SEQ ID NO: 3135366 - RNA, 19 nt, Artificial Sequence
  Description of Artificial Sequence: Synthetic oligonucleotide
ggcuggcggugccgggcau

SEQ ID NO: 3135367 - RNA, 19 nt, Artificial Sequence
  Description of Artificial Sequence: Synthetic oligonucleotide
cggugggcgagggcaucca

SEQ ID NO: 3135368 - RNA, 19 nt, Artificial Sequence
  Description of Artificial Sequence: Synthetic oligonucleotide
aaucacaugacuuaaagga

SEQ ID NO: 3135369 - RNA, 19 nt, Artificial Sequence
  Description of Artificial Sequence: Synthetic oligonucleotide
auuaacaucaccugggaac

SEQ ID NO: 3135370 - RNA, 19 nt, Artificial Sequence
  Description of Artificial Sequence: Synthetic oligonucleotide
cuuaaaagucgauacagcg

SEQ ID NO: 3135371 - RNA, 19 nt, Artificial Sequence
  Description of Artificial Sequence: Synthetic oligonucleotide
ugacuuaaaggauauagag

SEQ ID NO: 3135372 - RNA, 19 nt, Artificial Sequence
  Description of Artificial Sequence: Synthetic oligonucleotide
acuuaaaggauauagagaa

SEQ ID NO: 3135373 - RNA, 19 nt, Artificial Sequence
  Description of Artificial Sequence: Synthetic oligonucleotide
uuaaaggauauagagaaag

SEQ ID NO: 3135374 - RNA, 19 nt, Artificial Sequence
  Description of Artificial Sequence: Synthetic oligonucleotide
aaaucacaugacuuaaagg

SEQ ID NO: 3135375 - RNA, 19 nt, Artificial Sequence
  Description of Artificial Sequence: Synthetic oligonucleotide
aguaaggucauucagaaaa

SEQ ID NO: 3135376 - RNA, 19 nt, Artificial Sequence
  Description of Artificial Sequence: Synthetic oligonucleotide
uggauuaacaucaccuggg

SEQ ID NO: 3135377 - RNA, 19 nt, Artificial Sequence
  Description of Artificial Sequence: Synthetic oligonucleotide
aaagaaaacagugugcagu

SEQ ID NO: 3135378 - RNA, 19 nt, Artificial Sequence
  Description of Artificial Sequence: Synthetic oligonucleotide
uaaaagucgauacagcguc

SEQ ID NO: 3135379 - RNA, 19 nt, Artificial Sequence
  Description of Artificial Sequence: Synthetic oligonucleotide
aacagugugcaguaagguc

SEQ ID NO: 3135380 - RNA, 19 nt, Artificial Sequence
  Description of Artificial Sequence: Synthetic oligonucleotide
aaugugugacuuaaaaguc

SEQ ID NO: 3135381 - RNA, 19 nt, Artificial Sequence
  Description of Artificial Sequence: Synthetic oligonucleotide
gaaugugugacuuaaaagu

SEQ ID NO: 3135382 - RNA, 19 nt, Artificial Sequence
  Description of Artificial Sequence: Synthetic oligonucleotide
agaaugugugacuuaaaag

SEQ ID NO: 3135383 - RNA, 19 nt, Artificial Sequence
  Description of Artificial Sequence: Synthetic oligonucleotide
aagaaugugugacuuaaaa

SEQ ID NO: 3135384 - RNA, 19 nt, Artificial Sequence
  Description of Artificial Sequence: Synthetic oligonucleotide
gacuuaaaagucgauacag

SEQ ID NO: 3135385 - RNA, 19 nt, Artificial Sequence
  Description of Artificial Sequence: Synthetic oligonucleotide
caugacuuaaaggauauag

SEQ ID NO: 3135386 - RNA, 19 nt, Artificial Sequence
  Description of Artificial Sequence: Synthetic oligonucleotide
uuaaaagucgauacagcgu

SEQ ID NO: 3135387 - RNA, 19 nt, Artificial Sequence
  Description of Artificial Sequence: Synthetic oligonucleotide
aaaacagugugcaguaagg

SEQ ID NO: 3135388 - RNA, 19 nt, Artificial Sequence
  Description of Artificial Sequence: Synthetic oligonucleotide
aaaaugacucugcagugga

SEQ ID NO: 3135389 - RNA, 19 nt, Artificial Sequence
  Description of Artificial Sequence: Synthetic oligonucleotide
auagagaaagaaaacagug

SEQ ID NO: 3135390 - RNA, 19 nt, Artificial Sequence
  Description of Artificial Sequence: Synthetic oligonucleotide
gugacuuaaaagucgauac

SEQ ID NO: 3135391 - RNA, 19 nt, Artificial Sequence
  Description of Artificial Sequence: Synthetic oligonucleotide
aaaggauauagagaaagaa

SEQ ID NO: 3135392 - RNA, 19 nt, Artificial Sequence
  Description of Artificial Sequence: Synthetic oligonucleotide
aacuggauuaacaucaccu

SEQ ID NO: 3135393 - RNA, 19 nt, Artificial Sequence
  Description of Artificial Sequence: Synthetic oligonucleotide
ucagaaaaugacucugcag

SEQ ID NO: 3135394 - RNA, 19 nt, Artificial Sequence
  Description of Artificial Sequence: Synthetic oligonucleotide
aaugacucugcaguggaag

SEQ ID NO: 3135395 - RNA, 19 nt, Artificial Sequence
  Description of Artificial Sequence: Synthetic oligonucleotide
agaaagaaaacagugugca

SEQ ID NO: 3135396 - RNA, 19 nt, Artificial Sequence
  Description of Artificial Sequence: Synthetic oligonucleotide
ugugugacuuaaaagucga

SEQ ID NO: 3135397 - RNA, 19 nt, Artificial Sequence
  Description of Artificial Sequence: Synthetic oligonucleotide
ugcaguggaagaaugugug

SEQ ID NO: 3135398 - RNA, 19 nt, Artificial Sequence
  Description of Artificial Sequence: Synthetic oligonucleotide
uaaaggauauagagaaaga

SEQ ID NO: 3135399 - RNA, 19 nt, Artificial Sequence
  Description of Artificial Sequence: Synthetic oligonucleotide
guucccagucuccauaucg

SEQ ID NO: 3135400 - RNA, 19 nt, Artificial Sequence
  Description of Artificial Sequence: Synthetic oligonucleotide
cuggauuaacaucaccugg

SEQ ID NO: 3135401 - RNA, 19 nt, Artificial Sequence
  Description of Artificial Sequence: Synthetic oligonucleotide
aggucauucagaaaaugac

SEQ ID NO: 3135402 - RNA, 19 nt, Artificial Sequence
  Description of Artificial Sequence: Synthetic oligonucleotide
acuuaaaagucgauacagc

SEQ ID NO: 3135403 - RNA, 19 nt, Artificial Sequence
  Description of Artificial Sequence: Synthetic oligonucleotide
aucguguaggcuccgggcc

SEQ ID NO: 3135404 - RNA, 19 nt, Artificial Sequence
  Description of Artificial Sequence: Synthetic oligonucleotide
uuuucuuugguaacuggau

SEQ ID NO: 3135405 - RNA, 19 nt, Artificial Sequence
  Description of Artificial Sequence: Synthetic oligonucleotide
ugacuuaaaagucgauaca

SEQ ID NO: 3135406 - RNA, 19 nt, Artificial Sequence
  Description of Artificial Sequence: Synthetic oligonucleotide
uucagaaaaugacucugca

SEQ ID NO: 3135407 - RNA, 19 nt, Artificial Sequence
  Description of Artificial Sequence: Synthetic oligonucleotide
acuggauuaacaucaccug

SEQ ID NO: 3135408 - RNA, 19 nt, Artificial Sequence
  Description of Artificial Sequence: Synthetic oligonucleotide
aaggauauagagaaagaaa

SEQ ID NO: 3135409 - RNA, 19 nt, Artificial Sequence
  Description of Artificial Sequence: Synthetic oligonucleotide
gaaagaaaacagugugcag

SEQ ID NO: 3135410 - RNA, 19 nt, Artificial Sequence
  Description of Artificial Sequence: Synthetic oligonucleotide
augaaaaucacaugacuua

SEQ ID NO: 3135411 - RNA, 19 nt, Artificial Sequence
  Description of Artificial Sequence: Synthetic oligonucleotide
acagcguccuuuccguucc

SEQ ID NO: 3135412 - RNA, 19 nt, Artificial Sequence
  Description of Artificial Sequence: Synthetic oligonucleotide
auucagaaaaugacucugc

SEQ ID NO: 3135413 - RNA, 19 nt, Artificial Sequence
  Description of Artificial Sequence: Synthetic oligonucleotide
cuccauaucguguaggcuc

SEQ ID NO: 3135414 - RNA, 19 nt, Artificial Sequence
  Description of Artificial Sequence: Synthetic oligonucleotide
uugguaacuggauuaacau

SEQ ID NO: 3135415 - RNA, 19 nt, Artificial Sequence
  Description of Artificial Sequence: Synthetic oligonucleotide
gagaaagaaaacagugugc

SEQ ID NO: 3135416 - RNA, 19 nt, Artificial Sequence
  Description of Artificial Sequence: Synthetic oligonucleotide
ugugcaguaaggucauuca

SEQ ID NO: 3135417 - RNA, 19 nt, Artificial Sequence
  Description of Artificial Sequence: Synthetic oligonucleotide
ucaccugggaacuucuuca

SEQ ID NO: 3135418 - RNA, 19 nt, Artificial Sequence
  Description of Artificial Sequence: Synthetic oligonucleotide
aaaagucgauacagcgucc

SEQ ID NO: 3135419 - RNA, 19 nt, Artificial Sequence
  Description of Artificial Sequence: Synthetic oligonucleotide
ucacaugacuuaaaggaua

SEQ ID NO: 3135420 - RNA, 19 nt, Artificial Sequence
  Description of Artificial Sequence: Synthetic oligonucleotide
aacaucaccugggaacuuc

SEQ ID NO: 3135421 - RNA, 19 nt, Artificial Sequence
  Description of Artificial Sequence: Synthetic oligonucleotide
uucuuugguaacuggauua

SEQ ID NO: 3135422 - RNA, 19 nt, Artificial Sequence
  Description of Artificial Sequence: Synthetic oligonucleotide
gguaacuggauuaacauca

SEQ ID NO: 3135423 - RNA, 19 nt, Artificial Sequence
  Description of Artificial Sequence: Synthetic oligonucleotide
ugaaaaucacaugacuuaa

SEQ ID NO: 3135424 - RNA, 19 nt, Artificial Sequence
  Description of Artificial Sequence: Synthetic oligonucleotide
aucaccugggaacuucuuc

SEQ ID NO: 3135425 - RNA, 19 nt, Artificial Sequence
  Description of Artificial Sequence: Synthetic oligonucleotide
uccauaucguguaggcucc

SEQ ID NO: 3135426 - RNA, 19 nt, Artificial Sequence
  Description of Artificial Sequence: Synthetic oligonucleotide
auaucguguaggcuccggg

SEQ ID NO: 3135427 - RNA, 19 nt, Artificial Sequence
  Description of Artificial Sequence: Synthetic oligonucleotide
augugugacuuaaaagucg

SEQ ID NO: 3135428 - RNA, 19 nt, Artificial Sequence
  Description of Artificial Sequence: Synthetic oligonucleotide
ucugcaguggaagaaugug

SEQ ID NO: 3135429 - RNA, 19 nt, Artificial Sequence
  Description of Artificial Sequence: Synthetic oligonucleotide
acagugugcaguaagguca

SEQ ID NO: 3135430 - RNA, 19 nt, Artificial Sequence
  Description of Artificial Sequence: Synthetic oligonucleotide
gacuuaaaggauauagaga

SEQ ID NO: 3135431 - RNA, 19 nt, Artificial Sequence
  Description of Artificial Sequence: Synthetic oligonucleotide
gucauucagaaaaugacuc

SEQ ID NO: 3135432 - RNA, 19 nt, Artificial Sequence
  Description of Artificial Sequence: Synthetic oligonucleotide
uaacuggauuaacaucacc

SEQ ID NO: 3135433 - RNA, 19 nt, Artificial Sequence
  Description of Artificial Sequence: Synthetic oligonucleotide
ugugacuuaaaagucgaua

SEQ ID NO: 3135434 - RNA, 19 nt, Artificial Sequence
  Description of Artificial Sequence: Synthetic oligonucleotide
uaucguguaggcuccgggc

SEQ ID NO: 3135435 - RNA, 19 nt, Artificial Sequence
  Description of Artificial Sequence: Synthetic oligonucleotide
ugggaacuucuucaguggc

SEQ ID NO: 3135436 - RNA, 19 nt, Artificial Sequence
  Description of Artificial Sequence: Synthetic oligonucleotide
uuucuuugguaacuggauu

SEQ ID NO: 3135437 - RNA, 19 nt, Artificial Sequence
  Description of Artificial Sequence: Synthetic oligonucleotide
cagaaaaugacucugcagu

SEQ ID NO: 3135438 - RNA, 19 nt, Artificial Sequence
  Description of Artificial Sequence: Synthetic oligonucleotide
cugggaacuucuucagugg

SEQ ID NO: 3135439 - RNA, 19 nt, Artificial Sequence
  Description of Artificial Sequence: Synthetic oligonucleotide
aguggaagaaugugugacu

SEQ ID NO: 3135440 - RNA, 19 nt, Artificial Sequence
  Description of Artificial Sequence: Synthetic oligonucleotide
uaaggucauucagaaaaug

SEQ ID NO: 3135441 - RNA, 19 nt, Artificial Sequence
  Description of Artificial Sequence: Synthetic oligonucleotide
aaagucgauacagcguccu

SEQ ID NO: 3135442 - RNA, 19 nt, Artificial Sequence
  Description of Artificial Sequence: Synthetic oligonucleotide
ugguaacuggauuaacauc

SEQ ID NO: 3135443 - RNA, 19 nt, Artificial Sequence
  Description of Artificial Sequence: Synthetic oligonucleotide
gucuccauaucguguaggc

SEQ ID NO: 3135444 - RNA, 19 nt, Artificial Sequence
  Description of Artificial Sequence: Synthetic oligonucleotide
augacuuaaaggauauaga

SEQ ID NO: 3135445 - RNA, 19 nt, Artificial Sequence
  Description of Artificial Sequence: Synthetic oligonucleotide
uucccagucuccauaucgu

SEQ ID NO: 3135446 - RNA, 19 nt, Artificial Sequence
  Description of Artificial Sequence: Synthetic oligonucleotide
gugcaguaaggucauucag

SEQ ID NO: 3135447 - RNA, 19 nt, Artificial Sequence
  Description of Artificial Sequence: Synthetic oligonucleotide
ucuuugguaacuggauuaa

SEQ ID NO: 3135448 - RNA, 19 nt, Artificial Sequence
  Description of Artificial Sequence: Synthetic oligonucleotide
gauuaacaucaccugggaa

SEQ ID NO: 3135449 - RNA, 19 nt, Artificial Sequence
  Description of Artificial Sequence: Synthetic oligonucleotide
gauacagcguccuuuccgu

SEQ ID NO: 3135450 - RNA, 19 nt, Artificial Sequence
  Description of Artificial Sequence: Synthetic oligonucleotide
augacucugcaguggaaga

SEQ ID NO: 3135451 - RNA, 19 nt, Artificial Sequence
  Description of Artificial Sequence: Synthetic oligonucleotide
ggauauagagaaagaaaac

SEQ ID NO: 3135452 - RNA, 19 nt, Artificial Sequence
  Description of Artificial Sequence: Synthetic oligonucleotide
agucuccauaucguguagg

SEQ ID NO: 3135453 - RNA, 19 nt, Artificial Sequence
  Description of Artificial Sequence: Synthetic oligonucleotide
ucguguaggcuccgggccc

SEQ ID NO: 3135454 - RNA, 19 nt, Artificial Sequence
  Description of Artificial Sequence: Synthetic oligonucleotide
uucuucaguggcucccucu

SEQ ID NO: 3135455 - RNA, 19 nt, Artificial Sequence
  Description of Artificial Sequence: Synthetic oligonucleotide
uacagcguccuuuccguuc

SEQ ID NO: 3135456 - RNA, 19 nt, Artificial Sequence
  Description of Artificial Sequence: Synthetic oligonucleotide
ucccagucuccauaucgug

SEQ ID NO: 3135457 - RNA, 19 nt, Artificial Sequence
  Description of Artificial Sequence: Synthetic oligonucleotide
gucgauacagcguccuuuc

SEQ ID NO: 3135458 - RNA, 19 nt, Artificial Sequence
  Description of Artificial Sequence: Synthetic oligonucleotide
uuuccguucccagucucca

SEQ ID NO: 3135459 - RNA, 19 nt, Artificial Sequence
  Description of Artificial Sequence: Synthetic oligonucleotide
ccugggaacuucuucagug

SEQ ID NO: 3135460 - RNA, 19 nt, Artificial Sequence
  Description of Artificial Sequence: Synthetic oligonucleotide
ucgauacagcguccuuucc

SEQ ID NO: 3135461 - RNA, 19 nt, Artificial Sequence
  Description of Artificial Sequence: Synthetic oligonucleotide
aucacaugacuuaaaggau

SEQ ID NO: 3135462 - RNA, 19 nt, Artificial Sequence
  Description of Artificial Sequence: Synthetic oligonucleotide
cuuaaaggauauagagaaa

SEQ ID NO: 3135463 - RNA, 19 nt, Artificial Sequence
  Description of Artificial Sequence: Synthetic oligonucleotide
guccuuuccguucccaguc

SEQ ID NO: 3135464 - RNA, 19 nt, Artificial Sequence
  Description of Artificial Sequence: Synthetic oligonucleotide
uccguucccagucuccaua

SEQ ID NO: 3135465 - RNA, 19 nt, Artificial Sequence
  Description of Artificial Sequence: Synthetic oligonucleotide
ucuccauaucguguaggcu

SEQ ID NO: 3135466 - RNA, 19 nt, Artificial Sequence
  Description of Artificial Sequence: Synthetic oligonucleotide
uggaagaaugugugacuua

SEQ ID NO: 3135467 - RNA, 19 nt, Artificial Sequence
  Description of Artificial Sequence: Synthetic oligonucleotide
ugacucugcaguggaagaa

SEQ ID NO: 3135468 - RNA, 19 nt, Artificial Sequence
  Description of Artificial Sequence: Synthetic oligonucleotide
caccugggaacuucuucag

SEQ ID NO: 3135469 - RNA, 19 nt, Artificial Sequence
  Description of Artificial Sequence: Synthetic oligonucleotide
ggaagaaugugugacuuaa

SEQ ID NO: 3135470 - RNA, 19 nt, Artificial Sequence
  Description of Artificial Sequence: Synthetic oligonucleotide
cauaucguguaggcuccgg

SEQ ID NO: 3135471 - RNA, 19 nt, Artificial Sequence
  Description of Artificial Sequence: Synthetic oligonucleotide
guaacuggauuaacaucac

SEQ ID NO: 3135472 - RNA, 19 nt, Artificial Sequence
  Description of Artificial Sequence: Synthetic oligonucleotide
uccuuuccguucccagucu

SEQ ID NO: 3135473 - RNA, 19 nt, Artificial Sequence
  Description of Artificial Sequence: Synthetic oligonucleotide
gugugcaguaaggucauuc

SEQ ID NO: 3135474 - RNA, 19 nt, Artificial Sequence
  Description of Artificial Sequence: Synthetic oligonucleotide
ggauuaacaucaccuggga

SEQ ID NO: 3135475 - RNA, 19 nt, Artificial Sequence
  Description of Artificial Sequence: Synthetic oligonucleotide
agucgauacagcguccuuu

SEQ ID NO: 3135476 - RNA, 19 nt, Artificial Sequence
  Description of Artificial Sequence: Synthetic oligonucleotide
ggaacuucuucaguggcuc

SEQ ID NO: 3135477 - RNA, 19 nt, Artificial Sequence
  Description of Artificial Sequence: Synthetic oligonucleotide
aagucgauacagcguccuu

SEQ ID NO: 3135478 - RNA, 19 nt, Artificial Sequence
  Description of Artificial Sequence: Synthetic oligonucleotide
cgauacagcguccuuuccg

SEQ ID NO: 3135479 - RNA, 19 nt, Artificial Sequence
  Description of Artificial Sequence: Synthetic oligonucleotide
acucugcaguggaagaaug

SEQ ID NO: 3135480 - RNA, 19 nt, Artificial Sequence
  Description of Artificial Sequence: Synthetic oligonucleotide
accugggaacuucuucagu

SEQ ID NO: 3135481 - RNA, 19 nt, Artificial Sequence
  Description of Artificial Sequence: Synthetic oligonucleotide
aaaugacucugcaguggaa

SEQ ID NO: 3135482 - RNA, 19 nt, Artificial Sequence
  Description of Artificial Sequence: Synthetic oligonucleotide
cagucuccauaucguguag

SEQ ID NO: 3135483 - RNA, 19 nt, Artificial Sequence
  Description of Artificial Sequence: Synthetic oligonucleotide
cacaugacuuaaaggauau

SEQ ID NO: 3135484 - RNA, 19 nt, Artificial Sequence
  Description of Artificial Sequence: Synthetic oligonucleotide
ggucauucagaaaaugacu

SEQ ID NO: 3135485 - RNA, 19 nt, Artificial Sequence
  Description of Artificial Sequence: Synthetic oligonucleotide
gaagaaugugugacuuaaa

SEQ ID NO: 3135486 - RNA, 19 nt, Artificial Sequence
  Description of Artificial Sequence: Synthetic oligonucleotide
agaaaacagugugcaguaa

SEQ ID NO: 3135487 - RNA, 19 nt, Artificial Sequence
  Description of Artificial Sequence: Synthetic oligonucleotide
cugcaguggaagaaugugu

SEQ ID NO: 3135488 - RNA, 19 nt, Artificial Sequence
  Description of Artificial Sequence: Synthetic oligonucleotide
acaucaccugggaacuucu

SEQ ID NO: 3135489 - RNA, 19 nt, Artificial Sequence
  Description of Artificial Sequence: Synthetic oligonucleotide
uguaggcuccgggccccgg

SEQ ID NO: 3135490 - RNA, 19 nt, Artificial Sequence
  Description of Artificial Sequence: Synthetic oligonucleotide
uuccguucccagucuccau

SEQ ID NO: 3135491 - RNA, 19 nt, Artificial Sequence
  Description of Artificial Sequence: Synthetic oligonucleotide
auacagcguccuuuccguu

SEQ ID NO: 3135492 - RNA, 19 nt, Artificial Sequence
  Description of Artificial Sequence: Synthetic oligonucleotide
guaaggucauucagaaaau

SEQ ID NO: 3135493 - RNA, 19 nt, Artificial Sequence
  Description of Artificial Sequence: Synthetic oligonucleotide
guggaagaaugugugacuu

SEQ ID NO: 3135494 - RNA, 19 nt, Artificial Sequence
  Description of Artificial Sequence: Synthetic oligonucleotide
gcguccuuuccguucccag

SEQ ID NO: 3135495 - RNA, 19 nt, Artificial Sequence
  Description of Artificial Sequence: Synthetic oligonucleotide
gacucugcaguggaagaau

SEQ ID NO: 3135496 - RNA, 19 nt, Artificial Sequence
  Description of Artificial Sequence: Synthetic oligonucleotide
cucugcaguggaagaaugu

SEQ ID NO: 3135497 - RNA, 19 nt, Artificial Sequence
  Description of Artificial Sequence: Synthetic oligonucleotide
caguaaggucauucagaaa

SEQ ID NO: 3135498 - RNA, 19 nt, Artificial Sequence
  Description of Artificial Sequence: Synthetic oligonucleotide
acaugacuuaaaggauaua

SEQ ID NO: 3135499 - RNA, 19 nt, Artificial Sequence
  Description of Artificial Sequence: Synthetic oligonucleotide
ccagucuccauaucgugua

SEQ ID NO: 3135500 - RNA, 19 nt, Artificial Sequence
  Description of Artificial Sequence: Synthetic oligonucleotide
agcguccuuuccguuccca

SEQ ID NO: 3135501 - RNA, 19 nt, Artificial Sequence
  Description of Artificial Sequence: Synthetic oligonucleotide
ccuuuccguucccagucuc

SEQ ID NO: 3135502 - RNA, 19 nt, Artificial Sequence
  Description of Artificial Sequence: Synthetic oligonucleotide
cagugugcaguaaggucau

SEQ ID NO: 3135503 - RNA, 19 nt, Artificial Sequence
  Description of Artificial Sequence: Synthetic oligonucleotide
cagcguccuuuccguuccc

SEQ ID NO: 3135504 - RNA, 19 nt, Artificial Sequence
  Description of Artificial Sequence: Synthetic oligonucleotide
guguaggcuccgggccccg

SEQ ID NO: 3135505 - RNA, 19 nt, Artificial Sequence
  Description of Artificial Sequence: Synthetic oligonucleotide
gggaacuucuucaguggcu

SEQ ID NO: 3135506 - RNA, 19 nt, Artificial Sequence
  Description of Artificial Sequence: Synthetic oligonucleotide
ccauaucguguaggcuccg

SEQ ID NO: 3135507 - RNA, 19 nt, Artificial Sequence
  Description of Artificial Sequence: Synthetic oligonucleotide
cccagucuccauaucgugu

SEQ ID NO: 3135508 - RNA, 19 nt, Artificial Sequence
  Description of Artificial Sequence: Synthetic oligonucleotide
agugugcaguaaggucauu

SEQ ID NO: 3135509 - RNA, 19 nt, Artificial Sequence
  Description of Artificial Sequence: Synthetic oligonucleotide
cuccgggccccgggguccg

SEQ ID NO: 3135510 - RNA, 19 nt, Artificial Sequence
  Description of Artificial Sequence: Synthetic oligonucleotide
gugugacuuaaaagucgau

SEQ ID NO: 3135511 - RNA, 19 nt, Artificial Sequence
  Description of Artificial Sequence: Synthetic oligonucleotide
cguguaggcuccgggcccc

SEQ ID NO: 3135512 - RNA, 19 nt, Artificial Sequence
  Description of Artificial Sequence: Synthetic oligonucleotide
caucaccugggaacuucuu

SEQ ID NO: 3135513 - RNA, 19 nt, Artificial Sequence
  Description of Artificial Sequence: Synthetic oligonucleotide
cguucccagucuccauauc

SEQ ID NO: 3135514 - RNA, 19 nt, Artificial Sequence
  Description of Artificial Sequence: Synthetic oligonucleotide
cguccuuuccguucccagu

SEQ ID NO: 3135515 - RNA, 19 nt, Artificial Sequence
  Description of Artificial Sequence: Synthetic oligonucleotide
uccgggccccgggguccgc

SEQ ID NO: 3135516 - RNA, 19 nt, Artificial Sequence
  Description of Artificial Sequence: Synthetic oligonucleotide
ccguucccagucuccauau

SEQ ID NO: 3135517 - RNA, 19 nt, Artificial Sequence
  Description of Artificial Sequence: Synthetic oligonucleotide
ggccccgggguccgccuuu

SEQ ID NO: 3135518 - RNA, 19 nt, Artificial Sequence
  Description of Artificial Sequence: Synthetic oligonucleotide
gggccccgggguccgccuu

SEQ ID NO: 3135519 - RNA, 19 nt, Artificial Sequence
  Description of Artificial Sequence: Synthetic oligonucleotide
gccccgggguccgccuuuu

SEQ ID NO: 3135520 - RNA, 19 nt, Artificial Sequence
  Description of Artificial Sequence: Synthetic oligonucleotide
uguguuguagccaugaugc

SEQ ID NO: 3135521 - RNA, 19 nt, Artificial Sequence
  Description of Artificial Sequence: Synthetic oligonucleotide
acucuuuauucucauaggc

SEQ ID NO: 3135522 - RNA, 19 nt, Artificial Sequence
  Description of Artificial Sequence: Synthetic oligonucleotide
ugacucuuuauucucauag

SEQ ID NO: 3135523 - RNA, 19 nt, Artificial Sequence
  Description of Artificial Sequence: Synthetic oligonucleotide
aagguguauguguuguagc

SEQ ID NO: 3135524 - RNA, 19 nt, Artificial Sequence
  Description of Artificial Sequence: Synthetic oligonucleotide
auucacaggaccgagacgg

SEQ ID NO: 3135525 - RNA, 19 nt, Artificial Sequence
  Description of Artificial Sequence: Synthetic oligonucleotide
uaggcaaugaauucacagg

SEQ ID NO: 3135526 - RNA, 19 nt, Artificial Sequence
  Description of Artificial Sequence: Synthetic oligonucleotide
ucuuuauucucauaggcaa

SEQ ID NO: 3135527 - RNA, 19 nt, Artificial Sequence
  Description of Artificial Sequence: Synthetic oligonucleotide
auaggcaaugaauucacag

SEQ ID NO: 3135528 - RNA, 19 nt, Artificial Sequence
  Description of Artificial Sequence: Synthetic oligonucleotide
agguguauguguuguagcc

SEQ ID NO: 3135529 - RNA, 19 nt, Artificial Sequence
  Description of Artificial Sequence: Synthetic oligonucleotide
caaugaauucacaggaccg

SEQ ID NO: 3135530 - RNA, 19 nt, Artificial Sequence
  Description of Artificial Sequence: Synthetic oligonucleotide
guagccaugaugcugcagg

SEQ ID NO: 3135531 - RNA, 19 nt, Artificial Sequence
  Description of Artificial Sequence: Synthetic oligonucleotide
acuuugugacucuuuauuc

SEQ ID NO: 3135532 - RNA, 19 nt, Artificial Sequence
  Description of Artificial Sequence: Synthetic oligonucleotide
uuguagguugugaugacag

SEQ ID NO: 3135533 - RNA, 19 nt, Artificial Sequence
  Description of Artificial Sequence: Synthetic oligonucleotide
uucucauaggcaaugaauu

SEQ ID NO: 3135534 - RNA, 19 nt, Artificial Sequence
  Description of Artificial Sequence: Synthetic oligonucleotide
gaauucacaggaccgagac

SEQ ID NO: 3135535 - RNA, 19 nt, Artificial Sequence
  Description of Artificial Sequence: Synthetic oligonucleotide
uuuauucucauaggcaaug

SEQ ID NO: 3135536 - RNA, 19 nt, Artificial Sequence
  Description of Artificial Sequence: Synthetic oligonucleotide
uucaggucuaggaaggugu

SEQ ID NO: 3135537 - RNA, 19 nt, Artificial Sequence
  Description of Artificial Sequence: Synthetic oligonucleotide
aauucacaggaccgagacg

SEQ ID NO: 3135538 - RNA, 19 nt, Artificial Sequence
  Description of Artificial Sequence: Synthetic oligonucleotide
ugcagguucuuguagguug

SEQ ID NO: 3135539 - RNA, 19 nt, Artificial Sequence
  Description of Artificial Sequence: Synthetic oligonucleotide
uucuuguagguugugauga

SEQ ID NO: 3135540 - RNA, 19 nt, Artificial Sequence
  Description of Artificial Sequence: Synthetic oligonucleotide
aggcaaugaauucacagga

SEQ ID NO: 3135541 - RNA, 19 nt, Artificial Sequence
  Description of Artificial Sequence: Synthetic oligonucleotide
ucauaggcaaugaauucac

SEQ ID NO: 3135542 - RNA, 19 nt, Artificial Sequence
  Description of Artificial Sequence: Synthetic oligonucleotide
aaugaauucacaggaccga

SEQ ID NO: 3135543 - RNA, 19 nt, Artificial Sequence
  Description of Artificial Sequence: Synthetic oligonucleotide
ugcggcauccugaacuugg

SEQ ID NO: 3135544 - RNA, 19 nt, Artificial Sequence
  Description of Artificial Sequence: Synthetic oligonucleotide
ugagcugagcucagugucg

SEQ ID NO: 3135545 - RNA, 19 nt, Artificial Sequence
  Description of Artificial Sequence: Synthetic oligonucleotide
gucgaggugacucucgucc

SEQ ID NO: 3135546 - RNA, 19 nt, Artificial Sequence
  Description of Artificial Sequence: Synthetic oligonucleotide
uuugugacucuuuauucuc

SEQ ID NO: 3135547 - RNA, 19 nt, Artificial Sequence
  Description of Artificial Sequence: Synthetic oligonucleotide
gaagguguauguguuguag

SEQ ID NO: 3135548 - RNA, 19 nt, Artificial Sequence
  Description of Artificial Sequence: Synthetic oligonucleotide
cuuggagagguccagguuc

SEQ ID NO: 3135549 - RNA, 19 nt, Artificial Sequence
  Description of Artificial Sequence: Synthetic oligonucleotide
aacuuggagagguccaggu

SEQ ID NO: 3135550 - RNA, 19 nt, Artificial Sequence
  Description of Artificial Sequence: Synthetic oligonucleotide
guuguagccaugaugcugc

SEQ ID NO: 3135551 - RNA, 19 nt, Artificial Sequence
  Description of Artificial Sequence: Synthetic oligonucleotide
uguuguagccaugaugcug

SEQ ID NO: 3135552 - RNA, 19 nt, Artificial Sequence
  Description of Artificial Sequence: Synthetic oligonucleotide
gcaaugaauucacaggacc

SEQ ID NO: 3135553 - RNA, 19 nt, Artificial Sequence
  Description of Artificial Sequence: Synthetic oligonucleotide
cagguucaggucuaggaag

SEQ ID NO: 3135554 - RNA, 19 nt, Artificial Sequence
  Description of Artificial Sequence: Synthetic oligonucleotide
uauucucauaggcaaugaa

SEQ ID NO: 3135555 - RNA, 19 nt, Artificial Sequence
  Description of Artificial Sequence: Synthetic oligonucleotide
ugaauucacaggaccgaga

SEQ ID NO: 3135556 - RNA, 19 nt, Artificial Sequence
  Description of Artificial Sequence: Synthetic oligonucleotide
acaggaccgagacggggcc

SEQ ID NO: 3135557 - RNA, 19 nt, Artificial Sequence
  Description of Artificial Sequence: Synthetic oligonucleotide
uuuugucacuuugugacuc

SEQ ID NO: 3135558 - RNA, 19 nt, Artificial Sequence
  Description of Artificial Sequence: Synthetic oligonucleotide
uugugacucuuuauucuca

SEQ ID NO: 3135559 - RNA, 19 nt, Artificial Sequence
  Description of Artificial Sequence: Synthetic oligonucleotide
gcauccugaacuuggagag

SEQ ID NO: 3135560 - RNA, 19 nt, Artificial Sequence
  Description of Artificial Sequence: Synthetic oligonucleotide
cucuuuauucucauaggca

SEQ ID NO: 3135561 - RNA, 19 nt, Artificial Sequence
  Description of Artificial Sequence: Synthetic oligonucleotide
gugacucucguccugacga

SEQ ID NO: 3135562 - RNA, 19 nt, Artificial Sequence
  Description of Artificial Sequence: Synthetic oligonucleotide
ugaugcugcagguucuugu

SEQ ID NO: 3135563 - RNA, 19 nt, Artificial Sequence
  Description of Artificial Sequence: Synthetic oligonucleotide
guucuuguagguugugaug

SEQ ID NO: 3135564 - RNA, 19 nt, Artificial Sequence
  Description of Artificial Sequence: Synthetic oligonucleotide
ugaacuuggagagguccag

SEQ ID NO: 3135565 - RNA, 19 nt, Artificial Sequence
  Description of Artificial Sequence: Synthetic oligonucleotide
uuggagagguccagguuca

SEQ ID NO: 3135566 - RNA, 19 nt, Artificial Sequence
  Description of Artificial Sequence: Synthetic oligonucleotide
auucucauaggcaaugaau

SEQ ID NO: 3135567 - RNA, 19 nt, Artificial Sequence
  Description of Artificial Sequence: Synthetic oligonucleotide
cucagugucgaggugacuc

SEQ ID NO: 3135568 - RNA, 19 nt, Artificial Sequence
  Description of Artificial Sequence: Synthetic oligonucleotide
augaauucacaggaccgag

SEQ ID NO: 3135569 - RNA, 19 nt, Artificial Sequence
  Description of Artificial Sequence: Synthetic oligonucleotide
uuauucucauaggcaauga

SEQ ID NO: 3135570 - RNA, 19 nt, Artificial Sequence
  Description of Artificial Sequence: Synthetic oligonucleotide
guagguugugaugacaguc

SEQ ID NO: 3135571 - RNA, 19 nt, Artificial Sequence
  Description of Artificial Sequence: Synthetic oligonucleotide
agagguccagguucagguc

SEQ ID NO: 3135572 - RNA, 19 nt, Artificial Sequence
  Description of Artificial Sequence: Synthetic oligonucleotide
uguauguguuguagccaug

SEQ ID NO: 3135573 - RNA, 19 nt, Artificial Sequence
  Description of Artificial Sequence: Synthetic oligonucleotide
ugugacucuuuauucucau

SEQ ID NO: 3135574 - RNA, 19 nt, Artificial Sequence
  Description of Artificial Sequence: Synthetic oligonucleotide
aggucuaggaagguguaug

SEQ ID NO: 3135575 - RNA, 19 nt, Artificial Sequence
  Description of Artificial Sequence: Synthetic oligonucleotide
uguagguugugaugacagu

SEQ ID NO: 3135576 - RNA, 19 nt, Artificial Sequence
  Description of Artificial Sequence: Synthetic oligonucleotide
uuugucacuuugugacucu

SEQ ID NO: 3135577 - RNA, 19 nt, Artificial Sequence
  Description of Artificial Sequence: Synthetic oligonucleotide
uucacaggaccgagacggg

SEQ ID NO: 3135578 - RNA, 19 nt, Artificial Sequence
  Description of Artificial Sequence: Synthetic oligonucleotide
cacaggaccgagacggggc

SEQ ID NO: 3135579 - RNA, 19 nt, Artificial Sequence
  Description of Artificial Sequence: Synthetic oligonucleotide
cucauaggcaaugaauuca

SEQ ID NO: 3135580 - RNA, 19 nt, Artificial Sequence
  Description of Artificial Sequence: Synthetic oligonucleotide
uaggaagguguauguguug

SEQ ID NO: 3135581 - RNA, 19 nt, Artificial Sequence
  Description of Artificial Sequence: Synthetic oligonucleotide
gugagcugagcucaguguc

SEQ ID NO: 3135582 - RNA, 19 nt, Artificial Sequence
  Description of Artificial Sequence: Synthetic oligonucleotide
ucagugucgaggugacucu

SEQ ID NO: 3135583 - RNA, 19 nt, Artificial Sequence
  Description of Artificial Sequence: Synthetic oligonucleotide
gaacuuggagagguccagg

SEQ ID NO: 3135584 - RNA, 19 nt, Artificial Sequence
  Description of Artificial Sequence: Synthetic oligonucleotide
ucacaggaccgagacgggg

SEQ ID NO: 3135585 - RNA, 19 nt, Artificial Sequence
  Description of Artificial Sequence: Synthetic oligonucleotide
ucuuguagguugugaugac

SEQ ID NO: 3135586 - RNA, 19 nt, Artificial Sequence
  Description of Artificial Sequence: Synthetic oligonucleotide
aggaagguguauguguugu

SEQ ID NO: 3135587 - RNA, 19 nt, Artificial Sequence
  Description of Artificial Sequence: Synthetic oligonucleotide
auccugaacuuggagaggu

SEQ ID NO: 3135588 - RNA, 19 nt, Artificial Sequence
  Description of Artificial Sequence: Synthetic oligonucleotide
cuuugugacucuuuauucu

SEQ ID NO: 3135589 - RNA, 19 nt, Artificial Sequence
  Description of Artificial Sequence: Synthetic oligonucleotide
uauguguuguagccaugau

SEQ ID NO: 3135590 - RNA, 19 nt, Artificial Sequence
  Description of Artificial Sequence: Synthetic oligonucleotide
ucacuuugugacucuuuau

SEQ ID NO: 3135591 - RNA, 19 nt, Artificial Sequence
  Description of Artificial Sequence: Synthetic oligonucleotide
ugacucucguccugacgag

SEQ ID NO: 3135592 - RNA, 19 nt, Artificial Sequence
  Description of Artificial Sequence: Synthetic oligonucleotide
acucucguccugacgaggg

SEQ ID NO: 3135593 - RNA, 19 nt, Artificial Sequence
  Description of Artificial Sequence: Synthetic oligonucleotide
guauguguuguagccauga

SEQ ID NO: 3135594 - RNA, 19 nt, Artificial Sequence
  Description of Artificial Sequence: Synthetic oligonucleotide
ugagcucagugucgaggug

SEQ ID NO: 3135595 - RNA, 19 nt, Artificial Sequence
  Description of Artificial Sequence: Synthetic oligonucleotide
ucaggucuaggaaggugua

SEQ ID NO: 3135596 - RNA, 19 nt, Artificial Sequence
  Description of Artificial Sequence: Synthetic oligonucleotide
gacucucguccugacgagg

SEQ ID NO: 3135597 - RNA, 19 nt, Artificial Sequence
  Description of Artificial Sequence: Synthetic oligonucleotide
agugucgaggugacucucg

SEQ ID NO: 3135598 - RNA, 19 nt, Artificial Sequence
  Description of Artificial Sequence: Synthetic oligonucleotide
uagccaugaugcugcaggu

SEQ ID NO: 3135599 - RNA, 19 nt, Artificial Sequence
  Description of Artificial Sequence: Synthetic oligonucleotide
gagacggggccaccgugag

SEQ ID NO: 3135600 - RNA, 19 nt, Artificial Sequence
  Description of Artificial Sequence: Synthetic oligonucleotide
gagcucagugucgagguga

SEQ ID NO: 3135601 - RNA, 19 nt, Artificial Sequence
  Description of Artificial Sequence: Synthetic oligonucleotide
ugucacuuugugacucuuu

SEQ ID NO: 3135602 - RNA, 19 nt, Artificial Sequence
  Description of Artificial Sequence: Synthetic oligonucleotide
ucucguccugacgagggcu

SEQ ID NO: 3135603 - RNA, 19 nt, Artificial Sequence
  Description of Artificial Sequence: Synthetic oligonucleotide
gccaugaugcugcagguuc

SEQ ID NO: 3135604 - RNA, 19 nt, Artificial Sequence
  Description of Artificial Sequence: Synthetic oligonucleotide
ucgaggugacucucguccu

SEQ ID NO: 3135605 - RNA, 19 nt, Artificial Sequence
  Description of Artificial Sequence: Synthetic oligonucleotide
ggugacucucguccugacg

SEQ ID NO: 3135606 - RNA, 19 nt, Artificial Sequence
  Description of Artificial Sequence: Synthetic oligonucleotide
uguagccaugaugcugcag

SEQ ID NO: 3135607 - RNA, 19 nt, Artificial Sequence
  Description of Artificial Sequence: Synthetic oligonucleotide
gcugagcucagugucgagg

SEQ ID NO: 3135608 - RNA, 19 nt, Artificial Sequence
  Description of Artificial Sequence: Synthetic oligonucleotide
aggugacucucguccugac

SEQ ID NO: 3135609 - RNA, 19 nt, Artificial Sequence
  Description of Artificial Sequence: Synthetic oligonucleotide
cauccugaacuuggagagg

SEQ ID NO: 3135610 - RNA, 19 nt, Artificial Sequence
  Description of Artificial Sequence: Synthetic oligonucleotide
agcucagugucgaggugac

SEQ ID NO: 3135611 - RNA, 19 nt, Artificial Sequence
  Description of Artificial Sequence: Synthetic oligonucleotide
agacggggccaccgugagc

SEQ ID NO: 3135612 - RNA, 19 nt, Artificial Sequence
  Description of Artificial Sequence: Synthetic oligonucleotide
uccugacgagggcugcggc

SEQ ID NO: 3135613 - RNA, 19 nt, Artificial Sequence
  Description of Artificial Sequence: Synthetic oligonucleotide
gacggggccaccgugagcu

SEQ ID NO: 3135614 - RNA, 19 nt, Artificial Sequence
  Description of Artificial Sequence: Synthetic oligonucleotide
aggaccgagacggggccac

SEQ ID NO: 3135615 - RNA, 19 nt, Artificial Sequence
  Description of Artificial Sequence: Synthetic oligonucleotide
guguauguguuguagccau

SEQ ID NO: 3135616 - RNA, 19 nt, Artificial Sequence
  Description of Artificial Sequence: Synthetic oligonucleotide
cauaggcaaugaauucaca

SEQ ID NO: 3135617 - RNA, 19 nt, Artificial Sequence
  Description of Artificial Sequence: Synthetic oligonucleotide
cuuguagguugugaugaca

SEQ ID NO: 3135618 - RNA, 19 nt, Artificial Sequence
  Description of Artificial Sequence: Synthetic oligonucleotide
agguucuuguagguuguga

SEQ ID NO: 3135619 - RNA, 19 nt, Artificial Sequence
  Description of Artificial Sequence: Synthetic oligonucleotide
gaccgagacggggccaccg

SEQ ID NO: 3135620 - RNA, 19 nt, Artificial Sequence
  Description of Artificial Sequence: Synthetic oligonucleotide
ugucgaggugacucucguc

SEQ ID NO: 3135621 - RNA, 19 nt, Artificial Sequence
  Description of Artificial Sequence: Synthetic oligonucleotide
uccugaacuuggagagguc

SEQ ID NO: 3135622 - RNA, 19 nt, Artificial Sequence
  Description of Artificial Sequence: Synthetic oligonucleotide
cacuuugugacucuuuauu

SEQ ID NO: 3135623 - RNA, 19 nt, Artificial Sequence
  Description of Artificial Sequence: Synthetic oligonucleotide
gacgagggcugcggcaucc

SEQ ID NO: 3135624 - RNA, 19 nt, Artificial Sequence
  Description of Artificial Sequence: Synthetic oligonucleotide
cucucguccugacgagggc

SEQ ID NO: 3135625 - RNA, 19 nt, Artificial Sequence
  Description of Artificial Sequence: Synthetic oligonucleotide
agggcugcggcauccugaa

SEQ ID NO: 3135626 - RNA, 19 nt, Artificial Sequence
  Description of Artificial Sequence: Synthetic oligonucleotide
gguucuuguagguugugau

SEQ ID NO: 3135627 - RNA, 19 nt, Artificial Sequence
  Description of Artificial Sequence: Synthetic oligonucleotide
uuguagccaugaugcugca

SEQ ID NO: 3135628 - RNA, 19 nt, Artificial Sequence
  Description of Artificial Sequence: Synthetic oligonucleotide
gaggugacucucguccuga

SEQ ID NO: 3135629 - RNA, 19 nt, Artificial Sequence
  Description of Artificial Sequence: Synthetic oligonucleotide
gguguauguguuguagcca

SEQ ID NO: 3135630 - RNA, 19 nt, Artificial Sequence
  Description of Artificial Sequence: Synthetic oligonucleotide
cugagcucagugucgaggu

SEQ ID NO: 3135631 - RNA, 19 nt, Artificial Sequence
  Description of Artificial Sequence: Synthetic oligonucleotide
ggcaaugaauucacaggac

SEQ ID NO: 3135632 - RNA, 19 nt, Artificial Sequence
  Description of Artificial Sequence: Synthetic oligonucleotide
gagcugagcucagugucga

SEQ ID NO: 3135633 - RNA, 19 nt, Artificial Sequence
  Description of Artificial Sequence: Synthetic oligonucleotide
agcugagcucagugucgag

SEQ ID NO: 3135634 - RNA, 19 nt, Artificial Sequence
  Description of Artificial Sequence: Synthetic oligonucleotide
augaugcugcagguucuug

SEQ ID NO: 3135635 - RNA, 19 nt, Artificial Sequence
  Description of Artificial Sequence: Synthetic oligonucleotide
gagggcugcggcauccuga

SEQ ID NO: 3135636 - RNA, 19 nt, Artificial Sequence
  Description of Artificial Sequence: Synthetic oligonucleotide
ggcugcggcauccugaacu

SEQ ID NO: 3135637 - RNA, 19 nt, Artificial Sequence
  Description of Artificial Sequence: Synthetic oligonucleotide
guccagguucaggucuagg

SEQ ID NO: 3135638 - RNA, 19 nt, Artificial Sequence
  Description of Artificial Sequence: Synthetic oligonucleotide
accgagacggggccaccgu

SEQ ID NO: 3135639 - RNA, 19 nt, Artificial Sequence
  Description of Artificial Sequence: Synthetic oligonucleotide
uugucacuuugugacucuu

SEQ ID NO: 3135640 - RNA, 19 nt, Artificial Sequence
  Description of Artificial Sequence: Synthetic oligonucleotide
uggagagguccagguucag

SEQ ID NO: 3135641 - RNA, 19 nt, Artificial Sequence
  Description of Artificial Sequence: Synthetic oligonucleotide
gugacucuuuauucucaua

SEQ ID NO: 3135642 - RNA, 19 nt, Artificial Sequence
  Description of Artificial Sequence: Synthetic oligonucleotide
ucguccugacgagggcugc

SEQ ID NO: 3135643 - RNA, 19 nt, Artificial Sequence
  Description of Artificial Sequence: Synthetic oligonucleotide
ggucuaggaagguguaugu

SEQ ID NO: 3135644 - RNA, 19 nt, Artificial Sequence
  Description of Artificial Sequence: Synthetic oligonucleotide
ugacgagggcugcggcauc

SEQ ID NO: 3135645 - RNA, 19 nt, Artificial Sequence
  Description of Artificial Sequence: Synthetic oligonucleotide
ccagguucaggucuaggaa

SEQ ID NO: 3135646 - RNA, 19 nt, Artificial Sequence
  Description of Artificial Sequence: Synthetic oligonucleotide
caccgugagcugagcucag

SEQ ID NO: 3135647 - RNA, 19 nt, Artificial Sequence
  Description of Artificial Sequence: Synthetic oligonucleotide
cagugucgaggugacucuc

SEQ ID NO: 3135648 - RNA, 19 nt, Artificial Sequence
  Description of Artificial Sequence: Synthetic oligonucleotide
ccgugagcugagcucagug

SEQ ID NO: 3135649 - RNA, 19 nt, Artificial Sequence
  Description of Artificial Sequence: Synthetic oligonucleotide
cagguucuuguagguugug

SEQ ID NO: 3135650 - RNA, 19 nt, Artificial Sequence
  Description of Artificial Sequence: Synthetic oligonucleotide
guguuguagccaugaugcu

SEQ ID NO: 3135651 - RNA, 19 nt, Artificial Sequence
  Description of Artificial Sequence: Synthetic oligonucleotide
gugucgaggugacucucgu

SEQ ID NO: 3135652 - RNA, 19 nt, Artificial Sequence
  Description of Artificial Sequence: Synthetic oligonucleotide
agccaugaugcugcagguu

SEQ ID NO: 3135653 - RNA, 19 nt, Artificial Sequence
  Description of Artificial Sequence: Synthetic oligonucleotide
ggaagguguauguguugua

SEQ ID NO: 3135654 - RNA, 19 nt, Artificial Sequence
  Description of Artificial Sequence: Synthetic oligonucleotide
accgugagcugagcucagu

SEQ ID NO: 3135655 - RNA, 19 nt, Artificial Sequence
  Description of Artificial Sequence: Synthetic oligonucleotide
cugcggcauccugaacuug

SEQ ID NO: 3135656 - RNA, 19 nt, Artificial Sequence
  Description of Artificial Sequence: Synthetic oligonucleotide
ccaccgugagcugagcuca

SEQ ID NO: 3135657 - RNA, 19 nt, Artificial Sequence
  Description of Artificial Sequence: Synthetic oligonucleotide
agguccagguucaggucua

SEQ ID NO: 3135658 - RNA, 19 nt, Artificial Sequence
  Description of Artificial Sequence: Synthetic oligonucleotide
acggggccaccgugagcug

SEQ ID NO: 3135659 - RNA, 19 nt, Artificial Sequence
  Description of Artificial Sequence: Synthetic oligonucleotide
cugacgagggcugcggcau

SEQ ID NO: 3135660 - RNA, 19 nt, Artificial Sequence
  Description of Artificial Sequence: Synthetic oligonucleotide
acgagggcugcggcauccu

SEQ ID NO: 3135661 - RNA, 19 nt, Artificial Sequence
  Description of Artificial Sequence: Synthetic oligonucleotide
ccgagacggggccaccgug

SEQ ID NO: 3135662 - RNA, 19 nt, Artificial Sequence
  Description of Artificial Sequence: Synthetic oligonucleotide
cggcauccugaacuuggag

SEQ ID NO: 3135663 - RNA, 19 nt, Artificial Sequence
  Description of Artificial Sequence: Synthetic oligonucleotide
gcagguucuuguagguugu

SEQ ID NO: 3135664 - RNA, 19 nt, Artificial Sequence
  Description of Artificial Sequence: Synthetic oligonucleotide
ccaugaugcugcagguucu

SEQ ID NO: 3135665 - RNA, 19 nt, Artificial Sequence
  Description of Artificial Sequence: Synthetic oligonucleotide
cgagacggggccaccguga

SEQ ID NO: 3135666 - RNA, 19 nt, Artificial Sequence
  Description of Artificial Sequence: Synthetic oligonucleotide
gguucaggucuaggaaggu

SEQ ID NO: 3135667 - RNA, 19 nt, Artificial Sequence
  Description of Artificial Sequence: Synthetic oligonucleotide
gcugcggcauccugaacuu

SEQ ID NO: 3135668 - RNA, 19 nt, Artificial Sequence
  Description of Artificial Sequence: Synthetic oligonucleotide
caugaugcugcagguucuu

SEQ ID NO: 3135669 - RNA, 19 nt, Artificial Sequence
  Description of Artificial Sequence: Synthetic oligonucleotide
caggaccgagacggggcca

SEQ ID NO: 3135670 - RNA, 19 nt, Artificial Sequence
  Description of Artificial Sequence: Synthetic oligonucleotide
gcggcauccugaacuugga

SEQ ID NO: 3135671 - RNA, 19 nt, Artificial Sequence
  Description of Artificial Sequence: Synthetic oligonucleotide
ggccaccgugagcugagcu

SEQ ID NO: 3135672 - RNA, 19 nt, Artificial Sequence
  Description of Artificial Sequence: Synthetic oligonucleotide
cgugagcugagcucagugu

SEQ ID NO: 3135673 - RNA, 19 nt, Artificial Sequence
  Description of Artificial Sequence: Synthetic oligonucleotide
caggucuaggaagguguau

SEQ ID NO: 3135674 - RNA, 19 nt, Artificial Sequence
  Description of Artificial Sequence: Synthetic oligonucleotide
ggaccgagacggggccacc

SEQ ID NO: 3135675 - RNA, 19 nt, Artificial Sequence
  Description of Artificial Sequence: Synthetic oligonucleotide
cgagggcugcggcauccug

SEQ ID NO: 3135676 - RNA, 19 nt, Artificial Sequence
  Description of Artificial Sequence: Synthetic oligonucleotide
gggcugcggcauccugaac

SEQ ID NO: 3135677 - RNA, 19 nt, Artificial Sequence
  Description of Artificial Sequence: Synthetic oligonucleotide
gcucagugucgaggugacu

SEQ ID NO: 3135678 - RNA, 19 nt, Artificial Sequence
  Description of Artificial Sequence: Synthetic oligonucleotide
auaaacuucaccuugacgg

SEQ ID NO: 3135679 - RNA, 19 nt, Artificial Sequence
  Description of Artificial Sequence: Synthetic oligonucleotide
aauuucacaaacuugauga

SEQ ID NO: 3135680 - RNA, 19 nt, Artificial Sequence
  Description of Artificial Sequence: Synthetic oligonucleotide
aacuugaugagauaaacuu

SEQ ID NO: 3135681 - RNA, 19 nt, Artificial Sequence
  Description of Artificial Sequence: Synthetic oligonucleotide
acuuuguaauuucacaaac

SEQ ID NO: 3135682 - RNA, 19 nt, Artificial Sequence
  Description of Artificial Sequence: Synthetic oligonucleotide
ugagauaaacuucaccuug

SEQ ID NO: 3135683 - RNA, 19 nt, Artificial Sequence
  Description of Artificial Sequence: Synthetic oligonucleotide
gaugagauaaacuucaccu

SEQ ID NO: 3135684 - RNA, 19 nt, Artificial Sequence
  Description of Artificial Sequence: Synthetic oligonucleotide
uuuguaauuucacaaacuu

SEQ ID NO: 3135685 - RNA, 19 nt, Artificial Sequence
  Description of Artificial Sequence: Synthetic oligonucleotide
ugaucgaaaacgcuccccg

SEQ ID NO: 3135686 - RNA, 19 nt, Artificial Sequence
  Description of Artificial Sequence: Synthetic oligonucleotide
gauaaacuucaccuugacg

SEQ ID NO: 3135687 - RNA, 19 nt, Artificial Sequence
  Description of Artificial Sequence: Synthetic oligonucleotide
uaauuucacaaacuugaug

SEQ ID NO: 3135688 - RNA, 19 nt, Artificial Sequence
  Description of Artificial Sequence: Synthetic oligonucleotide
uucacaaacuugaugagau

SEQ ID NO: 3135689 - RNA, 19 nt, Artificial Sequence
  Description of Artificial Sequence: Synthetic oligonucleotide
uuguaauuucacaaacuug

SEQ ID NO: 3135690 - RNA, 19 nt, Artificial Sequence
  Description of Artificial Sequence: Synthetic oligonucleotide
ugaugagauaaacuucacc

SEQ ID NO: 3135691 - RNA, 19 nt, Artificial Sequence
  Description of Artificial Sequence: Synthetic oligonucleotide
aucgaaaacgcuccccggc

SEQ ID NO: 3135692 - RNA, 19 nt, Artificial Sequence
  Description of Artificial Sequence: Synthetic oligonucleotide
cuugaugagauaaacuuca

SEQ ID NO: 3135693 - RNA, 19 nt, Artificial Sequence
  Description of Artificial Sequence: Synthetic oligonucleotide
ugcacuuuguaauuucaca

SEQ ID NO: 3135694 - RNA, 19 nt, Artificial Sequence
  Description of Artificial Sequence: Synthetic oligonucleotide
uuuucuuagcuacccuugc

SEQ ID NO: 3135695 - RNA, 19 nt, Artificial Sequence
  Description of Artificial Sequence: Synthetic oligonucleotide
uaaacuucaccuugacggc

SEQ ID NO: 3135696 - RNA, 19 nt, Artificial Sequence
  Description of Artificial Sequence: Synthetic oligonucleotide
uggugaucgaaaacgcucc

SEQ ID NO: 3135697 - RNA, 19 nt, Artificial Sequence
  Description of Artificial Sequence: Synthetic oligonucleotide
cacguggugaucgaaaacg

SEQ ID NO: 3135698 - RNA, 19 nt, Artificial Sequence
  Description of Artificial Sequence: Synthetic oligonucleotide
uucuuagcuacccuugcac

SEQ ID NO: 3135699 - RNA, 19 nt, Artificial Sequence
  Description of Artificial Sequence: Synthetic oligonucleotide
auuucacaaacuugaugag

SEQ ID NO: 3135700 - RNA, 19 nt, Artificial Sequence
  Description of Artificial Sequence: Synthetic oligonucleotide
aaacuucaccuugacggcg

SEQ ID NO: 3135701 - RNA, 19 nt, Artificial Sequence
  Description of Artificial Sequence: Synthetic oligonucleotide
acuugaugagauaaacuuc

SEQ ID NO: 3135702 - RNA, 19 nt, Artificial Sequence
  Description of Artificial Sequence: Synthetic oligonucleotide
aaacuugaugagauaaacu

SEQ ID NO: 3135703 - RNA, 19 nt, Artificial Sequence
  Description of Artificial Sequence: Synthetic oligonucleotide
aacuucaccuugacggcgc

SEQ ID NO: 3135704 - RNA, 19 nt, Artificial Sequence
  Description of Artificial Sequence: Synthetic oligonucleotide
uacccuugcacuuuguaau

SEQ ID NO: 3135705 - RNA, 19 nt, Artificial Sequence
  Description of Artificial Sequence: Synthetic oligonucleotide
uuucuuagcuacccuugca

SEQ ID NO: 3135706 - RNA, 19 nt, Artificial Sequence
  Description of Artificial Sequence: Synthetic oligonucleotide
gaucgaaaacgcuccccgg

SEQ ID NO: 3135707 - RNA, 19 nt, Artificial Sequence
  Description of Artificial Sequence: Synthetic oligonucleotide
ucuuagcuacccuugcacu

SEQ ID NO: 3135708 - RNA, 19 nt, Artificial Sequence
  Description of Artificial Sequence: Synthetic oligonucleotide
uugcacuuuguaauuucac

SEQ ID NO: 3135709 - RNA, 19 nt, Artificial Sequence
  Description of Artificial Sequence: Synthetic oligonucleotide
uucaccuugacggcgcgag

SEQ ID NO: 3135710 - RNA, 19 nt, Artificial Sequence
  Description of Artificial Sequence: Synthetic oligonucleotide
uuugccugugccauccauc

SEQ ID NO: 3135711 - RNA, 19 nt, Artificial Sequence
  Description of Artificial Sequence: Synthetic oligonucleotide
uugccugugccauccaucu

SEQ ID NO: 3135712 - RNA, 19 nt, Artificial Sequence
  Description of Artificial Sequence: Synthetic oligonucleotide
uggcccgcgagucacacac

SEQ ID NO: 3135713 - RNA, 19 nt, Artificial Sequence
  Description of Artificial Sequence: Synthetic oligonucleotide
augagauaaacuucaccuu

SEQ ID NO: 3135714 - RNA, 19 nt, Artificial Sequence
  Description of Artificial Sequence: Synthetic oligonucleotide
ucgaaaacgcuccccggcu

SEQ ID NO: 3135715 - RNA, 19 nt, Artificial Sequence
  Description of Artificial Sequence: Synthetic oligonucleotide
uugaugagauaaacuucac

SEQ ID NO: 3135716 - RNA, 19 nt, Artificial Sequence
  Description of Artificial Sequence: Synthetic oligonucleotide
acacacggccgucugcacg

SEQ ID NO: 3135717 - RNA, 19 nt, Artificial Sequence
  Description of Artificial Sequence: Synthetic oligonucleotide
acguggugaucgaaaacgc

SEQ ID NO: 3135718 - RNA, 19 nt, Artificial Sequence
  Description of Artificial Sequence: Synthetic oligonucleotide
accuugacggcgcgagggc

SEQ ID NO: 3135719 - RNA, 19 nt, Artificial Sequence
  Description of Artificial Sequence: Synthetic oligonucleotide
aacgcuccccggcuucccg

SEQ ID NO: 3135720 - RNA, 19 nt, Artificial Sequence
  Description of Artificial Sequence: Synthetic oligonucleotide
ugcacguggugaucgaaaa

SEQ ID NO: 3135721 - RNA, 19 nt, Artificial Sequence
  Description of Artificial Sequence: Synthetic oligonucleotide
cacaaacuugaugagauaa

SEQ ID NO: 3135722 - RNA, 19 nt, Artificial Sequence
  Description of Artificial Sequence: Synthetic oligonucleotide
gagauaaacuucaccuuga

SEQ ID NO: 3135723 - RNA, 19 nt, Artificial Sequence
  Description of Artificial Sequence: Synthetic oligonucleotide
cuuuguaauuucacaaacu

SEQ ID NO: 3135724 - RNA, 19 nt, Artificial Sequence
  Description of Artificial Sequence: Synthetic oligonucleotide
agggcgucggcccuccccg

SEQ ID NO: 3135725 - RNA, 19 nt, Artificial Sequence
  Description of Artificial Sequence: Synthetic oligonucleotide
guggugaucgaaaacgcuc

SEQ ID NO: 3135726 - RNA, 19 nt, Artificial Sequence
  Description of Artificial Sequence: Synthetic oligonucleotide
ucacacacggccgucugca

SEQ ID NO: 3135727 - RNA, 19 nt, Artificial Sequence
  Description of Artificial Sequence: Synthetic oligonucleotide
gaaaacgcuccccggcuuc

SEQ ID NO: 3135728 - RNA, 19 nt, Artificial Sequence
  Description of Artificial Sequence: Synthetic oligonucleotide
uuuugccugugccauccau

SEQ ID NO: 3135729 - RNA, 19 nt, Artificial Sequence
  Description of Artificial Sequence: Synthetic oligonucleotide
aaacgcuccccggcuuccc

SEQ ID NO: 3135730 - RNA, 19 nt, Artificial Sequence
  Description of Artificial Sequence: Synthetic oligonucleotide
ucaccuugacggcgcgagg

SEQ ID NO: 3135731 - RNA, 19 nt, Artificial Sequence
  Description of Artificial Sequence: Synthetic oligonucleotide
caccuugacggcgcgaggg

SEQ ID NO: 3135732 - RNA, 19 nt, Artificial Sequence
  Description of Artificial Sequence: Synthetic oligonucleotide
cuccccgguacccuggccc

SEQ ID NO: 3135733 - RNA, 19 nt, Artificial Sequence
  Description of Artificial Sequence: Synthetic oligonucleotide
cuacccuugcacuuuguaa

SEQ ID NO: 3135734 - RNA, 19 nt, Artificial Sequence
  Description of Artificial Sequence: Synthetic oligonucleotide
acuucaccuugacggcgcg

SEQ ID NO: 3135735 - RNA, 19 nt, Artificial Sequence
  Description of Artificial Sequence: Synthetic oligonucleotide
uccccgguacccuggcccg

SEQ ID NO: 3135736 - RNA, 19 nt, Artificial Sequence
  Description of Artificial Sequence: Synthetic oligonucleotide
ucacaaacuugaugagaua

SEQ ID NO: 3135737 - RNA, 19 nt, Artificial Sequence
  Description of Artificial Sequence: Synthetic oligonucleotide
uuagcuacccuugcacuuu

SEQ ID NO: 3135738 - RNA, 19 nt, Artificial Sequence
  Description of Artificial Sequence: Synthetic oligonucleotide
cuucccgucacuggacgcc

SEQ ID NO: 3135739 - RNA, 19 nt, Artificial Sequence
  Description of Artificial Sequence: Synthetic oligonucleotide
uagcuacccuugcacuuug

SEQ ID NO: 3135740 - RNA, 19 nt, Artificial Sequence
  Description of Artificial Sequence: Synthetic oligonucleotide
agucacacacggccgucug

SEQ ID NO: 3135741 - RNA, 19 nt, Artificial Sequence
  Description of Artificial Sequence: Synthetic oligonucleotide
ggugaucgaaaacgcuccc

SEQ ID NO: 3135742 - RNA, 19 nt, Artificial Sequence
  Description of Artificial Sequence: Synthetic oligonucleotide
gagggcgucggcccucccc

SEQ ID NO: 3135743 - RNA, 19 nt, Artificial Sequence
  Description of Artificial Sequence: Synthetic oligonucleotide
ccgcgagucacacacggcc

SEQ ID NO: 3135744 - RNA, 19 nt, Artificial Sequence
  Description of Artificial Sequence: Synthetic oligonucleotide
ggcuucccgucacuggacg

SEQ ID NO: 3135745 - RNA, 19 nt, Artificial Sequence
  Description of Artificial Sequence: Synthetic oligonucleotide
gucacacacggccgucugc

SEQ ID NO: 3135746 - RNA, 19 nt, Artificial Sequence
  Description of Artificial Sequence: Synthetic oligonucleotide
acccuugcacuuuguaauu

SEQ ID NO: 3135747 - RNA, 19 nt, Artificial Sequence
  Description of Artificial Sequence: Synthetic oligonucleotide
ucugcacguggugaucgaa

SEQ ID NO: 3135748 - RNA, 19 nt, Artificial Sequence
  Description of Artificial Sequence: Synthetic oligonucleotide
gacggcgcgagggcgucgg

SEQ ID NO: 3135749 - RNA, 19 nt, Artificial Sequence
  Description of Artificial Sequence: Synthetic oligonucleotide
ccuugcacuuuguaauuuc

SEQ ID NO: 3135750 - RNA, 19 nt, Artificial Sequence
  Description of Artificial Sequence: Synthetic oligonucleotide
acccuggcccgcgagucac

SEQ ID NO: 3135751 - RNA, 19 nt, Artificial Sequence
  Description of Artificial Sequence: Synthetic oligonucleotide
gcccgcgagucacacacgg

SEQ ID NO: 3135752 - RNA, 19 nt, Artificial Sequence
  Description of Artificial Sequence: Synthetic oligonucleotide
uacccuggcccgcgaguca

SEQ ID NO: 3135753 - RNA, 19 nt, Artificial Sequence
  Description of Artificial Sequence: Synthetic oligonucleotide
uucccgucacuggacgcca

SEQ ID NO: 3135754 - RNA, 19 nt, Artificial Sequence
  Description of Artificial Sequence: Synthetic oligonucleotide
cuuagcuacccuugcacuu

SEQ ID NO: 3135755 - RNA, 19 nt, Artificial Sequence
  Description of Artificial Sequence: Synthetic oligonucleotide
guaauuucacaaacuugau

SEQ ID NO: 3135756 - RNA, 19 nt, Artificial Sequence
  Description of Artificial Sequence: Synthetic oligonucleotide
cugcacguggugaucgaaa

SEQ ID NO: 3135757 - RNA, 19 nt, Artificial Sequence
  Description of Artificial Sequence: Synthetic oligonucleotide
ggcgcgagggcgucggccc

SEQ ID NO: 3135758 - RNA, 19 nt, Artificial Sequence
  Description of Artificial Sequence: Synthetic oligonucleotide
guacccuggcccgcgaguc

SEQ ID NO: 3135759 - RNA, 19 nt, Artificial Sequence
  Description of Artificial Sequence: Synthetic oligonucleotide
cacggccgucugcacgugg

SEQ ID NO: 3135760 - RNA, 19 nt, Artificial Sequence
  Description of Artificial Sequence: Synthetic oligonucleotide
gcacguggugaucgaaaac

SEQ ID NO: 3135761 - RNA, 19 nt, Artificial Sequence
  Description of Artificial Sequence: Synthetic oligonucleotide
ucggcccuccccgguaccc

SEQ ID NO: 3135762 - RNA, 19 nt, Artificial Sequence
  Description of Artificial Sequence: Synthetic oligonucleotide
cacacacggccgucugcac

SEQ ID NO: 3135763 - RNA, 19 nt, Artificial Sequence
  Description of Artificial Sequence: Synthetic oligonucleotide
gcuucccgucacuggacgc

SEQ ID NO: 3135764 - RNA, 19 nt, Artificial Sequence
  Description of Artificial Sequence: Synthetic oligonucleotide
cacacggccgucugcacgu

SEQ ID NO: 3135765 - RNA, 19 nt, Artificial Sequence
  Description of Artificial Sequence: Synthetic oligonucleotide
cgcgagucacacacggccg

SEQ ID NO: 3135766 - RNA, 19 nt, Artificial Sequence
  Description of Artificial Sequence: Synthetic oligonucleotide
cgucugcacguggugaucg

SEQ ID NO: 3135767 - RNA, 19 nt, Artificial Sequence
  Description of Artificial Sequence: Synthetic oligonucleotide
gucugcacguggugaucga

SEQ ID NO: 3135768 - RNA, 19 nt, Artificial Sequence
  Description of Artificial Sequence: Synthetic oligonucleotide
acgcuccccggcuucccgu

SEQ ID NO: 3135769 - RNA, 19 nt, Artificial Sequence
  Description of Artificial Sequence: Synthetic oligonucleotide
ugccugugccauccaucuu

SEQ ID NO: 3135770 - RNA, 19 nt, Artificial Sequence
  Description of Artificial Sequence: Synthetic oligonucleotide
cuugacggcgcgagggcgu

SEQ ID NO: 3135771 - RNA, 19 nt, Artificial Sequence
  Description of Artificial Sequence: Synthetic oligonucleotide
ccuugacggcgcgagggcg

SEQ ID NO: 3135772 - RNA, 19 nt, Artificial Sequence
  Description of Artificial Sequence: Synthetic oligonucleotide
acggcgcgagggcgucggc

SEQ ID NO: 3135773 - RNA, 19 nt, Artificial Sequence
  Description of Artificial Sequence: Synthetic oligonucleotide
acggccgucugcacguggu

SEQ ID NO: 3135774 - RNA, 19 nt, Artificial Sequence
  Description of Artificial Sequence: Synthetic oligonucleotide
uugacggcgcgagggcguc

SEQ ID NO: 3135775 - RNA, 19 nt, Artificial Sequence
  Description of Artificial Sequence: Synthetic oligonucleotide
ugacggcgcgagggcgucg

SEQ ID NO: 3135776 - RNA, 19 nt, Artificial Sequence
  Description of Artificial Sequence: Synthetic oligonucleotide
cuccccggcuucccgucac

SEQ ID NO: 3135777 - RNA, 19 nt, Artificial Sequence
  Description of Artificial Sequence: Synthetic oligonucleotide
uccccggcuucccgucacu

SEQ ID NO: 3135778 - RNA, 19 nt, Artificial Sequence
  Description of Artificial Sequence: Synthetic oligonucleotide
cccggcuucccgucacugg

SEQ ID NO: 3135779 - RNA, 19 nt, Artificial Sequence
  Description of Artificial Sequence: Synthetic oligonucleotide
gcuacccuugcacuuugua

SEQ ID NO: 3135780 - RNA, 19 nt, Artificial Sequence
  Description of Artificial Sequence: Synthetic oligonucleotide
gagucacacacggccgucu

SEQ ID NO: 3135781 - RNA, 19 nt, Artificial Sequence
  Description of Artificial Sequence: Synthetic oligonucleotide
ucccgucacuggacgccau

SEQ ID NO: 3135782 - RNA, 19 nt, Artificial Sequence
  Description of Artificial Sequence: Synthetic oligonucleotide
gucggcccuccccgguacc

SEQ ID NO: 3135783 - RNA, 19 nt, Artificial Sequence
  Description of Artificial Sequence: Synthetic oligonucleotide
ccggcuucccgucacugga

SEQ ID NO: 3135784 - RNA, 19 nt, Artificial Sequence
  Description of Artificial Sequence: Synthetic oligonucleotide
cccgcgagucacacacggc

SEQ ID NO: 3135785 - RNA, 19 nt, Artificial Sequence
  Description of Artificial Sequence: Synthetic oligonucleotide
agcuacccuugcacuuugu

SEQ ID NO: 3135786 - RNA, 19 nt, Artificial Sequence
  Description of Artificial Sequence: Synthetic oligonucleotide
cuucaccuugacggcgcga

SEQ ID NO: 3135787 - RNA, 19 nt, Artificial Sequence
  Description of Artificial Sequence: Synthetic oligonucleotide
ggcccuccccgguacccug

SEQ ID NO: 3135788 - RNA, 19 nt, Artificial Sequence
  Description of Artificial Sequence: Synthetic oligonucleotide
gguacccuggcccgcgagu

SEQ ID NO: 3135789 - RNA, 19 nt, Artificial Sequence
  Description of Artificial Sequence: Synthetic oligonucleotide
ggccgucugcacgugguga

SEQ ID NO: 3135790 - RNA, 19 nt, Artificial Sequence
  Description of Artificial Sequence: Synthetic oligonucleotide
acacggccgucugcacgug

SEQ ID NO: 3135791 - RNA, 19 nt, Artificial Sequence
  Description of Artificial Sequence: Synthetic oligonucleotide
cuggcccgcgagucacaca

SEQ ID NO: 3135792 - RNA, 19 nt, Artificial Sequence
  Description of Artificial Sequence: Synthetic oligonucleotide
gcgagucacacacggccgu

SEQ ID NO: 3135793 - RNA, 19 nt, Artificial Sequence
  Description of Artificial Sequence: Synthetic oligonucleotide
gggcgucggcccuccccgg

SEQ ID NO: 3135794 - RNA, 19 nt, Artificial Sequence
  Description of Artificial Sequence: Synthetic oligonucleotide
cccgguacccuggcccgcg

SEQ ID NO: 3135795 - RNA, 19 nt, Artificial Sequence
  Description of Artificial Sequence: Synthetic oligonucleotide
ggcccgcgagucacacacg

SEQ ID NO: 3135796 - RNA, 19 nt, Artificial Sequence
  Description of Artificial Sequence: Synthetic oligonucleotide
ccuggcccgcgagucacac

SEQ ID NO: 3135797 - RNA, 19 nt, Artificial Sequence
  Description of Artificial Sequence: Synthetic oligonucleotide
cguggugaucgaaaacgcu

SEQ ID NO: 3135798 - RNA, 19 nt, Artificial Sequence
  Description of Artificial Sequence: Synthetic oligonucleotide
gcccuccccgguacccugg

SEQ ID NO: 3135799 - RNA, 19 nt, Artificial Sequence
  Description of Artificial Sequence: Synthetic oligonucleotide
gccgucugcacguggugau

SEQ ID NO: 3135800 - RNA, 19 nt, Artificial Sequence
  Description of Artificial Sequence: Synthetic oligonucleotide
ccuccccgguacccuggcc

SEQ ID NO: 3135801 - RNA, 19 nt, Artificial Sequence
  Description of Artificial Sequence: Synthetic oligonucleotide
cccuccccgguacccuggc

SEQ ID NO: 3135802 - RNA, 19 nt, Artificial Sequence
  Description of Artificial Sequence: Synthetic oligonucleotide
cggcuucccgucacuggac

SEQ ID NO: 3135803 - RNA, 19 nt, Artificial Sequence
  Description of Artificial Sequence: Synthetic oligonucleotide
gcuccccggcuucccguca

SEQ ID NO: 3135804 - RNA, 19 nt, Artificial Sequence
  Description of Artificial Sequence: Synthetic oligonucleotide
gcgagggcgucggcccucc

SEQ ID NO: 3135805 - RNA, 19 nt, Artificial Sequence
  Description of Artificial Sequence: Synthetic oligonucleotide
ccgucugcacguggugauc

SEQ ID NO: 3135806 - RNA, 19 nt, Artificial Sequence
  Description of Artificial Sequence: Synthetic oligonucleotide
cgucggcccuccccgguac

SEQ ID NO: 3135807 - RNA, 19 nt, Artificial Sequence
  Description of Artificial Sequence: Synthetic oligonucleotide
cgagucacacacggccguc

SEQ ID NO: 3135808 - RNA, 19 nt, Artificial Sequence
  Description of Artificial Sequence: Synthetic oligonucleotide
cgguacccuggcccgcgag

SEQ ID NO: 3135809 - RNA, 19 nt, Artificial Sequence
  Description of Artificial Sequence: Synthetic oligonucleotide
ccccggcuucccgucacug

SEQ ID NO: 3135810 - RNA, 19 nt, Artificial Sequence
  Description of Artificial Sequence: Synthetic oligonucleotide
cggccgucugcacguggug

SEQ ID NO: 3135811 - RNA, 19 nt, Artificial Sequence
  Description of Artificial Sequence: Synthetic oligonucleotide
cgcuccccggcuucccguc

SEQ ID NO: 3135812 - RNA, 19 nt, Artificial Sequence
  Description of Artificial Sequence: Synthetic oligonucleotide
ggcgucggcccuccccggu

SEQ ID NO: 3135813 - RNA, 19 nt, Artificial Sequence
  Description of Artificial Sequence: Synthetic oligonucleotide
gcgucggcccuccccggua

SEQ ID NO: 3135814 - RNA, 19 nt, Artificial Sequence
  Description of Artificial Sequence: Synthetic oligonucleotide
ccccgguacccuggcccgc

SEQ ID NO: 3135815 - RNA, 19 nt, Artificial Sequence
  Description of Artificial Sequence: Synthetic oligonucleotide
cccuugcacuuuguaauuu

SEQ ID NO: 3135816 - RNA, 19 nt, Artificial Sequence
  Description of Artificial Sequence: Synthetic oligonucleotide
cgaaaacgcuccccggcuu

SEQ ID NO: 3135817 - RNA, 19 nt, Artificial Sequence
  Description of Artificial Sequence: Synthetic oligonucleotide
cccuggcccgcgagucaca

SEQ ID NO: 3135818 - RNA, 19 nt, Artificial Sequence
  Description of Artificial Sequence: Synthetic oligonucleotide
ccgguacccuggcccgcga

SEQ ID NO: 3135819 - RNA, 19 nt, Artificial Sequence
  Description of Artificial Sequence: Synthetic oligonucleotide
gcgcgagggcgucggcccu

SEQ ID NO: 3135820 - RNA, 19 nt, Artificial Sequence
  Description of Artificial Sequence: Synthetic oligonucleotide
cgagggcgucggcccuccc

SEQ ID NO: 3135821 - RNA, 19 nt, Artificial Sequence
  Description of Artificial Sequence: Synthetic oligonucleotide
cgcgagggcgucggcccuc

SEQ ID NO: 3135822 - RNA, 19 nt, Artificial Sequence
  Description of Artificial Sequence: Synthetic oligonucleotide
cggcccuccccgguacccu

SEQ ID NO: 3135823 - RNA, 19 nt, Artificial Sequence
  Description of Artificial Sequence: Synthetic oligonucleotide
  modified_base (17)..(17): a, c, u, g, unknown or other
auugcugacacuuauangg

SEQ ID NO: 3135824 - RNA, 19 nt, Artificial Sequence
  Description of Artificial Sequence: Synthetic oligonucleotide
auuucaugaauucggaagg

SEQ ID NO: 3135825 - RNA, 19 nt, Artificial Sequence
  Description of Artificial Sequence: Synthetic oligonucleotide
ucugcaaugaaguggaaug

SEQ ID NO: 3135826 - RNA, 19 nt, Artificial Sequence
  Description of Artificial Sequence: Synthetic oligonucleotide
uguaucugcaaugaagugg

SEQ ID NO: 3135827 - RNA, 19 nt, Artificial Sequence
  Description of Artificial Sequence: Synthetic oligonucleotide
aaguggaaugacugaaggc

SEQ ID NO: 3135828 - RNA, 19 nt, Artificial Sequence
  Description of Artificial Sequence: Synthetic oligonucleotide
aacugggacagaugaaggc

SEQ ID NO: 3135829 - RNA, 19 nt, Artificial Sequence
  Description of Artificial Sequence: Synthetic oligonucleotide
gaaguggaaugacugaagg

SEQ ID NO: 3135830 - RNA, 19 nt, Artificial Sequence
  Description of Artificial Sequence: Synthetic oligonucleotide
aacgaggaugacuguaggc

SEQ ID NO: 3135831 - RNA, 19 nt, Artificial Sequence
  Description of Artificial Sequence: Synthetic oligonucleotide
augacuguaggcuuuccac

SEQ ID NO: 3135832 - RNA, 19 nt, Artificial Sequence
  Description of Artificial Sequence: Synthetic oligonucleotide
ucguguaucugcaaugaag

SEQ ID NO: 3135833 - RNA, 19 nt, Artificial Sequence
  Description of Artificial Sequence: Synthetic oligonucleotide
auucggaaggaacugggac

SEQ ID NO: 3135834 - RNA, 19 nt, Artificial Sequence
  Description of Artificial Sequence: Synthetic oligonucleotide
agugugaccuauuucauga

SEQ ID NO: 3135835 - RNA, 19 nt, Artificial Sequence
  Description of Artificial Sequence: Synthetic oligonucleotide
aaugaaguggaaugacuga

SEQ ID NO: 3135836 - RNA, 19 nt, Artificial Sequence
  Description of Artificial Sequence: Synthetic oligonucleotide
uucgaagugaacgaggaug

SEQ ID NO: 3135837 - RNA, 19 nt, Artificial Sequence
  Description of Artificial Sequence: Synthetic oligonucleotide
aagugaacgaggaugacug

SEQ ID NO: 3135838 - RNA, 19 nt, Artificial Sequence
  Description of Artificial Sequence: Synthetic oligonucleotide
ugaacgaggaugacuguag

SEQ ID NO: 3135839 - RNA, 19 nt, Artificial Sequence
  Description of Artificial Sequence: Synthetic oligonucleotide
caaugaaguggaaugacug

SEQ ID NO: 3135840 - RNA, 19 nt, Artificial Sequence
  Description of Artificial Sequence: Synthetic oligonucleotide
aguggaaugacugaaggcu

SEQ ID NO: 3135841 - RNA, 19 nt, Artificial Sequence
  Description of Artificial Sequence: Synthetic oligonucleotide
acuccuugcauucguaggg

SEQ ID NO: 3135842 - RNA, 19 nt, Artificial Sequence
  Description of Artificial Sequence: Synthetic oligonucleotide
uucugugugagugugaccu

SEQ ID NO: 3135843 - RNA, 19 nt, Artificial Sequence
  Description of Artificial Sequence: Synthetic oligonucleotide
gugagugugaccuauuuca

SEQ ID NO: 3135844 - RNA, 19 nt, Artificial Sequence
  Description of Artificial Sequence: Synthetic oligonucleotide
ugaaguggaaugacugaag

SEQ ID NO: 3135845 - RNA, 19 nt, Artificial Sequence
  Description of Artificial Sequence: Synthetic oligonucleotide
accuauuucaugaauucgg

SEQ ID NO: 3135846 - RNA, 19 nt, Artificial Sequence
  Description of Artificial Sequence: Synthetic oligonucleotide
ucgaagugaacgaggauga

SEQ ID NO: 3135847 - RNA, 19 nt, Artificial Sequence
  Description of Artificial Sequence: Synthetic oligonucleotide
ugaauucggaaggaacugg

SEQ ID NO: 3135848 - RNA, 19 nt, Artificial Sequence
  Description of Artificial Sequence: Synthetic oligonucleotide
aggcuuuccacauugcuga

SEQ ID NO: 3135849 - RNA, 19 nt, Artificial Sequence
  Description of Artificial Sequence: Synthetic oligonucleotide
  modified_base (16)..(16): a, c, u, g, unknown or other
uugcugacacuuauanggu

SEQ ID NO: 3135850 - RNA, 19 nt, Artificial Sequence
  Description of Artificial Sequence: Synthetic oligonucleotide
  modified_base (19)..(19): a, c, u, g, unknown or other
acauugcugacacuuauan

SEQ ID NO: 3135851 - RNA, 19 nt, Artificial Sequence
  Description of Artificial Sequence: Synthetic oligonucleotide
uucggaaggaacugggaca

SEQ ID NO: 3135852 - RNA, 19 nt, Artificial Sequence
  Description of Artificial Sequence: Synthetic oligonucleotide
gaauucggaaggaacuggg

SEQ ID NO: 3135853 - RNA, 19 nt, Artificial Sequence
  Description of Artificial Sequence: Synthetic oligonucleotide
ugaccuauuucaugaauuc

SEQ ID NO: 3135854 - RNA, 19 nt, Artificial Sequence
  Description of Artificial Sequence: Synthetic oligonucleotide
gaccuauuucaugaauucg

SEQ ID NO: 3135855 - RNA, 19 nt, Artificial Sequence
  Description of Artificial Sequence: Synthetic oligonucleotide
gacagaugaaggcucuccc

SEQ ID NO: 3135856 - RNA, 19 nt, Artificial Sequence
  Description of Artificial Sequence: Synthetic oligonucleotide
gaacgaggaugacuguagg

SEQ ID NO: 3135857 - RNA, 19 nt, Artificial Sequence
  Description of Artificial Sequence: Synthetic oligonucleotide
ugacuguaggcuuuccaca

SEQ ID NO: 3135858 - RNA, 19 nt, Artificial Sequence
  Description of Artificial Sequence: Synthetic oligonucleotide
uuuucuucugugugagugu

SEQ ID NO: 3135859 - RNA, 19 nt, Artificial Sequence
  Description of Artificial Sequence: Synthetic oligonucleotide
gaacugggacagaugaagg

SEQ ID NO: 3135860 - RNA, 19 nt, Artificial Sequence
  Description of Artificial Sequence: Synthetic oligonucleotide
ugugagugugaccuauuuc

SEQ ID NO: 3135861 - RNA, 19 nt, Artificial Sequence
  Description of Artificial Sequence: Synthetic oligonucleotide
guaucugcaaugaagugga

SEQ ID NO: 3135862 - RNA, 19 nt, Artificial Sequence
  Description of Artificial Sequence: Synthetic oligonucleotide
ugugaccuauuucaugaau

SEQ ID NO: 3135863 - RNA, 19 nt, Artificial Sequence
  Description of Artificial Sequence: Synthetic oligonucleotide
  modified_base (18)..(18): a, c, u, g, unknown or other
cauugcugacacuuauang

SEQ ID NO: 3135864 - RNA, 19 nt, Artificial Sequence
  Description of Artificial Sequence: Synthetic oligonucleotide
aaggcucucccacacuccu

SEQ ID NO: 3135865 - RNA, 19 nt, Artificial Sequence
  Description of Artificial Sequence: Synthetic oligonucleotide
uuucuucugugugagugug

SEQ ID NO: 3135866 - RNA, 19 nt, Artificial Sequence
  Description of Artificial Sequence: Synthetic oligonucleotide
ucuucugugugagugugac

SEQ ID NO: 3135867 - RNA, 19 nt, Artificial Sequence
  Description of Artificial Sequence: Synthetic oligonucleotide
cacuccuugcauucguagg

SEQ ID NO: 3135868 - RNA, 19 nt, Artificial Sequence
  Description of Artificial Sequence: Synthetic oligonucleotide
gagugugaccuauuucaug

SEQ ID NO: 3135869 - RNA, 19 nt, Artificial Sequence
  Description of Artificial Sequence: Synthetic oligonucleotide
acgaggaugacuguaggcu

SEQ ID NO: 3135870 - RNA, 19 nt, Artificial Sequence
  Description of Artificial Sequence: Synthetic oligonucleotide
ggaacugggacagaugaag

SEQ ID NO: 3135871 - RNA, 19 nt, Artificial Sequence
  Description of Artificial Sequence: Synthetic oligonucleotide
cuguaggcuuuccacauug

SEQ ID NO: 3135872 - RNA, 19 nt, Artificial Sequence
  Description of Artificial Sequence: Synthetic oligonucleotide
augaauucggaaggaacug

SEQ ID NO: 3135873 - RNA, 19 nt, Artificial Sequence
  Description of Artificial Sequence: Synthetic oligonucleotide
ucucguguaucugcaauga

SEQ ID NO: 3135874 - RNA, 19 nt, Artificial Sequence
  Description of Artificial Sequence: Synthetic oligonucleotide
uuucaugaauucggaagga

SEQ ID NO: 3135875 - RNA, 19 nt, Artificial Sequence
  Description of Artificial Sequence: Synthetic oligonucleotide
ugcaaugaaguggaaugac

SEQ ID NO: 3135876 - RNA, 19 nt, Artificial Sequence
  Description of Artificial Sequence: Synthetic oligonucleotide
caugaauucggaaggaacu

SEQ ID NO: 3135877 - RNA, 19 nt, Artificial Sequence
  Description of Artificial Sequence: Synthetic oligonucleotide
acagaugaaggcucuccca

SEQ ID NO: 3135878 - RNA, 19 nt, Artificial Sequence
  Description of Artificial Sequence: Synthetic oligonucleotide
uuccacauugcugacacuu

SEQ ID NO: 3135879 - RNA, 19 nt, Artificial Sequence
  Description of Artificial Sequence: Synthetic oligonucleotide
acugggacagaugaaggcu

SEQ ID NO: 3135880 - RNA, 19 nt, Artificial Sequence
  Description of Artificial Sequence: Synthetic oligonucleotide
ugagugugaccuauuucau

SEQ ID NO: 3135881 - RNA, 19 nt, Artificial Sequence
  Description of Artificial Sequence: Synthetic oligonucleotide
cucucguguaucugcaaug

SEQ ID NO: 3135882 - RNA, 19 nt, Artificial Sequence
  Description of Artificial Sequence: Synthetic oligonucleotide
uguggguucucucguguau

SEQ ID NO: 3135883 - RNA, 19 nt, Artificial Sequence
  Description of Artificial Sequence: Synthetic oligonucleotide
aauucggaaggaacuggga

SEQ ID NO: 3135884 - RNA, 19 nt, Artificial Sequence
  Description of Artificial Sequence: Synthetic oligonucleotide
augaaguggaaugacugaa

SEQ ID NO: 3135885 - RNA, 19 nt, Artificial Sequence
  Description of Artificial Sequence: Synthetic oligonucleotide
guguaucugcaaugaagug

SEQ ID NO: 3135886 - RNA, 19 nt, Artificial Sequence
  Description of Artificial Sequence: Synthetic oligonucleotide
uggaaugacugaaggcuuu

SEQ ID NO: 3135887 - RNA, 19 nt, Artificial Sequence
  Description of Artificial Sequence: Synthetic oligonucleotide
ugggacagaugaaggcucu

SEQ ID NO: 3135888 - RNA, 19 nt, Artificial Sequence
  Description of Artificial Sequence: Synthetic oligonucleotide
uggguucucucguguaucu

SEQ ID NO: 3135889 - RNA, 19 nt, Artificial Sequence
  Description of Artificial Sequence: Synthetic oligonucleotide
cuauuucaugaauucggaa

SEQ ID NO: 3135890 - RNA, 19 nt, Artificial Sequence
  Description of Artificial Sequence: Synthetic oligonucleotide
uucuucugugugaguguga

SEQ ID NO: 3135891 - RNA, 19 nt, Artificial Sequence
  Description of Artificial Sequence: Synthetic oligonucleotide
cgugccuucgaagugaacg

SEQ ID NO: 3135892 - RNA, 19 nt, Artificial Sequence
  Description of Artificial Sequence: Synthetic oligonucleotide
ugccuucgaagugaacgag

SEQ ID NO: 3135893 - RNA, 19 nt, Artificial Sequence
  Description of Artificial Sequence: Synthetic oligonucleotide
uccacauugcugacacuua

SEQ ID NO: 3135894 - RNA, 19 nt, Artificial Sequence
  Description of Artificial Sequence: Synthetic oligonucleotide
uccuugcauucguagggcu

SEQ ID NO: 3135895 - RNA, 19 nt, Artificial Sequence
  Description of Artificial Sequence: Synthetic oligonucleotide
gaagugaacgaggaugacu

SEQ ID NO: 3135896 - RNA, 19 nt, Artificial Sequence
  Description of Artificial Sequence: Synthetic oligonucleotide
cuucugugugagugugacc

SEQ ID NO: 3135897 - RNA, 19 nt, Artificial Sequence
  Description of Artificial Sequence: Synthetic oligonucleotide
aucugcaaugaaguggaau

SEQ ID NO: 3135898 - RNA, 19 nt, Artificial Sequence
  Description of Artificial Sequence: Synthetic oligonucleotide
gugccuucgaagugaacga

SEQ ID NO: 3135899 - RNA, 19 nt, Artificial Sequence
  Description of Artificial Sequence: Synthetic oligonucleotide
agugaacgaggaugacugu

SEQ ID NO: 3135900 - RNA, 19 nt, Artificial Sequence
  Description of Artificial Sequence: Synthetic oligonucleotide
aggaugacuguaggcuuuc

SEQ ID NO: 3135901 - RNA, 19 nt, Artificial Sequence
  Description of Artificial Sequence: Synthetic oligonucleotide
gaaggcucucccacacucc

SEQ ID NO: 3135902 - RNA, 19 nt, Artificial Sequence
  Description of Artificial Sequence: Synthetic oligonucleotide
  modified_base (15)..(15): a, c, u, g, unknown or other
ugcugacacuuauangguu

SEQ ID NO: 3135903 - RNA, 19 nt, Artificial Sequence
  Description of Artificial Sequence: Synthetic oligonucleotide
uucgugccuucgaagugaa

SEQ ID NO: 3135904 - RNA, 19 nt, Artificial Sequence
  Description of Artificial Sequence: Synthetic oligonucleotide
cuccuugcauucguagggc

SEQ ID NO: 3135905 - RNA, 19 nt, Artificial Sequence
  Description of Artificial Sequence: Synthetic oligonucleotide
gaaugacugaaggcuuuuc

SEQ ID NO: 3135906 - RNA, 19 nt, Artificial Sequence
  Description of Artificial Sequence: Synthetic oligonucleotide
ugugugagugugaccuauu

SEQ ID NO: 3135907 - RNA, 19 nt, Artificial Sequence
  Description of Artificial Sequence: Synthetic oligonucleotide
ggcucucccacacuccuug

SEQ ID NO: 3135908 - RNA, 19 nt, Artificial Sequence
  Description of Artificial Sequence: Synthetic oligonucleotide
ccuauuucaugaauucgga

SEQ ID NO: 3135909 - RNA, 19 nt, Artificial Sequence
  Description of Artificial Sequence: Synthetic oligonucleotide
guaggcuuuccacauugcu

SEQ ID NO: 3135910 - RNA, 19 nt, Artificial Sequence
  Description of Artificial Sequence: Synthetic oligonucleotide
ggacagaugaaggcucucc

SEQ ID NO: 3135911 - RNA, 19 nt, Artificial Sequence
  Description of Artificial Sequence: Synthetic oligonucleotide
cugcaaugaaguggaauga

SEQ ID NO: 3135912 - RNA, 19 nt, Artificial Sequence
  Description of Artificial Sequence: Synthetic oligonucleotide
ucugugugagugugaccua

SEQ ID NO: 3135913 - RNA, 19 nt, Artificial Sequence
  Description of Artificial Sequence: Synthetic oligonucleotide
uaucugcaaugaaguggaa

SEQ ID NO: 3135914 - RNA, 19 nt, Artificial Sequence
  Description of Artificial Sequence: Synthetic oligonucleotide
gccuucgaagugaacgagg

SEQ ID NO: 3135915 - RNA, 19 nt, Artificial Sequence
  Description of Artificial Sequence: Synthetic oligonucleotide
acuguaggcuuuccacauu

SEQ ID NO: 3135916 - RNA, 19 nt, Artificial Sequence
  Description of Artificial Sequence: Synthetic oligonucleotide
ccuucgaagugaacgagga

SEQ ID NO: 3135917 - RNA, 19 nt, Artificial Sequence
  Description of Artificial Sequence: Synthetic oligonucleotide
gugaacgaggaugacugua

SEQ ID NO: 3135918 - RNA, 19 nt, Artificial Sequence
  Description of Artificial Sequence: Synthetic oligonucleotide
cacauugcugacacuuaua

SEQ ID NO: 3135919 - RNA, 19 nt, Artificial Sequence
  Description of Artificial Sequence: Synthetic oligonucleotide
gugaccuauuucaugaauu

SEQ ID NO: 3135920 - RNA, 19 nt, Artificial Sequence
  Description of Artificial Sequence: Synthetic oligonucleotide
guggguucucucguguauc

SEQ ID NO: 3135921 - RNA, 19 nt, Artificial Sequence
  Description of Artificial Sequence: Synthetic oligonucleotide
cguguaucugcaaugaagu

SEQ ID NO: 3135922 - RNA, 19 nt, Artificial Sequence
  Description of Artificial Sequence: Synthetic oligonucleotide
  modified_base (13)..(13): a, c, u, g, unknown or other
cugacacuuauangguuuu

SEQ ID NO: 3135923 - RNA, 19 nt, Artificial Sequence
  Description of Artificial Sequence: Synthetic oligonucleotide
  modified_base (14)..(14): a, c, u, g, unknown or other
gcugacacuuauangguuu

SEQ ID NO: 3135924 - RNA, 19 nt, Artificial Sequence
  Description of Artificial Sequence: Synthetic oligonucleotide
cucguguaucugcaaugaa

SEQ ID NO: 3135925 - RNA, 19 nt, Artificial Sequence
  Description of Artificial Sequence: Synthetic oligonucleotide
ucgugccuucgaagugaac

SEQ ID NO: 3135926 - RNA, 19 nt, Artificial Sequence
  Description of Artificial Sequence: Synthetic oligonucleotide
gugugagugugaccuauuu

SEQ ID NO: 3135927 - RNA, 19 nt, Artificial Sequence
  Description of Artificial Sequence: Synthetic oligonucleotide
ugcauucguagggcuucuc

SEQ ID NO: 3135928 - RNA, 19 nt, Artificial Sequence
  Description of Artificial Sequence: Synthetic oligonucleotide
guguggguucucucgugua

SEQ ID NO: 3135929 - RNA, 19 nt, Artificial Sequence
  Description of Artificial Sequence: Synthetic oligonucleotide
ggaaggaacugggacagau

SEQ ID NO: 3135930 - RNA, 19 nt, Artificial Sequence
  Description of Artificial Sequence: Synthetic oligonucleotide
gaggaugacuguaggcuuu

SEQ ID NO: 3135931 - RNA, 19 nt, Artificial Sequence
  Description of Artificial Sequence: Synthetic oligonucleotide
ggcuuuccacauugcugac

SEQ ID NO: 3135932 - RNA, 19 nt, Artificial Sequence
  Description of Artificial Sequence: Synthetic oligonucleotide
guggaaugacugaaggcuu

SEQ ID NO: 3135933 - RNA, 19 nt, Artificial Sequence
  Description of Artificial Sequence: Synthetic oligonucleotide
ggaugacuguaggcuuucc

SEQ ID NO: 3135934 - RNA, 19 nt, Artificial Sequence
  Description of Artificial Sequence: Synthetic oligonucleotide
ggguucucucguguaucug

SEQ ID NO: 3135935 - RNA, 19 nt, Artificial Sequence
  Description of Artificial Sequence: Synthetic oligonucleotide
cuucgaagugaacgaggau

SEQ ID NO: 3135936 - RNA, 19 nt, Artificial Sequence
  Description of Artificial Sequence: Synthetic oligonucleotide
cugugugagugugaccuau

SEQ ID NO: 3135937 - RNA, 19 nt, Artificial Sequence
  Description of Artificial Sequence: Synthetic oligonucleotide
gggacagaugaaggcucuc

SEQ ID NO: 3135938 - RNA, 19 nt, Artificial Sequence
  Description of Artificial Sequence: Synthetic oligonucleotide
ccacauugcugacacuuau

SEQ ID NO: 3135939 - RNA, 19 nt, Artificial Sequence
  Description of Artificial Sequence: Synthetic oligonucleotide
ggaaugacugaaggcuuuu

SEQ ID NO: 3135940 - RNA, 19 nt, Artificial Sequence
  Description of Artificial Sequence: Synthetic oligonucleotide
cgaagugaacgaggaugac

SEQ ID NO: 3135941 - RNA, 19 nt, Artificial Sequence
  Description of Artificial Sequence: Synthetic oligonucleotide
aggcucucccacacuccuu

SEQ ID NO: 3135942 - RNA, 19 nt, Artificial Sequence
  Description of Artificial Sequence: Synthetic oligonucleotide
ccuugcauucguagggcuu

SEQ ID NO: 3135943 - RNA, 19 nt, Artificial Sequence
  Description of Artificial Sequence: Synthetic oligonucleotide
cgaggaugacuguaggcuu

SEQ ID NO: 3135944 - RNA, 19 nt, Artificial Sequence
  Description of Artificial Sequence: Synthetic oligonucleotide
aauuaugacauaugcaucg

SEQ ID NO: 3135945 - RNA, 19 nt, Artificial Sequence
  Description of Artificial Sequence: Synthetic oligonucleotide
auaauuaugacauaugcau

SEQ ID NO: 3135946 - RNA, 19 nt, Artificial Sequence
  Description of Artificial Sequence: Synthetic oligonucleotide
ucauaauuaugacauaugc

SEQ ID NO: 3135947 - RNA, 19 nt, Artificial Sequence
  Description of Artificial Sequence: Synthetic oligonucleotide
aauguuaccagaugcuggg

SEQ ID NO: 3135948 - RNA, 19 nt, Artificial Sequence
  Description of Artificial Sequence: Synthetic oligonucleotide
auucucuaacaucacaucc

SEQ ID NO: 3135949 - RNA, 19 nt, Artificial Sequence
  Description of Artificial Sequence: Synthetic oligonucleotide
ucuaacaucacauccacgu

SEQ ID NO: 3135950 - RNA, 19 nt, Artificial Sequence
  Description of Artificial Sequence: Synthetic oligonucleotide
aagcauuuaccaaaggagc

SEQ ID NO: 3135951 - RNA, 19 nt, Artificial Sequence
  Description of Artificial Sequence: Synthetic oligonucleotide
aauucucuaacaucacauc

SEQ ID NO: 3135952 - RNA, 19 nt, Artificial Sequence
  Description of Artificial Sequence: Synthetic oligonucleotide
gaagcauuuaccaaaggag

SEQ ID NO: 3135953 - RNA, 19 nt, Artificial Sequence
  Description of Artificial Sequence: Synthetic oligonucleotide
auugcgguaauucucuaac

SEQ ID NO: 3135954 - RNA, 19 nt, Artificial Sequence
  Description of Artificial Sequence: Synthetic oligonucleotide
aagacauucucauaauuau

SEQ ID NO: 3135955 - RNA, 19 nt, Artificial Sequence
  Description of Artificial Sequence: Synthetic oligonucleotide
accaaaggagcauucauuc

SEQ ID NO: 3135956 - RNA, 19 nt, Artificial Sequence
  Description of Artificial Sequence: Synthetic oligonucleotide
agucuagacauucccauuc

SEQ ID NO: 3135957 - RNA, 19 nt, Artificial Sequence
  Description of Artificial Sequence: Synthetic oligonucleotide
aucgguucccuacaaagac

SEQ ID NO: 3135958 - RNA, 19 nt, Artificial Sequence
  Description of Artificial Sequence: Synthetic oligonucleotide
uaauucucuaacaucacau

SEQ ID NO: 3135959 - RNA, 19 nt, Artificial Sequence
  Description of Artificial Sequence: Synthetic oligonucleotide
acaaagacuagauugcggu

SEQ ID NO: 3135960 - RNA, 19 nt, Artificial Sequence
  Description of Artificial Sequence: Synthetic oligonucleotide
uacaaagacuagauugcgg

SEQ ID NO: 3135961 - RNA, 19 nt, Artificial Sequence
  Description of Artificial Sequence: Synthetic oligonucleotide
auaugcaucgguucccuac

SEQ ID NO: 3135962 - RNA, 19 nt, Artificial Sequence
  Description of Artificial Sequence: Synthetic oligonucleotide
augacauaugcaucgguuc

SEQ ID NO: 3135963 - RNA, 19 nt, Artificial Sequence
  Description of Artificial Sequence: Synthetic oligonucleotide
ugacauaugcaucgguucc

SEQ ID NO: 3135964 - RNA, 19 nt, Artificial Sequence
  Description of Artificial Sequence: Synthetic oligonucleotide
auucucauaauuaugacau

SEQ ID NO: 3135965 - RNA, 19 nt, Artificial Sequence
  Description of Artificial Sequence: Synthetic oligonucleotide
uucucuaacaucacaucca

SEQ ID NO: 3135966 - RNA, 19 nt, Artificial Sequence
  Description of Artificial Sequence: Synthetic oligonucleotide
aaggagcauucauucuucc

SEQ ID NO: 3135967 - RNA, 19 nt, Artificial Sequence
  Description of Artificial Sequence: Synthetic oligonucleotide
acauucucauaauuaugac

SEQ ID NO: 3135968 - RNA, 19 nt, Artificial Sequence
  Description of Artificial Sequence: Synthetic oligonucleotide
ucauucuuccuucuucuug

SEQ ID NO: 3135969 - RNA, 19 nt, Artificial Sequence
  Description of Artificial Sequence: Synthetic oligonucleotide
gaauguuaccagaugcugg

SEQ ID NO: 3135970 - RNA, 19 nt, Artificial Sequence
  Description of Artificial Sequence: Synthetic oligonucleotide
gacauucucauaauuauga

SEQ ID NO: 3135971 - RNA, 19 nt, Artificial Sequence
  Description of Artificial Sequence: Synthetic oligonucleotide
uaauuaugacauaugcauc

SEQ ID NO: 3135972 - RNA, 19 nt, Artificial Sequence
  Description of Artificial Sequence: Synthetic oligonucleotide
uagauugcgguaauucucu

SEQ ID NO: 3135973 - RNA, 19 nt, Artificial Sequence
  Description of Artificial Sequence: Synthetic oligonucleotide
uucccauuccuccugggag

SEQ ID NO: 3135974 - RNA, 19 nt, Artificial Sequence
  Description of Artificial Sequence: Synthetic oligonucleotide
cauaauuaugacauaugca

SEQ ID NO: 3135975 - RNA, 19 nt, Artificial Sequence
  Description of Artificial Sequence: Synthetic oligonucleotide
ugauccaagacauucucau

SEQ ID NO: 3135976 - RNA, 19 nt, Artificial Sequence
  Description of Artificial Sequence: Synthetic oligonucleotide
acauccacguacaaagccc

SEQ ID NO: 3135977 - RNA, 19 nt, Artificial Sequence
  Description of Artificial Sequence: Synthetic oligonucleotide
auccaagacauucucauaa

SEQ ID NO: 3135978 - RNA, 19 nt, Artificial Sequence
  Description of Artificial Sequence: Synthetic oligonucleotide
aaaggagcauucauucuuc

SEQ ID NO: 3135979 - RNA, 19 nt, Artificial Sequence
  Description of Artificial Sequence: Synthetic oligonucleotide
acuagauugcgguaauucu

SEQ ID NO: 3135980 - RNA, 19 nt, Artificial Sequence
  Description of Artificial Sequence: Synthetic oligonucleotide
uaugacauaugcaucgguu

SEQ ID NO: 3135981 - RNA, 19 nt, Artificial Sequence
  Description of Artificial Sequence: Synthetic oligonucleotide
ucucuaacaucacauccac

SEQ ID NO: 3135982 - RNA, 19 nt, Artificial Sequence
  Description of Artificial Sequence: Synthetic oligonucleotide
ucucauaauuaugacauau

SEQ ID NO: 3135983 - RNA, 19 nt, Artificial Sequence
  Description of Artificial Sequence: Synthetic oligonucleotide
aaagacuagauugcgguaa

SEQ ID NO: 3135984 - RNA, 19 nt, Artificial Sequence
  Description of Artificial Sequence: Synthetic oligonucleotide
cuagauugcgguaauucuc

SEQ ID NO: 3135985 - RNA, 19 nt, Artificial Sequence
  Description of Artificial Sequence: Synthetic oligonucleotide
ugaauguuaccagaugcug

SEQ ID NO: 3135986 - RNA, 19 nt, Artificial Sequence
  Description of Artificial Sequence: Synthetic oligonucleotide
guacaaagcccucugagca

SEQ ID NO: 3135987 - RNA, 19 nt, Artificial Sequence
  Description of Artificial Sequence: Synthetic oligonucleotide
cucauaauuaugacauaug

SEQ ID NO: 3135988 - RNA, 19 nt, Artificial Sequence
  Description of Artificial Sequence: Synthetic oligonucleotide
ucugagcacagucuagaca

SEQ ID NO: 3135989 - RNA, 19 nt, Artificial Sequence
  Description of Artificial Sequence: Synthetic oligonucleotide
ugggaagcauuuaccaaag

SEQ ID NO: 3135990 - RNA, 19 nt, Artificial Sequence
  Description of Artificial Sequence: Synthetic oligonucleotide
ugcgguaauucucuaacau

SEQ ID NO: 3135991 - RNA, 19 nt, Artificial Sequence
  Description of Artificial Sequence: Synthetic oligonucleotide
cccuacaaagacuagauug

SEQ ID NO: 3135992 - RNA, 19 nt, Artificial Sequence
  Description of Artificial Sequence: Synthetic oligonucleotide
uaugcaucgguucccuaca

SEQ ID NO: 3135993 - RNA, 19 nt, Artificial Sequence
  Description of Artificial Sequence: Synthetic oligonucleotide
ugcugggaagcauuuacca

SEQ ID NO: 3135994 - RNA, 19 nt, Artificial Sequence
  Description of Artificial Sequence: Synthetic oligonucleotide
cauucucauaauuaugaca

SEQ ID NO: 3135995 - RNA, 19 nt, Artificial Sequence
  Description of Artificial Sequence: Synthetic oligonucleotide
acguacaaagcccucugag

SEQ ID NO: 3135996 - RNA, 19 nt, Artificial Sequence
  Description of Artificial Sequence: Synthetic oligonucleotide
uucccuacaaagacuagau

SEQ ID NO: 3135997 - RNA, 19 nt, Artificial Sequence
  Description of Artificial Sequence: Synthetic oligonucleotide
guuaccagaugcugggaag

SEQ ID NO: 3135998 - RNA, 19 nt, Artificial Sequence
  Description of Artificial Sequence: Synthetic oligonucleotide
uuaccaaaggagcauucau

SEQ ID NO: 3135999 - RNA, 19 nt, Artificial Sequence
  Description of Artificial Sequence: Synthetic oligonucleotide
cauucauucuuccuucuuc

SEQ ID NO: 3136000 - RNA, 19 nt, Artificial Sequence
  Description of Artificial Sequence: Synthetic oligonucleotide
auuaugacauaugcaucgg

SEQ ID NO: 3136001 - RNA, 19 nt, Artificial Sequence
  Description of Artificial Sequence: Synthetic oligonucleotide
cacauccacguacaaagcc

SEQ ID NO: 3136002 - RNA, 19 nt, Artificial Sequence
  Description of Artificial Sequence: Synthetic oligonucleotide
ccuacaaagacuagauugc

SEQ ID NO: 3136003 - RNA, 19 nt, Artificial Sequence
  Description of Artificial Sequence: Synthetic oligonucleotide
uuuaccaaaggagcauuca

SEQ ID NO: 3136004 - RNA, 19 nt, Artificial Sequence
  Description of Artificial Sequence: Synthetic oligonucleotide
uugauccaagacauucuca

SEQ ID NO: 3136005 - RNA, 19 nt, Artificial Sequence
  Description of Artificial Sequence: Synthetic oligonucleotide
uuaugacauaugcaucggu

SEQ ID NO: 3136006 - RNA, 19 nt, Artificial Sequence
  Description of Artificial Sequence: Synthetic oligonucleotide
cuacaaagacuagauugcg

SEQ ID NO: 3136007 - RNA, 19 nt, Artificial Sequence
  Description of Artificial Sequence: Synthetic oligonucleotide
uguuaccagaugcugggaa

SEQ ID NO: 3136008 - RNA, 19 nt, Artificial Sequence
  Description of Artificial Sequence: Synthetic oligonucleotide
cuagacauucccauuccuc

SEQ ID NO: 3136009 - RNA, 19 nt, Artificial Sequence
  Description of Artificial Sequence: Synthetic oligonucleotide
ccugaauguuaccagaugc

SEQ ID NO: 3136010 - RNA, 19 nt, Artificial Sequence
  Description of Artificial Sequence: Synthetic oligonucleotide
acagucuagacauucccau

SEQ ID NO: 3136011 - RNA, 19 nt, Artificial Sequence
  Description of Artificial Sequence: Synthetic oligonucleotide
ggaagcauuuaccaaagga

SEQ ID NO: 3136012 - RNA, 19 nt, Artificial Sequence
  Description of Artificial Sequence: Synthetic oligonucleotide
ucuagacauucccauuccu

SEQ ID NO: 3136013 - RNA, 19 nt, Artificial Sequence
  Description of Artificial Sequence: Synthetic oligonucleotide
gacuagauugcgguaauuc

SEQ ID NO: 3136014 - RNA, 19 nt, Artificial Sequence
  Description of Artificial Sequence: Synthetic oligonucleotide
cugggagagguccacagac

SEQ ID NO: 3136015 - RNA, 19 nt, Artificial Sequence
  Description of Artificial Sequence: Synthetic oligonucleotide
uuaccagaugcugggaagc

SEQ ID NO: 3136016 - RNA, 19 nt, Artificial Sequence
  Description of Artificial Sequence: Synthetic oligonucleotide
ucacauccacguacaaagc

SEQ ID NO: 3136017 - RNA, 19 nt, Artificial Sequence
  Description of Artificial Sequence: Synthetic oligonucleotide
aagacuagauugcgguaau

SEQ ID NO: 3136018 - RNA, 19 nt, Artificial Sequence
  Description of Artificial Sequence: Synthetic oligonucleotide
gagcauucauucuuccuuc

SEQ ID NO: 3136019 - RNA, 19 nt, Artificial Sequence
  Description of Artificial Sequence: Synthetic oligonucleotide
gcaucgguucccuacaaag

SEQ ID NO: 3136020 - RNA, 19 nt, Artificial Sequence
  Description of Artificial Sequence: Synthetic oligonucleotide
auuuaccaaaggagcauuc

SEQ ID NO: 3136021 - RNA, 19 nt, Artificial Sequence
  Description of Artificial Sequence: Synthetic oligonucleotide
agcacagucuagacauucc

SEQ ID NO: 3136022 - RNA, 19 nt, Artificial Sequence
  Description of Artificial Sequence: Synthetic oligonucleotide
agcauuuaccaaaggagca

SEQ ID NO: 3136023 - RNA, 19 nt, Artificial Sequence
  Description of Artificial Sequence: Synthetic oligonucleotide
gacauaugcaucgguuccc

SEQ ID NO: 3136024 - RNA, 19 nt, Artificial Sequence
  Description of Artificial Sequence: Synthetic oligonucleotide
cucuaacaucacauccacg

SEQ ID NO: 3136025 - RNA, 19 nt, Artificial Sequence
  Description of Artificial Sequence: Synthetic oligonucleotide
ucgguucccuacaaagacu

SEQ ID NO: 3136026 - RNA, 19 nt, Artificial Sequence
  Description of Artificial Sequence: Synthetic oligonucleotide
cugggaagcauuuaccaaa

SEQ ID NO: 3136027 - RNA, 19 nt, Artificial Sequence
  Description of Artificial Sequence: Synthetic oligonucleotide
augcugggaagcauuuacc

SEQ ID NO: 3136028 - RNA, 19 nt, Artificial Sequence
  Description of Artificial Sequence: Synthetic oligonucleotide
agacauucucauaauuaug

SEQ ID NO: 3136029 - RNA, 19 nt, Artificial Sequence
  Description of Artificial Sequence: Synthetic oligonucleotide
uugcgguaauucucuaaca

SEQ ID NO: 3136030 - RNA, 19 nt, Artificial Sequence
  Description of Artificial Sequence: Synthetic oligonucleotide
gucuagacauucccauucc

SEQ ID NO: 3136031 - RNA, 19 nt, Artificial Sequence
  Description of Artificial Sequence: Synthetic oligonucleotide
agacauucccauuccuccu

SEQ ID NO: 3136032 - RNA, 19 nt, Artificial Sequence
  Description of Artificial Sequence: Synthetic oligonucleotide
auucccauuccuccuggga

SEQ ID NO: 3136033 - RNA, 19 nt, Artificial Sequence
  Description of Artificial Sequence: Synthetic oligonucleotide
agguccacagacacauccc

SEQ ID NO: 3136034 - RNA, 19 nt, Artificial Sequence
  Description of Artificial Sequence: Synthetic oligonucleotide
ucccauuccuccugggaga

SEQ ID NO: 3136035 - RNA, 19 nt, Artificial Sequence
  Description of Artificial Sequence: Synthetic oligonucleotide
ucccugaauguuaccagau

SEQ ID NO: 3136036 - RNA, 19 nt, Artificial Sequence
  Description of Artificial Sequence: Synthetic oligonucleotide
uccaagacauucucauaau

SEQ ID NO: 3136037 - RNA, 19 nt, Artificial Sequence
  Description of Artificial Sequence: Synthetic oligonucleotide
ugggagagguccacagaca

SEQ ID NO: 3136038 - RNA, 19 nt, Artificial Sequence
  Description of Artificial Sequence: Synthetic oligonucleotide
aggagcauucauucuuccu

SEQ ID NO: 3136039 - RNA, 19 nt, Artificial Sequence
  Description of Artificial Sequence: Synthetic oligonucleotide
gauugcgguaauucucuaa

SEQ ID NO: 3136040 - RNA, 19 nt, Artificial Sequence
  Description of Artificial Sequence: Synthetic oligonucleotide
uccacguacaaagcccucu

SEQ ID NO: 3136041 - RNA, 19 nt, Artificial Sequence
  Description of Artificial Sequence: Synthetic oligonucleotide
agcauucauucuuccuucu

SEQ ID NO: 3136042 - RNA, 19 nt, Artificial Sequence
  Description of Artificial Sequence: Synthetic oligonucleotide
cauucuuccuucuucuugu

SEQ ID NO: 3136043 - RNA, 19 nt, Artificial Sequence
  Description of Artificial Sequence: Synthetic oligonucleotide
guucccuacaaagacuaga

SEQ ID NO: 3136044 - RNA, 19 nt, Artificial Sequence
  Description of Artificial Sequence: Synthetic oligonucleotide
cacagucuagacauuccca

SEQ ID NO: 3136045 - RNA, 19 nt, Artificial Sequence
  Description of Artificial Sequence: Synthetic oligonucleotide
cucugagcacagucuagac

SEQ ID NO: 3136046 - RNA, 19 nt, Artificial Sequence
  Description of Artificial Sequence: Synthetic oligonucleotide
caucgguucccuacaaaga

SEQ ID NO: 3136047 - RNA, 19 nt, Artificial Sequence
  Description of Artificial Sequence: Synthetic oligonucleotide
uucucauaauuaugacaua

SEQ ID NO: 3136048 - RNA, 19 nt, Artificial Sequence
  Description of Artificial Sequence: Synthetic oligonucleotide
gcacagucuagacauuccc

SEQ ID NO: 3136049 - RNA, 19 nt, Artificial Sequence
  Description of Artificial Sequence: Synthetic oligonucleotide
gagcacagucuagacauuc

SEQ ID NO: 3136050 - RNA, 19 nt, Artificial Sequence
  Description of Artificial Sequence: Synthetic oligonucleotide
gagagguccacagacacau

SEQ ID NO: 3136051 - RNA, 19 nt, Artificial Sequence
  Description of Artificial Sequence: Synthetic oligonucleotide
cgguaauucucuaacauca

SEQ ID NO: 3136052 - RNA, 19 nt, Artificial Sequence
  Description of Artificial Sequence: Synthetic oligonucleotide
gggagagguccacagacac

SEQ ID NO: 3136053 - RNA, 19 nt, Artificial Sequence
  Description of Artificial Sequence: Synthetic oligonucleotide
ugcaucgguucccuacaaa

SEQ ID NO: 3136054 - RNA, 19 nt, Artificial Sequence
  Description of Artificial Sequence: Synthetic oligonucleotide
cugaauguuaccagaugcu

SEQ ID NO: 3136055 - RNA, 19 nt, Artificial Sequence
  Description of Artificial Sequence: Synthetic oligonucleotide
gauccaagacauucucaua

SEQ ID NO: 3136056 - RNA, 19 nt, Artificial Sequence
  Description of Artificial Sequence: Synthetic oligonucleotide
ucccuacaaagacuagauu

SEQ ID NO: 3136057 - RNA, 19 nt, Artificial Sequence
  Description of Artificial Sequence: Synthetic oligonucleotide
uucauucuuccuucuucuu

SEQ ID NO: 3136058 - RNA, 19 nt, Artificial Sequence
  Description of Artificial Sequence: Synthetic oligonucleotide
acauaugcaucgguucccu

SEQ ID NO: 3136059 - RNA, 19 nt, Artificial Sequence
  Description of Artificial Sequence: Synthetic oligonucleotide
caaaggagcauucauucuu

SEQ ID NO: 3136060 - RNA, 19 nt, Artificial Sequence
  Description of Artificial Sequence: Synthetic oligonucleotide
uaccagaugcugggaagca

SEQ ID NO: 3136061 - RNA, 19 nt, Artificial Sequence
  Description of Artificial Sequence: Synthetic oligonucleotide
gcgguaauucucuaacauc

SEQ ID NO: 3136062 - RNA, 19 nt, Artificial Sequence
  Description of Artificial Sequence: Synthetic oligonucleotide
cacaucccugaauguuacc

SEQ ID NO: 3136063 - RNA, 19 nt, Artificial Sequence
  Description of Artificial Sequence: Synthetic oligonucleotide
gggaagcauuuaccaaagg

SEQ ID NO: 3136064 - RNA, 19 nt, Artificial Sequence
  Description of Artificial Sequence: Synthetic oligonucleotide
cuaacaucacauccacgua

SEQ ID NO: 3136065 - RNA, 19 nt, Artificial Sequence
  Description of Artificial Sequence: Synthetic oligonucleotide
caaagacuagauugcggua

SEQ ID NO: 3136066 - RNA, 19 nt, Artificial Sequence
  Description of Artificial Sequence: Synthetic oligonucleotide
ggagcauucauucuuccuu

SEQ ID NO: 3136067 - RNA, 19 nt, Artificial Sequence
  Description of Artificial Sequence: Synthetic oligonucleotide
ugagcacagucuagacauu

SEQ ID NO: 3136068 - RNA, 19 nt, Artificial Sequence
  Description of Artificial Sequence: Synthetic oligonucleotide
cauccacguacaaagcccu

SEQ ID NO: 3136069 - RNA, 19 nt, Artificial Sequence
  Description of Artificial Sequence: Synthetic oligonucleotide
guccacagacacaucccug

SEQ ID NO: 3136070 - RNA, 19 nt, Artificial Sequence
  Description of Artificial Sequence: Synthetic oligonucleotide
agauugcgguaauucucua

SEQ ID NO: 3136071 - RNA, 19 nt, Artificial Sequence
  Description of Artificial Sequence: Synthetic oligonucleotide
cauuccuccugggagaggu

SEQ ID NO: 3136072 - RNA, 19 nt, Artificial Sequence
  Description of Artificial Sequence: Synthetic oligonucleotide
gcugggaagcauuuaccaa

SEQ ID NO: 3136073 - RNA, 19 nt, Artificial Sequence
  Description of Artificial Sequence: Synthetic oligonucleotide
cacguacaaagcccucuga

SEQ ID NO: 3136074 - RNA, 19 nt, Artificial Sequence
  Description of Artificial Sequence: Synthetic oligonucleotide
augcaucgguucccuacaa

SEQ ID NO: 3136075 - RNA, 19 nt, Artificial Sequence
  Description of Artificial Sequence: Synthetic oligonucleotide
auguuaccagaugcuggga

SEQ ID NO: 3136076 - RNA, 19 nt, Artificial Sequence
  Description of Artificial Sequence: Synthetic oligonucleotide
auccacguacaaagcccuc

SEQ ID NO: 3136077 - RNA, 19 nt, Artificial Sequence
  Description of Artificial Sequence: Synthetic oligonucleotide
accagaugcugggaagcau

SEQ ID NO: 3136078 - RNA, 19 nt, Artificial Sequence
  Description of Artificial Sequence: Synthetic oligonucleotide
cccugaauguuaccagaug

SEQ ID NO: 3136079 - RNA, 19 nt, Artificial Sequence
  Description of Artificial Sequence: Synthetic oligonucleotide
agagguccacagacacauc

SEQ ID NO: 3136080 - RNA, 19 nt, Artificial Sequence
  Description of Artificial Sequence: Synthetic oligonucleotide
auuccuccugggagagguc

SEQ ID NO: 3136081 - RNA, 19 nt, Artificial Sequence
  Description of Artificial Sequence: Synthetic oligonucleotide
ccacguacaaagcccucug

SEQ ID NO: 3136082 - RNA, 19 nt, Artificial Sequence
  Description of Artificial Sequence: Synthetic oligonucleotide
gguucccuacaaagacuag

SEQ ID NO: 3136083 - RNA, 19 nt, Artificial Sequence
  Description of Artificial Sequence: Synthetic oligonucleotide
agacuagauugcgguaauu

SEQ ID NO: 3136084 - RNA, 19 nt, Artificial Sequence
  Description of Artificial Sequence: Synthetic oligonucleotide
cagacacaucccugaaugu

SEQ ID NO: 3136085 - RNA, 19 nt, Artificial Sequence
  Description of Artificial Sequence: Synthetic oligonucleotide
cauuuaccaaaggagcauu

SEQ ID NO: 3136086 - RNA, 19 nt, Artificial Sequence
  Description of Artificial Sequence: Synthetic oligonucleotide
cauaugcaucgguucccua

SEQ ID NO: 3136087 - RNA, 19 nt, Artificial Sequence
  Description of Artificial Sequence: Synthetic oligonucleotide
gcauuuaccaaaggagcau

SEQ ID NO: 3136088 - RNA, 19 nt, Artificial Sequence
  Description of Artificial Sequence: Synthetic oligonucleotide
cacagacacaucccugaau

SEQ ID NO: 3136089 - RNA, 19 nt, Artificial Sequence
  Description of Artificial Sequence: Synthetic oligonucleotide
cccauuccuccugggagag

SEQ ID NO: 3136090 - RNA, 19 nt, Artificial Sequence
  Description of Artificial Sequence: Synthetic oligonucleotide
ccucugagcacagucuaga

SEQ ID NO: 3136091 - RNA, 19 nt, Artificial Sequence
  Description of Artificial Sequence: Synthetic oligonucleotide
cagucuagacauucccauu

SEQ ID NO: 3136092 - RNA, 19 nt, Artificial Sequence
  Description of Artificial Sequence: Synthetic oligonucleotide
ccaaaggagcauucauucu

SEQ ID NO: 3136093 - RNA, 19 nt, Artificial Sequence
  Description of Artificial Sequence: Synthetic oligonucleotide
ccaagacauucucauaauu

SEQ ID NO: 3136094 - RNA, 19 nt, Artificial Sequence
  Description of Artificial Sequence: Synthetic oligonucleotide
gcauucauucuuccuucuu

SEQ ID NO: 3136095 - RNA, 19 nt, Artificial Sequence
  Description of Artificial Sequence: Synthetic oligonucleotide
ccagaugcugggaagcauu

SEQ ID NO: 3136096 - RNA, 19 nt, Artificial Sequence
  Description of Artificial Sequence: Synthetic oligonucleotide
ccacagacacaucccugaa

SEQ ID NO: 3136097 - RNA, 19 nt, Artificial Sequence
  Description of Artificial Sequence: Synthetic oligonucleotide
ccauuccuccugggagagg

SEQ ID NO: 3136098 - RNA, 19 nt, Artificial Sequence
  Description of Artificial Sequence: Synthetic oligonucleotide
cauagaauuauuuucauug

SEQ ID NO: 3136099 - RNA, 19 nt, Artificial Sequence
  Description of Artificial Sequence: Synthetic oligonucleotide
aauuauuuucauugcuacg

SEQ ID NO: 3136100 - RNA, 19 nt, Artificial Sequence
  Description of Artificial Sequence: Synthetic oligonucleotide
auagaauuauuuucauugc

SEQ ID NO: 3136101 - RNA, 19 nt, Artificial Sequence
  Description of Artificial Sequence: Synthetic oligonucleotide
cauucaauccccaaagggg

SEQ ID NO: 3136102 - RNA, 19 nt, Artificial Sequence
  Description of Artificial Sequence: Synthetic oligonucleotide
gaaagggucauucaauccc

SEQ ID NO: 3136103 - RNA, 19 nt, Artificial Sequence
  Description of Artificial Sequence: Synthetic oligonucleotide
gaauuauuuucauugcuac

SEQ ID NO: 3136104 - RNA, 19 nt, Artificial Sequence
  Description of Artificial Sequence: Synthetic oligonucleotide
auugcuacgucauaacugu

SEQ ID NO: 3136105 - RNA, 19 nt, Artificial Sequence
  Description of Artificial Sequence: Synthetic oligonucleotide
uaucuguauuuuccuaugg

SEQ ID NO: 3136106 - RNA, 19 nt, Artificial Sequence
  Description of Artificial Sequence: Synthetic oligonucleotide
uagaauuauuuucauugcu

SEQ ID NO: 3136107 - RNA, 19 nt, Artificial Sequence
  Description of Artificial Sequence: Synthetic oligonucleotide
ucuguauuuuccuaugguc

SEQ ID NO: 3136108 - RNA, 19 nt, Artificial Sequence
  Description of Artificial Sequence: Synthetic oligonucleotide
uaggcuaccccugugaaag

SEQ ID NO: 3136109 - RNA, 19 nt, Artificial Sequence
  Description of Artificial Sequence: Synthetic oligonucleotide
cauugcuacgucauaacug

SEQ ID NO: 3136110 - RNA, 19 nt, Artificial Sequence
  Description of Artificial Sequence: Synthetic oligonucleotide
ugaaagggucauucaaucc

SEQ ID NO: 3136111 - RNA, 19 nt, Artificial Sequence
  Description of Artificial Sequence: Synthetic oligonucleotide
uacgucauaacuguaauuu

SEQ ID NO: 3136112 - RNA, 19 nt, Artificial Sequence
  Description of Artificial Sequence: Synthetic oligonucleotide
uauuuucauugcuacguca

SEQ ID NO: 3136113 - RNA, 19 nt, Artificial Sequence
  Description of Artificial Sequence: Synthetic oligonucleotide
ucauugcuacgucauaacu

SEQ ID NO: 3136114 - RNA, 19 nt, Artificial Sequence
  Description of Artificial Sequence: Synthetic oligonucleotide
auaucuguauuuuccuaug

SEQ ID NO: 3136115 - RNA, 19 nt, Artificial Sequence
  Description of Artificial Sequence: Synthetic oligonucleotide
ucuuaggcuaccccuguga

SEQ ID NO: 3136116 - RNA, 19 nt, Artificial Sequence
  Description of Artificial Sequence: Synthetic oligonucleotide
uuauuuucauugcuacguc

SEQ ID NO: 3136117 - RNA, 19 nt, Artificial Sequence
  Description of Artificial Sequence: Synthetic oligonucleotide
cagccauagaauuauuuuc

SEQ ID NO: 3136118 - RNA, 19 nt, Artificial Sequence
  Description of Artificial Sequence: Synthetic oligonucleotide
uguuguggugaccuccagc

SEQ ID NO: 3136119 - RNA, 19 nt, Artificial Sequence
  Description of Artificial Sequence: Synthetic oligonucleotide
ucaauccccaaaggggucg

SEQ ID NO: 3136120 - RNA, 19 nt, Artificial Sequence
  Description of Artificial Sequence: Synthetic oligonucleotide
aucuguauuuuccuauggu

SEQ ID NO: 3136121 - RNA, 19 nt, Artificial Sequence
  Description of Artificial Sequence: Synthetic oligonucleotide
ugcuacgucauaacuguaa

SEQ ID NO: 3136122 - RNA, 19 nt, Artificial Sequence
  Description of Artificial Sequence: Synthetic oligonucleotide
gugaccuacagguugagaa

SEQ ID NO: 3136123 - RNA, 19 nt, Artificial Sequence
  Description of Artificial Sequence: Synthetic oligonucleotide
uucauugcuacgucauaac

SEQ ID NO: 3136124 - RNA, 19 nt, Artificial Sequence
  Description of Artificial Sequence: Synthetic oligonucleotide
ugaccuacagguugagaac

SEQ ID NO: 3136125 - RNA, 19 nt, Artificial Sequence
  Description of Artificial Sequence: Synthetic oligonucleotide
auucaauccccaaaggggu

SEQ ID NO: 3136126 - RNA, 19 nt, Artificial Sequence
  Description of Artificial Sequence: Synthetic oligonucleotide
aaggggucgugaccuacag

SEQ ID NO: 3136127 - RNA, 19 nt, Artificial Sequence
  Description of Artificial Sequence: Synthetic oligonucleotide
agccauagaauuauuuuca

SEQ ID NO: 3136128 - RNA, 19 nt, Artificial Sequence
  Description of Artificial Sequence: Synthetic oligonucleotide
agaauuauuuucauugcua

SEQ ID NO: 3136129 - RNA, 19 nt, Artificial Sequence
  Description of Artificial Sequence: Synthetic oligonucleotide
uuccuauggucuuaggcua

SEQ ID NO: 3136130 - RNA, 19 nt, Artificial Sequence
  Description of Artificial Sequence: Synthetic oligonucleotide
ggucgugaccuacagguug

SEQ ID NO: 3136131 - RNA, 19 nt, Artificial Sequence
  Description of Artificial Sequence: Synthetic oligonucleotide
uucaauccccaaagggguc

SEQ ID NO: 3136132 - RNA, 19 nt, Artificial Sequence
  Description of Artificial Sequence: Synthetic oligonucleotide
uccuauggucuuaggcuac

SEQ ID NO: 3136133 - RNA, 19 nt, Artificial Sequence
  Description of Artificial Sequence: Synthetic oligonucleotide
uuaggcuaccccugugaaa

SEQ ID NO: 3136134 - RNA, 19 nt, Artificial Sequence
  Description of Artificial Sequence: Synthetic oligonucleotide
cuaccccugugaaaggguc

SEQ ID NO: 3136135 - RNA, 19 nt, Artificial Sequence
  Description of Artificial Sequence: Synthetic oligonucleotide
acgucauaacuguaauuuu

SEQ ID NO: 3136136 - RNA, 19 nt, Artificial Sequence
  Description of Artificial Sequence: Synthetic oligonucleotide
uccccaaaggggucgugac

SEQ ID NO: 3136137 - RNA, 19 nt, Artificial Sequence
  Description of Artificial Sequence: Synthetic oligonucleotide
aaaggggucgugaccuaca

SEQ ID NO: 3136138 - RNA, 19 nt, Artificial Sequence
  Description of Artificial Sequence: Synthetic oligonucleotide
aggggucgugaccuacagg

SEQ ID NO: 3136139 - RNA, 19 nt, Artificial Sequence
  Description of Artificial Sequence: Synthetic oligonucleotide
ggggucgugaccuacaggu

SEQ ID NO: 3136140 - RNA, 19 nt, Artificial Sequence
  Description of Artificial Sequence: Synthetic oligonucleotide
cuuaggcuaccccugugaa

SEQ ID NO: 3136141 - RNA, 19 nt, Artificial Sequence
  Description of Artificial Sequence: Synthetic oligonucleotide
aggcuaccccugugaaagg

SEQ ID NO: 3136142 - RNA, 19 nt, Artificial Sequence
  Description of Artificial Sequence: Synthetic oligonucleotide
caaaggggucgugaccuac

SEQ ID NO: 3136143 - RNA, 19 nt, Artificial Sequence
  Description of Artificial Sequence: Synthetic oligonucleotide
gucuuaggcuaccccugug

SEQ ID NO: 3136144 - RNA, 19 nt, Artificial Sequence
  Description of Artificial Sequence: Synthetic oligonucleotide
ggcuaccccugugaaaggg

SEQ ID NO: 3136145 - RNA, 19 nt, Artificial Sequence
  Description of Artificial Sequence: Synthetic oligonucleotide
auccccaaaggggucguga

SEQ ID NO: 3136146 - RNA, 19 nt, Artificial Sequence
  Description of Artificial Sequence: Synthetic oligonucleotide
aauccccaaaggggucgug

SEQ ID NO: 3136147 - RNA, 19 nt, Artificial Sequence
  Description of Artificial Sequence: Synthetic oligonucleotide
gucgugaccuacagguuga

SEQ ID NO: 3136148 - RNA, 19 nt, Artificial Sequence
  Description of Artificial Sequence: Synthetic oligonucleotide
ucgugaccuacagguugag

SEQ ID NO: 3136149 - RNA, 19 nt, Artificial Sequence
  Description of Artificial Sequence: Synthetic oligonucleotide
gcuacgucauaacuguaau

SEQ ID NO: 3136150 - RNA, 19 nt, Artificial Sequence
  Description of Artificial Sequence: Synthetic oligonucleotide
cuacgucauaacuguaauu

SEQ ID NO: 3136151 - RNA, 19 nt, Artificial Sequence
  Description of Artificial Sequence: Synthetic oligonucleotide
ccagccauagaauuauuuu

SEQ ID NO: 3136152 - RNA, 19 nt, Artificial Sequence
  Description of Artificial Sequence: Synthetic oligonucleotide
gccauagaauuauuuucau

SEQ ID NO: 3136153 - RNA, 19 nt, Artificial Sequence
  Description of Artificial Sequence: Synthetic oligonucleotide
ccauagaauuauuuucauu

SEQ ID NO: 3136154 - RNA, 19 nt, Artificial Sequence
  Description of Artificial Sequence: Synthetic oligonucleotide
gcuaccccugugaaagggu

SEQ ID NO: 3136155 - RNA, 19 nt, Artificial Sequence
  Description of Artificial Sequence: Synthetic oligonucleotide
caauccccaaaggggucgu

SEQ ID NO: 3136156 - RNA, 19 nt, Artificial Sequence
  Description of Artificial Sequence: Synthetic oligonucleotide
cgugaccuacagguugaga

SEQ ID NO: 3136157 - RNA, 19 nt, Artificial Sequence
  Description of Artificial Sequence: Synthetic oligonucleotide
gggucgugaccuacagguu

SEQ ID NO: 3136158 - RNA, 19 nt, Artificial Sequence
  Description of Artificial Sequence: Synthetic oligonucleotide
cuguccucauuucugugcg

SEQ ID NO: 3136159 - RNA, 19 nt, Artificial Sequence
  Description of Artificial Sequence: Synthetic oligonucleotide
uugccuguccucauuucug

SEQ ID NO: 3136160 - RNA, 19 nt, Artificial Sequence
  Description of Artificial Sequence: Synthetic oligonucleotide
cauuucugugcgcaggaug

SEQ ID NO: 3136161 - RNA, 19 nt, Artificial Sequence
  Description of Artificial Sequence: Synthetic oligonucleotide
auuucugugcgcaggauga

SEQ ID NO: 3136162 - RNA, 19 nt, Artificial Sequence
  Description of Artificial Sequence: Synthetic oligonucleotide
gaaggggcgguccauggac

SEQ ID NO: 3136163 - RNA, 19 nt, Artificial Sequence
  Description of Artificial Sequence: Synthetic oligonucleotide
aggaaggggcgguccaugg

SEQ ID NO: 3136164 - RNA, 19 nt, Artificial Sequence
  Description of Artificial Sequence: Synthetic oligonucleotide
uccucauuucugugcgcag

SEQ ID NO: 3136165 - RNA, 19 nt, Artificial Sequence
  Description of Artificial Sequence: Synthetic oligonucleotide
ugccuguccucauuucugu

SEQ ID NO: 3136166 - RNA, 19 nt, Artificial Sequence
  Description of Artificial Sequence: Synthetic oligonucleotide
ccuguccucauuucugugc

SEQ ID NO: 3136167 - RNA, 19 nt, Artificial Sequence
  Description of Artificial Sequence: Synthetic oligonucleotide
uguccucauuucugugcgc

SEQ ID NO: 3136168 - RNA, 19 nt, Artificial Sequence
  Description of Artificial Sequence: Synthetic oligonucleotide
cucauuucugugcgcagga

SEQ ID NO: 3136169 - RNA, 19 nt, Artificial Sequence
  Description of Artificial Sequence: Synthetic oligonucleotide
guugccuguccucauuucu

SEQ ID NO: 3136170 - RNA, 19 nt, Artificial Sequence
  Description of Artificial Sequence: Synthetic oligonucleotide
guccucauuucugugcgca

SEQ ID NO: 3136171 - RNA, 19 nt, Artificial Sequence
  Description of Artificial Sequence: Synthetic oligonucleotide
aggggcgguccauggacug

SEQ ID NO: 3136172 - RNA, 19 nt, Artificial Sequence
  Description of Artificial Sequence: Synthetic oligonucleotide
aaggggcgguccauggacu

SEQ ID NO: 3136173 - RNA, 19 nt, Artificial Sequence
  Description of Artificial Sequence: Synthetic oligonucleotide
ccucauuucugugcgcagg

SEQ ID NO: 3136174 - RNA, 19 nt, Artificial Sequence
  Description of Artificial Sequence: Synthetic oligonucleotide
ucauuucugugcgcaggau

SEQ ID NO: 3136175 - RNA, 19 nt, Artificial Sequence
  Description of Artificial Sequence: Synthetic oligonucleotide
guagcaggaaggggcgguc

SEQ ID NO: 3136176 - RNA, 19 nt, Artificial Sequence
  Description of Artificial Sequence: Synthetic oligonucleotide
gccuguccucauuucugug

SEQ ID NO: 3136177 - RNA, 19 nt, Artificial Sequence
  Description of Artificial Sequence: Synthetic oligonucleotide
ggaaggggcgguccaugga

SEQ ID NO: 3136178 - RNA, 19 nt, Artificial Sequence
  Description of Artificial Sequence: Synthetic oligonucleotide
gcgguccauggacugcuug

SEQ ID NO: 3136179 - RNA, 19 nt, Artificial Sequence
  Description of Artificial Sequence: Synthetic oligonucleotide
ggggcgguccauggacugc

SEQ ID NO: 3136180 - RNA, 19 nt, Artificial Sequence
  Description of Artificial Sequence: Synthetic oligonucleotide
gggcgguccauggacugcu

SEQ ID NO: 3136181 - RNA, 19 nt, Artificial Sequence
  Description of Artificial Sequence: Synthetic oligonucleotide
ggcgguccauggacugcuu

SEQ ID NO: 3136182 - RNA, 19 nt, Artificial Sequence
  Description of Artificial Sequence: Synthetic oligonucleotide
uuuagcugcgguuugagcg

SEQ ID NO: 3136183 - RNA, 19 nt, Artificial Sequence
  Description of Artificial Sequence: Synthetic oligonucleotide
uguaaauucuggaagcacg

SEQ ID NO: 3136184 - RNA, 19 nt, Artificial Sequence
  Description of Artificial Sequence: Synthetic oligonucleotide
uacuucaugagauugaaga

SEQ ID NO: 3136185 - RNA, 19 nt, Artificial Sequence
  Description of Artificial Sequence: Synthetic oligonucleotide
aggaacuuuucacugagcc

SEQ ID NO: 3136186 - RNA, 19 nt, Artificial Sequence
  Description of Artificial Sequence: Synthetic oligonucleotide
aaacaagacuucaagaauc

SEQ ID NO: 3136187 - RNA, 19 nt, Artificial Sequence
  Description of Artificial Sequence: Synthetic oligonucleotide
uguuguaaauucuggaagc

SEQ ID NO: 3136188 - RNA, 19 nt, Artificial Sequence
  Description of Artificial Sequence: Synthetic oligonucleotide
aaaacaagacuucaagaau

SEQ ID NO: 3136189 - RNA, 19 nt, Artificial Sequence
  Description of Artificial Sequence: Synthetic oligonucleotide
uucaugagauugaagaucu

SEQ ID NO: 3136190 - RNA, 19 nt, Artificial Sequence
  Description of Artificial Sequence: Synthetic oligonucleotide
acugagccgagacugaccc

SEQ ID NO: 3136191 - RNA, 19 nt, Artificial Sequence
  Description of Artificial Sequence: Synthetic oligonucleotide
gagauugaagaucugcucc

SEQ ID NO: 3136192 - RNA, 19 nt, Artificial Sequence
  Description of Artificial Sequence: Synthetic oligonucleotide
ucuggaagcacguuuagcu

SEQ ID NO: 3136193 - RNA, 19 nt, Artificial Sequence
  Description of Artificial Sequence: Synthetic oligonucleotide
ucaagaaucggcuguagcu

SEQ ID NO: 3136194 - RNA, 19 nt, Artificial Sequence
  Description of Artificial Sequence: Synthetic oligonucleotide
caagacuucaagaaucggc

SEQ ID NO: 3136195 - RNA, 19 nt, Artificial Sequence
  Description of Artificial Sequence: Synthetic oligonucleotide
aacaagacuucaagaaucg

SEQ ID NO: 3136196 - RNA, 19 nt, Artificial Sequence
  Description of Artificial Sequence: Synthetic oligonucleotide
ucauguguuguaaauucug

SEQ ID NO: 3136197 - RNA, 19 nt, Artificial Sequence
  Description of Artificial Sequence: Synthetic oligonucleotide
cuucuggaacaucagaggg

SEQ ID NO: 3136198 - RNA, 19 nt, Artificial Sequence
  Description of Artificial Sequence: Synthetic oligonucleotide
uguguuguaaauucuggaa

SEQ ID NO: 3136199 - RNA, 19 nt, Artificial Sequence
  Description of Artificial Sequence: Synthetic oligonucleotide
cauguguuguaaauucugg

SEQ ID NO: 3136200 - RNA, 19 nt, Artificial Sequence
  Description of Artificial Sequence: Synthetic oligonucleotide
guguuguaaauucuggaag

SEQ ID NO: 3136201 - RNA, 19 nt, Artificial Sequence
  Description of Artificial Sequence: Synthetic oligonucleotide
aagacuucaagaaucggcu

SEQ ID NO: 3136202 - RNA, 19 nt, Artificial Sequence
  Description of Artificial Sequence: Synthetic oligonucleotide
guagcugucauacuucaug

SEQ ID NO: 3136203 - RNA, 19 nt, Artificial Sequence
  Description of Artificial Sequence: Synthetic oligonucleotide
aaauucuggaagcacguuu

SEQ ID NO: 3136204 - RNA, 19 nt, Artificial Sequence
  Description of Artificial Sequence: Synthetic oligonucleotide
uuucacugagccgagacug

SEQ ID NO: 3136205 - RNA, 19 nt, Artificial Sequence
  Description of Artificial Sequence: Synthetic oligonucleotide
gaacuuuucacugagccga

SEQ ID NO: 3136206 - RNA, 19 nt, Artificial Sequence
  Description of Artificial Sequence: Synthetic oligonucleotide
ugaagaucugcuccuggag

SEQ ID NO: 3136207 - RNA, 19 nt, Artificial Sequence
  Description of Artificial Sequence: Synthetic oligonucleotide
aagaucugcuccuggagcu

SEQ ID NO: 3136208 - RNA, 19 nt, Artificial Sequence
  Description of Artificial Sequence: Synthetic oligonucleotide
gaagaucugcuccuggagc

SEQ ID NO: 3136209 - RNA, 19 nt, Artificial Sequence
  Description of Artificial Sequence: Synthetic oligonucleotide
ucuggaacaucagagggug

SEQ ID NO: 3136210 - RNA, 19 nt, Artificial Sequence
  Description of Artificial Sequence: Synthetic oligonucleotide
ucauacuucaugagauuga

SEQ ID NO: 3136211 - RNA, 19 nt, Artificial Sequence
  Description of Artificial Sequence: Synthetic oligonucleotide
uggaagcacguuuagcugc

SEQ ID NO: 3136212 - RNA, 19 nt, Artificial Sequence
  Description of Artificial Sequence: Synthetic oligonucleotide
caugagauugaagaucugc

SEQ ID NO: 3136213 - RNA, 19 nt, Artificial Sequence
  Description of Artificial Sequence: Synthetic oligonucleotide
ugugguucuuccaggaacu

SEQ ID NO: 3136214 - RNA, 19 nt, Artificial Sequence
  Description of Artificial Sequence: Synthetic oligonucleotide
auugaagaucugcuccugg

SEQ ID NO: 3136215 - RNA, 19 nt, Artificial Sequence
  Description of Artificial Sequence: Synthetic oligonucleotide
uucaagaaucggcuguagc

SEQ ID NO: 3136216 - RNA, 19 nt, Artificial Sequence
  Description of Artificial Sequence: Synthetic oligonucleotide
aagaaucggcuguagcugu

SEQ ID NO: 3136217 - RNA, 19 nt, Artificial Sequence
  Description of Artificial Sequence: Synthetic oligonucleotide
ugagauugaagaucugcuc

SEQ ID NO: 3136218 - RNA, 19 nt, Artificial Sequence
  Description of Artificial Sequence: Synthetic oligonucleotide
acaucagagggugugguuc

SEQ ID NO: 3136219 - RNA, 19 nt, Artificial Sequence
  Description of Artificial Sequence: Synthetic oligonucleotide
uucaucaguacaguugugu

SEQ ID NO: 3136220 - RNA, 19 nt, Artificial Sequence
  Description of Artificial Sequence: Synthetic oligonucleotide
agauugaagaucugcuccu

SEQ ID NO: 3136221 - RNA, 19 nt, Artificial Sequence
  Description of Artificial Sequence: Synthetic oligonucleotide
uuccaggaacuuuucacug

SEQ ID NO: 3136222 - RNA, 19 nt, Artificial Sequence
  Description of Artificial Sequence: Synthetic oligonucleotide
ucggcuguagcugucauac

SEQ ID NO: 3136223 - RNA, 19 nt, Artificial Sequence
  Description of Artificial Sequence: Synthetic oligonucleotide
uugaagaucugcuccugga

SEQ ID NO: 3136224 - RNA, 19 nt, Artificial Sequence
  Description of Artificial Sequence: Synthetic oligonucleotide
cuucaugagauugaagauc

SEQ ID NO: 3136225 - RNA, 19 nt, Artificial Sequence
  Description of Artificial Sequence: Synthetic oligonucleotide
auguguuguaaauucugga

SEQ ID NO: 3136226 - RNA, 19 nt, Artificial Sequence
  Description of Artificial Sequence: Synthetic oligonucleotide
gucauacuucaugagauug

SEQ ID NO: 3136227 - RNA, 19 nt, Artificial Sequence
  Description of Artificial Sequence: Synthetic oligonucleotide
agcuucuggaacaucagag

SEQ ID NO: 3136228 - RNA, 19 nt, Artificial Sequence
  Description of Artificial Sequence: Synthetic oligonucleotide
uggaacaucagagggugug

SEQ ID NO: 3136229 - RNA, 19 nt, Artificial Sequence
  Description of Artificial Sequence: Synthetic oligonucleotide
aguacaguuguguuucaaa

SEQ ID NO: 3136230 - RNA, 19 nt, Artificial Sequence
  Description of Artificial Sequence: Synthetic oligonucleotide
ggaacuuuucacugagccg

SEQ ID NO: 3136231 - RNA, 19 nt, Artificial Sequence
  Description of Artificial Sequence: Synthetic oligonucleotide
aauucuggaagcacguuua

SEQ ID NO: 3136232 - RNA, 19 nt, Artificial Sequence
  Description of Artificial Sequence: Synthetic oligonucleotide
uuagcugcgguuugagcgu

SEQ ID NO: 3136233 - RNA, 19 nt, Artificial Sequence
  Description of Artificial Sequence: Synthetic oligonucleotide
uuguaaauucuggaagcac

SEQ ID NO: 3136234 - RNA, 19 nt, Artificial Sequence
  Description of Artificial Sequence: Synthetic oligonucleotide
gcuucuggaacaucagagg

SEQ ID NO: 3136235 - RNA, 19 nt, Artificial Sequence
  Description of Artificial Sequence: Synthetic oligonucleotide
guacaguuguguuucaaaa

SEQ ID NO: 3136236 - RNA, 19 nt, Artificial Sequence
  Description of Artificial Sequence: Synthetic oligonucleotide
augagauugaagaucugcu

SEQ ID NO: 3136237 - RNA, 19 nt, Artificial Sequence
  Description of Artificial Sequence: Synthetic oligonucleotide
uccaggaacuuuucacuga

SEQ ID NO: 3136238 - RNA, 19 nt, Artificial Sequence
  Description of Artificial Sequence: Synthetic oligonucleotide
ugcgguuugagcgucggga

SEQ ID NO: 3136239 - RNA, 19 nt, Artificial Sequence
  Description of Artificial Sequence: Synthetic oligonucleotide
ucaucaguacaguuguguu

SEQ ID NO: 3136240 - RNA, 19 nt, Artificial Sequence
  Description of Artificial Sequence: Synthetic oligonucleotide
caagaaucggcuguagcug

SEQ ID NO: 3136241 - RNA, 19 nt, Artificial Sequence
  Description of Artificial Sequence: Synthetic oligonucleotide
gugugguucuuccaggaac

SEQ ID NO: 3136242 - RNA, 19 nt, Artificial Sequence
  Description of Artificial Sequence: Synthetic oligonucleotide
auucuggaagcacguuuag

SEQ ID NO: 3136243 - RNA, 19 nt, Artificial Sequence
  Description of Artificial Sequence: Synthetic oligonucleotide
agacuucaagaaucggcug

SEQ ID NO: 3136244 - RNA, 19 nt, Artificial Sequence
  Description of Artificial Sequence: Synthetic oligonucleotide
agcugucauacuucaugag

SEQ ID NO: 3136245 - RNA, 19 nt, Artificial Sequence
  Description of Artificial Sequence: Synthetic oligonucleotide
gcucauguguuguaaauuc

SEQ ID NO: 3136246 - RNA, 19 nt, Artificial Sequence
  Description of Artificial Sequence: Synthetic oligonucleotide
acaagacuucaagaaucgg

SEQ ID NO: 3136247 - RNA, 19 nt, Artificial Sequence
  Description of Artificial Sequence: Synthetic oligonucleotide
aagcacguuuagcugcggu

SEQ ID NO: 3136248 - RNA, 19 nt, Artificial Sequence
  Description of Artificial Sequence: Synthetic oligonucleotide
uucacugagccgagacuga

SEQ ID NO: 3136249 - RNA, 19 nt, Artificial Sequence
  Description of Artificial Sequence: Synthetic oligonucleotide
guuguaaauucuggaagca

SEQ ID NO: 3136250 - RNA, 19 nt, Artificial Sequence
  Description of Artificial Sequence: Synthetic oligonucleotide
gacuucaagaaucggcugu

SEQ ID NO: 3136251 - RNA, 19 nt, Artificial Sequence
  Description of Artificial Sequence: Synthetic oligonucleotide
gauugaagaucugcuccug

SEQ ID NO: 3136252 - RNA, 19 nt, Artificial Sequence
  Description of Artificial Sequence: Synthetic oligonucleotide
aacaucagagggugugguu

SEQ ID NO: 3136253 - RNA, 19 nt, Artificial Sequence
  Description of Artificial Sequence: Synthetic oligonucleotide
uucuggaagcacguuuagc

SEQ ID NO: 3136254 - RNA, 19 nt, Artificial Sequence
  Description of Artificial Sequence: Synthetic oligonucleotide
uugagcgucgggaggcucu

SEQ ID NO: 3136255 - RNA, 19 nt, Artificial Sequence
  Description of Artificial Sequence: Synthetic oligonucleotide
ucaugagauugaagaucug

SEQ ID NO: 3136256 - RNA, 19 nt, Artificial Sequence
  Description of Artificial Sequence: Synthetic oligonucleotide
gcugucauacuucaugaga

SEQ ID NO: 3136257 - RNA, 19 nt, Artificial Sequence
  Description of Artificial Sequence: Synthetic oligonucleotide
ugucauacuucaugagauu

SEQ ID NO: 3136258 - RNA, 19 nt, Artificial Sequence
  Description of Artificial Sequence: Synthetic oligonucleotide
aacuuuucacugagccgag

SEQ ID NO: 3136259 - RNA, 19 nt, Artificial Sequence
  Description of Artificial Sequence: Synthetic oligonucleotide
gagcuucuggaacaucaga

SEQ ID NO: 3136260 - RNA, 19 nt, Artificial Sequence
  Description of Artificial Sequence: Synthetic oligonucleotide
cugucauacuucaugagau

SEQ ID NO: 3136261 - RNA, 19 nt, Artificial Sequence
  Description of Artificial Sequence: Synthetic oligonucleotide
aaucggcuguagcugucau

SEQ ID NO: 3136262 - RNA, 19 nt, Artificial Sequence
  Description of Artificial Sequence: Synthetic oligonucleotide
uguagcugucauacuucau

SEQ ID NO: 3136263 - RNA, 19 nt, Artificial Sequence
  Description of Artificial Sequence: Synthetic oligonucleotide
agcacguuuagcugcgguu

SEQ ID NO: 3136264 - RNA, 19 nt, Artificial Sequence
  Description of Artificial Sequence: Synthetic oligonucleotide
cauacuucaugagauugaa

SEQ ID NO: 3136265 - RNA, 19 nt, Artificial Sequence
  Description of Artificial Sequence: Synthetic oligonucleotide
cacugagccgagacugacc

SEQ ID NO: 3136266 - RNA, 19 nt, Artificial Sequence
  Description of Artificial Sequence: Synthetic oligonucleotide
caggaacuuuucacugagc

SEQ ID NO: 3136267 - RNA, 19 nt, Artificial Sequence
  Description of Artificial Sequence: Synthetic oligonucleotide
cuguagcugucauacuuca

SEQ ID NO: 3136268 - RNA, 19 nt, Artificial Sequence
  Description of Artificial Sequence: Synthetic oligonucleotide
gguuugagcgucgggaggc

SEQ ID NO: 3136269 - RNA, 19 nt, Artificial Sequence
  Description of Artificial Sequence: Synthetic oligonucleotide
ggaacaucagagggugugg

SEQ ID NO: 3136270 - RNA, 19 nt, Artificial Sequence
  Description of Artificial Sequence: Synthetic oligonucleotide
ucaguacaguuguguuuca

SEQ ID NO: 3136271 - RNA, 19 nt, Artificial Sequence
  Description of Artificial Sequence: Synthetic oligonucleotide
cuccuggagcuucuggaac

SEQ ID NO: 3136272 - RNA, 19 nt, Artificial Sequence
  Description of Artificial Sequence: Synthetic oligonucleotide
ccaggaacuuuucacugag

SEQ ID NO: 3136273 - RNA, 19 nt, Artificial Sequence
  Description of Artificial Sequence: Synthetic oligonucleotide
guaaauucuggaagcacgu

SEQ ID NO: 3136274 - RNA, 19 nt, Artificial Sequence
  Description of Artificial Sequence: Synthetic oligonucleotide
ggaagcacguuuagcugcg

SEQ ID NO: 3136275 - RNA, 19 nt, Artificial Sequence
  Description of Artificial Sequence: Synthetic oligonucleotide
cuucaagaaucggcuguag

SEQ ID NO: 3136276 - RNA, 19 nt, Artificial Sequence
  Description of Artificial Sequence: Synthetic oligonucleotide
agcgucgggaggcucuucu

SEQ ID NO: 3136277 - RNA, 19 nt, Artificial Sequence
  Description of Artificial Sequence: Synthetic oligonucleotide
uaaauucuggaagcacguu

SEQ ID NO: 3136278 - RNA, 19 nt, Artificial Sequence
  Description of Artificial Sequence: Synthetic oligonucleotide
cacguuuagcugcgguuug

SEQ ID NO: 3136279 - RNA, 19 nt, Artificial Sequence
  Description of Artificial Sequence: Synthetic oligonucleotide
ucacugagccgagacugac

SEQ ID NO: 3136280 - RNA, 19 nt, Artificial Sequence
  Description of Artificial Sequence: Synthetic oligonucleotide
agaaucggcuguagcuguc

SEQ ID NO: 3136281 - RNA, 19 nt, Artificial Sequence
  Description of Artificial Sequence: Synthetic oligonucleotide
acuucaagaaucggcugua

SEQ ID NO: 3136282 - RNA, 19 nt, Artificial Sequence
  Description of Artificial Sequence: Synthetic oligonucleotide
cucauguguuguaaauucu

SEQ ID NO: 3136283 - RNA, 19 nt, Artificial Sequence
  Description of Artificial Sequence: Synthetic oligonucleotide
gaagcacguuuagcugcgg

SEQ ID NO: 3136284 - RNA, 19 nt, Artificial Sequence
  Description of Artificial Sequence: Synthetic oligonucleotide
gaaucggcuguagcuguca

SEQ ID NO: 3136285 - RNA, 19 nt, Artificial Sequence
  Description of Artificial Sequence: Synthetic oligonucleotide
ucgggaggcucuucuuccu

SEQ ID NO: 3136286 - RNA, 19 nt, Artificial Sequence
  Description of Artificial Sequence: Synthetic oligonucleotide
gcgguuugagcgucgggag

SEQ ID NO: 3136287 - RNA, 19 nt, Artificial Sequence
  Description of Artificial Sequence: Synthetic oligonucleotide
ggagcuucuggaacaucag

SEQ ID NO: 3136288 - RNA, 19 nt, Artificial Sequence
  Description of Artificial Sequence: Synthetic oligonucleotide
ugguucuuccaggaacuuu

SEQ ID NO: 3136289 - RNA, 19 nt, Artificial Sequence
  Description of Artificial Sequence: Synthetic oligonucleotide
ucagagggugugguucuuc

SEQ ID NO: 3136290 - RNA, 19 nt, Artificial Sequence
  Description of Artificial Sequence: Synthetic oligonucleotide
gaacaucagaggguguggu

SEQ ID NO: 3136291 - RNA, 19 nt, Artificial Sequence
  Description of Artificial Sequence: Synthetic oligonucleotide
gcuguagcugucauacuuc

SEQ ID NO: 3136292 - RNA, 19 nt, Artificial Sequence
  Description of Artificial Sequence: Synthetic oligonucleotide
uuugagcgucgggaggcuc

SEQ ID NO: 3136293 - RNA, 19 nt, Artificial Sequence
  Description of Artificial Sequence: Synthetic oligonucleotide
acguuuagcugcgguuuga

SEQ ID NO: 3136294 - RNA, 19 nt, Artificial Sequence
  Description of Artificial Sequence: Synthetic oligonucleotide
aucggcuguagcugucaua

SEQ ID NO: 3136295 - RNA, 19 nt, Artificial Sequence
  Description of Artificial Sequence: Synthetic oligonucleotide
cugcgguuugagcgucggg

SEQ ID NO: 3136296 - RNA, 19 nt, Artificial Sequence
  Description of Artificial Sequence: Synthetic oligonucleotide
acuuuucacugagccgaga

SEQ ID NO: 3136297 - RNA, 19 nt, Artificial Sequence
  Description of Artificial Sequence: Synthetic oligonucleotide
caucagagggugugguucu

SEQ ID NO: 3136298 - RNA, 19 nt, Artificial Sequence
  Description of Artificial Sequence: Synthetic oligonucleotide
gggugugguucuuccagga

SEQ ID NO: 3136299 - RNA, 19 nt, Artificial Sequence
  Description of Artificial Sequence: Synthetic oligonucleotide
ggcuguagcugucauacuu

SEQ ID NO: 3136300 - RNA, 19 nt, Artificial Sequence
  Description of Artificial Sequence: Synthetic oligonucleotide
gcugcgguuugagcgucgg

SEQ ID NO: 3136301 - RNA, 19 nt, Artificial Sequence
  Description of Artificial Sequence: Synthetic oligonucleotide
ggugugguucuuccaggaa

SEQ ID NO: 3136302 - RNA, 19 nt, Artificial Sequence
  Description of Artificial Sequence: Synthetic oligonucleotide
uagcugcgguuugagcguc

SEQ ID NO: 3136303 - RNA, 19 nt, Artificial Sequence
  Description of Artificial Sequence: Synthetic oligonucleotide
agcugcgguuugagcgucg

SEQ ID NO: 3136304 - RNA, 19 nt, Artificial Sequence
  Description of Artificial Sequence: Synthetic oligonucleotide
ugagcgucgggaggcucuu

SEQ ID NO: 3136305 - RNA, 19 nt, Artificial Sequence
  Description of Artificial Sequence: Synthetic oligonucleotide
cgguuugagcgucgggagg

SEQ ID NO: 3136306 - RNA, 19 nt, Artificial Sequence
  Description of Artificial Sequence: Synthetic oligonucleotide
cuggagcuucuggaacauc

SEQ ID NO: 3136307 - RNA, 19 nt, Artificial Sequence
  Description of Artificial Sequence: Synthetic oligonucleotide
aucagagggugugguucuu

SEQ ID NO: 3136308 - RNA, 19 nt, Artificial Sequence
  Description of Artificial Sequence: Synthetic oligonucleotide
cuggaacaucagagggugu

SEQ ID NO: 3136309 - RNA, 19 nt, Artificial Sequence
  Description of Artificial Sequence: Synthetic oligonucleotide
guuugagcgucgggaggcu

SEQ ID NO: 3136310 - RNA, 19 nt, Artificial Sequence
  Description of Artificial Sequence: Synthetic oligonucleotide
gcacguuuagcugcgguuu

SEQ ID NO: 3136311 - RNA, 19 nt, Artificial Sequence
  Description of Artificial Sequence: Synthetic oligonucleotide
cugagccgagacugacccu

SEQ ID NO: 3136312 - RNA, 19 nt, Artificial Sequence
  Description of Artificial Sequence: Synthetic oligonucleotide
gagcgucgggaggcucuuc

SEQ ID NO: 3136313 - RNA, 19 nt, Artificial Sequence
  Description of Artificial Sequence: Synthetic oligonucleotide
cgggaggcucuucuuccuc

SEQ ID NO: 3136314 - RNA, 19 nt, Artificial Sequence
  Description of Artificial Sequence: Synthetic oligonucleotide
gcgucgggaggcucuucuu

SEQ ID NO: 3136315 - RNA, 19 nt, Artificial Sequence
  Description of Artificial Sequence: Synthetic oligonucleotide
cggcuguagcugucauacu

SEQ ID NO: 3136316 - RNA, 19 nt, Artificial Sequence
  Description of Artificial Sequence: Synthetic oligonucleotide
aauguacucacuuccucac

SEQ ID NO: 3136317 - RNA, 19 nt, Artificial Sequence
  Description of Artificial Sequence: Synthetic oligonucleotide
ucuggggugacucagcccc

SEQ ID NO: 3136318 - RNA, 19 nt, Artificial Sequence
  Description of Artificial Sequence: Synthetic oligonucleotide
aaagugggcagcucugggg

SEQ ID NO: 3136319 - RNA, 19 nt, Artificial Sequence
  Description of Artificial Sequence: Synthetic oligonucleotide
aagguugcucuccugggac

SEQ ID NO: 3136320 - RNA, 19 nt, Artificial Sequence
  Description of Artificial Sequence: Synthetic oligonucleotide
gaauguacucacuuccuca

SEQ ID NO: 3136321 - RNA, 19 nt, Artificial Sequence
  Description of Artificial Sequence: Synthetic oligonucleotide
uguacucacuuccucacuc

SEQ ID NO: 3136322 - RNA, 19 nt, Artificial Sequence
  Description of Artificial Sequence: Synthetic oligonucleotide
aacacagccuggcucaccu

SEQ ID NO: 3136323 - RNA, 19 nt, Artificial Sequence
  Description of Artificial Sequence: Synthetic oligonucleotide
aaagguugcucuccuggga

SEQ ID NO: 3136324 - RNA, 19 nt, Artificial Sequence
  Description of Artificial Sequence: Synthetic oligonucleotide
ucccaucuggggaaagugg

SEQ ID NO: 3136325 - RNA, 19 nt, Artificial Sequence
  Description of Artificial Sequence: Synthetic oligonucleotide
aagugggcagcucuggggu

SEQ ID NO: 3136326 - RNA, 19 nt, Artificial Sequence
  Description of Artificial Sequence: Synthetic oligonucleotide
cuugucccugcacaggugg

SEQ ID NO: 3136327 - RNA, 19 nt, Artificial Sequence
  Description of Artificial Sequence: Synthetic oligonucleotide
gaaagugggcagcucuggg

SEQ ID NO: 3136328 - RNA, 19 nt, Artificial Sequence
  Description of Artificial Sequence: Synthetic oligonucleotide
uuuccuugucccugcacag

SEQ ID NO: 3136329 - RNA, 19 nt, Artificial Sequence
  Description of Artificial Sequence: Synthetic oligonucleotide
cucacuuccucacucugcc

SEQ ID NO: 3136330 - RNA, 19 nt, Artificial Sequence
  Description of Artificial Sequence: Synthetic oligonucleotide
acuuccucacucugccacc

SEQ ID NO: 3136331 - RNA, 19 nt, Artificial Sequence
  Description of Artificial Sequence: Synthetic oligonucleotide
ugcacagguggccugugcc

SEQ ID NO: 3136332 - RNA, 19 nt, Artificial Sequence
  Description of Artificial Sequence: Synthetic oligonucleotide
aggaacacagccuggcuca

SEQ ID NO: 3136333 - RNA, 19 nt, Artificial Sequence
  Description of Artificial Sequence: Synthetic oligonucleotide
ugcacugcaggaacacagc

SEQ ID NO: 3136334 - RNA, 19 nt, Artificial Sequence
  Description of Artificial Sequence: Synthetic oligonucleotide
uccuugucccugcacaggu

SEQ ID NO: 3136335 - RNA, 19 nt, Artificial Sequence
  Description of Artificial Sequence: Synthetic oligonucleotide
uacucacuuccucacucug

SEQ ID NO: 3136336 - RNA, 19 nt, Artificial Sequence
  Description of Artificial Sequence: Synthetic oligonucleotide
cacucugccaccugccugc

SEQ ID NO: 3136337 - RNA, 19 nt, Artificial Sequence
  Description of Artificial Sequence: Synthetic oligonucleotide
uccucacucugccaccugc

SEQ ID NO: 3136338 - RNA, 19 nt, Artificial Sequence
  Description of Artificial Sequence: Synthetic oligonucleotide
agccccggaauguacucac

SEQ ID NO: 3136339 - RNA, 19 nt, Artificial Sequence
  Description of Artificial Sequence: Synthetic oligonucleotide
cucuccugggacucagugg

SEQ ID NO: 3136340 - RNA, 19 nt, Artificial Sequence
  Description of Artificial Sequence: Synthetic oligonucleotide
acucacuuccucacucugc

SEQ ID NO: 3136341 - RNA, 19 nt, Artificial Sequence
  Description of Artificial Sequence: Synthetic oligonucleotide
ucacucugccaccugccug

SEQ ID NO: 3136342 - RNA, 19 nt, Artificial Sequence
  Description of Artificial Sequence: Synthetic oligonucleotide
cacuuccucacucugccac

SEQ ID NO: 3136343 - RNA, 19 nt, Artificial Sequence
  Description of Artificial Sequence: Synthetic oligonucleotide
cacagccuggcucaccucc

SEQ ID NO: 3136344 - RNA, 19 nt, Artificial Sequence
  Description of Artificial Sequence: Synthetic oligonucleotide
ccaaagguugcucuccugg

SEQ ID NO: 3136345 - RNA, 19 nt, Artificial Sequence
  Description of Artificial Sequence: Synthetic oligonucleotide
ugcaggaacacagccuggc

SEQ ID NO: 3136346 - RNA, 19 nt, Artificial Sequence
  Description of Artificial Sequence: Synthetic oligonucleotide
aucuggggaaagugggcag

SEQ ID NO: 3136347 - RNA, 19 nt, Artificial Sequence
  Description of Artificial Sequence: Synthetic oligonucleotide
accuccagcggauguuuuc

SEQ ID NO: 3136348 - RNA, 19 nt, Artificial Sequence
  Description of Artificial Sequence: Synthetic oligonucleotide
uuccuugucccugcacagg

SEQ ID NO: 3136349 - RNA, 19 nt, Artificial Sequence
  Description of Artificial Sequence: Synthetic oligonucleotide
caggaacacagccuggcuc

SEQ ID NO: 3136350 - RNA, 19 nt, Artificial Sequence
  Description of Artificial Sequence: Synthetic oligonucleotide
ccggaauguacucacuucc

SEQ ID NO: 3136351 - RNA, 19 nt, Artificial Sequence
  Description of Artificial Sequence: Synthetic oligonucleotide
uguuuuccuugucccugca

SEQ ID NO: 3136352 - RNA, 19 nt, Artificial Sequence
  Description of Artificial Sequence: Synthetic oligonucleotide
uugccccaaagguugcucu

SEQ ID NO: 3136353 - RNA, 19 nt, Artificial Sequence
  Description of Artificial Sequence: Synthetic oligonucleotide
cccaucuggggaaaguggg

SEQ ID NO: 3136354 - RNA, 19 nt, Artificial Sequence
  Description of Artificial Sequence: Synthetic oligonucleotide
gugacucagccccggaaug

SEQ ID NO: 3136355 - RNA, 19 nt, Artificial Sequence
  Description of Artificial Sequence: Synthetic oligonucleotide
agccuggcucaccuccagc

SEQ ID NO: 3136356 - RNA, 19 nt, Artificial Sequence
  Description of Artificial Sequence: Synthetic oligonucleotide
auguacucacuuccucacu

SEQ ID NO: 3136357 - RNA, 19 nt, Artificial Sequence
  Description of Artificial Sequence: Synthetic oligonucleotide
ugacuccugccccaccccu

SEQ ID NO: 3136358 - RNA, 19 nt, Artificial Sequence
  Description of Artificial Sequence: Synthetic oligonucleotide
uugucccugcacagguggc

SEQ ID NO: 3136359 - RNA, 19 nt, Artificial Sequence
  Description of Artificial Sequence: Synthetic oligonucleotide
ggaauguacucacuuccuc

SEQ ID NO: 3136360 - RNA, 19 nt, Artificial Sequence
  Description of Artificial Sequence: Synthetic oligonucleotide
gccuggcucaccuccagcg

SEQ ID NO: 3136361 - RNA, 19 nt, Artificial Sequence
  Description of Artificial Sequence: Synthetic oligonucleotide
agguggccugugccaaccc

SEQ ID NO: 3136362 - RNA, 19 nt, Artificial Sequence
  Description of Artificial Sequence: Synthetic oligonucleotide
ggaaagugggcagcucugg

SEQ ID NO: 3136363 - RNA, 19 nt, Artificial Sequence
  Description of Artificial Sequence: Synthetic oligonucleotide
ucagccccggaauguacuc

SEQ ID NO: 3136364 - RNA, 19 nt, Artificial Sequence
  Description of Artificial Sequence: Synthetic oligonucleotide
guuuuccuugucccugcac

SEQ ID NO: 3136365 - RNA, 19 nt, Artificial Sequence
  Description of Artificial Sequence: Synthetic oligonucleotide
gucccaucuggggaaagug

SEQ ID NO: 3136366 - RNA, 19 nt, Artificial Sequence
  Description of Artificial Sequence: Synthetic oligonucleotide
cugcaggaacacagccugg

SEQ ID NO: 3136367 - RNA, 19 nt, Artificial Sequence
  Description of Artificial Sequence: Synthetic oligonucleotide
ucacuuccucacucugcca

SEQ ID NO: 3136368 - RNA, 19 nt, Artificial Sequence
  Description of Artificial Sequence: Synthetic oligonucleotide
gcacugcaggaacacagcc

SEQ ID NO: 3136369 - RNA, 19 nt, Artificial Sequence
  Description of Artificial Sequence: Synthetic oligonucleotide
ugccugcacugcaggaaca

SEQ ID NO: 3136370 - RNA, 19 nt, Artificial Sequence
  Description of Artificial Sequence: Synthetic oligonucleotide
cucuggggugacucagccc

SEQ ID NO: 3136371 - RNA, 19 nt, Artificial Sequence
  Description of Artificial Sequence: Synthetic oligonucleotide
agcucuggggugacucagc

SEQ ID NO: 3136372 - RNA, 19 nt, Artificial Sequence
  Description of Artificial Sequence: Synthetic oligonucleotide
agguugcucuccugggacu

SEQ ID NO: 3136373 - RNA, 19 nt, Artificial Sequence
  Description of Artificial Sequence: Synthetic oligonucleotide
caucuggggaaagugggca

SEQ ID NO: 3136374 - RNA, 19 nt, Artificial Sequence
  Description of Artificial Sequence: Synthetic oligonucleotide
acucagccccggaauguac

SEQ ID NO: 3136375 - RNA, 19 nt, Artificial Sequence
  Description of Artificial Sequence: Synthetic oligonucleotide
cugacuccugccccacccc

SEQ ID NO: 3136376 - RNA, 19 nt, Artificial Sequence
  Description of Artificial Sequence: Synthetic oligonucleotide
uggggugacucagccccgg

SEQ ID NO: 3136377 - RNA, 19 nt, Artificial Sequence
  Description of Artificial Sequence: Synthetic oligonucleotide
uugcucuccugggacucag

SEQ ID NO: 3136378 - RNA, 19 nt, Artificial Sequence
  Description of Artificial Sequence: Synthetic oligonucleotide
caccugccugcacugcagg

SEQ ID NO: 3136379 - RNA, 19 nt, Artificial Sequence
  Description of Artificial Sequence: Synthetic oligonucleotide
ugccccaaagguugcucuc

SEQ ID NO: 3136380 - RNA, 19 nt, Artificial Sequence
  Description of Artificial Sequence: Synthetic oligonucleotide
uuccucacucugccaccug

SEQ ID NO: 3136381 - RNA, 19 nt, Artificial Sequence
  Description of Artificial Sequence: Synthetic oligonucleotide
uccagcggauguuuuccuu

SEQ ID NO: 3136382 - RNA, 19 nt, Artificial Sequence
  Description of Artificial Sequence: Synthetic oligonucleotide
cugccccaccccuugcccc

SEQ ID NO: 3136383 - RNA, 19 nt, Artificial Sequence
  Description of Artificial Sequence: Synthetic oligonucleotide
ccagcggauguuuuccuug

SEQ ID NO: 3136384 - RNA, 19 nt, Artificial Sequence
  Description of Artificial Sequence: Synthetic oligonucleotide
ccccuugccccaaagguug

SEQ ID NO: 3136385 - RNA, 19 nt, Artificial Sequence
  Description of Artificial Sequence: Synthetic oligonucleotide
cuugccccaaagguugcuc

SEQ ID NO: 3136386 - RNA, 19 nt, Artificial Sequence
  Description of Artificial Sequence: Synthetic oligonucleotide
cuggggugacucagccccg

SEQ ID NO: 3136387 - RNA, 19 nt, Artificial Sequence
  Description of Artificial Sequence: Synthetic oligonucleotide
gaacacagccuggcucacc

SEQ ID NO: 3136388 - RNA, 19 nt, Artificial Sequence
  Description of Artificial Sequence: Synthetic oligonucleotide
ccugacuccugccccaccc

SEQ ID NO: 3136389 - RNA, 19 nt, Artificial Sequence
  Description of Artificial Sequence: Synthetic oligonucleotide
ugccccaccccuugcccca

SEQ ID NO: 3136390 - RNA, 19 nt, Artificial Sequence
  Description of Artificial Sequence: Synthetic oligonucleotide
uggcucaccuccagcggau

SEQ ID NO: 3136391 - RNA, 19 nt, Artificial Sequence
  Description of Artificial Sequence: Synthetic oligonucleotide
ccauccugacuccugcccc

SEQ ID NO: 3136392 - RNA, 19 nt, Artificial Sequence
  Description of Artificial Sequence: Synthetic oligonucleotide
gcucuggggugacucagcc

SEQ ID NO: 3136393 - RNA, 19 nt, Artificial Sequence
  Description of Artificial Sequence: Synthetic oligonucleotide
ccaucuggggaaagugggc

SEQ ID NO: 3136394 - RNA, 19 nt, Artificial Sequence
  Description of Artificial Sequence: Synthetic oligonucleotide
uccugacuccugccccacc

SEQ ID NO: 3136395 - RNA, 19 nt, Artificial Sequence
  Description of Artificial Sequence: Synthetic oligonucleotide
cuggcucaccuccagcgga

SEQ ID NO: 3136396 - RNA, 19 nt, Artificial Sequence
  Description of Artificial Sequence: Synthetic oligonucleotide
cagguggccugugccaacc

SEQ ID NO: 3136397 - RNA, 19 nt, Artificial Sequence
  Description of Artificial Sequence: Synthetic oligonucleotide
gguggccugugccaacccc

SEQ ID NO: 3136398 - RNA, 19 nt, Artificial Sequence
  Description of Artificial Sequence: Synthetic oligonucleotide
ucaccuccagcggauguuu

SEQ ID NO: 3136399 - RNA, 19 nt, Artificial Sequence
  Description of Artificial Sequence: Synthetic oligonucleotide
guacucacuuccucacucu

SEQ ID NO: 3136400 - RNA, 19 nt, Artificial Sequence
  Description of Artificial Sequence: Synthetic oligonucleotide
cugccaccugccugcacug

SEQ ID NO: 3136401 - RNA, 19 nt, Artificial Sequence
  Description of Artificial Sequence: Synthetic oligonucleotide
cagcucuggggugacucag

SEQ ID NO: 3136402 - RNA, 19 nt, Artificial Sequence
  Description of Artificial Sequence: Synthetic oligonucleotide
ucccugcacagguggccug

SEQ ID NO: 3136403 - RNA, 19 nt, Artificial Sequence
  Description of Artificial Sequence: Synthetic oligonucleotide
cccauccugacuccugccc

SEQ ID NO: 3136404 - RNA, 19 nt, Artificial Sequence
  Description of Artificial Sequence: Synthetic oligonucleotide
caccccuugccccaaaggu

SEQ ID NO: 3136405 - RNA, 19 nt, Artificial Sequence
  Description of Artificial Sequence: Synthetic oligonucleotide
ccuccagcggauguuuucc

SEQ ID NO: 3136406 - RNA, 19 nt, Artificial Sequence
  Description of Artificial Sequence: Synthetic oligonucleotide
ugcucuccugggacucagu

SEQ ID NO: 3136407 - RNA, 19 nt, Artificial Sequence
  Description of Artificial Sequence: Synthetic oligonucleotide
gggaaagugggcagcucug

SEQ ID NO: 3136408 - RNA, 19 nt, Artificial Sequence
  Description of Artificial Sequence: Synthetic oligonucleotide
cacugcaggaacacagccu

SEQ ID NO: 3136409 - RNA, 19 nt, Artificial Sequence
  Description of Artificial Sequence: Synthetic oligonucleotide
ccucacucugccaccugcc

SEQ ID NO: 3136410 - RNA, 19 nt, Artificial Sequence
  Description of Artificial Sequence: Synthetic oligonucleotide
cccggaauguacucacuuc

SEQ ID NO: 3136411 - RNA, 19 nt, Artificial Sequence
  Description of Artificial Sequence: Synthetic oligonucleotide
ggggaaagugggcagcucu

SEQ ID NO: 3136412 - RNA, 19 nt, Artificial Sequence
  Description of Artificial Sequence: Synthetic oligonucleotide
ccuggcucaccuccagcgg

SEQ ID NO: 3136413 - RNA, 19 nt, Artificial Sequence
  Description of Artificial Sequence: Synthetic oligonucleotide
cagccuggcucaccuccag

SEQ ID NO: 3136414 - RNA, 19 nt, Artificial Sequence
  Description of Artificial Sequence: Synthetic oligonucleotide
accccuugccccaaagguu

SEQ ID NO: 3136415 - RNA, 19 nt, Artificial Sequence
  Description of Artificial Sequence: Synthetic oligonucleotide
ccaccccuugccccaaagg

SEQ ID NO: 3136416 - RNA, 19 nt, Artificial Sequence
  Description of Artificial Sequence: Synthetic oligonucleotide
cucagccccggaauguacu

SEQ ID NO: 3136417 - RNA, 19 nt, Artificial Sequence
  Description of Artificial Sequence: Synthetic oligonucleotide
gacucagccccggaaugua

SEQ ID NO: 3136418 - RNA, 19 nt, Artificial Sequence
  Description of Artificial Sequence: Synthetic oligonucleotide
uggggaaagugggcagcuc

SEQ ID NO: 3136419 - RNA, 19 nt, Artificial Sequence
  Description of Artificial Sequence: Synthetic oligonucleotide
ggugacucagccccggaau

SEQ ID NO: 3136420 - RNA, 19 nt, Artificial Sequence
  Description of Artificial Sequence: Synthetic oligonucleotide
gcacagguggccugugcca

SEQ ID NO: 3136421 - RNA, 19 nt, Artificial Sequence
  Description of Artificial Sequence: Synthetic oligonucleotide
gguugcucuccugggacuc

SEQ ID NO: 3136422 - RNA, 19 nt, Artificial Sequence
  Description of Artificial Sequence: Synthetic oligonucleotide
ugccaccugccugcacugc

SEQ ID NO: 3136423 - RNA, 19 nt, Artificial Sequence
  Description of Artificial Sequence: Synthetic oligonucleotide
gccccaaagguugcucucc

SEQ ID NO: 3136424 - RNA, 19 nt, Artificial Sequence
  Description of Artificial Sequence: Synthetic oligonucleotide
ccaccugccugcacugcag

SEQ ID NO: 3136425 - RNA, 19 nt, Artificial Sequence
  Description of Artificial Sequence: Synthetic oligonucleotide
cugucccaucuggggaaag

SEQ ID NO: 3136426 - RNA, 19 nt, Artificial Sequence
  Description of Artificial Sequence: Synthetic oligonucleotide
cagcggauguuuuccuugu

SEQ ID NO: 3136427 - RNA, 19 nt, Artificial Sequence
  Description of Artificial Sequence: Synthetic oligonucleotide
ccugccccaccccuugccc

SEQ ID NO: 3136428 - RNA, 19 nt, Artificial Sequence
  Description of Artificial Sequence: Synthetic oligonucleotide
cacagguggccugugccaa

SEQ ID NO: 3136429 - RNA, 19 nt, Artificial Sequence
  Description of Artificial Sequence: Synthetic oligonucleotide
ccuugucccugcacaggug

SEQ ID NO: 3136430 - RNA, 19 nt, Artificial Sequence
  Description of Artificial Sequence: Synthetic oligonucleotide
cccaaagguugcucuccug

SEQ ID NO: 3136431 - RNA, 19 nt, Artificial Sequence
  Description of Artificial Sequence: Synthetic oligonucleotide
gcagcucuggggugacuca

SEQ ID NO: 3136432 - RNA, 19 nt, Artificial Sequence
  Description of Artificial Sequence: Synthetic oligonucleotide
gccaccugccugcacugca

SEQ ID NO: 3136433 - RNA, 19 nt, Artificial Sequence
  Description of Artificial Sequence: Synthetic oligonucleotide
gggugacucagccccggaa

SEQ ID NO: 3136434 - RNA, 19 nt, Artificial Sequence
  Description of Artificial Sequence: Synthetic oligonucleotide
gccugcacugcaggaacac

SEQ ID NO: 3136435 - RNA, 19 nt, Artificial Sequence
  Description of Artificial Sequence: Synthetic oligonucleotide
cuuccucacucugccaccu

SEQ ID NO: 3136436 - RNA, 19 nt, Artificial Sequence
  Description of Artificial Sequence: Synthetic oligonucleotide
ccccauccugacuccugcc

SEQ ID NO: 3136437 - RNA, 19 nt, Artificial Sequence
  Description of Artificial Sequence: Synthetic oligonucleotide
cccuugccccaaagguugc

SEQ ID NO: 3136438 - RNA, 19 nt, Artificial Sequence
  Description of Artificial Sequence: Synthetic oligonucleotide
cagccccggaauguacuca

SEQ ID NO: 3136439 - RNA, 19 nt, Artificial Sequence
  Description of Artificial Sequence: Synthetic oligonucleotide
cuccagcggauguuuuccu

SEQ ID NO: 3136440 - RNA, 19 nt, Artificial Sequence
  Description of Artificial Sequence: Synthetic oligonucleotide
ggaacacagccuggcucac

SEQ ID NO: 3136441 - RNA, 19 nt, Artificial Sequence
  Description of Artificial Sequence: Synthetic oligonucleotide
gcaggaacacagccuggcu

SEQ ID NO: 3136442 - RNA, 19 nt, Artificial Sequence
  Description of Artificial Sequence: Synthetic oligonucleotide
cuggggaaagugggcagcu

SEQ ID NO: 3136443 - RNA, 19 nt, Artificial Sequence
  Description of Artificial Sequence: Synthetic oligonucleotide
gucccugcacagguggccu

SEQ ID NO: 3136444 - RNA, 19 nt, Artificial Sequence
  Description of Artificial Sequence: Synthetic oligonucleotide
ggcucaccuccagcggaug

SEQ ID NO: 3136445 - RNA, 19 nt, Artificial Sequence
  Description of Artificial Sequence: Synthetic oligonucleotide
gcucaccuccagcggaugu

SEQ ID NO: 3136446 - RNA, 19 nt, Artificial Sequence
  Description of Artificial Sequence: Synthetic oligonucleotide
ggggugacucagccccgga

SEQ ID NO: 3136447 - RNA, 19 nt, Artificial Sequence
  Description of Artificial Sequence: Synthetic oligonucleotide
cucaccuccagcggauguu

SEQ ID NO: 3136448 - RNA, 19 nt, Artificial Sequence
  Description of Artificial Sequence: Synthetic oligonucleotide
ccugcacugcaggaacaca

SEQ ID NO: 3136449 - RNA, 19 nt, Artificial Sequence
  Description of Artificial Sequence: Synthetic oligonucleotide
cggaauguacucacuuccu

SEQ ID NO: 3136450 - RNA, 19 nt, Artificial Sequence
  Description of Artificial Sequence: Synthetic oligonucleotide
caccuccagcggauguuuu

SEQ ID NO: 3136451 - RNA, 19 nt, Artificial Sequence
  Description of Artificial Sequence: Synthetic oligonucleotide
ccccggaauguacucacuu

SEQ ID NO: 3136452 - RNA, 19 nt, Artificial Sequence
  Description of Artificial Sequence: Synthetic oligonucleotide
ccccaaagguugcucuccu

SEQ ID NO: 3136453 - RNA, 19 nt, Artificial Sequence
  Description of Artificial Sequence: Synthetic oligonucleotide
gccccggaauguacucacu

SEQ ID NO: 3136454 - RNA, 19 nt, Artificial Sequence
  Description of Artificial Sequence: Synthetic oligonucleotide
ccuugccccaaagguugcu

SEQ ID NO: 3136455 - RNA, 19 nt, Artificial Sequence
  Description of Artificial Sequence: Synthetic oligonucleotide
cccugcacagguggccugu

SEQ ID NO: 3136456 - RNA, 19 nt, Artificial Sequence
  Description of Artificial Sequence: Synthetic oligonucleotide
uuagugaggauuuucuugg

SEQ ID NO: 3136457 - RNA, 19 nt, Artificial Sequence
  Description of Artificial Sequence: Synthetic oligonucleotide
aaaucagaugucuacugag

SEQ ID NO: 3136458 - RNA, 19 nt, Artificial Sequence
  Description of Artificial Sequence: Synthetic oligonucleotide
uuuagugaggauuuucuug

SEQ ID NO: 3136459 - RNA, 19 nt, Artificial Sequence
  Description of Artificial Sequence: Synthetic oligonucleotide
cuuuguaccugaaaggacc

SEQ ID NO: 3136460 - RNA, 19 nt, Artificial Sequence
  Description of Artificial Sequence: Synthetic oligonucleotide
agucauagggcuucucucc

SEQ ID NO: 3136461 - RNA, 19 nt, Artificial Sequence
  Description of Artificial Sequence: Synthetic oligonucleotide
ucaaagaaggucuucccac

SEQ ID NO: 3136462 - RNA, 19 nt, Artificial Sequence
  Description of Artificial Sequence: Synthetic oligonucleotide
gaccaauggucaaagaagg

SEQ ID NO: 3136463 - RNA, 19 nt, Artificial Sequence
  Description of Artificial Sequence: Synthetic oligonucleotide
aucagaugucuacugagag

SEQ ID NO: 3136464 - RNA, 19 nt, Artificial Sequence
  Description of Artificial Sequence: Synthetic oligonucleotide
acucccuacauucuugguc

SEQ ID NO: 3136465 - RNA, 19 nt, Artificial Sequence
  Description of Artificial Sequence: Synthetic oligonucleotide
uucccuacacucaggacag

SEQ ID NO: 3136466 - RNA, 19 nt, Artificial Sequence
  Description of Artificial Sequence: Synthetic oligonucleotide
cagaugucuacugagagug

SEQ ID NO: 3136467 - RNA, 19 nt, Artificial Sequence
  Description of Artificial Sequence: Synthetic oligonucleotide
acauucuuggucuugccgu

SEQ ID NO: 3136468 - RNA, 19 nt, Artificial Sequence
  Description of Artificial Sequence: Synthetic oligonucleotide
gagagugcuccuuuguacc

SEQ ID NO: 3136469 - RNA, 19 nt, Artificial Sequence
  Description of Artificial Sequence: Synthetic oligonucleotide
ugggaaaucagaugucuac

SEQ ID NO: 3136470 - RNA, 19 nt, Artificial Sequence
  Description of Artificial Sequence: Synthetic oligonucleotide
uccuuuguaccugaaagga

SEQ ID NO: 3136471 - RNA, 19 nt, Artificial Sequence
  Description of Artificial Sequence: Synthetic oligonucleotide
cuccuuuguaccugaaagg

SEQ ID NO: 3136472 - RNA, 19 nt, Artificial Sequence
  Description of Artificial Sequence: Synthetic oligonucleotide
gugaggauuuucuuggaug

SEQ ID NO: 3136473 - RNA, 19 nt, Artificial Sequence
  Description of Artificial Sequence: Synthetic oligonucleotide
gaaaggaccuucccuacac

SEQ ID NO: 3136474 - RNA, 19 nt, Artificial Sequence
  Description of Artificial Sequence: Synthetic oligonucleotide
gaaaucagaugucuacuga

SEQ ID NO: 3136475 - RNA, 19 nt, Artificial Sequence
  Description of Artificial Sequence: Synthetic oligonucleotide
acacucaggacagucauag

SEQ ID NO: 3136476 - RNA, 19 nt, Artificial Sequence
  Description of Artificial Sequence: Synthetic oligonucleotide
ugagagugcuccuuuguac

SEQ ID NO: 3136477 - RNA, 19 nt, Artificial Sequence
  Description of Artificial Sequence: Synthetic oligonucleotide
uuuguaccugaaaggaccu

SEQ ID NO: 3136478 - RNA, 19 nt, Artificial Sequence
  Description of Artificial Sequence: Synthetic oligonucleotide
uccugugugggaaaucaga

SEQ ID NO: 3136479 - RNA, 19 nt, Artificial Sequence
  Description of Artificial Sequence: Synthetic oligonucleotide
ggucuugccguuuagugag

SEQ ID NO: 3136480 - RNA, 19 nt, Artificial Sequence
  Description of Artificial Sequence: Synthetic oligonucleotide
gcuccuuuguaccugaaag

SEQ ID NO: 3136481 - RNA, 19 nt, Artificial Sequence
  Description of Artificial Sequence: Synthetic oligonucleotide
uggucaaagaaggucuucc

SEQ ID NO: 3136482 - RNA, 19 nt, Artificial Sequence
  Description of Artificial Sequence: Synthetic oligonucleotide
ugugggaaaucagaugucu

SEQ ID NO: 3136483 - RNA, 19 nt, Artificial Sequence
  Description of Artificial Sequence: Synthetic oligonucleotide
ucagaugucuacugagagu

SEQ ID NO: 3136484 - RNA, 19 nt, Artificial Sequence
  Description of Artificial Sequence: Synthetic oligonucleotide
aaucagaugucuacugaga

SEQ ID NO: 3136485 - RNA, 19 nt, Artificial Sequence
  Description of Artificial Sequence: Synthetic oligonucleotide
acacucccuacauucuugg

SEQ ID NO: 3136486 - RNA, 19 nt, Artificial Sequence
  Description of Artificial Sequence: Synthetic oligonucleotide
uagggcuucucucccagug

SEQ ID NO: 3136487 - RNA, 19 nt, Artificial Sequence
  Description of Artificial Sequence: Synthetic oligonucleotide
ucuccugugugggaaauca

SEQ ID NO: 3136488 - RNA, 19 nt, Artificial Sequence
  Description of Artificial Sequence: Synthetic oligonucleotide
uggucuugccguuuaguga

SEQ ID NO: 3136489 - RNA, 19 nt, Artificial Sequence
  Description of Artificial Sequence: Synthetic oligonucleotide
aggacagucauagggcuuc

SEQ ID NO: 3136490 - RNA, 19 nt, Artificial Sequence
  Description of Artificial Sequence: Synthetic oligonucleotide
ugaaaggaccuucccuaca

SEQ ID NO: 3136491 - RNA, 19 nt, Artificial Sequence
  Description of Artificial Sequence: Synthetic oligonucleotide
ggaccaauggucaaagaag

SEQ ID NO: 3136492 - RNA, 19 nt, Artificial Sequence
  Description of Artificial Sequence: Synthetic oligonucleotide
uguaccugaaaggaccuuc

SEQ ID NO: 3136493 - RNA, 19 nt, Artificial Sequence
  Description of Artificial Sequence: Synthetic oligonucleotide
ugucucgugagcucuccug

SEQ ID NO: 3136494 - RNA, 19 nt, Artificial Sequence
  Description of Artificial Sequence: Synthetic oligonucleotide
aaaggaccuucccuacacu

SEQ ID NO: 3136495 - RNA, 19 nt, Artificial Sequence
  Description of Artificial Sequence: Synthetic oligonucleotide
accugaaaggaccuucccu

SEQ ID NO: 3136496 - RNA, 19 nt, Artificial Sequence
  Description of Artificial Sequence: Synthetic oligonucleotide
gaugagggaccaaugguca

SEQ ID NO: 3136497 - RNA, 19 nt, Artificial Sequence
  Description of Artificial Sequence: Synthetic oligonucleotide
caauggucaaagaaggucu

SEQ ID NO: 3136498 - RNA, 19 nt, Artificial Sequence
  Description of Artificial Sequence: Synthetic oligonucleotide
acugagagugcuccuuugu

SEQ ID NO: 3136499 - RNA, 19 nt, Artificial Sequence
  Description of Artificial Sequence: Synthetic oligonucleotide
uaccugaaaggaccuuccc

SEQ ID NO: 3136500 - RNA, 19 nt, Artificial Sequence
  Description of Artificial Sequence: Synthetic oligonucleotide
uucucucccagugugaguu

SEQ ID NO: 3136501 - RNA, 19 nt, Artificial Sequence
  Description of Artificial Sequence: Synthetic oligonucleotide
ugccguuuagugaggauuu

SEQ ID NO: 3136502 - RNA, 19 nt, Artificial Sequence
  Description of Artificial Sequence: Synthetic oligonucleotide
cugugugggaaaucagaug

SEQ ID NO: 3136503 - RNA, 19 nt, Artificial Sequence
  Description of Artificial Sequence: Synthetic oligonucleotide
ucuuggucuugccguuuag

SEQ ID NO: 3136504 - RNA, 19 nt, Artificial Sequence
  Description of Artificial Sequence: Synthetic oligonucleotide
ucgugagcucuccugugug

SEQ ID NO: 3136505 - RNA, 19 nt, Artificial Sequence
  Description of Artificial Sequence: Synthetic oligonucleotide
cugaaaggaccuucccuac

SEQ ID NO: 3136506 - RNA, 19 nt, Artificial Sequence
  Description of Artificial Sequence: Synthetic oligonucleotide
cuacauucuuggucuugcc

SEQ ID NO: 3136507 - RNA, 19 nt, Artificial Sequence
  Description of Artificial Sequence: Synthetic oligonucleotide
cacacucccuacauucuug

SEQ ID NO: 3136508 - RNA, 19 nt, Artificial Sequence
  Description of Artificial Sequence: Synthetic oligonucleotide
uacugagagugcuccuuug

SEQ ID NO: 3136509 - RNA, 19 nt, Artificial Sequence
  Description of Artificial Sequence: Synthetic oligonucleotide
ugugguggcggaugaggga

SEQ ID NO: 3136510 - RNA, 19 nt, Artificial Sequence
  Description of Artificial Sequence: Synthetic oligonucleotide
agagugcuccuuuguaccu

SEQ ID NO: 3136511 - RNA, 19 nt, Artificial Sequence
  Description of Artificial Sequence: Synthetic oligonucleotide
uugccguuuagugaggauu

SEQ ID NO: 3136512 - RNA, 19 nt, Artificial Sequence
  Description of Artificial Sequence: Synthetic oligonucleotide
agugcuccuuuguaccuga

SEQ ID NO: 3136513 - RNA, 19 nt, Artificial Sequence
  Description of Artificial Sequence: Synthetic oligonucleotide
gcggaugagggaccaaugg

SEQ ID NO: 3136514 - RNA, 19 nt, Artificial Sequence
  Description of Artificial Sequence: Synthetic oligonucleotide
agaugucuacugagagugc

SEQ ID NO: 3136515 - RNA, 19 nt, Artificial Sequence
  Description of Artificial Sequence: Synthetic oligonucleotide
gugagcucuccuguguggg

SEQ ID NO: 3136516 - RNA, 19 nt, Artificial Sequence
  Description of Artificial Sequence: Synthetic oligonucleotide
ugcuccuuuguaccugaaa

SEQ ID NO: 3136517 - RNA, 19 nt, Artificial Sequence
  Description of Artificial Sequence: Synthetic oligonucleotide
ucuacugagagugcuccuu

SEQ ID NO: 3136518 - RNA, 19 nt, Artificial Sequence
  Description of Artificial Sequence: Synthetic oligonucleotide
guaccugaaaggaccuucc

SEQ ID NO: 3136519 - RNA, 19 nt, Artificial Sequence
  Description of Artificial Sequence: Synthetic oligonucleotide
gggaccaauggucaaagaa

SEQ ID NO: 3136520 - RNA, 19 nt, Artificial Sequence
  Description of Artificial Sequence: Synthetic oligonucleotide
uagugaggauuuucuugga

SEQ ID NO: 3136521 - RNA, 19 nt, Artificial Sequence
  Description of Artificial Sequence: Synthetic oligonucleotide
aauggucaaagaaggucuu

SEQ ID NO: 3136522 - RNA, 19 nt, Artificial Sequence
  Description of Artificial Sequence: Synthetic oligonucleotide
cucccuacauucuuggucu

SEQ ID NO: 3136523 - RNA, 19 nt, Artificial Sequence
  Description of Artificial Sequence: Synthetic oligonucleotide
gaugucucgugagcucucc

SEQ ID NO: 3136524 - RNA, 19 nt, Artificial Sequence
  Description of Artificial Sequence: Synthetic oligonucleotide
ugaguucugugguggcgga

SEQ ID NO: 3136525 - RNA, 19 nt, Artificial Sequence
  Description of Artificial Sequence: Synthetic oligonucleotide
gaugucuacugagagugcu

SEQ ID NO: 3136526 - RNA, 19 nt, Artificial Sequence
  Description of Artificial Sequence: Synthetic oligonucleotide
ugagggaccaauggucaaa

SEQ ID NO: 3136527 - RNA, 19 nt, Artificial Sequence
  Description of Artificial Sequence: Synthetic oligonucleotide
uucuuggucuugccguuua

SEQ ID NO: 3136528 - RNA, 19 nt, Artificial Sequence
  Description of Artificial Sequence: Synthetic oligonucleotide
augucuacugagagugcuc

SEQ ID NO: 3136529 - RNA, 19 nt, Artificial Sequence
  Description of Artificial Sequence: Synthetic oligonucleotide
ucuugccguuuagugagga

SEQ ID NO: 3136530 - RNA, 19 nt, Artificial Sequence
  Description of Artificial Sequence: Synthetic oligonucleotide
ccaauggucaaagaagguc

SEQ ID NO: 3136531 - RNA, 19 nt, Artificial Sequence
  Description of Artificial Sequence: Synthetic oligonucleotide
ugagcucuccuguguggga

SEQ ID NO: 3136532 - RNA, 19 nt, Artificial Sequence
  Description of Artificial Sequence: Synthetic oligonucleotide
ggaugagggaccaaugguc

SEQ ID NO: 3136533 - RNA, 19 nt, Artificial Sequence
  Description of Artificial Sequence: Synthetic oligonucleotide
uacacucaggacagucaua

SEQ ID NO: 3136534 - RNA, 19 nt, Artificial Sequence
  Description of Artificial Sequence: Synthetic oligonucleotide
cacucaggacagucauagg

SEQ ID NO: 3136535 - RNA, 19 nt, Artificial Sequence
  Description of Artificial Sequence: Synthetic oligonucleotide
gugguggcggaugagggac

SEQ ID NO: 3136536 - RNA, 19 nt, Artificial Sequence
  Description of Artificial Sequence: Synthetic oligonucleotide
cuccugugugggaaaucag

SEQ ID NO: 3136537 - RNA, 19 nt, Artificial Sequence
  Description of Artificial Sequence: Synthetic oligonucleotide
ugaugucucgugagcucuc

SEQ ID NO: 3136538 - RNA, 19 nt, Artificial Sequence
  Description of Artificial Sequence: Synthetic oligonucleotide
agggcuucucucccagugu

SEQ ID NO: 3136539 - RNA, 19 nt, Artificial Sequence
  Description of Artificial Sequence: Synthetic oligonucleotide
ccuacauucuuggucuugc

SEQ ID NO: 3136540 - RNA, 19 nt, Artificial Sequence
  Description of Artificial Sequence: Synthetic oligonucleotide
ccuuuguaccugaaaggac

SEQ ID NO: 3136541 - RNA, 19 nt, Artificial Sequence
  Description of Artificial Sequence: Synthetic oligonucleotide
gagugcuccuuuguaccug

SEQ ID NO: 3136542 - RNA, 19 nt, Artificial Sequence
  Description of Artificial Sequence: Synthetic oligonucleotide
ugguggcggaugagggacc

SEQ ID NO: 3136543 - RNA, 19 nt, Artificial Sequence
  Description of Artificial Sequence: Synthetic oligonucleotide
augagggaccaauggucaa

SEQ ID NO: 3136544 - RNA, 19 nt, Artificial Sequence
  Description of Artificial Sequence: Synthetic oligonucleotide
accaauggucaaagaaggu

SEQ ID NO: 3136545 - RNA, 19 nt, Artificial Sequence
  Description of Artificial Sequence: Synthetic oligonucleotide
gaccuucccuacacucagg

SEQ ID NO: 3136546 - RNA, 19 nt, Artificial Sequence
  Description of Artificial Sequence: Synthetic oligonucleotide
guuuagugaggauuuucuu

SEQ ID NO: 3136547 - RNA, 19 nt, Artificial Sequence
  Description of Artificial Sequence: Synthetic oligonucleotide
gcuucucucccagugugag

SEQ ID NO: 3136548 - RNA, 19 nt, Artificial Sequence
  Description of Artificial Sequence: Synthetic oligonucleotide
ccugaaaggaccuucccua

SEQ ID NO: 3136549 - RNA, 19 nt, Artificial Sequence
  Description of Artificial Sequence: Synthetic oligonucleotide
uggcggaugagggaccaau

SEQ ID NO: 3136550 - RNA, 19 nt, Artificial Sequence
  Description of Artificial Sequence: Synthetic oligonucleotide
auagggcuucucucccagu

SEQ ID NO: 3136551 - RNA, 19 nt, Artificial Sequence
  Description of Artificial Sequence: Synthetic oligonucleotide
agggaccaauggucaaaga

SEQ ID NO: 3136552 - RNA, 19 nt, Artificial Sequence
  Description of Artificial Sequence: Synthetic oligonucleotide
cugagagugcuccuuugua

SEQ ID NO: 3136553 - RNA, 19 nt, Artificial Sequence
  Description of Artificial Sequence: Synthetic oligonucleotide
cuacacucaggacagucau

SEQ ID NO: 3136554 - RNA, 19 nt, Artificial Sequence
  Description of Artificial Sequence: Synthetic oligonucleotide
gucucgugagcucuccugu

SEQ ID NO: 3136555 - RNA, 19 nt, Artificial Sequence
  Description of Artificial Sequence: Synthetic oligonucleotide
ucucucccagugugaguuc

SEQ ID NO: 3136556 - RNA, 19 nt, Artificial Sequence
  Description of Artificial Sequence: Synthetic oligonucleotide
ccuacacucaggacaguca

SEQ ID NO: 3136557 - RNA, 19 nt, Artificial Sequence
  Description of Artificial Sequence: Synthetic oligonucleotide
gagcucuccugugugggaa

SEQ ID NO: 3136558 - RNA, 19 nt, Artificial Sequence
  Description of Artificial Sequence: Synthetic oligonucleotide
aggucuucccacacucccu

SEQ ID NO: 3136559 - RNA, 19 nt, Artificial Sequence
  Description of Artificial Sequence: Synthetic oligonucleotide
gugugggaaaucagauguc

SEQ ID NO: 3136560 - RNA, 19 nt, Artificial Sequence
  Description of Artificial Sequence: Synthetic oligonucleotide
agcucuccugugugggaaa

SEQ ID NO: 3136561 - RNA, 19 nt, Artificial Sequence
  Description of Artificial Sequence: Synthetic oligonucleotide
cgugagcucuccugugugg

SEQ ID NO: 3136562 - RNA, 19 nt, Artificial Sequence
  Description of Artificial Sequence: Synthetic oligonucleotide
gggaaaucagaugucuacu

SEQ ID NO: 3136563 - RNA, 19 nt, Artificial Sequence
  Description of Artificial Sequence: Synthetic oligonucleotide
uuguaccugaaaggaccuu

SEQ ID NO: 3136564 - RNA, 19 nt, Artificial Sequence
  Description of Artificial Sequence: Synthetic oligonucleotide
gugggaaaucagaugucua

SEQ ID NO: 3136565 - RNA, 19 nt, Artificial Sequence
  Description of Artificial Sequence: Synthetic oligonucleotide
gacagucauagggcuucuc

SEQ ID NO: 3136566 - RNA, 19 nt, Artificial Sequence
  Description of Artificial Sequence: Synthetic oligonucleotide
auucuuggucuugccguuu

SEQ ID NO: 3136567 - RNA, 19 nt, Artificial Sequence
  Description of Artificial Sequence: Synthetic oligonucleotide
ggucuucccacacucccua

SEQ ID NO: 3136568 - RNA, 19 nt, Artificial Sequence
  Description of Artificial Sequence: Synthetic oligonucleotide
cguuuagugaggauuuucu

SEQ ID NO: 3136569 - RNA, 19 nt, Artificial Sequence
  Description of Artificial Sequence: Synthetic oligonucleotide
ucccuacauucuuggucuu

SEQ ID NO: 3136570 - RNA, 19 nt, Artificial Sequence
  Description of Artificial Sequence: Synthetic oligonucleotide
ggcggaugagggaccaaug

SEQ ID NO: 3136571 - RNA, 19 nt, Artificial Sequence
  Description of Artificial Sequence: Synthetic oligonucleotide
cucuccugugugggaaauc

SEQ ID NO: 3136572 - RNA, 19 nt, Artificial Sequence
  Description of Artificial Sequence: Synthetic oligonucleotide
cucgugagcucuccugugu

SEQ ID NO: 3136573 - RNA, 19 nt, Artificial Sequence
  Description of Artificial Sequence: Synthetic oligonucleotide
cuuggucuugccguuuagu

SEQ ID NO: 3136574 - RNA, 19 nt, Artificial Sequence
  Description of Artificial Sequence: Synthetic oligonucleotide
ccguuuagugaggauuuuc

SEQ ID NO: 3136575 - RNA, 19 nt, Artificial Sequence
  Description of Artificial Sequence: Synthetic oligonucleotide
cauucuuggucuugccguu

SEQ ID NO: 3136576 - RNA, 19 nt, Artificial Sequence
  Description of Artificial Sequence: Synthetic oligonucleotide
cccuacacucaggacaguc

SEQ ID NO: 3136577 - RNA, 19 nt, Artificial Sequence
  Description of Artificial Sequence: Synthetic oligonucleotide
gucuacugagagugcuccu

SEQ ID NO: 3136578 - RNA, 19 nt, Artificial Sequence
  Description of Artificial Sequence: Synthetic oligonucleotide
ccugugugggaaaucagau

SEQ ID NO: 3136579 - RNA, 19 nt, Artificial Sequence
  Description of Artificial Sequence: Synthetic oligonucleotide
cuacugagagugcuccuuu

SEQ ID NO: 3136580 - RNA, 19 nt, Artificial Sequence
  Description of Artificial Sequence: Synthetic oligonucleotide
cuucucucccagugugagu

SEQ ID NO: 3136581 - RNA, 19 nt, Artificial Sequence
  Description of Artificial Sequence: Synthetic oligonucleotide
cuugccguuuagugaggau

SEQ ID NO: 3136582 - RNA, 19 nt, Artificial Sequence
  Description of Artificial Sequence: Synthetic oligonucleotide
gguggcggaugagggacca

SEQ ID NO: 3136583 - RNA, 19 nt, Artificial Sequence
  Description of Artificial Sequence: Synthetic oligonucleotide
cccuacauucuuggucuug

SEQ ID NO: 3136584 - RNA, 19 nt, Artificial Sequence
  Description of Artificial Sequence: Synthetic oligonucleotide
ucccuacacucaggacagu

SEQ ID NO: 3136585 - RNA, 19 nt, Artificial Sequence
  Description of Artificial Sequence: Synthetic oligonucleotide
cucucccagugugaguucu

SEQ ID NO: 3136586 - RNA, 19 nt, Artificial Sequence
  Description of Artificial Sequence: Synthetic oligonucleotide
cacucccuacauucuuggu

SEQ ID NO: 3136587 - RNA, 19 nt, Artificial Sequence
  Description of Artificial Sequence: Synthetic oligonucleotide
ggcuucucucccaguguga

SEQ ID NO: 3136588 - RNA, 19 nt, Artificial Sequence
  Description of Artificial Sequence: Synthetic oligonucleotide
caggacagucauagggcuu

SEQ ID NO: 3136589 - RNA, 19 nt, Artificial Sequence
  Description of Artificial Sequence: Synthetic oligonucleotide
gaguucugugguggcggau

SEQ ID NO: 3136590 - RNA, 19 nt, Artificial Sequence
  Description of Artificial Sequence: Synthetic oligonucleotide
cggaugagggaccaauggu

SEQ ID NO: 3136591 - RNA, 19 nt, Artificial Sequence
  Description of Artificial Sequence: Synthetic oligonucleotide
gugcuccuuuguaccugaa

SEQ ID NO: 3136592 - RNA, 19 nt, Artificial Sequence
  Description of Artificial Sequence: Synthetic oligonucleotide
guggcggaugagggaccaa

SEQ ID NO: 3136593 - RNA, 19 nt, Artificial Sequence
  Description of Artificial Sequence: Synthetic oligonucleotide
ggacagucauagggcuucu

SEQ ID NO: 3136594 - RNA, 19 nt, Artificial Sequence
  Description of Artificial Sequence: Synthetic oligonucleotide
ccacacucccuacauucuu

SEQ ID NO: 3136595 - RNA, 19 nt, Artificial Sequence
  Description of Artificial Sequence: Synthetic oligonucleotide
gcucuccugugugggaaau

SEQ ID NO: 3136596 - RNA, 19 nt, Artificial Sequence
  Description of Artificial Sequence: Synthetic oligonucleotide
gccguuuagugaggauuuu

SEQ ID NO: 3136597 - RNA, 19 nt, Artificial Sequence
  Description of Artificial Sequence: Synthetic oligonucleotide
aagaaaacuuguuagaaag

SEQ ID NO: 3136598 - RNA, 19 nt, Artificial Sequence
  Description of Artificial Sequence: Synthetic oligonucleotide
aagaaagaaaacuuguuag

SEQ ID NO: 3136599 - RNA, 19 nt, Artificial Sequence
  Description of Artificial Sequence: Synthetic oligonucleotide
ucuaggauaggcuccaagg

SEQ ID NO: 3136600 - RNA, 19 nt, Artificial Sequence
  Description of Artificial Sequence: Synthetic oligonucleotide
aaagaaaacuuguuagaaa

SEQ ID NO: 3136601 - RNA, 19 nt, Artificial Sequence
  Description of Artificial Sequence: Synthetic oligonucleotide
uguagagaaacccugucuc

SEQ ID NO: 3136602 - RNA, 19 nt, Artificial Sequence
  Description of Artificial Sequence: Synthetic oligonucleotide
agcauuguucuccagagug

SEQ ID NO: 3136603 - RNA, 19 nt, Artificial Sequence
  Description of Artificial Sequence: Synthetic oligonucleotide
agaaagaaaacuuguuaga

SEQ ID NO: 3136604 - RNA, 19 nt, Artificial Sequence
  Description of Artificial Sequence: Synthetic oligonucleotide
accucuuuaauccccgcac

SEQ ID NO: 3136605 - RNA, 19 nt, Artificial Sequence
  Description of Artificial Sequence: Synthetic oligonucleotide
aaacuuguuagaaaguaaa

SEQ ID NO: 3136606 - RNA, 19 nt, Artificial Sequence
  Description of Artificial Sequence: Synthetic oligonucleotide
aauccccgcacuugggagg

SEQ ID NO: 3136607 - RNA, 19 nt, Artificial Sequence
  Description of Artificial Sequence: Synthetic oligonucleotide
ugaguucuaggauaggcuc

SEQ ID NO: 3136608 - RNA, 19 nt, Artificial Sequence
  Description of Artificial Sequence: Synthetic oligonucleotide
aggcuauguagagaaaccc

SEQ ID NO: 3136609 - RNA, 19 nt, Artificial Sequence
  Description of Artificial Sequence: Synthetic oligonucleotide
uggcgcaccucuuuaaucc

SEQ ID NO: 3136610 - RNA, 19 nt, Artificial Sequence
  Description of Artificial Sequence: Synthetic oligonucleotide
gaaagaaaacuuguuagaa

SEQ ID NO: 3136611 - RNA, 19 nt, Artificial Sequence
  Description of Artificial Sequence: Synthetic oligonucleotide
aaaagaaagaaaacuuguu

SEQ ID NO: 3136612 - RNA, 19 nt, Artificial Sequence
  Description of Artificial Sequence: Synthetic oligonucleotide
uauguagagaaacccuguc

SEQ ID NO: 3136613 - RNA, 19 nt, Artificial Sequence
  Description of Artificial Sequence: Synthetic oligonucleotide
uuaauccccgcacuuggga

SEQ ID NO: 3136614 - RNA, 19 nt, Artificial Sequence
  Description of Artificial Sequence: Synthetic oligonucleotide
aaaacuuguuagaaaguaa

SEQ ID NO: 3136615 - RNA, 19 nt, Artificial Sequence
  Description of Artificial Sequence: Synthetic oligonucleotide
gaaaacuuguuagaaagua

SEQ ID NO: 3136616 - RNA, 19 nt, Artificial Sequence
  Description of Artificial Sequence: Synthetic oligonucleotide
uucuaggauaggcuccaag

SEQ ID NO: 3136617 - RNA, 19 nt, Artificial Sequence
  Description of Artificial Sequence: Synthetic oligonucleotide
auguagagaaacccugucu

SEQ ID NO: 3136618 - RNA, 19 nt, Artificial Sequence
  Description of Artificial Sequence: Synthetic oligonucleotide
uaauccccgcacuugggag

SEQ ID NO: 3136619 - RNA, 19 nt, Artificial Sequence
  Description of Artificial Sequence: Synthetic oligonucleotide
cauuguucuccagagugag

SEQ ID NO: 3136620 - RNA, 19 nt, Artificial Sequence
  Description of Artificial Sequence: Synthetic oligonucleotide
gaguucuaggauaggcucc

SEQ ID NO: 3136621 - RNA, 19 nt, Artificial Sequence
  Description of Artificial Sequence: Synthetic oligonucleotide
agaaaacuuguuagaaagu

SEQ ID NO: 3136622 - RNA, 19 nt, Artificial Sequence
  Description of Artificial Sequence: Synthetic oligonucleotide
gcuauguagagaaacccug

SEQ ID NO: 3136623 - RNA, 19 nt, Artificial Sequence
  Description of Artificial Sequence: Synthetic oligonucleotide
auaggcuccaaggcuaugu

SEQ ID NO: 3136624 - RNA, 19 nt, Artificial Sequence
  Description of Artificial Sequence: Synthetic oligonucleotide
aggcuccaaggcuauguag

SEQ ID NO: 3136625 - RNA, 19 nt, Artificial Sequence
  Description of Artificial Sequence: Synthetic oligonucleotide
aguucuaggauaggcucca

SEQ ID NO: 3136626 - RNA, 19 nt, Artificial Sequence
  Description of Artificial Sequence: Synthetic oligonucleotide
uguucuccagagugaguuc

SEQ ID NO: 3136627 - RNA, 19 nt, Artificial Sequence
  Description of Artificial Sequence: Synthetic oligonucleotide
auccccgcacuugggaggc

SEQ ID NO: 3136628 - RNA, 19 nt, Artificial Sequence
  Description of Artificial Sequence: Synthetic oligonucleotide
uaggcuccaaggcuaugua

SEQ ID NO: 3136629 - RNA, 19 nt, Artificial Sequence
  Description of Artificial Sequence: Synthetic oligonucleotide
uggguucgaggccagcauu

SEQ ID NO: 3136630 - RNA, 19 nt, Artificial Sequence
  Description of Artificial Sequence: Synthetic oligonucleotide
cuauguagagaaacccugu

SEQ ID NO: 3136631 - RNA, 19 nt, Artificial Sequence
  Description of Artificial Sequence: Synthetic oligonucleotide
ggcuccaaggcuauguaga

SEQ ID NO: 3136632 - RNA, 19 nt, Artificial Sequence
  Description of Artificial Sequence: Synthetic oligonucleotide
aggccagcauuguucucca

SEQ ID NO: 3136633 - RNA, 19 nt, Artificial Sequence
  Description of Artificial Sequence: Synthetic oligonucleotide
gugaguucuaggauaggcu

SEQ ID NO: 3136634 - RNA, 19 nt, Artificial Sequence
  Description of Artificial Sequence: Synthetic oligonucleotide
gccagcauuguucuccaga

SEQ ID NO: 3136635 - RNA, 19 nt, Artificial Sequence
  Description of Artificial Sequence: Synthetic oligonucleotide
caccucuuuaauccccgca

SEQ ID NO: 3136636 - RNA, 19 nt, Artificial Sequence
  Description of Artificial Sequence: Synthetic oligonucleotide
auuguucuccagagugagu

SEQ ID NO: 3136637 - RNA, 19 nt, Artificial Sequence
  Description of Artificial Sequence: Synthetic oligonucleotide
ggcgcaccucuuuaauccc

SEQ ID NO: 3136638 - RNA, 19 nt, Artificial Sequence
  Description of Artificial Sequence: Synthetic oligonucleotide
guguugguggcgcaccucu

SEQ ID NO: 3136639 - RNA, 19 nt, Artificial Sequence
  Description of Artificial Sequence: Synthetic oligonucleotide
ggguucgaggccagcauug

SEQ ID NO: 3136640 - RNA, 19 nt, Artificial Sequence
  Description of Artificial Sequence: Synthetic oligonucleotide
cgcaccucuuuaauccccg

SEQ ID NO: 3136641 - RNA, 19 nt, Artificial Sequence
  Description of Artificial Sequence: Synthetic oligonucleotide
gcauuguucuccagaguga

SEQ ID NO: 3136642 - RNA, 19 nt, Artificial Sequence
  Description of Artificial Sequence: Synthetic oligonucleotide
ggcuauguagagaaacccu

SEQ ID NO: 3136643 - RNA, 19 nt, Artificial Sequence
  Description of Artificial Sequence: Synthetic oligonucleotide
gcaccucuuuaauccccgc

SEQ ID NO: 3136644 - RNA, 19 nt, Artificial Sequence
  Description of Artificial Sequence: Synthetic oligonucleotide
guggguucgaggccagcau

SEQ ID NO: 3136645 - RNA, 19 nt, Artificial Sequence
  Description of Artificial Sequence: Synthetic oligonucleotide
gcgcaccucuuuaaucccc

SEQ ID NO: 3136646 - RNA, 19 nt, Artificial Sequence
  Description of Artificial Sequence: Synthetic oligonucleotide
cagcauuguucuccagagu

SEQ ID NO: 3136647 - RNA, 19 nt, Artificial Sequence
  Description of Artificial Sequence: Synthetic oligonucleotide
ccgcacuugggaggcagag

SEQ ID NO: 3136648 - RNA, 19 nt, Artificial Sequence
  Description of Artificial Sequence: Synthetic oligonucleotide
ggccagcauuguucuccag

SEQ ID NO: 3136649 - RNA, 19 nt, Artificial Sequence
  Description of Artificial Sequence: Synthetic oligonucleotide
gguguugguggcgcaccuc

SEQ ID NO: 3136650 - RNA, 19 nt, Artificial Sequence
  Description of Artificial Sequence: Synthetic oligonucleotide
guucuaggauaggcuccaa

SEQ ID NO: 3136651 - RNA, 19 nt, Artificial Sequence
  Description of Artificial Sequence: Synthetic oligonucleotide
ccucuuuaauccccgcacu

SEQ ID NO: 3136652 - RNA, 19 nt, Artificial Sequence
  Description of Artificial Sequence: Synthetic oligonucleotide
ccccgcacuugggaggcag

SEQ ID NO: 3136653 - RNA, 19 nt, Artificial Sequence
  Description of Artificial Sequence: Synthetic oligonucleotide
uccccgcacuugggaggca

SEQ ID NO: 3136654 - RNA, 19 nt, Artificial Sequence
  Description of Artificial Sequence: Synthetic oligonucleotide
cccgcacuugggaggcaga

SEQ ID NO: 3136655 - RNA, 19 nt, Artificial Sequence
  Description of Artificial Sequence: Synthetic oligonucleotide
uuguuuacagcaaagagcc

SEQ ID NO: 3136656 - RNA, 19 nt, Artificial Sequence
  Description of Artificial Sequence: Synthetic oligonucleotide
caugaugacaucuugcugg

SEQ ID NO: 3136657 - RNA, 19 nt, Artificial Sequence
  Description of Artificial Sequence: Synthetic oligonucleotide
ugacaggagaguuugaagg

SEQ ID NO: 3136658 - RNA, 19 nt, Artificial Sequence
  Description of Artificial Sequence: Synthetic oligonucleotide
cuuguuuacagcaaagagc

SEQ ID NO: 3136659 - RNA, 19 nt, Artificial Sequence
  Description of Artificial Sequence: Synthetic oligonucleotide
aacuuuaggaccaugauga

SEQ ID NO: 3136660 - RNA, 19 nt, Artificial Sequence
  Description of Artificial Sequence: Synthetic oligonucleotide
uuuaggaccaugaugacau

SEQ ID NO: 3136661 - RNA, 19 nt, Artificial Sequence
  Description of Artificial Sequence: Synthetic oligonucleotide
uuagcagugacagugauga

SEQ ID NO: 3136662 - RNA, 19 nt, Artificial Sequence
  Description of Artificial Sequence: Synthetic oligonucleotide
acagcaaagagccuguuag

SEQ ID NO: 3136663 - RNA, 19 nt, Artificial Sequence
  Description of Artificial Sequence: Synthetic oligonucleotide
acuuguuuacagcaaagag

SEQ ID NO: 3136664 - RNA, 19 nt, Artificial Sequence
  Description of Artificial Sequence: Synthetic oligonucleotide
ugaagggaacuuuaggacc

SEQ ID NO: 3136665 - RNA, 19 nt, Artificial Sequence
  Description of Artificial Sequence: Synthetic oligonucleotide
uaugagaggaucgauuucc

SEQ ID NO: 3136666 - RNA, 19 nt, Artificial Sequence
  Description of Artificial Sequence: Synthetic oligonucleotide
uuggugagcaggaagguug

SEQ ID NO: 3136667 - RNA, 19 nt, Artificial Sequence
  Description of Artificial Sequence: Synthetic oligonucleotide
aucgauuuccacuggcagc

SEQ ID NO: 3136668 - RNA, 19 nt, Artificial Sequence
  Description of Artificial Sequence: Synthetic oligonucleotide
gaacuuuaggaccaugaug

SEQ ID NO: 3136669 - RNA, 19 nt, Artificial Sequence
  Description of Artificial Sequence: Synthetic oligonucleotide
gacaggagaguuugaaggg

SEQ ID NO: 3136670 - RNA, 19 nt, Artificial Sequence
  Description of Artificial Sequence: Synthetic oligonucleotide
agaggaucgauuuccacug

SEQ ID NO: 3136671 - RNA, 19 nt, Artificial Sequence
  Description of Artificial Sequence: Synthetic oligonucleotide
ugcaacaugggugacagga

SEQ ID NO: 3136672 - RNA, 19 nt, Artificial Sequence
  Description of Artificial Sequence: Synthetic oligonucleotide
uugaagggaacuuuaggac

SEQ ID NO: 3136673 - RNA, 19 nt, Artificial Sequence
  Description of Artificial Sequence: Synthetic oligonucleotide
ugacagugaugacagcagg

SEQ ID NO: 3136674 - RNA, 19 nt, Artificial Sequence
  Description of Artificial Sequence: Synthetic oligonucleotide
ugagcaggaagguugugcc

SEQ ID NO: 3136675 - RNA, 19 nt, Artificial Sequence
  Description of Artificial Sequence: Synthetic oligonucleotide
gaucgauuuccacuggcag

SEQ ID NO: 3136676 - RNA, 19 nt, Artificial Sequence
  Description of Artificial Sequence: Synthetic oligonucleotide
guuuacagcaaagagccug

SEQ ID NO: 3136677 - RNA, 19 nt, Artificial Sequence
  Description of Artificial Sequence: Synthetic oligonucleotide
uuuacagcaaagagccugu

SEQ ID NO: 3136678 - RNA, 19 nt, Artificial Sequence
  Description of Artificial Sequence: Synthetic oligonucleotide
uuggcugcaacauggguga

SEQ ID NO: 3136679 - RNA, 19 nt, Artificial Sequence
  Description of Artificial Sequence: Synthetic oligonucleotide
aggaucgauuuccacuggc

SEQ ID NO: 3136680 - RNA, 19 nt, Artificial Sequence
  Description of Artificial Sequence: Synthetic oligonucleotide
accaugaugacaucuugcu

SEQ ID NO: 3136681 - RNA, 19 nt, Artificial Sequence
  Description of Artificial Sequence: Synthetic oligonucleotide
augaugacaucuugcuggg

SEQ ID NO: 3136682 - RNA, 19 nt, Artificial Sequence
  Description of Artificial Sequence: Synthetic oligonucleotide
caggaguugccaaaccugg

SEQ ID NO: 3136683 - RNA, 19 nt, Artificial Sequence
  Description of Artificial Sequence: Synthetic oligonucleotide
gauuuccacuggcagcugg

SEQ ID NO: 3136684 - RNA, 19 nt, Artificial Sequence
  Description of Artificial Sequence: Synthetic oligonucleotide
ugugccacuuguuuacagc

SEQ ID NO: 3136685 - RNA, 19 nt, Artificial Sequence
  Description of Artificial Sequence: Synthetic oligonucleotide
aguugccaaaccuggcugg

SEQ ID NO: 3136686 - RNA, 19 nt, Artificial Sequence
  Description of Artificial Sequence: Synthetic oligonucleotide
uauggcuggucuuguacag

SEQ ID NO: 3136687 - RNA, 19 nt, Artificial Sequence
  Description of Artificial Sequence: Synthetic oligonucleotide
aagguugugccacuuguuu

SEQ ID NO: 3136688 - RNA, 19 nt, Artificial Sequence
  Description of Artificial Sequence: Synthetic oligonucleotide
agagccuguuagcagugac

SEQ ID NO: 3136689 - RNA, 19 nt, Artificial Sequence
  Description of Artificial Sequence: Synthetic oligonucleotide
ucgauuuccacuggcagcu

SEQ ID NO: 3136690 - RNA, 19 nt, Artificial Sequence
  Description of Artificial Sequence: Synthetic oligonucleotide
agcaggaagguugugccac

SEQ ID NO: 3136691 - RNA, 19 nt, Artificial Sequence
  Description of Artificial Sequence: Synthetic oligonucleotide
gguguuggcugcaacaugg

SEQ ID NO: 3136692 - RNA, 19 nt, Artificial Sequence
  Description of Artificial Sequence: Synthetic oligonucleotide
guuggcugcaacaugggug

SEQ ID NO: 3136693 - RNA, 19 nt, Artificial Sequence
  Description of Artificial Sequence: Synthetic oligonucleotide
acuuuaggaccaugaugac

SEQ ID NO: 3136694 - RNA, 19 nt, Artificial Sequence
  Description of Artificial Sequence: Synthetic oligonucleotide
agccuguuagcagugacag

SEQ ID NO: 3136695 - RNA, 19 nt, Artificial Sequence
  Description of Artificial Sequence: Synthetic oligonucleotide
accuuggugagcaggaagg

SEQ ID NO: 3136696 - RNA, 19 nt, Artificial Sequence
  Description of Artificial Sequence: Synthetic oligonucleotide
gaguugccaaaccuggcug

SEQ ID NO: 3136697 - RNA, 19 nt, Artificial Sequence
  Description of Artificial Sequence: Synthetic oligonucleotide
agcagugacagugaugaca

SEQ ID NO: 3136698 - RNA, 19 nt, Artificial Sequence
  Description of Artificial Sequence: Synthetic oligonucleotide
ugggugacaggagaguuug

SEQ ID NO: 3136699 - RNA, 19 nt, Artificial Sequence
  Description of Artificial Sequence: Synthetic oligonucleotide
gugacaggagaguuugaag

SEQ ID NO: 3136700 - RNA, 19 nt, Artificial Sequence
  Description of Artificial Sequence: Synthetic oligonucleotide
gaagggaacuuuaggacca

SEQ ID NO: 3136701 - RNA, 19 nt, Artificial Sequence
  Description of Artificial Sequence: Synthetic oligonucleotide
agcaaagagccuguuagca

SEQ ID NO: 3136702 - RNA, 19 nt, Artificial Sequence
  Description of Artificial Sequence: Synthetic oligonucleotide
uggcuggucuuguacagca

SEQ ID NO: 3136703 - RNA, 19 nt, Artificial Sequence
  Description of Artificial Sequence: Synthetic oligonucleotide
gagaggaucgauuuccacu

SEQ ID NO: 3136704 - RNA, 19 nt, Artificial Sequence
  Description of Artificial Sequence: Synthetic oligonucleotide
gaccaugaugacaucuugc

SEQ ID NO: 3136705 - RNA, 19 nt, Artificial Sequence
  Description of Artificial Sequence: Synthetic oligonucleotide
gaugacagcaggaguugcc

SEQ ID NO: 3136706 - RNA, 19 nt, Artificial Sequence
  Description of Artificial Sequence: Synthetic oligonucleotide
aguuugaagggaacuuuag

SEQ ID NO: 3136707 - RNA, 19 nt, Artificial Sequence
  Description of Artificial Sequence: Synthetic oligonucleotide
ccuguuagcagugacagug

SEQ ID NO: 3136708 - RNA, 19 nt, Artificial Sequence
  Description of Artificial Sequence: Synthetic oligonucleotide
agugaugacagcaggaguu

SEQ ID NO: 3136709 - RNA, 19 nt, Artificial Sequence
  Description of Artificial Sequence: Synthetic oligonucleotide
gucuuguacagcaccuugg

SEQ ID NO: 3136710 - RNA, 19 nt, Artificial Sequence
  Description of Artificial Sequence: Synthetic oligonucleotide
uguuggcugcaacaugggu

SEQ ID NO: 3136711 - RNA, 19 nt, Artificial Sequence
  Description of Artificial Sequence: Synthetic oligonucleotide
uugugccacuuguuuacag

SEQ ID NO: 3136712 - RNA, 19 nt, Artificial Sequence
  Description of Artificial Sequence: Synthetic oligonucleotide
uguuagcagugacagugau

SEQ ID NO: 3136713 - RNA, 19 nt, Artificial Sequence
  Description of Artificial Sequence: Synthetic oligonucleotide
cuggcagcugguauggcug

SEQ ID NO: 3136714 - RNA, 19 nt, Artificial Sequence
  Description of Artificial Sequence: Synthetic oligonucleotide
acuggcagcugguauggcu

SEQ ID NO: 3136715 - RNA, 19 nt, Artificial Sequence
  Description of Artificial Sequence: Synthetic oligonucleotide
gcagugacagugaugacag

SEQ ID NO: 3136716 - RNA, 19 nt, Artificial Sequence
  Description of Artificial Sequence: Synthetic oligonucleotide
aaccuggcuggguguuggc

SEQ ID NO: 3136717 - RNA, 19 nt, Artificial Sequence
  Description of Artificial Sequence: Synthetic oligonucleotide
uaggaccaugaugacaucu

SEQ ID NO: 3136718 - RNA, 19 nt, Artificial Sequence
  Description of Artificial Sequence: Synthetic oligonucleotide
ugagaggaucgauuuccac

SEQ ID NO: 3136719 - RNA, 19 nt, Artificial Sequence
  Description of Artificial Sequence: Synthetic oligonucleotide
aaagagccuguuagcagug

SEQ ID NO: 3136720 - RNA, 19 nt, Artificial Sequence
  Description of Artificial Sequence: Synthetic oligonucleotide
uacagcaaagagccuguua

SEQ ID NO: 3136721 - RNA, 19 nt, Artificial Sequence
  Description of Artificial Sequence: Synthetic oligonucleotide
gguugugccacuuguuuac

SEQ ID NO: 3136722 - RNA, 19 nt, Artificial Sequence
  Description of Artificial Sequence: Synthetic oligonucleotide
gaggaucgauuuccacugg

SEQ ID NO: 3136723 - RNA, 19 nt, Artificial Sequence
  Description of Artificial Sequence: Synthetic oligonucleotide
guauggcuggucuuguaca

SEQ ID NO: 3136724 - RNA, 19 nt, Artificial Sequence
  Description of Artificial Sequence: Synthetic oligonucleotide
gugccacuuguuuacagca

SEQ ID NO: 3136725 - RNA, 19 nt, Artificial Sequence
  Description of Artificial Sequence: Synthetic oligonucleotide
cagcaaagagccuguuagc

SEQ ID NO: 3136726 - RNA, 19 nt, Artificial Sequence
  Description of Artificial Sequence: Synthetic oligonucleotide
gugagcaggaagguugugc

SEQ ID NO: 3136727 - RNA, 19 nt, Artificial Sequence
  Description of Artificial Sequence: Synthetic oligonucleotide
gcaaagagccuguuagcag

SEQ ID NO: 3136728 - RNA, 19 nt, Artificial Sequence
  Description of Artificial Sequence: Synthetic oligonucleotide
auggcuggucuuguacagc

SEQ ID NO: 3136729 - RNA, 19 nt, Artificial Sequence
  Description of Artificial Sequence: Synthetic oligonucleotide
gguauggcuggucuuguac

SEQ ID NO: 3136730 - RNA, 19 nt, Artificial Sequence
  Description of Artificial Sequence: Synthetic oligonucleotide
uguuuacagcaaagagccu

SEQ ID NO: 3136731 - RNA, 19 nt, Artificial Sequence
  Description of Artificial Sequence: Synthetic oligonucleotide
ugaugacagcaggaguugc

SEQ ID NO: 3136732 - RNA, 19 nt, Artificial Sequence
  Description of Artificial Sequence: Synthetic oligonucleotide
uggcagcugguauggcugg

SEQ ID NO: 3136733 - RNA, 19 nt, Artificial Sequence
  Description of Artificial Sequence: Synthetic oligonucleotide
cuaugagaggaucgauuuc

SEQ ID NO: 3136734 - RNA, 19 nt, Artificial Sequence
  Description of Artificial Sequence: Synthetic oligonucleotide
agaguuugaagggaacuuu

SEQ ID NO: 3136735 - RNA, 19 nt, Artificial Sequence
  Description of Artificial Sequence: Synthetic oligonucleotide
aggagaguuugaagggaac

SEQ ID NO: 3136736 - RNA, 19 nt, Artificial Sequence
  Description of Artificial Sequence: Synthetic oligonucleotide
aggaguugccaaaccuggc

SEQ ID NO: 3136737 - RNA, 19 nt, Artificial Sequence
  Description of Artificial Sequence: Synthetic oligonucleotide
caaagagccuguuagcagu

SEQ ID NO: 3136738 - RNA, 19 nt, Artificial Sequence
  Description of Artificial Sequence: Synthetic oligonucleotide
gcugcaacaugggugacag

SEQ ID NO: 3136739 - RNA, 19 nt, Artificial Sequence
  Description of Artificial Sequence: Synthetic oligonucleotide
acaggagaguuugaaggga

SEQ ID NO: 3136740 - RNA, 19 nt, Artificial Sequence
  Description of Artificial Sequence: Synthetic oligonucleotide
guugccaaaccuggcuggg

SEQ ID NO: 3136741 - RNA, 19 nt, Artificial Sequence
  Description of Artificial Sequence: Synthetic oligonucleotide
gcuggucuuguacagcacc

SEQ ID NO: 3136742 - RNA, 19 nt, Artificial Sequence
  Description of Artificial Sequence: Synthetic oligonucleotide
ggucuuguacagcaccuug

SEQ ID NO: 3136743 - RNA, 19 nt, Artificial Sequence
  Description of Artificial Sequence: Synthetic oligonucleotide
cuuuaggaccaugaugaca

SEQ ID NO: 3136744 - RNA, 19 nt, Artificial Sequence
  Description of Artificial Sequence: Synthetic oligonucleotide
caacaugggugacaggaga

SEQ ID NO: 3136745 - RNA, 19 nt, Artificial Sequence
  Description of Artificial Sequence: Synthetic oligonucleotide
augacagcaggaguugcca

SEQ ID NO: 3136746 - RNA, 19 nt, Artificial Sequence
  Description of Artificial Sequence: Synthetic oligonucleotide
aggaagguugugccacuug

SEQ ID NO: 3136747 - RNA, 19 nt, Artificial Sequence
  Description of Artificial Sequence: Synthetic oligonucleotide
cuggcuggguguuggcugc

SEQ ID NO: 3136748 - RNA, 19 nt, Artificial Sequence
  Description of Artificial Sequence: Synthetic oligonucleotide
gacagcaggaguugccaaa

SEQ ID NO: 3136749 - RNA, 19 nt, Artificial Sequence
  Description of Artificial Sequence: Synthetic oligonucleotide
ugccacuuguuuacagcaa

SEQ ID NO: 3136750 - RNA, 19 nt, Artificial Sequence
  Description of Artificial Sequence: Synthetic oligonucleotide
uuccacuggcagcugguau

SEQ ID NO: 3136751 - RNA, 19 nt, Artificial Sequence
  Description of Artificial Sequence: Synthetic oligonucleotide
agguugugccacuuguuua

SEQ ID NO: 3136752 - RNA, 19 nt, Artificial Sequence
  Description of Artificial Sequence: Synthetic oligonucleotide
gugaugacagcaggaguug

SEQ ID NO: 3136753 - RNA, 19 nt, Artificial Sequence
  Description of Artificial Sequence: Synthetic oligonucleotide
uggguguuggcugcaacau

SEQ ID NO: 3136754 - RNA, 19 nt, Artificial Sequence
  Description of Artificial Sequence: Synthetic oligonucleotide
ggaccaugaugacaucuug

SEQ ID NO: 3136755 - RNA, 19 nt, Artificial Sequence
  Description of Artificial Sequence: Synthetic oligonucleotide
cacuuguuuacagcaaaga

SEQ ID NO: 3136756 - RNA, 19 nt, Artificial Sequence
  Description of Artificial Sequence: Synthetic oligonucleotide
ugacagcaggaguugccaa

SEQ ID NO: 3136757 - RNA, 19 nt, Artificial Sequence
  Description of Artificial Sequence: Synthetic oligonucleotide
gaguuugaagggaacuuua

SEQ ID NO: 3136758 - RNA, 19 nt, Artificial Sequence
  Description of Artificial Sequence: Synthetic oligonucleotide
acaugggugacaggagagu

SEQ ID NO: 3136759 - RNA, 19 nt, Artificial Sequence
  Description of Artificial Sequence: Synthetic oligonucleotide
ccacuuguuuacagcaaag

SEQ ID NO: 3136760 - RNA, 19 nt, Artificial Sequence
  Description of Artificial Sequence: Synthetic oligonucleotide
agcaccuuggugagcagga

SEQ ID NO: 3136761 - RNA, 19 nt, Artificial Sequence
  Description of Artificial Sequence: Synthetic oligonucleotide
gagccuguuagcagugaca

SEQ ID NO: 3136762 - RNA, 19 nt, Artificial Sequence
  Description of Artificial Sequence: Synthetic oligonucleotide
caggagaguuugaagggaa

SEQ ID NO: 3136763 - RNA, 19 nt, Artificial Sequence
  Description of Artificial Sequence: Synthetic oligonucleotide
gcaggaguugccaaaccug

SEQ ID NO: 3136764 - RNA, 19 nt, Artificial Sequence
  Description of Artificial Sequence: Synthetic oligonucleotide
gggaacuuuaggaccauga

SEQ ID NO: 3136765 - RNA, 19 nt, Artificial Sequence
  Description of Artificial Sequence: Synthetic oligonucleotide
cuguuagcagugacaguga

SEQ ID NO: 3136766 - RNA, 19 nt, Artificial Sequence
  Description of Artificial Sequence: Synthetic oligonucleotide
aagagccuguuagcaguga

SEQ ID NO: 3136767 - RNA, 19 nt, Artificial Sequence
  Description of Artificial Sequence: Synthetic oligonucleotide
guguuggcugcaacauggg

SEQ ID NO: 3136768 - RNA, 19 nt, Artificial Sequence
  Description of Artificial Sequence: Synthetic oligonucleotide
auuuccacuggcagcuggu

SEQ ID NO: 3136769 - RNA, 19 nt, Artificial Sequence
  Description of Artificial Sequence: Synthetic oligonucleotide
gcugguauggcuggucuug

SEQ ID NO: 3136770 - RNA, 19 nt, Artificial Sequence
  Description of Artificial Sequence: Synthetic oligonucleotide
uuaggaccaugaugacauc

SEQ ID NO: 3136771 - RNA, 19 nt, Artificial Sequence
  Description of Artificial Sequence: Synthetic oligonucleotide
augagaggaucgauuucca

SEQ ID NO: 3136772 - RNA, 19 nt, Artificial Sequence
  Description of Artificial Sequence: Synthetic oligonucleotide
ggaagguugugccacuugu

SEQ ID NO: 3136773 - RNA, 19 nt, Artificial Sequence
  Description of Artificial Sequence: Synthetic oligonucleotide
ccaugaugacaucuugcug

SEQ ID NO: 3136774 - RNA, 19 nt, Artificial Sequence
  Description of Artificial Sequence: Synthetic oligonucleotide
gagaguuugaagggaacuu

SEQ ID NO: 3136775 - RNA, 19 nt, Artificial Sequence
  Description of Artificial Sequence: Synthetic oligonucleotide
aggaccaugaugacaucuu

SEQ ID NO: 3136776 - RNA, 19 nt, Artificial Sequence
  Description of Artificial Sequence: Synthetic oligonucleotide
gcaacaugggugacaggag

SEQ ID NO: 3136777 - RNA, 19 nt, Artificial Sequence
  Description of Artificial Sequence: Synthetic oligonucleotide
ggaguugccaaaccuggcu

SEQ ID NO: 3136778 - RNA, 19 nt, Artificial Sequence
  Description of Artificial Sequence: Synthetic oligonucleotide
ggugacaggagaguuugaa

SEQ ID NO: 3136779 - RNA, 19 nt, Artificial Sequence
  Description of Artificial Sequence: Synthetic oligonucleotide
aagggaacuuuaggaccau

SEQ ID NO: 3136780 - RNA, 19 nt, Artificial Sequence
  Description of Artificial Sequence: Synthetic oligonucleotide
ggaucgauuuccacuggca

SEQ ID NO: 3136781 - RNA, 19 nt, Artificial Sequence
  Description of Artificial Sequence: Synthetic oligonucleotide
ggaacuuuaggaccaugau

SEQ ID NO: 3136782 - RNA, 19 nt, Artificial Sequence
  Description of Artificial Sequence: Synthetic oligonucleotide
ugguauggcuggucuugua

SEQ ID NO: 3136783 - RNA, 19 nt, Artificial Sequence
  Description of Artificial Sequence: Synthetic oligonucleotide
cagugacagugaugacagc

SEQ ID NO: 3136784 - RNA, 19 nt, Artificial Sequence
  Description of Artificial Sequence: Synthetic oligonucleotide
cuggucuuguacagcaccu

SEQ ID NO: 3136785 - RNA, 19 nt, Artificial Sequence
  Description of Artificial Sequence: Synthetic oligonucleotide
agggaacuuuaggaccaug

SEQ ID NO: 3136786 - RNA, 19 nt, Artificial Sequence
  Description of Artificial Sequence: Synthetic oligonucleotide
uugccaaaccuggcugggu

SEQ ID NO: 3136787 - RNA, 19 nt, Artificial Sequence
  Description of Artificial Sequence: Synthetic oligonucleotide
cugcaacaugggugacagg

SEQ ID NO: 3136788 - RNA, 19 nt, Artificial Sequence
  Description of Artificial Sequence: Synthetic oligonucleotide
uagcagugacagugaugac

SEQ ID NO: 3136789 - RNA, 19 nt, Artificial Sequence
  Description of Artificial Sequence: Synthetic oligonucleotide
uggucuuguacagcaccuu

SEQ ID NO: 3136790 - RNA, 19 nt, Artificial Sequence
  Description of Artificial Sequence: Synthetic oligonucleotide
agcugguauggcuggucuu

SEQ ID NO: 3136791 - RNA, 19 nt, Artificial Sequence
  Description of Artificial Sequence: Synthetic oligonucleotide
ggguguuggcugcaacaug

SEQ ID NO: 3136792 - RNA, 19 nt, Artificial Sequence
  Description of Artificial Sequence: Synthetic oligonucleotide
caaaccuggcuggguguug

SEQ ID NO: 3136793 - RNA, 19 nt, Artificial Sequence
  Description of Artificial Sequence: Synthetic oligonucleotide
guugugccacuuguuuaca

SEQ ID NO: 3136794 - RNA, 19 nt, Artificial Sequence
  Description of Artificial Sequence: Synthetic oligonucleotide
ggagaguuugaagggaacu

SEQ ID NO: 3136795 - RNA, 19 nt, Artificial Sequence
  Description of Artificial Sequence: Synthetic oligonucleotide
accuggcuggguguuggcu

SEQ ID NO: 3136796 - RNA, 19 nt, Artificial Sequence
  Description of Artificial Sequence: Synthetic oligonucleotide
augggugacaggagaguuu

SEQ ID NO: 3136797 - RNA, 19 nt, Artificial Sequence
  Description of Artificial Sequence: Synthetic oligonucleotide
cagugaugacagcaggagu

SEQ ID NO: 3136798 - RNA, 19 nt, Artificial Sequence
  Description of Artificial Sequence: Synthetic oligonucleotide
gaagguugugccacuuguu

SEQ ID NO: 3136799 - RNA, 19 nt, Artificial Sequence
  Description of Artificial Sequence: Synthetic oligonucleotide
guacagcaccuuggugagc

SEQ ID NO: 3136800 - RNA, 19 nt, Artificial Sequence
  Description of Artificial Sequence: Synthetic oligonucleotide
gcuggguguuggcugcaac

SEQ ID NO: 3136801 - RNA, 19 nt, Artificial Sequence
  Description of Artificial Sequence: Synthetic oligonucleotide
cagcugguauggcuggucu

SEQ ID NO: 3136802 - RNA, 19 nt, Artificial Sequence
  Description of Artificial Sequence: Synthetic oligonucleotide
caugggugacaggagaguu

SEQ ID NO: 3136803 - RNA, 19 nt, Artificial Sequence
  Description of Artificial Sequence: Synthetic oligonucleotide
ggcugcaacaugggugaca

SEQ ID NO: 3136804 - RNA, 19 nt, Artificial Sequence
  Description of Artificial Sequence: Synthetic oligonucleotide
uggcuggguguuggcugca

SEQ ID NO: 3136805 - RNA, 19 nt, Artificial Sequence
  Description of Artificial Sequence: Synthetic oligonucleotide
ggugagcaggaagguugug

SEQ ID NO: 3136806 - RNA, 19 nt, Artificial Sequence
  Description of Artificial Sequence: Synthetic oligonucleotide
uggcugcaacaugggugac

SEQ ID NO: 3136807 - RNA, 19 nt, Artificial Sequence
  Description of Artificial Sequence: Synthetic oligonucleotide
cuuggugagcaggaagguu

SEQ ID NO: 3136808 - RNA, 19 nt, Artificial Sequence
  Description of Artificial Sequence: Synthetic oligonucleotide
ggcuggucuuguacagcac

SEQ ID NO: 3136809 - RNA, 19 nt, Artificial Sequence
  Description of Artificial Sequence: Synthetic oligonucleotide
cugguauggcuggucuugu

SEQ ID NO: 3136810 - RNA, 19 nt, Artificial Sequence
  Description of Artificial Sequence: Synthetic oligonucleotide
gcaggaagguugugccacu

SEQ ID NO: 3136811 - RNA, 19 nt, Artificial Sequence
  Description of Artificial Sequence: Synthetic oligonucleotide
gccuguuagcagugacagu

SEQ ID NO: 3136812 - RNA, 19 nt, Artificial Sequence
  Description of Artificial Sequence: Synthetic oligonucleotide
gggugacaggagaguuuga

SEQ ID NO: 3136813 - RNA, 19 nt, Artificial Sequence
  Description of Artificial Sequence: Synthetic oligonucleotide
gcaccuuggugagcaggaa

SEQ ID NO: 3136814 - RNA, 19 nt, Artificial Sequence
  Description of Artificial Sequence: Synthetic oligonucleotide
caggaagguugugccacuu

SEQ ID NO: 3136815 - RNA, 19 nt, Artificial Sequence
  Description of Artificial Sequence: Synthetic oligonucleotide
ccuuggugagcaggaaggu

SEQ ID NO: 3136816 - RNA, 19 nt, Artificial Sequence
  Description of Artificial Sequence: Synthetic oligonucleotide
cgauuuccacuggcagcug

SEQ ID NO: 3136817 - RNA, 19 nt, Artificial Sequence
  Description of Artificial Sequence: Synthetic oligonucleotide
ggcuggguguuggcugcaa

SEQ ID NO: 3136818 - RNA, 19 nt, Artificial Sequence
  Description of Artificial Sequence: Synthetic oligonucleotide
aauuugaacauuuucaaag

SEQ ID NO: 3136819 - RNA, 19 nt, Artificial Sequence
  Description of Artificial Sequence: Synthetic oligonucleotide
agaaagaugacuuaaaagu

SEQ ID NO: 3136820 - RNA, 19 nt, Artificial Sequence
  Description of Artificial Sequence: Synthetic oligonucleotide
ugaacauuuucaaagaaag

SEQ ID NO: 3136821 - RNA, 19 nt, Artificial Sequence
  Description of Artificial Sequence: Synthetic oligonucleotide
uuauucaugaaaauaagca

SEQ ID NO: 3136822 - RNA, 19 nt, Artificial Sequence
  Description of Artificial Sequence: Synthetic oligonucleotide
auuagcaguauauacauuc

SEQ ID NO: 3136823 - RNA, 19 nt, Artificial Sequence
  Description of Artificial Sequence: Synthetic oligonucleotide
uauacagucauuuacauua

SEQ ID NO: 3136824 - RNA, 19 nt, Artificial Sequence
  Description of Artificial Sequence: Synthetic oligonucleotide
uuuacauuaagacuuuggc

SEQ ID NO: 3136825 - RNA, 19 nt, Artificial Sequence
  Description of Artificial Sequence: Synthetic oligonucleotide
gaaaauaagcaacucagcc

SEQ ID NO: 3136826 - RNA, 19 nt, Artificial Sequence
  Description of Artificial Sequence: Synthetic oligonucleotide
aagaaagaugacuuaaaag

SEQ ID NO: 3136827 - RNA, 19 nt, Artificial Sequence
  Description of Artificial Sequence: Synthetic oligonucleotide
ucuuuauucaugaaaauaa

SEQ ID NO: 3136828 - RNA, 19 nt, Artificial Sequence
  Description of Artificial Sequence: Synthetic oligonucleotide
uuucacuagaccaagcuag

SEQ ID NO: 3136829 - RNA, 19 nt, Artificial Sequence
  Description of Artificial Sequence: Synthetic oligonucleotide
aaaaguuucuugcuaaucu

SEQ ID NO: 3136830 - RNA, 19 nt, Artificial Sequence
  Description of Artificial Sequence: Synthetic oligonucleotide
uuuauucaugaaaauaagc

SEQ ID NO: 3136831 - RNA, 19 nt, Artificial Sequence
  Description of Artificial Sequence: Synthetic oligonucleotide
acuagaccaagcuagcucc

SEQ ID NO: 3136832 - RNA, 19 nt, Artificial Sequence
  Description of Artificial Sequence: Synthetic oligonucleotide
aaaauaagcaacucagcca

SEQ ID NO: 3136833 - RNA, 19 nt, Artificial Sequence
  Description of Artificial Sequence: Synthetic oligonucleotide
uaaucuuuauucaugaaaa

SEQ ID NO: 3136834 - RNA, 19 nt, Artificial Sequence
  Description of Artificial Sequence: Synthetic oligonucleotide
aaauaagcaacucagccau

SEQ ID NO: 3136835 - RNA, 19 nt, Artificial Sequence
  Description of Artificial Sequence: Synthetic oligonucleotide
guauauacauucucuaugg

SEQ ID NO: 3136836 - RNA, 19 nt, Artificial Sequence
  Description of Artificial Sequence: Synthetic oligonucleotide
uacauuaagacuuuggcau

SEQ ID NO: 3136837 - RNA, 19 nt, Artificial Sequence
  Description of Artificial Sequence: Synthetic oligonucleotide
ugacuuaaaaguuucuugc

SEQ ID NO: 3136838 - RNA, 19 nt, Artificial Sequence
  Description of Artificial Sequence: Synthetic oligonucleotide
aguauauacauucucuaug

SEQ ID NO: 3136839 - RNA, 19 nt, Artificial Sequence
  Description of Artificial Sequence: Synthetic oligonucleotide
auucaugaaaauaagcaac

SEQ ID NO: 3136840 - RNA, 19 nt, Artificial Sequence
  Description of Artificial Sequence: Synthetic oligonucleotide
aagcaacucagccauuagc

SEQ ID NO: 3136841 - RNA, 19 nt, Artificial Sequence
  Description of Artificial Sequence: Synthetic oligonucleotide
aaagaaagaugacuuaaaa

SEQ ID NO: 3136842 - RNA, 19 nt, Artificial Sequence
  Description of Artificial Sequence: Synthetic oligonucleotide
uuuucaaagaaagaugacu

SEQ ID NO: 3136843 - RNA, 19 nt, Artificial Sequence
  Description of Artificial Sequence: Synthetic oligonucleotide
uuucaaagaaagaugacuu

SEQ ID NO: 3136844 - RNA, 19 nt, Artificial Sequence
  Description of Artificial Sequence: Synthetic oligonucleotide
uauucaugaaaauaagcaa

SEQ ID NO: 3136845 - RNA, 19 nt, Artificial Sequence
  Description of Artificial Sequence: Synthetic oligonucleotide
ucuauggugguauacaguc

SEQ ID NO: 3136846 - RNA, 19 nt, Artificial Sequence
  Description of Artificial Sequence: Synthetic oligonucleotide
augaaaauaagcaacucag

SEQ ID NO: 3136847 - RNA, 19 nt, Artificial Sequence
  Description of Artificial Sequence: Synthetic oligonucleotide
auauacauucucuauggug

SEQ ID NO: 3136848 - RNA, 19 nt, Artificial Sequence
  Description of Artificial Sequence: Synthetic oligonucleotide
cagucauuuacauuaagac

SEQ ID NO: 3136849 - RNA, 19 nt, Artificial Sequence
  Description of Artificial Sequence: Synthetic oligonucleotide
ugaaaauaagcaacucagc

SEQ ID NO: 3136850 - RNA, 19 nt, Artificial Sequence
  Description of Artificial Sequence: Synthetic oligonucleotide
cauuuucaaagaaagauga

SEQ ID NO: 3136851 - RNA, 19 nt, Artificial Sequence
  Description of Artificial Sequence: Synthetic oligonucleotide
aagaugacuuaaaaguuuc

SEQ ID NO: 3136852 - RNA, 19 nt, Artificial Sequence
  Description of Artificial Sequence: Synthetic oligonucleotide
augacuuaaaaguuucuug

SEQ ID NO: 3136853 - RNA, 19 nt, Artificial Sequence
  Description of Artificial Sequence: Synthetic oligonucleotide
agccauuagcaguauauac

SEQ ID NO: 3136854 - RNA, 19 nt, Artificial Sequence
  Description of Artificial Sequence: Synthetic oligonucleotide
cuuuauucaugaaaauaag

SEQ ID NO: 3136855 - RNA, 19 nt, Artificial Sequence
  Description of Artificial Sequence: Synthetic oligonucleotide
agucauuuacauuaagacu

SEQ ID NO: 3136856 - RNA, 19 nt, Artificial Sequence
  Description of Artificial Sequence: Synthetic oligonucleotide
uugaacauuuucaaagaaa

SEQ ID NO: 3136857 - RNA, 19 nt, Artificial Sequence
  Description of Artificial Sequence: Synthetic oligonucleotide
auuugaacauuuucaaaga

SEQ ID NO: 3136858 - RNA, 19 nt, Artificial Sequence
  Description of Artificial Sequence: Synthetic oligonucleotide
ugcuaaucuuuauucauga

SEQ ID NO: 3136859 - RNA, 19 nt, Artificial Sequence
  Description of Artificial Sequence: Synthetic oligonucleotide
uuugaacauuuucaaagaa

SEQ ID NO: 3136860 - RNA, 19 nt, Artificial Sequence
  Description of Artificial Sequence: Synthetic oligonucleotide
uucuugcuaaucuuuauuc

SEQ ID NO: 3136861 - RNA, 19 nt, Artificial Sequence
  Description of Artificial Sequence: Synthetic oligonucleotide
uugcuaaucuuuauucaug

SEQ ID NO: 3136862 - RNA, 19 nt, Artificial Sequence
  Description of Artificial Sequence: Synthetic oligonucleotide
auuuacauuaagacuuugg

SEQ ID NO: 3136863 - RNA, 19 nt, Artificial Sequence
  Description of Artificial Sequence: Synthetic oligonucleotide
ucagccauuagcaguauau

SEQ ID NO: 3136864 - RNA, 19 nt, Artificial Sequence
  Description of Artificial Sequence: Synthetic oligonucleotide
caugccuaaaacaugaaaa

SEQ ID NO: 3136865 - RNA, 19 nt, Artificial Sequence
  Description of Artificial Sequence: Synthetic oligonucleotide
ucaaagaaagaugacuuaa

SEQ ID NO: 3136866 - RNA, 19 nt, Artificial Sequence
  Description of Artificial Sequence: Synthetic oligonucleotide
ucucuauggugguauacag

SEQ ID NO: 3136867 - RNA, 19 nt, Artificial Sequence
  Description of Artificial Sequence: Synthetic oligonucleotide
uauggugguauacagucau

SEQ ID NO: 3136868 - RNA, 19 nt, Artificial Sequence
  Description of Artificial Sequence: Synthetic oligonucleotide
ucuugcuaaucuuuauuca

SEQ ID NO: 3136869 - RNA, 19 nt, Artificial Sequence
  Description of Artificial Sequence: Synthetic oligonucleotide
aaucuuuauucaugaaaau

SEQ ID NO: 3136870 - RNA, 19 nt, Artificial Sequence
  Description of Artificial Sequence: Synthetic oligonucleotide
aaaguuucuugcuaaucuu

SEQ ID NO: 3136871 - RNA, 19 nt, Artificial Sequence
  Description of Artificial Sequence: Synthetic oligonucleotide
uuagcaguauauacauucu

SEQ ID NO: 3136872 - RNA, 19 nt, Artificial Sequence
  Description of Artificial Sequence: Synthetic oligonucleotide
caugaaaauaagcaacuca

SEQ ID NO: 3136873 - RNA, 19 nt, Artificial Sequence
  Description of Artificial Sequence: Synthetic oligonucleotide
cuaaucuuuauucaugaaa

SEQ ID NO: 3136874 - RNA, 19 nt, Artificial Sequence
  Description of Artificial Sequence: Synthetic oligonucleotide
agcuccucaugccuaaaac

SEQ ID NO: 3136875 - RNA, 19 nt, Artificial Sequence
  Description of Artificial Sequence: Synthetic oligonucleotide
uuuucacuagaccaagcua

SEQ ID NO: 3136876 - RNA, 19 nt, Artificial Sequence
  Description of Artificial Sequence: Synthetic oligonucleotide
aaagaugacuuaaaaguuu

SEQ ID NO: 3136877 - RNA, 19 nt, Artificial Sequence
  Description of Artificial Sequence: Synthetic oligonucleotide
uauauacauucucuauggu

SEQ ID NO: 3136878 - RNA, 19 nt, Artificial Sequence
  Description of Artificial Sequence: Synthetic oligonucleotide
ucaugccuaaaacaugaaa

SEQ ID NO: 3136879 - RNA, 19 nt, Artificial Sequence
  Description of Artificial Sequence: Synthetic oligonucleotide
uuucuugcuaaucuuuauu

SEQ ID NO: 3136880 - RNA, 19 nt, Artificial Sequence
  Description of Artificial Sequence: Synthetic oligonucleotide
acuuaaaaguuucuugcua

SEQ ID NO: 3136881 - RNA, 19 nt, Artificial Sequence
  Description of Artificial Sequence: Synthetic oligonucleotide
uuaaaucuuuuauuucuuu

SEQ ID NO: 3136882 - RNA, 19 nt, Artificial Sequence
  Description of Artificial Sequence: Synthetic oligonucleotide
uucacuagaccaagcuagc

SEQ ID NO: 3136883 - RNA, 19 nt, Artificial Sequence
  Description of Artificial Sequence: Synthetic oligonucleotide
uacagucauuuacauuaag

SEQ ID NO: 3136884 - RNA, 19 nt, Artificial Sequence
  Description of Artificial Sequence: Synthetic oligonucleotide
uaagcaacucagccauuag

SEQ ID NO: 3136885 - RNA, 19 nt, Artificial Sequence
  Description of Artificial Sequence: Synthetic oligonucleotide
uuaaaaguuucuugcuaau

SEQ ID NO: 3136886 - RNA, 19 nt, Artificial Sequence
  Description of Artificial Sequence: Synthetic oligonucleotide
caagcuagcuccucaugcc

SEQ ID NO: 3136887 - RNA, 19 nt, Artificial Sequence
  Description of Artificial Sequence: Synthetic oligonucleotide
uucaaagaaagaugacuua

SEQ ID NO: 3136888 - RNA, 19 nt, Artificial Sequence
  Description of Artificial Sequence: Synthetic oligonucleotide
gucauuuacauuaagacuu

SEQ ID NO: 3136889 - RNA, 19 nt, Artificial Sequence
  Description of Artificial Sequence: Synthetic oligonucleotide
uccucaugccuaaaacaug

SEQ ID NO: 3136890 - RNA, 19 nt, Artificial Sequence
  Description of Artificial Sequence: Synthetic oligonucleotide
acagucauuuacauuaaga

SEQ ID NO: 3136891 - RNA, 19 nt, Artificial Sequence
  Description of Artificial Sequence: Synthetic oligonucleotide
agcaguauauacauucucu

SEQ ID NO: 3136892 - RNA, 19 nt, Artificial Sequence
  Description of Artificial Sequence: Synthetic oligonucleotide
uaaaaguuucuugcuaauc

SEQ ID NO: 3136893 - RNA, 19 nt, Artificial Sequence
  Description of Artificial Sequence: Synthetic oligonucleotide
agcaacucagccauuagca

SEQ ID NO: 3136894 - RNA, 19 nt, Artificial Sequence
  Description of Artificial Sequence: Synthetic oligonucleotide
aucuuuauucaugaaaaua

SEQ ID NO: 3136895 - RNA, 19 nt, Artificial Sequence
  Description of Artificial Sequence: Synthetic oligonucleotide
uagcaguauauacauucuc

SEQ ID NO: 3136896 - RNA, 19 nt, Artificial Sequence
  Description of Artificial Sequence: Synthetic oligonucleotide
aagcuagcuccucaugccu

SEQ ID NO: 3136897 - RNA, 19 nt, Artificial Sequence
  Description of Artificial Sequence: Synthetic oligonucleotide
auucucuauggugguauac

SEQ ID NO: 3136898 - RNA, 19 nt, Artificial Sequence
  Description of Artificial Sequence: Synthetic oligonucleotide
ucauuuacauuaagacuuu

SEQ ID NO: 3136899 - RNA, 19 nt, Artificial Sequence
  Description of Artificial Sequence: Synthetic oligonucleotide
ucaugaaaauaagcaacuc

SEQ ID NO: 3136900 - RNA, 19 nt, Artificial Sequence
  Description of Artificial Sequence: Synthetic oligonucleotide
gaacauuuucaaagaaaga

SEQ ID NO: 3136901 - RNA, 19 nt, Artificial Sequence
  Description of Artificial Sequence: Synthetic oligonucleotide
cacuagaccaagcuagcuc

SEQ ID NO: 3136902 - RNA, 19 nt, Artificial Sequence
  Description of Artificial Sequence: Synthetic oligonucleotide
gacuuaaaaguuucuugcu

SEQ ID NO: 3136903 - RNA, 19 nt, Artificial Sequence
  Description of Artificial Sequence: Synthetic oligonucleotide
aacucagccauuagcagua

SEQ ID NO: 3136904 - RNA, 19 nt, Artificial Sequence
  Description of Artificial Sequence: Synthetic oligonucleotide
uuucuucuuuaaaucuuuu

SEQ ID NO: 3136905 - RNA, 19 nt, Artificial Sequence
  Description of Artificial Sequence: Synthetic oligonucleotide
aaguuucuugcuaaucuuu

SEQ ID NO: 3136906 - RNA, 19 nt, Artificial Sequence
  Description of Artificial Sequence: Synthetic oligonucleotide
gaaagaugacuuaaaaguu

SEQ ID NO: 3136907 - RNA, 19 nt, Artificial Sequence
  Description of Artificial Sequence: Synthetic oligonucleotide
acauuaagacuuuggcauu

SEQ ID NO: 3136908 - RNA, 19 nt, Artificial Sequence
  Description of Artificial Sequence: Synthetic oligonucleotide
agaccaagcuagcuccuca

SEQ ID NO: 3136909 - RNA, 19 nt, Artificial Sequence
  Description of Artificial Sequence: Synthetic oligonucleotide
ccaagcuagcuccucaugc

SEQ ID NO: 3136910 - RNA, 19 nt, Artificial Sequence
  Description of Artificial Sequence: Synthetic oligonucleotide
uggugguauacagucauuu

SEQ ID NO: 3136911 - RNA, 19 nt, Artificial Sequence
  Description of Artificial Sequence: Synthetic oligonucleotide
auaagcaacucagccauua

SEQ ID NO: 3136912 - RNA, 19 nt, Artificial Sequence
  Description of Artificial Sequence: Synthetic oligonucleotide
cuugcuaaucuuuauucau

SEQ ID NO: 3136913 - RNA, 19 nt, Artificial Sequence
  Description of Artificial Sequence: Synthetic oligonucleotide
gcaacucagccauuagcag

SEQ ID NO: 3136914 - RNA, 19 nt, Artificial Sequence
  Description of Artificial Sequence: Synthetic oligonucleotide
gaugacuuaaaaguuucuu

SEQ ID NO: 3136915 - RNA, 19 nt, Artificial Sequence
  Description of Artificial Sequence: Synthetic oligonucleotide
cauuuacauuaagacuuug

SEQ ID NO: 3136916 - RNA, 19 nt, Artificial Sequence
  Description of Artificial Sequence: Synthetic oligonucleotide
ucacuagaccaagcuagcu

SEQ ID NO: 3136917 - RNA, 19 nt, Artificial Sequence
  Description of Artificial Sequence: Synthetic oligonucleotide
gccauuagcaguauauaca

SEQ ID NO: 3136918 - RNA, 19 nt, Artificial Sequence
  Description of Artificial Sequence: Synthetic oligonucleotide
uagcuccucaugccuaaaa

SEQ ID NO: 3136919 - RNA, 19 nt, Artificial Sequence
  Description of Artificial Sequence: Synthetic oligonucleotide
ccucaugccuaaaacauga

SEQ ID NO: 3136920 - RNA, 19 nt, Artificial Sequence
  Description of Artificial Sequence: Synthetic oligonucleotide
cuauggugguauacaguca

SEQ ID NO: 3136921 - RNA, 19 nt, Artificial Sequence
  Description of Artificial Sequence: Synthetic oligonucleotide
gcuccucaugccuaaaaca

SEQ ID NO: 3136922 - RNA, 19 nt, Artificial Sequence
  Description of Artificial Sequence: Synthetic oligonucleotide
agaugacuuaaaaguuucu

SEQ ID NO: 3136923 - RNA, 19 nt, Artificial Sequence
  Description of Artificial Sequence: Synthetic oligonucleotide
cuccucaugccuaaaacau

SEQ ID NO: 3136924 - RNA, 19 nt, Artificial Sequence
  Description of Artificial Sequence: Synthetic oligonucleotide
caacucagccauuagcagu

SEQ ID NO: 3136925 - RNA, 19 nt, Artificial Sequence
  Description of Artificial Sequence: Synthetic oligonucleotide
caguauauacauucucuau

SEQ ID NO: 3136926 - RNA, 19 nt, Artificial Sequence
  Description of Artificial Sequence: Synthetic oligonucleotide
gguauacagucauuuacau

SEQ ID NO: 3136927 - RNA, 19 nt, Artificial Sequence
  Description of Artificial Sequence: Synthetic oligonucleotide
guuucuugcuaaucuuuau

SEQ ID NO: 3136928 - RNA, 19 nt, Artificial Sequence
  Description of Artificial Sequence: Synthetic oligonucleotide
auuaagacuuuggcauuua

SEQ ID NO: 3136929 - RNA, 19 nt, Artificial Sequence
  Description of Artificial Sequence: Synthetic oligonucleotide
auacagucauuuacauuaa

SEQ ID NO: 3136930 - RNA, 19 nt, Artificial Sequence
  Description of Artificial Sequence: Synthetic oligonucleotide
aauaagcaacucagccauu

SEQ ID NO: 3136931 - RNA, 19 nt, Artificial Sequence
  Description of Artificial Sequence: Synthetic oligonucleotide
guauacagucauuuacauu

SEQ ID NO: 3136932 - RNA, 19 nt, Artificial Sequence
  Description of Artificial Sequence: Synthetic oligonucleotide
ggugguauacagucauuua

SEQ ID NO: 3136933 - RNA, 19 nt, Artificial Sequence
  Description of Artificial Sequence: Synthetic oligonucleotide
uagaccaagcuagcuccuc

SEQ ID NO: 3136934 - RNA, 19 nt, Artificial Sequence
  Description of Artificial Sequence: Synthetic oligonucleotide
cucuauggugguauacagu

SEQ ID NO: 3136935 - RNA, 19 nt, Artificial Sequence
  Description of Artificial Sequence: Synthetic oligonucleotide
gcuaaucuuuauucaugaa

SEQ ID NO: 3136936 - RNA, 19 nt, Artificial Sequence
  Description of Artificial Sequence: Synthetic oligonucleotide
ccauuagcaguauauacau

SEQ ID NO: 3136937 - RNA, 19 nt, Artificial Sequence
  Description of Artificial Sequence: Synthetic oligonucleotide
cucaugccuaaaacaugaa

SEQ ID NO: 3136938 - RNA, 19 nt, Artificial Sequence
  Description of Artificial Sequence: Synthetic oligonucleotide
cauucucuauggugguaua

SEQ ID NO: 3136939 - RNA, 19 nt, Artificial Sequence
  Description of Artificial Sequence: Synthetic oligonucleotide
gaccaagcuagcuccucau

SEQ ID NO: 3136940 - RNA, 19 nt, Artificial Sequence
  Description of Artificial Sequence: Synthetic oligonucleotide
cauuaagacuuuggcauuu

SEQ ID NO: 3136941 - RNA, 19 nt, Artificial Sequence
  Description of Artificial Sequence: Synthetic oligonucleotide
cagccauuagcaguauaua

SEQ ID NO: 3136942 - RNA, 19 nt, Artificial Sequence
  Description of Artificial Sequence: Synthetic oligonucleotide
agcuagcuccucaugccua

SEQ ID NO: 3136943 - RNA, 19 nt, Artificial Sequence
  Description of Artificial Sequence: Synthetic oligonucleotide
gcuagcuccucaugccuaa

SEQ ID NO: 3136944 - RNA, 19 nt, Artificial Sequence
  Description of Artificial Sequence: Synthetic oligonucleotide
cuagaccaagcuagcuccu

SEQ ID NO: 3136945 - RNA, 19 nt, Artificial Sequence
  Description of Artificial Sequence: Synthetic oligonucleotide
cauuagcaguauauacauu

SEQ ID NO: 3136946 - RNA, 19 nt, Artificial Sequence
  Description of Artificial Sequence: Synthetic oligonucleotide
cucagccauuagcaguaua

SEQ ID NO: 3136947 - RNA, 19 nt, Artificial Sequence
  Description of Artificial Sequence: Synthetic oligonucleotide
auggugguauacagucauu

SEQ ID NO: 3136948 - RNA, 19 nt, Artificial Sequence
  Description of Artificial Sequence: Synthetic oligonucleotide
acucagccauuagcaguau

SEQ ID NO: 3136949 - RNA, 19 nt, Artificial Sequence
  Description of Artificial Sequence: Synthetic oligonucleotide
cuagcuccucaugccuaaa

SEQ ID NO: 3136950 - RNA, 19 nt, Artificial Sequence
  Description of Artificial Sequence: Synthetic oligonucleotide
aaacuucagagauaguuac

SEQ ID NO: 3136951 - RNA, 19 nt, Artificial Sequence
  Description of Artificial Sequence: Synthetic oligonucleotide
aggaagauaaacuucagag

SEQ ID NO: 3136952 - RNA, 19 nt, Artificial Sequence
  Description of Artificial Sequence: Synthetic oligonucleotide
ucaaggaagauaaacuuca

SEQ ID NO: 3136953 - RNA, 19 nt, Artificial Sequence
  Description of Artificial Sequence: Synthetic oligonucleotide
uugauaccaggacacaugg

SEQ ID NO: 3136954 - RNA, 19 nt, Artificial Sequence
  Description of Artificial Sequence: Synthetic oligonucleotide
aaguguuagggucagguca

SEQ ID NO: 3136955 - RNA, 19 nt, Artificial Sequence
  Description of Artificial Sequence: Synthetic oligonucleotide
acggcugccauguugauac

SEQ ID NO: 3136956 - RNA, 19 nt, Artificial Sequence
  Description of Artificial Sequence: Synthetic oligonucleotide
caaaaucagguccagaggc

SEQ ID NO: 3136957 - RNA, 19 nt, Artificial Sequence
  Description of Artificial Sequence: Synthetic oligonucleotide
agauaaacuucagagauag

SEQ ID NO: 3136958 - RNA, 19 nt, Artificial Sequence
  Description of Artificial Sequence: Synthetic oligonucleotide
gagauaguuacugaccugg

SEQ ID NO: 3136959 - RNA, 19 nt, Artificial Sequence
  Description of Artificial Sequence: Synthetic oligonucleotide
ucagagauaguuacugacc

SEQ ID NO: 3136960 - RNA, 19 nt, Artificial Sequence
  Description of Artificial Sequence: Synthetic oligonucleotide
aaaguguuagggucagguc

SEQ ID NO: 3136961 - RNA, 19 nt, Artificial Sequence
  Description of Artificial Sequence: Synthetic oligonucleotide
ugggcuagggcuauacugg

SEQ ID NO: 3136962 - RNA, 19 nt, Artificial Sequence
  Description of Artificial Sequence: Synthetic oligonucleotide
aaaaucagguccagaggcc

SEQ ID NO: 3136963 - RNA, 19 nt, Artificial Sequence
  Description of Artificial Sequence: Synthetic oligonucleotide
gaagauaaacuucagagau

SEQ ID NO: 3136964 - RNA, 19 nt, Artificial Sequence
  Description of Artificial Sequence: Synthetic oligonucleotide
uggucaaggaagauaaacu

SEQ ID NO: 3136965 - RNA, 19 nt, Artificial Sequence
  Description of Artificial Sequence: Synthetic oligonucleotide
cauguugauaccaggacac

SEQ ID NO: 3136966 - RNA, 19 nt, Artificial Sequence
  Description of Artificial Sequence: Synthetic oligonucleotide
uuagggucaggucagcccc

SEQ ID NO: 3136967 - RNA, 19 nt, Artificial Sequence
  Description of Artificial Sequence: Synthetic oligonucleotide
uaaacuucagagauaguua

SEQ ID NO: 3136968 - RNA, 19 nt, Artificial Sequence
  Description of Artificial Sequence: Synthetic oligonucleotide
uucagagauaguuacugac

SEQ ID NO: 3136969 - RNA, 19 nt, Artificial Sequence
  Description of Artificial Sequence: Synthetic oligonucleotide
aaggaagauaaacuucaga

SEQ ID NO: 3136970 - RNA, 19 nt, Artificial Sequence
  Description of Artificial Sequence: Synthetic oligonucleotide
auaaacuucagagauaguu

SEQ ID NO: 3136971 - RNA, 19 nt, Artificial Sequence
  Description of Artificial Sequence: Synthetic oligonucleotide
ggcaaaaucagguccagag

SEQ ID NO: 3136972 - RNA, 19 nt, Artificial Sequence
  Description of Artificial Sequence: Synthetic oligonucleotide
gauaguuacugaccuggcc

SEQ ID NO: 3136973 - RNA, 19 nt, Artificial Sequence
  Description of Artificial Sequence: Synthetic oligonucleotide
gcuugaaacugccugacgg

SEQ ID NO: 3136974 - RNA, 19 nt, Artificial Sequence
  Description of Artificial Sequence: Synthetic oligonucleotide
acgaagcgagacuggaugc

SEQ ID NO: 3136975 - RNA, 19 nt, Artificial Sequence
  Description of Artificial Sequence: Synthetic oligonucleotide
ugugcuugaaacugccuga

SEQ ID NO: 3136976 - RNA, 19 nt, Artificial Sequence
  Description of Artificial Sequence: Synthetic oligonucleotide
uacuggggcaaaaucaggu

SEQ ID NO: 3136977 - RNA, 19 nt, Artificial Sequence
  Description of Artificial Sequence: Synthetic oligonucleotide
cuugaaacugccugacggc

SEQ ID NO: 3136978 - RNA, 19 nt, Artificial Sequence
  Description of Artificial Sequence: Synthetic oligonucleotide
cuggaugcaggucaccugg

SEQ ID NO: 3136979 - RNA, 19 nt, Artificial Sequence
  Description of Artificial Sequence: Synthetic oligonucleotide
ugccauguugauaccagga

SEQ ID NO: 3136980 - RNA, 19 nt, Artificial Sequence
  Description of Artificial Sequence: Synthetic oligonucleotide
acuggggcaaaaucagguc

SEQ ID NO: 3136981 - RNA, 19 nt, Artificial Sequence
  Description of Artificial Sequence: Synthetic oligonucleotide
gaaacugccugacggcugc

SEQ ID NO: 3136982 - RNA, 19 nt, Artificial Sequence
  Description of Artificial Sequence: Synthetic oligonucleotide
gaugcaggucaccuggggc

SEQ ID NO: 3136983 - RNA, 19 nt, Artificial Sequence
  Description of Artificial Sequence: Synthetic oligonucleotide
agggcuauacuggucaagg

SEQ ID NO: 3136984 - RNA, 19 nt, Artificial Sequence
  Description of Artificial Sequence: Synthetic oligonucleotide
cuggggcaaaaucaggucc

SEQ ID NO: 3136985 - RNA, 19 nt, Artificial Sequence
  Description of Artificial Sequence: Synthetic oligonucleotide
aaaucagguccagaggccu

SEQ ID NO: 3136986 - RNA, 19 nt, Artificial Sequence
  Description of Artificial Sequence: Synthetic oligonucleotide
guuagggucaggucagccc

SEQ ID NO: 3136987 - RNA, 19 nt, Artificial Sequence
  Description of Artificial Sequence: Synthetic oligonucleotide
cugggcuagggcuauacug

SEQ ID NO: 3136988 - RNA, 19 nt, Artificial Sequence
  Description of Artificial Sequence: Synthetic oligonucleotide
uggccucaaaguguuaggg

SEQ ID NO: 3136989 - RNA, 19 nt, Artificial Sequence
  Description of Artificial Sequence: Synthetic oligonucleotide
uggggcaaaaucaggucca

SEQ ID NO: 3136990 - RNA, 19 nt, Artificial Sequence
  Description of Artificial Sequence: Synthetic oligonucleotide
cugugcuugaaacugccug

SEQ ID NO: 3136991 - RNA, 19 nt, Artificial Sequence
  Description of Artificial Sequence: Synthetic oligonucleotide
cacgaagcgagacuggaug

SEQ ID NO: 3136992 - RNA, 19 nt, Artificial Sequence
  Description of Artificial Sequence: Synthetic oligonucleotide
uacugaccuggccucaaag

SEQ ID NO: 3136993 - RNA, 19 nt, Artificial Sequence
  Description of Artificial Sequence: Synthetic oligonucleotide
ugaccuggccucaaagugu

SEQ ID NO: 3136994 - RNA, 19 nt, Artificial Sequence
  Description of Artificial Sequence: Synthetic oligonucleotide
ugcuugaaacugccugacg

SEQ ID NO: 3136995 - RNA, 19 nt, Artificial Sequence
  Description of Artificial Sequence: Synthetic oligonucleotide
cuggucaaggaagauaaac

SEQ ID NO: 3136996 - RNA, 19 nt, Artificial Sequence
  Description of Artificial Sequence: Synthetic oligonucleotide
ugaaacugccugacggcug

SEQ ID NO: 3136997 - RNA, 19 nt, Artificial Sequence
  Description of Artificial Sequence: Synthetic oligonucleotide
cugaccuggccucaaagug

SEQ ID NO: 3136998 - RNA, 19 nt, Artificial Sequence
  Description of Artificial Sequence: Synthetic oligonucleotide
ggaagauaaacuucagaga

SEQ ID NO: 3136999 - RNA, 19 nt, Artificial Sequence
  Description of Artificial Sequence: Synthetic oligonucleotide
gcaaaaucagguccagagg

SEQ ID NO: 3137000 - RNA, 19 nt, Artificial Sequence
  Description of Artificial Sequence: Synthetic oligonucleotide
guugauaccaggacacaug

SEQ ID NO: 3137001 - RNA, 19 nt, Artificial Sequence
  Description of Artificial Sequence: Synthetic oligonucleotide
agagauaguuacugaccug

SEQ ID NO: 3137002 - RNA, 19 nt, Artificial Sequence
  Description of Artificial Sequence: Synthetic oligonucleotide
gcuauacuggucaaggaag

SEQ ID NO: 3137003 - RNA, 19 nt, Artificial Sequence
  Description of Artificial Sequence: Synthetic oligonucleotide
aguguuagggucaggucag

SEQ ID NO: 3137004 - RNA, 19 nt, Artificial Sequence
  Description of Artificial Sequence: Synthetic oligonucleotide
augcaggucaccuggggca

SEQ ID NO: 3137005 - RNA, 19 nt, Artificial Sequence
  Description of Artificial Sequence: Synthetic oligonucleotide
agauaguuacugaccuggc

SEQ ID NO: 3137006 - RNA, 19 nt, Artificial Sequence
  Description of Artificial Sequence: Synthetic oligonucleotide
uugaaacugccugacggcu

SEQ ID NO: 3137007 - RNA, 19 nt, Artificial Sequence
  Description of Artificial Sequence: Synthetic oligonucleotide
uguugauaccaggacacau

SEQ ID NO: 3137008 - RNA, 19 nt, Artificial Sequence
  Description of Artificial Sequence: Synthetic oligonucleotide
ugauaccaggacacauggc

SEQ ID NO: 3137009 - RNA, 19 nt, Artificial Sequence
  Description of Artificial Sequence: Synthetic oligonucleotide
gucaaggaagauaaacuuc

SEQ ID NO: 3137010 - RNA, 19 nt, Artificial Sequence
  Description of Artificial Sequence: Synthetic oligonucleotide
gagguacuggggcaaaauc

SEQ ID NO: 3137011 - RNA, 19 nt, Artificial Sequence
  Description of Artificial Sequence: Synthetic oligonucleotide
agcugugcuugaaacugcc

SEQ ID NO: 3137012 - RNA, 19 nt, Artificial Sequence
  Description of Artificial Sequence: Synthetic oligonucleotide
agguccagaggccugggcu

SEQ ID NO: 3137013 - RNA, 19 nt, Artificial Sequence
  Description of Artificial Sequence: Synthetic oligonucleotide
gguacuggggcaaaaucag

SEQ ID NO: 3137014 - RNA, 19 nt, Artificial Sequence
  Description of Artificial Sequence: Synthetic oligonucleotide
agguacuggggcaaaauca

SEQ ID NO: 3137015 - RNA, 19 nt, Artificial Sequence
  Description of Artificial Sequence: Synthetic oligonucleotide
cuauacuggucaaggaaga

SEQ ID NO: 3137016 - RNA, 19 nt, Artificial Sequence
  Description of Artificial Sequence: Synthetic oligonucleotide
gaagcgagacuggaugcag

SEQ ID NO: 3137017 - RNA, 19 nt, Artificial Sequence
  Description of Artificial Sequence: Synthetic oligonucleotide
uaguuacugaccuggccuc

SEQ ID NO: 3137018 - RNA, 19 nt, Artificial Sequence
  Description of Artificial Sequence: Synthetic oligonucleotide
cuggccucaaaguguuagg

SEQ ID NO: 3137019 - RNA, 19 nt, Artificial Sequence
  Description of Artificial Sequence: Synthetic oligonucleotide
ucagccccucccacgaagc

SEQ ID NO: 3137020 - RNA, 19 nt, Artificial Sequence
  Description of Artificial Sequence: Synthetic oligonucleotide
acuggaugcaggucaccug

SEQ ID NO: 3137021 - RNA, 19 nt, Artificial Sequence
  Description of Artificial Sequence: Synthetic oligonucleotide
cugccauguugauaccagg

SEQ ID NO: 3137022 - RNA, 19 nt, Artificial Sequence
  Description of Artificial Sequence: Synthetic oligonucleotide
agcgagacuggaugcaggu

SEQ ID NO: 3137023 - RNA, 19 nt, Artificial Sequence
  Description of Artificial Sequence: Synthetic oligonucleotide
aacuucagagauaguuacu

SEQ ID NO: 3137024 - RNA, 19 nt, Artificial Sequence
  Description of Artificial Sequence: Synthetic oligonucleotide
aagcgagacuggaugcagg

SEQ ID NO: 3137025 - RNA, 19 nt, Artificial Sequence
  Description of Artificial Sequence: Synthetic oligonucleotide
uguuagggucaggucagcc

SEQ ID NO: 3137026 - RNA, 19 nt, Artificial Sequence
  Description of Artificial Sequence: Synthetic oligonucleotide
aagauaaacuucagagaua

SEQ ID NO: 3137027 - RNA, 19 nt, Artificial Sequence
  Description of Artificial Sequence: Synthetic oligonucleotide
gcuagggcuauacugguca

SEQ ID NO: 3137028 - RNA, 19 nt, Artificial Sequence
  Description of Artificial Sequence: Synthetic oligonucleotide
gccucaaaguguuaggguc

SEQ ID NO: 3137029 - RNA, 19 nt, Artificial Sequence
  Description of Artificial Sequence: Synthetic oligonucleotide
ucccacgaagcgagacugg

SEQ ID NO: 3137030 - RNA, 19 nt, Artificial Sequence
  Description of Artificial Sequence: Synthetic oligonucleotide
cucaaaguguuagggucag

SEQ ID NO: 3137031 - RNA, 19 nt, Artificial Sequence
  Description of Artificial Sequence: Synthetic oligonucleotide
cugacggcugccauguuga

SEQ ID NO: 3137032 - RNA, 19 nt, Artificial Sequence
  Description of Artificial Sequence: Synthetic oligonucleotide
cuucagagauaguuacuga

SEQ ID NO: 3137033 - RNA, 19 nt, Artificial Sequence
  Description of Artificial Sequence: Synthetic oligonucleotide
gcagcugugcuugaaacug

SEQ ID NO: 3137034 - RNA, 19 nt, Artificial Sequence
  Description of Artificial Sequence: Synthetic oligonucleotide
uauacuggucaaggaagau

SEQ ID NO: 3137035 - RNA, 19 nt, Artificial Sequence
  Description of Artificial Sequence: Synthetic oligonucleotide
cagagauaguuacugaccu

SEQ ID NO: 3137036 - RNA, 19 nt, Artificial Sequence
  Description of Artificial Sequence: Synthetic oligonucleotide
guacuggggcaaaaucagg

SEQ ID NO: 3137037 - RNA, 19 nt, Artificial Sequence
  Description of Artificial Sequence: Synthetic oligonucleotide
aaacugccugacggcugcc

SEQ ID NO: 3137038 - RNA, 19 nt, Artificial Sequence
  Description of Artificial Sequence: Synthetic oligonucleotide
uagggcuauacuggucaag

SEQ ID NO: 3137039 - RNA, 19 nt, Artificial Sequence
  Description of Artificial Sequence: Synthetic oligonucleotide
caggucagccccucccacg

SEQ ID NO: 3137040 - RNA, 19 nt, Artificial Sequence
  Description of Artificial Sequence: Synthetic oligonucleotide
ucaaaguguuagggucagg

SEQ ID NO: 3137041 - RNA, 19 nt, Artificial Sequence
  Description of Artificial Sequence: Synthetic oligonucleotide
ggcuauacuggucaaggaa

SEQ ID NO: 3137042 - RNA, 19 nt, Artificial Sequence
  Description of Artificial Sequence: Synthetic oligonucleotide
cucccacgaagcgagacug

SEQ ID NO: 3137043 - RNA, 19 nt, Artificial Sequence
  Description of Artificial Sequence: Synthetic oligonucleotide
auaccaggacacauggcca

SEQ ID NO: 3137044 - RNA, 19 nt, Artificial Sequence
  Description of Artificial Sequence: Synthetic oligonucleotide
gucagccccucccacgaag

SEQ ID NO: 3137045 - RNA, 19 nt, Artificial Sequence
  Description of Artificial Sequence: Synthetic oligonucleotide
aggucagccccucccacga

SEQ ID NO: 3137046 - RNA, 19 nt, Artificial Sequence
  Description of Artificial Sequence: Synthetic oligonucleotide
ugccugacggcugccaugu

SEQ ID NO: 3137047 - RNA, 19 nt, Artificial Sequence
  Description of Artificial Sequence: Synthetic oligonucleotide
caaaguguuagggucaggu

SEQ ID NO: 3137048 - RNA, 19 nt, Artificial Sequence
  Description of Artificial Sequence: Synthetic oligonucleotide
gccauguugauaccaggac

SEQ ID NO: 3137049 - RNA, 19 nt, Artificial Sequence
  Description of Artificial Sequence: Synthetic oligonucleotide
uuacugaccuggccucaaa

SEQ ID NO: 3137050 - RNA, 19 nt, Artificial Sequence
  Description of Artificial Sequence: Synthetic oligonucleotide
ggucaggucagccccuccc

SEQ ID NO: 3137051 - RNA, 19 nt, Artificial Sequence
  Description of Artificial Sequence: Synthetic oligonucleotide
ggucaaggaagauaaacuu

SEQ ID NO: 3137052 - RNA, 19 nt, Artificial Sequence
  Description of Artificial Sequence: Synthetic oligonucleotide
gagacuggaugcaggucac

SEQ ID NO: 3137053 - RNA, 19 nt, Artificial Sequence
  Description of Artificial Sequence: Synthetic oligonucleotide
gcugccauguugauaccag

SEQ ID NO: 3137054 - RNA, 19 nt, Artificial Sequence
  Description of Artificial Sequence: Synthetic oligonucleotide
ccauguugauaccaggaca

SEQ ID NO: 3137055 - RNA, 19 nt, Artificial Sequence
  Description of Artificial Sequence: Synthetic oligonucleotide
auguugauaccaggacaca

SEQ ID NO: 3137056 - RNA, 19 nt, Artificial Sequence
  Description of Artificial Sequence: Synthetic oligonucleotide
gugcuugaaacugccugac

SEQ ID NO: 3137057 - RNA, 19 nt, Artificial Sequence
  Description of Artificial Sequence: Synthetic oligonucleotide
acugccugacggcugccau

SEQ ID NO: 3137058 - RNA, 19 nt, Artificial Sequence
  Description of Artificial Sequence: Synthetic oligonucleotide
uagggucaggucagccccu

SEQ ID NO: 3137059 - RNA, 19 nt, Artificial Sequence
  Description of Artificial Sequence: Synthetic oligonucleotide
aacugccugacggcugcca

SEQ ID NO: 3137060 - RNA, 19 nt, Artificial Sequence
  Description of Artificial Sequence: Synthetic oligonucleotide
aguuacugaccuggccuca

SEQ ID NO: 3137061 - RNA, 19 nt, Artificial Sequence
  Description of Artificial Sequence: Synthetic oligonucleotide
gggcagcugugcuugaaac

SEQ ID NO: 3137062 - RNA, 19 nt, Artificial Sequence
  Description of Artificial Sequence: Synthetic oligonucleotide
ccuggccucaaaguguuag

SEQ ID NO: 3137063 - RNA, 19 nt, Artificial Sequence
  Description of Artificial Sequence: Synthetic oligonucleotide
gacuggaugcaggucaccu

SEQ ID NO: 3137064 - RNA, 19 nt, Artificial Sequence
  Description of Artificial Sequence: Synthetic oligonucleotide
cugccugacggcugccaug

SEQ ID NO: 3137065 - RNA, 19 nt, Artificial Sequence
  Description of Artificial Sequence: Synthetic oligonucleotide
ccucaaaguguuaggguca

SEQ ID NO: 3137066 - RNA, 19 nt, Artificial Sequence
  Description of Artificial Sequence: Synthetic oligonucleotide
cagccccucccacgaagcg

SEQ ID NO: 3137067 - RNA, 19 nt, Artificial Sequence
  Description of Artificial Sequence: Synthetic oligonucleotide
ccugacggcugccauguug

SEQ ID NO: 3137068 - RNA, 19 nt, Artificial Sequence
  Description of Artificial Sequence: Synthetic oligonucleotide
guaggagguacuggggcaa

SEQ ID NO: 3137069 - RNA, 19 nt, Artificial Sequence
  Description of Artificial Sequence: Synthetic oligonucleotide
guccagaggccugggcuag

SEQ ID NO: 3137070 - RNA, 19 nt, Artificial Sequence
  Description of Artificial Sequence: Synthetic oligonucleotide
uccagaggccugggcuagg

SEQ ID NO: 3137071 - RNA, 19 nt, Artificial Sequence
  Description of Artificial Sequence: Synthetic oligonucleotide
cagguccagaggccugggc

SEQ ID NO: 3137072 - RNA, 19 nt, Artificial Sequence
  Description of Artificial Sequence: Synthetic oligonucleotide
agggucaggucagccccuc

SEQ ID NO: 3137073 - RNA, 19 nt, Artificial Sequence
  Description of Artificial Sequence: Synthetic oligonucleotide
cuagggcuauacuggucaa

SEQ ID NO: 3137074 - RNA, 19 nt, Artificial Sequence
  Description of Artificial Sequence: Synthetic oligonucleotide
gauaaacuucagagauagu

SEQ ID NO: 3137075 - RNA, 19 nt, Artificial Sequence
  Description of Artificial Sequence: Synthetic oligonucleotide
agccccucccacgaagcga

SEQ ID NO: 3137076 - RNA, 19 nt, Artificial Sequence
  Description of Artificial Sequence: Synthetic oligonucleotide
uaggagguacuggggcaaa

SEQ ID NO: 3137077 - RNA, 19 nt, Artificial Sequence
  Description of Artificial Sequence: Synthetic oligonucleotide
gggcuauacuggucaagga

SEQ ID NO: 3137078 - RNA, 19 nt, Artificial Sequence
  Description of Artificial Sequence: Synthetic oligonucleotide
accuggggcagcugugcuu

SEQ ID NO: 3137079 - RNA, 19 nt, Artificial Sequence
  Description of Artificial Sequence: Synthetic oligonucleotide
gccccucccacgaagcgag

SEQ ID NO: 3137080 - RNA, 19 nt, Artificial Sequence
  Description of Artificial Sequence: Synthetic oligonucleotide
guuacugaccuggccucaa

SEQ ID NO: 3137081 - RNA, 19 nt, Artificial Sequence
  Description of Artificial Sequence: Synthetic oligonucleotide
ggggcaaaaucagguccag

SEQ ID NO: 3137082 - RNA, 19 nt, Artificial Sequence
  Description of Artificial Sequence: Synthetic oligonucleotide
guguuagggucaggucagc

SEQ ID NO: 3137083 - RNA, 19 nt, Artificial Sequence
  Description of Artificial Sequence: Synthetic oligonucleotide
ugacggcugccauguugau

SEQ ID NO: 3137084 - RNA, 19 nt, Artificial Sequence
  Description of Artificial Sequence: Synthetic oligonucleotide
gguccagaggccugggcua

SEQ ID NO: 3137085 - RNA, 19 nt, Artificial Sequence
  Description of Artificial Sequence: Synthetic oligonucleotide
ggcagcugugcuugaaacu

SEQ ID NO: 3137086 - RNA, 19 nt, Artificial Sequence
  Description of Artificial Sequence: Synthetic oligonucleotide
gacggcugccauguugaua

SEQ ID NO: 3137087 - RNA, 19 nt, Artificial Sequence
  Description of Artificial Sequence: Synthetic oligonucleotide
acuggucaaggaagauaaa

SEQ ID NO: 3137088 - RNA, 19 nt, Artificial Sequence
  Description of Artificial Sequence: Synthetic oligonucleotide
ggccucaaaguguuagggu

SEQ ID NO: 3137089 - RNA, 19 nt, Artificial Sequence
  Description of Artificial Sequence: Synthetic oligonucleotide
uggggcagcugugcuugaa

SEQ ID NO: 3137090 - RNA, 19 nt, Artificial Sequence
  Description of Artificial Sequence: Synthetic oligonucleotide
aggagguacuggggcaaaa

SEQ ID NO: 3137091 - RNA, 19 nt, Artificial Sequence
  Description of Artificial Sequence: Synthetic oligonucleotide
ggcugccauguugauacca

SEQ ID NO: 3137092 - RNA, 19 nt, Artificial Sequence
  Description of Artificial Sequence: Synthetic oligonucleotide
gaccuggccucaaaguguu

SEQ ID NO: 3137093 - RNA, 19 nt, Artificial Sequence
  Description of Artificial Sequence: Synthetic oligonucleotide
ggucaccuggggcagcugu

SEQ ID NO: 3137094 - RNA, 19 nt, Artificial Sequence
  Description of Artificial Sequence: Synthetic oligonucleotide
ggggcagcugugcuugaaa

SEQ ID NO: 3137095 - RNA, 19 nt, Artificial Sequence
  Description of Artificial Sequence: Synthetic oligonucleotide
ggcuagggcuauacugguc

SEQ ID NO: 3137096 - RNA, 19 nt, Artificial Sequence
  Description of Artificial Sequence: Synthetic oligonucleotide
gggcaaaaucagguccaga

SEQ ID NO: 3137097 - RNA, 19 nt, Artificial Sequence
  Description of Artificial Sequence: Synthetic oligonucleotide
gccugggcuagggcuauac

SEQ ID NO: 3137098 - RNA, 19 nt, Artificial Sequence
  Description of Artificial Sequence: Synthetic oligonucleotide
gggcuagggcuauacuggu

SEQ ID NO: 3137099 - RNA, 19 nt, Artificial Sequence
  Description of Artificial Sequence: Synthetic oligonucleotide
aggccugggcuagggcuau

SEQ ID NO: 3137100 - RNA, 19 nt, Artificial Sequence
  Description of Artificial Sequence: Synthetic oligonucleotide
cccacgaagcgagacugga

SEQ ID NO: 3137101 - RNA, 19 nt, Artificial Sequence
  Description of Artificial Sequence: Synthetic oligonucleotide
cccucccacgaagcgagac

SEQ ID NO: 3137102 - RNA, 19 nt, Artificial Sequence
  Description of Artificial Sequence: Synthetic oligonucleotide
gcgagacuggaugcagguc

SEQ ID NO: 3137103 - RNA, 19 nt, Artificial Sequence
  Description of Artificial Sequence: Synthetic oligonucleotide
cgaagcgagacuggaugca

SEQ ID NO: 3137104 - RNA, 19 nt, Artificial Sequence
  Description of Artificial Sequence: Synthetic oligonucleotide
caggucaccuggggcagcu

SEQ ID NO: 3137105 - RNA, 19 nt, Artificial Sequence
  Description of Artificial Sequence: Synthetic oligonucleotide
caccuggggcagcugugcu

SEQ ID NO: 3137106 - RNA, 19 nt, Artificial Sequence
  Description of Artificial Sequence: Synthetic oligonucleotide
gcaggucaccuggggcagc

SEQ ID NO: 3137107 - RNA, 19 nt, Artificial Sequence
  Description of Artificial Sequence: Synthetic oligonucleotide
gcugugcuugaaacugccu

SEQ ID NO: 3137108 - RNA, 19 nt, Artificial Sequence
  Description of Artificial Sequence: Synthetic oligonucleotide
ccucccacgaagcgagacu

SEQ ID NO: 3137109 - RNA, 19 nt, Artificial Sequence
  Description of Artificial Sequence: Synthetic oligonucleotide
ggucagccccucccacgaa

SEQ ID NO: 3137110 - RNA, 19 nt, Artificial Sequence
  Description of Artificial Sequence: Synthetic oligonucleotide
accuggccucaaaguguua

SEQ ID NO: 3137111 - RNA, 19 nt, Artificial Sequence
  Description of Artificial Sequence: Synthetic oligonucleotide
ccacgaagcgagacuggau

SEQ ID NO: 3137112 - RNA, 19 nt, Artificial Sequence
  Description of Artificial Sequence: Synthetic oligonucleotide
ccugggcuagggcuauacu

SEQ ID NO: 3137113 - RNA, 19 nt, Artificial Sequence
  Description of Artificial Sequence: Synthetic oligonucleotide
cggcugccauguugauacc

SEQ ID NO: 3137114 - RNA, 19 nt, Artificial Sequence
  Description of Artificial Sequence: Synthetic oligonucleotide
ccccucccacgaagcgaga

SEQ ID NO: 3137115 - RNA, 19 nt, Artificial Sequence
  Description of Artificial Sequence: Synthetic oligonucleotide
gccugacggcugccauguu

SEQ ID NO: 3137116 - RNA, 19 nt, Artificial Sequence
  Description of Artificial Sequence: Synthetic oligonucleotide
cuugugaugauuuacauuc

SEQ ID NO: 3137117 - RNA, 19 nt, Artificial Sequence
  Description of Artificial Sequence: Synthetic oligonucleotide
aguauuuucuuccuaacuc

SEQ ID NO: 3137118 - RNA, 19 nt, Artificial Sequence
  Description of Artificial Sequence: Synthetic oligonucleotide
ucugacaagacucuaagcu

SEQ ID NO: 3137119 - RNA, 19 nt, Artificial Sequence
  Description of Artificial Sequence: Synthetic oligonucleotide
caucagaugaugaagaaag

SEQ ID NO: 3137120 - RNA, 19 nt, Artificial Sequence
  Description of Artificial Sequence: Synthetic oligonucleotide
ucaguuauaggugagaucu

SEQ ID NO: 3137121 - RNA, 19 nt, Artificial Sequence
  Description of Artificial Sequence: Synthetic oligonucleotide
cuuucagauaaauuaaggc

SEQ ID NO: 3137122 - RNA, 19 nt, Artificial Sequence
  Description of Artificial Sequence: Synthetic oligonucleotide
uauccuuucagauaaauua

SEQ ID NO: 3137123 - RNA, 19 nt, Artificial Sequence
  Description of Artificial Sequence: Synthetic oligonucleotide
aauauaacucuggguaucc

SEQ ID NO: 3137124 - RNA, 19 nt, Artificial Sequence
  Description of Artificial Sequence: Synthetic oligonucleotide
uuuacauucugacaagacu

SEQ ID NO: 3137125 - RNA, 19 nt, Artificial Sequence
  Description of Artificial Sequence: Synthetic oligonucleotide
uuacauucugacaagacuc

SEQ ID NO: 3137126 - RNA, 19 nt, Artificial Sequence
  Description of Artificial Sequence: Synthetic oligonucleotide
aagaaaguugcucugacuu

SEQ ID NO: 3137127 - RNA, 19 nt, Artificial Sequence
  Description of Artificial Sequence: Synthetic oligonucleotide
agaugaugaagaaaguugc

SEQ ID NO: 3137128 - RNA, 19 nt, Artificial Sequence
  Description of Artificial Sequence: Synthetic oligonucleotide
auaggugagaucuuuaagu

SEQ ID NO: 3137129 - RNA, 19 nt, Artificial Sequence
  Description of Artificial Sequence: Synthetic oligonucleotide
uauuuucuuccuaacuccg

SEQ ID NO: 3137130 - RNA, 19 nt, Artificial Sequence
  Description of Artificial Sequence: Synthetic oligonucleotide
ucugacuucagguuggcug

SEQ ID NO: 3137131 - RNA, 19 nt, Artificial Sequence
  Description of Artificial Sequence: Synthetic oligonucleotide
auauccgucaauauaacuc

SEQ ID NO: 3137132 - RNA, 19 nt, Artificial Sequence
  Description of Artificial Sequence: Synthetic oligonucleotide
uuaaguauuuucuuccuaa

SEQ ID NO: 3137133 - RNA, 19 nt, Artificial Sequence
  Description of Artificial Sequence: Synthetic oligonucleotide
ugaugaagaaaguugcucu

SEQ ID NO: 3137134 - RNA, 19 nt, Artificial Sequence
  Description of Artificial Sequence: Synthetic oligonucleotide
ugacaagacucuaagcugc

SEQ ID NO: 3137135 - RNA, 19 nt, Artificial Sequence
  Description of Artificial Sequence: Synthetic oligonucleotide
uauaggugagaucuuuaag

SEQ ID NO: 3137136 - RNA, 19 nt, Artificial Sequence
  Description of Artificial Sequence: Synthetic oligonucleotide
ugaugauuuacauucugac

SEQ ID NO: 3137137 - RNA, 19 nt, Artificial Sequence
  Description of Artificial Sequence: Synthetic oligonucleotide
cagaugaugaagaaaguug

SEQ ID NO: 3137138 - RNA, 19 nt, Artificial Sequence
  Description of Artificial Sequence: Synthetic oligonucleotide
gucaauauaacucugggua

SEQ ID NO: 3137139 - RNA, 19 nt, Artificial Sequence
  Description of Artificial Sequence: Synthetic oligonucleotide
aaguauuuucuuccuaacu

SEQ ID NO: 3137140 - RNA, 19 nt, Artificial Sequence
  Description of Artificial Sequence: Synthetic oligonucleotide
uucuuccuaacuccguucg

SEQ ID NO: 3137141 - RNA, 19 nt, Artificial Sequence
  Description of Artificial Sequence: Synthetic oligonucleotide
uggguauccuuucagauaa

SEQ ID NO: 3137142 - RNA, 19 nt, Artificial Sequence
  Description of Artificial Sequence: Synthetic oligonucleotide
guauuuucuuccuaacucc

SEQ ID NO: 3137143 - RNA, 19 nt, Artificial Sequence
  Description of Artificial Sequence: Synthetic oligonucleotide
uauccgucaauauaacucu

SEQ ID NO: 3137144 - RNA, 19 nt, Artificial Sequence
  Description of Artificial Sequence: Synthetic oligonucleotide
aagacucuaagcugccauc

SEQ ID NO: 3137145 - RNA, 19 nt, Artificial Sequence
  Description of Artificial Sequence: Synthetic oligonucleotide
uccuuucagauaaauuaag

SEQ ID NO: 3137146 - RNA, 19 nt, Artificial Sequence
  Description of Artificial Sequence: Synthetic oligonucleotide
auucugacaagacucuaag

SEQ ID NO: 3137147 - RNA, 19 nt, Artificial Sequence
  Description of Artificial Sequence: Synthetic oligonucleotide
uccgucaauauaacucugg

SEQ ID NO: 3137148 - RNA, 19 nt, Artificial Sequence
  Description of Artificial Sequence: Synthetic oligonucleotide
ugugaugauuuacauucug

SEQ ID NO: 3137149 - RNA, 19 nt, Artificial Sequence
  Description of Artificial Sequence: Synthetic oligonucleotide
gagaucuuuaaguauuuuc

SEQ ID NO: 3137150 - RNA, 19 nt, Artificial Sequence
  Description of Artificial Sequence: Synthetic oligonucleotide
gaugauuuacauucugaca

SEQ ID NO: 3137151 - RNA, 19 nt, Artificial Sequence
  Description of Artificial Sequence: Synthetic oligonucleotide
agaucuuuaaguauuuucu

SEQ ID NO: 3137152 - RNA, 19 nt, Artificial Sequence
  Description of Artificial Sequence: Synthetic oligonucleotide
gaugaagaaaguugcucug

SEQ ID NO: 3137153 - RNA, 19 nt, Artificial Sequence
  Description of Artificial Sequence: Synthetic oligonucleotide
agauaaauuaaggcuuugg

SEQ ID NO: 3137154 - RNA, 19 nt, Artificial Sequence
  Description of Artificial Sequence: Synthetic oligonucleotide
ugauuuacauucugacaag

SEQ ID NO: 3137155 - RNA, 19 nt, Artificial Sequence
  Description of Artificial Sequence: Synthetic oligonucleotide
uuggcuguaccacucaaac

SEQ ID NO: 3137156 - RNA, 19 nt, Artificial Sequence
  Description of Artificial Sequence: Synthetic oligonucleotide
acuggccucaguuauaggu

SEQ ID NO: 3137157 - RNA, 19 nt, Artificial Sequence
  Description of Artificial Sequence: Synthetic oligonucleotide
ucaaacuggccucaguuau

SEQ ID NO: 3137158 - RNA, 19 nt, Artificial Sequence
  Description of Artificial Sequence: Synthetic oligonucleotide
augaugaagaaaguugcuc

SEQ ID NO: 3137159 - RNA, 19 nt, Artificial Sequence
  Description of Artificial Sequence: Synthetic oligonucleotide
ggcuguaccacucaaacug

SEQ ID NO: 3137160 - RNA, 19 nt, Artificial Sequence
  Description of Artificial Sequence: Synthetic oligonucleotide
agaaaguugcucugacuuc

SEQ ID NO: 3137161 - RNA, 19 nt, Artificial Sequence
  Description of Artificial Sequence: Synthetic oligonucleotide
uuauaggugagaucuuuaa

SEQ ID NO: 3137162 - RNA, 19 nt, Artificial Sequence
  Description of Artificial Sequence: Synthetic oligonucleotide
aaacuggccucaguuauag

SEQ ID NO: 3137163 - RNA, 19 nt, Artificial Sequence
  Description of Artificial Sequence: Synthetic oligonucleotide
ugaagaaaguugcucugac

SEQ ID NO: 3137164 - RNA, 19 nt, Artificial Sequence
  Description of Artificial Sequence: Synthetic oligonucleotide
auuuacauucugacaagac

SEQ ID NO: 3137165 - RNA, 19 nt, Artificial Sequence
  Description of Artificial Sequence: Synthetic oligonucleotide
ugccaucagaugaugaaga

SEQ ID NO: 3137166 - RNA, 19 nt, Artificial Sequence
  Description of Artificial Sequence: Synthetic oligonucleotide
aguugcucugacuucaggu

SEQ ID NO: 3137167 - RNA, 19 nt, Artificial Sequence
  Description of Artificial Sequence: Synthetic oligonucleotide
uguaccacucaaacuggcc

SEQ ID NO: 3137168 - RNA, 19 nt, Artificial Sequence
  Description of Artificial Sequence: Synthetic oligonucleotide
ucaauauaacucuggguau

SEQ ID NO: 3137169 - RNA, 19 nt, Artificial Sequence
  Description of Artificial Sequence: Synthetic oligonucleotide
ugcucugacuucagguugg

SEQ ID NO: 3137170 - RNA, 19 nt, Artificial Sequence
  Description of Artificial Sequence: Synthetic oligonucleotide
cugacaagacucuaagcug

SEQ ID NO: 3137171 - RNA, 19 nt, Artificial Sequence
  Description of Artificial Sequence: Synthetic oligonucleotide
uuuaaguauuuucuuccua

SEQ ID NO: 3137172 - RNA, 19 nt, Artificial Sequence
  Description of Artificial Sequence: Synthetic oligonucleotide
uaaguauuuucuuccuaac

SEQ ID NO: 3137173 - RNA, 19 nt, Artificial Sequence
  Description of Artificial Sequence: Synthetic oligonucleotide
uacauucugacaagacucu

SEQ ID NO: 3137174 - RNA, 19 nt, Artificial Sequence
  Description of Artificial Sequence: Synthetic oligonucleotide
cuaagcugccaucagauga

SEQ ID NO: 3137175 - RNA, 19 nt, Artificial Sequence
  Description of Artificial Sequence: Synthetic oligonucleotide
acuucagguuggcuguacc

SEQ ID NO: 3137176 - RNA, 19 nt, Artificial Sequence
  Description of Artificial Sequence: Synthetic oligonucleotide
uugcucugacuucagguug

SEQ ID NO: 3137177 - RNA, 19 nt, Artificial Sequence
  Description of Artificial Sequence: Synthetic oligonucleotide
aaguugcucugacuucagg

SEQ ID NO: 3137178 - RNA, 19 nt, Artificial Sequence
  Description of Artificial Sequence: Synthetic oligonucleotide
aggauauccgucaauauaa

SEQ ID NO: 3137179 - RNA, 19 nt, Artificial Sequence
  Description of Artificial Sequence: Synthetic oligonucleotide
uuuucuuccuaacuccguu

SEQ ID NO: 3137180 - RNA, 19 nt, Artificial Sequence
  Description of Artificial Sequence: Synthetic oligonucleotide
aaagcucuugugaugauuu

SEQ ID NO: 3137181 - RNA, 19 nt, Artificial Sequence
  Description of Artificial Sequence: Synthetic oligonucleotide
ccuuucagauaaauuaagg

SEQ ID NO: 3137182 - RNA, 19 nt, Artificial Sequence
  Description of Artificial Sequence: Synthetic oligonucleotide
agcucuugugaugauuuac

SEQ ID NO: 3137183 - RNA, 19 nt, Artificial Sequence
  Description of Artificial Sequence: Synthetic oligonucleotide
ucuggguauccuuucagau

SEQ ID NO: 3137184 - RNA, 19 nt, Artificial Sequence
  Description of Artificial Sequence: Synthetic oligonucleotide
gaaaguugcucugacuuca

SEQ ID NO: 3137185 - RNA, 19 nt, Artificial Sequence
  Description of Artificial Sequence: Synthetic oligonucleotide
uucugacaagacucuaagc

SEQ ID NO: 3137186 - RNA, 19 nt, Artificial Sequence
  Description of Artificial Sequence: Synthetic oligonucleotide
ucagaugaugaagaaaguu

SEQ ID NO: 3137187 - RNA, 19 nt, Artificial Sequence
  Description of Artificial Sequence: Synthetic oligonucleotide
uaagcugccaucagaugau

SEQ ID NO: 3137188 - RNA, 19 nt, Artificial Sequence
  Description of Artificial Sequence: Synthetic oligonucleotide
uccguucgcaggauauccg

SEQ ID NO: 3137189 - RNA, 19 nt, Artificial Sequence
  Description of Artificial Sequence: Synthetic oligonucleotide
uauaacucuggguauccuu

SEQ ID NO: 3137190 - RNA, 19 nt, Artificial Sequence
  Description of Artificial Sequence: Synthetic oligonucleotide
acucaaacuggccucaguu

SEQ ID NO: 3137191 - RNA, 19 nt, Artificial Sequence
  Description of Artificial Sequence: Synthetic oligonucleotide
uuccuaacuccguucgcag

SEQ ID NO: 3137192 - RNA, 19 nt, Artificial Sequence
  Description of Artificial Sequence: Synthetic oligonucleotide
uccuaacuccguucgcagg

SEQ ID NO: 3137193 - RNA, 19 nt, Artificial Sequence
  Description of Artificial Sequence: Synthetic oligonucleotide
ucuugugaugauuuacauu

SEQ ID NO: 3137194 - RNA, 19 nt, Artificial Sequence
  Description of Artificial Sequence: Synthetic oligonucleotide
ucuaagcugccaucagaug

SEQ ID NO: 3137195 - RNA, 19 nt, Artificial Sequence
  Description of Artificial Sequence: Synthetic oligonucleotide
acucuaagcugccaucaga

SEQ ID NO: 3137196 - RNA, 19 nt, Artificial Sequence
  Description of Artificial Sequence: Synthetic oligonucleotide
cuggccucaguuauaggug

SEQ ID NO: 3137197 - RNA, 19 nt, Artificial Sequence
  Description of Artificial Sequence: Synthetic oligonucleotide
acucuggguauccuuucag

SEQ ID NO: 3137198 - RNA, 19 nt, Artificial Sequence
  Description of Artificial Sequence: Synthetic oligonucleotide
uuucuuccuaacuccguuc

SEQ ID NO: 3137199 - RNA, 19 nt, Artificial Sequence
  Description of Artificial Sequence: Synthetic oligonucleotide
uugugaugauuuacauucu

SEQ ID NO: 3137200 - RNA, 19 nt, Artificial Sequence
  Description of Artificial Sequence: Synthetic oligonucleotide
ucagguuggcuguaccacu

SEQ ID NO: 3137201 - RNA, 19 nt, Artificial Sequence
  Description of Artificial Sequence: Synthetic oligonucleotide
uucagguuggcuguaccac

SEQ ID NO: 3137202 - RNA, 19 nt, Artificial Sequence
  Description of Artificial Sequence: Synthetic oligonucleotide
uggccucaguuauagguga

SEQ ID NO: 3137203 - RNA, 19 nt, Artificial Sequence
  Description of Artificial Sequence: Synthetic oligonucleotide
ucuuccuaacuccguucgc

SEQ ID NO: 3137204 - RNA, 19 nt, Artificial Sequence
  Description of Artificial Sequence: Synthetic oligonucleotide
aaaagcucuugugaugauu

SEQ ID NO: 3137205 - RNA, 19 nt, Artificial Sequence
  Description of Artificial Sequence: Synthetic oligonucleotide
gacucuaagcugccaucag

SEQ ID NO: 3137206 - RNA, 19 nt, Artificial Sequence
  Description of Artificial Sequence: Synthetic oligonucleotide
gauauccgucaauauaacu

SEQ ID NO: 3137207 - RNA, 19 nt, Artificial Sequence
  Description of Artificial Sequence: Synthetic oligonucleotide
cucaguuauaggugagauc

SEQ ID NO: 3137208 - RNA, 19 nt, Artificial Sequence
  Description of Artificial Sequence: Synthetic oligonucleotide
cuguaccacucaaacuggc

SEQ ID NO: 3137209 - RNA, 19 nt, Artificial Sequence
  Description of Artificial Sequence: Synthetic oligonucleotide
uaccacucaaacuggccuc

SEQ ID NO: 3137210 - RNA, 19 nt, Artificial Sequence
  Description of Artificial Sequence: Synthetic oligonucleotide
guucgcaggauauccguca

SEQ ID NO: 3137211 - RNA, 19 nt, Artificial Sequence
  Description of Artificial Sequence: Synthetic oligonucleotide
cugccaucagaugaugaag

SEQ ID NO: 3137212 - RNA, 19 nt, Artificial Sequence
  Description of Artificial Sequence: Synthetic oligonucleotide
aaaguugcucugacuucag

SEQ ID NO: 3137213 - RNA, 19 nt, Artificial Sequence
  Description of Artificial Sequence: Synthetic oligonucleotide
aguuauaggugagaucuuu

SEQ ID NO: 3137214 - RNA, 19 nt, Artificial Sequence
  Description of Artificial Sequence: Synthetic oligonucleotide
gugaugauuuacauucuga

SEQ ID NO: 3137215 - RNA, 19 nt, Artificial Sequence
  Description of Artificial Sequence: Synthetic oligonucleotide
agacucuaagcugccauca

SEQ ID NO: 3137216 - RNA, 19 nt, Artificial Sequence
  Description of Artificial Sequence: Synthetic oligonucleotide
cuccguucgcaggauaucc

SEQ ID NO: 3137217 - RNA, 19 nt, Artificial Sequence
  Description of Artificial Sequence: Synthetic oligonucleotide
uggcuguaccacucaaacu

SEQ ID NO: 3137218 - RNA, 19 nt, Artificial Sequence
  Description of Artificial Sequence: Synthetic oligonucleotide
cauucugacaagacucuaa

SEQ ID NO: 3137219 - RNA, 19 nt, Artificial Sequence
  Description of Artificial Sequence: Synthetic oligonucleotide
gaagaaaguugcucugacu

SEQ ID NO: 3137220 - RNA, 19 nt, Artificial Sequence
  Description of Artificial Sequence: Synthetic oligonucleotide
uaacucuggguauccuuuc

SEQ ID NO: 3137221 - RNA, 19 nt, Artificial Sequence
  Description of Artificial Sequence: Synthetic oligonucleotide
gacaagacucuaagcugcc

SEQ ID NO: 3137222 - RNA, 19 nt, Artificial Sequence
  Description of Artificial Sequence: Synthetic oligonucleotide
auaacucuggguauccuuu

SEQ ID NO: 3137223 - RNA, 19 nt, Artificial Sequence
  Description of Artificial Sequence: Synthetic oligonucleotide
uucgcaggauauccgucaa

SEQ ID NO: 3137224 - RNA, 19 nt, Artificial Sequence
  Description of Artificial Sequence: Synthetic oligonucleotide
ccgucaauauaacucuggg

SEQ ID NO: 3137225 - RNA, 19 nt, Artificial Sequence
  Description of Artificial Sequence: Synthetic oligonucleotide
cuucagguuggcuguacca

SEQ ID NO: 3137226 - RNA, 19 nt, Artificial Sequence
  Description of Artificial Sequence: Synthetic oligonucleotide
aacuccguucgcaggauau

SEQ ID NO: 3137227 - RNA, 19 nt, Artificial Sequence
  Description of Artificial Sequence: Synthetic oligonucleotide
caggauauccgucaauaua

SEQ ID NO: 3137228 - RNA, 19 nt, Artificial Sequence
  Description of Artificial Sequence: Synthetic oligonucleotide
guaccacucaaacuggccu

SEQ ID NO: 3137229 - RNA, 19 nt, Artificial Sequence
  Description of Artificial Sequence: Synthetic oligonucleotide
cuuuaaguauuuucuuccu

SEQ ID NO: 3137230 - RNA, 19 nt, Artificial Sequence
  Description of Artificial Sequence: Synthetic oligonucleotide
auuuucuuccuaacuccgu

SEQ ID NO: 3137231 - RNA, 19 nt, Artificial Sequence
  Description of Artificial Sequence: Synthetic oligonucleotide
aagcucuugugaugauuua

SEQ ID NO: 3137232 - RNA, 19 nt, Artificial Sequence
  Description of Artificial Sequence: Synthetic oligonucleotide
cuuccuaacuccguucgca

SEQ ID NO: 3137233 - RNA, 19 nt, Artificial Sequence
  Description of Artificial Sequence: Synthetic oligonucleotide
cagguuggcuguaccacuc

SEQ ID NO: 3137234 - RNA, 19 nt, Artificial Sequence
  Description of Artificial Sequence: Synthetic oligonucleotide
ugagaucuuuaaguauuuu

SEQ ID NO: 3137235 - RNA, 19 nt, Artificial Sequence
  Description of Artificial Sequence: Synthetic oligonucleotide
cucuggguauccuuucaga

SEQ ID NO: 3137236 - RNA, 19 nt, Artificial Sequence
  Description of Artificial Sequence: Synthetic oligonucleotide
cagauaaauuaaggcuuug

SEQ ID NO: 3137237 - RNA, 19 nt, Artificial Sequence
  Description of Artificial Sequence: Synthetic oligonucleotide
acuccguucgcaggauauc

SEQ ID NO: 3137238 - RNA, 19 nt, Artificial Sequence
  Description of Artificial Sequence: Synthetic oligonucleotide
auauaacucuggguauccu

SEQ ID NO: 3137239 - RNA, 19 nt, Artificial Sequence
  Description of Artificial Sequence: Synthetic oligonucleotide
gcuguaccacucaaacugg

SEQ ID NO: 3137240 - RNA, 19 nt, Artificial Sequence
  Description of Artificial Sequence: Synthetic oligonucleotide
cucuaagcugccaucagau

SEQ ID NO: 3137241 - RNA, 19 nt, Artificial Sequence
  Description of Artificial Sequence: Synthetic oligonucleotide
cugacuucagguuggcugu

SEQ ID NO: 3137242 - RNA, 19 nt, Artificial Sequence
  Description of Artificial Sequence: Synthetic oligonucleotide
cucaaacuggccucaguua

SEQ ID NO: 3137243 - RNA, 19 nt, Artificial Sequence
  Description of Artificial Sequence: Synthetic oligonucleotide
cuggguauccuuucagaua

SEQ ID NO: 3137244 - RNA, 19 nt, Artificial Sequence
  Description of Artificial Sequence: Synthetic oligonucleotide
guuauaggugagaucuuua

SEQ ID NO: 3137245 - RNA, 19 nt, Artificial Sequence
  Description of Artificial Sequence: Synthetic oligonucleotide
guugcucugacuucagguu

SEQ ID NO: 3137246 - RNA, 19 nt, Artificial Sequence
  Description of Artificial Sequence: Synthetic oligonucleotide
accacucaaacuggccuca

SEQ ID NO: 3137247 - RNA, 19 nt, Artificial Sequence
  Description of Artificial Sequence: Synthetic oligonucleotide
uaacuccguucgcaggaua

SEQ ID NO: 3137248 - RNA, 19 nt, Artificial Sequence
  Description of Artificial Sequence: Synthetic oligonucleotide
agguuggcuguaccacuca

SEQ ID NO: 3137249 - RNA, 19 nt, Artificial Sequence
  Description of Artificial Sequence: Synthetic oligonucleotide
gcugccaucagaugaugaa

SEQ ID NO: 3137250 - RNA, 19 nt, Artificial Sequence
  Description of Artificial Sequence: Synthetic oligonucleotide
gcucuugugaugauuuaca

SEQ ID NO: 3137251 - RNA, 19 nt, Artificial Sequence
  Description of Artificial Sequence: Synthetic oligonucleotide
auccgucaauauaacucug

SEQ ID NO: 3137252 - RNA, 19 nt, Artificial Sequence
  Description of Artificial Sequence: Synthetic oligonucleotide
ucgcaggauauccgucaau

SEQ ID NO: 3137253 - RNA, 19 nt, Artificial Sequence
  Description of Artificial Sequence: Synthetic oligonucleotide
ggauauccgucaauauaac

SEQ ID NO: 3137254 - RNA, 19 nt, Artificial Sequence
  Description of Artificial Sequence: Synthetic oligonucleotide
caagacucuaagcugccau

SEQ ID NO: 3137255 - RNA, 19 nt, Artificial Sequence
  Description of Artificial Sequence: Synthetic oligonucleotide
ccuaacuccguucgcagga

SEQ ID NO: 3137256 - RNA, 19 nt, Artificial Sequence
  Description of Artificial Sequence: Synthetic oligonucleotide
cucuugugaugauuuacau

SEQ ID NO: 3137257 - RNA, 19 nt, Artificial Sequence
  Description of Artificial Sequence: Synthetic oligonucleotide
acauucugacaagacucua

SEQ ID NO: 3137258 - RNA, 19 nt, Artificial Sequence
  Description of Artificial Sequence: Synthetic oligonucleotide
caaacuggccucaguuaua

SEQ ID NO: 3137259 - RNA, 19 nt, Artificial Sequence
  Description of Artificial Sequence: Synthetic oligonucleotide
guuggcuguaccacucaaa

SEQ ID NO: 3137260 - RNA, 19 nt, Artificial Sequence
  Description of Artificial Sequence: Synthetic oligonucleotide
gccaucagaugaugaagaa

SEQ ID NO: 3137261 - RNA, 19 nt, Artificial Sequence
  Description of Artificial Sequence: Synthetic oligonucleotide
gguuggcuguaccacucaa

SEQ ID NO: 3137262 - RNA, 19 nt, Artificial Sequence
  Description of Artificial Sequence: Synthetic oligonucleotide
gguauccuuucagauaaau

SEQ ID NO: 3137263 - RNA, 19 nt, Artificial Sequence
  Description of Artificial Sequence: Synthetic oligonucleotide
ggccucaguuauaggugag

SEQ ID NO: 3137264 - RNA, 19 nt, Artificial Sequence
  Description of Artificial Sequence: Synthetic oligonucleotide
ccaucagaugaugaagaaa

SEQ ID NO: 3137265 - RNA, 19 nt, Artificial Sequence
  Description of Artificial Sequence: Synthetic oligonucleotide
gcaggauauccgucaauau

SEQ ID NO: 3137266 - RNA, 19 nt, Artificial Sequence
  Description of Artificial Sequence: Synthetic oligonucleotide
gccucaguuauaggugaga

SEQ ID NO: 3137267 - RNA, 19 nt, Artificial Sequence
  Description of Artificial Sequence: Synthetic oligonucleotide
cguucgcaggauauccguc

SEQ ID NO: 3137268 - RNA, 19 nt, Artificial Sequence
  Description of Artificial Sequence: Synthetic oligonucleotide
cacucaaacuggccucagu

SEQ ID NO: 3137269 - RNA, 19 nt, Artificial Sequence
  Description of Artificial Sequence: Synthetic oligonucleotide
cgucaauauaacucugggu

SEQ ID NO: 3137270 - RNA, 19 nt, Artificial Sequence
  Description of Artificial Sequence: Synthetic oligonucleotide
caguuauaggugagaucuu

SEQ ID NO: 3137271 - RNA, 19 nt, Artificial Sequence
  Description of Artificial Sequence: Synthetic oligonucleotide
cgcaggauauccgucaaua

SEQ ID NO: 3137272 - RNA, 19 nt, Artificial Sequence
  Description of Artificial Sequence: Synthetic oligonucleotide
cuaacuccguucgcaggau

SEQ ID NO: 3137273 - RNA, 19 nt, Artificial Sequence
  Description of Artificial Sequence: Synthetic oligonucleotide
ccucaguuauaggugagau

SEQ ID NO: 3137274 - RNA, 19 nt, Artificial Sequence
  Description of Artificial Sequence: Synthetic oligonucleotide
ccacucaaacuggccucag

SEQ ID NO: 3137275 - RNA, 19 nt, Artificial Sequence
  Description of Artificial Sequence: Synthetic oligonucleotide
ccguucgcaggauauccgu

SEQ ID NO: 3137276 - RNA, 19 nt, Artificial Sequence
  Description of Artificial Sequence: Synthetic oligonucleotide
ggguauccuuucagauaaa

SEQ ID NO: 3137277 - RNA, 19 nt, Artificial Sequence
  Description of Artificial Sequence: Synthetic oligonucleotide
auugauugcauucauaggg

SEQ ID NO: 3137278 - RNA, 19 nt, Artificial Sequence
  Description of Artificial Sequence: Synthetic oligonucleotide
uauggucuuucuuuuaugg

SEQ ID NO: 3137279 - RNA, 19 nt, Artificial Sequence
  Description of Artificial Sequence: Synthetic oligonucleotide
gacgauuacugcuacaugc

SEQ ID NO: 3137280 - RNA, 19 nt, Artificial Sequence
  Description of Artificial Sequence: Synthetic oligonucleotide
uuucucuccaguaugacau

SEQ ID NO: 3137281 - RNA, 19 nt, Artificial Sequence
  Description of Artificial Sequence: Synthetic oligonucleotide
augaaugagaagaugacuc

SEQ ID NO: 3137282 - RNA, 19 nt, Artificial Sequence
  Description of Artificial Sequence: Synthetic oligonucleotide
aaagcuuuaccacauugau

SEQ ID NO: 3137283 - RNA, 19 nt, Artificial Sequence
  Description of Artificial Sequence: Synthetic oligonucleotide
uacugcuacaugcaaaagc

SEQ ID NO: 3137284 - RNA, 19 nt, Artificial Sequence
  Description of Artificial Sequence: Synthetic oligonucleotide
uaugacaucuuuucaugcc

SEQ ID NO: 3137285 - RNA, 19 nt, Artificial Sequence
  Description of Artificial Sequence: Synthetic oligonucleotide
aucuuuucaugccugugac

SEQ ID NO: 3137286 - RNA, 19 nt, Artificial Sequence
  Description of Artificial Sequence: Synthetic oligonucleotide
aaugagaagaugacucuuc

SEQ ID NO: 3137287 - RNA, 19 nt, Artificial Sequence
  Description of Artificial Sequence: Synthetic oligonucleotide
gaagaugacucuucuuugc

SEQ ID NO: 3137288 - RNA, 19 nt, Artificial Sequence
  Description of Artificial Sequence: Synthetic oligonucleotide
uccaguaugacaucuuuuc

SEQ ID NO: 3137289 - RNA, 19 nt, Artificial Sequence
  Description of Artificial Sequence: Synthetic oligonucleotide
auuacugcuacaugcaaaa

SEQ ID NO: 3137290 - RNA, 19 nt, Artificial Sequence
  Description of Artificial Sequence: Synthetic oligonucleotide
ucaugaaugagaagaugac

SEQ ID NO: 3137291 - RNA, 19 nt, Artificial Sequence
  Description of Artificial Sequence: Synthetic oligonucleotide
cauucaaaggcuuucucuc

SEQ ID NO: 3137292 - RNA, 19 nt, Artificial Sequence
  Description of Artificial Sequence: Synthetic oligonucleotide
uugcuuacauucaaaggcu

SEQ ID NO: 3137293 - RNA, 19 nt, Artificial Sequence
  Description of Artificial Sequence: Synthetic oligonucleotide
aagaugacucuucuuugca

SEQ ID NO: 3137294 - RNA, 19 nt, Artificial Sequence
  Description of Artificial Sequence: Synthetic oligonucleotide
ugaaugagaagaugacucu

SEQ ID NO: 3137295 - RNA, 19 nt, Artificial Sequence
  Description of Artificial Sequence: Synthetic oligonucleotide
cauugauugcauucauagg

SEQ ID NO: 3137296 - RNA, 19 nt, Artificial Sequence
  Description of Artificial Sequence: Synthetic oligonucleotide
uguauggucuuucuuuuau

SEQ ID NO: 3137297 - RNA, 19 nt, Artificial Sequence
  Description of Artificial Sequence: Synthetic oligonucleotide
agaagaugacucuucuuug

SEQ ID NO: 3137298 - RNA, 19 nt, Artificial Sequence
  Description of Artificial Sequence: Synthetic oligonucleotide
acugcuacaugcaaaagcu

SEQ ID NO: 3137299 - RNA, 19 nt, Artificial Sequence
  Description of Artificial Sequence: Synthetic oligonucleotide
uggucuuucuuuuauggau

SEQ ID NO: 3137300 - RNA, 19 nt, Artificial Sequence
  Description of Artificial Sequence: Synthetic oligonucleotide
ucuuuucaugccugugacg

SEQ ID NO: 3137301 - RNA, 19 nt, Artificial Sequence
  Description of Artificial Sequence: Synthetic oligonucleotide
ugcuacaugcaaaagcuuu

SEQ ID NO: 3137302 - RNA, 19 nt, Artificial Sequence
  Description of Artificial Sequence: Synthetic oligonucleotide
guaugacaucuuuucaugc

SEQ ID NO: 3137303 - RNA, 19 nt, Artificial Sequence
  Description of Artificial Sequence: Synthetic oligonucleotide
augacaucuuuucaugccu

SEQ ID NO: 3137304 - RNA, 19 nt, Artificial Sequence
  Description of Artificial Sequence: Synthetic oligonucleotide
ucuuugcaaagguuuuacc

SEQ ID NO: 3137305 - RNA, 19 nt, Artificial Sequence
  Description of Artificial Sequence: Synthetic oligonucleotide
uucaaaggcuuucucuccu

SEQ ID NO: 3137306 - RNA, 19 nt, Artificial Sequence
  Description of Artificial Sequence: Synthetic oligonucleotide
ugacaucuuuucaugccug

SEQ ID NO: 3137307 - RNA, 19 nt, Artificial Sequence
  Description of Artificial Sequence: Synthetic oligonucleotide
uccuguauggucuuucuuu

SEQ ID NO: 3137308 - RNA, 19 nt, Artificial Sequence
  Description of Artificial Sequence: Synthetic oligonucleotide
cuuuucaugccugugacga

SEQ ID NO: 3137309 - RNA, 19 nt, Artificial Sequence
  Description of Artificial Sequence: Synthetic oligonucleotide
gaugacucuucuuugcaaa

SEQ ID NO: 3137310 - RNA, 19 nt, Artificial Sequence
  Description of Artificial Sequence: Synthetic oligonucleotide
ucuucuuugcaaagguuuu

SEQ ID NO: 3137311 - RNA, 19 nt, Artificial Sequence
  Description of Artificial Sequence: Synthetic oligonucleotide
augacucuucuuugcaaag

SEQ ID NO: 3137312 - RNA, 19 nt, Artificial Sequence
  Description of Artificial Sequence: Synthetic oligonucleotide
augagaagaugacucuucu

SEQ ID NO: 3137313 - RNA, 19 nt, Artificial Sequence
  Description of Artificial Sequence: Synthetic oligonucleotide
gagaagaugacucuucuuu

SEQ ID NO: 3137314 - RNA, 19 nt, Artificial Sequence
  Description of Artificial Sequence: Synthetic oligonucleotide
uucuuugcaaagguuuuac

SEQ ID NO: 3137315 - RNA, 19 nt, Artificial Sequence
  Description of Artificial Sequence: Synthetic oligonucleotide
ugacgauuacugcuacaug

SEQ ID NO: 3137316 - RNA, 19 nt, Artificial Sequence
  Description of Artificial Sequence: Synthetic oligonucleotide
augccugugacgauuacug

SEQ ID NO: 3137317 - RNA, 19 nt, Artificial Sequence
  Description of Artificial Sequence: Synthetic oligonucleotide
auggucuuucuuuuaugga

SEQ ID NO: 3137318 - RNA, 19 nt, Artificial Sequence
  Description of Artificial Sequence: Synthetic oligonucleotide
guauggucuuucuuuuaug

SEQ ID NO: 3137319 - RNA, 19 nt, Artificial Sequence
  Description of Artificial Sequence: Synthetic oligonucleotide
ucaaaggcuuucucuccug

SEQ ID NO: 3137320 - RNA, 19 nt, Artificial Sequence
  Description of Artificial Sequence: Synthetic oligonucleotide
aaaggcuuucucuccugua

SEQ ID NO: 3137321 - RNA, 19 nt, Artificial Sequence
  Description of Artificial Sequence: Synthetic oligonucleotide
gauuacugcuacaugcaaa

SEQ ID NO: 3137322 - RNA, 19 nt, Artificial Sequence
  Description of Artificial Sequence: Synthetic oligonucleotide
agaugacucuucuuugcaa

SEQ ID NO: 3137323 - RNA, 19 nt, Artificial Sequence
  Description of Artificial Sequence: Synthetic oligonucleotide
ugugacgauuacugcuaca

SEQ ID NO: 3137324 - RNA, 19 nt, Artificial Sequence
  Description of Artificial Sequence: Synthetic oligonucleotide
uuacugcuacaugcaaaag

SEQ ID NO: 3137325 - RNA, 19 nt, Artificial Sequence
  Description of Artificial Sequence: Synthetic oligonucleotide
ugagaagaugacucuucuu

SEQ ID NO: 3137326 - RNA, 19 nt, Artificial Sequence
  Description of Artificial Sequence: Synthetic oligonucleotide
uucaugccugugacgauua

SEQ ID NO: 3137327 - RNA, 19 nt, Artificial Sequence
  Description of Artificial Sequence: Synthetic oligonucleotide
uuucaugccugugacgauu

SEQ ID NO: 3137328 - RNA, 19 nt, Artificial Sequence
  Description of Artificial Sequence: Synthetic oligonucleotide
ugccugugacgauuacugc

SEQ ID NO: 3137329 - RNA, 19 nt, Artificial Sequence
  Description of Artificial Sequence: Synthetic oligonucleotide
acgauuacugcuacaugca

SEQ ID NO: 3137330 - RNA, 19 nt, Artificial Sequence
  Description of Artificial Sequence: Synthetic oligonucleotide
aagcuuuaccacauugauu

SEQ ID NO: 3137331 - RNA, 19 nt, Artificial Sequence
  Description of Artificial Sequence: Synthetic oligonucleotide
uuuucaugccugugacgau

SEQ ID NO: 3137332 - RNA, 19 nt, Artificial Sequence
  Description of Artificial Sequence: Synthetic oligonucleotide
cucuucuuugcaaagguuu

SEQ ID NO: 3137333 - RNA, 19 nt, Artificial Sequence
  Description of Artificial Sequence: Synthetic oligonucleotide
caguaugacaucuuuucau

SEQ ID NO: 3137334 - RNA, 19 nt, Artificial Sequence
  Description of Artificial Sequence: Synthetic oligonucleotide
cugugacgauuacugcuac

SEQ ID NO: 3137335 - RNA, 19 nt, Artificial Sequence
  Description of Artificial Sequence: Synthetic oligonucleotide
caugaaugagaagaugacu

SEQ ID NO: 3137336 - RNA, 19 nt, Artificial Sequence
  Description of Artificial Sequence: Synthetic oligonucleotide
gacaucuuuucaugccugu

SEQ ID NO: 3137337 - RNA, 19 nt, Artificial Sequence
  Description of Artificial Sequence: Synthetic oligonucleotide
ucaugccugugacgauuac

SEQ ID NO: 3137338 - RNA, 19 nt, Artificial Sequence
  Description of Artificial Sequence: Synthetic oligonucleotide
gugacgauuacugcuacau

SEQ ID NO: 3137339 - RNA, 19 nt, Artificial Sequence
  Description of Artificial Sequence: Synthetic oligonucleotide
gaaugagaagaugacucuu

SEQ ID NO: 3137340 - RNA, 19 nt, Artificial Sequence
  Description of Artificial Sequence: Synthetic oligonucleotide
ccaguaugacaucuuuuca

SEQ ID NO: 3137341 - RNA, 19 nt, Artificial Sequence
  Description of Artificial Sequence: Synthetic oligonucleotide
cuucuuugcaaagguuuua

SEQ ID NO: 3137342 - RNA, 19 nt, Artificial Sequence
  Description of Artificial Sequence: Synthetic oligonucleotide
gccugugacgauuacugcu

SEQ ID NO: 3137343 - RNA, 19 nt, Artificial Sequence
  Description of Artificial Sequence: Synthetic oligonucleotide
cuguauggucuuucuuuua

SEQ ID NO: 3137344 - RNA, 19 nt, Artificial Sequence
  Description of Artificial Sequence: Synthetic oligonucleotide
gcuacaugcaaaagcuuua

SEQ ID NO: 3137345 - RNA, 19 nt, Artificial Sequence
  Description of Artificial Sequence: Synthetic oligonucleotide
ccugugacgauuacugcua

SEQ ID NO: 3137346 - RNA, 19 nt, Artificial Sequence
  Description of Artificial Sequence: Synthetic oligonucleotide
caaaggcuuucucuccugu

SEQ ID NO: 3137347 - RNA, 19 nt, Artificial Sequence
  Description of Artificial Sequence: Synthetic oligonucleotide
caugccugugacgauuacu

SEQ ID NO: 3137348 - RNA, 19 nt, Artificial Sequence
  Description of Artificial Sequence: Synthetic oligonucleotide
cuccaguaugacaucuuuu

SEQ ID NO: 3137349 - RNA, 19 nt, Artificial Sequence
  Description of Artificial Sequence: Synthetic oligonucleotide
cugcuacaugcaaaagcuu

SEQ ID NO: 3137350 - RNA, 19 nt, Artificial Sequence
  Description of Artificial Sequence: Synthetic oligonucleotide
ccuguauggucuuucuuuu

SEQ ID NO: 3137351 - RNA, 19 nt, Artificial Sequence
  Description of Artificial Sequence: Synthetic oligonucleotide
gcuuucucuccuguauggu

SEQ ID NO: 3137352 - RNA, 19 nt, Artificial Sequence
  Description of Artificial Sequence: Synthetic oligonucleotide
auuaaauaaauacuuaauu

SEQ ID NO: 3137353 - RNA, 19 nt, Artificial Sequence
  Description of Artificial Sequence: Synthetic oligonucleotide
uaacacacaccucuaaucc

SEQ ID NO: 3137354 - RNA, 19 nt, Artificial Sequence
  Description of Artificial Sequence: Synthetic oligonucleotide
uuuauuaaauaaauacuua

SEQ ID NO: 3137355 - RNA, 19 nt, Artificial Sequence
  Description of Artificial Sequence: Synthetic oligonucleotide
uuguuuacuaaauuuauuu

SEQ ID NO: 3137356 - RNA, 19 nt, Artificial Sequence
  Description of Artificial Sequence: Synthetic oligonucleotide
uggauuucugagcuggagg

SEQ ID NO: 3137357 - RNA, 19 nt, Artificial Sequence
  Description of Artificial Sequence: Synthetic oligonucleotide
uuuacuaaauuuauuuauu

SEQ ID NO: 3137358 - RNA, 19 nt, Artificial Sequence
  Description of Artificial Sequence: Synthetic oligonucleotide
ucuaaucccagcacuuggg

SEQ ID NO: 3137359 - RNA, 19 nt, Artificial Sequence
  Description of Artificial Sequence: Synthetic oligonucleotide
auuuauuaaauaaauacuu

SEQ ID NO: 3137360 - RNA, 19 nt, Artificial Sequence
  Description of Artificial Sequence: Synthetic oligonucleotide
uucuuguuuacuaaauuua

SEQ ID NO: 3137361 - RNA, 19 nt, Artificial Sequence
  Description of Artificial Sequence: Synthetic oligonucleotide
ucuuguuuacuaaauuuau

SEQ ID NO: 3137362 - RNA, 19 nt, Artificial Sequence
  Description of Artificial Sequence: Synthetic oligonucleotide
uuacuaaauuuauuuauua

SEQ ID NO: 3137363 - RNA, 19 nt, Artificial Sequence
  Description of Artificial Sequence: Synthetic oligonucleotide
uacuaaauuuauuuauuaa

SEQ ID NO: 3137364 - RNA, 19 nt, Artificial Sequence
  Description of Artificial Sequence: Synthetic oligonucleotide
uguuuacuaaauuuauuua

SEQ ID NO: 3137365 - RNA, 19 nt, Artificial Sequence
  Description of Artificial Sequence: Synthetic oligonucleotide
ugggcauuguaacacacac

SEQ ID NO: 3137366 - RNA, 19 nt, Artificial Sequence
  Description of Artificial Sequence: Synthetic oligonucleotide
aaaaggugcagcugggcau

SEQ ID NO: 3137367 - RNA, 19 nt, Artificial Sequence
  Description of Artificial Sequence: Synthetic oligonucleotide
uuuucuuguuuacuaaauu

SEQ ID NO: 3137368 - RNA, 19 nt, Artificial Sequence
  Description of Artificial Sequence: Synthetic oligonucleotide
uguaacacacaccucuaau

SEQ ID NO: 3137369 - RNA, 19 nt, Artificial Sequence
  Description of Artificial Sequence: Synthetic oligonucleotide
cuaaauuuauuuauuaaau

SEQ ID NO: 3137370 - RNA, 19 nt, Artificial Sequence
  Description of Artificial Sequence: Synthetic oligonucleotide
guaacacacaccucuaauc

SEQ ID NO: 3137371 - RNA, 19 nt, Artificial Sequence
  Description of Artificial Sequence: Synthetic oligonucleotide
guuuacuaaauuuauuuau

SEQ ID NO: 3137372 - RNA, 19 nt, Artificial Sequence
  Description of Artificial Sequence: Synthetic oligonucleotide
cucuaaucccagcacuugg

SEQ ID NO: 3137373 - RNA, 19 nt, Artificial Sequence
  Description of Artificial Sequence: Synthetic oligonucleotide
acaccucuaaucccagcac

SEQ ID NO: 3137374 - RNA, 19 nt, Artificial Sequence
  Description of Artificial Sequence: Synthetic oligonucleotide
ggauuucugagcuggaggc

SEQ ID NO: 3137375 - RNA, 19 nt, Artificial Sequence
  Description of Artificial Sequence: Synthetic oligonucleotide
agguggauuucugagcugg

SEQ ID NO: 3137376 - RNA, 19 nt, Artificial Sequence
  Description of Artificial Sequence: Synthetic oligonucleotide
cauuguaacacacaccucu

SEQ ID NO: 3137377 - RNA, 19 nt, Artificial Sequence
  Description of Artificial Sequence: Synthetic oligonucleotide
ugcagcugggcauuguaac

SEQ ID NO: 3137378 - RNA, 19 nt, Artificial Sequence
  Description of Artificial Sequence: Synthetic oligonucleotide
uuguaacacacaccucuaa

SEQ ID NO: 3137379 - RNA, 19 nt, Artificial Sequence
  Description of Artificial Sequence: Synthetic oligonucleotide
acacaccucuaaucccagc

SEQ ID NO: 3137380 - RNA, 19 nt, Artificial Sequence
  Description of Artificial Sequence: Synthetic oligonucleotide
uuucugagcuggaggccag

SEQ ID NO: 3137381 - RNA, 19 nt, Artificial Sequence
  Description of Artificial Sequence: Synthetic oligonucleotide
gauuucugagcuggaggcc

SEQ ID NO: 3137382 - RNA, 19 nt, Artificial Sequence
  Description of Artificial Sequence: Synthetic oligonucleotide
aguuccaggacagccccuc

SEQ ID NO: 3137383 - RNA, 19 nt, Artificial Sequence
  Description of Artificial Sequence: Synthetic oligonucleotide
cacaccucuaaucccagca

SEQ ID NO: 3137384 - RNA, 19 nt, Artificial Sequence
  Description of Artificial Sequence: Synthetic oligonucleotide
gggaggcaaaggcaggugg

SEQ ID NO: 3137385 - RNA, 19 nt, Artificial Sequence
  Description of Artificial Sequence: Synthetic oligonucleotide
aaaggugcagcugggcauu

SEQ ID NO: 3137386 - RNA, 19 nt, Artificial Sequence
  Description of Artificial Sequence: Synthetic oligonucleotide
guggauuucugagcuggag

SEQ ID NO: 3137387 - RNA, 19 nt, Artificial Sequence
  Description of Artificial Sequence: Synthetic oligonucleotide
uuccaggacagccccucgu

SEQ ID NO: 3137388 - RNA, 19 nt, Artificial Sequence
  Description of Artificial Sequence: Synthetic oligonucleotide
cagcugggcauuguaacac

SEQ ID NO: 3137389 - RNA, 19 nt, Artificial Sequence
  Description of Artificial Sequence: Synthetic oligonucleotide
aggacagccccucgucuca

SEQ ID NO: 3137390 - RNA, 19 nt, Artificial Sequence
  Description of Artificial Sequence: Synthetic oligonucleotide
guuccaggacagccccucg

SEQ ID NO: 3137391 - RNA, 19 nt, Artificial Sequence
  Description of Artificial Sequence: Synthetic oligonucleotide
cuuguuuacuaaauuuauu

SEQ ID NO: 3137392 - RNA, 19 nt, Artificial Sequence
  Description of Artificial Sequence: Synthetic oligonucleotide
caggacagccccucgucuc

SEQ ID NO: 3137393 - RNA, 19 nt, Artificial Sequence
  Description of Artificial Sequence: Synthetic oligonucleotide
cugggcauuguaacacaca

SEQ ID NO: 3137394 - RNA, 19 nt, Artificial Sequence
  Description of Artificial Sequence: Synthetic oligonucleotide
gagcuggaggccagccugg

SEQ ID NO: 3137395 - RNA, 19 nt, Artificial Sequence
  Description of Artificial Sequence: Synthetic oligonucleotide
acagccccucgucucaaaa

SEQ ID NO: 3137396 - RNA, 19 nt, Artificial Sequence
  Description of Artificial Sequence: Synthetic oligonucleotide
cagguggauuucugagcug

SEQ ID NO: 3137397 - RNA, 19 nt, Artificial Sequence
  Description of Artificial Sequence: Synthetic oligonucleotide
gcagcugggcauuguaaca

SEQ ID NO: 3137398 - RNA, 19 nt, Artificial Sequence
  Description of Artificial Sequence: Synthetic oligonucleotide
aaggugcagcugggcauug

SEQ ID NO: 3137399 - RNA, 19 nt, Artificial Sequence
  Description of Artificial Sequence: Synthetic oligonucleotide
uucugagcuggaggccagc

SEQ ID NO: 3137400 - RNA, 19 nt, Artificial Sequence
  Description of Artificial Sequence: Synthetic oligonucleotide
caccucuaaucccagcacu

SEQ ID NO: 3137401 - RNA, 19 nt, Artificial Sequence
  Description of Artificial Sequence: Synthetic oligonucleotide
ggcaaaggcagguggauuu

SEQ ID NO: 3137402 - RNA, 19 nt, Artificial Sequence
  Description of Artificial Sequence: Synthetic oligonucleotide
ggaggcaaaggcaggugga

SEQ ID NO: 3137403 - RNA, 19 nt, Artificial Sequence
  Description of Artificial Sequence: Synthetic oligonucleotide
gcugggcauuguaacacac

SEQ ID NO: 3137404 - RNA, 19 nt, Artificial Sequence
  Description of Artificial Sequence: Synthetic oligonucleotide
ggugcagcugggcauugua

SEQ ID NO: 3137405 - RNA, 19 nt, Artificial Sequence
  Description of Artificial Sequence: Synthetic oligonucleotide
gaggcaaaggcagguggau

SEQ ID NO: 3137406 - RNA, 19 nt, Artificial Sequence
  Description of Artificial Sequence: Synthetic oligonucleotide
gcaaaggcagguggauuuc

SEQ ID NO: 3137407 - RNA, 19 nt, Artificial Sequence
  Description of Artificial Sequence: Synthetic oligonucleotide
gacagccccucgucucaaa

SEQ ID NO: 3137408 - RNA, 19 nt, Artificial Sequence
  Description of Artificial Sequence: Synthetic oligonucleotide
gcauuguaacacacaccuc

SEQ ID NO: 3137409 - RNA, 19 nt, Artificial Sequence
  Description of Artificial Sequence: Synthetic oligonucleotide
aggugcagcugggcauugu

SEQ ID NO: 3137410 - RNA, 19 nt, Artificial Sequence
  Description of Artificial Sequence: Synthetic oligonucleotide
gguggauuucugagcugga

SEQ ID NO: 3137411 - RNA, 19 nt, Artificial Sequence
  Description of Artificial Sequence: Synthetic oligonucleotide
gcuggaggccagccugguc

SEQ ID NO: 3137412 - RNA, 19 nt, Artificial Sequence
  Description of Artificial Sequence: Synthetic oligonucleotide
ccaggacagccccucgucu

SEQ ID NO: 3137413 - RNA, 19 nt, Artificial Sequence
  Description of Artificial Sequence: Synthetic oligonucleotide
ggacagccccucgucucaa

SEQ ID NO: 3137414 - RNA, 19 nt, Artificial Sequence
  Description of Artificial Sequence: Synthetic oligonucleotide
  modified_base (11)..(11): a, c, u, g, unknown or other
aaaacaacaancuacaaac

SEQ ID NO: 3137415 - RNA, 19 nt, Artificial Sequence
  Description of Artificial Sequence: Synthetic oligonucleotide
uugacuaauauccugaguc

SEQ ID NO: 3137416 - RNA, 19 nt, Artificial Sequence
  Description of Artificial Sequence: Synthetic oligonucleotide
uuuuccuccucucagauug

SEQ ID NO: 3137417 - RNA, 19 nt, Artificial Sequence
  Description of Artificial Sequence: Synthetic oligonucleotide
  modified_base (5)..(5): a, c, u, g, unknown or other
acaancuacaaacaaaaca

SEQ ID NO: 3137418 - RNA, 19 nt, Artificial Sequence
  Description of Artificial Sequence: Synthetic oligonucleotide
uuucguaaauuacacauca

SEQ ID NO: 3137419 - RNA, 19 nt, Artificial Sequence
  Description of Artificial Sequence: Synthetic oligonucleotide
ucguaaauuacacaucacc

SEQ ID NO: 3137420 - RNA, 19 nt, Artificial Sequence
  Description of Artificial Sequence: Synthetic oligonucleotide
ucagauuggcuugagaugg

SEQ ID NO: 3137421 - RNA, 19 nt, Artificial Sequence
  Description of Artificial Sequence: Synthetic oligonucleotide
uaaacauuggccaaugcuc

SEQ ID NO: 3137422 - RNA, 19 nt, Artificial Sequence
  Description of Artificial Sequence: Synthetic oligonucleotide
  modified_base (4)..(4): a, c, u, g, unknown or other
caancuacaaacaaaacaa

SEQ ID NO: 3137423 - RNA, 19 nt, Artificial Sequence
  Description of Artificial Sequence: Synthetic oligonucleotide
  modified_base (9)..(9): a, c, u, g, unknown or other
aacaacaancuacaaacaa

SEQ ID NO: 3137424 - RNA, 19 nt, Artificial Sequence
  Description of Artificial Sequence: Synthetic oligonucleotide
uaaauuacacaucaccuuc

SEQ ID NO: 3137425 - RNA, 19 nt, Artificial Sequence
  Description of Artificial Sequence: Synthetic oligonucleotide
aauagcuuucguaaauuac

SEQ ID NO: 3137426 - RNA, 19 nt, Artificial Sequence
  Description of Artificial Sequence: Synthetic oligonucleotide
ugcuuaguaaacauuggcc

SEQ ID NO: 3137427 - RNA, 19 nt, Artificial Sequence
  Description of Artificial Sequence: Synthetic oligonucleotide
aauauccugagucccagcu

SEQ ID NO: 3137428 - RNA, 19 nt, Artificial Sequence
  Description of Artificial Sequence: Synthetic oligonucleotide
uuuuagauggcuccauuga

SEQ ID NO: 3137429 - RNA, 19 nt, Artificial Sequence
  Description of Artificial Sequence: Synthetic oligonucleotide
aucaccuucucuuccaagg

SEQ ID NO: 3137430 - RNA, 19 nt, Artificial Sequence
  Description of Artificial Sequence: Synthetic oligonucleotide
uuaccuuuuagauggcucc

SEQ ID NO: 3137431 - RNA, 19 nt, Artificial Sequence
  Description of Artificial Sequence: Synthetic oligonucleotide
aagugcuuaguaaacauug

SEQ ID NO: 3137432 - RNA, 19 nt, Artificial Sequence
  Description of Artificial Sequence: Synthetic oligonucleotide
guagaaauagcuuucguaa

SEQ ID NO: 3137433 - RNA, 19 nt, Artificial Sequence
  Description of Artificial Sequence: Synthetic oligonucleotide
ucucagauuggcuugagau

SEQ ID NO: 3137434 - RNA, 19 nt, Artificial Sequence
  Description of Artificial Sequence: Synthetic oligonucleotide
uguagaaauagcuuucgua

SEQ ID NO: 3137435 - RNA, 19 nt, Artificial Sequence
  Description of Artificial Sequence: Synthetic oligonucleotide
  modified_base (6)..(6): a, c, u, g, unknown or other
aacaancuacaaacaaaac

SEQ ID NO: 3137436 - RNA, 19 nt, Artificial Sequence
  Description of Artificial Sequence: Synthetic oligonucleotide
uuuagauggcuccauugac

SEQ ID NO: 3137437 - RNA, 19 nt, Artificial Sequence
  Description of Artificial Sequence: Synthetic oligonucleotide
ugacuaauauccugagucc

SEQ ID NO: 3137438 - RNA, 19 nt, Artificial Sequence
  Description of Artificial Sequence: Synthetic oligonucleotide
uuuaccuuuuagauggcuc

SEQ ID NO: 3137439 - RNA, 19 nt, Artificial Sequence
  Description of Artificial Sequence: Synthetic oligonucleotide
uuagauggcuccauugacu

SEQ ID NO: 3137440 - RNA, 19 nt, Artificial Sequence
  Description of Artificial Sequence: Synthetic oligonucleotide
  modified_base (7)..(7): a, c, u, g, unknown or other
caacaancuacaaacaaaa

SEQ ID NO: 3137441 - RNA, 19 nt, Artificial Sequence
  Description of Artificial Sequence: Synthetic oligonucleotide
uuggccaaugcucuuuucc

SEQ ID NO: 3137442 - RNA, 19 nt, Artificial Sequence
  Description of Artificial Sequence: Synthetic oligonucleotide
aguaaacauuggccaaugc

SEQ ID NO: 3137443 - RNA, 19 nt, Artificial Sequence
  Description of Artificial Sequence: Synthetic oligonucleotide
uuacacaucaccuucucuu

SEQ ID NO: 3137444 - RNA, 19 nt, Artificial Sequence
  Description of Artificial Sequence: Synthetic oligonucleotide
ucuuccaaggagcguaaag

SEQ ID NO: 3137445 - RNA, 19 nt, Artificial Sequence
  Description of Artificial Sequence: Synthetic oligonucleotide
uauccugagucccagcugu

SEQ ID NO: 3137446 - RNA, 19 nt, Artificial Sequence
  Description of Artificial Sequence: Synthetic oligonucleotide
uugagauggggaaacccag

SEQ ID NO: 3137447 - RNA, 19 nt, Artificial Sequence
  Description of Artificial Sequence: Synthetic oligonucleotide
uccauugacuaauauccug

SEQ ID NO: 3137448 - RNA, 19 nt, Artificial Sequence
  Description of Artificial Sequence: Synthetic oligonucleotide
gcuccauugacuaauaucc

SEQ ID NO: 3137449 - RNA, 19 nt, Artificial Sequence
  Description of Artificial Sequence: Synthetic oligonucleotide
aaauagcuuucguaaauua

SEQ ID NO: 3137450 - RNA, 19 nt, Artificial Sequence
  Description of Artificial Sequence: Synthetic oligonucleotide
uccaaggagcguaaagugc

SEQ ID NO: 3137451 - RNA, 19 nt, Artificial Sequence
  Description of Artificial Sequence: Synthetic oligonucleotide
  modified_base (2)..(2): a, c, u, g, unknown or other
ancuacaaacaaaacaaaa

SEQ ID NO: 3137452 - RNA, 19 nt, Artificial Sequence
  Description of Artificial Sequence: Synthetic oligonucleotide
uaaagugcuuaguaaacau

SEQ ID NO: 3137453 - RNA, 19 nt, Artificial Sequence
  Description of Artificial Sequence: Synthetic oligonucleotide
cuuuuagauggcuccauug

SEQ ID NO: 3137454 - RNA, 19 nt, Artificial Sequence
  Description of Artificial Sequence: Synthetic oligonucleotide
uuccaaggagcguaaagug

SEQ ID NO: 3137455 - RNA, 19 nt, Artificial Sequence
  Description of Artificial Sequence: Synthetic oligonucleotide
ugagauggggaaacccagg

SEQ ID NO: 3137456 - RNA, 19 nt, Artificial Sequence
  Description of Artificial Sequence: Synthetic oligonucleotide
agaaauagcuuucguaaau

SEQ ID NO: 3137457 - RNA, 19 nt, Artificial Sequence
  Description of Artificial Sequence: Synthetic oligonucleotide
acacaucaccuucucuucc

SEQ ID NO: 3137458 - RNA, 19 nt, Artificial Sequence
  Description of Artificial Sequence: Synthetic oligonucleotide
auagcuuucguaaauuaca

SEQ ID NO: 3137459 - RNA, 19 nt, Artificial Sequence
  Description of Artificial Sequence: Synthetic oligonucleotide
uagcuuucguaaauuacac

SEQ ID NO: 3137460 - RNA, 19 nt, Artificial Sequence
  Description of Artificial Sequence: Synthetic oligonucleotide
aaacccaggauaaaguaaa

SEQ ID NO: 3137461 - RNA, 19 nt, Artificial Sequence
  Description of Artificial Sequence: Synthetic oligonucleotide
aaacauuggccaaugcucu

SEQ ID NO: 3137462 - RNA, 19 nt, Artificial Sequence
  Description of Artificial Sequence: Synthetic oligonucleotide
gacuaauauccugaguccc

SEQ ID NO: 3137463 - RNA, 19 nt, Artificial Sequence
  Description of Artificial Sequence: Synthetic oligonucleotide
gauggggaaacccaggaua

SEQ ID NO: 3137464 - RNA, 19 nt, Artificial Sequence
  Description of Artificial Sequence: Synthetic oligonucleotide
cuuucguaaauuacacauc

SEQ ID NO: 3137465 - RNA, 19 nt, Artificial Sequence
  Description of Artificial Sequence: Synthetic oligonucleotide
uagaaauagcuuucguaaa

SEQ ID NO: 3137466 - RNA, 19 nt, Artificial Sequence
  Description of Artificial Sequence: Synthetic oligonucleotide
cauugacuaauauccugag

SEQ ID NO: 3137467 - RNA, 19 nt, Artificial Sequence
  Description of Artificial Sequence: Synthetic oligonucleotide
auuggcuugagauggggaa

SEQ ID NO: 3137468 - RNA, 19 nt, Artificial Sequence
  Description of Artificial Sequence: Synthetic oligonucleotide
accuucucuuccaaggagc

SEQ ID NO: 3137469 - RNA, 19 nt, Artificial Sequence
  Description of Artificial Sequence: Synthetic oligonucleotide
gcuuaguaaacauuggcca

SEQ ID NO: 3137470 - RNA, 19 nt, Artificial Sequence
  Description of Artificial Sequence: Synthetic oligonucleotide
cucagauuggcuugagaug

SEQ ID NO: 3137471 - RNA, 19 nt, Artificial Sequence
  Description of Artificial Sequence: Synthetic oligonucleotide
aaauuacacaucaccuucu

SEQ ID NO: 3137472 - RNA, 19 nt, Artificial Sequence
  Description of Artificial Sequence: Synthetic oligonucleotide
  modified_base (3)..(3): a, c, u, g, unknown or other
aancuacaaacaaaacaaa

SEQ ID NO: 3137473 - RNA, 19 nt, Artificial Sequence
  Description of Artificial Sequence: Synthetic oligonucleotide
auugacuaauauccugagu

SEQ ID NO: 3137474 - RNA, 19 nt, Artificial Sequence
  Description of Artificial Sequence: Synthetic oligonucleotide
cuugagauggggaaaccca

SEQ ID NO: 3137475 - RNA, 19 nt, Artificial Sequence
  Description of Artificial Sequence: Synthetic oligonucleotide
agcguaaagugcuuaguaa

SEQ ID NO: 3137476 - RNA, 19 nt, Artificial Sequence
  Description of Artificial Sequence: Synthetic oligonucleotide
ucaccuucucuuccaagga

SEQ ID NO: 3137477 - RNA, 19 nt, Artificial Sequence
  Description of Artificial Sequence: Synthetic oligonucleotide
guaaacauuggccaaugcu

SEQ ID NO: 3137478 - RNA, 19 nt, Artificial Sequence
  Description of Artificial Sequence: Synthetic oligonucleotide
uagauggcuccauugacua

SEQ ID NO: 3137479 - RNA, 19 nt, Artificial Sequence
  Description of Artificial Sequence: Synthetic oligonucleotide
agugcuuaguaaacauugg

SEQ ID NO: 3137480 - RNA, 19 nt, Artificial Sequence
  Description of Artificial Sequence: Synthetic oligonucleotide
uucguaaauuacacaucac

SEQ ID NO: 3137481 - RNA, 19 nt, Artificial Sequence
  Description of Artificial Sequence: Synthetic oligonucleotide
  modified_base (8)..(8): a, c, u, g, unknown or other
acaacaancuacaaacaaa

SEQ ID NO: 3137482 - RNA, 19 nt, Artificial Sequence
  Description of Artificial Sequence: Synthetic oligonucleotide
uuaguaaacauuggccaau

SEQ ID NO: 3137483 - RNA, 19 nt, Artificial Sequence
  Description of Artificial Sequence: Synthetic oligonucleotide
auuacacaucaccuucucu

SEQ ID NO: 3137484 - RNA, 19 nt, Artificial Sequence
  Description of Artificial Sequence: Synthetic oligonucleotide
aggagcguaaagugcuuag

SEQ ID NO: 3137485 - RNA, 19 nt, Artificial Sequence
  Description of Artificial Sequence: Synthetic oligonucleotide
uacacaucaccuucucuuc

SEQ ID NO: 3137486 - RNA, 19 nt, Artificial Sequence
  Description of Artificial Sequence: Synthetic oligonucleotide
agcuguagaaauagcuuuc

SEQ ID NO: 3137487 - RNA, 19 nt, Artificial Sequence
  Description of Artificial Sequence: Synthetic oligonucleotide
cuuaguaaacauuggccaa

SEQ ID NO: 3137488 - RNA, 19 nt, Artificial Sequence
  Description of Artificial Sequence: Synthetic oligonucleotide
cuaauauccugagucccag

SEQ ID NO: 3137489 - RNA, 19 nt, Artificial Sequence
  Description of Artificial Sequence: Synthetic oligonucleotide
uggccaaugcucuuuuccu

SEQ ID NO: 3137490 - RNA, 19 nt, Artificial Sequence
  Description of Artificial Sequence: Synthetic oligonucleotide
uucucuuccaaggagcgua

SEQ ID NO: 3137491 - RNA, 19 nt, Artificial Sequence
  Description of Artificial Sequence: Synthetic oligonucleotide
guaaagugcuuaguaaaca

SEQ ID NO: 3137492 - RNA, 19 nt, Artificial Sequence
  Description of Artificial Sequence: Synthetic oligonucleotide
uaguaaacauuggccaaug

SEQ ID NO: 3137493 - RNA, 19 nt, Artificial Sequence
  Description of Artificial Sequence: Synthetic oligonucleotide
gagauggggaaacccagga

SEQ ID NO: 3137494 - RNA, 19 nt, Artificial Sequence
  Description of Artificial Sequence: Synthetic oligonucleotide
uuuuaccuuuuagauggcu

SEQ ID NO: 3137495 - RNA, 19 nt, Artificial Sequence
  Description of Artificial Sequence: Synthetic oligonucleotide
auauccugagucccagcug

SEQ ID NO: 3137496 - RNA, 19 nt, Artificial Sequence
  Description of Artificial Sequence: Synthetic oligonucleotide
uuuccuccucucagauugg

SEQ ID NO: 3137497 - RNA, 19 nt, Artificial Sequence
  Description of Artificial Sequence: Synthetic oligonucleotide
agcuuucguaaauuacaca

SEQ ID NO: 3137498 - RNA, 19 nt, Artificial Sequence
  Description of Artificial Sequence: Synthetic oligonucleotide
gaaacccaggauaaaguaa

SEQ ID NO: 3137499 - RNA, 19 nt, Artificial Sequence
  Description of Artificial Sequence: Synthetic oligonucleotide
uaauauccugagucccagc

SEQ ID NO: 3137500 - RNA, 19 nt, Artificial Sequence
  Description of Artificial Sequence: Synthetic oligonucleotide
gucccagcuguagaaauag

SEQ ID NO: 3137501 - RNA, 19 nt, Artificial Sequence
  Description of Artificial Sequence: Synthetic oligonucleotide
gagcguaaagugcuuagua

SEQ ID NO: 3137502 - RNA, 19 nt, Artificial Sequence
  Description of Artificial Sequence: Synthetic oligonucleotide
auuggccaaugcucuuuuc

SEQ ID NO: 3137503 - RNA, 19 nt, Artificial Sequence
  Description of Artificial Sequence: Synthetic oligonucleotide
gcuuucguaaauuacacau

SEQ ID NO: 3137504 - RNA, 19 nt, Artificial Sequence
  Description of Artificial Sequence: Synthetic oligonucleotide
acuaauauccugaguccca

SEQ ID NO: 3137505 - RNA, 19 nt, Artificial Sequence
  Description of Artificial Sequence: Synthetic oligonucleotide
gcuguagaaauagcuuucg

SEQ ID NO: 3137506 - RNA, 19 nt, Artificial Sequence
  Description of Artificial Sequence: Synthetic oligonucleotide
caccuucucuuccaaggag

SEQ ID NO: 3137507 - RNA, 19 nt, Artificial Sequence
  Description of Artificial Sequence: Synthetic oligonucleotide
aacauuggccaaugcucuu

SEQ ID NO: 3137508 - RNA, 19 nt, Artificial Sequence
  Description of Artificial Sequence: Synthetic oligonucleotide
ggcuccauugacuaauauc

SEQ ID NO: 3137509 - RNA, 19 nt, Artificial Sequence
  Description of Artificial Sequence: Synthetic oligonucleotide
cuccucucagauuggcuug

SEQ ID NO: 3137510 - RNA, 19 nt, Artificial Sequence
  Description of Artificial Sequence: Synthetic oligonucleotide
caucaccuucucuuccaag

SEQ ID NO: 3137511 - RNA, 19 nt, Artificial Sequence
  Description of Artificial Sequence: Synthetic oligonucleotide
ggggaaacccaggauaaag

SEQ ID NO: 3137512 - RNA, 19 nt, Artificial Sequence
  Description of Artificial Sequence: Synthetic oligonucleotide
cagauuggcuugagauggg

SEQ ID NO: 3137513 - RNA, 19 nt, Artificial Sequence
  Description of Artificial Sequence: Synthetic oligonucleotide
ccuucucuuccaaggagcg

SEQ ID NO: 3137514 - RNA, 19 nt, Artificial Sequence
  Description of Artificial Sequence: Synthetic oligonucleotide
uaccuuuuagauggcucca

SEQ ID NO: 3137515 - RNA, 19 nt, Artificial Sequence
  Description of Artificial Sequence: Synthetic oligonucleotide
uccuccucucagauuggcu

SEQ ID NO: 3137516 - RNA, 19 nt, Artificial Sequence
  Description of Artificial Sequence: Synthetic oligonucleotide
uggcuugagauggggaaac

SEQ ID NO: 3137517 - RNA, 19 nt, Artificial Sequence
  Description of Artificial Sequence: Synthetic oligonucleotide
ucccagcuguagaaauagc

SEQ ID NO: 3137518 - RNA, 19 nt, Artificial Sequence
  Description of Artificial Sequence: Synthetic oligonucleotide
uccugagucccagcuguag

SEQ ID NO: 3137519 - RNA, 19 nt, Artificial Sequence
  Description of Artificial Sequence: Synthetic oligonucleotide
ucucuuccaaggagcguaa

SEQ ID NO: 3137520 - RNA, 19 nt, Artificial Sequence
  Description of Artificial Sequence: Synthetic oligonucleotide
cguaaagugcuuaguaaac

SEQ ID NO: 3137521 - RNA, 19 nt, Artificial Sequence
  Description of Artificial Sequence: Synthetic oligonucleotide
agauggggaaacccaggau

SEQ ID NO: 3137522 - RNA, 19 nt, Artificial Sequence
  Description of Artificial Sequence: Synthetic oligonucleotide
ccauugacuaauauccuga

SEQ ID NO: 3137523 - RNA, 19 nt, Artificial Sequence
  Description of Artificial Sequence: Synthetic oligonucleotide
gcguaaagugcuuaguaaa

SEQ ID NO: 3137524 - RNA, 19 nt, Artificial Sequence
  Description of Artificial Sequence: Synthetic oligonucleotide
gauuggcuugagaugggga

SEQ ID NO: 3137525 - RNA, 19 nt, Artificial Sequence
  Description of Artificial Sequence: Synthetic oligonucleotide
ggaaacccaggauaaagua

SEQ ID NO: 3137526 - RNA, 19 nt, Artificial Sequence
  Description of Artificial Sequence: Synthetic oligonucleotide
uuggcuugagauggggaaa

SEQ ID NO: 3137527 - RNA, 19 nt, Artificial Sequence
  Description of Artificial Sequence: Synthetic oligonucleotide
cacaucaccuucucuucca

SEQ ID NO: 3137528 - RNA, 19 nt, Artificial Sequence
  Description of Artificial Sequence: Synthetic oligonucleotide
cuuccaaggagcguaaagu

SEQ ID NO: 3137529 - RNA, 19 nt, Artificial Sequence
  Description of Artificial Sequence: Synthetic oligonucleotide
gauggcuccauugacuaau

SEQ ID NO: 3137530 - RNA, 19 nt, Artificial Sequence
  Description of Artificial Sequence: Synthetic oligonucleotide
gaaauagcuuucguaaauu

SEQ ID NO: 3137531 - RNA, 19 nt, Artificial Sequence
  Description of Artificial Sequence: Synthetic oligonucleotide
auggggaaacccaggauaa

SEQ ID NO: 3137532 - RNA, 19 nt, Artificial Sequence
  Description of Artificial Sequence: Synthetic oligonucleotide
aaggagcguaaagugcuua

SEQ ID NO: 3137533 - RNA, 19 nt, Artificial Sequence
  Description of Artificial Sequence: Synthetic oligonucleotide
uuccuccucucagauuggc

SEQ ID NO: 3137534 - RNA, 19 nt, Artificial Sequence
  Description of Artificial Sequence: Synthetic oligonucleotide
gcuugagauggggaaaccc

SEQ ID NO: 3137535 - RNA, 19 nt, Artificial Sequence
  Description of Artificial Sequence: Synthetic oligonucleotide
uccucucagauuggcuuga

SEQ ID NO: 3137536 - RNA, 19 nt, Artificial Sequence
  Description of Artificial Sequence: Synthetic oligonucleotide
acaucaccuucucuuccaa

SEQ ID NO: 3137537 - RNA, 19 nt, Artificial Sequence
  Description of Artificial Sequence: Synthetic oligonucleotide
cguaaauuacacaucaccu

SEQ ID NO: 3137538 - RNA, 19 nt, Artificial Sequence
  Description of Artificial Sequence: Synthetic oligonucleotide
uggcuccauugacuaauau

SEQ ID NO: 3137539 - RNA, 19 nt, Artificial Sequence
  Description of Artificial Sequence: Synthetic oligonucleotide
aacccaggauaaaguaaaa

SEQ ID NO: 3137540 - RNA, 19 nt, Artificial Sequence
  Description of Artificial Sequence: Synthetic oligonucleotide
cagcuguagaaauagcuuu

SEQ ID NO: 3137541 - RNA, 19 nt, Artificial Sequence
  Description of Artificial Sequence: Synthetic oligonucleotide
agauggcuccauugacuaa

SEQ ID NO: 3137542 - RNA, 19 nt, Artificial Sequence
  Description of Artificial Sequence: Synthetic oligonucleotide
acauuggccaaugcucuuu

SEQ ID NO: 3137543 - RNA, 19 nt, Artificial Sequence
  Description of Artificial Sequence: Synthetic oligonucleotide
accuuuuagauggcuccau

SEQ ID NO: 3137544 - RNA, 19 nt, Artificial Sequence
  Description of Artificial Sequence: Synthetic oligonucleotide
ggccaaugcucuuuuccuc

SEQ ID NO: 3137545 - RNA, 19 nt, Artificial Sequence
  Description of Artificial Sequence: Synthetic oligonucleotide
cucucagauuggcuugaga

SEQ ID NO: 3137546 - RNA, 19 nt, Artificial Sequence
  Description of Artificial Sequence: Synthetic oligonucleotide
ccaaggagcguaaagugcu

SEQ ID NO: 3137547 - RNA, 19 nt, Artificial Sequence
  Description of Artificial Sequence: Synthetic oligonucleotide
cuccauugacuaauauccu

SEQ ID NO: 3137548 - RNA, 19 nt, Artificial Sequence
  Description of Artificial Sequence: Synthetic oligonucleotide
uggggaaacccaggauaaa

SEQ ID NO: 3137549 - RNA, 19 nt, Artificial Sequence
  Description of Artificial Sequence: Synthetic oligonucleotide
cuguagaaauagcuuucgu

SEQ ID NO: 3137550 - RNA, 19 nt, Artificial Sequence
  Description of Artificial Sequence: Synthetic oligonucleotide
cccagcuguagaaauagcu

SEQ ID NO: 3137551 - RNA, 19 nt, Artificial Sequence
  Description of Artificial Sequence: Synthetic oligonucleotide
gggaaacccaggauaaagu

SEQ ID NO: 3137552 - RNA, 19 nt, Artificial Sequence
  Description of Artificial Sequence: Synthetic oligonucleotide
ggcuugagauggggaaacc

SEQ ID NO: 3137553 - RNA, 19 nt, Artificial Sequence
  Description of Artificial Sequence: Synthetic oligonucleotide
ccugagucccagcuguaga

SEQ ID NO: 3137554 - RNA, 19 nt, Artificial Sequence
  Description of Artificial Sequence: Synthetic oligonucleotide
ccagcuguagaaauagcuu

SEQ ID NO: 3137555 - RNA, 19 nt, Artificial Sequence
  Description of Artificial Sequence: Synthetic oligonucleotide
auggcuccauugacuaaua

SEQ ID NO: 3137556 - RNA, 19 nt, Artificial Sequence
  Description of Artificial Sequence: Synthetic oligonucleotide
ggagcguaaagugcuuagu

SEQ ID NO: 3137557 - RNA, 19 nt, Artificial Sequence
  Description of Artificial Sequence: Synthetic oligonucleotide
cauuggccaaugcucuuuu

SEQ ID NO: 3137558 - RNA, 19 nt, Artificial Sequence
  Description of Artificial Sequence: Synthetic oligonucleotide
ccuccucucagauuggcuu

SEQ ID NO: 3137559 - RNA, 19 nt, Artificial Sequence
  Description of Artificial Sequence: Synthetic oligonucleotide
caaggagcguaaagugcuu

SEQ ID NO: 3137560 - RNA, 19 nt, Artificial Sequence
  Description of Artificial Sequence: Synthetic oligonucleotide
cuucucuuccaaggagcgu

SEQ ID NO: 3137561 - RNA, 19 nt, Artificial Sequence
  Description of Artificial Sequence: Synthetic oligonucleotide
cucuuccaaggagcguaaa

SEQ ID NO: 3137562 - RNA, 19 nt, Artificial Sequence
  Description of Artificial Sequence: Synthetic oligonucleotide
ccucucagauuggcuugag

SEQ ID NO: 3137563 - RNA, 19 nt, Artificial Sequence
  Description of Artificial Sequence: Synthetic oligonucleotide
auccugagucccagcugua

SEQ ID NO: 3137564 - RNA, 19 nt, Artificial Sequence
  Description of Artificial Sequence: Synthetic oligonucleotide
ccuuuuagauggcuccauu

SEQ ID NO: 3137565 - RNA, 19 nt, Artificial Sequence
  Description of Artificial Sequence: Synthetic oligonucleotide
aauucaaauuuauccaucc

SEQ ID NO: 3137566 - RNA, 19 nt, Artificial Sequence
  Description of Artificial Sequence: Synthetic oligonucleotide
uccauuaauaagaugaucc

SEQ ID NO: 3137567 - RNA, 19 nt, Artificial Sequence
  Description of Artificial Sequence: Synthetic oligonucleotide
uauccauccauuaauaaga

SEQ ID NO: 3137568 - RNA, 19 nt, Artificial Sequence
  Description of Artificial Sequence: Synthetic oligonucleotide
auuugugcgcguuuggugc

SEQ ID NO: 3137569 - RNA, 19 nt, Artificial Sequence
  Description of Artificial Sequence: Synthetic oligonucleotide
uuaauaagaugauccaucc

SEQ ID NO: 3137570 - RNA, 19 nt, Artificial Sequence
  Description of Artificial Sequence: Synthetic oligonucleotide
uuauccauccauuaauaag

SEQ ID NO: 3137571 - RNA, 19 nt, Artificial Sequence
  Description of Artificial Sequence: Synthetic oligonucleotide
auuaauaagaugauccauc

SEQ ID NO: 3137572 - RNA, 19 nt, Artificial Sequence
  Description of Artificial Sequence: Synthetic oligonucleotide
aaauucaaauuuauccauc

SEQ ID NO: 3137573 - RNA, 19 nt, Artificial Sequence
  Description of Artificial Sequence: Synthetic oligonucleotide
auagacuucugcugucuac

SEQ ID NO: 3137574 - RNA, 19 nt, Artificial Sequence
  Description of Artificial Sequence: Synthetic oligonucleotide
cugucuaccauuugugcgc

SEQ ID NO: 3137575 - RNA, 19 nt, Artificial Sequence
  Description of Artificial Sequence: Synthetic oligonucleotide
uuuauccauccauuaauaa

SEQ ID NO: 3137576 - RNA, 19 nt, Artificial Sequence
  Description of Artificial Sequence: Synthetic oligonucleotide
ccauccauuaauaagauga

SEQ ID NO: 3137577 - RNA, 19 nt, Artificial Sequence
  Description of Artificial Sequence: Synthetic oligonucleotide
uaauaagaugauccaucca

SEQ ID NO: 3137578 - RNA, 19 nt, Artificial Sequence
  Description of Artificial Sequence: Synthetic oligonucleotide
cauccauagacuucugcug

SEQ ID NO: 3137579 - RNA, 19 nt, Artificial Sequence
  Description of Artificial Sequence: Synthetic oligonucleotide
auucaaauuuauccaucca

SEQ ID NO: 3137580 - RNA, 19 nt, Artificial Sequence
  Description of Artificial Sequence: Synthetic oligonucleotide
auccauagacuucugcugu

SEQ ID NO: 3137581 - RNA, 19 nt, Artificial Sequence
  Description of Artificial Sequence: Synthetic oligonucleotide
uagacuucugcugucuacc

SEQ ID NO: 3137582 - RNA, 19 nt, Artificial Sequence
  Description of Artificial Sequence: Synthetic oligonucleotide
gcugucuaccauuugugcg

SEQ ID NO: 3137583 - RNA, 19 nt, Artificial Sequence
  Description of Artificial Sequence: Synthetic oligonucleotide
ugcugucuaccauuugugc

SEQ ID NO: 3137584 - RNA, 19 nt, Artificial Sequence
  Description of Artificial Sequence: Synthetic oligonucleotide
uccauccauagacuucugc

SEQ ID NO: 3137585 - RNA, 19 nt, Artificial Sequence
  Description of Artificial Sequence: Synthetic oligonucleotide
cauuugugcgcguuuggug

SEQ ID NO: 3137586 - RNA, 19 nt, Artificial Sequence
  Description of Artificial Sequence: Synthetic oligonucleotide
ugucuaccauuugugcgcg

SEQ ID NO: 3137587 - RNA, 19 nt, Artificial Sequence
  Description of Artificial Sequence: Synthetic oligonucleotide
uccauccauuaauaagaug

SEQ ID NO: 3137588 - RNA, 19 nt, Artificial Sequence
  Description of Artificial Sequence: Synthetic oligonucleotide
guuuggugcuguuguuugg

SEQ ID NO: 3137589 - RNA, 19 nt, Artificial Sequence
  Description of Artificial Sequence: Synthetic oligonucleotide
accauuugugcgcguuugg

SEQ ID NO: 3137590 - RNA, 19 nt, Artificial Sequence
  Description of Artificial Sequence: Synthetic oligonucleotide
acuucugcugucuaccauu

SEQ ID NO: 3137591 - RNA, 19 nt, Artificial Sequence
  Description of Artificial Sequence: Synthetic oligonucleotide
gauccauccauagacuucu

SEQ ID NO: 3137592 - RNA, 19 nt, Artificial Sequence
  Description of Artificial Sequence: Synthetic oligonucleotide
uaccauuugugcgcguuug

SEQ ID NO: 3137593 - RNA, 19 nt, Artificial Sequence
  Description of Artificial Sequence: Synthetic oligonucleotide
auuuauccauccauuaaua

SEQ ID NO: 3137594 - RNA, 19 nt, Artificial Sequence
  Description of Artificial Sequence: Synthetic oligonucleotide
uuugugcgcguuuggugcu

SEQ ID NO: 3137595 - RNA, 19 nt, Artificial Sequence
  Description of Artificial Sequence: Synthetic oligonucleotide
agacuucugcugucuacca

SEQ ID NO: 3137596 - RNA, 19 nt, Artificial Sequence
  Description of Artificial Sequence: Synthetic oligonucleotide
uccauagacuucugcuguc

SEQ ID NO: 3137597 - RNA, 19 nt, Artificial Sequence
  Description of Artificial Sequence: Synthetic oligonucleotide
ucuaccauuugugcgcguu

SEQ ID NO: 3137598 - RNA, 19 nt, Artificial Sequence
  Description of Artificial Sequence: Synthetic oligonucleotide
ccauuaauaagaugaucca

SEQ ID NO: 3137599 - RNA, 19 nt, Artificial Sequence
  Description of Artificial Sequence: Synthetic oligonucleotide
ugcgcguuuggugcuguug

SEQ ID NO: 3137600 - RNA, 19 nt, Artificial Sequence
  Description of Artificial Sequence: Synthetic oligonucleotide
cauuaauaagaugauccau

SEQ ID NO: 3137601 - RNA, 19 nt, Artificial Sequence
  Description of Artificial Sequence: Synthetic oligonucleotide
auccauccauuaauaagau

SEQ ID NO: 3137602 - RNA, 19 nt, Artificial Sequence
  Description of Artificial Sequence: Synthetic oligonucleotide
cguuuggugcuguuguuug

SEQ ID NO: 3137603 - RNA, 19 nt, Artificial Sequence
  Description of Artificial Sequence: Synthetic oligonucleotide
ccauccauagacuucugcu

SEQ ID NO: 3137604 - RNA, 19 nt, Artificial Sequence
  Description of Artificial Sequence: Synthetic oligonucleotide
cauagacuucugcugucua

SEQ ID NO: 3137605 - RNA, 19 nt, Artificial Sequence
  Description of Artificial Sequence: Synthetic oligonucleotide
uugugcgcguuuggugcug

SEQ ID NO: 3137606 - RNA, 19 nt, Artificial Sequence
  Description of Artificial Sequence: Synthetic oligonucleotide
gacuucugcugucuaccau

SEQ ID NO: 3137607 - RNA, 19 nt, Artificial Sequence
  Description of Artificial Sequence: Synthetic oligonucleotide
ugugcgcguuuggugcugu

SEQ ID NO: 3137608 - RNA, 19 nt, Artificial Sequence
  Description of Artificial Sequence: Synthetic oligonucleotide
gcgcguuuggugcuguugu

SEQ ID NO: 3137609 - RNA, 19 nt, Artificial Sequence
  Description of Artificial Sequence: Synthetic oligonucleotide
cuaccauuugugcgcguuu

SEQ ID NO: 3137610 - RNA, 19 nt, Artificial Sequence
  Description of Artificial Sequence: Synthetic oligonucleotide
gucuaccauuugugcgcgu

SEQ ID NO: 3137611 - RNA, 19 nt, Artificial Sequence
  Description of Artificial Sequence: Synthetic oligonucleotide
ccauuugugcgcguuuggu

SEQ ID NO: 3137612 - RNA, 19 nt, Artificial Sequence
  Description of Artificial Sequence: Synthetic oligonucleotide
gcguuuggugcuguuguuu

SEQ ID NO: 3137613 - RNA, 19 nt, Artificial Sequence
  Description of Artificial Sequence: Synthetic oligonucleotide
gugcgcguuuggugcuguu

SEQ ID NO: 3137614 - RNA, 19 nt, Artificial Sequence
  Description of Artificial Sequence: Synthetic oligonucleotide
cgcguuuggugcuguuguu

SEQ ID NO: 3137615 - RNA, 19 nt, Artificial Sequence
  Description of Artificial Sequence: Synthetic oligonucleotide
aucccauccacgcagacgc

SEQ ID NO: 3137616 - RNA, 19 nt, Artificial Sequence
  Description of Artificial Sequence: Synthetic oligonucleotide
uuuagccagguccagagcc

SEQ ID NO: 3137617 - RNA, 19 nt, Artificial Sequence
  Description of Artificial Sequence: Synthetic oligonucleotide
cucccuuugagcuuuagcc

SEQ ID NO: 3137618 - RNA, 19 nt, Artificial Sequence
  Description of Artificial Sequence: Synthetic oligonucleotide
ucaguuuaccuccuaguac

SEQ ID NO: 3137619 - RNA, 19 nt, Artificial Sequence
  Description of Artificial Sequence: Synthetic oligonucleotide
guugccucaguuuaccucc

SEQ ID NO: 3137620 - RNA, 19 nt, Artificial Sequence
  Description of Artificial Sequence: Synthetic oligonucleotide
uccuaguacuccaugcucc

SEQ ID NO: 3137621 - RNA, 19 nt, Artificial Sequence
  Description of Artificial Sequence: Synthetic oligonucleotide
accuccuaguacuccaugc

SEQ ID NO: 3137622 - RNA, 19 nt, Artificial Sequence
  Description of Artificial Sequence: Synthetic oligonucleotide
uuuaccuccuaguacucca

SEQ ID NO: 3137623 - RNA, 19 nt, Artificial Sequence
  Description of Artificial Sequence: Synthetic oligonucleotide
uuagccagguccagagccg

SEQ ID NO: 3137624 - RNA, 19 nt, Artificial Sequence
  Description of Artificial Sequence: Synthetic oligonucleotide
uccaugcucccuuugagcu

SEQ ID NO: 3137625 - RNA, 19 nt, Artificial Sequence
  Description of Artificial Sequence: Synthetic oligonucleotide
agagccggaagaccagccc

SEQ ID NO: 3137626 - RNA, 19 nt, Artificial Sequence
  Description of Artificial Sequence: Synthetic oligonucleotide
ucccuuugagcuuuagcca

SEQ ID NO: 3137627 - RNA, 19 nt, Artificial Sequence
  Description of Artificial Sequence: Synthetic oligonucleotide
gacaccccggaucaggggc

SEQ ID NO: 3137628 - RNA, 19 nt, Artificial Sequence
  Description of Artificial Sequence: Synthetic oligonucleotide
ucggggacaccccggauca

SEQ ID NO: 3137629 - RNA, 19 nt, Artificial Sequence
  Description of Artificial Sequence: Synthetic oligonucleotide
acagcgacccagccccucc

SEQ ID NO: 3137630 - RNA, 19 nt, Artificial Sequence
  Description of Artificial Sequence: Synthetic oligonucleotide
uagccguugccucaguuua

SEQ ID NO: 3137631 - RNA, 19 nt, Artificial Sequence
  Description of Artificial Sequence: Synthetic oligonucleotide
gagccggaagaccagcccc

SEQ ID NO: 3137632 - RNA, 19 nt, Artificial Sequence
  Description of Artificial Sequence: Synthetic oligonucleotide
cuccaugcucccuuugagc

SEQ ID NO: 3137633 - RNA, 19 nt, Artificial Sequence
  Description of Artificial Sequence: Synthetic oligonucleotide
gaugccaggcucucgggga

SEQ ID NO: 3137634 - RNA, 19 nt, Artificial Sequence
  Description of Artificial Sequence: Synthetic oligonucleotide
caguuuaccuccuaguacu

SEQ ID NO: 3137635 - RNA, 19 nt, Artificial Sequence
  Description of Artificial Sequence: Synthetic oligonucleotide
guccccaucccauccacgc

SEQ ID NO: 3137636 - RNA, 19 nt, Artificial Sequence
  Description of Artificial Sequence: Synthetic oligonucleotide
uccagagccggaagaccag

SEQ ID NO: 3137637 - RNA, 19 nt, Artificial Sequence
  Description of Artificial Sequence: Synthetic oligonucleotide
uaguacuccaugcucccuu

SEQ ID NO: 3137638 - RNA, 19 nt, Artificial Sequence
  Description of Artificial Sequence: Synthetic oligonucleotide
uaccuccuaguacuccaug

SEQ ID NO: 3137639 - RNA, 19 nt, Artificial Sequence
  Description of Artificial Sequence: Synthetic oligonucleotide
augccaggcucucggggac

SEQ ID NO: 3137640 - RNA, 19 nt, Artificial Sequence
  Description of Artificial Sequence: Synthetic oligonucleotide
cuuuagccagguccagagc

SEQ ID NO: 3137641 - RNA, 19 nt, Artificial Sequence
  Description of Artificial Sequence: Synthetic oligonucleotide
cuccuaguacuccaugcuc

SEQ ID NO: 3137642 - RNA, 19 nt, Artificial Sequence
  Description of Artificial Sequence: Synthetic oligonucleotide
ugggaacagcgacccagcc

SEQ ID NO: 3137643 - RNA, 19 nt, Artificial Sequence
  Description of Artificial Sequence: Synthetic oligonucleotide
caggggcaugggaacagcg

SEQ ID NO: 3137644 - RNA, 19 nt, Artificial Sequence
  Description of Artificial Sequence: Synthetic oligonucleotide
caucccauccacgcagacg

SEQ ID NO: 3137645 - RNA, 19 nt, Artificial Sequence
  Description of Artificial Sequence: Synthetic oligonucleotide
guuuaccuccuaguacucc

SEQ ID NO: 3137646 - RNA, 19 nt, Artificial Sequence
  Description of Artificial Sequence: Synthetic oligonucleotide
cucaguuuaccuccuagua

SEQ ID NO: 3137647 - RNA, 19 nt, Artificial Sequence
  Description of Artificial Sequence: Synthetic oligonucleotide
aguuuaccuccuaguacuc

SEQ ID NO: 3137648 - RNA, 19 nt, Artificial Sequence
  Description of Artificial Sequence: Synthetic oligonucleotide
cccuuugagcuuuagccag

SEQ ID NO: 3137649 - RNA, 19 nt, Artificial Sequence
  Description of Artificial Sequence: Synthetic oligonucleotide
acgcagacgccccuuccag

SEQ ID NO: 3137650 - RNA, 19 nt, Artificial Sequence
  Description of Artificial Sequence: Synthetic oligonucleotide
uuaccuccuaguacuccau

SEQ ID NO: 3137651 - RNA, 19 nt, Artificial Sequence
  Description of Artificial Sequence: Synthetic oligonucleotide
uagccagguccagagccgg

SEQ ID NO: 3137652 - RNA, 19 nt, Artificial Sequence
  Description of Artificial Sequence: Synthetic oligonucleotide
agcgacccagccccucccc

SEQ ID NO: 3137653 - RNA, 19 nt, Artificial Sequence
  Description of Artificial Sequence: Synthetic oligonucleotide
cagagccggaagaccagcc

SEQ ID NO: 3137654 - RNA, 19 nt, Artificial Sequence
  Description of Artificial Sequence: Synthetic oligonucleotide
caggcucucggggacaccc

SEQ ID NO: 3137655 - RNA, 19 nt, Artificial Sequence
  Description of Artificial Sequence: Synthetic oligonucleotide
aacagcgacccagccccuc

SEQ ID NO: 3137656 - RNA, 19 nt, Artificial Sequence
  Description of Artificial Sequence: Synthetic oligonucleotide
ggaugccaggcucucgggg

SEQ ID NO: 3137657 - RNA, 19 nt, Artificial Sequence
  Description of Artificial Sequence: Synthetic oligonucleotide
uuugagcuuuagccagguc

SEQ ID NO: 3137658 - RNA, 19 nt, Artificial Sequence
  Description of Artificial Sequence: Synthetic oligonucleotide
ggcaugggaacagcgaccc

SEQ ID NO: 3137659 - RNA, 19 nt, Artificial Sequence
  Description of Artificial Sequence: Synthetic oligonucleotide
aucaggggcaugggaacag

SEQ ID NO: 3137660 - RNA, 19 nt, Artificial Sequence
  Description of Artificial Sequence: Synthetic oligonucleotide
cucggggacaccccggauc

SEQ ID NO: 3137661 - RNA, 19 nt, Artificial Sequence
  Description of Artificial Sequence: Synthetic oligonucleotide
gcagacgccccuuccagcc

SEQ ID NO: 3137662 - RNA, 19 nt, Artificial Sequence
  Description of Artificial Sequence: Synthetic oligonucleotide
uccccaucccauccacgca

SEQ ID NO: 3137663 - RNA, 19 nt, Artificial Sequence
  Description of Artificial Sequence: Synthetic oligonucleotide
ccuaguacuccaugcuccc

SEQ ID NO: 3137664 - RNA, 19 nt, Artificial Sequence
  Description of Artificial Sequence: Synthetic oligonucleotide
ggggcaugggaacagcgac

SEQ ID NO: 3137665 - RNA, 19 nt, Artificial Sequence
  Description of Artificial Sequence: Synthetic oligonucleotide
aguacuccaugcucccuuu

SEQ ID NO: 3137666 - RNA, 19 nt, Artificial Sequence
  Description of Artificial Sequence: Synthetic oligonucleotide
gggaacagcgacccagccc

SEQ ID NO: 3137667 - RNA, 19 nt, Artificial Sequence
  Description of Artificial Sequence: Synthetic oligonucleotide
ggaucaggggcaugggaac

SEQ ID NO: 3137668 - RNA, 19 nt, Artificial Sequence
  Description of Artificial Sequence: Synthetic oligonucleotide
ugcagcccuagccguugcc

SEQ ID NO: 3137669 - RNA, 19 nt, Artificial Sequence
  Description of Artificial Sequence: Synthetic oligonucleotide
gccucaguuuaccuccuag

SEQ ID NO: 3137670 - RNA, 19 nt, Artificial Sequence
  Description of Artificial Sequence: Synthetic oligonucleotide
guccagagccggaagacca

SEQ ID NO: 3137671 - RNA, 19 nt, Artificial Sequence
  Description of Artificial Sequence: Synthetic oligonucleotide
gaucaggggcaugggaaca

SEQ ID NO: 3137672 - RNA, 19 nt, Artificial Sequence
  Description of Artificial Sequence: Synthetic oligonucleotide
ucaggggcaugggaacagc

SEQ ID NO: 3137673 - RNA, 19 nt, Artificial Sequence
  Description of Artificial Sequence: Synthetic oligonucleotide
agcccuagccguugccuca

SEQ ID NO: 3137674 - RNA, 19 nt, Artificial Sequence
  Description of Artificial Sequence: Synthetic oligonucleotide
ccuuugagcuuuagccagg

SEQ ID NO: 3137675 - RNA, 19 nt, Artificial Sequence
  Description of Artificial Sequence: Synthetic oligonucleotide
uccccggaugccaggcucu

SEQ ID NO: 3137676 - RNA, 19 nt, Artificial Sequence
  Description of Artificial Sequence: Synthetic oligonucleotide
uugccucaguuuaccuccu

SEQ ID NO: 3137677 - RNA, 19 nt, Artificial Sequence
  Description of Artificial Sequence: Synthetic oligonucleotide
uccacgcagacgccccuuc

SEQ ID NO: 3137678 - RNA, 19 nt, Artificial Sequence
  Description of Artificial Sequence: Synthetic oligonucleotide
agcuuuagccagguccaga

SEQ ID NO: 3137679 - RNA, 19 nt, Artificial Sequence
  Description of Artificial Sequence: Synthetic oligonucleotide
gcucccuuugagcuuuagc

SEQ ID NO: 3137680 - RNA, 19 nt, Artificial Sequence
  Description of Artificial Sequence: Synthetic oligonucleotide
guacuccaugcucccuuug

SEQ ID NO: 3137681 - RNA, 19 nt, Artificial Sequence
  Description of Artificial Sequence: Synthetic oligonucleotide
gagcuuuagccagguccag

SEQ ID NO: 3137682 - RNA, 19 nt, Artificial Sequence
  Description of Artificial Sequence: Synthetic oligonucleotide
ggcucucggggacaccccg

SEQ ID NO: 3137683 - RNA, 19 nt, Artificial Sequence
  Description of Artificial Sequence: Synthetic oligonucleotide
ccggaugccaggcucucgg

SEQ ID NO: 3137684 - RNA, 19 nt, Artificial Sequence
  Description of Artificial Sequence: Synthetic oligonucleotide
ucccauccacgcagacgcc

SEQ ID NO: 3137685 - RNA, 19 nt, Artificial Sequence
  Description of Artificial Sequence: Synthetic oligonucleotide
agccguugccucaguuuac

SEQ ID NO: 3137686 - RNA, 19 nt, Artificial Sequence
  Description of Artificial Sequence: Synthetic oligonucleotide
ucuccccggaugccaggcu

SEQ ID NO: 3137687 - RNA, 19 nt, Artificial Sequence
  Description of Artificial Sequence: Synthetic oligonucleotide
cagcccuagccguugccuc

SEQ ID NO: 3137688 - RNA, 19 nt, Artificial Sequence
  Description of Artificial Sequence: Synthetic oligonucleotide
cuccccggaugccaggcuc

SEQ ID NO: 3137689 - RNA, 19 nt, Artificial Sequence
  Description of Artificial Sequence: Synthetic oligonucleotide
cagguccagagccggaaga

SEQ ID NO: 3137690 - RNA, 19 nt, Artificial Sequence
  Description of Artificial Sequence: Synthetic oligonucleotide
ggggacaccccggaucagg

SEQ ID NO: 3137691 - RNA, 19 nt, Artificial Sequence
  Description of Artificial Sequence: Synthetic oligonucleotide
agacgccccuuccagccaa

SEQ ID NO: 3137692 - RNA, 19 nt, Artificial Sequence
  Description of Artificial Sequence: Synthetic oligonucleotide
gggacaccccggaucaggg

SEQ ID NO: 3137693 - RNA, 19 nt, Artificial Sequence
  Description of Artificial Sequence: Synthetic oligonucleotide
ggacaccccggaucagggg

SEQ ID NO: 3137694 - RNA, 19 nt, Artificial Sequence
  Description of Artificial Sequence: Synthetic oligonucleotide
cucuccccggaugccaggc

SEQ ID NO: 3137695 - RNA, 19 nt, Artificial Sequence
  Description of Artificial Sequence: Synthetic oligonucleotide
gguccagagccggaagacc

SEQ ID NO: 3137696 - RNA, 19 nt, Artificial Sequence
  Description of Artificial Sequence: Synthetic oligonucleotide
aggcucucggggacacccc

SEQ ID NO: 3137697 - RNA, 19 nt, Artificial Sequence
  Description of Artificial Sequence: Synthetic oligonucleotide
cacgcagacgccccuucca

SEQ ID NO: 3137698 - RNA, 19 nt, Artificial Sequence
  Description of Artificial Sequence: Synthetic oligonucleotide
acgccccuuccagccaagc

SEQ ID NO: 3137699 - RNA, 19 nt, Artificial Sequence
  Description of Artificial Sequence: Synthetic oligonucleotide
ugcucccuuugagcuuuag

SEQ ID NO: 3137700 - RNA, 19 nt, Artificial Sequence
  Description of Artificial Sequence: Synthetic oligonucleotide
ucucggggacaccccggau

SEQ ID NO: 3137701 - RNA, 19 nt, Artificial Sequence
  Description of Artificial Sequence: Synthetic oligonucleotide
ugccucaguuuaccuccua

SEQ ID NO: 3137702 - RNA, 19 nt, Artificial Sequence
  Description of Artificial Sequence: Synthetic oligonucleotide
gggcaugggaacagcgacc

SEQ ID NO: 3137703 - RNA, 19 nt, Artificial Sequence
  Description of Artificial Sequence: Synthetic oligonucleotide
cguugccucaguuuaccuc

SEQ ID NO: 3137704 - RNA, 19 nt, Artificial Sequence
  Description of Artificial Sequence: Synthetic oligonucleotide
gccguugccucaguuuacc

SEQ ID NO: 3137705 - RNA, 19 nt, Artificial Sequence
  Description of Artificial Sequence: Synthetic oligonucleotide
cagcgacccagccccuccc

SEQ ID NO: 3137706 - RNA, 19 nt, Artificial Sequence
  Description of Artificial Sequence: Synthetic oligonucleotide
cuagccguugccucaguuu

SEQ ID NO: 3137707 - RNA, 19 nt, Artificial Sequence
  Description of Artificial Sequence: Synthetic oligonucleotide
cugcagcccuagccguugc

SEQ ID NO: 3137708 - RNA, 19 nt, Artificial Sequence
  Description of Artificial Sequence: Synthetic oligonucleotide
ccccggaucaggggcaugg

SEQ ID NO: 3137709 - RNA, 19 nt, Artificial Sequence
  Description of Artificial Sequence: Synthetic oligonucleotide
acaccccggaucaggggca

SEQ ID NO: 3137710 - RNA, 19 nt, Artificial Sequence
  Description of Artificial Sequence: Synthetic oligonucleotide
ugccaggcucucggggaca

SEQ ID NO: 3137711 - RNA, 19 nt, Artificial Sequence
  Description of Artificial Sequence: Synthetic oligonucleotide
cuuugagcuuuagccaggu

SEQ ID NO: 3137712 - RNA, 19 nt, Artificial Sequence
  Description of Artificial Sequence: Synthetic oligonucleotide
cccauccacgcagacgccc

SEQ ID NO: 3137713 - RNA, 19 nt, Artificial Sequence
  Description of Artificial Sequence: Synthetic oligonucleotide
ccagguccagagccggaag

SEQ ID NO: 3137714 - RNA, 19 nt, Artificial Sequence
  Description of Artificial Sequence: Synthetic oligonucleotide
gacgccccuuccagccaag

SEQ ID NO: 3137715 - RNA, 19 nt, Artificial Sequence
  Description of Artificial Sequence: Synthetic oligonucleotide
gcugcagcccuagccguug

SEQ ID NO: 3137716 - RNA, 19 nt, Artificial Sequence
  Description of Artificial Sequence: Synthetic oligonucleotide
caugcucccuuugagcuuu

SEQ ID NO: 3137717 - RNA, 19 nt, Artificial Sequence
  Description of Artificial Sequence: Synthetic oligonucleotide
cggaucaggggcaugggaa

SEQ ID NO: 3137718 - RNA, 19 nt, Artificial Sequence
  Description of Artificial Sequence: Synthetic oligonucleotide
gcucucggggacaccccgg

SEQ ID NO: 3137719 - RNA, 19 nt, Artificial Sequence
  Description of Artificial Sequence: Synthetic oligonucleotide
ccucaguuuaccuccuagu

SEQ ID NO: 3137720 - RNA, 19 nt, Artificial Sequence
  Description of Artificial Sequence: Synthetic oligonucleotide
cagacgccccuuccagcca

SEQ ID NO: 3137721 - RNA, 19 nt, Artificial Sequence
  Description of Artificial Sequence: Synthetic oligonucleotide
ccacgcagacgccccuucc

SEQ ID NO: 3137722 - RNA, 19 nt, Artificial Sequence
  Description of Artificial Sequence: Synthetic oligonucleotide
ggcguccccaucccaucca

SEQ ID NO: 3137723 - RNA, 19 nt, Artificial Sequence
  Description of Artificial Sequence: Synthetic oligonucleotide
ccuccuaguacuccaugcu

SEQ ID NO: 3137724 - RNA, 19 nt, Artificial Sequence
  Description of Artificial Sequence: Synthetic oligonucleotide
gcguccccaucccauccac

SEQ ID NO: 3137725 - RNA, 19 nt, Artificial Sequence
  Description of Artificial Sequence: Synthetic oligonucleotide
cguccccaucccauccacg

SEQ ID NO: 3137726 - RNA, 19 nt, Artificial Sequence
  Description of Artificial Sequence: Synthetic oligonucleotide
cuaguacuccaugcucccu

SEQ ID NO: 3137727 - RNA, 19 nt, Artificial Sequence
  Description of Artificial Sequence: Synthetic oligonucleotide
ccaucccauccacgcagac

SEQ ID NO: 3137728 - RNA, 19 nt, Artificial Sequence
  Description of Artificial Sequence: Synthetic oligonucleotide
cgcagacgccccuuccagc

SEQ ID NO: 3137729 - RNA, 19 nt, Artificial Sequence
  Description of Artificial Sequence: Synthetic oligonucleotide
cggaugccaggcucucggg

SEQ ID NO: 3137730 - RNA, 19 nt, Artificial Sequence
  Description of Artificial Sequence: Synthetic oligonucleotide
gcccuagccguugccucag

SEQ ID NO: 3137731 - RNA, 19 nt, Artificial Sequence
  Description of Artificial Sequence: Synthetic oligonucleotide
auccacgcagacgccccuu

SEQ ID NO: 3137732 - RNA, 19 nt, Artificial Sequence
  Description of Artificial Sequence: Synthetic oligonucleotide
agccagguccagagccgga

SEQ ID NO: 3137733 - RNA, 19 nt, Artificial Sequence
  Description of Artificial Sequence: Synthetic oligonucleotide
ccggaucaggggcauggga

SEQ ID NO: 3137734 - RNA, 19 nt, Artificial Sequence
  Description of Artificial Sequence: Synthetic oligonucleotide
cccggaucaggggcauggg

SEQ ID NO: 3137735 - RNA, 19 nt, Artificial Sequence
  Description of Artificial Sequence: Synthetic oligonucleotide
gccagguccagagccggaa

SEQ ID NO: 3137736 - RNA, 19 nt, Artificial Sequence
  Description of Artificial Sequence: Synthetic oligonucleotide
cauccacgcagacgccccu

SEQ ID NO: 3137737 - RNA, 19 nt, Artificial Sequence
  Description of Artificial Sequence: Synthetic oligonucleotide
gcaugggaacagcgaccca

SEQ ID NO: 3137738 - RNA, 19 nt, Artificial Sequence
  Description of Artificial Sequence: Synthetic oligonucleotide
cggcguccccaucccaucc

SEQ ID NO: 3137739 - RNA, 19 nt, Artificial Sequence
  Description of Artificial Sequence: Synthetic oligonucleotide
ccggcguccccaucccauc

SEQ ID NO: 3137740 - RNA, 19 nt, Artificial Sequence
  Description of Artificial Sequence: Synthetic oligonucleotide
cccaucccauccacgcaga

SEQ ID NO: 3137741 - RNA, 19 nt, Artificial Sequence
  Description of Artificial Sequence: Synthetic oligonucleotide
gccaggcucucggggacac

SEQ ID NO: 3137742 - RNA, 19 nt, Artificial Sequence
  Description of Artificial Sequence: Synthetic oligonucleotide
accccggaucaggggcaug

SEQ ID NO: 3137743 - RNA, 19 nt, Artificial Sequence
  Description of Artificial Sequence: Synthetic oligonucleotide
gaacagcgacccagccccu

SEQ ID NO: 3137744 - RNA, 19 nt, Artificial Sequence
  Description of Artificial Sequence: Synthetic oligonucleotide
ccaggcucucggggacacc

SEQ ID NO: 3137745 - RNA, 19 nt, Artificial Sequence
  Description of Artificial Sequence: Synthetic oligonucleotide
ccguugccucaguuuaccu

SEQ ID NO: 3137746 - RNA, 19 nt, Artificial Sequence
  Description of Artificial Sequence: Synthetic oligonucleotide
ccaugcucccuuugagcuu

SEQ ID NO: 3137747 - RNA, 19 nt, Artificial Sequence
  Description of Artificial Sequence: Synthetic oligonucleotide
augcucccuuugagcuuua

SEQ ID NO: 3137748 - RNA, 19 nt, Artificial Sequence
  Description of Artificial Sequence: Synthetic oligonucleotide
ccuagccguugccucaguu

SEQ ID NO: 3137749 - RNA, 19 nt, Artificial Sequence
  Description of Artificial Sequence: Synthetic oligonucleotide
ccccggaugccaggcucuc

SEQ ID NO: 3137750 - RNA, 19 nt, Artificial Sequence
  Description of Artificial Sequence: Synthetic oligonucleotide
cccggcguccccaucccau

SEQ ID NO: 3137751 - RNA, 19 nt, Artificial Sequence
  Description of Artificial Sequence: Synthetic oligonucleotide
caccccggaucaggggcau

SEQ ID NO: 3137752 - RNA, 19 nt, Artificial Sequence
  Description of Artificial Sequence: Synthetic oligonucleotide
cgccccuuccagccaagcu

SEQ ID NO: 3137753 - RNA, 19 nt, Artificial Sequence
  Description of Artificial Sequence: Synthetic oligonucleotide
cggggacaccccggaucag

SEQ ID NO: 3137754 - RNA, 19 nt, Artificial Sequence
  Description of Artificial Sequence: Synthetic oligonucleotide
ccccggcguccccauccca

SEQ ID NO: 3137755 - RNA, 19 nt, Artificial Sequence
  Description of Artificial Sequence: Synthetic oligonucleotide
cccuagccguugccucagu

SEQ ID NO: 3137756 - RNA, 19 nt, Artificial Sequence
  Description of Artificial Sequence: Synthetic oligonucleotide
ccccgcgcucuccccggau

SEQ ID NO: 3137757 - RNA, 19 nt, Artificial Sequence
  Description of Artificial Sequence: Synthetic oligonucleotide
aaguaaacacuuucuuucc

SEQ ID NO: 3137758 - RNA, 19 nt, Artificial Sequence
  Description of Artificial Sequence: Synthetic oligonucleotide
ugaggaacaagccaguaag

SEQ ID NO: 3137759 - RNA, 19 nt, Artificial Sequence
  Description of Artificial Sequence: Synthetic oligonucleotide
aucacagcaauaguaaccc

SEQ ID NO: 3137760 - RNA, 19 nt, Artificial Sequence
  Description of Artificial Sequence: Synthetic oligonucleotide
aagccaaguaaacacuuuc

SEQ ID NO: 3137761 - RNA, 19 nt, Artificial Sequence
  Description of Artificial Sequence: Synthetic oligonucleotide
ucagugauggacuauggug

SEQ ID NO: 3137762 - RNA, 19 nt, Artificial Sequence
  Description of Artificial Sequence: Synthetic oligonucleotide
caaguaaacacuuucuuuc

SEQ ID NO: 3137763 - RNA, 19 nt, Artificial Sequence
  Description of Artificial Sequence: Synthetic oligonucleotide
aacacuuucuuucccaacu

SEQ ID NO: 3137764 - RNA, 19 nt, Artificial Sequence
  Description of Artificial Sequence: Synthetic oligonucleotide
uguuccaucacagcaauag

SEQ ID NO: 3137765 - RNA, 19 nt, Artificial Sequence
  Description of Artificial Sequence: Synthetic oligonucleotide
aguaaacacuuucuuuccc

SEQ ID NO: 3137766 - RNA, 19 nt, Artificial Sequence
  Description of Artificial Sequence: Synthetic oligonucleotide
acuuccuucagugauggac

SEQ ID NO: 3137767 - RNA, 19 nt, Artificial Sequence
  Description of Artificial Sequence: Synthetic oligonucleotide
aaacacuuucuuucccaac

SEQ ID NO: 3137768 - RNA, 19 nt, Artificial Sequence
  Description of Artificial Sequence: Synthetic oligonucleotide
uuucccaacuugcuuuugg

SEQ ID NO: 3137769 - RNA, 19 nt, Artificial Sequence
  Description of Artificial Sequence: Synthetic oligonucleotide
uguaagccaaguaaacacu

SEQ ID NO: 3137770 - RNA, 19 nt, Artificial Sequence
  Description of Artificial Sequence: Synthetic oligonucleotide
aguucuugcccugacuucc

SEQ ID NO: 3137771 - RNA, 19 nt, Artificial Sequence
  Description of Artificial Sequence: Synthetic oligonucleotide
uggacuaugguguggaagu

SEQ ID NO: 3137772 - RNA, 19 nt, Artificial Sequence
  Description of Artificial Sequence: Synthetic oligonucleotide
uaugguguggaaguguaag

SEQ ID NO: 3137773 - RNA, 19 nt, Artificial Sequence
  Description of Artificial Sequence: Synthetic oligonucleotide
aaguguaagccaaguaaac

SEQ ID NO: 3137774 - RNA, 19 nt, Artificial Sequence
  Description of Artificial Sequence: Synthetic oligonucleotide
guguaagccaaguaaacac

SEQ ID NO: 3137775 - RNA, 19 nt, Artificial Sequence
  Description of Artificial Sequence: Synthetic oligonucleotide
acuuucuuucccaacuugc

SEQ ID NO: 3137776 - RNA, 19 nt, Artificial Sequence
  Description of Artificial Sequence: Synthetic oligonucleotide
augguguggaaguguaagc

SEQ ID NO: 3137777 - RNA, 19 nt, Artificial Sequence
  Description of Artificial Sequence: Synthetic oligonucleotide
ucaugguguuccaucacag

SEQ ID NO: 3137778 - RNA, 19 nt, Artificial Sequence
  Description of Artificial Sequence: Synthetic oligonucleotide
augguguuccaucacagca

SEQ ID NO: 3137779 - RNA, 19 nt, Artificial Sequence
  Description of Artificial Sequence: Synthetic oligonucleotide
cuuuuggucaugguguucc

SEQ ID NO: 3137780 - RNA, 19 nt, Artificial Sequence
  Description of Artificial Sequence: Synthetic oligonucleotide
aagccaguaagcagcacac

SEQ ID NO: 3137781 - RNA, 19 nt, Artificial Sequence
  Description of Artificial Sequence: Synthetic oligonucleotide
caagcccugaggaacaagc

SEQ ID NO: 3137782 - RNA, 19 nt, Artificial Sequence
  Description of Artificial Sequence: Synthetic oligonucleotide
uuccaucacagcaauagua

SEQ ID NO: 3137783 - RNA, 19 nt, Artificial Sequence
  Description of Artificial Sequence: Synthetic oligonucleotide
ugaguucuugcccugacuu

SEQ ID NO: 3137784 - RNA, 19 nt, Artificial Sequence
  Description of Artificial Sequence: Synthetic oligonucleotide
uaagcagcacaccuccaug

SEQ ID NO: 3137785 - RNA, 19 nt, Artificial Sequence
  Description of Artificial Sequence: Synthetic oligonucleotide
caguaagcagcacaccucc

SEQ ID NO: 3137786 - RNA, 19 nt, Artificial Sequence
  Description of Artificial Sequence: Synthetic oligonucleotide
guaaacacuuucuuuccca

SEQ ID NO: 3137787 - RNA, 19 nt, Artificial Sequence
  Description of Artificial Sequence: Synthetic oligonucleotide
agcagcacaccuccauggc

SEQ ID NO: 3137788 - RNA, 19 nt, Artificial Sequence
  Description of Artificial Sequence: Synthetic oligonucleotide
uucagugauggacuauggu

SEQ ID NO: 3137789 - RNA, 19 nt, Artificial Sequence
  Description of Artificial Sequence: Synthetic oligonucleotide
uucuuucccaacuugcuuu

SEQ ID NO: 3137790 - RNA, 19 nt, Artificial Sequence
  Description of Artificial Sequence: Synthetic oligonucleotide
aguguaagccaaguaaaca

SEQ ID NO: 3137791 - RNA, 19 nt, Artificial Sequence
  Description of Artificial Sequence: Synthetic oligonucleotide
ggaaguguaagccaaguaa

SEQ ID NO: 3137792 - RNA, 19 nt, Artificial Sequence
  Description of Artificial Sequence: Synthetic oligonucleotide
ggaacaagccaguaagcag

SEQ ID NO: 3137793 - RNA, 19 nt, Artificial Sequence
  Description of Artificial Sequence: Synthetic oligonucleotide
aagcccugaggaacaagcc

SEQ ID NO: 3137794 - RNA, 19 nt, Artificial Sequence
  Description of Artificial Sequence: Synthetic oligonucleotide
ucugcaucggcuccugccu

SEQ ID NO: 3137795 - RNA, 19 nt, Artificial Sequence
  Description of Artificial Sequence: Synthetic oligonucleotide
aacuugcuuuuggucaugg

SEQ ID NO: 3137796 - RNA, 19 nt, Artificial Sequence
  Description of Artificial Sequence: Synthetic oligonucleotide
cuucagugauggacuaugg

SEQ ID NO: 3137797 - RNA, 19 nt, Artificial Sequence
  Description of Artificial Sequence: Synthetic oligonucleotide
uggucaugguguuccauca

SEQ ID NO: 3137798 - RNA, 19 nt, Artificial Sequence
  Description of Artificial Sequence: Synthetic oligonucleotide
ugauggacuauggugugga

SEQ ID NO: 3137799 - RNA, 19 nt, Artificial Sequence
  Description of Artificial Sequence: Synthetic oligonucleotide
agugauggacuauggugug

SEQ ID NO: 3137800 - RNA, 19 nt, Artificial Sequence
  Description of Artificial Sequence: Synthetic oligonucleotide
ugaccaagcccugaggaac

SEQ ID NO: 3137801 - RNA, 19 nt, Artificial Sequence
  Description of Artificial Sequence: Synthetic oligonucleotide
ugguguuccaucacagcaa

SEQ ID NO: 3137802 - RNA, 19 nt, Artificial Sequence
  Description of Artificial Sequence: Synthetic oligonucleotide
uuggucaugguguuccauc

SEQ ID NO: 3137803 - RNA, 19 nt, Artificial Sequence
  Description of Artificial Sequence: Synthetic oligonucleotide
aggaacaagccaguaagca

SEQ ID NO: 3137804 - RNA, 19 nt, Artificial Sequence
  Description of Artificial Sequence: Synthetic oligonucleotide
cuccauggccucugcaucg

SEQ ID NO: 3137805 - RNA, 19 nt, Artificial Sequence
  Description of Artificial Sequence: Synthetic oligonucleotide
ugcccuguugaguucuugc

SEQ ID NO: 3137806 - RNA, 19 nt, Artificial Sequence
  Description of Artificial Sequence: Synthetic oligonucleotide
caugguguuccaucacagc

SEQ ID NO: 3137807 - RNA, 19 nt, Artificial Sequence
  Description of Artificial Sequence: Synthetic oligonucleotide
auggacuaugguguggaag

SEQ ID NO: 3137808 - RNA, 19 nt, Artificial Sequence
  Description of Artificial Sequence: Synthetic oligonucleotide
uugaguucuugcccugacu

SEQ ID NO: 3137809 - RNA, 19 nt, Artificial Sequence
  Description of Artificial Sequence: Synthetic oligonucleotide
uucccaacuugcuuuuggu

SEQ ID NO: 3137810 - RNA, 19 nt, Artificial Sequence
  Description of Artificial Sequence: Synthetic oligonucleotide
uaagccaaguaaacacuuu

SEQ ID NO: 3137811 - RNA, 19 nt, Artificial Sequence
  Description of Artificial Sequence: Synthetic oligonucleotide
uggaaguguaagccaagua

SEQ ID NO: 3137812 - RNA, 19 nt, Artificial Sequence
  Description of Artificial Sequence: Synthetic oligonucleotide
caagccaguaagcagcaca

SEQ ID NO: 3137813 - RNA, 19 nt, Artificial Sequence
  Description of Artificial Sequence: Synthetic oligonucleotide
cugacuuccuucagugaug

SEQ ID NO: 3137814 - RNA, 19 nt, Artificial Sequence
  Description of Artificial Sequence: Synthetic oligonucleotide
agcccugaggaacaagcca

SEQ ID NO: 3137815 - RNA, 19 nt, Artificial Sequence
  Description of Artificial Sequence: Synthetic oligonucleotide
gucaugguguuccaucaca

SEQ ID NO: 3137816 - RNA, 19 nt, Artificial Sequence
  Description of Artificial Sequence: Synthetic oligonucleotide
gaggaacaagccaguaagc

SEQ ID NO: 3137817 - RNA, 19 nt, Artificial Sequence
  Description of Artificial Sequence: Synthetic oligonucleotide
aacaagccaguaagcagca

SEQ ID NO: 3137818 - RNA, 19 nt, Artificial Sequence
  Description of Artificial Sequence: Synthetic oligonucleotide
ucccaacuugcuuuugguc

SEQ ID NO: 3137819 - RNA, 19 nt, Artificial Sequence
  Description of Artificial Sequence: Synthetic oligonucleotide
cagugauggacuauggugu

SEQ ID NO: 3137820 - RNA, 19 nt, Artificial Sequence
  Description of Artificial Sequence: Synthetic oligonucleotide
cacagcaauaguaacccua

SEQ ID NO: 3137821 - RNA, 19 nt, Artificial Sequence
  Description of Artificial Sequence: Synthetic oligonucleotide
acagcaauaguaacccuaa

SEQ ID NO: 3137822 - RNA, 19 nt, Artificial Sequence
  Description of Artificial Sequence: Synthetic oligonucleotide
uuuuggucaugguguucca

SEQ ID NO: 3137823 - RNA, 19 nt, Artificial Sequence
  Description of Artificial Sequence: Synthetic oligonucleotide
ugcccugacuuccuucagu

SEQ ID NO: 3137824 - RNA, 19 nt, Artificial Sequence
  Description of Artificial Sequence: Synthetic oligonucleotide
agccaaguaaacacuuucu

SEQ ID NO: 3137825 - RNA, 19 nt, Artificial Sequence
  Description of Artificial Sequence: Synthetic oligonucleotide
ucuuucccaacuugcuuuu

SEQ ID NO: 3137826 - RNA, 19 nt, Artificial Sequence
  Description of Artificial Sequence: Synthetic oligonucleotide
ugcaucggcuccugccucc

SEQ ID NO: 3137827 - RNA, 19 nt, Artificial Sequence
  Description of Artificial Sequence: Synthetic oligonucleotide
agccaguaagcagcacacc

SEQ ID NO: 3137828 - RNA, 19 nt, Artificial Sequence
  Description of Artificial Sequence: Synthetic oligonucleotide
guugaguucuugcccugac

SEQ ID NO: 3137829 - RNA, 19 nt, Artificial Sequence
  Description of Artificial Sequence: Synthetic oligonucleotide
cuuccuucagugauggacu

SEQ ID NO: 3137830 - RNA, 19 nt, Artificial Sequence
  Description of Artificial Sequence: Synthetic oligonucleotide
aggcugaccaagcccugag

SEQ ID NO: 3137831 - RNA, 19 nt, Artificial Sequence
  Description of Artificial Sequence: Synthetic oligonucleotide
ucuugcccugacuuccuuc

SEQ ID NO: 3137832 - RNA, 19 nt, Artificial Sequence
  Description of Artificial Sequence: Synthetic oligonucleotide
uguugaguucuugcccuga

SEQ ID NO: 3137833 - RNA, 19 nt, Artificial Sequence
  Description of Artificial Sequence: Synthetic oligonucleotide
ucggcuccugccuccagga

SEQ ID NO: 3137834 - RNA, 19 nt, Artificial Sequence
  Description of Artificial Sequence: Synthetic oligonucleotide
gugauggacuauggugugg

SEQ ID NO: 3137835 - RNA, 19 nt, Artificial Sequence
  Description of Artificial Sequence: Synthetic oligonucleotide
gguguggaaguguaagcca

SEQ ID NO: 3137836 - RNA, 19 nt, Artificial Sequence
  Description of Artificial Sequence: Synthetic oligonucleotide
uccauggccucugcaucgg

SEQ ID NO: 3137837 - RNA, 19 nt, Artificial Sequence
  Description of Artificial Sequence: Synthetic oligonucleotide
gauccugcccuguugaguu

SEQ ID NO: 3137838 - RNA, 19 nt, Artificial Sequence
  Description of Artificial Sequence: Synthetic oligonucleotide
cccaacuugcuuuugguca

SEQ ID NO: 3137839 - RNA, 19 nt, Artificial Sequence
  Description of Artificial Sequence: Synthetic oligonucleotide
ugcuuuuggucaugguguu

SEQ ID NO: 3137840 - RNA, 19 nt, Artificial Sequence
  Description of Artificial Sequence: Synthetic oligonucleotide
agcacaccuccauggccuc

SEQ ID NO: 3137841 - RNA, 19 nt, Artificial Sequence
  Description of Artificial Sequence: Synthetic oligonucleotide
acuaugguguggaagugua

SEQ ID NO: 3137842 - RNA, 19 nt, Artificial Sequence
  Description of Artificial Sequence: Synthetic oligonucleotide
gcugaccaagcccugagga

SEQ ID NO: 3137843 - RNA, 19 nt, Artificial Sequence
  Description of Artificial Sequence: Synthetic oligonucleotide
acuugcuuuuggucauggu

SEQ ID NO: 3137844 - RNA, 19 nt, Artificial Sequence
  Description of Artificial Sequence: Synthetic oligonucleotide
aggauccugcccuguugag

SEQ ID NO: 3137845 - RNA, 19 nt, Artificial Sequence
  Description of Artificial Sequence: Synthetic oligonucleotide
cugaggaacaagccaguaa

SEQ ID NO: 3137846 - RNA, 19 nt, Artificial Sequence
  Description of Artificial Sequence: Synthetic oligonucleotide
uuccuucagugauggacua

SEQ ID NO: 3137847 - RNA, 19 nt, Artificial Sequence
  Description of Artificial Sequence: Synthetic oligonucleotide
uuuggucaugguguuccau

SEQ ID NO: 3137848 - RNA, 19 nt, Artificial Sequence
  Description of Artificial Sequence: Synthetic oligonucleotide
gcccugaggaacaagccag

SEQ ID NO: 3137849 - RNA, 19 nt, Artificial Sequence
  Description of Artificial Sequence: Synthetic oligonucleotide
gcccugacuuccuucagug

SEQ ID NO: 3137850 - RNA, 19 nt, Artificial Sequence
  Description of Artificial Sequence: Synthetic oligonucleotide
cccuguugaguucuugccc

SEQ ID NO: 3137851 - RNA, 19 nt, Artificial Sequence
  Description of Artificial Sequence: Synthetic oligonucleotide
ccuucagugauggacuaug

SEQ ID NO: 3137852 - RNA, 19 nt, Artificial Sequence
  Description of Artificial Sequence: Synthetic oligonucleotide
gcccuguugaguucuugcc

SEQ ID NO: 3137853 - RNA, 19 nt, Artificial Sequence
  Description of Artificial Sequence: Synthetic oligonucleotide
gcagcacaccuccauggcc

SEQ ID NO: 3137854 - RNA, 19 nt, Artificial Sequence
  Description of Artificial Sequence: Synthetic oligonucleotide
auccugcccuguugaguuc

SEQ ID NO: 3137855 - RNA, 19 nt, Artificial Sequence
  Description of Artificial Sequence: Synthetic oligonucleotide
ccaguaagcagcacaccuc

SEQ ID NO: 3137856 - RNA, 19 nt, Artificial Sequence
  Description of Artificial Sequence: Synthetic oligonucleotide
gaccaagcccugaggaaca

SEQ ID NO: 3137857 - RNA, 19 nt, Artificial Sequence
  Description of Artificial Sequence: Synthetic oligonucleotide
ggcugaccaagcccugagg

SEQ ID NO: 3137858 - RNA, 19 nt, Artificial Sequence
  Description of Artificial Sequence: Synthetic oligonucleotide
gauggacuaugguguggaa

SEQ ID NO: 3137859 - RNA, 19 nt, Artificial Sequence
  Description of Artificial Sequence: Synthetic oligonucleotide
cugaccaagcccugaggaa

SEQ ID NO: 3137860 - RNA, 19 nt, Artificial Sequence
  Description of Artificial Sequence: Synthetic oligonucleotide
guuccaucacagcaauagu

SEQ ID NO: 3137861 - RNA, 19 nt, Artificial Sequence
  Description of Artificial Sequence: Synthetic oligonucleotide
gacuaugguguggaagugu

SEQ ID NO: 3137862 - RNA, 19 nt, Artificial Sequence
  Description of Artificial Sequence: Synthetic oligonucleotide
gccaguaagcagcacaccu

SEQ ID NO: 3137863 - RNA, 19 nt, Artificial Sequence
  Description of Artificial Sequence: Synthetic oligonucleotide
cagcacaccuccauggccu

SEQ ID NO: 3137864 - RNA, 19 nt, Artificial Sequence
  Description of Artificial Sequence: Synthetic oligonucleotide
cacaccuccauggccucug

SEQ ID NO: 3137865 - RNA, 19 nt, Artificial Sequence
  Description of Artificial Sequence: Synthetic oligonucleotide
cuaugguguggaaguguaa

SEQ ID NO: 3137866 - RNA, 19 nt, Artificial Sequence
  Description of Artificial Sequence: Synthetic oligonucleotide
guaagccaaguaaacacuu

SEQ ID NO: 3137867 - RNA, 19 nt, Artificial Sequence
  Description of Artificial Sequence: Synthetic oligonucleotide
ggcuccugccuccaggauc

SEQ ID NO: 3137868 - RNA, 19 nt, Artificial Sequence
  Description of Artificial Sequence: Synthetic oligonucleotide
ggucaugguguuccaucac

SEQ ID NO: 3137869 - RNA, 19 nt, Artificial Sequence
  Description of Artificial Sequence: Synthetic oligonucleotide
cuuucccaacuugcuuuug

SEQ ID NO: 3137870 - RNA, 19 nt, Artificial Sequence
  Description of Artificial Sequence: Synthetic oligonucleotide
aguaagcagcacaccucca

SEQ ID NO: 3137871 - RNA, 19 nt, Artificial Sequence
  Description of Artificial Sequence: Synthetic oligonucleotide
uccuucagugauggacuau

SEQ ID NO: 3137872 - RNA, 19 nt, Artificial Sequence
  Description of Artificial Sequence: Synthetic oligonucleotide
ggacuaugguguggaagug

SEQ ID NO: 3137873 - RNA, 19 nt, Artificial Sequence
  Description of Artificial Sequence: Synthetic oligonucleotide
cugcaucggcuccugccuc

SEQ ID NO: 3137874 - RNA, 19 nt, Artificial Sequence
  Description of Artificial Sequence: Synthetic oligonucleotide
guggaaguguaagccaagu

SEQ ID NO: 3137875 - RNA, 19 nt, Artificial Sequence
  Description of Artificial Sequence: Synthetic oligonucleotide
ccuccauggccucugcauc

SEQ ID NO: 3137876 - RNA, 19 nt, Artificial Sequence
  Description of Artificial Sequence: Synthetic oligonucleotide
gacuuccuucagugaugga

SEQ ID NO: 3137877 - RNA, 19 nt, Artificial Sequence
  Description of Artificial Sequence: Synthetic oligonucleotide
ccaggauccugcccuguug

SEQ ID NO: 3137878 - RNA, 19 nt, Artificial Sequence
  Description of Artificial Sequence: Synthetic oligonucleotide
ccuguugaguucuugcccu

SEQ ID NO: 3137879 - RNA, 19 nt, Artificial Sequence
  Description of Artificial Sequence: Synthetic oligonucleotide
gccaaguaaacacuuucuu

SEQ ID NO: 3137880 - RNA, 19 nt, Artificial Sequence
  Description of Artificial Sequence: Synthetic oligonucleotide
ccugacuuccuucagugau

SEQ ID NO: 3137881 - RNA, 19 nt, Artificial Sequence
  Description of Artificial Sequence: Synthetic oligonucleotide
cugcccuguugaguucuug

SEQ ID NO: 3137882 - RNA, 19 nt, Artificial Sequence
  Description of Artificial Sequence: Synthetic oligonucleotide
caucggcuccugccuccag

SEQ ID NO: 3137883 - RNA, 19 nt, Artificial Sequence
  Description of Artificial Sequence: Synthetic oligonucleotide
accaagcccugaggaacaa

SEQ ID NO: 3137884 - RNA, 19 nt, Artificial Sequence
  Description of Artificial Sequence: Synthetic oligonucleotide
gcuuuuggucaugguguuc

SEQ ID NO: 3137885 - RNA, 19 nt, Artificial Sequence
  Description of Artificial Sequence: Synthetic oligonucleotide
caggcugaccaagcccuga

SEQ ID NO: 3137886 - RNA, 19 nt, Artificial Sequence
  Description of Artificial Sequence: Synthetic oligonucleotide
guucuugcccugacuuccu

SEQ ID NO: 3137887 - RNA, 19 nt, Artificial Sequence
  Description of Artificial Sequence: Synthetic oligonucleotide
ccuccaggauccugcccug

SEQ ID NO: 3137888 - RNA, 19 nt, Artificial Sequence
  Description of Artificial Sequence: Synthetic oligonucleotide
ccaacuugcuuuuggucau

SEQ ID NO: 3137889 - RNA, 19 nt, Artificial Sequence
  Description of Artificial Sequence: Synthetic oligonucleotide
ggauccugcccuguugagu

SEQ ID NO: 3137890 - RNA, 19 nt, Artificial Sequence
  Description of Artificial Sequence: Synthetic oligonucleotide
ccaagcccugaggaacaag

SEQ ID NO: 3137891 - RNA, 19 nt, Artificial Sequence
  Description of Artificial Sequence: Synthetic oligonucleotide
ccauggccucugcaucggc

SEQ ID NO: 3137892 - RNA, 19 nt, Artificial Sequence
  Description of Artificial Sequence: Synthetic oligonucleotide
cccugacuuccuucaguga

SEQ ID NO: 3137893 - RNA, 19 nt, Artificial Sequence
  Description of Artificial Sequence: Synthetic oligonucleotide
ccugaggaacaagccagua

SEQ ID NO: 3137894 - RNA, 19 nt, Artificial Sequence
  Description of Artificial Sequence: Synthetic oligonucleotide
cccugaggaacaagccagu

SEQ ID NO: 3137895 - RNA, 19 nt, Artificial Sequence
  Description of Artificial Sequence: Synthetic oligonucleotide
cuccaggauccugcccugu

SEQ ID NO: 3137896 - RNA, 19 nt, Artificial Sequence
  Description of Artificial Sequence: Synthetic oligonucleotide
gcacaccuccauggccucu

SEQ ID NO: 3137897 - RNA, 19 nt, Artificial Sequence
  Description of Artificial Sequence: Synthetic oligonucleotide
cggcuccugccuccaggau

SEQ ID NO: 3137898 - RNA, 19 nt, Artificial Sequence
  Description of Artificial Sequence: Synthetic oligonucleotide
ugcacagcaugucugaagg

SEQ ID NO: 3137899 - RNA, 19 nt, Artificial Sequence
  Description of Artificial Sequence: Synthetic oligonucleotide
augaugucguuguagaagg

SEQ ID NO: 3137900 - RNA, 19 nt, Artificial Sequence
  Description of Artificial Sequence: Synthetic oligonucleotide
auaagugaggaugaugucg

SEQ ID NO: 3137901 - RNA, 19 nt, Artificial Sequence
  Description of Artificial Sequence: Synthetic oligonucleotide
aauaagugaggaugauguc

SEQ ID NO: 3137902 - RNA, 19 nt, Artificial Sequence
  Description of Artificial Sequence: Synthetic oligonucleotide
agugugaacagccccgucg

SEQ ID NO: 3137903 - RNA, 19 nt, Artificial Sequence
  Description of Artificial Sequence: Synthetic oligonucleotide
aguguagagguucacaggu

SEQ ID NO: 3137904 - RNA, 19 nt, Artificial Sequence
  Description of Artificial Sequence: Synthetic oligonucleotide
gaugaugucguuguagaag

SEQ ID NO: 3137905 - RNA, 19 nt, Artificial Sequence
  Description of Artificial Sequence: Synthetic oligonucleotide
augucugaaggagaggucc

SEQ ID NO: 3137906 - RNA, 19 nt, Artificial Sequence
  Description of Artificial Sequence: Synthetic oligonucleotide
uucuuggccaaagagaaug

SEQ ID NO: 3137907 - RNA, 19 nt, Artificial Sequence
  Description of Artificial Sequence: Synthetic oligonucleotide
gagagguccagucaugacc

SEQ ID NO: 3137908 - RNA, 19 nt, Artificial Sequence
  Description of Artificial Sequence: Synthetic oligonucleotide
uaagugaggaugaugucgu

SEQ ID NO: 3137909 - RNA, 19 nt, Artificial Sequence
  Description of Artificial Sequence: Synthetic oligonucleotide
agguucacagguuucuugg

SEQ ID NO: 3137910 - RNA, 19 nt, Artificial Sequence
  Description of Artificial Sequence: Synthetic oligonucleotide
auggccacauuccaucccc

SEQ ID NO: 3137911 - RNA, 19 nt, Artificial Sequence
  Description of Artificial Sequence: Synthetic oligonucleotide
agucaugaccucuuccuuc

SEQ ID NO: 3137912 - RNA, 19 nt, Artificial Sequence
  Description of Artificial Sequence: Synthetic oligonucleotide
ucguggacaguguagaggu

SEQ ID NO: 3137913 - RNA, 19 nt, Artificial Sequence
  Description of Artificial Sequence: Synthetic oligonucleotide
agguuucuuggccaaagag

SEQ ID NO: 3137914 - RNA, 19 nt, Artificial Sequence
  Description of Artificial Sequence: Synthetic oligonucleotide
cuggacagugugaacagcc

SEQ ID NO: 3137915 - RNA, 19 nt, Artificial Sequence
  Description of Artificial Sequence: Synthetic oligonucleotide
uuccagauggccacauucc

SEQ ID NO: 3137916 - RNA, 19 nt, Artificial Sequence
  Description of Artificial Sequence: Synthetic oligonucleotide
agauggccacauuccaucc

SEQ ID NO: 3137917 - RNA, 19 nt, Artificial Sequence
  Description of Artificial Sequence: Synthetic oligonucleotide
caauaagugaggaugaugu

SEQ ID NO: 3137918 - RNA, 19 nt, Artificial Sequence
  Description of Artificial Sequence: Synthetic oligonucleotide
ugaaggagagguccaguca

SEQ ID NO: 3137919 - RNA, 19 nt, Artificial Sequence
  Description of Artificial Sequence: Synthetic oligonucleotide
uucacagguuucuuggcca

SEQ ID NO: 3137920 - RNA, 19 nt, Artificial Sequence
  Description of Artificial Sequence: Synthetic oligonucleotide
uggccaaagagaaugucaa

SEQ ID NO: 3137921 - RNA, 19 nt, Artificial Sequence
  Description of Artificial Sequence: Synthetic oligonucleotide
gacagugugaacagccccg

SEQ ID NO: 3137922 - RNA, 19 nt, Artificial Sequence
  Description of Artificial Sequence: Synthetic oligonucleotide
uguagagguucacagguuu

SEQ ID NO: 3137923 - RNA, 19 nt, Artificial Sequence
  Description of Artificial Sequence: Synthetic oligonucleotide
aggaugaugucguuguaga

SEQ ID NO: 3137924 - RNA, 19 nt, Artificial Sequence
  Description of Artificial Sequence: Synthetic oligonucleotide
ugucguuguagaaggguga

SEQ ID NO: 3137925 - RNA, 19 nt, Artificial Sequence
  Description of Artificial Sequence: Synthetic oligonucleotide
accucuucggugcacagca

SEQ ID NO: 3137926 - RNA, 19 nt, Artificial Sequence
  Description of Artificial Sequence: Synthetic oligonucleotide
cuuccagauggccacauuc

SEQ ID NO: 3137927 - RNA, 19 nt, Artificial Sequence
  Description of Artificial Sequence: Synthetic oligonucleotide
ucuucggugcacagcaugu

SEQ ID NO: 3137928 - RNA, 19 nt, Artificial Sequence
  Description of Artificial Sequence: Synthetic oligonucleotide
guucacagguuucuuggcc

SEQ ID NO: 3137929 - RNA, 19 nt, Artificial Sequence
  Description of Artificial Sequence: Synthetic oligonucleotide
gaggaugaugucguuguag

SEQ ID NO: 3137930 - RNA, 19 nt, Artificial Sequence
  Description of Artificial Sequence: Synthetic oligonucleotide
ugaugucguuguagaaggg

SEQ ID NO: 3137931 - RNA, 19 nt, Artificial Sequence
  Description of Artificial Sequence: Synthetic oligonucleotide
guuucuuggccaaagagaa

SEQ ID NO: 3137932 - RNA, 19 nt, Artificial Sequence
  Description of Artificial Sequence: Synthetic oligonucleotide
uuguagaagggugaccucu

SEQ ID NO: 3137933 - RNA, 19 nt, Artificial Sequence
  Description of Artificial Sequence: Synthetic oligonucleotide
gucaugaccucuuccuucc

SEQ ID NO: 3137934 - RNA, 19 nt, Artificial Sequence
  Description of Artificial Sequence: Synthetic oligonucleotide
uccagucaugaccucuucc

SEQ ID NO: 3137935 - RNA, 19 nt, Artificial Sequence
  Description of Artificial Sequence: Synthetic oligonucleotide
gagaaugucaauguuuucu

SEQ ID NO: 3137936 - RNA, 19 nt, Artificial Sequence
  Description of Artificial Sequence: Synthetic oligonucleotide
gagguucacagguuucuug

SEQ ID NO: 3137937 - RNA, 19 nt, Artificial Sequence
  Description of Artificial Sequence: Synthetic oligonucleotide
uccagauggccacauucca

SEQ ID NO: 3137938 - RNA, 19 nt, Artificial Sequence
  Description of Artificial Sequence: Synthetic oligonucleotide
uggacagugugaacagccc

SEQ ID NO: 3137939 - RNA, 19 nt, Artificial Sequence
  Description of Artificial Sequence: Synthetic oligonucleotide
cacagcaugucugaaggag

SEQ ID NO: 3137940 - RNA, 19 nt, Artificial Sequence
  Description of Artificial Sequence: Synthetic oligonucleotide
caguguagagguucacagg

SEQ ID NO: 3137941 - RNA, 19 nt, Artificial Sequence
  Description of Artificial Sequence: Synthetic oligonucleotide
uucggugcacagcaugucu

SEQ ID NO: 3137942 - RNA, 19 nt, Artificial Sequence
  Description of Artificial Sequence: Synthetic oligonucleotide
cagcaugucugaaggagag

SEQ ID NO: 3137943 - RNA, 19 nt, Artificial Sequence
  Description of Artificial Sequence: Synthetic oligonucleotide
gaagggugaccucuggaca

SEQ ID NO: 3137944 - RNA, 19 nt, Artificial Sequence
  Description of Artificial Sequence: Synthetic oligonucleotide
uggacaguguagagguuca

SEQ ID NO: 3137945 - RNA, 19 nt, Artificial Sequence
  Description of Artificial Sequence: Synthetic oligonucleotide
ucggugcacagcaugucug

SEQ ID NO: 3137946 - RNA, 19 nt, Artificial Sequence
  Description of Artificial Sequence: Synthetic oligonucleotide
cagauggccacauuccauc

SEQ ID NO: 3137947 - RNA, 19 nt, Artificial Sequence
  Description of Artificial Sequence: Synthetic oligonucleotide
ugucugaaggagaggucca

SEQ ID NO: 3137948 - RNA, 19 nt, Artificial Sequence
  Description of Artificial Sequence: Synthetic oligonucleotide
ucuuggccaaagagaaugu

SEQ ID NO: 3137949 - RNA, 19 nt, Artificial Sequence
  Description of Artificial Sequence: Synthetic oligonucleotide
ugaacagccccgucgugga

SEQ ID NO: 3137950 - RNA, 19 nt, Artificial Sequence
  Description of Artificial Sequence: Synthetic oligonucleotide
gucguggacaguguagagg

SEQ ID NO: 3137951 - RNA, 19 nt, Artificial Sequence
  Description of Artificial Sequence: Synthetic oligonucleotide
cugaaggagagguccaguc

SEQ ID NO: 3137952 - RNA, 19 nt, Artificial Sequence
  Description of Artificial Sequence: Synthetic oligonucleotide
gauggccacauuccauccc

SEQ ID NO: 3137953 - RNA, 19 nt, Artificial Sequence
  Description of Artificial Sequence: Synthetic oligonucleotide
agugaggaugaugucguug

SEQ ID NO: 3137954 - RNA, 19 nt, Artificial Sequence
  Description of Artificial Sequence: Synthetic oligonucleotide
agagguccagucaugaccu

SEQ ID NO: 3137955 - RNA, 19 nt, Artificial Sequence
  Description of Artificial Sequence: Synthetic oligonucleotide
gccaaagagaaugucaaug

SEQ ID NO: 3137956 - RNA, 19 nt, Artificial Sequence
  Description of Artificial Sequence: Synthetic oligonucleotide
uagagguucacagguuucu

SEQ ID NO: 3137957 - RNA, 19 nt, Artificial Sequence
  Description of Artificial Sequence: Synthetic oligonucleotide
ugaccucuggacaguguga

SEQ ID NO: 3137958 - RNA, 19 nt, Artificial Sequence
  Description of Artificial Sequence: Synthetic oligonucleotide
augaccucuuccuuccaga

SEQ ID NO: 3137959 - RNA, 19 nt, Artificial Sequence
  Description of Artificial Sequence: Synthetic oligonucleotide
acagguuucuuggccaaag

SEQ ID NO: 3137960 - RNA, 19 nt, Artificial Sequence
  Description of Artificial Sequence: Synthetic oligonucleotide
augucguuguagaagggug

SEQ ID NO: 3137961 - RNA, 19 nt, Artificial Sequence
  Description of Artificial Sequence: Synthetic oligonucleotide
uguaccucuucggugcaca

SEQ ID NO: 3137962 - RNA, 19 nt, Artificial Sequence
  Description of Artificial Sequence: Synthetic oligonucleotide
ugccguguaccucuucggu

SEQ ID NO: 3137963 - RNA, 19 nt, Artificial Sequence
  Description of Artificial Sequence: Synthetic oligonucleotide
gugcacagcaugucugaag

SEQ ID NO: 3137964 - RNA, 19 nt, Artificial Sequence
  Description of Artificial Sequence: Synthetic oligonucleotide
ugcccugccguguaccucu

SEQ ID NO: 3137965 - RNA, 19 nt, Artificial Sequence
  Description of Artificial Sequence: Synthetic oligonucleotide
gaaggagagguccagucau

SEQ ID NO: 3137966 - RNA, 19 nt, Artificial Sequence
  Description of Artificial Sequence: Synthetic oligonucleotide
cucuucggugcacagcaug

SEQ ID NO: 3137967 - RNA, 19 nt, Artificial Sequence
  Description of Artificial Sequence: Synthetic oligonucleotide
aacagccccgucguggaca

SEQ ID NO: 3137968 - RNA, 19 nt, Artificial Sequence
  Description of Artificial Sequence: Synthetic oligonucleotide
gaccucuuccuuccagaug

SEQ ID NO: 3137969 - RNA, 19 nt, Artificial Sequence
  Description of Artificial Sequence: Synthetic oligonucleotide
gugaggaugaugucguugu

SEQ ID NO: 3137970 - RNA, 19 nt, Artificial Sequence
  Description of Artificial Sequence: Synthetic oligonucleotide
uuucuuggccaaagagaau

SEQ ID NO: 3137971 - RNA, 19 nt, Artificial Sequence
  Description of Artificial Sequence: Synthetic oligonucleotide
caugucugaaggagagguc

SEQ ID NO: 3137972 - RNA, 19 nt, Artificial Sequence
  Description of Artificial Sequence: Synthetic oligonucleotide
ugugaacagccccgucgug

SEQ ID NO: 3137973 - RNA, 19 nt, Artificial Sequence
  Description of Artificial Sequence: Synthetic oligonucleotide
accucuggacagugugaac

SEQ ID NO: 3137974 - RNA, 19 nt, Artificial Sequence
  Description of Artificial Sequence: Synthetic oligonucleotide
ugaccucuuccuuccagau

SEQ ID NO: 3137975 - RNA, 19 nt, Artificial Sequence
  Description of Artificial Sequence: Synthetic oligonucleotide
ucuggacagugugaacagc

SEQ ID NO: 3137976 - RNA, 19 nt, Artificial Sequence
  Description of Artificial Sequence: Synthetic oligonucleotide
ggacagugugaacagcccc

SEQ ID NO: 3137977 - RNA, 19 nt, Artificial Sequence
  Description of Artificial Sequence: Synthetic oligonucleotide
cugccguguaccucuucgg

SEQ ID NO: 3137978 - RNA, 19 nt, Artificial Sequence
  Description of Artificial Sequence: Synthetic oligonucleotide
ucacagguuucuuggccaa

SEQ ID NO: 3137979 - RNA, 19 nt, Artificial Sequence
  Description of Artificial Sequence: Synthetic oligonucleotide
ccguguaccucuucggugc

SEQ ID NO: 3137980 - RNA, 19 nt, Artificial Sequence
  Description of Artificial Sequence: Synthetic oligonucleotide
gaugucguuguagaagggu

SEQ ID NO: 3137981 - RNA, 19 nt, Artificial Sequence
  Description of Artificial Sequence: Synthetic oligonucleotide
acagcaugucugaaggaga

SEQ ID NO: 3137982 - RNA, 19 nt, Artificial Sequence
  Description of Artificial Sequence: Synthetic oligonucleotide
aaggagagguccagucaug

SEQ ID NO: 3137983 - RNA, 19 nt, Artificial Sequence
  Description of Artificial Sequence: Synthetic oligonucleotide
ucguuguagaagggugacc

SEQ ID NO: 3137984 - RNA, 19 nt, Artificial Sequence
  Description of Artificial Sequence: Synthetic oligonucleotide
acagccccgucguggacag

SEQ ID NO: 3137985 - RNA, 19 nt, Artificial Sequence
  Description of Artificial Sequence: Synthetic oligonucleotide
ccugccguguaccucuucg

SEQ ID NO: 3137986 - RNA, 19 nt, Artificial Sequence
  Description of Artificial Sequence: Synthetic oligonucleotide
cuuggccaaagagaauguc

SEQ ID NO: 3137987 - RNA, 19 nt, Artificial Sequence
  Description of Artificial Sequence: Synthetic oligonucleotide
aggagagguccagucauga

SEQ ID NO: 3137988 - RNA, 19 nt, Artificial Sequence
  Description of Artificial Sequence: Synthetic oligonucleotide
ugaggaugaugucguugua

SEQ ID NO: 3137989 - RNA, 19 nt, Artificial Sequence
  Description of Artificial Sequence: Synthetic oligonucleotide
guuguagaagggugaccuc

SEQ ID NO: 3137990 - RNA, 19 nt, Artificial Sequence
  Description of Artificial Sequence: Synthetic oligonucleotide
ucaugaccucuuccuucca

SEQ ID NO: 3137991 - RNA, 19 nt, Artificial Sequence
  Description of Artificial Sequence: Synthetic oligonucleotide
gucguuguagaagggugac

SEQ ID NO: 3137992 - RNA, 19 nt, Artificial Sequence
  Description of Artificial Sequence: Synthetic oligonucleotide
guaccucuucggugcacag

SEQ ID NO: 3137993 - RNA, 19 nt, Artificial Sequence
  Description of Artificial Sequence: Synthetic oligonucleotide
agugcccugccguguaccu

SEQ ID NO: 3137994 - RNA, 19 nt, Artificial Sequence
  Description of Artificial Sequence: Synthetic oligonucleotide
uaccucuucggugcacagc

SEQ ID NO: 3137995 - RNA, 19 nt, Artificial Sequence
  Description of Artificial Sequence: Synthetic oligonucleotide
agccccgucguggacagug

SEQ ID NO: 3137996 - RNA, 19 nt, Artificial Sequence
  Description of Artificial Sequence: Synthetic oligonucleotide
gucugaaggagagguccag

SEQ ID NO: 3137997 - RNA, 19 nt, Artificial Sequence
  Description of Artificial Sequence: Synthetic oligonucleotide
guagagguucacagguuuc

SEQ ID NO: 3137998 - RNA, 19 nt, Artificial Sequence
  Description of Artificial Sequence: Synthetic oligonucleotide
ccaauaagugaggaugaug

SEQ ID NO: 3137999 - RNA, 19 nt, Artificial Sequence
  Description of Artificial Sequence: Synthetic oligonucleotide
aagugaggaugaugucguu

SEQ ID NO: 3138000 - RNA, 19 nt, Artificial Sequence
  Description of Artificial Sequence: Synthetic oligonucleotide
gaccucuggacagugugaa

SEQ ID NO: 3138001 - RNA, 19 nt, Artificial Sequence
  Description of Artificial Sequence: Synthetic oligonucleotide
agguccagucaugaccucu

SEQ ID NO: 3138002 - RNA, 19 nt, Artificial Sequence
  Description of Artificial Sequence: Synthetic oligonucleotide
acagugugaacagccccgu

SEQ ID NO: 3138003 - RNA, 19 nt, Artificial Sequence
  Description of Artificial Sequence: Synthetic oligonucleotide
gccguguaccucuucggug

SEQ ID NO: 3138004 - RNA, 19 nt, Artificial Sequence
  Description of Artificial Sequence: Synthetic oligonucleotide
gugugaacagccccgucgu

SEQ ID NO: 3138005 - RNA, 19 nt, Artificial Sequence
  Description of Artificial Sequence: Synthetic oligonucleotide
caaagagaaugucaauguu

SEQ ID NO: 3138006 - RNA, 19 nt, Artificial Sequence
  Description of Artificial Sequence: Synthetic oligonucleotide
ggagagguccagucaugac

SEQ ID NO: 3138007 - RNA, 19 nt, Artificial Sequence
  Description of Artificial Sequence: Synthetic oligonucleotide
cagguuucuuggccaaaga

SEQ ID NO: 3138008 - RNA, 19 nt, Artificial Sequence
  Description of Artificial Sequence: Synthetic oligonucleotide
ccucuggacagugugaaca

SEQ ID NO: 3138009 - RNA, 19 nt, Artificial Sequence
  Description of Artificial Sequence: Synthetic oligonucleotide
cuucggugcacagcauguc

SEQ ID NO: 3138010 - RNA, 19 nt, Artificial Sequence
  Description of Artificial Sequence: Synthetic oligonucleotide
gcaugucugaaggagaggu

SEQ ID NO: 3138011 - RNA, 19 nt, Artificial Sequence
  Description of Artificial Sequence: Synthetic oligonucleotide
agagguucacagguuucuu

SEQ ID NO: 3138012 - RNA, 19 nt, Artificial Sequence
  Description of Artificial Sequence: Synthetic oligonucleotide
gaacagccccgucguggac

SEQ ID NO: 3138013 - RNA, 19 nt, Artificial Sequence
  Description of Artificial Sequence: Synthetic oligonucleotide
cagugcccugccguguacc

SEQ ID NO: 3138014 - RNA, 19 nt, Artificial Sequence
  Description of Artificial Sequence: Synthetic oligonucleotide
uuccuuccagauggccaca

SEQ ID NO: 3138015 - RNA, 19 nt, Artificial Sequence
  Description of Artificial Sequence: Synthetic oligonucleotide
cccgucguggacaguguag

SEQ ID NO: 3138016 - RNA, 19 nt, Artificial Sequence
  Description of Artificial Sequence: Synthetic oligonucleotide
guccagucaugaccucuuc

SEQ ID NO: 3138017 - RNA, 19 nt, Artificial Sequence
  Description of Artificial Sequence: Synthetic oligonucleotide
ccccaauaagugaggauga

SEQ ID NO: 3138018 - RNA, 19 nt, Artificial Sequence
  Description of Artificial Sequence: Synthetic oligonucleotide
ccagucaugaccucuuccu

SEQ ID NO: 3138019 - RNA, 19 nt, Artificial Sequence
  Description of Artificial Sequence: Synthetic oligonucleotide
gagguccagucaugaccuc

SEQ ID NO: 3138020 - RNA, 19 nt, Artificial Sequence
  Description of Artificial Sequence: Synthetic oligonucleotide
cagugugaacagccccguc

SEQ ID NO: 3138021 - RNA, 19 nt, Artificial Sequence
  Description of Artificial Sequence: Synthetic oligonucleotide
gcacagcaugucugaagga

SEQ ID NO: 3138022 - RNA, 19 nt, Artificial Sequence
  Description of Artificial Sequence: Synthetic oligonucleotide
cguuguagaagggugaccu

SEQ ID NO: 3138023 - RNA, 19 nt, Artificial Sequence
  Description of Artificial Sequence: Synthetic oligonucleotide
guguaccucuucggugcac

SEQ ID NO: 3138024 - RNA, 19 nt, Artificial Sequence
  Description of Artificial Sequence: Synthetic oligonucleotide
cgucguggacaguguagag

SEQ ID NO: 3138025 - RNA, 19 nt, Artificial Sequence
  Description of Artificial Sequence: Synthetic oligonucleotide
gggugaccucuggacagug

SEQ ID NO: 3138026 - RNA, 19 nt, Artificial Sequence
  Description of Artificial Sequence: Synthetic oligonucleotide
cagucaugaccucuuccuu

SEQ ID NO: 3138027 - RNA, 19 nt, Artificial Sequence
  Description of Artificial Sequence: Synthetic oligonucleotide
ggugcacagcaugucugaa

SEQ ID NO: 3138028 - RNA, 19 nt, Artificial Sequence
  Description of Artificial Sequence: Synthetic oligonucleotide
ccgucguggacaguguaga

SEQ ID NO: 3138029 - RNA, 19 nt, Artificial Sequence
  Description of Artificial Sequence: Synthetic oligonucleotide
cacagguuucuuggccaaa

SEQ ID NO: 3138030 - RNA, 19 nt, Artificial Sequence
  Description of Artificial Sequence: Synthetic oligonucleotide
gugcccugccguguaccuc

SEQ ID NO: 3138031 - RNA, 19 nt, Artificial Sequence
  Description of Artificial Sequence: Synthetic oligonucleotide
ccagauggccacauuccau

SEQ ID NO: 3138032 - RNA, 19 nt, Artificial Sequence
  Description of Artificial Sequence: Synthetic oligonucleotide
ccagugcccugccguguac

SEQ ID NO: 3138033 - RNA, 19 nt, Artificial Sequence
  Description of Artificial Sequence: Synthetic oligonucleotide
cggugcacagcaugucuga

SEQ ID NO: 3138034 - RNA, 19 nt, Artificial Sequence
  Description of Artificial Sequence: Synthetic oligonucleotide
gguccagucaugaccucuu

SEQ ID NO: 3138035 - RNA, 19 nt, Artificial Sequence
  Description of Artificial Sequence: Synthetic oligonucleotide
cguguaccucuucggugca

SEQ ID NO: 3138036 - RNA, 19 nt, Artificial Sequence
  Description of Artificial Sequence: Synthetic oligonucleotide
cccaauaagugaggaugau

SEQ ID NO: 3138037 - RNA, 19 nt, Artificial Sequence
  Description of Artificial Sequence: Synthetic oligonucleotide
cccugccguguaccucuuc

SEQ ID NO: 3138038 - RNA, 19 nt, Artificial Sequence
  Description of Artificial Sequence: Synthetic oligonucleotide
ccccgucguggacagugua

SEQ ID NO: 3138039 - RNA, 19 nt, Artificial Sequence
  Description of Artificial Sequence: Synthetic oligonucleotide
ccuuccagauggccacauu

SEQ ID NO: 3138040 - RNA, 19 nt, Artificial Sequence
  Description of Artificial Sequence: Synthetic oligonucleotide
gccccgucguggacagugu

SEQ ID NO: 3138041 - RNA, 19 nt, Artificial Sequence
  Description of Artificial Sequence: Synthetic oligonucleotide
cguggacaguguagagguu

SEQ ID NO: 3138042 - RNA, 19 nt, Artificial Sequence
  Description of Artificial Sequence: Synthetic oligonucleotide
cagccccgucguggacagu

SEQ ID NO: 3138043 - RNA, 19 nt, Artificial Sequence
  Description of Artificial Sequence: Synthetic oligonucleotide
gcccugccguguaccucuu

SEQ ID NO: 3138044 - RNA, 19 nt, Artificial Sequence
  Description of Artificial Sequence: Synthetic oligonucleotide
aaagacuacacagagaaac

SEQ ID NO: 3138045 - RNA, 19 nt, Artificial Sequence
  Description of Artificial Sequence: Synthetic oligonucleotide
aaccaagaaagaaagaaag

SEQ ID NO: 3138046 - RNA, 19 nt, Artificial Sequence
  Description of Artificial Sequence: Synthetic oligonucleotide
aagacuacacagagaaacc

SEQ ID NO: 3138047 - RNA, 19 nt, Artificial Sequence
  Description of Artificial Sequence: Synthetic oligonucleotide
aaaauguguagugugugug

SEQ ID NO: 3138048 - RNA, 19 nt, Artificial Sequence
  Description of Artificial Sequence: Synthetic oligonucleotide
aaauguguagugugugugu

SEQ ID NO: 3138049 - RNA, 19 nt, Artificial Sequence
  Description of Artificial Sequence: Synthetic oligonucleotide
agccugguucuccagagcg

SEQ ID NO: 3138050 - RNA, 19 nt, Artificial Sequence
  Description of Artificial Sequence: Synthetic oligonucleotide
aauguguagugugugugug

SEQ ID NO: 3138051 - RNA, 19 nt, Artificial Sequence
  Description of Artificial Sequence: Synthetic oligonucleotide
uguagugugugugugugug

SEQ ID NO: 3138052 - RNA, 19 nt, Artificial Sequence
  Description of Artificial Sequence: Synthetic oligonucleotide
aaaccaagaaagaaagaaa

SEQ ID NO: 3138053 - RNA, 19 nt, Artificial Sequence
  Description of Artificial Sequence: Synthetic oligonucleotide
ggcuccaaagacuacacag

SEQ ID NO: 3138054 - RNA, 19 nt, Artificial Sequence
  Description of Artificial Sequence: Synthetic oligonucleotide
uguguagugugugugugug

SEQ ID NO: 3138055 - RNA, 19 nt, Artificial Sequence
  Description of Artificial Sequence: Synthetic oligonucleotide
uccaaagacuacacagaga

SEQ ID NO: 3138056 - RNA, 19 nt, Artificial Sequence
  Description of Artificial Sequence: Synthetic oligonucleotide
ugguucuccagagcgagug

SEQ ID NO: 3138057 - RNA, 19 nt, Artificial Sequence
  Description of Artificial Sequence: Synthetic oligonucleotide
auaggcuccaaagacuaca

SEQ ID NO: 3138058 - RNA, 19 nt, Artificial Sequence
  Description of Artificial Sequence: Synthetic oligonucleotide
ccaaagacuacacagagaa

SEQ ID NO: 3138059 - RNA, 19 nt, Artificial Sequence
  Description of Artificial Sequence: Synthetic oligonucleotide
uaggcuccaaagacuacac

SEQ ID NO: 3138060 - RNA, 19 nt, Artificial Sequence
  Description of Artificial Sequence: Synthetic oligonucleotide
uagugugugugugugugug

SEQ ID NO: 3138061 - RNA, 19 nt, Artificial Sequence
  Description of Artificial Sequence: Synthetic oligonucleotide
auguguagugugugugugu

SEQ ID NO: 3138062 - RNA, 19 nt, Artificial Sequence
  Description of Artificial Sequence: Synthetic oligonucleotide
ugugugugugugugugugu

SEQ ID NO: 3138063 - RNA, 19 nt, Artificial Sequence
  Description of Artificial Sequence: Synthetic oligonucleotide
gugugugugugugugugug

SEQ ID NO: 3138064 - RNA, 19 nt, Artificial Sequence
  Description of Artificial Sequence: Synthetic oligonucleotide
agugugugugugugugugu

SEQ ID NO: 3138065 - RNA, 19 nt, Artificial Sequence
  Description of Artificial Sequence: Synthetic oligonucleotide
gauaggcuccaaagacuac

SEQ ID NO: 3138066 - RNA, 19 nt, Artificial Sequence
  Description of Artificial Sequence: Synthetic oligonucleotide
aggcuccaaagacuacaca

SEQ ID NO: 3138067 - RNA, 19 nt, Artificial Sequence
  Description of Artificial Sequence: Synthetic oligonucleotide
caaagacuacacagagaaa

SEQ ID NO: 3138068 - RNA, 19 nt, Artificial Sequence
  Description of Artificial Sequence: Synthetic oligonucleotide
gcuccaaagacuacacaga

SEQ ID NO: 3138069 - RNA, 19 nt, Artificial Sequence
  Description of Artificial Sequence: Synthetic oligonucleotide
ccugguucuccagagcgag

SEQ ID NO: 3138070 - RNA, 19 nt, Artificial Sequence
  Description of Artificial Sequence: Synthetic oligonucleotide
cagccugguucuccagagc

SEQ ID NO: 3138071 - RNA, 19 nt, Artificial Sequence
  Description of Artificial Sequence: Synthetic oligonucleotide
cucuugggaggcagaggca

SEQ ID NO: 3138072 - RNA, 19 nt, Artificial Sequence
  Description of Artificial Sequence: Synthetic oligonucleotide
guagugugugugugugugu

SEQ ID NO: 3138073 - RNA, 19 nt, Artificial Sequence
  Description of Artificial Sequence: Synthetic oligonucleotide
guguagugugugugugugu

SEQ ID NO: 3138074 - RNA, 19 nt, Artificial Sequence
  Description of Artificial Sequence: Synthetic oligonucleotide
cugguucuccagagcgagu

SEQ ID NO: 3138075 - RNA, 19 nt, Artificial Sequence
  Description of Artificial Sequence: Synthetic oligonucleotide
gccugguucuccagagcga

SEQ ID NO: 3138076 - RNA, 19 nt, Artificial Sequence
  Description of Artificial Sequence: Synthetic oligonucleotide
ugaagaaauaaagaguuca

SEQ ID NO: 3138077 - RNA, 19 nt, Artificial Sequence
  Description of Artificial Sequence: Synthetic oligonucleotide
gcagugaagaaauaaagag

SEQ ID NO: 3138078 - RNA, 19 nt, Artificial Sequence
  Description of Artificial Sequence: Synthetic oligonucleotide
gaagaaauaaagaguucag

SEQ ID NO: 3138079 - RNA, 19 nt, Artificial Sequence
  Description of Artificial Sequence: Synthetic oligonucleotide
uccgcuuucccauugaaaa

SEQ ID NO: 3138080 - RNA, 19 nt, Artificial Sequence
  Description of Artificial Sequence: Synthetic oligonucleotide
agugaagaaauaaagaguu

SEQ ID NO: 3138081 - RNA, 19 nt, Artificial Sequence
  Description of Artificial Sequence: Synthetic oligonucleotide
aauuguucucccaaggcaa

SEQ ID NO: 3138082 - RNA, 19 nt, Artificial Sequence
  Description of Artificial Sequence: Synthetic oligonucleotide
aaggcaagcuccgcuuucc

SEQ ID NO: 3138083 - RNA, 19 nt, Artificial Sequence
  Description of Artificial Sequence: Synthetic oligonucleotide
aagagcagugaagaaauaa

SEQ ID NO: 3138084 - RNA, 19 nt, Artificial Sequence
  Description of Artificial Sequence: Synthetic oligonucleotide
uucucccaaggcaagcucc

SEQ ID NO: 3138085 - RNA, 19 nt, Artificial Sequence
  Description of Artificial Sequence: Synthetic oligonucleotide
ucucccaaggcaagcuccg

SEQ ID NO: 3138086 - RNA, 19 nt, Artificial Sequence
  Description of Artificial Sequence: Synthetic oligonucleotide
agcagugaagaaauaaaga

SEQ ID NO: 3138087 - RNA, 19 nt, Artificial Sequence
  Description of Artificial Sequence: Synthetic oligonucleotide
caauuguucucccaaggca

SEQ ID NO: 3138088 - RNA, 19 nt, Artificial Sequence
  Description of Artificial Sequence: Synthetic oligonucleotide
uggccaauuguucucccaa

SEQ ID NO: 3138089 - RNA, 19 nt, Artificial Sequence
  Description of Artificial Sequence: Synthetic oligonucleotide
agagcagugaagaaauaaa

SEQ ID NO: 3138090 - RNA, 19 nt, Artificial Sequence
  Description of Artificial Sequence: Synthetic oligonucleotide
gccaauuguucucccaagg

SEQ ID NO: 3138091 - RNA, 19 nt, Artificial Sequence
  Description of Artificial Sequence: Synthetic oligonucleotide
uguucucccaaggcaagcu

SEQ ID NO: 3138092 - RNA, 19 nt, Artificial Sequence
  Description of Artificial Sequence: Synthetic oligonucleotide
aggcaagcuccgcuuuccc

SEQ ID NO: 3138093 - RNA, 19 nt, Artificial Sequence
  Description of Artificial Sequence: Synthetic oligonucleotide
ucccaaggcaagcuccgcu

SEQ ID NO: 3138094 - RNA, 19 nt, Artificial Sequence
  Description of Artificial Sequence: Synthetic oligonucleotide
ccaauuguucucccaaggc

SEQ ID NO: 3138095 - RNA, 19 nt, Artificial Sequence
  Description of Artificial Sequence: Synthetic oligonucleotide
auuguucucccaaggcaag

SEQ ID NO: 3138096 - RNA, 19 nt, Artificial Sequence
  Description of Artificial Sequence: Synthetic oligonucleotide
aagcuccgcuuucccauug

SEQ ID NO: 3138097 - RNA, 19 nt, Artificial Sequence
  Description of Artificial Sequence: Synthetic oligonucleotide
uuguucucccaaggcaagc

SEQ ID NO: 3138098 - RNA, 19 nt, Artificial Sequence
  Description of Artificial Sequence: Synthetic oligonucleotide
guucucccaaggcaagcuc

SEQ ID NO: 3138099 - RNA, 19 nt, Artificial Sequence
  Description of Artificial Sequence: Synthetic oligonucleotide
ggccaauuguucucccaag

SEQ ID NO: 3138100 - RNA, 19 nt, Artificial Sequence
  Description of Artificial Sequence: Synthetic oligonucleotide
caaggcaagcuccgcuuuc

SEQ ID NO: 3138101 - RNA, 19 nt, Artificial Sequence
  Description of Artificial Sequence: Synthetic oligonucleotide
agcuccgcuuucccauuga

SEQ ID NO: 3138102 - RNA, 19 nt, Artificial Sequence
  Description of Artificial Sequence: Synthetic oligonucleotide
cuccgcuuucccauugaaa

SEQ ID NO: 3138103 - RNA, 19 nt, Artificial Sequence
  Description of Artificial Sequence: Synthetic oligonucleotide
ggcaagcuccgcuuuccca

SEQ ID NO: 3138104 - RNA, 19 nt, Artificial Sequence
  Description of Artificial Sequence: Synthetic oligonucleotide
cucccaaggcaagcuccgc

SEQ ID NO: 3138105 - RNA, 19 nt, Artificial Sequence
  Description of Artificial Sequence: Synthetic oligonucleotide
gcaagcuccgcuuucccau

SEQ ID NO: 3138106 - RNA, 19 nt, Artificial Sequence
  Description of Artificial Sequence: Synthetic oligonucleotide
gcuccgcuuucccauugaa

SEQ ID NO: 3138107 - RNA, 19 nt, Artificial Sequence
  Description of Artificial Sequence: Synthetic oligonucleotide
caagcuccgcuuucccauu

SEQ ID NO: 3138108 - RNA, 19 nt, Artificial Sequence
  Description of Artificial Sequence: Synthetic oligonucleotide
cccaaggcaagcuccgcuu

SEQ ID NO: 3138109 - RNA, 19 nt, Artificial Sequence
  Description of Artificial Sequence: Synthetic oligonucleotide
ccaaggcaagcuccgcuuu

SEQ ID NO: 3138110 - RNA, 19 nt, Artificial Sequence
  Description of Artificial Sequence: Synthetic oligonucleotide
uuaagggacaguaagcugg

SEQ ID NO: 3138111 - RNA, 19 nt, Artificial Sequence
  Description of Artificial Sequence: Synthetic oligonucleotide
ucugaccugaacuuaaggg

SEQ ID NO: 3138112 - RNA, 19 nt, Artificial Sequence
  Description of Artificial Sequence: Synthetic oligonucleotide
uauacgguaaguacagagg

SEQ ID NO: 3138113 - RNA, 19 nt, Artificial Sequence
  Description of Artificial Sequence: Synthetic oligonucleotide
auacgguaaguacagaggg

SEQ ID NO: 3138114 - RNA, 19 nt, Artificial Sequence
  Description of Artificial Sequence: Synthetic oligonucleotide
gaacuuaagggacaguaag

SEQ ID NO: 3138115 - RNA, 19 nt, Artificial Sequence
  Description of Artificial Sequence: Synthetic oligonucleotide
ugcguuucuucacaggacg

SEQ ID NO: 3138116 - RNA, 19 nt, Artificial Sequence
  Description of Artificial Sequence: Synthetic oligonucleotide
aacuuaagggacaguaagc

SEQ ID NO: 3138117 - RNA, 19 nt, Artificial Sequence
  Description of Artificial Sequence: Synthetic oligonucleotide
uuagcagacggcgacaggg

SEQ ID NO: 3138118 - RNA, 19 nt, Artificial Sequence
  Description of Artificial Sequence: Synthetic oligonucleotide
guauacgguaaguacagag

SEQ ID NO: 3138119 - RNA, 19 nt, Artificial Sequence
  Description of Artificial Sequence: Synthetic oligonucleotide
uggguauacgguaaguaca

SEQ ID NO: 3138120 - RNA, 19 nt, Artificial Sequence
  Description of Artificial Sequence: Synthetic oligonucleotide
cucgaagcggccuucauag

SEQ ID NO: 3138121 - RNA, 19 nt, Artificial Sequence
  Description of Artificial Sequence: Synthetic oligonucleotide
aggagcacuggguauacgg

SEQ ID NO: 3138122 - RNA, 19 nt, Artificial Sequence
  Description of Artificial Sequence: Synthetic oligonucleotide
ugaccugaacuuaagggac

SEQ ID NO: 3138123 - RNA, 19 nt, Artificial Sequence
  Description of Artificial Sequence: Synthetic oligonucleotide
uuuucuggaggugacagcu

SEQ ID NO: 3138124 - RNA, 19 nt, Artificial Sequence
  Description of Artificial Sequence: Synthetic oligonucleotide
agggacaguaagcuggagg

SEQ ID NO: 3138125 - RNA, 19 nt, Artificial Sequence
  Description of Artificial Sequence: Synthetic oligonucleotide
uacgguaaguacagagggg

SEQ ID NO: 3138126 - RNA, 19 nt, Artificial Sequence
  Description of Artificial Sequence: Synthetic oligonucleotide
uggaggagcugucggagcg

SEQ ID NO: 3138127 - RNA, 19 nt, Artificial Sequence
  Description of Artificial Sequence: Synthetic oligonucleotide
uucuggaggugacagcucc

SEQ ID NO: 3138128 - RNA, 19 nt, Artificial Sequence
  Description of Artificial Sequence: Synthetic oligonucleotide
aagcggccuucauaggagc

SEQ ID NO: 3138129 - RNA, 19 nt, Artificial Sequence
  Description of Artificial Sequence: Synthetic oligonucleotide
uuucuucacaggacguucc

SEQ ID NO: 3138130 - RNA, 19 nt, Artificial Sequence
  Description of Artificial Sequence: Synthetic oligonucleotide
acuuaagggacaguaagcu

SEQ ID NO: 3138131 - RNA, 19 nt, Artificial Sequence
  Description of Artificial Sequence: Synthetic oligonucleotide
ugaacuuaagggacaguaa

SEQ ID NO: 3138132 - RNA, 19 nt, Artificial Sequence
  Description of Artificial Sequence: Synthetic oligonucleotide
uucauaggagcacugggua

SEQ ID NO: 3138133 - RNA, 19 nt, Artificial Sequence
  Description of Artificial Sequence: Synthetic oligonucleotide
cuggguauacgguaaguac

SEQ ID NO: 3138134 - RNA, 19 nt, Artificial Sequence
  Description of Artificial Sequence: Synthetic oligonucleotide
gacaguaagcuggaggagc

SEQ ID NO: 3138135 - RNA, 19 nt, Artificial Sequence
  Description of Artificial Sequence: Synthetic oligonucleotide
cugaccugaacuuaaggga

SEQ ID NO: 3138136 - RNA, 19 nt, Artificial Sequence
  Description of Artificial Sequence: Synthetic oligonucleotide
guggacuuagcagacggcg

SEQ ID NO: 3138137 - RNA, 19 nt, Artificial Sequence
  Description of Artificial Sequence: Synthetic oligonucleotide
gagggguggacuuagcaga

SEQ ID NO: 3138138 - RNA, 19 nt, Artificial Sequence
  Description of Artificial Sequence: Synthetic oligonucleotide
gaggugacagcuccguacc

SEQ ID NO: 3138139 - RNA, 19 nt, Artificial Sequence
  Description of Artificial Sequence: Synthetic oligonucleotide
cuugcguuucuucacagga

SEQ ID NO: 3138140 - RNA, 19 nt, Artificial Sequence
  Description of Artificial Sequence: Synthetic oligonucleotide
gacagcuccguaccuugcg

SEQ ID NO: 3138141 - RNA, 19 nt, Artificial Sequence
  Description of Artificial Sequence: Synthetic oligonucleotide
gagcgaucguccucgaagc

SEQ ID NO: 3138142 - RNA, 19 nt, Artificial Sequence
  Description of Artificial Sequence: Synthetic oligonucleotide
gguaaguacagaggggugg

SEQ ID NO: 3138143 - RNA, 19 nt, Artificial Sequence
  Description of Artificial Sequence: Synthetic oligonucleotide
ggagcgaucguccucgaag

SEQ ID NO: 3138144 - RNA, 19 nt, Artificial Sequence
  Description of Artificial Sequence: Synthetic oligonucleotide
ucuggaggugacagcuccg

SEQ ID NO: 3138145 - RNA, 19 nt, Artificial Sequence
  Description of Artificial Sequence: Synthetic oligonucleotide
cucugaccugaacuuaagg

SEQ ID NO: 3138146 - RNA, 19 nt, Artificial Sequence
  Description of Artificial Sequence: Synthetic oligonucleotide
aaguacagagggguggacu

SEQ ID NO: 3138147 - RNA, 19 nt, Artificial Sequence
  Description of Artificial Sequence: Synthetic oligonucleotide
acgguaaguacagaggggu

SEQ ID NO: 3138148 - RNA, 19 nt, Artificial Sequence
  Description of Artificial Sequence: Synthetic oligonucleotide
uggacuuagcagacggcga

SEQ ID NO: 3138149 - RNA, 19 nt, Artificial Sequence
  Description of Artificial Sequence: Synthetic oligonucleotide
gaagcggccuucauaggag

SEQ ID NO: 3138150 - RNA, 19 nt, Artificial Sequence
  Description of Artificial Sequence: Synthetic oligonucleotide
uaccuugcguuucuucaca

SEQ ID NO: 3138151 - RNA, 19 nt, Artificial Sequence
  Description of Artificial Sequence: Synthetic oligonucleotide
aguacagagggguggacuu

SEQ ID NO: 3138152 - RNA, 19 nt, Artificial Sequence
  Description of Artificial Sequence: Synthetic oligonucleotide
gggacaguaagcuggagga

SEQ ID NO: 3138153 - RNA, 19 nt, Artificial Sequence
  Description of Artificial Sequence: Synthetic oligonucleotide
uugcguuucuucacaggac

SEQ ID NO: 3138154 - RNA, 19 nt, Artificial Sequence
  Description of Artificial Sequence: Synthetic oligonucleotide
uccucugaccugaacuuaa

SEQ ID NO: 3138155 - RNA, 19 nt, Artificial Sequence
  Description of Artificial Sequence: Synthetic oligonucleotide
uacagagggguggacuuag

SEQ ID NO: 3138156 - RNA, 19 nt, Artificial Sequence
  Description of Artificial Sequence: Synthetic oligonucleotide
ggguggacuuagcagacgg

SEQ ID NO: 3138157 - RNA, 19 nt, Artificial Sequence
  Description of Artificial Sequence: Synthetic oligonucleotide
cagacggcgacagggaugc

SEQ ID NO: 3138158 - RNA, 19 nt, Artificial Sequence
  Description of Artificial Sequence: Synthetic oligonucleotide
ucacaggacguuccucuga

SEQ ID NO: 3138159 - RNA, 19 nt, Artificial Sequence
  Description of Artificial Sequence: Synthetic oligonucleotide
gucggagcgaucguccucg

SEQ ID NO: 3138160 - RNA, 19 nt, Artificial Sequence
  Description of Artificial Sequence: Synthetic oligonucleotide
acaggacguuccucugacc

SEQ ID NO: 3138161 - RNA, 19 nt, Artificial Sequence
  Description of Artificial Sequence: Synthetic oligonucleotide
ucauaggagcacuggguau

SEQ ID NO: 3138162 - RNA, 19 nt, Artificial Sequence
  Description of Artificial Sequence: Synthetic oligonucleotide
auaggagcacuggguauac

SEQ ID NO: 3138163 - RNA, 19 nt, Artificial Sequence
  Description of Artificial Sequence: Synthetic oligonucleotide
acuuagcagacggcgacag

SEQ ID NO: 3138164 - RNA, 19 nt, Artificial Sequence
  Description of Artificial Sequence: Synthetic oligonucleotide
uucacaggacguuccucug

SEQ ID NO: 3138165 - RNA, 19 nt, Artificial Sequence
  Description of Artificial Sequence: Synthetic oligonucleotide
guaccuugcguuucuucac

SEQ ID NO: 3138166 - RNA, 19 nt, Artificial Sequence
  Description of Artificial Sequence: Synthetic oligonucleotide
agcgaucguccucgaagcg

SEQ ID NO: 3138167 - RNA, 19 nt, Artificial Sequence
  Description of Artificial Sequence: Synthetic oligonucleotide
guuucuucacaggacguuc

SEQ ID NO: 3138168 - RNA, 19 nt, Artificial Sequence
  Description of Artificial Sequence: Synthetic oligonucleotide
ggguauacgguaaguacag

SEQ ID NO: 3138169 - RNA, 19 nt, Artificial Sequence
  Description of Artificial Sequence: Synthetic oligonucleotide
ccuucauaggagcacuggg

SEQ ID NO: 3138170 - RNA, 19 nt, Artificial Sequence
  Description of Artificial Sequence: Synthetic oligonucleotide
cugaacuuaagggacagua

SEQ ID NO: 3138171 - RNA, 19 nt, Artificial Sequence
  Description of Artificial Sequence: Synthetic oligonucleotide
ggaggugacagcuccguac

SEQ ID NO: 3138172 - RNA, 19 nt, Artificial Sequence
  Description of Artificial Sequence: Synthetic oligonucleotide
cacaggacguuccucugac

SEQ ID NO: 3138173 - RNA, 19 nt, Artificial Sequence
  Description of Artificial Sequence: Synthetic oligonucleotide
accugaacuuaagggacag

SEQ ID NO: 3138174 - RNA, 19 nt, Artificial Sequence
  Description of Artificial Sequence: Synthetic oligonucleotide
uagcagacggcgacaggga

SEQ ID NO: 3138175 - RNA, 19 nt, Artificial Sequence
  Description of Artificial Sequence: Synthetic oligonucleotide
aggacguuccucugaccug

SEQ ID NO: 3138176 - RNA, 19 nt, Artificial Sequence
  Description of Artificial Sequence: Synthetic oligonucleotide
ugacagcuccguaccuugc

SEQ ID NO: 3138177 - RNA, 19 nt, Artificial Sequence
  Description of Artificial Sequence: Synthetic oligonucleotide
ucgaagcggccuucauagg

SEQ ID NO: 3138178 - RNA, 19 nt, Artificial Sequence
  Description of Artificial Sequence: Synthetic oligonucleotide
cuuagcagacggcgacagg

SEQ ID NO: 3138179 - RNA, 19 nt, Artificial Sequence
  Description of Artificial Sequence: Synthetic oligonucleotide
acaguaagcuggaggagcu

SEQ ID NO: 3138180 - RNA, 19 nt, Artificial Sequence
  Description of Artificial Sequence: Synthetic oligonucleotide
acagcuccguaccuugcgu

SEQ ID NO: 3138181 - RNA, 19 nt, Artificial Sequence
  Description of Artificial Sequence: Synthetic oligonucleotide
cuucauaggagcacugggu

SEQ ID NO: 3138182 - RNA, 19 nt, Artificial Sequence
  Description of Artificial Sequence: Synthetic oligonucleotide
acuggguauacgguaagua

SEQ ID NO: 3138183 - RNA, 19 nt, Artificial Sequence
  Description of Artificial Sequence: Synthetic oligonucleotide
cuucacaggacguuccucu

SEQ ID NO: 3138184 - RNA, 19 nt, Artificial Sequence
  Description of Artificial Sequence: Synthetic oligonucleotide
guaaguacagaggggugga

SEQ ID NO: 3138185 - RNA, 19 nt, Artificial Sequence
  Description of Artificial Sequence: Synthetic oligonucleotide
ggacuuagcagacggcgac

SEQ ID NO: 3138186 - RNA, 19 nt, Artificial Sequence
  Description of Artificial Sequence: Synthetic oligonucleotide
cuggaggagcugucggagc

SEQ ID NO: 3138187 - RNA, 19 nt, Artificial Sequence
  Description of Artificial Sequence: Synthetic oligonucleotide
agggguggacuuagcagac

SEQ ID NO: 3138188 - RNA, 19 nt, Artificial Sequence
  Description of Artificial Sequence: Synthetic oligonucleotide
acguuccucugaccugaac

SEQ ID NO: 3138189 - RNA, 19 nt, Artificial Sequence
  Description of Artificial Sequence: Synthetic oligonucleotide
agcugucggagcgaucguc

SEQ ID NO: 3138190 - RNA, 19 nt, Artificial Sequence
  Description of Artificial Sequence: Synthetic oligonucleotide
agggaugccucggucuggg

SEQ ID NO: 3138191 - RNA, 19 nt, Artificial Sequence
  Description of Artificial Sequence: Synthetic oligonucleotide
gacagggaugccucggucu

SEQ ID NO: 3138192 - RNA, 19 nt, Artificial Sequence
  Description of Artificial Sequence: Synthetic oligonucleotide
gagcacuggguauacggua

SEQ ID NO: 3138193 - RNA, 19 nt, Artificial Sequence
  Description of Artificial Sequence: Synthetic oligonucleotide
acggcgacagggaugccuc

SEQ ID NO: 3138194 - RNA, 19 nt, Artificial Sequence
  Description of Artificial Sequence: Synthetic oligonucleotide
ucuucacaggacguuccuc

SEQ ID NO: 3138195 - RNA, 19 nt, Artificial Sequence
  Description of Artificial Sequence: Synthetic oligonucleotide
ugucggagcgaucguccuc

SEQ ID NO: 3138196 - RNA, 19 nt, Artificial Sequence
  Description of Artificial Sequence: Synthetic oligonucleotide
aagggacaguaagcuggag

SEQ ID NO: 3138197 - RNA, 19 nt, Artificial Sequence
  Description of Artificial Sequence: Synthetic oligonucleotide
uaaguacagagggguggac

SEQ ID NO: 3138198 - RNA, 19 nt, Artificial Sequence
  Description of Artificial Sequence: Synthetic oligonucleotide
uaggagcacuggguauacg

SEQ ID NO: 3138199 - RNA, 19 nt, Artificial Sequence
  Description of Artificial Sequence: Synthetic oligonucleotide
agcagacggcgacagggau

SEQ ID NO: 3138200 - RNA, 19 nt, Artificial Sequence
  Description of Artificial Sequence: Synthetic oligonucleotide
cagagggguggacuuagca

SEQ ID NO: 3138201 - RNA, 19 nt, Artificial Sequence
  Description of Artificial Sequence: Synthetic oligonucleotide
agcacuggguauacgguaa

SEQ ID NO: 3138202 - RNA, 19 nt, Artificial Sequence
  Description of Artificial Sequence: Synthetic oligonucleotide
caggacguuccucugaccu

SEQ ID NO: 3138203 - RNA, 19 nt, Artificial Sequence
  Description of Artificial Sequence: Synthetic oligonucleotide
acagagggguggacuuagc

SEQ ID NO: 3138204 - RNA, 19 nt, Artificial Sequence
  Description of Artificial Sequence: Synthetic oligonucleotide
gcgaucguccucgaagcgg

SEQ ID NO: 3138205 - RNA, 19 nt, Artificial Sequence
  Description of Artificial Sequence: Synthetic oligonucleotide
ccuugcguuucuucacagg

SEQ ID NO: 3138206 - RNA, 19 nt, Artificial Sequence
  Description of Artificial Sequence: Synthetic oligonucleotide
cauaggagcacuggguaua

SEQ ID NO: 3138207 - RNA, 19 nt, Artificial Sequence
  Description of Artificial Sequence: Synthetic oligonucleotide
agcuccguaccuugcguuu

SEQ ID NO: 3138208 - RNA, 19 nt, Artificial Sequence
  Description of Artificial Sequence: Synthetic oligonucleotide
uuccucugaccugaacuua

SEQ ID NO: 3138209 - RNA, 19 nt, Artificial Sequence
  Description of Artificial Sequence: Synthetic oligonucleotide
gacuuagcagacggcgaca

SEQ ID NO: 3138210 - RNA, 19 nt, Artificial Sequence
  Description of Artificial Sequence: Synthetic oligonucleotide
guuccucugaccugaacuu

SEQ ID NO: 3138211 - RNA, 19 nt, Artificial Sequence
  Description of Artificial Sequence: Synthetic oligonucleotide
gccuucauaggagcacugg

SEQ ID NO: 3138212 - RNA, 19 nt, Artificial Sequence
  Description of Artificial Sequence: Synthetic oligonucleotide
ucguccucgaagcggccuu

SEQ ID NO: 3138213 - RNA, 19 nt, Artificial Sequence
  Description of Artificial Sequence: Synthetic oligonucleotide
uggaggugacagcuccgua

SEQ ID NO: 3138214 - RNA, 19 nt, Artificial Sequence
  Description of Artificial Sequence: Synthetic oligonucleotide
cgaucguccucgaagcggc

SEQ ID NO: 3138215 - RNA, 19 nt, Artificial Sequence
  Description of Artificial Sequence: Synthetic oligonucleotide
aggugacagcuccguaccu

SEQ ID NO: 3138216 - RNA, 19 nt, Artificial Sequence
  Description of Artificial Sequence: Synthetic oligonucleotide
gcugucggagcgaucgucc

SEQ ID NO: 3138217 - RNA, 19 nt, Artificial Sequence
  Description of Artificial Sequence: Synthetic oligonucleotide
cguaccuugcguuucuuca

SEQ ID NO: 3138218 - RNA, 19 nt, Artificial Sequence
  Description of Artificial Sequence: Synthetic oligonucleotide
aucguccucgaagcggccu

SEQ ID NO: 3138219 - RNA, 19 nt, Artificial Sequence
  Description of Artificial Sequence: Synthetic oligonucleotide
uccucgaagcggccuucau

SEQ ID NO: 3138220 - RNA, 19 nt, Artificial Sequence
  Description of Artificial Sequence: Synthetic oligonucleotide
ggacguuccucugaccuga

SEQ ID NO: 3138221 - RNA, 19 nt, Artificial Sequence
  Description of Artificial Sequence: Synthetic oligonucleotide
ccucugaccugaacuuaag

SEQ ID NO: 3138222 - RNA, 19 nt, Artificial Sequence
  Description of Artificial Sequence: Synthetic oligonucleotide
gguggacuuagcagacggc

SEQ ID NO: 3138223 - RNA, 19 nt, Artificial Sequence
  Description of Artificial Sequence: Synthetic oligonucleotide
ggcgacagggaugccucgg

SEQ ID NO: 3138224 - RNA, 19 nt, Artificial Sequence
  Description of Artificial Sequence: Synthetic oligonucleotide
gaucguccucgaagcggcc

SEQ ID NO: 3138225 - RNA, 19 nt, Artificial Sequence
  Description of Artificial Sequence: Synthetic oligonucleotide
caguaagcuggaggagcug

SEQ ID NO: 3138226 - RNA, 19 nt, Artificial Sequence
  Description of Artificial Sequence: Synthetic oligonucleotide
gacggcgacagggaugccu

SEQ ID NO: 3138227 - RNA, 19 nt, Artificial Sequence
  Description of Artificial Sequence: Synthetic oligonucleotide
agcggccuucauaggagca

SEQ ID NO: 3138228 - RNA, 19 nt, Artificial Sequence
  Description of Artificial Sequence: Synthetic oligonucleotide
gcagacggcgacagggaug

SEQ ID NO: 3138229 - RNA, 19 nt, Artificial Sequence
  Description of Artificial Sequence: Synthetic oligonucleotide
gggguggacuuagcagacg

SEQ ID NO: 3138230 - RNA, 19 nt, Artificial Sequence
  Description of Artificial Sequence: Synthetic oligonucleotide
gguauacgguaaguacaga

SEQ ID NO: 3138231 - RNA, 19 nt, Artificial Sequence
  Description of Artificial Sequence: Synthetic oligonucleotide
cgaagcggccuucauagga

SEQ ID NO: 3138232 - RNA, 19 nt, Artificial Sequence
  Description of Artificial Sequence: Synthetic oligonucleotide
ucggagcgaucguccucga

SEQ ID NO: 3138233 - RNA, 19 nt, Artificial Sequence
  Description of Artificial Sequence: Synthetic oligonucleotide
cguuccucugaccugaacu

SEQ ID NO: 3138234 - RNA, 19 nt, Artificial Sequence
  Description of Artificial Sequence: Synthetic oligonucleotide
aggagcugucggagcgauc

SEQ ID NO: 3138235 - RNA, 19 nt, Artificial Sequence
  Description of Artificial Sequence: Synthetic oligonucleotide
cgguaaguacagaggggug

SEQ ID NO: 3138236 - RNA, 19 nt, Artificial Sequence
  Description of Artificial Sequence: Synthetic oligonucleotide
guacagagggguggacuua

SEQ ID NO: 3138237 - RNA, 19 nt, Artificial Sequence
  Description of Artificial Sequence: Synthetic oligonucleotide
gcggccuucauaggagcac

SEQ ID NO: 3138238 - RNA, 19 nt, Artificial Sequence
  Description of Artificial Sequence: Synthetic oligonucleotide
ccguaccuugcguuucuuc

SEQ ID NO: 3138239 - RNA, 19 nt, Artificial Sequence
  Description of Artificial Sequence: Synthetic oligonucleotide
ggccuucauaggagcacug

SEQ ID NO: 3138240 - RNA, 19 nt, Artificial Sequence
  Description of Artificial Sequence: Synthetic oligonucleotide
ggagcacuggguauacggu

SEQ ID NO: 3138241 - RNA, 19 nt, Artificial Sequence
  Description of Artificial Sequence: Synthetic oligonucleotide
agacggcgacagggaugcc

SEQ ID NO: 3138242 - RNA, 19 nt, Artificial Sequence
  Description of Artificial Sequence: Synthetic oligonucleotide
uccguaccuugcguuucuu

SEQ ID NO: 3138243 - RNA, 19 nt, Artificial Sequence
  Description of Artificial Sequence: Synthetic oligonucleotide
cugucggagcgaucguccu

SEQ ID NO: 3138244 - RNA, 19 nt, Artificial Sequence
  Description of Artificial Sequence: Synthetic oligonucleotide
cuggaggugacagcuccgu

SEQ ID NO: 3138245 - RNA, 19 nt, Artificial Sequence
  Description of Artificial Sequence: Synthetic oligonucleotide
gaggagcugucggagcgau

SEQ ID NO: 3138246 - RNA, 19 nt, Artificial Sequence
  Description of Artificial Sequence: Synthetic oligonucleotide
gcuccguaccuugcguuuc

SEQ ID NO: 3138247 - RNA, 19 nt, Artificial Sequence
  Description of Artificial Sequence: Synthetic oligonucleotide
guccucgaagcggccuuca

SEQ ID NO: 3138248 - RNA, 19 nt, Artificial Sequence
  Description of Artificial Sequence: Synthetic oligonucleotide
cuccguaccuugcguuucu

SEQ ID NO: 3138249 - RNA, 19 nt, Artificial Sequence
  Description of Artificial Sequence: Synthetic oligonucleotide
gagcugucggagcgaucgu

SEQ ID NO: 3138250 - RNA, 19 nt, Artificial Sequence
  Description of Artificial Sequence: Synthetic oligonucleotide
cacuggguauacgguaagu

SEQ ID NO: 3138251 - RNA, 19 nt, Artificial Sequence
  Description of Artificial Sequence: Synthetic oligonucleotide
ggaggagcugucggagcga

SEQ ID NO: 3138252 - RNA, 19 nt, Artificial Sequence
  Description of Artificial Sequence: Synthetic oligonucleotide
gacguuccucugaccugaa

SEQ ID NO: 3138253 - RNA, 19 nt, Artificial Sequence
  Description of Artificial Sequence: Synthetic oligonucleotide
ccucgaagcggccuucaua

SEQ ID NO: 3138254 - RNA, 19 nt, Artificial Sequence
  Description of Artificial Sequence: Synthetic oligonucleotide
cagcuccguaccuugcguu

SEQ ID NO: 3138255 - RNA, 19 nt, Artificial Sequence
  Description of Artificial Sequence: Synthetic oligonucleotide
ggugacagcuccguaccuu

SEQ ID NO: 3138256 - RNA, 19 nt, Artificial Sequence
  Description of Artificial Sequence: Synthetic oligonucleotide
gcgacagggaugccucggu

SEQ ID NO: 3138257 - RNA, 19 nt, Artificial Sequence
  Description of Artificial Sequence: Synthetic oligonucleotide
gcguuucuucacaggacgu

SEQ ID NO: 3138258 - RNA, 19 nt, Artificial Sequence
  Description of Artificial Sequence: Synthetic oligonucleotide
gggaugccucggucuggga

SEQ ID NO: 3138259 - RNA, 19 nt, Artificial Sequence
  Description of Artificial Sequence: Synthetic oligonucleotide
cggcgacagggaugccucg

SEQ ID NO: 3138260 - RNA, 19 nt, Artificial Sequence
  Description of Artificial Sequence: Synthetic oligonucleotide
ccugaacuuaagggacagu

SEQ ID NO: 3138261 - RNA, 19 nt, Artificial Sequence
  Description of Artificial Sequence: Synthetic oligonucleotide
cguccucgaagcggccuuc

SEQ ID NO: 3138262 - RNA, 19 nt, Artificial Sequence
  Description of Artificial Sequence: Synthetic oligonucleotide
cguuucuucacaggacguu

SEQ ID NO: 3138263 - RNA, 19 nt, Artificial Sequence
  Description of Artificial Sequence: Synthetic oligonucleotide
cagcagccgcagcuucuuu

SEQ ID NO: 3138264 - RNA, 19 nt, Artificial Sequence
  Description of Artificial Sequence: Synthetic oligonucleotide
cggccuucauaggagcacu

SEQ ID NO: 3138265 - RNA, 19 nt, Artificial Sequence
  Description of Artificial Sequence: Synthetic oligonucleotide
cggagcgaucguccucgaa

SEQ ID NO: 3138266 - RNA, 19 nt, Artificial Sequence
  Description of Artificial Sequence: Synthetic oligonucleotide
uuuaauauaacaaauauuc

SEQ ID NO: 3138267 - RNA, 19 nt, Artificial Sequence
  Description of Artificial Sequence: Synthetic oligonucleotide
aaagcagcaauucaaaacc

SEQ ID NO: 3138268 - RNA, 19 nt, Artificial Sequence
  Description of Artificial Sequence: Synthetic oligonucleotide
uuuucaaaggugcacaggg

SEQ ID NO: 3138269 - RNA, 19 nt, Artificial Sequence
  Description of Artificial Sequence: Synthetic oligonucleotide
auaacaaauauucaaagca

SEQ ID NO: 3138270 - RNA, 19 nt, Artificial Sequence
  Description of Artificial Sequence: Synthetic oligonucleotide
uauaacuuuaauauaacaa

SEQ ID NO: 3138271 - RNA, 19 nt, Artificial Sequence
  Description of Artificial Sequence: Synthetic oligonucleotide
uaauauaacaaauauucaa

SEQ ID NO: 3138272 - RNA, 19 nt, Artificial Sequence
  Description of Artificial Sequence: Synthetic oligonucleotide
aacaaauauucaaagcagc

SEQ ID NO: 3138273 - RNA, 19 nt, Artificial Sequence
  Description of Artificial Sequence: Synthetic oligonucleotide
uauaacaaauauucaaagc

SEQ ID NO: 3138274 - RNA, 19 nt, Artificial Sequence
  Description of Artificial Sequence: Synthetic oligonucleotide
aaauauucaaagcagcaau

SEQ ID NO: 3138275 - RNA, 19 nt, Artificial Sequence
  Description of Artificial Sequence: Synthetic oligonucleotide
aaaaccaaaaucuuuucaa

SEQ ID NO: 3138276 - RNA, 19 nt, Artificial Sequence
  Description of Artificial Sequence: Synthetic oligonucleotide
auauaacaaauauucaaag

SEQ ID NO: 3138277 - RNA, 19 nt, Artificial Sequence
  Description of Artificial Sequence: Synthetic oligonucleotide
auaacuuuaauauaacaaa

SEQ ID NO: 3138278 - RNA, 19 nt, Artificial Sequence
  Description of Artificial Sequence: Synthetic oligonucleotide
accaaaaucuuuucaaagg

SEQ ID NO: 3138279 - RNA, 19 nt, Artificial Sequence
  Description of Artificial Sequence: Synthetic oligonucleotide
aaccaaaaucuuuucaaag

SEQ ID NO: 3138280 - RNA, 19 nt, Artificial Sequence
  Description of Artificial Sequence: Synthetic oligonucleotide
aauggaacaagcacacucc

SEQ ID NO: 3138281 - RNA, 19 nt, Artificial Sequence
  Description of Artificial Sequence: Synthetic oligonucleotide
ugaagagcuagugugaggg

SEQ ID NO: 3138282 - RNA, 19 nt, Artificial Sequence
  Description of Artificial Sequence: Synthetic oligonucleotide
uuaauauaacaaauauuca

SEQ ID NO: 3138283 - RNA, 19 nt, Artificial Sequence
  Description of Artificial Sequence: Synthetic oligonucleotide
ucaguuggcaguaaugcag

SEQ ID NO: 3138284 - RNA, 19 nt, Artificial Sequence
  Description of Artificial Sequence: Synthetic oligonucleotide
acuuuaauauaacaaauau

SEQ ID NO: 3138285 - RNA, 19 nt, Artificial Sequence
  Description of Artificial Sequence: Synthetic oligonucleotide
aacaagcacacuccucucc

SEQ ID NO: 3138286 - RNA, 19 nt, Artificial Sequence
  Description of Artificial Sequence: Synthetic oligonucleotide
uuauaacuuuaauauaaca

SEQ ID NO: 3138287 - RNA, 19 nt, Artificial Sequence
  Description of Artificial Sequence: Synthetic oligonucleotide
aaucuuuucaaaggugcac

SEQ ID NO: 3138288 - RNA, 19 nt, Artificial Sequence
  Description of Artificial Sequence: Synthetic oligonucleotide
uucaaaaccaaaaucuuuu

SEQ ID NO: 3138289 - RNA, 19 nt, Artificial Sequence
  Description of Artificial Sequence: Synthetic oligonucleotide
uauucaaagcagcaauuca

SEQ ID NO: 3138290 - RNA, 19 nt, Artificial Sequence
  Description of Artificial Sequence: Synthetic oligonucleotide
uuaucugugggagugaaga

SEQ ID NO: 3138291 - RNA, 19 nt, Artificial Sequence
  Description of Artificial Sequence: Synthetic oligonucleotide
caaagcagcaauucaaaac

SEQ ID NO: 3138292 - RNA, 19 nt, Artificial Sequence
  Description of Artificial Sequence: Synthetic oligonucleotide
aagcacacuccucuccugc

SEQ ID NO: 3138293 - RNA, 19 nt, Artificial Sequence
  Description of Artificial Sequence: Synthetic oligonucleotide
aguaaugcagccauuaucu

SEQ ID NO: 3138294 - RNA, 19 nt, Artificial Sequence
  Description of Artificial Sequence: Synthetic oligonucleotide
aaaccaaaaucuuuucaaa

SEQ ID NO: 3138295 - RNA, 19 nt, Artificial Sequence
  Description of Artificial Sequence: Synthetic oligonucleotide
aaugcagccauuaucugug

SEQ ID NO: 3138296 - RNA, 19 nt, Artificial Sequence
  Description of Artificial Sequence: Synthetic oligonucleotide
caauucaaaaccaaaaucu

SEQ ID NO: 3138297 - RNA, 19 nt, Artificial Sequence
  Description of Artificial Sequence: Synthetic oligonucleotide
ucugugggagugaagagcu

SEQ ID NO: 3138298 - RNA, 19 nt, Artificial Sequence
  Description of Artificial Sequence: Synthetic oligonucleotide
auauucaaagcagcaauuc

SEQ ID NO: 3138299 - RNA, 19 nt, Artificial Sequence
  Description of Artificial Sequence: Synthetic oligonucleotide
ugucaguuggcaguaaugc

SEQ ID NO: 3138300 - RNA, 19 nt, Artificial Sequence
  Description of Artificial Sequence: Synthetic oligonucleotide
agcaauucaaaaccaaaau

SEQ ID NO: 3138301 - RNA, 19 nt, Artificial Sequence
  Description of Artificial Sequence: Synthetic oligonucleotide
aagagcuagugugaggguc

SEQ ID NO: 3138302 - RNA, 19 nt, Artificial Sequence
  Description of Artificial Sequence: Synthetic oligonucleotide
uacacugucaguuggcagu

SEQ ID NO: 3138303 - RNA, 19 nt, Artificial Sequence
  Description of Artificial Sequence: Synthetic oligonucleotide
caauggaacaagcacacuc

SEQ ID NO: 3138304 - RNA, 19 nt, Artificial Sequence
  Description of Artificial Sequence: Synthetic oligonucleotide
ggagugaagagcuagugug

SEQ ID NO: 3138305 - RNA, 19 nt, Artificial Sequence
  Description of Artificial Sequence: Synthetic oligonucleotide
uaaugcagccauuaucugu

SEQ ID NO: 3138306 - RNA, 19 nt, Artificial Sequence
  Description of Artificial Sequence: Synthetic oligonucleotide
aucugugggagugaagagc

SEQ ID NO: 3138307 - RNA, 19 nt, Artificial Sequence
  Description of Artificial Sequence: Synthetic oligonucleotide
uccccaauggaacaagcac

SEQ ID NO: 3138308 - RNA, 19 nt, Artificial Sequence
  Description of Artificial Sequence: Synthetic oligonucleotide
uuggcaguaaugcagccau

SEQ ID NO: 3138309 - RNA, 19 nt, Artificial Sequence
  Description of Artificial Sequence: Synthetic oligonucleotide
ucaggugaccugcucaggc

SEQ ID NO: 3138310 - RNA, 19 nt, Artificial Sequence
  Description of Artificial Sequence: Synthetic oligonucleotide
aauucaaaaccaaaaucuu

SEQ ID NO: 3138311 - RNA, 19 nt, Artificial Sequence
  Description of Artificial Sequence: Synthetic oligonucleotide
uucaaaggugcacaggguu

SEQ ID NO: 3138312 - RNA, 19 nt, Artificial Sequence
  Description of Artificial Sequence: Synthetic oligonucleotide
ugugggagugaagagcuag

SEQ ID NO: 3138313 - RNA, 19 nt, Artificial Sequence
  Description of Artificial Sequence: Synthetic oligonucleotide
acaaauauucaaagcagca

SEQ ID NO: 3138314 - RNA, 19 nt, Artificial Sequence
  Description of Artificial Sequence: Synthetic oligonucleotide
cacaggguuacacugucag

SEQ ID NO: 3138315 - RNA, 19 nt, Artificial Sequence
  Description of Artificial Sequence: Synthetic oligonucleotide
aguuggcaguaaugcagcc

SEQ ID NO: 3138316 - RNA, 19 nt, Artificial Sequence
  Description of Artificial Sequence: Synthetic oligonucleotide
cugguuuccccaauggaac

SEQ ID NO: 3138317 - RNA, 19 nt, Artificial Sequence
  Description of Artificial Sequence: Synthetic oligonucleotide
aaaucuuuucaaaggugca

SEQ ID NO: 3138318 - RNA, 19 nt, Artificial Sequence
  Description of Artificial Sequence: Synthetic oligonucleotide
aauauucaaagcagcaauu

SEQ ID NO: 3138319 - RNA, 19 nt, Artificial Sequence
  Description of Artificial Sequence: Synthetic oligonucleotide
aaggugcacaggguuacac

SEQ ID NO: 3138320 - RNA, 19 nt, Artificial Sequence
  Description of Artificial Sequence: Synthetic oligonucleotide
uuacacugucaguuggcag

SEQ ID NO: 3138321 - RNA, 19 nt, Artificial Sequence
  Description of Artificial Sequence: Synthetic oligonucleotide
gcaauucaaaaccaaaauc

SEQ ID NO: 3138322 - RNA, 19 nt, Artificial Sequence
  Description of Artificial Sequence: Synthetic oligonucleotide
uuuccccaauggaacaagc

SEQ ID NO: 3138323 - RNA, 19 nt, Artificial Sequence
  Description of Artificial Sequence: Synthetic oligonucleotide
uuucaaaggugcacagggu

SEQ ID NO: 3138324 - RNA, 19 nt, Artificial Sequence
  Description of Artificial Sequence: Synthetic oligonucleotide
ucaaaggugcacaggguua

SEQ ID NO: 3138325 - RNA, 19 nt, Artificial Sequence
  Description of Artificial Sequence: Synthetic oligonucleotide
acaacaauuauaacuuuaa

SEQ ID NO: 3138326 - RNA, 19 nt, Artificial Sequence
  Description of Artificial Sequence: Synthetic oligonucleotide
caaaaccaaaaucuuuuca

SEQ ID NO: 3138327 - RNA, 19 nt, Artificial Sequence
  Description of Artificial Sequence: Synthetic oligonucleotide
uuccccaauggaacaagca

SEQ ID NO: 3138328 - RNA, 19 nt, Artificial Sequence
  Description of Artificial Sequence: Synthetic oligonucleotide
auucaaagcagcaauucaa

SEQ ID NO: 3138329 - RNA, 19 nt, Artificial Sequence
  Description of Artificial Sequence: Synthetic oligonucleotide
agugaagagcuagugugag

SEQ ID NO: 3138330 - RNA, 19 nt, Artificial Sequence
  Description of Artificial Sequence: Synthetic oligonucleotide
caguaaugcagccauuauc

SEQ ID NO: 3138331 - RNA, 19 nt, Artificial Sequence
  Description of Artificial Sequence: Synthetic oligonucleotide
aucuuuucaaaggugcaca

SEQ ID NO: 3138332 - RNA, 19 nt, Artificial Sequence
  Description of Artificial Sequence: Synthetic oligonucleotide
caguuggcaguaaugcagc

SEQ ID NO: 3138333 - RNA, 19 nt, Artificial Sequence
  Description of Artificial Sequence: Synthetic oligonucleotide
acaagcacacuccucuccu

SEQ ID NO: 3138334 - RNA, 19 nt, Artificial Sequence
  Description of Artificial Sequence: Synthetic oligonucleotide
ugagggucaggugaccugc

SEQ ID NO: 3138335 - RNA, 19 nt, Artificial Sequence
  Description of Artificial Sequence: Synthetic oligonucleotide
ggugcacaggguuacacug

SEQ ID NO: 3138336 - RNA, 19 nt, Artificial Sequence
  Description of Artificial Sequence: Synthetic oligonucleotide
agugugagggucaggugac

SEQ ID NO: 3138337 - RNA, 19 nt, Artificial Sequence
  Description of Artificial Sequence: Synthetic oligonucleotide
caauuauaacuuuaauaua

SEQ ID NO: 3138338 - RNA, 19 nt, Artificial Sequence
  Description of Artificial Sequence: Synthetic oligonucleotide
cuuuaauauaacaaauauu

SEQ ID NO: 3138339 - RNA, 19 nt, Artificial Sequence
  Description of Artificial Sequence: Synthetic oligonucleotide
cugucaguuggcaguaaug

SEQ ID NO: 3138340 - RNA, 19 nt, Artificial Sequence
  Description of Artificial Sequence: Synthetic oligonucleotide
aggguuacacugucaguug

SEQ ID NO: 3138341 - RNA, 19 nt, Artificial Sequence
  Description of Artificial Sequence: Synthetic oligonucleotide
gugaagagcuagugugagg

SEQ ID NO: 3138342 - RNA, 19 nt, Artificial Sequence
  Description of Artificial Sequence: Synthetic oligonucleotide
auggaacaagcacacuccu

SEQ ID NO: 3138343 - RNA, 19 nt, Artificial Sequence
  Description of Artificial Sequence: Synthetic oligonucleotide
auucaaaaccaaaaucuuu

SEQ ID NO: 3138344 - RNA, 19 nt, Artificial Sequence
  Description of Artificial Sequence: Synthetic oligonucleotide
guaaugcagccauuaucug

SEQ ID NO: 3138345 - RNA, 19 nt, Artificial Sequence
  Description of Artificial Sequence: Synthetic oligonucleotide
cagcaauucaaaaccaaaa

SEQ ID NO: 3138346 - RNA, 19 nt, Artificial Sequence
  Description of Artificial Sequence: Synthetic oligonucleotide
ugcacaggguuacacuguc

SEQ ID NO: 3138347 - RNA, 19 nt, Artificial Sequence
  Description of Artificial Sequence: Synthetic oligonucleotide
cagccauuaucugugggag

SEQ ID NO: 3138348 - RNA, 19 nt, Artificial Sequence
  Description of Artificial Sequence: Synthetic oligonucleotide
ugggagugaagagcuagug

SEQ ID NO: 3138349 - RNA, 19 nt, Artificial Sequence
  Description of Artificial Sequence: Synthetic oligonucleotide
aagcagcaauucaaaacca

SEQ ID NO: 3138350 - RNA, 19 nt, Artificial Sequence
  Description of Artificial Sequence: Synthetic oligonucleotide
caaauauucaaagcagcaa

SEQ ID NO: 3138351 - RNA, 19 nt, Artificial Sequence
  Description of Artificial Sequence: Synthetic oligonucleotide
uggaacaagcacacuccuc

SEQ ID NO: 3138352 - RNA, 19 nt, Artificial Sequence
  Description of Artificial Sequence: Synthetic oligonucleotide
ggguuacacugucaguugg

SEQ ID NO: 3138353 - RNA, 19 nt, Artificial Sequence
  Description of Artificial Sequence: Synthetic oligonucleotide
ggaacaagcacacuccucu

SEQ ID NO: 3138354 - RNA, 19 nt, Artificial Sequence
  Description of Artificial Sequence: Synthetic oligonucleotide
caaaggugcacaggguuac

SEQ ID NO: 3138355 - RNA, 19 nt, Artificial Sequence
  Description of Artificial Sequence: Synthetic oligonucleotide
ugggcugguuuccccaaug

SEQ ID NO: 3138356 - RNA, 19 nt, Artificial Sequence
  Description of Artificial Sequence: Synthetic oligonucleotide
cucuccugcucuucaggcc

SEQ ID NO: 3138357 - RNA, 19 nt, Artificial Sequence
  Description of Artificial Sequence: Synthetic oligonucleotide
acugucaguuggcaguaau

SEQ ID NO: 3138358 - RNA, 19 nt, Artificial Sequence
  Description of Artificial Sequence: Synthetic oligonucleotide
gucaguuggcaguaaugca

SEQ ID NO: 3138359 - RNA, 19 nt, Artificial Sequence
  Description of Artificial Sequence: Synthetic oligonucleotide
caggugaccugcucaggcc

SEQ ID NO: 3138360 - RNA, 19 nt, Artificial Sequence
  Description of Artificial Sequence: Synthetic oligonucleotide
aggugaccugcucaggccu

SEQ ID NO: 3138361 - RNA, 19 nt, Artificial Sequence
  Description of Artificial Sequence: Synthetic oligonucleotide
ugugagggucaggugaccu

SEQ ID NO: 3138362 - RNA, 19 nt, Artificial Sequence
  Description of Artificial Sequence: Synthetic oligonucleotide
aggugcacaggguuacacu

SEQ ID NO: 3138363 - RNA, 19 nt, Artificial Sequence
  Description of Artificial Sequence: Synthetic oligonucleotide
gccauuaucugugggagug

SEQ ID NO: 3138364 - RNA, 19 nt, Artificial Sequence
  Description of Artificial Sequence: Synthetic oligonucleotide
guuuccccaauggaacaag

SEQ ID NO: 3138365 - RNA, 19 nt, Artificial Sequence
  Description of Artificial Sequence: Synthetic oligonucleotide
cuagugugagggucaggug

SEQ ID NO: 3138366 - RNA, 19 nt, Artificial Sequence
  Description of Artificial Sequence: Synthetic oligonucleotide
gaacaagcacacuccucuc

SEQ ID NO: 3138367 - RNA, 19 nt, Artificial Sequence
  Description of Artificial Sequence: Synthetic oligonucleotide
ggucaggugaccugcucag

SEQ ID NO: 3138368 - RNA, 19 nt, Artificial Sequence
  Description of Artificial Sequence: Synthetic oligonucleotide
gagugaagagcuaguguga

SEQ ID NO: 3138369 - RNA, 19 nt, Artificial Sequence
  Description of Artificial Sequence: Synthetic oligonucleotide
cccaauggaacaagcacac

SEQ ID NO: 3138370 - RNA, 19 nt, Artificial Sequence
  Description of Artificial Sequence: Synthetic oligonucleotide
guuacacugucaguuggca

SEQ ID NO: 3138371 - RNA, 19 nt, Artificial Sequence
  Description of Artificial Sequence: Synthetic oligonucleotide
augcagccauuaucugugg

SEQ ID NO: 3138372 - RNA, 19 nt, Artificial Sequence
  Description of Artificial Sequence: Synthetic oligonucleotide
agagcuagugugaggguca

SEQ ID NO: 3138373 - RNA, 19 nt, Artificial Sequence
  Description of Artificial Sequence: Synthetic oligonucleotide
aggccuugggcugguuucc

SEQ ID NO: 3138374 - RNA, 19 nt, Artificial Sequence
  Description of Artificial Sequence: Synthetic oligonucleotide
auuaucugugggagugaag

SEQ ID NO: 3138375 - RNA, 19 nt, Artificial Sequence
  Description of Artificial Sequence: Synthetic oligonucleotide
agggucaggugaccugcuc

SEQ ID NO: 3138376 - RNA, 19 nt, Artificial Sequence
  Description of Artificial Sequence: Synthetic oligonucleotide
caggccuugggcugguuuc

SEQ ID NO: 3138377 - RNA, 19 nt, Artificial Sequence
  Description of Artificial Sequence: Synthetic oligonucleotide
gugagggucaggugaccug

SEQ ID NO: 3138378 - RNA, 19 nt, Artificial Sequence
  Description of Artificial Sequence: Synthetic oligonucleotide
gcagccauuaucuguggga

SEQ ID NO: 3138379 - RNA, 19 nt, Artificial Sequence
  Description of Artificial Sequence: Synthetic oligonucleotide
agccauuaucugugggagu

SEQ ID NO: 3138380 - RNA, 19 nt, Artificial Sequence
  Description of Artificial Sequence: Synthetic oligonucleotide
caagcacacuccucuccug

SEQ ID NO: 3138381 - RNA, 19 nt, Artificial Sequence
  Description of Artificial Sequence: Synthetic oligonucleotide
guuggcaguaaugcagcca

SEQ ID NO: 3138382 - RNA, 19 nt, Artificial Sequence
  Description of Artificial Sequence: Synthetic oligonucleotide
agcagcaauucaaaaccaa

SEQ ID NO: 3138383 - RNA, 19 nt, Artificial Sequence
  Description of Artificial Sequence: Synthetic oligonucleotide
gggcugguuuccccaaugg

SEQ ID NO: 3138384 - RNA, 19 nt, Artificial Sequence
  Description of Artificial Sequence: Synthetic oligonucleotide
gguuacacugucaguuggc

SEQ ID NO: 3138385 - RNA, 19 nt, Artificial Sequence
  Description of Artificial Sequence: Synthetic oligonucleotide
cugcucaggccuugggcug

SEQ ID NO: 3138386 - RNA, 19 nt, Artificial Sequence
  Description of Artificial Sequence: Synthetic oligonucleotide
ugaccugcucaggccuugg

SEQ ID NO: 3138387 - RNA, 19 nt, Artificial Sequence
  Description of Artificial Sequence: Synthetic oligonucleotide
gagcuagugugagggucag

SEQ ID NO: 3138388 - RNA, 19 nt, Artificial Sequence
  Description of Artificial Sequence: Synthetic oligonucleotide
ccucuccugcucuucaggc

SEQ ID NO: 3138389 - RNA, 19 nt, Artificial Sequence
  Description of Artificial Sequence: Synthetic oligonucleotide
ccccaauggaacaagcaca

SEQ ID NO: 3138390 - RNA, 19 nt, Artificial Sequence
  Description of Artificial Sequence: Synthetic oligonucleotide
gcugguuuccccaauggaa

SEQ ID NO: 3138391 - RNA, 19 nt, Artificial Sequence
  Description of Artificial Sequence: Synthetic oligonucleotide
caacaauuauaacuuuaau

SEQ ID NO: 3138392 - RNA, 19 nt, Artificial Sequence
  Description of Artificial Sequence: Synthetic oligonucleotide
gucaggugaccugcucagg

SEQ ID NO: 3138393 - RNA, 19 nt, Artificial Sequence
  Description of Artificial Sequence: Synthetic oligonucleotide
cauuaucugugggagugaa

SEQ ID NO: 3138394 - RNA, 19 nt, Artificial Sequence
  Description of Artificial Sequence: Synthetic oligonucleotide
gcuagugugagggucaggu

SEQ ID NO: 3138395 - RNA, 19 nt, Artificial Sequence
  Description of Artificial Sequence: Synthetic oligonucleotide
gaagagcuagugugagggu

SEQ ID NO: 3138396 - RNA, 19 nt, Artificial Sequence
  Description of Artificial Sequence: Synthetic oligonucleotide
gcagcaauucaaaaccaaa

SEQ ID NO: 3138397 - RNA, 19 nt, Artificial Sequence
  Description of Artificial Sequence: Synthetic oligonucleotide
gggucaggugaccugcuca

SEQ ID NO: 3138398 - RNA, 19 nt, Artificial Sequence
  Description of Artificial Sequence: Synthetic oligonucleotide
caggguuacacugucaguu

SEQ ID NO: 3138399 - RNA, 19 nt, Artificial Sequence
  Description of Artificial Sequence: Synthetic oligonucleotide
ggcugguuuccccaaugga

SEQ ID NO: 3138400 - RNA, 19 nt, Artificial Sequence
  Description of Artificial Sequence: Synthetic oligonucleotide
acacugucaguuggcagua

SEQ ID NO: 3138401 - RNA, 19 nt, Artificial Sequence
  Description of Artificial Sequence: Synthetic oligonucleotide
ggcaguaaugcagccauua

SEQ ID NO: 3138402 - RNA, 19 nt, Artificial Sequence
  Description of Artificial Sequence: Synthetic oligonucleotide
agcuagugugagggucagg

SEQ ID NO: 3138403 - RNA, 19 nt, Artificial Sequence
  Description of Artificial Sequence: Synthetic oligonucleotide
gggagugaagagcuagugu

SEQ ID NO: 3138404 - RNA, 19 nt, Artificial Sequence
  Description of Artificial Sequence: Synthetic oligonucleotide
cuugggcugguuuccccaa

SEQ ID NO: 3138405 - RNA, 19 nt, Artificial Sequence
  Description of Artificial Sequence: Synthetic oligonucleotide
uggcaguaaugcagccauu

SEQ ID NO: 3138406 - RNA, 19 nt, Artificial Sequence
  Description of Artificial Sequence: Synthetic oligonucleotide
gugaccugcucaggccuug

SEQ ID NO: 3138407 - RNA, 19 nt, Artificial Sequence
  Description of Artificial Sequence: Synthetic oligonucleotide
gguuuccccaauggaacaa

SEQ ID NO: 3138408 - RNA, 19 nt, Artificial Sequence
  Description of Artificial Sequence: Synthetic oligonucleotide
gcacacuccucuccugcuc

SEQ ID NO: 3138409 - RNA, 19 nt, Artificial Sequence
  Description of Artificial Sequence: Synthetic oligonucleotide
ccugcucaggccuugggcu

SEQ ID NO: 3138410 - RNA, 19 nt, Artificial Sequence
  Description of Artificial Sequence: Synthetic oligonucleotide
ccuugggcugguuucccca

SEQ ID NO: 3138411 - RNA, 19 nt, Artificial Sequence
  Description of Artificial Sequence: Synthetic oligonucleotide
gcaguaaugcagccauuau

SEQ ID NO: 3138412 - RNA, 19 nt, Artificial Sequence
  Description of Artificial Sequence: Synthetic oligonucleotide
gugggagugaagagcuagu

SEQ ID NO: 3138413 - RNA, 19 nt, Artificial Sequence
  Description of Artificial Sequence: Synthetic oligonucleotide
gugcacaggguuacacugu

SEQ ID NO: 3138414 - RNA, 19 nt, Artificial Sequence
  Description of Artificial Sequence: Synthetic oligonucleotide
cugugggagugaagagcua

SEQ ID NO: 3138415 - RNA, 19 nt, Artificial Sequence
  Description of Artificial Sequence: Synthetic oligonucleotide
gagggucaggugaccugcu

SEQ ID NO: 3138416 - RNA, 19 nt, Artificial Sequence
  Description of Artificial Sequence: Synthetic oligonucleotide
gcacaggguuacacuguca

SEQ ID NO: 3138417 - RNA, 19 nt, Artificial Sequence
  Description of Artificial Sequence: Synthetic oligonucleotide
ccauuaucugugggaguga

SEQ ID NO: 3138418 - RNA, 19 nt, Artificial Sequence
  Description of Artificial Sequence: Synthetic oligonucleotide
cacugucaguuggcaguaa

SEQ ID NO: 3138419 - RNA, 19 nt, Artificial Sequence
  Description of Artificial Sequence: Synthetic oligonucleotide
ccaauggaacaagcacacu

SEQ ID NO: 3138420 - RNA, 19 nt, Artificial Sequence
  Description of Artificial Sequence: Synthetic oligonucleotide
ggugaccugcucaggccuu

SEQ ID NO: 3138421 - RNA, 19 nt, Artificial Sequence
  Description of Artificial Sequence: Synthetic oligonucleotide
cucaggccuugggcugguu

SEQ ID NO: 3138422 - RNA, 19 nt, Artificial Sequence
  Description of Artificial Sequence: Synthetic oligonucleotide
aauaaguuaguuuucauug

SEQ ID NO: 3138423 - RNA, 19 nt, Artificial Sequence
  Description of Artificial Sequence: Synthetic oligonucleotide
aguuaguuuucauugacag

SEQ ID NO: 3138424 - RNA, 19 nt, Artificial Sequence
  Description of Artificial Sequence: Synthetic oligonucleotide
uucauugacaguugcaucc

SEQ ID NO: 3138425 - RNA, 19 nt, Artificial Sequence
  Description of Artificial Sequence: Synthetic oligonucleotide
gacaguugcauccucagag

SEQ ID NO: 3138426 - RNA, 19 nt, Artificial Sequence
  Description of Artificial Sequence: Synthetic oligonucleotide
uuaguuuucauugacaguu

SEQ ID NO: 3138427 - RNA, 19 nt, Artificial Sequence
  Description of Artificial Sequence: Synthetic oligonucleotide
uucauauucuccaucacuc

SEQ ID NO: 3138428 - RNA, 19 nt, Artificial Sequence
  Description of Artificial Sequence: Synthetic oligonucleotide
aguuuucauugacaguugc

SEQ ID NO: 3138429 - RNA, 19 nt, Artificial Sequence
  Description of Artificial Sequence: Synthetic oligonucleotide
gguucuaucacgcagugcc

SEQ ID NO: 3138430 - RNA, 19 nt, Artificial Sequence
  Description of Artificial Sequence: Synthetic oligonucleotide
auguugucacuacagacuc

SEQ ID NO: 3138431 - RNA, 19 nt, Artificial Sequence
  Description of Artificial Sequence: Synthetic oligonucleotide
ugauguugucacuacagac

SEQ ID NO: 3138432 - RNA, 19 nt, Artificial Sequence
  Description of Artificial Sequence: Synthetic oligonucleotide
agugccuucccagucaccc

SEQ ID NO: 3138433 - RNA, 19 nt, Artificial Sequence
  Description of Artificial Sequence: Synthetic oligonucleotide
uuuucauugacaguugcau

SEQ ID NO: 3138434 - RNA, 19 nt, Artificial Sequence
  Description of Artificial Sequence: Synthetic oligonucleotide
aguggguucuaucacgcag

SEQ ID NO: 3138435 - RNA, 19 nt, Artificial Sequence
  Description of Artificial Sequence: Synthetic oligonucleotide
auaaguuaguuuucauuga

SEQ ID NO: 3138436 - RNA, 19 nt, Artificial Sequence
  Description of Artificial Sequence: Synthetic oligonucleotide
uugguuacuuuccugacuu

SEQ ID NO: 3138437 - RNA, 19 nt, Artificial Sequence
  Description of Artificial Sequence: Synthetic oligonucleotide
acagacuccaucuccaggu

SEQ ID NO: 3138438 - RNA, 19 nt, Artificial Sequence
  Description of Artificial Sequence: Synthetic oligonucleotide
ugagagagcugcagguagg

SEQ ID NO: 3138439 - RNA, 19 nt, Artificial Sequence
  Description of Artificial Sequence: Synthetic oligonucleotide
ucauauucuccaucacucc

SEQ ID NO: 3138440 - RNA, 19 nt, Artificial Sequence
  Description of Artificial Sequence: Synthetic oligonucleotide
guugcauccucagaguggg

SEQ ID NO: 3138441 - RNA, 19 nt, Artificial Sequence
  Description of Artificial Sequence: Synthetic oligonucleotide
uugacaguugcauccucag

SEQ ID NO: 3138442 - RNA, 19 nt, Artificial Sequence
  Description of Artificial Sequence: Synthetic oligonucleotide
acaccauugguuacuuucc

SEQ ID NO: 3138443 - RNA, 19 nt, Artificial Sequence
  Description of Artificial Sequence: Synthetic oligonucleotide
cagaguggguucuaucacg

SEQ ID NO: 3138444 - RNA, 19 nt, Artificial Sequence
  Description of Artificial Sequence: Synthetic oligonucleotide
agaguggguucuaucacgc

SEQ ID NO: 3138445 - RNA, 19 nt, Artificial Sequence
  Description of Artificial Sequence: Synthetic oligonucleotide
ugucacuacagacuccauc

SEQ ID NO: 3138446 - RNA, 19 nt, Artificial Sequence
  Description of Artificial Sequence: Synthetic oligonucleotide
ucagaguggguucuaucac

SEQ ID NO: 3138447 - RNA, 19 nt, Artificial Sequence
  Description of Artificial Sequence: Synthetic oligonucleotide
uuucauugacaguugcauc

SEQ ID NO: 3138448 - RNA, 19 nt, Artificial Sequence
  Description of Artificial Sequence: Synthetic oligonucleotide
auugguuacuuuccugacu

SEQ ID NO: 3138449 - RNA, 19 nt, Artificial Sequence
  Description of Artificial Sequence: Synthetic oligonucleotide
uaguuuucauugacaguug

SEQ ID NO: 3138450 - RNA, 19 nt, Artificial Sequence
  Description of Artificial Sequence: Synthetic oligonucleotide
ugaauaaguuaguuuucau

SEQ ID NO: 3138451 - RNA, 19 nt, Artificial Sequence
  Description of Artificial Sequence: Synthetic oligonucleotide
cacuacagacuccaucucc

SEQ ID NO: 3138452 - RNA, 19 nt, Artificial Sequence
  Description of Artificial Sequence: Synthetic oligonucleotide
aaguuaguuuucauugaca

SEQ ID NO: 3138453 - RNA, 19 nt, Artificial Sequence
  Description of Artificial Sequence: Synthetic oligonucleotide
uuccugacuuucuucauau

SEQ ID NO: 3138454 - RNA, 19 nt, Artificial Sequence
  Description of Artificial Sequence: Synthetic oligonucleotide
cugagagagcugcagguag

SEQ ID NO: 3138455 - RNA, 19 nt, Artificial Sequence
  Description of Artificial Sequence: Synthetic oligonucleotide
cucagaguggguucuauca

SEQ ID NO: 3138456 - RNA, 19 nt, Artificial Sequence
  Description of Artificial Sequence: Synthetic oligonucleotide
ucuucauauucuccaucac

SEQ ID NO: 3138457 - RNA, 19 nt, Artificial Sequence
  Description of Artificial Sequence: Synthetic oligonucleotide
gucacuacagacuccaucu

SEQ ID NO: 3138458 - RNA, 19 nt, Artificial Sequence
  Description of Artificial Sequence: Synthetic oligonucleotide
gaauaaguuaguuuucauu

SEQ ID NO: 3138459 - RNA, 19 nt, Artificial Sequence
  Description of Artificial Sequence: Synthetic oligonucleotide
uuuccugacuuucuucaua

SEQ ID NO: 3138460 - RNA, 19 nt, Artificial Sequence
  Description of Artificial Sequence: Synthetic oligonucleotide
uccugagagagcugcaggu

SEQ ID NO: 3138461 - RNA, 19 nt, Artificial Sequence
  Description of Artificial Sequence: Synthetic oligonucleotide
gauguugucacuacagacu

SEQ ID NO: 3138462 - RNA, 19 nt, Artificial Sequence
  Description of Artificial Sequence: Synthetic oligonucleotide
aguugcauccucagagugg

SEQ ID NO: 3138463 - RNA, 19 nt, Artificial Sequence
  Description of Artificial Sequence: Synthetic oligonucleotide
ucacgcagugccuucccag

SEQ ID NO: 3138464 - RNA, 19 nt, Artificial Sequence
  Description of Artificial Sequence: Synthetic oligonucleotide
gguagggguuaucugaagc

SEQ ID NO: 3138465 - RNA, 19 nt, Artificial Sequence
  Description of Artificial Sequence: Synthetic oligonucleotide
ucacuccugauguugucac

SEQ ID NO: 3138466 - RNA, 19 nt, Artificial Sequence
  Description of Artificial Sequence: Synthetic oligonucleotide
uguugucacuacagacucc

SEQ ID NO: 3138467 - RNA, 19 nt, Artificial Sequence
  Description of Artificial Sequence: Synthetic oligonucleotide
accauugguuacuuuccug

SEQ ID NO: 3138468 - RNA, 19 nt, Artificial Sequence
  Description of Artificial Sequence: Synthetic oligonucleotide
uagggguuaucugaagcug

SEQ ID NO: 3138469 - RNA, 19 nt, Artificial Sequence
  Description of Artificial Sequence: Synthetic oligonucleotide
cauugguuacuuuccugac

SEQ ID NO: 3138470 - RNA, 19 nt, Artificial Sequence
  Description of Artificial Sequence: Synthetic oligonucleotide
guugucacuacagacucca

SEQ ID NO: 3138471 - RNA, 19 nt, Artificial Sequence
  Description of Artificial Sequence: Synthetic oligonucleotide
acaguugcauccucagagu

SEQ ID NO: 3138472 - RNA, 19 nt, Artificial Sequence
  Description of Artificial Sequence: Synthetic oligonucleotide
gagagagcugcagguaggg

SEQ ID NO: 3138473 - RNA, 19 nt, Artificial Sequence
  Description of Artificial Sequence: Synthetic oligonucleotide
ugccuucccagucacccug

SEQ ID NO: 3138474 - RNA, 19 nt, Artificial Sequence
  Description of Artificial Sequence: Synthetic oligonucleotide
caucuuccuccugagagag

SEQ ID NO: 3138475 - RNA, 19 nt, Artificial Sequence
  Description of Artificial Sequence: Synthetic oligonucleotide
uuacuuuccugacuuucuu

SEQ ID NO: 3138476 - RNA, 19 nt, Artificial Sequence
  Description of Artificial Sequence: Synthetic oligonucleotide
uggguucuaucacgcagug

SEQ ID NO: 3138477 - RNA, 19 nt, Artificial Sequence
  Description of Artificial Sequence: Synthetic oligonucleotide
ugcagguagggguuaucug

SEQ ID NO: 3138478 - RNA, 19 nt, Artificial Sequence
  Description of Artificial Sequence: Synthetic oligonucleotide
caucuccaggucaucuucc

SEQ ID NO: 3138479 - RNA, 19 nt, Artificial Sequence
  Description of Artificial Sequence: Synthetic oligonucleotide
ugacaguugcauccucaga

SEQ ID NO: 3138480 - RNA, 19 nt, Artificial Sequence
  Description of Artificial Sequence: Synthetic oligonucleotide
auauucuccaucacuccug

SEQ ID NO: 3138481 - RNA, 19 nt, Artificial Sequence
  Description of Artificial Sequence: Synthetic oligonucleotide
ggcuccacaacaccauugg

SEQ ID NO: 3138482 - RNA, 19 nt, Artificial Sequence
  Description of Artificial Sequence: Synthetic oligonucleotide
cuccugagagagcugcagg

SEQ ID NO: 3138483 - RNA, 19 nt, Artificial Sequence
  Description of Artificial Sequence: Synthetic oligonucleotide
ccugacuuucuucauauuc

SEQ ID NO: 3138484 - RNA, 19 nt, Artificial Sequence
  Description of Artificial Sequence: Synthetic oligonucleotide
acuacagacuccaucucca

SEQ ID NO: 3138485 - RNA, 19 nt, Artificial Sequence
  Description of Artificial Sequence: Synthetic oligonucleotide
uaucacgcagugccuuccc

SEQ ID NO: 3138486 - RNA, 19 nt, Artificial Sequence
  Description of Artificial Sequence: Synthetic oligonucleotide
cugacuuucuucauauucu

SEQ ID NO: 3138487 - RNA, 19 nt, Artificial Sequence
  Description of Artificial Sequence: Synthetic oligonucleotide
gagagcugcagguaggggu

SEQ ID NO: 3138488 - RNA, 19 nt, Artificial Sequence
  Description of Artificial Sequence: Synthetic oligonucleotide
caguugcauccucagagug

SEQ ID NO: 3138489 - RNA, 19 nt, Artificial Sequence
  Description of Artificial Sequence: Synthetic oligonucleotide
ucauugacaguugcauccu

SEQ ID NO: 3138490 - RNA, 19 nt, Artificial Sequence
  Description of Artificial Sequence: Synthetic oligonucleotide
ucuaucacgcagugccuuc

SEQ ID NO: 3138491 - RNA, 19 nt, Artificial Sequence
  Description of Artificial Sequence: Synthetic oligonucleotide
auugacaguugcauccuca

SEQ ID NO: 3138492 - RNA, 19 nt, Artificial Sequence
  Description of Artificial Sequence: Synthetic oligonucleotide
cuacagacuccaucuccag

SEQ ID NO: 3138493 - RNA, 19 nt, Artificial Sequence
  Description of Artificial Sequence: Synthetic oligonucleotide
cuucauauucuccaucacu

SEQ ID NO: 3138494 - RNA, 19 nt, Artificial Sequence
  Description of Artificial Sequence: Synthetic oligonucleotide
ucacuacagacuccaucuc

SEQ ID NO: 3138495 - RNA, 19 nt, Artificial Sequence
  Description of Artificial Sequence: Synthetic oligonucleotide
gcagguagggguuaucuga

SEQ ID NO: 3138496 - RNA, 19 nt, Artificial Sequence
  Description of Artificial Sequence: Synthetic oligonucleotide
guuuucauugacaguugca

SEQ ID NO: 3138497 - RNA, 19 nt, Artificial Sequence
  Description of Artificial Sequence: Synthetic oligonucleotide
guagggguuaucugaagcu

SEQ ID NO: 3138498 - RNA, 19 nt, Artificial Sequence
  Description of Artificial Sequence: Synthetic oligonucleotide
cugauguugucacuacaga

SEQ ID NO: 3138499 - RNA, 19 nt, Artificial Sequence
  Description of Artificial Sequence: Synthetic oligonucleotide
agguagggguuaucugaag

SEQ ID NO: 3138500 - RNA, 19 nt, Artificial Sequence
  Description of Artificial Sequence: Synthetic oligonucleotide
acgcagugccuucccaguc

SEQ ID NO: 3138501 - RNA, 19 nt, Artificial Sequence
  Description of Artificial Sequence: Synthetic oligonucleotide
guuaguuuucauugacagu

SEQ ID NO: 3138502 - RNA, 19 nt, Artificial Sequence
  Description of Artificial Sequence: Synthetic oligonucleotide
ugcauccucagaguggguu

SEQ ID NO: 3138503 - RNA, 19 nt, Artificial Sequence
  Description of Artificial Sequence: Synthetic oligonucleotide
cuaucacgcagugccuucc

SEQ ID NO: 3138504 - RNA, 19 nt, Artificial Sequence
  Description of Artificial Sequence: Synthetic oligonucleotide
cauauucuccaucacuccu

SEQ ID NO: 3138505 - RNA, 19 nt, Artificial Sequence
  Description of Artificial Sequence: Synthetic oligonucleotide
uggggcuccacaacaccau

SEQ ID NO: 3138506 - RNA, 19 nt, Artificial Sequence
  Description of Artificial Sequence: Synthetic oligonucleotide
ccauugguuacuuuccuga

SEQ ID NO: 3138507 - RNA, 19 nt, Artificial Sequence
  Description of Artificial Sequence: Synthetic oligonucleotide
uucuaucacgcagugccuu

SEQ ID NO: 3138508 - RNA, 19 nt, Artificial Sequence
  Description of Artificial Sequence: Synthetic oligonucleotide
ucccagucacccuggggcu

SEQ ID NO: 3138509 - RNA, 19 nt, Artificial Sequence
  Description of Artificial Sequence: Synthetic oligonucleotide
gggguuaucugaagcuggg

SEQ ID NO: 3138510 - RNA, 19 nt, Artificial Sequence
  Description of Artificial Sequence: Synthetic oligonucleotide
cuggggcuccacaacacca

SEQ ID NO: 3138511 - RNA, 19 nt, Artificial Sequence
  Description of Artificial Sequence: Synthetic oligonucleotide
guuacuuuccugacuuucu

SEQ ID NO: 3138512 - RNA, 19 nt, Artificial Sequence
  Description of Artificial Sequence: Synthetic oligonucleotide
cauugacaguugcauccuc

SEQ ID NO: 3138513 - RNA, 19 nt, Artificial Sequence
  Description of Artificial Sequence: Synthetic oligonucleotide
aucacgcagugccuuccca

SEQ ID NO: 3138514 - RNA, 19 nt, Artificial Sequence
  Description of Artificial Sequence: Synthetic oligonucleotide
caucacuccugauguuguc

SEQ ID NO: 3138515 - RNA, 19 nt, Artificial Sequence
  Description of Artificial Sequence: Synthetic oligonucleotide
cuccacaacaccauugguu

SEQ ID NO: 3138516 - RNA, 19 nt, Artificial Sequence
  Description of Artificial Sequence: Synthetic oligonucleotide
gaguggguucuaucacgca

SEQ ID NO: 3138517 - RNA, 19 nt, Artificial Sequence
  Description of Artificial Sequence: Synthetic oligonucleotide
cagguagggguuaucugaa

SEQ ID NO: 3138518 - RNA, 19 nt, Artificial Sequence
  Description of Artificial Sequence: Synthetic oligonucleotide
aucuuccuccugagagagc

SEQ ID NO: 3138519 - RNA, 19 nt, Artificial Sequence
  Description of Artificial Sequence: Synthetic oligonucleotide
acaacaccauugguuacuu

SEQ ID NO: 3138520 - RNA, 19 nt, Artificial Sequence
  Description of Artificial Sequence: Synthetic oligonucleotide
uugucacuacagacuccau

SEQ ID NO: 3138521 - RNA, 19 nt, Artificial Sequence
  Description of Artificial Sequence: Synthetic oligonucleotide
gcauccucagaguggguuc

SEQ ID NO: 3138522 - RNA, 19 nt, Artificial Sequence
  Description of Artificial Sequence: Synthetic oligonucleotide
ccaucuccaggucaucuuc

SEQ ID NO: 3138523 - RNA, 19 nt, Artificial Sequence
  Description of Artificial Sequence: Synthetic oligonucleotide
ugguuacuuuccugacuuu

SEQ ID NO: 3138524 - RNA, 19 nt, Artificial Sequence
  Description of Artificial Sequence: Synthetic oligonucleotide
uccugacuuucuucauauu

SEQ ID NO: 3138525 - RNA, 19 nt, Artificial Sequence
  Description of Artificial Sequence: Synthetic oligonucleotide
uccucagaguggguucuau

SEQ ID NO: 3138526 - RNA, 19 nt, Artificial Sequence
  Description of Artificial Sequence: Synthetic oligonucleotide
cacccuggggcuccacaac

SEQ ID NO: 3138527 - RNA, 19 nt, Artificial Sequence
  Description of Artificial Sequence: Synthetic oligonucleotide
gucacccuggggcuccaca

SEQ ID NO: 3138528 - RNA, 19 nt, Artificial Sequence
  Description of Artificial Sequence: Synthetic oligonucleotide
cacaacaccauugguuacu

SEQ ID NO: 3138529 - RNA, 19 nt, Artificial Sequence
  Description of Artificial Sequence: Synthetic oligonucleotide
uugcauccucagagugggu

SEQ ID NO: 3138530 - RNA, 19 nt, Artificial Sequence
  Description of Artificial Sequence: Synthetic oligonucleotide
guggguucuaucacgcagu

SEQ ID NO: 3138531 - RNA, 19 nt, Artificial Sequence
  Description of Artificial Sequence: Synthetic oligonucleotide
cagugccuucccagucacc

SEQ ID NO: 3138532 - RNA, 19 nt, Artificial Sequence
  Description of Artificial Sequence: Synthetic oligonucleotide
gacuccaucuccaggucau

SEQ ID NO: 3138533 - RNA, 19 nt, Artificial Sequence
  Description of Artificial Sequence: Synthetic oligonucleotide
ccuggggcuccacaacacc

SEQ ID NO: 3138534 - RNA, 19 nt, Artificial Sequence
  Description of Artificial Sequence: Synthetic oligonucleotide
ggguuaucugaagcugggc

SEQ ID NO: 3138535 - RNA, 19 nt, Artificial Sequence
  Description of Artificial Sequence: Synthetic oligonucleotide
gcagugccuucccagucac

SEQ ID NO: 3138536 - RNA, 19 nt, Artificial Sequence
  Description of Artificial Sequence: Synthetic oligonucleotide
ccacaacaccauugguuac

SEQ ID NO: 3138537 - RNA, 19 nt, Artificial Sequence
  Description of Artificial Sequence: Synthetic oligonucleotide
caccauugguuacuuuccu

SEQ ID NO: 3138538 - RNA, 19 nt, Artificial Sequence
  Description of Artificial Sequence: Synthetic oligonucleotide
cugcagguagggguuaucu

SEQ ID NO: 3138539 - RNA, 19 nt, Artificial Sequence
  Description of Artificial Sequence: Synthetic oligonucleotide
ggguucuaucacgcagugc

SEQ ID NO: 3138540 - RNA, 19 nt, Artificial Sequence
  Description of Artificial Sequence: Synthetic oligonucleotide
cacgcagugccuucccagu

SEQ ID NO: 3138541 - RNA, 19 nt, Artificial Sequence
  Description of Artificial Sequence: Synthetic oligonucleotide
guucuaucacgcagugccu

SEQ ID NO: 3138542 - RNA, 19 nt, Artificial Sequence
  Description of Artificial Sequence: Synthetic oligonucleotide
cauccucagaguggguucu

SEQ ID NO: 3138543 - RNA, 19 nt, Artificial Sequence
  Description of Artificial Sequence: Synthetic oligonucleotide
ccuucccagucacccuggg

SEQ ID NO: 3138544 - RNA, 19 nt, Artificial Sequence
  Description of Artificial Sequence: Synthetic oligonucleotide
ccagucacccuggggcucc

SEQ ID NO: 3138545 - RNA, 19 nt, Artificial Sequence
  Description of Artificial Sequence: Synthetic oligonucleotide
agcugcagguagggguuau

SEQ ID NO: 3138546 - RNA, 19 nt, Artificial Sequence
  Description of Artificial Sequence: Synthetic oligonucleotide
cccuggggcuccacaacac

SEQ ID NO: 3138547 - RNA, 19 nt, Artificial Sequence
  Description of Artificial Sequence: Synthetic oligonucleotide
gccuucccagucacccugg

SEQ ID NO: 3138548 - RNA, 19 nt, Artificial Sequence
  Description of Artificial Sequence: Synthetic oligonucleotide
cacuccugauguugucacu

SEQ ID NO: 3138549 - RNA, 19 nt, Artificial Sequence
  Description of Artificial Sequence: Synthetic oligonucleotide
ccaucacuccugauguugu

SEQ ID NO: 3138550 - RNA, 19 nt, Artificial Sequence
  Description of Artificial Sequence: Synthetic oligonucleotide
gcuccacaacaccauuggu

SEQ ID NO: 3138551 - RNA, 19 nt, Artificial Sequence
  Description of Artificial Sequence: Synthetic oligonucleotide
auccucagaguggguucua

SEQ ID NO: 3138552 - RNA, 19 nt, Artificial Sequence
  Description of Artificial Sequence: Synthetic oligonucleotide
ccaggucaucuuccuccug

SEQ ID NO: 3138553 - RNA, 19 nt, Artificial Sequence
  Description of Artificial Sequence: Synthetic oligonucleotide
ccugagagagcugcaggua

SEQ ID NO: 3138554 - RNA, 19 nt, Artificial Sequence
  Description of Artificial Sequence: Synthetic oligonucleotide
cgcagugccuucccaguca

SEQ ID NO: 3138555 - RNA, 19 nt, Artificial Sequence
  Description of Artificial Sequence: Synthetic oligonucleotide
cagucacccuggggcucca

SEQ ID NO: 3138556 - RNA, 19 nt, Artificial Sequence
  Description of Artificial Sequence: Synthetic oligonucleotide
uggccuugaacucagaggg

SEQ ID NO: 3138557 - RNA, 19 nt, Artificial Sequence
  Description of Artificial Sequence: Synthetic oligonucleotide
aacucuguagaccaaggcu

SEQ ID NO: 3138558 - RNA, 19 nt, Artificial Sequence
  Description of Artificial Sequence: Synthetic oligonucleotide
uggaacucaacucuguaga

SEQ ID NO: 3138559 - RNA, 19 nt, Artificial Sequence
  Description of Artificial Sequence: Synthetic oligonucleotide
ucaacucuguagaccaagg

SEQ ID NO: 3138560 - RNA, 19 nt, Artificial Sequence
  Description of Artificial Sequence: Synthetic oligonucleotide
agagggaucugccugccuc

SEQ ID NO: 3138561 - RNA, 19 nt, Artificial Sequence
  Description of Artificial Sequence: Synthetic oligonucleotide
ugggauuuaaaggcguggg

SEQ ID NO: 3138562 - RNA, 19 nt, Artificial Sequence
  Description of Artificial Sequence: Synthetic oligonucleotide
gauuuaaaggcgugggcca

SEQ ID NO: 3138563 - RNA, 19 nt, Artificial Sequence
  Description of Artificial Sequence: Synthetic oligonucleotide
uguagaccaaggcuggccu

SEQ ID NO: 3138564 - RNA, 19 nt, Artificial Sequence
  Description of Artificial Sequence: Synthetic oligonucleotide
auaguucuggcuguccugg

SEQ ID NO: 3138565 - RNA, 19 nt, Artificial Sequence
  Description of Artificial Sequence: Synthetic oligonucleotide
uauaguucuggcuguccug

SEQ ID NO: 3138566 - RNA, 19 nt, Artificial Sequence
  Description of Artificial Sequence: Synthetic oligonucleotide
acucuguagaccaaggcug

SEQ ID NO: 3138567 - RNA, 19 nt, Artificial Sequence
  Description of Artificial Sequence: Synthetic oligonucleotide
cuggaacucaacucuguag

SEQ ID NO: 3138568 - RNA, 19 nt, Artificial Sequence
  Description of Artificial Sequence: Synthetic oligonucleotide
ugaacucagagggaucugc

SEQ ID NO: 3138569 - RNA, 19 nt, Artificial Sequence
  Description of Artificial Sequence: Synthetic oligonucleotide
accaaggcuggccuugaac

SEQ ID NO: 3138570 - RNA, 19 nt, Artificial Sequence
  Description of Artificial Sequence: Synthetic oligonucleotide
gaacucaacucuguagacc

SEQ ID NO: 3138571 - RNA, 19 nt, Artificial Sequence
  Description of Artificial Sequence: Synthetic oligonucleotide
ggauuuaaaggcgugggcc

SEQ ID NO: 3138572 - RNA, 19 nt, Artificial Sequence
  Description of Artificial Sequence: Synthetic oligonucleotide
cugucugucucugaagugc

SEQ ID NO: 3138573 - RNA, 19 nt, Artificial Sequence
  Description of Artificial Sequence: Synthetic oligonucleotide
cucuguagaccaaggcugg

SEQ ID NO: 3138574 - RNA, 19 nt, Artificial Sequence
  Description of Artificial Sequence: Synthetic oligonucleotide
uguguguguguguuggagu

SEQ ID NO: 3138575 - RNA, 19 nt, Artificial Sequence
  Description of Artificial Sequence: Synthetic oligonucleotide
auuuaaaggcgugggccac

SEQ ID NO: 3138576 - RNA, 19 nt, Artificial Sequence
  Description of Artificial Sequence: Synthetic oligonucleotide
guguguguguguguguugg

SEQ ID NO: 3138577 - RNA, 19 nt, Artificial Sequence
  Description of Artificial Sequence: Synthetic oligonucleotide
ucugucugucucugaagug

SEQ ID NO: 3138578 - RNA, 19 nt, Artificial Sequence
  Description of Artificial Sequence: Synthetic oligonucleotide
uaucgagugugugugugug

SEQ ID NO: 3138579 - RNA, 19 nt, Artificial Sequence
  Description of Artificial Sequence: Synthetic oligonucleotide
ugucugucucugaagugcu

SEQ ID NO: 3138580 - RNA, 19 nt, Artificial Sequence
  Description of Artificial Sequence: Synthetic oligonucleotide
cucagagggaucugccugc

SEQ ID NO: 3138581 - RNA, 19 nt, Artificial Sequence
  Description of Artificial Sequence: Synthetic oligonucleotide
ucgagugugugugugugug

SEQ ID NO: 3138582 - RNA, 19 nt, Artificial Sequence
  Description of Artificial Sequence: Synthetic oligonucleotide
caacucuguagaccaaggc

SEQ ID NO: 3138583 - RNA, 19 nt, Artificial Sequence
  Description of Artificial Sequence: Synthetic oligonucleotide
ugcugggauuuaaaggcgu

SEQ ID NO: 3138584 - RNA, 19 nt, Artificial Sequence
  Description of Artificial Sequence: Synthetic oligonucleotide
uguauaguucuggcugucc

SEQ ID NO: 3138585 - RNA, 19 nt, Artificial Sequence
  Description of Artificial Sequence: Synthetic oligonucleotide
uuaucgagugugugugugu

SEQ ID NO: 3138586 - RNA, 19 nt, Artificial Sequence
  Description of Artificial Sequence: Synthetic oligonucleotide
guuaucgagugugugugug

SEQ ID NO: 3138587 - RNA, 19 nt, Artificial Sequence
  Description of Artificial Sequence: Synthetic oligonucleotide
cuguccuggaacucaacuc

SEQ ID NO: 3138588 - RNA, 19 nt, Artificial Sequence
  Description of Artificial Sequence: Synthetic oligonucleotide
cugggauuuaaaggcgugg

SEQ ID NO: 3138589 - RNA, 19 nt, Artificial Sequence
  Description of Artificial Sequence: Synthetic oligonucleotide
gagugugugugugugugug

SEQ ID NO: 3138590 - RNA, 19 nt, Artificial Sequence
  Description of Artificial Sequence: Synthetic oligonucleotide
cucaacucuguagaccaag

SEQ ID NO: 3138591 - RNA, 19 nt, Artificial Sequence
  Description of Artificial Sequence: Synthetic oligonucleotide
uguguguguguguguguug

SEQ ID NO: 3138592 - RNA, 19 nt, Artificial Sequence
  Description of Artificial Sequence: Synthetic oligonucleotide
cugucucugaagugcuggg

SEQ ID NO: 3138593 - RNA, 19 nt, Artificial Sequence
  Description of Artificial Sequence: Synthetic oligonucleotide
gaacucagagggaucugcc

SEQ ID NO: 3138594 - RNA, 19 nt, Artificial Sequence
  Description of Artificial Sequence: Synthetic oligonucleotide
aaggcgugggccaccacug

SEQ ID NO: 3138595 - RNA, 19 nt, Artificial Sequence
  Description of Artificial Sequence: Synthetic oligonucleotide
cuguagaccaaggcuggcc

SEQ ID NO: 3138596 - RNA, 19 nt, Artificial Sequence
  Description of Artificial Sequence: Synthetic oligonucleotide
ugugugugugugugugugu

SEQ ID NO: 3138597 - RNA, 19 nt, Artificial Sequence
  Description of Artificial Sequence: Synthetic oligonucleotide
guguguguguguguuggag

SEQ ID NO: 3138598 - RNA, 19 nt, Artificial Sequence
  Description of Artificial Sequence: Synthetic oligonucleotide
gggauuuaaaggcgugggc

SEQ ID NO: 3138599 - RNA, 19 nt, Artificial Sequence
  Description of Artificial Sequence: Synthetic oligonucleotide
gugcugggauuuaaaggcg

SEQ ID NO: 3138600 - RNA, 19 nt, Artificial Sequence
  Description of Artificial Sequence: Synthetic oligonucleotide
gugugugugugugugugug

SEQ ID NO: 3138601 - RNA, 19 nt, Artificial Sequence
  Description of Artificial Sequence: Synthetic oligonucleotide
agugugugugugugugugu

SEQ ID NO: 3138602 - RNA, 19 nt, Artificial Sequence
  Description of Artificial Sequence: Synthetic oligonucleotide
ggaacucaacucuguagac

SEQ ID NO: 3138603 - RNA, 19 nt, Artificial Sequence
  Description of Artificial Sequence: Synthetic oligonucleotide
caaggcuggccuugaacuc

SEQ ID NO: 3138604 - RNA, 19 nt, Artificial Sequence
  Description of Artificial Sequence: Synthetic oligonucleotide
uguguguguguguguugga

SEQ ID NO: 3138605 - RNA, 19 nt, Artificial Sequence
  Description of Artificial Sequence: Synthetic oligonucleotide
ucugccugccucugucugu

SEQ ID NO: 3138606 - RNA, 19 nt, Artificial Sequence
  Description of Artificial Sequence: Synthetic oligonucleotide
guauaguucuggcuguccu

SEQ ID NO: 3138607 - RNA, 19 nt, Artificial Sequence
  Description of Artificial Sequence: Synthetic oligonucleotide
ucuguagaccaaggcuggc

SEQ ID NO: 3138608 - RNA, 19 nt, Artificial Sequence
  Description of Artificial Sequence: Synthetic oligonucleotide
aggcgugggccaccacugc

SEQ ID NO: 3138609 - RNA, 19 nt, Artificial Sequence
  Description of Artificial Sequence: Synthetic oligonucleotide
aucgagugugugugugugu

SEQ ID NO: 3138610 - RNA, 19 nt, Artificial Sequence
  Description of Artificial Sequence: Synthetic oligonucleotide
cucugucugucucugaagu

SEQ ID NO: 3138611 - RNA, 19 nt, Artificial Sequence
  Description of Artificial Sequence: Synthetic oligonucleotide
guccuggaacucaacucug

SEQ ID NO: 3138612 - RNA, 19 nt, Artificial Sequence
  Description of Artificial Sequence: Synthetic oligonucleotide
cuguauaguucuggcuguc

SEQ ID NO: 3138613 - RNA, 19 nt, Artificial Sequence
  Description of Artificial Sequence: Synthetic oligonucleotide
guguguguguguuggaguu

SEQ ID NO: 3138614 - RNA, 19 nt, Artificial Sequence
  Description of Artificial Sequence: Synthetic oligonucleotide
ccucugucugucucugaag

SEQ ID NO: 3138615 - RNA, 19 nt, Artificial Sequence
  Description of Artificial Sequence: Synthetic oligonucleotide
gcugggauuuaaaggcgug

SEQ ID NO: 3138616 - RNA, 19 nt, Artificial Sequence
  Description of Artificial Sequence: Synthetic oligonucleotide
ccaaggcuggccuugaacu

SEQ ID NO: 3138617 - RNA, 19 nt, Artificial Sequence
  Description of Artificial Sequence: Synthetic oligonucleotide
ggcgugggccaccacugcc

SEQ ID NO: 3138618 - RNA, 19 nt, Artificial Sequence
  Description of Artificial Sequence: Synthetic oligonucleotide
gcuguccuggaacucaacu

SEQ ID NO: 3138619 - RNA, 19 nt, Artificial Sequence
  Description of Artificial Sequence: Synthetic oligonucleotide
cugccugccucugucuguc

SEQ ID NO: 3138620 - RNA, 19 nt, Artificial Sequence
  Description of Artificial Sequence: Synthetic oligonucleotide
agggaucugccugccucug

SEQ ID NO: 3138621 - RNA, 19 nt, Artificial Sequence
  Description of Artificial Sequence: Synthetic oligonucleotide
agaccaaggcuggccuuga

SEQ ID NO: 3138622 - RNA, 19 nt, Artificial Sequence
  Description of Artificial Sequence: Synthetic oligonucleotide
gccucugucugucucugaa

SEQ ID NO: 3138623 - RNA, 19 nt, Artificial Sequence
  Description of Artificial Sequence: Synthetic oligonucleotide
acucaacucuguagaccaa

SEQ ID NO: 3138624 - RNA, 19 nt, Artificial Sequence
  Description of Artificial Sequence: Synthetic oligonucleotide
ugccugccucugucugucu

SEQ ID NO: 3138625 - RNA, 19 nt, Artificial Sequence
  Description of Artificial Sequence: Synthetic oligonucleotide
gaccaaggcuggccuugaa

SEQ ID NO: 3138626 - RNA, 19 nt, Artificial Sequence
  Description of Artificial Sequence: Synthetic oligonucleotide
gguuaucgagugugugugu

SEQ ID NO: 3138627 - RNA, 19 nt, Artificial Sequence
  Description of Artificial Sequence: Synthetic oligonucleotide
guguguguguguguguguu

SEQ ID NO: 3138628 - RNA, 19 nt, Artificial Sequence
  Description of Artificial Sequence: Synthetic oligonucleotide
guagaccaaggcuggccuu

SEQ ID NO: 3138629 - RNA, 19 nt, Artificial Sequence
  Description of Artificial Sequence: Synthetic oligonucleotide
gccugccucugucugucuc

SEQ ID NO: 3138630 - RNA, 19 nt, Artificial Sequence
  Description of Artificial Sequence: Synthetic oligonucleotide
ccuggaacucaacucugua

SEQ ID NO: 3138631 - RNA, 19 nt, Artificial Sequence
  Description of Artificial Sequence: Synthetic oligonucleotide
gggaucugccugccucugu

SEQ ID NO: 3138632 - RNA, 19 nt, Artificial Sequence
  Description of Artificial Sequence: Synthetic oligonucleotide
cagagggaucugccugccu

SEQ ID NO: 3138633 - RNA, 19 nt, Artificial Sequence
  Description of Artificial Sequence: Synthetic oligonucleotide
cgagugugugugugugugu

SEQ ID NO: 3138634 - RNA, 19 nt, Artificial Sequence
  Description of Artificial Sequence: Synthetic oligonucleotide
uuuuagaaacugcagcugg

SEQ ID NO: 3138635 - RNA, 19 nt, Artificial Sequence
  Description of Artificial Sequence: Synthetic oligonucleotide
agaaacugcagcugggugg

SEQ ID NO: 3138636 - RNA, 19 nt, Artificial Sequence
  Description of Artificial Sequence: Synthetic oligonucleotide
acacuuuuaaucccagcac

SEQ ID NO: 3138637 - RNA, 19 nt, Artificial Sequence
  Description of Artificial Sequence: Synthetic oligonucleotide
acagcccacacacacacac

SEQ ID NO: 3138638 - RNA, 19 nt, Artificial Sequence
  Description of Artificial Sequence: Synthetic oligonucleotide
agcccacacacacacacac

SEQ ID NO: 3138639 - RNA, 19 nt, Artificial Sequence
  Description of Artificial Sequence: Synthetic oligonucleotide
cacacacacacacacacac

SEQ ID NO: 3138640 - RNA, 19 nt, Artificial Sequence
  Description of Artificial Sequence: Synthetic oligonucleotide
acacacuuuuaaucccagc

SEQ ID NO: 3138641 - RNA, 19 nt, Artificial Sequence
  Description of Artificial Sequence: Synthetic oligonucleotide
cacacacacacacacacuc

SEQ ID NO: 3138642 - RNA, 19 nt, Artificial Sequence
  Description of Artificial Sequence: Synthetic oligonucleotide
aacugcagcuggguggugg

SEQ ID NO: 3138643 - RNA, 19 nt, Artificial Sequence
  Description of Artificial Sequence: Synthetic oligonucleotide
gguucccugaguucgaggc

SEQ ID NO: 3138644 - RNA, 19 nt, Artificial Sequence
  Description of Artificial Sequence: Synthetic oligonucleotide
caggacagcccacacacac

SEQ ID NO: 3138645 - RNA, 19 nt, Artificial Sequence
  Description of Artificial Sequence: Synthetic oligonucleotide
cacacacacacacacucuc

SEQ ID NO: 3138646 - RNA, 19 nt, Artificial Sequence
  Description of Artificial Sequence: Synthetic oligonucleotide
cacacacuuuuaaucccag

SEQ ID NO: 3138647 - RNA, 19 nt, Artificial Sequence
  Description of Artificial Sequence: Synthetic oligonucleotide
acacacacacacucucucu

SEQ ID NO: 3138648 - RNA, 19 nt, Artificial Sequence
  Description of Artificial Sequence: Synthetic oligonucleotide
cacacacacacacucucuc

SEQ ID NO: 3138649 - RNA, 19 nt, Artificial Sequence
  Description of Artificial Sequence: Synthetic oligonucleotide
ucucucucucucuacuuuu

SEQ ID NO: 3138650 - RNA, 19 nt, Artificial Sequence
  Description of Artificial Sequence: Synthetic oligonucleotide
acacacacucucucucucu

SEQ ID NO: 3138651 - RNA, 19 nt, Artificial Sequence
  Description of Artificial Sequence: Synthetic oligonucleotide
ggacagcccacacacacac

SEQ ID NO: 3138652 - RNA, 19 nt, Artificial Sequence
  Description of Artificial Sequence: Synthetic oligonucleotide
cacacucucucucucucuc

SEQ ID NO: 3138653 - RNA, 19 nt, Artificial Sequence
  Description of Artificial Sequence: Synthetic oligonucleotide
cccacacacacacacacac

SEQ ID NO: 3138654 - RNA, 19 nt, Artificial Sequence
  Description of Artificial Sequence: Synthetic oligonucleotide
ucucucucucucucucucu

SEQ ID NO: 3138655 - RNA, 19 nt, Artificial Sequence
  Description of Artificial Sequence: Synthetic oligonucleotide
ucucucucucucucucuac

SEQ ID NO: 3138656 - RNA, 19 nt, Artificial Sequence
  Description of Artificial Sequence: Synthetic oligonucleotide
cacuuuuaaucccagcacu

SEQ ID NO: 3138657 - RNA, 19 nt, Artificial Sequence
  Description of Artificial Sequence: Synthetic oligonucleotide
aguuccaggacagcccaca

SEQ ID NO: 3138658 - RNA, 19 nt, Artificial Sequence
  Description of Artificial Sequence: Synthetic oligonucleotide
cacacacucucucucucuc

SEQ ID NO: 3138659 - RNA, 19 nt, Artificial Sequence
  Description of Artificial Sequence: Synthetic oligonucleotide
cucucucucucucucucuc

SEQ ID NO: 3138660 - RNA, 19 nt, Artificial Sequence
  Description of Artificial Sequence: Synthetic oligonucleotide
ucucucucucucucuacuu

SEQ ID NO: 3138661 - RNA, 19 nt, Artificial Sequence
  Description of Artificial Sequence: Synthetic oligonucleotide
acacacucucucucucucu

SEQ ID NO: 3138662 - RNA, 19 nt, Artificial Sequence
  Description of Artificial Sequence: Synthetic oligonucleotide
acucucucucucucucucu

SEQ ID NO: 3138663 - RNA, 19 nt, Artificial Sequence
  Description of Artificial Sequence: Synthetic oligonucleotide
cacucucucucucucucuc

SEQ ID NO: 3138664 - RNA, 19 nt, Artificial Sequence
  Description of Artificial Sequence: Synthetic oligonucleotide
gaaacugcagcuggguggu

SEQ ID NO: 3138665 - RNA, 19 nt, Artificial Sequence
  Description of Artificial Sequence: Synthetic oligonucleotide
acacucucucucucucucu

SEQ ID NO: 3138666 - RNA, 19 nt, Artificial Sequence
  Description of Artificial Sequence: Synthetic oligonucleotide
acacacacacacacucucu

SEQ ID NO: 3138667 - RNA, 19 nt, Artificial Sequence
  Description of Artificial Sequence: Synthetic oligonucleotide
acacacacacacacacucu

SEQ ID NO: 3138668 - RNA, 19 nt, Artificial Sequence
  Description of Artificial Sequence: Synthetic oligonucleotide
acacacacacacacacaca

SEQ ID NO: 3138669 - RNA, 19 nt, Artificial Sequence
  Description of Artificial Sequence: Synthetic oligonucleotide
acacacacacacacacacu

SEQ ID NO: 3138670 - RNA, 19 nt, Artificial Sequence
  Description of Artificial Sequence: Synthetic oligonucleotide
aggacagcccacacacaca

SEQ ID NO: 3138671 - RNA, 19 nt, Artificial Sequence
  Description of Artificial Sequence: Synthetic oligonucleotide
gcacacacuuuuaauccca

SEQ ID NO: 3138672 - RNA, 19 nt, Artificial Sequence
  Description of Artificial Sequence: Synthetic oligonucleotide
cucucucucucucucucua

SEQ ID NO: 3138673 - RNA, 19 nt, Artificial Sequence
  Description of Artificial Sequence: Synthetic oligonucleotide
cucucucucucucucuacu

SEQ ID NO: 3138674 - RNA, 19 nt, Artificial Sequence
  Description of Artificial Sequence: Synthetic oligonucleotide
aaacugcagcuggguggug

SEQ ID NO: 3138675 - RNA, 19 nt, Artificial Sequence
  Description of Artificial Sequence: Synthetic oligonucleotide
cagcccacacacacacaca

SEQ ID NO: 3138676 - RNA, 19 nt, Artificial Sequence
  Description of Artificial Sequence: Synthetic oligonucleotide
gacagcccacacacacaca

SEQ ID NO: 3138677 - RNA, 19 nt, Artificial Sequence
  Description of Artificial Sequence: Synthetic oligonucleotide
cucucucucucucuacuuu

SEQ ID NO: 3138678 - RNA, 19 nt, Artificial Sequence
  Description of Artificial Sequence: Synthetic oligonucleotide
ccacacacacacacacaca

SEQ ID NO: 3138679 - RNA, 19 nt, Artificial Sequence
  Description of Artificial Sequence: Synthetic oligonucleotide
cugcagcugggugguggug

SEQ ID NO: 3138680 - RNA, 19 nt, Artificial Sequence
  Description of Artificial Sequence: Synthetic oligonucleotide
gcccacacacacacacaca

SEQ ID NO: 3138681 - RNA, 19 nt, Artificial Sequence
  Description of Artificial Sequence: Synthetic oligonucleotide
ccaggacagcccacacaca

SEQ ID NO: 3138682 - RNA, 19 nt, Artificial Sequence
  Description of Artificial Sequence: Synthetic oligonucleotide
uuuuauugcaucuggaucg

SEQ ID NO: 3138683 - RNA, 19 nt, Artificial Sequence
  Description of Artificial Sequence: Synthetic oligonucleotide
aauauuuuauugcaucugg

SEQ ID NO: 3138684 - RNA, 19 nt, Artificial Sequence
  Description of Artificial Sequence: Synthetic oligonucleotide
auuuuauugcaucuggauc

SEQ ID NO: 3138685 - RNA, 19 nt, Artificial Sequence
  Description of Artificial Sequence: Synthetic oligonucleotide
ugaauugucccacacaaga

SEQ ID NO: 3138686 - RNA, 19 nt, Artificial Sequence
  Description of Artificial Sequence: Synthetic oligonucleotide
ucuaggaacuacauuauga

SEQ ID NO: 3138687 - RNA, 19 nt, Artificial Sequence
  Description of Artificial Sequence: Synthetic oligonucleotide
agaacaauugcaaaagugg

SEQ ID NO: 3138688 - RNA, 19 nt, Artificial Sequence
  Description of Artificial Sequence: Synthetic oligonucleotide
agaccaacaauguucuugc

SEQ ID NO: 3138689 - RNA, 19 nt, Artificial Sequence
  Description of Artificial Sequence: Synthetic oligonucleotide
uaugaauugucccacacaa

SEQ ID NO: 3138690 - RNA, 19 nt, Artificial Sequence
  Description of Artificial Sequence: Synthetic oligonucleotide
ucuggaucgagucagccag

SEQ ID NO: 3138691 - RNA, 19 nt, Artificial Sequence
  Description of Artificial Sequence: Synthetic oligonucleotide
uuggagaagguaaacaaca

SEQ ID NO: 3138692 - RNA, 19 nt, Artificial Sequence
  Description of Artificial Sequence: Synthetic oligonucleotide
uguccaaacacauuuggug

SEQ ID NO: 3138693 - RNA, 19 nt, Artificial Sequence
  Description of Artificial Sequence: Synthetic oligonucleotide
acuacauuaugaauugucc

SEQ ID NO: 3138694 - RNA, 19 nt, Artificial Sequence
  Description of Artificial Sequence: Synthetic oligonucleotide
auuaugaauugucccacac

SEQ ID NO: 3138695 - RNA, 19 nt, Artificial Sequence
  Description of Artificial Sequence: Synthetic oligonucleotide
aauugucccacacaagaca

SEQ ID NO: 3138696 - RNA, 19 nt, Artificial Sequence
  Description of Artificial Sequence: Synthetic oligonucleotide
uacauuaugaauuguccca

SEQ ID NO: 3138697 - RNA, 19 nt, Artificial Sequence
  Description of Artificial Sequence: Synthetic oligonucleotide
auugcaucuggaucgaguc

SEQ ID NO: 3138698 - RNA, 19 nt, Artificial Sequence
  Description of Artificial Sequence: Synthetic oligonucleotide
gaucgagucagccagacca

SEQ ID NO: 3138699 - RNA, 19 nt, Artificial Sequence
  Description of Artificial Sequence: Synthetic oligonucleotide
uggucuaggaacuacauua

SEQ ID NO: 3138700 - RNA, 19 nt, Artificial Sequence
  Description of Artificial Sequence: Synthetic oligonucleotide
uuuggugacaagaacaauu

SEQ ID NO: 3138701 - RNA, 19 nt, Artificial Sequence
  Description of Artificial Sequence: Synthetic oligonucleotide
aacacauuuggugacaaga

SEQ ID NO: 3138702 - RNA, 19 nt, Artificial Sequence
  Description of Artificial Sequence: Synthetic oligonucleotide
cuacauuaugaauuguccc

SEQ ID NO: 3138703 - RNA, 19 nt, Artificial Sequence
  Description of Artificial Sequence: Synthetic oligonucleotide
aagaacaauugcaaaagug

SEQ ID NO: 3138704 - RNA, 19 nt, Artificial Sequence
  Description of Artificial Sequence: Synthetic oligonucleotide
aagaccaacaauguucuug

SEQ ID NO: 3138705 - RNA, 19 nt, Artificial Sequence
  Description of Artificial Sequence: Synthetic oligonucleotide
ugcaauauuuuauugcauc

SEQ ID NO: 3138706 - RNA, 19 nt, Artificial Sequence
  Description of Artificial Sequence: Synthetic oligonucleotide
aacaauugcaaaagugguc

SEQ ID NO: 3138707 - RNA, 19 nt, Artificial Sequence
  Description of Artificial Sequence: Synthetic oligonucleotide
aaaagaccaacaauguucu

SEQ ID NO: 3138708 - RNA, 19 nt, Artificial Sequence
  Description of Artificial Sequence: Synthetic oligonucleotide
ucuuggagaagguaaacaa

SEQ ID NO: 3138709 - RNA, 19 nt, Artificial Sequence
  Description of Artificial Sequence: Synthetic oligonucleotide
uauuuuauugcaucuggau

SEQ ID NO: 3138710 - RNA, 19 nt, Artificial Sequence
  Description of Artificial Sequence: Synthetic oligonucleotide
auguucuugccuuaccuuc

SEQ ID NO: 3138711 - RNA, 19 nt, Artificial Sequence
  Description of Artificial Sequence: Synthetic oligonucleotide
acaauugcaaaaguggucu

SEQ ID NO: 3138712 - RNA, 19 nt, Artificial Sequence
  Description of Artificial Sequence: Synthetic oligonucleotide
aaaguggucuaggaacuac

SEQ ID NO: 3138713 - RNA, 19 nt, Artificial Sequence
  Description of Artificial Sequence: Synthetic oligonucleotide
aauugcaaaaguggucuag

SEQ ID NO: 3138714 - RNA, 19 nt, Artificial Sequence
  Description of Artificial Sequence: Synthetic oligonucleotide
uuaugaauugucccacaca

SEQ ID NO: 3138715 - RNA, 19 nt, Artificial Sequence
  Description of Artificial Sequence: Synthetic oligonucleotide
gagaagguaaacaacaaaa

SEQ ID NO: 3138716 - RNA, 19 nt, Artificial Sequence
  Description of Artificial Sequence: Synthetic oligonucleotide
aacaauguucuugccuuac

SEQ ID NO: 3138717 - RNA, 19 nt, Artificial Sequence
  Description of Artificial Sequence: Synthetic oligonucleotide
acaauguucuugccuuacc

SEQ ID NO: 3138718 - RNA, 19 nt, Artificial Sequence
  Description of Artificial Sequence: Synthetic oligonucleotide
acauuaugaauugucccac

SEQ ID NO: 3138719 - RNA, 19 nt, Artificial Sequence
  Description of Artificial Sequence: Synthetic oligonucleotide
gcaaaaguggucuaggaac

SEQ ID NO: 3138720 - RNA, 19 nt, Artificial Sequence
  Description of Artificial Sequence: Synthetic oligonucleotide
ucuugccuuaccuuccucc

SEQ ID NO: 3138721 - RNA, 19 nt, Artificial Sequence
  Description of Artificial Sequence: Synthetic oligonucleotide
cuuggagaagguaaacaac

SEQ ID NO: 3138722 - RNA, 19 nt, Artificial Sequence
  Description of Artificial Sequence: Synthetic oligonucleotide
acaacugcacagcaauguc

SEQ ID NO: 3138723 - RNA, 19 nt, Artificial Sequence
  Description of Artificial Sequence: Synthetic oligonucleotide
auugcaaaaguggucuagg

SEQ ID NO: 3138724 - RNA, 19 nt, Artificial Sequence
  Description of Artificial Sequence: Synthetic oligonucleotide
uguucuugccuuaccuucc

SEQ ID NO: 3138725 - RNA, 19 nt, Artificial Sequence
  Description of Artificial Sequence: Synthetic oligonucleotide
ugcaucuggaucgagucag

SEQ ID NO: 3138726 - RNA, 19 nt, Artificial Sequence
  Description of Artificial Sequence: Synthetic oligonucleotide
uauugcaucuggaucgagu

SEQ ID NO: 3138727 - RNA, 19 nt, Artificial Sequence
  Description of Artificial Sequence: Synthetic oligonucleotide
ggaacuacauuaugaauug

SEQ ID NO: 3138728 - RNA, 19 nt, Artificial Sequence
  Description of Artificial Sequence: Synthetic oligonucleotide
cacagcaauguccaaacac

SEQ ID NO: 3138729 - RNA, 19 nt, Artificial Sequence
  Description of Artificial Sequence: Synthetic oligonucleotide
ugcaaaaguggucuaggaa

SEQ ID NO: 3138730 - RNA, 19 nt, Artificial Sequence
  Description of Artificial Sequence: Synthetic oligonucleotide
auugucccacacaagacac

SEQ ID NO: 3138731 - RNA, 19 nt, Artificial Sequence
  Description of Artificial Sequence: Synthetic oligonucleotide
aauguucuugccuuaccuu

SEQ ID NO: 3138732 - RNA, 19 nt, Artificial Sequence
  Description of Artificial Sequence: Synthetic oligonucleotide
acauuuggugacaagaaca

SEQ ID NO: 3138733 - RNA, 19 nt, Artificial Sequence
  Description of Artificial Sequence: Synthetic oligonucleotide
uuaccuuccucccaccccu

SEQ ID NO: 3138734 - RNA, 19 nt, Artificial Sequence
  Description of Artificial Sequence: Synthetic oligonucleotide
ugcacagcaauguccaaac

SEQ ID NO: 3138735 - RNA, 19 nt, Artificial Sequence
  Description of Artificial Sequence: Synthetic oligonucleotide
accaacaauguucuugccu

SEQ ID NO: 3138736 - RNA, 19 nt, Artificial Sequence
  Description of Artificial Sequence: Synthetic oligonucleotide
aaacacauuuggugacaag

SEQ ID NO: 3138737 - RNA, 19 nt, Artificial Sequence
  Description of Artificial Sequence: Synthetic oligonucleotide
caacugcacagcaaugucc

SEQ ID NO: 3138738 - RNA, 19 nt, Artificial Sequence
  Description of Artificial Sequence: Synthetic oligonucleotide
aggaacuacauuaugaauu

SEQ ID NO: 3138739 - RNA, 19 nt, Artificial Sequence
  Description of Artificial Sequence: Synthetic oligonucleotide
aacugcacagcaaugucca

SEQ ID NO: 3138740 - RNA, 19 nt, Artificial Sequence
  Description of Artificial Sequence: Synthetic oligonucleotide
uccaaacacauuuggugac

SEQ ID NO: 3138741 - RNA, 19 nt, Artificial Sequence
  Description of Artificial Sequence: Synthetic oligonucleotide
guccaaacacauuugguga

SEQ ID NO: 3138742 - RNA, 19 nt, Artificial Sequence
  Description of Artificial Sequence: Synthetic oligonucleotide
cuugccuuaccuuccuccc

SEQ ID NO: 3138743 - RNA, 19 nt, Artificial Sequence
  Description of Artificial Sequence: Synthetic oligonucleotide
ugacaagaacaauugcaaa

SEQ ID NO: 3138744 - RNA, 19 nt, Artificial Sequence
  Description of Artificial Sequence: Synthetic oligonucleotide
gaccaucccagucuuggag

SEQ ID NO: 3138745 - RNA, 19 nt, Artificial Sequence
  Description of Artificial Sequence: Synthetic oligonucleotide
caauauuuuauugcaucug

SEQ ID NO: 3138746 - RNA, 19 nt, Artificial Sequence
  Description of Artificial Sequence: Synthetic oligonucleotide
cuaggaacuacauuaugaa

SEQ ID NO: 3138747 - RNA, 19 nt, Artificial Sequence
  Description of Artificial Sequence: Synthetic oligonucleotide
uggugacaagaacaauugc

SEQ ID NO: 3138748 - RNA, 19 nt, Artificial Sequence
  Description of Artificial Sequence: Synthetic oligonucleotide
acagcaauguccaaacaca

SEQ ID NO: 3138749 - RNA, 19 nt, Artificial Sequence
  Description of Artificial Sequence: Synthetic oligonucleotide
uggagaagguaaacaacaa

SEQ ID NO: 3138750 - RNA, 19 nt, Artificial Sequence
  Description of Artificial Sequence: Synthetic oligonucleotide
cacauuuggugacaagaac

SEQ ID NO: 3138751 - RNA, 19 nt, Artificial Sequence
  Description of Artificial Sequence: Synthetic oligonucleotide
uugcaaaaguggucuagga

SEQ ID NO: 3138752 - RNA, 19 nt, Artificial Sequence
  Description of Artificial Sequence: Synthetic oligonucleotide
uaggaacuacauuaugaau

SEQ ID NO: 3138753 - RNA, 19 nt, Artificial Sequence
  Description of Artificial Sequence: Synthetic oligonucleotide
cagaccaucccagucuugg

SEQ ID NO: 3138754 - RNA, 19 nt, Artificial Sequence
  Description of Artificial Sequence: Synthetic oligonucleotide
gaauugucccacacaagac

SEQ ID NO: 3138755 - RNA, 19 nt, Artificial Sequence
  Description of Artificial Sequence: Synthetic oligonucleotide
uuuauugcaucuggaucga

SEQ ID NO: 3138756 - RNA, 19 nt, Artificial Sequence
  Description of Artificial Sequence: Synthetic oligonucleotide
agucuuggagaagguaaac

SEQ ID NO: 3138757 - RNA, 19 nt, Artificial Sequence
  Description of Artificial Sequence: Synthetic oligonucleotide
gagucagccagaccauccc

SEQ ID NO: 3138758 - RNA, 19 nt, Artificial Sequence
  Description of Artificial Sequence: Synthetic oligonucleotide
ugccuuaccuuccucccac

SEQ ID NO: 3138759 - RNA, 19 nt, Artificial Sequence
  Description of Artificial Sequence: Synthetic oligonucleotide
auauuuuauugcaucugga

SEQ ID NO: 3138760 - RNA, 19 nt, Artificial Sequence
  Description of Artificial Sequence: Synthetic oligonucleotide
gugacaagaacaauugcaa

SEQ ID NO: 3138761 - RNA, 19 nt, Artificial Sequence
  Description of Artificial Sequence: Synthetic oligonucleotide
gaacaauugcaaaaguggu

SEQ ID NO: 3138762 - RNA, 19 nt, Artificial Sequence
  Description of Artificial Sequence: Synthetic oligonucleotide
agccagaccaucccagucu

SEQ ID NO: 3138763 - RNA, 19 nt, Artificial Sequence
  Description of Artificial Sequence: Synthetic oligonucleotide
uugcaucuggaucgaguca

SEQ ID NO: 3138764 - RNA, 19 nt, Artificial Sequence
  Description of Artificial Sequence: Synthetic oligonucleotide
gucuaggaacuacauuaug

SEQ ID NO: 3138765 - RNA, 19 nt, Artificial Sequence
  Description of Artificial Sequence: Synthetic oligonucleotide
aucuggaucgagucagcca

SEQ ID NO: 3138766 - RNA, 19 nt, Artificial Sequence
  Description of Artificial Sequence: Synthetic oligonucleotide
aaguggucuaggaacuaca

SEQ ID NO: 3138767 - RNA, 19 nt, Artificial Sequence
  Description of Artificial Sequence: Synthetic oligonucleotide
uugccuuaccuuccuccca

SEQ ID NO: 3138768 - RNA, 19 nt, Artificial Sequence
  Description of Artificial Sequence: Synthetic oligonucleotide
uugucccacacaagacaca

SEQ ID NO: 3138769 - RNA, 19 nt, Artificial Sequence
  Description of Artificial Sequence: Synthetic oligonucleotide
caaaaguggucuaggaacu

SEQ ID NO: 3138770 - RNA, 19 nt, Artificial Sequence
  Description of Artificial Sequence: Synthetic oligonucleotide
ucagccagaccaucccagu

SEQ ID NO: 3138771 - RNA, 19 nt, Artificial Sequence
  Description of Artificial Sequence: Synthetic oligonucleotide
accuuccucccaccccugc

SEQ ID NO: 3138772 - RNA, 19 nt, Artificial Sequence
  Description of Artificial Sequence: Synthetic oligonucleotide
agucagccagaccauccca

SEQ ID NO: 3138773 - RNA, 19 nt, Artificial Sequence
  Description of Artificial Sequence: Synthetic oligonucleotide
acacauuuggugacaagaa

SEQ ID NO: 3138774 - RNA, 19 nt, Artificial Sequence
  Description of Artificial Sequence: Synthetic oligonucleotide
gucuuggagaagguaaaca

SEQ ID NO: 3138775 - RNA, 19 nt, Artificial Sequence
  Description of Artificial Sequence: Synthetic oligonucleotide
cauuaugaauugucccaca

SEQ ID NO: 3138776 - RNA, 19 nt, Artificial Sequence
  Description of Artificial Sequence: Synthetic oligonucleotide
augaauugucccacacaag

SEQ ID NO: 3138777 - RNA, 19 nt, Artificial Sequence
  Description of Artificial Sequence: Synthetic oligonucleotide
gaccaacaauguucuugcc

SEQ ID NO: 3138778 - RNA, 19 nt, Artificial Sequence
  Description of Artificial Sequence: Synthetic oligonucleotide
aaaaguggucuaggaacua

SEQ ID NO: 3138779 - RNA, 19 nt, Artificial Sequence
  Description of Artificial Sequence: Synthetic oligonucleotide
gcaauguccaaacacauuu

SEQ ID NO: 3138780 - RNA, 19 nt, Artificial Sequence
  Description of Artificial Sequence: Synthetic oligonucleotide
gcaauauuuuauugcaucu

SEQ ID NO: 3138781 - RNA, 19 nt, Artificial Sequence
  Description of Artificial Sequence: Synthetic oligonucleotide
uuauugcaucuggaucgag

SEQ ID NO: 3138782 - RNA, 19 nt, Artificial Sequence
  Description of Artificial Sequence: Synthetic oligonucleotide
auguccaaacacauuuggu

SEQ ID NO: 3138783 - RNA, 19 nt, Artificial Sequence
  Description of Artificial Sequence: Synthetic oligonucleotide
ggagaagguaaacaacaaa

SEQ ID NO: 3138784 - RNA, 19 nt, Artificial Sequence
  Description of Artificial Sequence: Synthetic oligonucleotide
aaagaccaacaauguucuu

SEQ ID NO: 3138785 - RNA, 19 nt, Artificial Sequence
  Description of Artificial Sequence: Synthetic oligonucleotide
gucagccagaccaucccag

SEQ ID NO: 3138786 - RNA, 19 nt, Artificial Sequence
  Description of Artificial Sequence: Synthetic oligonucleotide
uuccucccaccccugcccc

SEQ ID NO: 3138787 - RNA, 19 nt, Artificial Sequence
  Description of Artificial Sequence: Synthetic oligonucleotide
caauguucuugccuuaccu

SEQ ID NO: 3138788 - RNA, 19 nt, Artificial Sequence
  Description of Artificial Sequence: Synthetic oligonucleotide
uggaucgagucagccagac

SEQ ID NO: 3138789 - RNA, 19 nt, Artificial Sequence
  Description of Artificial Sequence: Synthetic oligonucleotide
agaccaucccagucuugga

SEQ ID NO: 3138790 - RNA, 19 nt, Artificial Sequence
  Description of Artificial Sequence: Synthetic oligonucleotide
aguggucuaggaacuacau

SEQ ID NO: 3138791 - RNA, 19 nt, Artificial Sequence
  Description of Artificial Sequence: Synthetic oligonucleotide
cagucuuggagaagguaaa

SEQ ID NO: 3138792 - RNA, 19 nt, Artificial Sequence
  Description of Artificial Sequence: Synthetic oligonucleotide
caagaacaauugcaaaagu

SEQ ID NO: 3138793 - RNA, 19 nt, Artificial Sequence
  Description of Artificial Sequence: Synthetic oligonucleotide
ccagucuuggagaagguaa

SEQ ID NO: 3138794 - RNA, 19 nt, Artificial Sequence
  Description of Artificial Sequence: Synthetic oligonucleotide
uucuugccuuaccuuccuc

SEQ ID NO: 3138795 - RNA, 19 nt, Artificial Sequence
  Description of Artificial Sequence: Synthetic oligonucleotide
ucccagucuuggagaaggu

SEQ ID NO: 3138796 - RNA, 19 nt, Artificial Sequence
  Description of Artificial Sequence: Synthetic oligonucleotide
caccccugccccacaacug

SEQ ID NO: 3138797 - RNA, 19 nt, Artificial Sequence
  Description of Artificial Sequence: Synthetic oligonucleotide
cagccagaccaucccaguc

SEQ ID NO: 3138798 - RNA, 19 nt, Artificial Sequence
  Description of Artificial Sequence: Synthetic oligonucleotide
caaacacauuuggugacaa

SEQ ID NO: 3138799 - RNA, 19 nt, Artificial Sequence
  Description of Artificial Sequence: Synthetic oligonucleotide
cacaacugcacagcaaugu

SEQ ID NO: 3138800 - RNA, 19 nt, Artificial Sequence
  Description of Artificial Sequence: Synthetic oligonucleotide
agcaauguccaaacacauu

SEQ ID NO: 3138801 - RNA, 19 nt, Artificial Sequence
  Description of Artificial Sequence: Synthetic oligonucleotide
ucgagucagccagaccauc

SEQ ID NO: 3138802 - RNA, 19 nt, Artificial Sequence
  Description of Artificial Sequence: Synthetic oligonucleotide
gaacuacauuaugaauugu

SEQ ID NO: 3138803 - RNA, 19 nt, Artificial Sequence
  Description of Artificial Sequence: Synthetic oligonucleotide
ggaucgagucagccagacc

SEQ ID NO: 3138804 - RNA, 19 nt, Artificial Sequence
  Description of Artificial Sequence: Synthetic oligonucleotide
caucccagucuuggagaag

SEQ ID NO: 3138805 - RNA, 19 nt, Artificial Sequence
  Description of Artificial Sequence: Synthetic oligonucleotide
caauugcaaaaguggucua

SEQ ID NO: 3138806 - RNA, 19 nt, Artificial Sequence
  Description of Artificial Sequence: Synthetic oligonucleotide
cagcaauguccaaacacau

SEQ ID NO: 3138807 - RNA, 19 nt, Artificial Sequence
  Description of Artificial Sequence: Synthetic oligonucleotide
caacaauguucuugccuua

SEQ ID NO: 3138808 - RNA, 19 nt, Artificial Sequence
  Description of Artificial Sequence: Synthetic oligonucleotide
guucuugccuuaccuuccu

SEQ ID NO: 3138809 - RNA, 19 nt, Artificial Sequence
  Description of Artificial Sequence: Synthetic oligonucleotide
aucgagucagccagaccau

SEQ ID NO: 3138810 - RNA, 19 nt, Artificial Sequence
  Description of Artificial Sequence: Synthetic oligonucleotide
ccacaacugcacagcaaug

SEQ ID NO: 3138811 - RNA, 19 nt, Artificial Sequence
  Description of Artificial Sequence: Synthetic oligonucleotide
uccucccaccccugcccca

SEQ ID NO: 3138812 - RNA, 19 nt, Artificial Sequence
  Description of Artificial Sequence: Synthetic oligonucleotide
cuggaucgagucagccaga

SEQ ID NO: 3138813 - RNA, 19 nt, Artificial Sequence
  Description of Artificial Sequence: Synthetic oligonucleotide
guggucuaggaacuacauu

SEQ ID NO: 3138814 - RNA, 19 nt, Artificial Sequence
  Description of Artificial Sequence: Synthetic oligonucleotide
ccaaacacauuuggugaca

SEQ ID NO: 3138815 - RNA, 19 nt, Artificial Sequence
  Description of Artificial Sequence: Synthetic oligonucleotide
gcacagcaauguccaaaca

SEQ ID NO: 3138816 - RNA, 19 nt, Artificial Sequence
  Description of Artificial Sequence: Synthetic oligonucleotide
ggucuaggaacuacauuau

SEQ ID NO: 3138817 - RNA, 19 nt, Artificial Sequence
  Description of Artificial Sequence: Synthetic oligonucleotide
gccccacaacugcacagca

SEQ ID NO: 3138818 - RNA, 19 nt, Artificial Sequence
  Description of Artificial Sequence: Synthetic oligonucleotide
ccaucccagucuuggagaa

SEQ ID NO: 3138819 - RNA, 19 nt, Artificial Sequence
  Description of Artificial Sequence: Synthetic oligonucleotide
cccugccccacaacugcac

SEQ ID NO: 3138820 - RNA, 19 nt, Artificial Sequence
  Description of Artificial Sequence: Synthetic oligonucleotide
ccagaccaucccagucuug

SEQ ID NO: 3138821 - RNA, 19 nt, Artificial Sequence
  Description of Artificial Sequence: Synthetic oligonucleotide
ccccacaacugcacagcaa

SEQ ID NO: 3138822 - RNA, 19 nt, Artificial Sequence
  Description of Artificial Sequence: Synthetic oligonucleotide
ccucccaccccugccccac

SEQ ID NO: 3138823 - RNA, 19 nt, Artificial Sequence
  Description of Artificial Sequence: Synthetic oligonucleotide
ccaccccugccccacaacu

SEQ ID NO: 3138824 - RNA, 19 nt, Artificial Sequence
  Description of Artificial Sequence: Synthetic oligonucleotide
cccaccccugccccacaac

SEQ ID NO: 3138825 - RNA, 19 nt, Artificial Sequence
  Description of Artificial Sequence: Synthetic oligonucleotide
cccagucuuggagaaggua

SEQ ID NO: 3138826 - RNA, 19 nt, Artificial Sequence
  Description of Artificial Sequence: Synthetic oligonucleotide
cucccaccccugccccaca

SEQ ID NO: 3138827 - RNA, 19 nt, Artificial Sequence
  Description of Artificial Sequence: Synthetic oligonucleotide
ccccugccccacaacugca

SEQ ID NO: 3138828 - RNA, 19 nt, Artificial Sequence
  Description of Artificial Sequence: Synthetic oligonucleotide
aauauuuacaauucauaac

SEQ ID NO: 3138829 - RNA, 19 nt, Artificial Sequence
  Description of Artificial Sequence: Synthetic oligonucleotide
caguguaauaauuuuaugg

SEQ ID NO: 3138830 - RNA, 19 nt, Artificial Sequence
  Description of Artificial Sequence: Synthetic oligonucleotide
acaugaacuguauugaagg

SEQ ID NO: 3138831 - RNA, 19 nt, Artificial Sequence
  Description of Artificial Sequence: Synthetic oligonucleotide
gaaaacacuaaauauuuac

SEQ ID NO: 3138832 - RNA, 19 nt, Artificial Sequence
  Description of Artificial Sequence: Synthetic oligonucleotide
uuuacaauucauaacagua

SEQ ID NO: 3138833 - RNA, 19 nt, Artificial Sequence
  Description of Artificial Sequence: Synthetic oligonucleotide
ucaaaugacccuuucacag

SEQ ID NO: 3138834 - RNA, 19 nt, Artificial Sequence
  Description of Artificial Sequence: Synthetic oligonucleotide
aauuuuaugguuuggggau

SEQ ID NO: 3138835 - RNA, 19 nt, Artificial Sequence
  Description of Artificial Sequence: Synthetic oligonucleotide
aguguaauaauuuuauggu

SEQ ID NO: 3138836 - RNA, 19 nt, Artificial Sequence
  Description of Artificial Sequence: Synthetic oligonucleotide
uuacaauucauaacaguag

SEQ ID NO: 3138837 - RNA, 19 nt, Artificial Sequence
  Description of Artificial Sequence: Synthetic oligonucleotide
aaacacuaaauauuuacaa

SEQ ID NO: 3138838 - RNA, 19 nt, Artificial Sequence
  Description of Artificial Sequence: Synthetic oligonucleotide
uacaauucauaacaguagc

SEQ ID NO: 3138839 - RNA, 19 nt, Artificial Sequence
  Description of Artificial Sequence: Synthetic oligonucleotide
gaagggaauauaugcaacg

SEQ ID NO: 3138840 - RNA, 19 nt, Artificial Sequence
  Description of Artificial Sequence: Synthetic oligonucleotide
uguaauaauuuuaugguuu

SEQ ID NO: 3138841 - RNA, 19 nt, Artificial Sequence
  Description of Artificial Sequence: Synthetic oligonucleotide
uaaauauuuacaauucaua

SEQ ID NO: 3138842 - RNA, 19 nt, Artificial Sequence
  Description of Artificial Sequence: Synthetic oligonucleotide
uuuaugggucaaaugaccc

SEQ ID NO: 3138843 - RNA, 19 nt, Artificial Sequence
  Description of Artificial Sequence: Synthetic oligonucleotide
uaugguuuggggaucacca

SEQ ID NO: 3138844 - RNA, 19 nt, Artificial Sequence
  Description of Artificial Sequence: Synthetic oligonucleotide
aacacuaaauauuuacaau

SEQ ID NO: 3138845 - RNA, 19 nt, Artificial Sequence
  Description of Artificial Sequence: Synthetic oligonucleotide
cacaacaugaacuguauug

SEQ ID NO: 3138846 - RNA, 19 nt, Artificial Sequence
  Description of Artificial Sequence: Synthetic oligonucleotide
cacugaagggaauauaugc

SEQ ID NO: 3138847 - RNA, 19 nt, Artificial Sequence
  Description of Artificial Sequence: Synthetic oligonucleotide
agcauuaggacguugagaa

SEQ ID NO: 3138848 - RNA, 19 nt, Artificial Sequence
  Description of Artificial Sequence: Synthetic oligonucleotide
acacuaaauauuuacaauu

SEQ ID NO: 3138849 - RNA, 19 nt, Artificial Sequence
  Description of Artificial Sequence: Synthetic oligonucleotide
cuuuaugggucaaaugacc

SEQ ID NO: 3138850 - RNA, 19 nt, Artificial Sequence
  Description of Artificial Sequence: Synthetic oligonucleotide
uaucggaaaacacuaaaua

SEQ ID NO: 3138851 - RNA, 19 nt, Artificial Sequence
  Description of Artificial Sequence: Synthetic oligonucleotide
cauuaggacguugagaacc

SEQ ID NO: 3138852 - RNA, 19 nt, Artificial Sequence
  Description of Artificial Sequence: Synthetic oligonucleotide
aagggaauauaugcaacgg

SEQ ID NO: 3138853 - RNA, 19 nt, Artificial Sequence
  Description of Artificial Sequence: Synthetic oligonucleotide
guaauaauuuuaugguuug

SEQ ID NO: 3138854 - RNA, 19 nt, Artificial Sequence
  Description of Artificial Sequence: Synthetic oligonucleotide
uugagaaccacugaaggga

SEQ ID NO: 3138855 - RNA, 19 nt, Artificial Sequence
  Description of Artificial Sequence: Synthetic oligonucleotide
guugagaaccacugaaggg

SEQ ID NO: 3138856 - RNA, 19 nt, Artificial Sequence
  Description of Artificial Sequence: Synthetic oligonucleotide
ucggaaaacacuaaauauu

SEQ ID NO: 3138857 - RNA, 19 nt, Artificial Sequence
  Description of Artificial Sequence: Synthetic oligonucleotide
auuuacaauucauaacagu

SEQ ID NO: 3138858 - RNA, 19 nt, Artificial Sequence
  Description of Artificial Sequence: Synthetic oligonucleotide
aucggaaaacacuaaauau

SEQ ID NO: 3138859 - RNA, 19 nt, Artificial Sequence
  Description of Artificial Sequence: Synthetic oligonucleotide
aacaugaacuguauugaag

SEQ ID NO: 3138860 - RNA, 19 nt, Artificial Sequence
  Description of Artificial Sequence: Synthetic oligonucleotide
agggucacagcauuaggac

SEQ ID NO: 3138861 - RNA, 19 nt, Artificial Sequence
  Description of Artificial Sequence: Synthetic oligonucleotide
guauugaagggucacagca

SEQ ID NO: 3138862 - RNA, 19 nt, Artificial Sequence
  Description of Artificial Sequence: Synthetic oligonucleotide
acaggggucaccuaaggcu

SEQ ID NO: 3138863 - RNA, 19 nt, Artificial Sequence
  Description of Artificial Sequence: Synthetic oligonucleotide
ucaccuaaggcuaucggaa

SEQ ID NO: 3138864 - RNA, 19 nt, Artificial Sequence
  Description of Artificial Sequence: Synthetic oligonucleotide
aaggcuaucggaaaacacu

SEQ ID NO: 3138865 - RNA, 19 nt, Artificial Sequence
  Description of Artificial Sequence: Synthetic oligonucleotide
ugaagggaauauaugcaac

SEQ ID NO: 3138866 - RNA, 19 nt, Artificial Sequence
  Description of Artificial Sequence: Synthetic oligonucleotide
caugaacuguauugaaggg

SEQ ID NO: 3138867 - RNA, 19 nt, Artificial Sequence
  Description of Artificial Sequence: Synthetic oligonucleotide
caaaugacccuuucacagg

SEQ ID NO: 3138868 - RNA, 19 nt, Artificial Sequence
  Description of Artificial Sequence: Synthetic oligonucleotide
uguauugaagggucacagc

SEQ ID NO: 3138869 - RNA, 19 nt, Artificial Sequence
  Description of Artificial Sequence: Synthetic oligonucleotide
acaacaugaacuguauuga

SEQ ID NO: 3138870 - RNA, 19 nt, Artificial Sequence
  Description of Artificial Sequence: Synthetic oligonucleotide
uaaggcuaucggaaaacac

SEQ ID NO: 3138871 - RNA, 19 nt, Artificial Sequence
  Description of Artificial Sequence: Synthetic oligonucleotide
ugaagggucacagcauuag

SEQ ID NO: 3138872 - RNA, 19 nt, Artificial Sequence
  Description of Artificial Sequence: Synthetic oligonucleotide
ggucaaaugacccuuucac

SEQ ID NO: 3138873 - RNA, 19 nt, Artificial Sequence
  Description of Artificial Sequence: Synthetic oligonucleotide
uuaugggucaaaugacccu

SEQ ID NO: 3138874 - RNA, 19 nt, Artificial Sequence
  Description of Artificial Sequence: Synthetic oligonucleotide
ugguuuggggaucaccaca

SEQ ID NO: 3138875 - RNA, 19 nt, Artificial Sequence
  Description of Artificial Sequence: Synthetic oligonucleotide
aagggucacagcauuagga

SEQ ID NO: 3138876 - RNA, 19 nt, Artificial Sequence
  Description of Artificial Sequence: Synthetic oligonucleotide
uauugaagggucacagcau

SEQ ID NO: 3138877 - RNA, 19 nt, Artificial Sequence
  Description of Artificial Sequence: Synthetic oligonucleotide
ucacaggggucaccuaagg

SEQ ID NO: 3138878 - RNA, 19 nt, Artificial Sequence
  Description of Artificial Sequence: Synthetic oligonucleotide
gacguugagaaccacugaa

SEQ ID NO: 3138879 - RNA, 19 nt, Artificial Sequence
  Description of Artificial Sequence: Synthetic oligonucleotide
agggaauauaugcaacgga

SEQ ID NO: 3138880 - RNA, 19 nt, Artificial Sequence
  Description of Artificial Sequence: Synthetic oligonucleotide
cuguauugaagggucacag

SEQ ID NO: 3138881 - RNA, 19 nt, Artificial Sequence
  Description of Artificial Sequence: Synthetic oligonucleotide
acagcauuaggacguugag

SEQ ID NO: 3138882 - RNA, 19 nt, Artificial Sequence
  Description of Artificial Sequence: Synthetic oligonucleotide
augguuuggggaucaccac

SEQ ID NO: 3138883 - RNA, 19 nt, Artificial Sequence
  Description of Artificial Sequence: Synthetic oligonucleotide
uagcaguguaauaauuuua

SEQ ID NO: 3138884 - RNA, 19 nt, Artificial Sequence
  Description of Artificial Sequence: Synthetic oligonucleotide
uuuuaugguuuggggauca

SEQ ID NO: 3138885 - RNA, 19 nt, Artificial Sequence
  Description of Artificial Sequence: Synthetic oligonucleotide
auugaagggucacagcauu

SEQ ID NO: 3138886 - RNA, 19 nt, Artificial Sequence
  Description of Artificial Sequence: Synthetic oligonucleotide
acugaagggaauauaugca

SEQ ID NO: 3138887 - RNA, 19 nt, Artificial Sequence
  Description of Artificial Sequence: Synthetic oligonucleotide
auuuuaugguuuggggauc

SEQ ID NO: 3138888 - RNA, 19 nt, Artificial Sequence
  Description of Artificial Sequence: Synthetic oligonucleotide
augaacuguauugaagggu

SEQ ID NO: 3138889 - RNA, 19 nt, Artificial Sequence
  Description of Artificial Sequence: Synthetic oligonucleotide
ugagaaccacugaagggaa

SEQ ID NO: 3138890 - RNA, 19 nt, Artificial Sequence
  Description of Artificial Sequence: Synthetic oligonucleotide
uuaugguuuggggaucacc

SEQ ID NO: 3138891 - RNA, 19 nt, Artificial Sequence
  Description of Artificial Sequence: Synthetic oligonucleotide
agcaguguaauaauuuuau

SEQ ID NO: 3138892 - RNA, 19 nt, Artificial Sequence
  Description of Artificial Sequence: Synthetic oligonucleotide
guuaugaaguagcagugua

SEQ ID NO: 3138893 - RNA, 19 nt, Artificial Sequence
  Description of Artificial Sequence: Synthetic oligonucleotide
gucaaaugacccuuucaca

SEQ ID NO: 3138894 - RNA, 19 nt, Artificial Sequence
  Description of Artificial Sequence: Synthetic oligonucleotide
acaauucauaacaguagca

SEQ ID NO: 3138895 - RNA, 19 nt, Artificial Sequence
  Description of Artificial Sequence: Synthetic oligonucleotide
gucaccuaaggcuaucgga

SEQ ID NO: 3138896 - RNA, 19 nt, Artificial Sequence
  Description of Artificial Sequence: Synthetic oligonucleotide
aguagcaguguaauaauuu

SEQ ID NO: 3138897 - RNA, 19 nt, Artificial Sequence
  Description of Artificial Sequence: Synthetic oligonucleotide
cugaagggaauauaugcaa

SEQ ID NO: 3138898 - RNA, 19 nt, Artificial Sequence
  Description of Artificial Sequence: Synthetic oligonucleotide
aggacguugagaaccacug

SEQ ID NO: 3138899 - RNA, 19 nt, Artificial Sequence
  Description of Artificial Sequence: Synthetic oligonucleotide
uaugggucaaaugacccuu

SEQ ID NO: 3138900 - RNA, 19 nt, Artificial Sequence
  Description of Artificial Sequence: Synthetic oligonucleotide
gaucaccacaacaugaacu

SEQ ID NO: 3138901 - RNA, 19 nt, Artificial Sequence
  Description of Artificial Sequence: Synthetic oligonucleotide
gggucacagcauuaggacg

SEQ ID NO: 3138902 - RNA, 19 nt, Artificial Sequence
  Description of Artificial Sequence: Synthetic oligonucleotide
accacugaagggaauauau

SEQ ID NO: 3138903 - RNA, 19 nt, Artificial Sequence
  Description of Artificial Sequence: Synthetic oligonucleotide
cccuuuaugggucaaauga

SEQ ID NO: 3138904 - RNA, 19 nt, Artificial Sequence
  Description of Artificial Sequence: Synthetic oligonucleotide
cguugagaaccacugaagg

SEQ ID NO: 3138905 - RNA, 19 nt, Artificial Sequence
  Description of Artificial Sequence: Synthetic oligonucleotide
ccuuuaugggucaaaugac

SEQ ID NO: 3138906 - RNA, 19 nt, Artificial Sequence
  Description of Artificial Sequence: Synthetic oligonucleotide
cacaggggucaccuaaggc

SEQ ID NO: 3138907 - RNA, 19 nt, Artificial Sequence
  Description of Artificial Sequence: Synthetic oligonucleotide
acguugagaaccacugaag

SEQ ID NO: 3138908 - RNA, 19 nt, Artificial Sequence
  Description of Artificial Sequence: Synthetic oligonucleotide
auuaggacguugagaacca

SEQ ID NO: 3138909 - RNA, 19 nt, Artificial Sequence
  Description of Artificial Sequence: Synthetic oligonucleotide
accuaaggcuaucggaaaa

SEQ ID NO: 3138910 - RNA, 19 nt, Artificial Sequence
  Description of Artificial Sequence: Synthetic oligonucleotide
uugaagggucacagcauua

SEQ ID NO: 3138911 - RNA, 19 nt, Artificial Sequence
  Description of Artificial Sequence: Synthetic oligonucleotide
acuguauugaagggucaca

SEQ ID NO: 3138912 - RNA, 19 nt, Artificial Sequence
  Description of Artificial Sequence: Synthetic oligonucleotide
aaguagcaguguaauaauu

SEQ ID NO: 3138913 - RNA, 19 nt, Artificial Sequence
  Description of Artificial Sequence: Synthetic oligonucleotide
gcaguguaauaauuuuaug

SEQ ID NO: 3138914 - RNA, 19 nt, Artificial Sequence
  Description of Artificial Sequence: Synthetic oligonucleotide
agaaccacugaagggaaua

SEQ ID NO: 3138915 - RNA, 19 nt, Artificial Sequence
  Description of Artificial Sequence: Synthetic oligonucleotide
ugggucaaaugacccuuuc

SEQ ID NO: 3138916 - RNA, 19 nt, Artificial Sequence
  Description of Artificial Sequence: Synthetic oligonucleotide
ggucaccuaaggcuaucgg

SEQ ID NO: 3138917 - RNA, 19 nt, Artificial Sequence
  Description of Artificial Sequence: Synthetic oligonucleotide
guguaauaauuuuaugguu

SEQ ID NO: 3138918 - RNA, 19 nt, Artificial Sequence
  Description of Artificial Sequence: Synthetic oligonucleotide
cuaucggaaaacacuaaau

SEQ ID NO: 3138919 - RNA, 19 nt, Artificial Sequence
  Description of Artificial Sequence: Synthetic oligonucleotide
caacaugaacuguauugaa

SEQ ID NO: 3138920 - RNA, 19 nt, Artificial Sequence
  Description of Artificial Sequence: Synthetic oligonucleotide
cuaaggcuaucggaaaaca

SEQ ID NO: 3138921 - RNA, 19 nt, Artificial Sequence
  Description of Artificial Sequence: Synthetic oligonucleotide
gcuaucggaaaacacuaaa

SEQ ID NO: 3138922 - RNA, 19 nt, Artificial Sequence
  Description of Artificial Sequence: Synthetic oligonucleotide
ucaccacaacaugaacugu

SEQ ID NO: 3138923 - RNA, 19 nt, Artificial Sequence
  Description of Artificial Sequence: Synthetic oligonucleotide
caccacaacaugaacugua

SEQ ID NO: 3138924 - RNA, 19 nt, Artificial Sequence
  Description of Artificial Sequence: Synthetic oligonucleotide
aaccacugaagggaauaua

SEQ ID NO: 3138925 - RNA, 19 nt, Artificial Sequence
  Description of Artificial Sequence: Synthetic oligonucleotide
aggcuaucggaaaacacua

SEQ ID NO: 3138926 - RNA, 19 nt, Artificial Sequence
  Description of Artificial Sequence: Synthetic oligonucleotide
ggaucaccacaacaugaac

SEQ ID NO: 3138927 - RNA, 19 nt, Artificial Sequence
  Description of Artificial Sequence: Synthetic oligonucleotide
uuuaugguuuggggaucac

SEQ ID NO: 3138928 - RNA, 19 nt, Artificial Sequence
  Description of Artificial Sequence: Synthetic oligonucleotide
ucacagcauuaggacguug

SEQ ID NO: 3138929 - RNA, 19 nt, Artificial Sequence
  Description of Artificial Sequence: Synthetic oligonucleotide
guuuggggaucaccacaac

SEQ ID NO: 3138930 - RNA, 19 nt, Artificial Sequence
  Description of Artificial Sequence: Synthetic oligonucleotide
uuaggacguugagaaccac

SEQ ID NO: 3138931 - RNA, 19 nt, Artificial Sequence
  Description of Artificial Sequence: Synthetic oligonucleotide
cagcauuaggacguugaga

SEQ ID NO: 3138932 - RNA, 19 nt, Artificial Sequence
  Description of Artificial Sequence: Synthetic oligonucleotide
caggggucaccuaaggcua

SEQ ID NO: 3138933 - RNA, 19 nt, Artificial Sequence
  Description of Artificial Sequence: Synthetic oligonucleotide
gggucaaaugacccuuuca

SEQ ID NO: 3138934 - RNA, 19 nt, Artificial Sequence
  Description of Artificial Sequence: Synthetic oligonucleotide
ccuaaggcuaucggaaaac

SEQ ID NO: 3138935 - RNA, 19 nt, Artificial Sequence
  Description of Artificial Sequence: Synthetic oligonucleotide
ggggaucaccacaacauga

SEQ ID NO: 3138936 - RNA, 19 nt, Artificial Sequence
  Description of Artificial Sequence: Synthetic oligonucleotide
ggucacagcauuaggacgu

SEQ ID NO: 3138937 - RNA, 19 nt, Artificial Sequence
  Description of Artificial Sequence: Synthetic oligonucleotide
gggucaccuaaggcuaucg

SEQ ID NO: 3138938 - RNA, 19 nt, Artificial Sequence
  Description of Artificial Sequence: Synthetic oligonucleotide
caccuaaggcuaucggaaa

SEQ ID NO: 3138939 - RNA, 19 nt, Artificial Sequence
  Description of Artificial Sequence: Synthetic oligonucleotide
gguuuggggaucaccacaa

SEQ ID NO: 3138940 - RNA, 19 nt, Artificial Sequence
  Description of Artificial Sequence: Synthetic oligonucleotide
gcauuaggacguugagaac

SEQ ID NO: 3138941 - RNA, 19 nt, Artificial Sequence
  Description of Artificial Sequence: Synthetic oligonucleotide
ggaaaacacuaaauauuua

SEQ ID NO: 3138942 - RNA, 19 nt, Artificial Sequence
  Description of Artificial Sequence: Synthetic oligonucleotide
gggaucaccacaacaugaa

SEQ ID NO: 3138943 - RNA, 19 nt, Artificial Sequence
  Description of Artificial Sequence: Synthetic oligonucleotide
ggacguugagaaccacuga

SEQ ID NO: 3138944 - RNA, 19 nt, Artificial Sequence
  Description of Artificial Sequence: Synthetic oligonucleotide
gaaccacugaagggaauau

SEQ ID NO: 3138945 - RNA, 19 nt, Artificial Sequence
  Description of Artificial Sequence: Synthetic oligonucleotide
augggucaaaugacccuuu

SEQ ID NO: 3138946 - RNA, 19 nt, Artificial Sequence
  Description of Artificial Sequence: Synthetic oligonucleotide
ggcuaucggaaaacacuaa

SEQ ID NO: 3138947 - RNA, 19 nt, Artificial Sequence
  Description of Artificial Sequence: Synthetic oligonucleotide
gagaaccacugaagggaau

SEQ ID NO: 3138948 - RNA, 19 nt, Artificial Sequence
  Description of Artificial Sequence: Synthetic oligonucleotide
aggggucaccuaaggcuau

SEQ ID NO: 3138949 - RNA, 19 nt, Artificial Sequence
  Description of Artificial Sequence: Synthetic oligonucleotide
ggggucaccuaaggcuauc

SEQ ID NO: 3138950 - RNA, 19 nt, Artificial Sequence
  Description of Artificial Sequence: Synthetic oligonucleotide
gucacagcauuaggacguu

SEQ ID NO: 3138951 - RNA, 19 nt, Artificial Sequence
  Description of Artificial Sequence: Synthetic oligonucleotide
ccacaacaugaacuguauu

SEQ ID NO: 3138952 - RNA, 19 nt, Artificial Sequence
  Description of Artificial Sequence: Synthetic oligonucleotide
uuuuaugucauuuugaaga

SEQ ID NO: 3138953 - RNA, 19 nt, Artificial Sequence
  Description of Artificial Sequence: Synthetic oligonucleotide
ugauuuacauucuauaggg

SEQ ID NO: 3138954 - RNA, 19 nt, Artificial Sequence
  Description of Artificial Sequence: Synthetic oligonucleotide
uuuuguuugaagacuagcg

SEQ ID NO: 3138955 - RNA, 19 nt, Artificial Sequence
  Description of Artificial Sequence: Synthetic oligonucleotide
uugaagaguacuuugauug

SEQ ID NO: 3138956 - RNA, 19 nt, Artificial Sequence
  Description of Artificial Sequence: Synthetic oligonucleotide
accacacugauuuacauuc

SEQ ID NO: 3138957 - RNA, 19 nt, Artificial Sequence
  Description of Artificial Sequence: Synthetic oligonucleotide
acugauuuacauucuauag

SEQ ID NO: 3138958 - RNA, 19 nt, Artificial Sequence
  Description of Artificial Sequence: Synthetic oligonucleotide
cugauuuacauucuauagg

SEQ ID NO: 3138959 - RNA, 19 nt, Artificial Sequence
  Description of Artificial Sequence: Synthetic oligonucleotide
uuuaugucauuuugaagag

SEQ ID NO: 3138960 - RNA, 19 nt, Artificial Sequence
  Description of Artificial Sequence: Synthetic oligonucleotide
uguuugaagacuagcgugc

SEQ ID NO: 3138961 - RNA, 19 nt, Artificial Sequence
  Description of Artificial Sequence: Synthetic oligonucleotide
uuuguuugaagacuagcgu

SEQ ID NO: 3138962 - RNA, 19 nt, Artificial Sequence
  Description of Artificial Sequence: Synthetic oligonucleotide
uaugucauuuugaagagua

SEQ ID NO: 3138963 - RNA, 19 nt, Artificial Sequence
  Description of Artificial Sequence: Synthetic oligonucleotide
aagaguacuuugauugugc

SEQ ID NO: 3138964 - RNA, 19 nt, Artificial Sequence
  Description of Artificial Sequence: Synthetic oligonucleotide
uuguuugaagacuagcgug

SEQ ID NO: 3138965 - RNA, 19 nt, Artificial Sequence
  Description of Artificial Sequence: Synthetic oligonucleotide
caagaaaaggcuuuaccac

SEQ ID NO: 3138966 - RNA, 19 nt, Artificial Sequence
  Description of Artificial Sequence: Synthetic oligonucleotide
uuuacauucuauaggguuu

SEQ ID NO: 3138967 - RNA, 19 nt, Artificial Sequence
  Description of Artificial Sequence: Synthetic oligonucleotide
auuuacauucuauaggguu

SEQ ID NO: 3138968 - RNA, 19 nt, Artificial Sequence
  Description of Artificial Sequence: Synthetic oligonucleotide
uuugauugugcgaagguuu

SEQ ID NO: 3138969 - RNA, 19 nt, Artificial Sequence
  Description of Artificial Sequence: Synthetic oligonucleotide
uagcgugccaagaaaaggc

SEQ ID NO: 3138970 - RNA, 19 nt, Artificial Sequence
  Description of Artificial Sequence: Synthetic oligonucleotide
uuuaccacacugauuuaca

SEQ ID NO: 3138971 - RNA, 19 nt, Artificial Sequence
  Description of Artificial Sequence: Synthetic oligonucleotide
cauuuugaagaguacuuug

SEQ ID NO: 3138972 - RNA, 19 nt, Artificial Sequence
  Description of Artificial Sequence: Synthetic oligonucleotide
auucuauaggguuuucucu

SEQ ID NO: 3138973 - RNA, 19 nt, Artificial Sequence
  Description of Artificial Sequence: Synthetic oligonucleotide
agaguacuuugauugugcg

SEQ ID NO: 3138974 - RNA, 19 nt, Artificial Sequence
  Description of Artificial Sequence: Synthetic oligonucleotide
uguccuuuuguuugaagac

SEQ ID NO: 3138975 - RNA, 19 nt, Artificial Sequence
  Description of Artificial Sequence: Synthetic oligonucleotide
auugugcgaagguuuuccc

SEQ ID NO: 3138976 - RNA, 19 nt, Artificial Sequence
  Description of Artificial Sequence: Synthetic oligonucleotide
cauucuauaggguuuucuc

SEQ ID NO: 3138977 - RNA, 19 nt, Artificial Sequence
  Description of Artificial Sequence: Synthetic oligonucleotide
ugucauuuugaagaguacu

SEQ ID NO: 3138978 - RNA, 19 nt, Artificial Sequence
  Description of Artificial Sequence: Synthetic oligonucleotide
uucuauaggguuuucucuc

SEQ ID NO: 3138979 - RNA, 19 nt, Artificial Sequence
  Description of Artificial Sequence: Synthetic oligonucleotide
ugugcgaagguuuucccac

SEQ ID NO: 3138980 - RNA, 19 nt, Artificial Sequence
  Description of Artificial Sequence: Synthetic oligonucleotide
ucuauaggguuuucucucc

SEQ ID NO: 3138981 - RNA, 19 nt, Artificial Sequence
  Description of Artificial Sequence: Synthetic oligonucleotide
aagacuagcgugccaagaa

SEQ ID NO: 3138982 - RNA, 19 nt, Artificial Sequence
  Description of Artificial Sequence: Synthetic oligonucleotide
gauugugcgaagguuuucc

SEQ ID NO: 3138983 - RNA, 19 nt, Artificial Sequence
  Description of Artificial Sequence: Synthetic oligonucleotide
uacuuugauugugcgaagg

SEQ ID NO: 3138984 - RNA, 19 nt, Artificial Sequence
  Description of Artificial Sequence: Synthetic oligonucleotide
cuuuuguuugaagacuagc

SEQ ID NO: 3138985 - RNA, 19 nt, Artificial Sequence
  Description of Artificial Sequence: Synthetic oligonucleotide
uauaggguuuucucuccag

SEQ ID NO: 3138986 - RNA, 19 nt, Artificial Sequence
  Description of Artificial Sequence: Synthetic oligonucleotide
gaagaguacuuugauugug

SEQ ID NO: 3138987 - RNA, 19 nt, Artificial Sequence
  Description of Artificial Sequence: Synthetic oligonucleotide
uccuuuuguuugaagacua

SEQ ID NO: 3138988 - RNA, 19 nt, Artificial Sequence
  Description of Artificial Sequence: Synthetic oligonucleotide
cuagcgugccaagaaaagg

SEQ ID NO: 3138989 - RNA, 19 nt, Artificial Sequence
  Description of Artificial Sequence: Synthetic oligonucleotide
cuuuaccacacugauuuac

SEQ ID NO: 3138990 - RNA, 19 nt, Artificial Sequence
  Description of Artificial Sequence: Synthetic oligonucleotide
guguccuuuuguuugaaga

SEQ ID NO: 3138991 - RNA, 19 nt, Artificial Sequence
  Description of Artificial Sequence: Synthetic oligonucleotide
uauguguccuuuuguuuga

SEQ ID NO: 3138992 - RNA, 19 nt, Artificial Sequence
  Description of Artificial Sequence: Synthetic oligonucleotide
acuuugauugugcgaaggu

SEQ ID NO: 3138993 - RNA, 19 nt, Artificial Sequence
  Description of Artificial Sequence: Synthetic oligonucleotide
uugaagacuagcgugccaa

SEQ ID NO: 3138994 - RNA, 19 nt, Artificial Sequence
  Description of Artificial Sequence: Synthetic oligonucleotide
uguguccuuuuguuugaag

SEQ ID NO: 3138995 - RNA, 19 nt, Artificial Sequence
  Description of Artificial Sequence: Synthetic oligonucleotide
ucauuuugaagaguacuuu

SEQ ID NO: 3138996 - RNA, 19 nt, Artificial Sequence
  Description of Artificial Sequence: Synthetic oligonucleotide
uugugcgaagguuuuccca

SEQ ID NO: 3138997 - RNA, 19 nt, Artificial Sequence
  Description of Artificial Sequence: Synthetic oligonucleotide
ugaagacuagcgugccaag

SEQ ID NO: 3138998 - RNA, 19 nt, Artificial Sequence
  Description of Artificial Sequence: Synthetic oligonucleotide
ccaagaaaaggcuuuacca

SEQ ID NO: 3138999 - RNA, 19 nt, Artificial Sequence
  Description of Artificial Sequence: Synthetic oligonucleotide
uuaccacacugauuuacau

SEQ ID NO: 3139000 - RNA, 19 nt, Artificial Sequence
  Description of Artificial Sequence: Synthetic oligonucleotide
uugauugugcgaagguuuu

SEQ ID NO: 3139001 - RNA, 19 nt, Artificial Sequence
  Description of Artificial Sequence: Synthetic oligonucleotide
gaguacuuugauugugcga

SEQ ID NO: 3139002 - RNA, 19 nt, Artificial Sequence
  Description of Artificial Sequence: Synthetic oligonucleotide
gccaagaaaaggcuuuacc

SEQ ID NO: 3139003 - RNA, 19 nt, Artificial Sequence
  Description of Artificial Sequence: Synthetic oligonucleotide
uuaugucauuuugaagagu

SEQ ID NO: 3139004 - RNA, 19 nt, Artificial Sequence
  Description of Artificial Sequence: Synthetic oligonucleotide
augucauuuugaagaguac

SEQ ID NO: 3139005 - RNA, 19 nt, Artificial Sequence
  Description of Artificial Sequence: Synthetic oligonucleotide
acuagcgugccaagaaaag

SEQ ID NO: 3139006 - RNA, 19 nt, Artificial Sequence
  Description of Artificial Sequence: Synthetic oligonucleotide
ugcgaagguuuucccacac

SEQ ID NO: 3139007 - RNA, 19 nt, Artificial Sequence
  Description of Artificial Sequence: Synthetic oligonucleotide
uuacauucuauaggguuuu

SEQ ID NO: 3139008 - RNA, 19 nt, Artificial Sequence
  Description of Artificial Sequence: Synthetic oligonucleotide
uaccacacugauuuacauu

SEQ ID NO: 3139009 - RNA, 19 nt, Artificial Sequence
  Description of Artificial Sequence: Synthetic oligonucleotide
acauucuauaggguuuucu

SEQ ID NO: 3139010 - RNA, 19 nt, Artificial Sequence
  Description of Artificial Sequence: Synthetic oligonucleotide
guuuucucuccagugugug

SEQ ID NO: 3139011 - RNA, 19 nt, Artificial Sequence
  Description of Artificial Sequence: Synthetic oligonucleotide
cacugauuuacauucuaua

SEQ ID NO: 3139012 - RNA, 19 nt, Artificial Sequence
  Description of Artificial Sequence: Synthetic oligonucleotide
guacuuugauugugcgaag

SEQ ID NO: 3139013 - RNA, 19 nt, Artificial Sequence
  Description of Artificial Sequence: Synthetic oligonucleotide
agacuagcgugccaagaaa

SEQ ID NO: 3139014 - RNA, 19 nt, Artificial Sequence
  Description of Artificial Sequence: Synthetic oligonucleotide
gaagacuagcgugccaaga

SEQ ID NO: 3139015 - RNA, 19 nt, Artificial Sequence
  Description of Artificial Sequence: Synthetic oligonucleotide
gacuagcgugccaagaaaa

SEQ ID NO: 3139016 - RNA, 19 nt, Artificial Sequence
  Description of Artificial Sequence: Synthetic oligonucleotide
acacugauuuacauucuau

SEQ ID NO: 3139017 - RNA, 19 nt, Artificial Sequence
  Description of Artificial Sequence: Synthetic oligonucleotide
ugccaagaaaaggcuuuac

SEQ ID NO: 3139018 - RNA, 19 nt, Artificial Sequence
  Description of Artificial Sequence: Synthetic oligonucleotide
gauuuacauucuauagggu

SEQ ID NO: 3139019 - RNA, 19 nt, Artificial Sequence
  Description of Artificial Sequence: Synthetic oligonucleotide
cuauaggguuuucucucca

SEQ ID NO: 3139020 - RNA, 19 nt, Artificial Sequence
  Description of Artificial Sequence: Synthetic oligonucleotide
agcgugccaagaaaaggcu

SEQ ID NO: 3139021 - RNA, 19 nt, Artificial Sequence
  Description of Artificial Sequence: Synthetic oligonucleotide
ccuuuuguuugaagacuag

SEQ ID NO: 3139022 - RNA, 19 nt, Artificial Sequence
  Description of Artificial Sequence: Synthetic oligonucleotide
ugauugugcgaagguuuuc

SEQ ID NO: 3139023 - RNA, 19 nt, Artificial Sequence
  Description of Artificial Sequence: Synthetic oligonucleotide
gucauuuugaagaguacuu

SEQ ID NO: 3139024 - RNA, 19 nt, Artificial Sequence
  Description of Artificial Sequence: Synthetic oligonucleotide
cacacugauuuacauucua

SEQ ID NO: 3139025 - RNA, 19 nt, Artificial Sequence
  Description of Artificial Sequence: Synthetic oligonucleotide
guccuuuuguuugaagacu

SEQ ID NO: 3139026 - RNA, 19 nt, Artificial Sequence
  Description of Artificial Sequence: Synthetic oligonucleotide
uacauucuauaggguuuuc

SEQ ID NO: 3139027 - RNA, 19 nt, Artificial Sequence
  Description of Artificial Sequence: Synthetic oligonucleotide
gugcgaagguuuucccaca

SEQ ID NO: 3139028 - RNA, 19 nt, Artificial Sequence
  Description of Artificial Sequence: Synthetic oligonucleotide
cuuugauugugcgaagguu

SEQ ID NO: 3139029 - RNA, 19 nt, Artificial Sequence
  Description of Artificial Sequence: Synthetic oligonucleotide
auguguccuuuuguuugaa

SEQ ID NO: 3139030 - RNA, 19 nt, Artificial Sequence
  Description of Artificial Sequence: Synthetic oligonucleotide
gcgaagguuuucccacacu

SEQ ID NO: 3139031 - RNA, 19 nt, Artificial Sequence
  Description of Artificial Sequence: Synthetic oligonucleotide
ccacacugauuuacauucu

SEQ ID NO: 3139032 - RNA, 19 nt, Artificial Sequence
  Description of Artificial Sequence: Synthetic oligonucleotide
gcgugccaagaaaaggcuu

SEQ ID NO: 3139033 - RNA, 19 nt, Artificial Sequence
  Description of Artificial Sequence: Synthetic oligonucleotide
ugcaaggucaguaugcgag

SEQ ID NO: 3139034 - RNA, 19 nt, Artificial Sequence
  Description of Artificial Sequence: Synthetic oligonucleotide
aacacugggcaccagccgg

SEQ ID NO: 3139035 - RNA, 19 nt, Artificial Sequence
  Description of Artificial Sequence: Synthetic oligonucleotide
uguggauccuaacacuggg

SEQ ID NO: 3139036 - RNA, 19 nt, Artificial Sequence
  Description of Artificial Sequence: Synthetic oligonucleotide
aaagggcuggccuguagac

SEQ ID NO: 3139037 - RNA, 19 nt, Artificial Sequence
  Description of Artificial Sequence: Synthetic oligonucleotide
uccauguggauccuaacac

SEQ ID NO: 3139038 - RNA, 19 nt, Artificial Sequence
  Description of Artificial Sequence: Synthetic oligonucleotide
aaggucaguaugcgaggcc

SEQ ID NO: 3139039 - RNA, 19 nt, Artificial Sequence
  Description of Artificial Sequence: Synthetic oligonucleotide
uuuccugcuguccugcaag

SEQ ID NO: 3139040 - RNA, 19 nt, Artificial Sequence
  Description of Artificial Sequence: Synthetic oligonucleotide
uggauccuaacacugggca

SEQ ID NO: 3139041 - RNA, 19 nt, Artificial Sequence
  Description of Artificial Sequence: Synthetic oligonucleotide
aggaguucugcccggagcg

SEQ ID NO: 3139042 - RNA, 19 nt, Artificial Sequence
  Description of Artificial Sequence: Synthetic oligonucleotide
aaaggagccccguuuccag

SEQ ID NO: 3139043 - RNA, 19 nt, Artificial Sequence
  Description of Artificial Sequence: Synthetic oligonucleotide
accagcaacagguuggcug

SEQ ID NO: 3139044 - RNA, 19 nt, Artificial Sequence
  Description of Artificial Sequence: Synthetic oligonucleotide
uggccuguagacuucuggg

SEQ ID NO: 3139045 - RNA, 19 nt, Artificial Sequence
  Description of Artificial Sequence: Synthetic oligonucleotide
gauccuaacacugggcacc

SEQ ID NO: 3139046 - RNA, 19 nt, Artificial Sequence
  Description of Artificial Sequence: Synthetic oligonucleotide
cauguggauccuaacacug

SEQ ID NO: 3139047 - RNA, 19 nt, Artificial Sequence
  Description of Artificial Sequence: Synthetic oligonucleotide
aacagguuggcuggcagag

SEQ ID NO: 3139048 - RNA, 19 nt, Artificial Sequence
  Description of Artificial Sequence: Synthetic oligonucleotide
uaacacugggcaccagccg

SEQ ID NO: 3139049 - RNA, 19 nt, Artificial Sequence
  Description of Artificial Sequence: Synthetic oligonucleotide
uaugcgaggccugcgaaag

SEQ ID NO: 3139050 - RNA, 19 nt, Artificial Sequence
  Description of Artificial Sequence: Synthetic oligonucleotide
auccauguggauccuaaca

SEQ ID NO: 3139051 - RNA, 19 nt, Artificial Sequence
  Description of Artificial Sequence: Synthetic oligonucleotide
aaggagccccguuuccagg

SEQ ID NO: 3139052 - RNA, 19 nt, Artificial Sequence
  Description of Artificial Sequence: Synthetic oligonucleotide
uugcuuuuccugcuguccu

SEQ ID NO: 3139053 - RNA, 19 nt, Artificial Sequence
  Description of Artificial Sequence: Synthetic oligonucleotide
agacgcaccagcaacaggu

SEQ ID NO: 3139054 - RNA, 19 nt, Artificial Sequence
  Description of Artificial Sequence: Synthetic oligonucleotide
cagguuggcuggcagagcc

SEQ ID NO: 3139055 - RNA, 19 nt, Artificial Sequence
  Description of Artificial Sequence: Synthetic oligonucleotide
cuugcuuuuccugcugucc

SEQ ID NO: 3139056 - RNA, 19 nt, Artificial Sequence
  Description of Artificial Sequence: Synthetic oligonucleotide
cuggccuguagacuucugg

SEQ ID NO: 3139057 - RNA, 19 nt, Artificial Sequence
  Description of Artificial Sequence: Synthetic oligonucleotide
gaaagggcuggccuguaga

SEQ ID NO: 3139058 - RNA, 19 nt, Artificial Sequence
  Description of Artificial Sequence: Synthetic oligonucleotide
gcuggcagagccucgaugc

SEQ ID NO: 3139059 - RNA, 19 nt, Artificial Sequence
  Description of Artificial Sequence: Synthetic oligonucleotide
agacuucuggggcuggucu

SEQ ID NO: 3139060 - RNA, 19 nt, Artificial Sequence
  Description of Artificial Sequence: Synthetic oligonucleotide
ugcgaaaggagccccguuu

SEQ ID NO: 3139061 - RNA, 19 nt, Artificial Sequence
  Description of Artificial Sequence: Synthetic oligonucleotide
uuccugcuguccugcaagg

SEQ ID NO: 3139062 - RNA, 19 nt, Artificial Sequence
  Description of Artificial Sequence: Synthetic oligonucleotide
uguccugcaaggucaguau

SEQ ID NO: 3139063 - RNA, 19 nt, Artificial Sequence
  Description of Artificial Sequence: Synthetic oligonucleotide
gaggccugcgaaaggagcc

SEQ ID NO: 3139064 - RNA, 19 nt, Artificial Sequence
  Description of Artificial Sequence: Synthetic oligonucleotide
ucaguaugcgaggccugcg

SEQ ID NO: 3139065 - RNA, 19 nt, Artificial Sequence
  Description of Artificial Sequence: Synthetic oligonucleotide
uuuuccugcuguccugcaa

SEQ ID NO: 3139066 - RNA, 19 nt, Artificial Sequence
  Description of Artificial Sequence: Synthetic oligonucleotide
ugcuuuuccugcuguccug

SEQ ID NO: 3139067 - RNA, 19 nt, Artificial Sequence
  Description of Artificial Sequence: Synthetic oligonucleotide
auguggauccuaacacugg

SEQ ID NO: 3139068 - RNA, 19 nt, Artificial Sequence
  Description of Artificial Sequence: Synthetic oligonucleotide
caggaguucugcccggagc

SEQ ID NO: 3139069 - RNA, 19 nt, Artificial Sequence
  Description of Artificial Sequence: Synthetic oligonucleotide
ggccuguagacuucugggg

SEQ ID NO: 3139070 - RNA, 19 nt, Artificial Sequence
  Description of Artificial Sequence: Synthetic oligonucleotide
ugcgaggccugcgaaagga

SEQ ID NO: 3139071 - RNA, 19 nt, Artificial Sequence
  Description of Artificial Sequence: Synthetic oligonucleotide
caaggucaguaugcgaggc

SEQ ID NO: 3139072 - RNA, 19 nt, Artificial Sequence
  Description of Artificial Sequence: Synthetic oligonucleotide
aggucaguaugcgaggccu

SEQ ID NO: 3139073 - RNA, 19 nt, Artificial Sequence
  Description of Artificial Sequence: Synthetic oligonucleotide
agggcuggccuguagacuu

SEQ ID NO: 3139074 - RNA, 19 nt, Artificial Sequence
  Description of Artificial Sequence: Synthetic oligonucleotide
cagcagacgcaccagcaac

SEQ ID NO: 3139075 - RNA, 19 nt, Artificial Sequence
  Description of Artificial Sequence: Synthetic oligonucleotide
gcaaggucaguaugcgagg

SEQ ID NO: 3139076 - RNA, 19 nt, Artificial Sequence
  Description of Artificial Sequence: Synthetic oligonucleotide
ucuugcuuuuccugcuguc

SEQ ID NO: 3139077 - RNA, 19 nt, Artificial Sequence
  Description of Artificial Sequence: Synthetic oligonucleotide
uguagacuucuggggcugg

SEQ ID NO: 3139078 - RNA, 19 nt, Artificial Sequence
  Description of Artificial Sequence: Synthetic oligonucleotide
gaaaggagccccguuucca

SEQ ID NO: 3139079 - RNA, 19 nt, Artificial Sequence
  Description of Artificial Sequence: Synthetic oligonucleotide
aguaugcgaggccugcgaa

SEQ ID NO: 3139080 - RNA, 19 nt, Artificial Sequence
  Description of Artificial Sequence: Synthetic oligonucleotide
aggccugcgaaaggagccc

SEQ ID NO: 3139081 - RNA, 19 nt, Artificial Sequence
  Description of Artificial Sequence: Synthetic oligonucleotide
gccuguagacuucuggggc

SEQ ID NO: 3139082 - RNA, 19 nt, Artificial Sequence
  Description of Artificial Sequence: Synthetic oligonucleotide
gagcgcacaccauccagca

SEQ ID NO: 3139083 - RNA, 19 nt, Artificial Sequence
  Description of Artificial Sequence: Synthetic oligonucleotide
ccuaacacugggcaccagc

SEQ ID NO: 3139084 - RNA, 19 nt, Artificial Sequence
  Description of Artificial Sequence: Synthetic oligonucleotide
cauccauguggauccuaac

SEQ ID NO: 3139085 - RNA, 19 nt, Artificial Sequence
  Description of Artificial Sequence: Synthetic oligonucleotide
acagguuggcuggcagagc

SEQ ID NO: 3139086 - RNA, 19 nt, Artificial Sequence
  Description of Artificial Sequence: Synthetic oligonucleotide
aagggcuggccuguagacu

SEQ ID NO: 3139087 - RNA, 19 nt, Artificial Sequence
  Description of Artificial Sequence: Synthetic oligonucleotide
acgcaccagcaacagguug

SEQ ID NO: 3139088 - RNA, 19 nt, Artificial Sequence
  Description of Artificial Sequence: Synthetic oligonucleotide
guccugcaaggucaguaug

SEQ ID NO: 3139089 - RNA, 19 nt, Artificial Sequence
  Description of Artificial Sequence: Synthetic oligonucleotide
aggagccccguuuccagga

SEQ ID NO: 3139090 - RNA, 19 nt, Artificial Sequence
  Description of Artificial Sequence: Synthetic oligonucleotide
gucaguaugcgaggccugc

SEQ ID NO: 3139091 - RNA, 19 nt, Artificial Sequence
  Description of Artificial Sequence: Synthetic oligonucleotide
uggcagagccucgaugcug

SEQ ID NO: 3139092 - RNA, 19 nt, Artificial Sequence
  Description of Artificial Sequence: Synthetic oligonucleotide
cgcaccagcaacagguugg

SEQ ID NO: 3139093 - RNA, 19 nt, Artificial Sequence
  Description of Artificial Sequence: Synthetic oligonucleotide
guggauccuaacacugggc

SEQ ID NO: 3139094 - RNA, 19 nt, Artificial Sequence
  Description of Artificial Sequence: Synthetic oligonucleotide
cagacgcaccagcaacagg

SEQ ID NO: 3139095 - RNA, 19 nt, Artificial Sequence
  Description of Artificial Sequence: Synthetic oligonucleotide
ggauccuaacacugggcac

SEQ ID NO: 3139096 - RNA, 19 nt, Artificial Sequence
  Description of Artificial Sequence: Synthetic oligonucleotide
augcgaggccugcgaaagg

SEQ ID NO: 3139097 - RNA, 19 nt, Artificial Sequence
  Description of Artificial Sequence: Synthetic oligonucleotide
gcaacagguuggcuggcag

SEQ ID NO: 3139098 - RNA, 19 nt, Artificial Sequence
  Description of Artificial Sequence: Synthetic oligonucleotide
gcgcacaccauccagcaga

SEQ ID NO: 3139099 - RNA, 19 nt, Artificial Sequence
  Description of Artificial Sequence: Synthetic oligonucleotide
aguucugcccggagcgcac

SEQ ID NO: 3139100 - RNA, 19 nt, Artificial Sequence
  Description of Artificial Sequence: Synthetic oligonucleotide
agcgcacaccauccagcag

SEQ ID NO: 3139101 - RNA, 19 nt, Artificial Sequence
  Description of Artificial Sequence: Synthetic oligonucleotide
uuggcuggcagagccucga

SEQ ID NO: 3139102 - RNA, 19 nt, Artificial Sequence
  Description of Artificial Sequence: Synthetic oligonucleotide
ccugcaaggucaguaugcg

SEQ ID NO: 3139103 - RNA, 19 nt, Artificial Sequence
  Description of Artificial Sequence: Synthetic oligonucleotide
agcagacgcaccagcaaca

SEQ ID NO: 3139104 - RNA, 19 nt, Artificial Sequence
  Description of Artificial Sequence: Synthetic oligonucleotide
cuguagacuucuggggcug

SEQ ID NO: 3139105 - RNA, 19 nt, Artificial Sequence
  Description of Artificial Sequence: Synthetic oligonucleotide
acaccauccagcagacgca

SEQ ID NO: 3139106 - RNA, 19 nt, Artificial Sequence
  Description of Artificial Sequence: Synthetic oligonucleotide
caacagguuggcuggcaga

SEQ ID NO: 3139107 - RNA, 19 nt, Artificial Sequence
  Description of Artificial Sequence: Synthetic oligonucleotide
accauccagcagacgcacc

SEQ ID NO: 3139108 - RNA, 19 nt, Artificial Sequence
  Description of Artificial Sequence: Synthetic oligonucleotide
uagacuucuggggcugguc

SEQ ID NO: 3139109 - RNA, 19 nt, Artificial Sequence
  Description of Artificial Sequence: Synthetic oligonucleotide
guaugcgaggccugcgaaa

SEQ ID NO: 3139110 - RNA, 19 nt, Artificial Sequence
  Description of Artificial Sequence: Synthetic oligonucleotide
cauccagcagacgcaccag

SEQ ID NO: 3139111 - RNA, 19 nt, Artificial Sequence
  Description of Artificial Sequence: Synthetic oligonucleotide
ggagcgcacaccauccagc

SEQ ID NO: 3139112 - RNA, 19 nt, Artificial Sequence
  Description of Artificial Sequence: Synthetic oligonucleotide
accagccggaaagggcugg

SEQ ID NO: 3139113 - RNA, 19 nt, Artificial Sequence
  Description of Artificial Sequence: Synthetic oligonucleotide
gaguucugcccggagcgca

SEQ ID NO: 3139114 - RNA, 19 nt, Artificial Sequence
  Description of Artificial Sequence: Synthetic oligonucleotide
caccauccagcagacgcac

SEQ ID NO: 3139115 - RNA, 19 nt, Artificial Sequence
  Description of Artificial Sequence: Synthetic oligonucleotide
ggucuugcuuuuccugcug

SEQ ID NO: 3139116 - RNA, 19 nt, Artificial Sequence
  Description of Artificial Sequence: Synthetic oligonucleotide
uucugcccggagcgcacac

SEQ ID NO: 3139117 - RNA, 19 nt, Artificial Sequence
  Description of Artificial Sequence: Synthetic oligonucleotide
caguaugcgaggccugcga

SEQ ID NO: 3139118 - RNA, 19 nt, Artificial Sequence
  Description of Artificial Sequence: Synthetic oligonucleotide
auccuaacacugggcacca

SEQ ID NO: 3139119 - RNA, 19 nt, Artificial Sequence
  Description of Artificial Sequence: Synthetic oligonucleotide
ucugcccggagcgcacacc

SEQ ID NO: 3139120 - RNA, 19 nt, Artificial Sequence
  Description of Artificial Sequence: Synthetic oligonucleotide
gcuuuuccugcuguccugc

SEQ ID NO: 3139121 - RNA, 19 nt, Artificial Sequence
  Description of Artificial Sequence: Synthetic oligonucleotide
uccugcuguccugcaaggu

SEQ ID NO: 3139122 - RNA, 19 nt, Artificial Sequence
  Description of Artificial Sequence: Synthetic oligonucleotide
gcgaaaggagccccguuuc

SEQ ID NO: 3139123 - RNA, 19 nt, Artificial Sequence
  Description of Artificial Sequence: Synthetic oligonucleotide
cugcaaggucaguaugcga

SEQ ID NO: 3139124 - RNA, 19 nt, Artificial Sequence
  Description of Artificial Sequence: Synthetic oligonucleotide
gccggaaagggcuggccug

SEQ ID NO: 3139125 - RNA, 19 nt, Artificial Sequence
  Description of Artificial Sequence: Synthetic oligonucleotide
agcaacagguuggcuggca

SEQ ID NO: 3139126 - RNA, 19 nt, Artificial Sequence
  Description of Artificial Sequence: Synthetic oligonucleotide
cagagccucgaugcugcag

SEQ ID NO: 3139127 - RNA, 19 nt, Artificial Sequence
  Description of Artificial Sequence: Synthetic oligonucleotide
cccggagcgcacaccaucc

SEQ ID NO: 3139128 - RNA, 19 nt, Artificial Sequence
  Description of Artificial Sequence: Synthetic oligonucleotide
gggcuggucuugcuuuucc

SEQ ID NO: 3139129 - RNA, 19 nt, Artificial Sequence
  Description of Artificial Sequence: Synthetic oligonucleotide
cugcccggagcgcacacca

SEQ ID NO: 3139130 - RNA, 19 nt, Artificial Sequence
  Description of Artificial Sequence: Synthetic oligonucleotide
cuuuuccugcuguccugca

SEQ ID NO: 3139131 - RNA, 19 nt, Artificial Sequence
  Description of Artificial Sequence: Synthetic oligonucleotide
ggcuggcagagccucgaug

SEQ ID NO: 3139132 - RNA, 19 nt, Artificial Sequence
  Description of Artificial Sequence: Synthetic oligonucleotide
cuguccugcaaggucagua

SEQ ID NO: 3139133 - RNA, 19 nt, Artificial Sequence
  Description of Artificial Sequence: Synthetic oligonucleotide
gcagacgcaccagcaacag

SEQ ID NO: 3139134 - RNA, 19 nt, Artificial Sequence
  Description of Artificial Sequence: Synthetic oligonucleotide
gucuugcuuuuccugcugu

SEQ ID NO: 3139135 - RNA, 19 nt, Artificial Sequence
  Description of Artificial Sequence: Synthetic oligonucleotide
caccagccggaaagggcug

SEQ ID NO: 3139136 - RNA, 19 nt, Artificial Sequence
  Description of Artificial Sequence: Synthetic oligonucleotide
cgaggccugcgaaaggagc

SEQ ID NO: 3139137 - RNA, 19 nt, Artificial Sequence
  Description of Artificial Sequence: Synthetic oligonucleotide
uccuaacacugggcaccag

SEQ ID NO: 3139138 - RNA, 19 nt, Artificial Sequence
  Description of Artificial Sequence: Synthetic oligonucleotide
gguuggcuggcagagccuc

SEQ ID NO: 3139139 - RNA, 19 nt, Artificial Sequence
  Description of Artificial Sequence: Synthetic oligonucleotide
ggagccccguuuccaggag

SEQ ID NO: 3139140 - RNA, 19 nt, Artificial Sequence
  Description of Artificial Sequence: Synthetic oligonucleotide
cguuuccaggaguucugcc

SEQ ID NO: 3139141 - RNA, 19 nt, Artificial Sequence
  Description of Artificial Sequence: Synthetic oligonucleotide
cgaaaggagccccguuucc

SEQ ID NO: 3139142 - RNA, 19 nt, Artificial Sequence
  Description of Artificial Sequence: Synthetic oligonucleotide
cagccggaaagggcuggcc

SEQ ID NO: 3139143 - RNA, 19 nt, Artificial Sequence
  Description of Artificial Sequence: Synthetic oligonucleotide
acugggcaccagccggaaa

SEQ ID NO: 3139144 - RNA, 19 nt, Artificial Sequence
  Description of Artificial Sequence: Synthetic oligonucleotide
ccauccauguggauccuaa

SEQ ID NO: 3139145 - RNA, 19 nt, Artificial Sequence
  Description of Artificial Sequence: Synthetic oligonucleotide
ggucaguaugcgaggccug

SEQ ID NO: 3139146 - RNA, 19 nt, Artificial Sequence
  Description of Artificial Sequence: Synthetic oligonucleotide
uggcuggcagagccucgau

SEQ ID NO: 3139147 - RNA, 19 nt, Artificial Sequence
  Description of Artificial Sequence: Synthetic oligonucleotide
gacuucuggggcuggucuu

SEQ ID NO: 3139148 - RNA, 19 nt, Artificial Sequence
  Description of Artificial Sequence: Synthetic oligonucleotide
cagcaacagguuggcuggc

SEQ ID NO: 3139149 - RNA, 19 nt, Artificial Sequence
  Description of Artificial Sequence: Synthetic oligonucleotide
ggaguucugcccggagcgc

SEQ ID NO: 3139150 - RNA, 19 nt, Artificial Sequence
  Description of Artificial Sequence: Synthetic oligonucleotide
agccccguuuccaggaguu

SEQ ID NO: 3139151 - RNA, 19 nt, Artificial Sequence
  Description of Artificial Sequence: Synthetic oligonucleotide
ugcccggagcgcacaccau

SEQ ID NO: 3139152 - RNA, 19 nt, Artificial Sequence
  Description of Artificial Sequence: Synthetic oligonucleotide
agguuggcuggcagagccu

SEQ ID NO: 3139153 - RNA, 19 nt, Artificial Sequence
  Description of Artificial Sequence: Synthetic oligonucleotide
ccauguggauccuaacacu

SEQ ID NO: 3139154 - RNA, 19 nt, Artificial Sequence
  Description of Artificial Sequence: Synthetic oligonucleotide
gcaccagccggaaagggcu

SEQ ID NO: 3139155 - RNA, 19 nt, Artificial Sequence
  Description of Artificial Sequence: Synthetic oligonucleotide
ccguuuccaggaguucugc

SEQ ID NO: 3139156 - RNA, 19 nt, Artificial Sequence
  Description of Artificial Sequence: Synthetic oligonucleotide
gagccccguuuccaggagu

SEQ ID NO: 3139157 - RNA, 19 nt, Artificial Sequence
  Description of Artificial Sequence: Synthetic oligonucleotide
gcccggagcgcacaccauc

SEQ ID NO: 3139158 - RNA, 19 nt, Artificial Sequence
  Description of Artificial Sequence: Synthetic oligonucleotide
gccugcgaaaggagccccg

SEQ ID NO: 3139159 - RNA, 19 nt, Artificial Sequence
  Description of Artificial Sequence: Synthetic oligonucleotide
ggccugcgaaaggagcccc

SEQ ID NO: 3139160 - RNA, 19 nt, Artificial Sequence
  Description of Artificial Sequence: Synthetic oligonucleotide
gcgaggccugcgaaaggag

SEQ ID NO: 3139161 - RNA, 19 nt, Artificial Sequence
  Description of Artificial Sequence: Synthetic oligonucleotide
ccuguagacuucuggggcu

SEQ ID NO: 3139162 - RNA, 19 nt, Artificial Sequence
  Description of Artificial Sequence: Synthetic oligonucleotide
cgcacaccauccagcagac

SEQ ID NO: 3139163 - RNA, 19 nt, Artificial Sequence
  Description of Artificial Sequence: Synthetic oligonucleotide
cggagcgcacaccauccag

SEQ ID NO: 3139164 - RNA, 19 nt, Artificial Sequence
  Description of Artificial Sequence: Synthetic oligonucleotide
guucugcccggagcgcaca

SEQ ID NO: 3139165 - RNA, 19 nt, Artificial Sequence
  Description of Artificial Sequence: Synthetic oligonucleotide
guagacuucuggggcuggu

SEQ ID NO: 3139166 - RNA, 19 nt, Artificial Sequence
  Description of Artificial Sequence: Synthetic oligonucleotide
cuggcagagccucgaugcu

SEQ ID NO: 3139167 - RNA, 19 nt, Artificial Sequence
  Description of Artificial Sequence: Synthetic oligonucleotide
ccagcagacgcaccagcaa

SEQ ID NO: 3139168 - RNA, 19 nt, Artificial Sequence
  Description of Artificial Sequence: Synthetic oligonucleotide
gacgcaccagcaacagguu

SEQ ID NO: 3139169 - RNA, 19 nt, Artificial Sequence
  Description of Artificial Sequence: Synthetic oligonucleotide
ccagccggaaagggcuggc

SEQ ID NO: 3139170 - RNA, 19 nt, Artificial Sequence
  Description of Artificial Sequence: Synthetic oligonucleotide
cacugggcaccagccggaa

SEQ ID NO: 3139171 - RNA, 19 nt, Artificial Sequence
  Description of Artificial Sequence: Synthetic oligonucleotide
cugcgaaaggagccccguu

SEQ ID NO: 3139172 - RNA, 19 nt, Artificial Sequence
  Description of Artificial Sequence: Synthetic oligonucleotide
ccccguuuccaggaguucu

SEQ ID NO: 3139173 - RNA, 19 nt, Artificial Sequence
  Description of Artificial Sequence: Synthetic oligonucleotide
gggcuggccuguagacuuc

SEQ ID NO: 3139174 - RNA, 19 nt, Artificial Sequence
  Description of Artificial Sequence: Synthetic oligonucleotide
gccccguuuccaggaguuc

SEQ ID NO: 3139175 - RNA, 19 nt, Artificial Sequence
  Description of Artificial Sequence: Synthetic oligonucleotide
ccggagcgcacaccaucca

SEQ ID NO: 3139176 - RNA, 19 nt, Artificial Sequence
  Description of Artificial Sequence: Synthetic oligonucleotide
ggcuggccuguagacuucu

SEQ ID NO: 3139177 - RNA, 19 nt, Artificial Sequence
  Description of Artificial Sequence: Synthetic oligonucleotide
ccugcgaaaggagccccgu

SEQ ID NO: 3139178 - RNA, 19 nt, Artificial Sequence
  Description of Artificial Sequence: Synthetic oligonucleotide
ccggaaagggcuggccugu

SEQ ID NO: 3139179 - RNA, 19 nt, Artificial Sequence
  Description of Artificial Sequence: Synthetic oligonucleotide
gcuguccugcaaggucagu

SEQ ID NO: 3139180 - RNA, 19 nt, Artificial Sequence
  Description of Artificial Sequence: Synthetic oligonucleotide
cccauccauguggauccua

SEQ ID NO: 3139181 - RNA, 19 nt, Artificial Sequence
  Description of Artificial Sequence: Synthetic oligonucleotide
ccccauccauguggauccu

SEQ ID NO: 3139182 - RNA, 19 nt, Artificial Sequence
  Description of Artificial Sequence: Synthetic oligonucleotide
ugagagguuaccaaguggg

SEQ ID NO: 3139183 - RNA, 19 nt, Artificial Sequence
  Description of Artificial Sequence: Synthetic oligonucleotide
accuguuucacguugagag

SEQ ID NO: 3139184 - RNA, 19 nt, Artificial Sequence
  Description of Artificial Sequence: Synthetic oligonucleotide
uggaucagagagcacaggg

SEQ ID NO: 3139185 - RNA, 19 nt, Artificial Sequence
  Description of Artificial Sequence: Synthetic oligonucleotide
auucagaagccgcuggucc

SEQ ID NO: 3139186 - RNA, 19 nt, Artificial Sequence
  Description of Artificial Sequence: Synthetic oligonucleotide
aaggacauucagaagccgc

SEQ ID NO: 3139187 - RNA, 19 nt, Artificial Sequence
  Description of Artificial Sequence: Synthetic oligonucleotide
guuaccaagugggagagcg

SEQ ID NO: 3139188 - RNA, 19 nt, Artificial Sequence
  Description of Artificial Sequence: Synthetic oligonucleotide
aaacuggucaguacacugc

SEQ ID NO: 3139189 - RNA, 19 nt, Artificial Sequence
  Description of Artificial Sequence: Synthetic oligonucleotide
uugagagguuaccaagugg

SEQ ID NO: 3139190 - RNA, 19 nt, Artificial Sequence
  Description of Artificial Sequence: Synthetic oligonucleotide
ucaguacacugcuugacag

SEQ ID NO: 3139191 - RNA, 19 nt, Artificial Sequence
  Description of Artificial Sequence: Synthetic oligonucleotide
cauggcagauuuaaggcag

SEQ ID NO: 3139192 - RNA, 19 nt, Artificial Sequence
  Description of Artificial Sequence: Synthetic oligonucleotide
uacacugcuugacaguggc

SEQ ID NO: 3139193 - RNA, 19 nt, Artificial Sequence
  Description of Artificial Sequence: Synthetic oligonucleotide
ucuuccaccagcacagugu

SEQ ID NO: 3139194 - RNA, 19 nt, Artificial Sequence
  Description of Artificial Sequence: Synthetic oligonucleotide
ccaaguguggaucagagag

SEQ ID NO: 3139195 - RNA, 19 nt, Artificial Sequence
  Description of Artificial Sequence: Synthetic oligonucleotide
aagugggagagcggcaucc

SEQ ID NO: 3139196 - RNA, 19 nt, Artificial Sequence
  Description of Artificial Sequence: Synthetic oligonucleotide
ucccaaacuggucaguaca

SEQ ID NO: 3139197 - RNA, 19 nt, Artificial Sequence
  Description of Artificial Sequence: Synthetic oligonucleotide
gaucagagagcacagggga

SEQ ID NO: 3139198 - RNA, 19 nt, Artificial Sequence
  Description of Artificial Sequence: Synthetic oligonucleotide
uugacaguggcaaggacau

SEQ ID NO: 3139199 - RNA, 19 nt, Artificial Sequence
  Description of Artificial Sequence: Synthetic oligonucleotide
cugucuuccaccagcacag

SEQ ID NO: 3139200 - RNA, 19 nt, Artificial Sequence
  Description of Artificial Sequence: Synthetic oligonucleotide
aaguguggaucagagagca

SEQ ID NO: 3139201 - RNA, 19 nt, Artificial Sequence
  Description of Artificial Sequence: Synthetic oligonucleotide
aacuggucaguacacugcu

SEQ ID NO: 3139202 - RNA, 19 nt, Artificial Sequence
  Description of Artificial Sequence: Synthetic oligonucleotide
caaacuggucaguacacug

SEQ ID NO: 3139203 - RNA, 19 nt, Artificial Sequence
  Description of Artificial Sequence: Synthetic oligonucleotide
acaguguccaucccaaacu

SEQ ID NO: 3139204 - RNA, 19 nt, Artificial Sequence
  Description of Artificial Sequence: Synthetic oligonucleotide
acguugagagguuaccaag

SEQ ID NO: 3139205 - RNA, 19 nt, Artificial Sequence
  Description of Artificial Sequence: Synthetic oligonucleotide
ggccauggcagauuuaagg

SEQ ID NO: 3139206 - RNA, 19 nt, Artificial Sequence
  Description of Artificial Sequence: Synthetic oligonucleotide
guggcaaggacauucagaa

SEQ ID NO: 3139207 - RNA, 19 nt, Artificial Sequence
  Description of Artificial Sequence: Synthetic oligonucleotide
aguacacugcuugacagug

SEQ ID NO: 3139208 - RNA, 19 nt, Artificial Sequence
  Description of Artificial Sequence: Synthetic oligonucleotide
gagguuaccaagugggaga

SEQ ID NO: 3139209 - RNA, 19 nt, Artificial Sequence
  Description of Artificial Sequence: Synthetic oligonucleotide
gacaguggcaaggacauuc

SEQ ID NO: 3139210 - RNA, 19 nt, Artificial Sequence
  Description of Artificial Sequence: Synthetic oligonucleotide
cauccugucuuccaccagc

SEQ ID NO: 3139211 - RNA, 19 nt, Artificial Sequence
  Description of Artificial Sequence: Synthetic oligonucleotide
cuggucaguacacugcuug

SEQ ID NO: 3139212 - RNA, 19 nt, Artificial Sequence
  Description of Artificial Sequence: Synthetic oligonucleotide
agagguuaccaagugggag

SEQ ID NO: 3139213 - RNA, 19 nt, Artificial Sequence
  Description of Artificial Sequence: Synthetic oligonucleotide
guugagagguuaccaagug

SEQ ID NO: 3139214 - RNA, 19 nt, Artificial Sequence
  Description of Artificial Sequence: Synthetic oligonucleotide
uuaccaagugggagagcgg

SEQ ID NO: 3139215 - RNA, 19 nt, Artificial Sequence
  Description of Artificial Sequence: Synthetic oligonucleotide
caaguguggaucagagagc

SEQ ID NO: 3139216 - RNA, 19 nt, Artificial Sequence
  Description of Artificial Sequence: Synthetic oligonucleotide
aucccaaacuggucaguac

SEQ ID NO: 3139217 - RNA, 19 nt, Artificial Sequence
  Description of Artificial Sequence: Synthetic oligonucleotide
agauuuaaggcagacuuua

SEQ ID NO: 3139218 - RNA, 19 nt, Artificial Sequence
  Description of Artificial Sequence: Synthetic oligonucleotide
gauuuaaggcagacuuuag

SEQ ID NO: 3139219 - RNA, 19 nt, Artificial Sequence
  Description of Artificial Sequence: Synthetic oligonucleotide
uuccaccuguuucacguug

SEQ ID NO: 3139220 - RNA, 19 nt, Artificial Sequence
  Description of Artificial Sequence: Synthetic oligonucleotide
uuucacguugagagguuac

SEQ ID NO: 3139221 - RNA, 19 nt, Artificial Sequence
  Description of Artificial Sequence: Synthetic oligonucleotide
uaccaagugggagagcggc

SEQ ID NO: 3139222 - RNA, 19 nt, Artificial Sequence
  Description of Artificial Sequence: Synthetic oligonucleotide
ucagagagcacaggggaga

SEQ ID NO: 3139223 - RNA, 19 nt, Artificial Sequence
  Description of Artificial Sequence: Synthetic oligonucleotide
uccaucccaaacuggucag

SEQ ID NO: 3139224 - RNA, 19 nt, Artificial Sequence
  Description of Artificial Sequence: Synthetic oligonucleotide
cacaguguccaucccaaac

SEQ ID NO: 3139225 - RNA, 19 nt, Artificial Sequence
  Description of Artificial Sequence: Synthetic oligonucleotide
uucacguugagagguuacc

SEQ ID NO: 3139226 - RNA, 19 nt, Artificial Sequence
  Description of Artificial Sequence: Synthetic oligonucleotide
aguguccaaguguggauca

SEQ ID NO: 3139227 - RNA, 19 nt, Artificial Sequence
  Description of Artificial Sequence: Synthetic oligonucleotide
gccauggcagauuuaaggc

SEQ ID NO: 3139228 - RNA, 19 nt, Artificial Sequence
  Description of Artificial Sequence: Synthetic oligonucleotide
acugcuugacaguggcaag

SEQ ID NO: 3139229 - RNA, 19 nt, Artificial Sequence
  Description of Artificial Sequence: Synthetic oligonucleotide
ucacguugagagguuacca

SEQ ID NO: 3139230 - RNA, 19 nt, Artificial Sequence
  Description of Artificial Sequence: Synthetic oligonucleotide
ugggccauggcagauuuaa

SEQ ID NO: 3139231 - RNA, 19 nt, Artificial Sequence
  Description of Artificial Sequence: Synthetic oligonucleotide
agagcggcauccugucuuc

SEQ ID NO: 3139232 - RNA, 19 nt, Artificial Sequence
  Description of Artificial Sequence: Synthetic oligonucleotide
uccaccuguuucacguuga

SEQ ID NO: 3139233 - RNA, 19 nt, Artificial Sequence
  Description of Artificial Sequence: Synthetic oligonucleotide
cugcuugacaguggcaagg

SEQ ID NO: 3139234 - RNA, 19 nt, Artificial Sequence
  Description of Artificial Sequence: Synthetic oligonucleotide
uccaaguguggaucagaga

SEQ ID NO: 3139235 - RNA, 19 nt, Artificial Sequence
  Description of Artificial Sequence: Synthetic oligonucleotide
caguguccaucccaaacug

SEQ ID NO: 3139236 - RNA, 19 nt, Artificial Sequence
  Description of Artificial Sequence: Synthetic oligonucleotide
aguggcaaggacauucaga

SEQ ID NO: 3139237 - RNA, 19 nt, Artificial Sequence
  Description of Artificial Sequence: Synthetic oligonucleotide
uggucaguacacugcuuga

SEQ ID NO: 3139238 - RNA, 19 nt, Artificial Sequence
  Description of Artificial Sequence: Synthetic oligonucleotide
ggaucagagagcacagggg

SEQ ID NO: 3139239 - RNA, 19 nt, Artificial Sequence
  Description of Artificial Sequence: Synthetic oligonucleotide
cuuccaccagcacaguguc

SEQ ID NO: 3139240 - RNA, 19 nt, Artificial Sequence
  Description of Artificial Sequence: Synthetic oligonucleotide
agguuaccaagugggagag

SEQ ID NO: 3139241 - RNA, 19 nt, Artificial Sequence
  Description of Artificial Sequence: Synthetic oligonucleotide
guccaaguguggaucagag

SEQ ID NO: 3139242 - RNA, 19 nt, Artificial Sequence
  Description of Artificial Sequence: Synthetic oligonucleotide
uggcaaggacauucagaag

SEQ ID NO: 3139243 - RNA, 19 nt, Artificial Sequence
  Description of Artificial Sequence: Synthetic oligonucleotide
aguguccaucccaaacugg

SEQ ID NO: 3139244 - RNA, 19 nt, Artificial Sequence
  Description of Artificial Sequence: Synthetic oligonucleotide
aggggagauggggucaugg

SEQ ID NO: 3139245 - RNA, 19 nt, Artificial Sequence
  Description of Artificial Sequence: Synthetic oligonucleotide
gcagauuuaaggcagacuu

SEQ ID NO: 3139246 - RNA, 19 nt, Artificial Sequence
  Description of Artificial Sequence: Synthetic oligonucleotide
uguccaaguguggaucaga

SEQ ID NO: 3139247 - RNA, 19 nt, Artificial Sequence
  Description of Artificial Sequence: Synthetic oligonucleotide
gggagauggggucaugggc

SEQ ID NO: 3139248 - RNA, 19 nt, Artificial Sequence
  Description of Artificial Sequence: Synthetic oligonucleotide
caaggacauucagaagccg

SEQ ID NO: 3139249 - RNA, 19 nt, Artificial Sequence
  Description of Artificial Sequence: Synthetic oligonucleotide
aggacauucagaagccgcu

SEQ ID NO: 3139250 - RNA, 19 nt, Artificial Sequence
  Description of Artificial Sequence: Synthetic oligonucleotide
aucagagagcacaggggag

SEQ ID NO: 3139251 - RNA, 19 nt, Artificial Sequence
  Description of Artificial Sequence: Synthetic oligonucleotide
uguuucacguugagagguu

SEQ ID NO: 3139252 - RNA, 19 nt, Artificial Sequence
  Description of Artificial Sequence: Synthetic oligonucleotide
ccuguuucacguugagagg

SEQ ID NO: 3139253 - RNA, 19 nt, Artificial Sequence
  Description of Artificial Sequence: Synthetic oligonucleotide
gucuuccaccagcacagug

SEQ ID NO: 3139254 - RNA, 19 nt, Artificial Sequence
  Description of Artificial Sequence: Synthetic oligonucleotide
gagauggggucaugggcca

SEQ ID NO: 3139255 - RNA, 19 nt, Artificial Sequence
  Description of Artificial Sequence: Synthetic oligonucleotide
agaagccgcugguccacag

SEQ ID NO: 3139256 - RNA, 19 nt, Artificial Sequence
  Description of Artificial Sequence: Synthetic oligonucleotide
guacacugcuugacagugg

SEQ ID NO: 3139257 - RNA, 19 nt, Artificial Sequence
  Description of Artificial Sequence: Synthetic oligonucleotide
ggggucaugggccauggca

SEQ ID NO: 3139258 - RNA, 19 nt, Artificial Sequence
  Description of Artificial Sequence: Synthetic oligonucleotide
caguuccaccuguuucacg

SEQ ID NO: 3139259 - RNA, 19 nt, Artificial Sequence
  Description of Artificial Sequence: Synthetic oligonucleotide
gggucaugggccauggcag

SEQ ID NO: 3139260 - RNA, 19 nt, Artificial Sequence
  Description of Artificial Sequence: Synthetic oligonucleotide
cauucagaagccgcugguc

SEQ ID NO: 3139261 - RNA, 19 nt, Artificial Sequence
  Description of Artificial Sequence: Synthetic oligonucleotide
gauggggucaugggccaug

SEQ ID NO: 3139262 - RNA, 19 nt, Artificial Sequence
  Description of Artificial Sequence: Synthetic oligonucleotide
agcacaggggagauggggu

SEQ ID NO: 3139263 - RNA, 19 nt, Artificial Sequence
  Description of Artificial Sequence: Synthetic oligonucleotide
cacguugagagguuaccaa

SEQ ID NO: 3139264 - RNA, 19 nt, Artificial Sequence
  Description of Artificial Sequence: Synthetic oligonucleotide
uuccaccagcacagugucc

SEQ ID NO: 3139265 - RNA, 19 nt, Artificial Sequence
  Description of Artificial Sequence: Synthetic oligonucleotide
caguguccaaguguggauc

SEQ ID NO: 3139266 - RNA, 19 nt, Artificial Sequence
  Description of Artificial Sequence: Synthetic oligonucleotide
guggaucagagagcacagg

SEQ ID NO: 3139267 - RNA, 19 nt, Artificial Sequence
  Description of Artificial Sequence: Synthetic oligonucleotide
uggcagauuuaaggcagac

SEQ ID NO: 3139268 - RNA, 19 nt, Artificial Sequence
  Description of Artificial Sequence: Synthetic oligonucleotide
cacaguguccaagugugga

SEQ ID NO: 3139269 - RNA, 19 nt, Artificial Sequence
  Description of Artificial Sequence: Synthetic oligonucleotide
cacugcuugacaguggcaa

SEQ ID NO: 3139270 - RNA, 19 nt, Artificial Sequence
  Description of Artificial Sequence: Synthetic oligonucleotide
auggggucaugggccaugg

SEQ ID NO: 3139271 - RNA, 19 nt, Artificial Sequence
  Description of Artificial Sequence: Synthetic oligonucleotide
agcggcauccugucuucca

SEQ ID NO: 3139272 - RNA, 19 nt, Artificial Sequence
  Description of Artificial Sequence: Synthetic oligonucleotide
caguggcaaggacauucag

SEQ ID NO: 3139273 - RNA, 19 nt, Artificial Sequence
  Description of Artificial Sequence: Synthetic oligonucleotide
agcacaguguccaucccaa

SEQ ID NO: 3139274 - RNA, 19 nt, Artificial Sequence
  Description of Artificial Sequence: Synthetic oligonucleotide
gagagguuaccaaguggga

SEQ ID NO: 3139275 - RNA, 19 nt, Artificial Sequence
  Description of Artificial Sequence: Synthetic oligonucleotide
cuguuucacguugagaggu

SEQ ID NO: 3139276 - RNA, 19 nt, Artificial Sequence
  Description of Artificial Sequence: Synthetic oligonucleotide
acaguggcaaggacauuca

SEQ ID NO: 3139277 - RNA, 19 nt, Artificial Sequence
  Description of Artificial Sequence: Synthetic oligonucleotide
aguguggaucagagagcac

SEQ ID NO: 3139278 - RNA, 19 nt, Artificial Sequence
  Description of Artificial Sequence: Synthetic oligonucleotide
cccaaacuggucaguacac

SEQ ID NO: 3139279 - RNA, 19 nt, Artificial Sequence
  Description of Artificial Sequence: Synthetic oligonucleotide
gugggagagcggcauccug

SEQ ID NO: 3139280 - RNA, 19 nt, Artificial Sequence
  Description of Artificial Sequence: Synthetic oligonucleotide
gagagcggcauccugucuu

SEQ ID NO: 3139281 - RNA, 19 nt, Artificial Sequence
  Description of Artificial Sequence: Synthetic oligonucleotide
cagcacaguguccauccca

SEQ ID NO: 3139282 - RNA, 19 nt, Artificial Sequence
  Description of Artificial Sequence: Synthetic oligonucleotide
ggucaguacacugcuugac

SEQ ID NO: 3139283 - RNA, 19 nt, Artificial Sequence
  Description of Artificial Sequence: Synthetic oligonucleotide
ccauggcagauuuaaggca

SEQ ID NO: 3139284 - RNA, 19 nt, Artificial Sequence
  Description of Artificial Sequence: Synthetic oligonucleotide
auccugucuuccaccagca

SEQ ID NO: 3139285 - RNA, 19 nt, Artificial Sequence
  Description of Artificial Sequence: Synthetic oligonucleotide
guguccaaguguggaucag

SEQ ID NO: 3139286 - RNA, 19 nt, Artificial Sequence
  Description of Artificial Sequence: Synthetic oligonucleotide
caagugggagagcggcauc

SEQ ID NO: 3139287 - RNA, 19 nt, Artificial Sequence
  Description of Artificial Sequence: Synthetic oligonucleotide
agagcacaggggagauggg

SEQ ID NO: 3139288 - RNA, 19 nt, Artificial Sequence
  Description of Artificial Sequence: Synthetic oligonucleotide
uggggucaugggccauggc

SEQ ID NO: 3139289 - RNA, 19 nt, Artificial Sequence
  Description of Artificial Sequence: Synthetic oligonucleotide
agugggagagcggcauccu

SEQ ID NO: 3139290 - RNA, 19 nt, Artificial Sequence
  Description of Artificial Sequence: Synthetic oligonucleotide
auggcagauuuaaggcaga

SEQ ID NO: 3139291 - RNA, 19 nt, Artificial Sequence
  Description of Artificial Sequence: Synthetic oligonucleotide
ucaugggccauggcagauu

SEQ ID NO: 3139292 - RNA, 19 nt, Artificial Sequence
  Description of Artificial Sequence: Synthetic oligonucleotide
guuucacguugagagguua

SEQ ID NO: 3139293 - RNA, 19 nt, Artificial Sequence
  Description of Artificial Sequence: Synthetic oligonucleotide
caucccaaacuggucagua

SEQ ID NO: 3139294 - RNA, 19 nt, Artificial Sequence
  Description of Artificial Sequence: Synthetic oligonucleotide
ccacaguguccaagugugg

SEQ ID NO: 3139295 - RNA, 19 nt, Artificial Sequence
  Description of Artificial Sequence: Synthetic oligonucleotide
cagauuuaaggcagacuuu

SEQ ID NO: 3139296 - RNA, 19 nt, Artificial Sequence
  Description of Artificial Sequence: Synthetic oligonucleotide
gaagccgcugguccacagu

SEQ ID NO: 3139297 - RNA, 19 nt, Artificial Sequence
  Description of Artificial Sequence: Synthetic oligonucleotide
ugucuuccaccagcacagu

SEQ ID NO: 3139298 - RNA, 19 nt, Artificial Sequence
  Description of Artificial Sequence: Synthetic oligonucleotide
ggucaugggccauggcaga

SEQ ID NO: 3139299 - RNA, 19 nt, Artificial Sequence
  Description of Artificial Sequence: Synthetic oligonucleotide
gggagagcggcauccuguc

SEQ ID NO: 3139300 - RNA, 19 nt, Artificial Sequence
  Description of Artificial Sequence: Synthetic oligonucleotide
accaagugggagagcggca

SEQ ID NO: 3139301 - RNA, 19 nt, Artificial Sequence
  Description of Artificial Sequence: Synthetic oligonucleotide
gcggcauccugucuuccac

SEQ ID NO: 3139302 - RNA, 19 nt, Artificial Sequence
  Description of Artificial Sequence: Synthetic oligonucleotide
caguacacugcuugacagu

SEQ ID NO: 3139303 - RNA, 19 nt, Artificial Sequence
  Description of Artificial Sequence: Synthetic oligonucleotide
gcacaggggagaugggguc

SEQ ID NO: 3139304 - RNA, 19 nt, Artificial Sequence
  Description of Artificial Sequence: Synthetic oligonucleotide
gcauccugucuuccaccag

SEQ ID NO: 3139305 - RNA, 19 nt, Artificial Sequence
  Description of Artificial Sequence: Synthetic oligonucleotide
cacaggggagaugggguca

SEQ ID NO: 3139306 - RNA, 19 nt, Artificial Sequence
  Description of Artificial Sequence: Synthetic oligonucleotide
acaggggagauggggucau

SEQ ID NO: 3139307 - RNA, 19 nt, Artificial Sequence
  Description of Artificial Sequence: Synthetic oligonucleotide
gagcggcauccugucuucc

SEQ ID NO: 3139308 - RNA, 19 nt, Artificial Sequence
  Description of Artificial Sequence: Synthetic oligonucleotide
gccgcugguccacaguguc

SEQ ID NO: 3139309 - RNA, 19 nt, Artificial Sequence
  Description of Artificial Sequence: Synthetic oligonucleotide
caccuguuucacguugaga

SEQ ID NO: 3139310 - RNA, 19 nt, Artificial Sequence
  Description of Artificial Sequence: Synthetic oligonucleotide
ccaccuguuucacguugag

SEQ ID NO: 3139311 - RNA, 19 nt, Artificial Sequence
  Description of Artificial Sequence: Synthetic oligonucleotide
acacugcuugacaguggca

SEQ ID NO: 3139312 - RNA, 19 nt, Artificial Sequence
  Description of Artificial Sequence: Synthetic oligonucleotide
caugggccauggcagauuu

SEQ ID NO: 3139313 - RNA, 19 nt, Artificial Sequence
  Description of Artificial Sequence: Synthetic oligonucleotide
gggccauggcagauuuaag

SEQ ID NO: 3139314 - RNA, 19 nt, Artificial Sequence
  Description of Artificial Sequence: Synthetic oligonucleotide
acuggucaguacacugcuu

SEQ ID NO: 3139315 - RNA, 19 nt, Artificial Sequence
  Description of Artificial Sequence: Synthetic oligonucleotide
ccgcugguccacagugucc

SEQ ID NO: 3139316 - RNA, 19 nt, Artificial Sequence
  Description of Artificial Sequence: Synthetic oligonucleotide
gguuaccaagugggagagc

SEQ ID NO: 3139317 - RNA, 19 nt, Artificial Sequence
  Description of Artificial Sequence: Synthetic oligonucleotide
ccagcacaguguccauccc

SEQ ID NO: 3139318 - RNA, 19 nt, Artificial Sequence
  Description of Artificial Sequence: Synthetic oligonucleotide
ggcagauuuaaggcagacu

SEQ ID NO: 3139319 - RNA, 19 nt, Artificial Sequence
  Description of Artificial Sequence: Synthetic oligonucleotide
ugacaguggcaaggacauu

SEQ ID NO: 3139320 - RNA, 19 nt, Artificial Sequence
  Description of Artificial Sequence: Synthetic oligonucleotide
agauggggucaugggccau

SEQ ID NO: 3139321 - RNA, 19 nt, Artificial Sequence
  Description of Artificial Sequence: Synthetic oligonucleotide
cggcauccugucuuccacc

SEQ ID NO: 3139322 - RNA, 19 nt, Artificial Sequence
  Description of Artificial Sequence: Synthetic oligonucleotide
cguugagagguuaccaagu

SEQ ID NO: 3139323 - RNA, 19 nt, Artificial Sequence
  Description of Artificial Sequence: Synthetic oligonucleotide
guuccaccuguuucacguu

SEQ ID NO: 3139324 - RNA, 19 nt, Artificial Sequence
  Description of Artificial Sequence: Synthetic oligonucleotide
cagaagccgcugguccaca

SEQ ID NO: 3139325 - RNA, 19 nt, Artificial Sequence
  Description of Artificial Sequence: Synthetic oligonucleotide
gcacaguguccaucccaaa

SEQ ID NO: 3139326 - RNA, 19 nt, Artificial Sequence
  Description of Artificial Sequence: Synthetic oligonucleotide
ggagagcggcauccugucu

SEQ ID NO: 3139327 - RNA, 19 nt, Artificial Sequence
  Description of Artificial Sequence: Synthetic oligonucleotide
ccaaacuggucaguacacu

SEQ ID NO: 3139328 - RNA, 19 nt, Artificial Sequence
  Description of Artificial Sequence: Synthetic oligonucleotide
augggccauggcagauuua

SEQ ID NO: 3139329 - RNA, 19 nt, Artificial Sequence
  Description of Artificial Sequence: Synthetic oligonucleotide
gcugguccacaguguccaa

SEQ ID NO: 3139330 - RNA, 19 nt, Artificial Sequence
  Description of Artificial Sequence: Synthetic oligonucleotide
ccaagugggagagcggcau

SEQ ID NO: 3139331 - RNA, 19 nt, Artificial Sequence
  Description of Artificial Sequence: Synthetic oligonucleotide
ccaucccaaacuggucagu

SEQ ID NO: 3139332 - RNA, 19 nt, Artificial Sequence
  Description of Artificial Sequence: Synthetic oligonucleotide
aaagcagguucacuaaagc

SEQ ID NO: 3139333 - RNA, 19 nt, Artificial Sequence
  Description of Artificial Sequence: Synthetic oligonucleotide
aagcagguucacuaaagcc

SEQ ID NO: 3139334 - RNA, 19 nt, Artificial Sequence
  Description of Artificial Sequence: Synthetic oligonucleotide
uauagaaggauccagcagu

SEQ ID NO: 3139335 - RNA, 19 nt, Artificial Sequence
  Description of Artificial Sequence: Synthetic oligonucleotide
aauagugagcgacacggca

SEQ ID NO: 3139336 - RNA, 19 nt, Artificial Sequence
  Description of Artificial Sequence: Synthetic oligonucleotide
gguccagugguauagaagg

SEQ ID NO: 3139337 - RNA, 19 nt, Artificial Sequence
  Description of Artificial Sequence: Synthetic oligonucleotide
auuggcaauagugagcgac

SEQ ID NO: 3139338 - RNA, 19 nt, Artificial Sequence
  Description of Artificial Sequence: Synthetic oligonucleotide
auggcagucagcaauaagg

SEQ ID NO: 3139339 - RNA, 19 nt, Artificial Sequence
  Description of Artificial Sequence: Synthetic oligonucleotide
uucacuaaagccagcguca

SEQ ID NO: 3139340 - RNA, 19 nt, Artificial Sequence
  Description of Artificial Sequence: Synthetic oligonucleotide
aaggaggaggcccauggag

SEQ ID NO: 3139341 - RNA, 19 nt, Artificial Sequence
  Description of Artificial Sequence: Synthetic oligonucleotide
agcagacaaaagcagguuc

SEQ ID NO: 3139342 - RNA, 19 nt, Artificial Sequence
  Description of Artificial Sequence: Synthetic oligonucleotide
ucagcaauaaggcggcggc

SEQ ID NO: 3139343 - RNA, 19 nt, Artificial Sequence
  Description of Artificial Sequence: Synthetic oligonucleotide
ugguauagaaggauccagc

SEQ ID NO: 3139344 - RNA, 19 nt, Artificial Sequence
  Description of Artificial Sequence: Synthetic oligonucleotide
aguccguguguccaggccc

SEQ ID NO: 3139345 - RNA, 19 nt, Artificial Sequence
  Description of Artificial Sequence: Synthetic oligonucleotide
aaaagcagguucacuaaag

SEQ ID NO: 3139346 - RNA, 19 nt, Artificial Sequence
  Description of Artificial Sequence: Synthetic oligonucleotide
uaaagccagcgucagcagg

SEQ ID NO: 3139347 - RNA, 19 nt, Artificial Sequence
  Description of Artificial Sequence: Synthetic oligonucleotide
aaagccagcgucagcaggg

SEQ ID NO: 3139348 - RNA, 19 nt, Artificial Sequence
  Description of Artificial Sequence: Synthetic oligonucleotide
cuugugggaucaaaggagc

SEQ ID NO: 3139349 - RNA, 19 nt, Artificial Sequence
  Description of Artificial Sequence: Synthetic oligonucleotide
acuaaagccagcgucagca

SEQ ID NO: 3139350 - RNA, 19 nt, Artificial Sequence
  Description of Artificial Sequence: Synthetic oligonucleotide
ggaucaaaggagcaguccg

SEQ ID NO: 3139351 - RNA, 19 nt, Artificial Sequence
  Description of Artificial Sequence: Synthetic oligonucleotide
gcaauagugagcgacacgg

SEQ ID NO: 3139352 - RNA, 19 nt, Artificial Sequence
  Description of Artificial Sequence: Synthetic oligonucleotide
gacaaaagcagguucacua

SEQ ID NO: 3139353 - RNA, 19 nt, Artificial Sequence
  Description of Artificial Sequence: Synthetic oligonucleotide
uggcagucagcaauaaggc

SEQ ID NO: 3139354 - RNA, 19 nt, Artificial Sequence
  Description of Artificial Sequence: Synthetic oligonucleotide
agaaggauccagcaguccu

SEQ ID NO: 3139355 - RNA, 19 nt, Artificial Sequence
  Description of Artificial Sequence: Synthetic oligonucleotide
aauccuugugggaucaaag

SEQ ID NO: 3139356 - RNA, 19 nt, Artificial Sequence
  Description of Artificial Sequence: Synthetic oligonucleotide
guauagaaggauccagcag

SEQ ID NO: 3139357 - RNA, 19 nt, Artificial Sequence
  Description of Artificial Sequence: Synthetic oligonucleotide
cagugguauagaaggaucc

SEQ ID NO: 3139358 - RNA, 19 nt, Artificial Sequence
  Description of Artificial Sequence: Synthetic oligonucleotide
gcagucagcaauaaggcgg

SEQ ID NO: 3139359 - RNA, 19 nt, Artificial Sequence
  Description of Artificial Sequence: Synthetic oligonucleotide
guucacuaaagccagcguc

SEQ ID NO: 3139360 - RNA, 19 nt, Artificial Sequence
  Description of Artificial Sequence: Synthetic oligonucleotide
aaaggagcaguccgugugu

SEQ ID NO: 3139361 - RNA, 19 nt, Artificial Sequence
  Description of Artificial Sequence: Synthetic oligonucleotide
ugguccagugguauagaag

SEQ ID NO: 3139362 - RNA, 19 nt, Artificial Sequence
  Description of Artificial Sequence: Synthetic oligonucleotide
ugugggaucaaaggagcag

SEQ ID NO: 3139363 - RNA, 19 nt, Artificial Sequence
  Description of Artificial Sequence: Synthetic oligonucleotide
agcagguucacuaaagcca

SEQ ID NO: 3139364 - RNA, 19 nt, Artificial Sequence
  Description of Artificial Sequence: Synthetic oligonucleotide
uagugagcgacacggcaag

SEQ ID NO: 3139365 - RNA, 19 nt, Artificial Sequence
  Description of Artificial Sequence: Synthetic oligonucleotide
uuggcaauagugagcgaca

SEQ ID NO: 3139366 - RNA, 19 nt, Artificial Sequence
  Description of Artificial Sequence: Synthetic oligonucleotide
caccauuggcaauagugag

SEQ ID NO: 3139367 - RNA, 19 nt, Artificial Sequence
  Description of Artificial Sequence: Synthetic oligonucleotide
caaaggagcaguccgugug

SEQ ID NO: 3139368 - RNA, 19 nt, Artificial Sequence
  Description of Artificial Sequence: Synthetic oligonucleotide
agguucacuaaagccagcg

SEQ ID NO: 3139369 - RNA, 19 nt, Artificial Sequence
  Description of Artificial Sequence: Synthetic oligonucleotide
cauaaauccuugugggauc

SEQ ID NO: 3139370 - RNA, 19 nt, Artificial Sequence
  Description of Artificial Sequence: Synthetic oligonucleotide
gauggcagucagcaauaag

SEQ ID NO: 3139371 - RNA, 19 nt, Artificial Sequence
  Description of Artificial Sequence: Synthetic oligonucleotide
aggcccauggagcaggcag

SEQ ID NO: 3139372 - RNA, 19 nt, Artificial Sequence
  Description of Artificial Sequence: Synthetic oligonucleotide
acaaaagcagguucacuaa

SEQ ID NO: 3139373 - RNA, 19 nt, Artificial Sequence
  Description of Artificial Sequence: Synthetic oligonucleotide
aggaggaggcccauggagc

SEQ ID NO: 3139374 - RNA, 19 nt, Artificial Sequence
  Description of Artificial Sequence: Synthetic oligonucleotide
aauaaggcggcggccacca

SEQ ID NO: 3139375 - RNA, 19 nt, Artificial Sequence
  Description of Artificial Sequence: Synthetic oligonucleotide
cagucagcaauaaggcggc

SEQ ID NO: 3139376 - RNA, 19 nt, Artificial Sequence
  Description of Artificial Sequence: Synthetic oligonucleotide
auagaaggauccagcaguc

SEQ ID NO: 3139377 - RNA, 19 nt, Artificial Sequence
  Description of Artificial Sequence: Synthetic oligonucleotide
ccauuggcaauagugagcg

SEQ ID NO: 3139378 - RNA, 19 nt, Artificial Sequence
  Description of Artificial Sequence: Synthetic oligonucleotide
gacacggcaaggaggaggc

SEQ ID NO: 3139379 - RNA, 19 nt, Artificial Sequence
  Description of Artificial Sequence: Synthetic oligonucleotide
gguauagaaggauccagca

SEQ ID NO: 3139380 - RNA, 19 nt, Artificial Sequence
  Description of Artificial Sequence: Synthetic oligonucleotide
ccuugugggaucaaaggag

SEQ ID NO: 3139381 - RNA, 19 nt, Artificial Sequence
  Description of Artificial Sequence: Synthetic oligonucleotide
cauggagcaggcagcagac

SEQ ID NO: 3139382 - RNA, 19 nt, Artificial Sequence
  Description of Artificial Sequence: Synthetic oligonucleotide
aggagcaguccgugugucc

SEQ ID NO: 3139383 - RNA, 19 nt, Artificial Sequence
  Description of Artificial Sequence: Synthetic oligonucleotide
uugugggaucaaaggagca

SEQ ID NO: 3139384 - RNA, 19 nt, Artificial Sequence
  Description of Artificial Sequence: Synthetic oligonucleotide
gugguauagaaggauccag

SEQ ID NO: 3139385 - RNA, 19 nt, Artificial Sequence
  Description of Artificial Sequence: Synthetic oligonucleotide
gcaaggaggaggcccaugg

SEQ ID NO: 3139386 - RNA, 19 nt, Artificial Sequence
  Description of Artificial Sequence: Synthetic oligonucleotide
auaaauccuugugggauca

SEQ ID NO: 3139387 - RNA, 19 nt, Artificial Sequence
  Description of Artificial Sequence: Synthetic oligonucleotide
ucacuaaagccagcgucag

SEQ ID NO: 3139388 - RNA, 19 nt, Artificial Sequence
  Description of Artificial Sequence: Synthetic oligonucleotide
ucaaaggagcaguccgugu

SEQ ID NO: 3139389 - RNA, 19 nt, Artificial Sequence
  Description of Artificial Sequence: Synthetic oligonucleotide
gucagcaauaaggcggcgg

SEQ ID NO: 3139390 - RNA, 19 nt, Artificial Sequence
  Description of Artificial Sequence: Synthetic oligonucleotide
aaauccuugugggaucaaa

SEQ ID NO: 3139391 - RNA, 19 nt, Artificial Sequence
  Description of Artificial Sequence: Synthetic oligonucleotide
ggcagucagcaauaaggcg

SEQ ID NO: 3139392 - RNA, 19 nt, Artificial Sequence
  Description of Artificial Sequence: Synthetic oligonucleotide
caauagugagcgacacggc

SEQ ID NO: 3139393 - RNA, 19 nt, Artificial Sequence
  Description of Artificial Sequence: Synthetic oligonucleotide
gagcgacacggcaaggagg

SEQ ID NO: 3139394 - RNA, 19 nt, Artificial Sequence
  Description of Artificial Sequence: Synthetic oligonucleotide
gccaccauuggcaauagug

SEQ ID NO: 3139395 - RNA, 19 nt, Artificial Sequence
  Description of Artificial Sequence: Synthetic oligonucleotide
agugguauagaaggaucca

SEQ ID NO: 3139396 - RNA, 19 nt, Artificial Sequence
  Description of Artificial Sequence: Synthetic oligonucleotide
aucaaaggagcaguccgug

SEQ ID NO: 3139397 - RNA, 19 nt, Artificial Sequence
  Description of Artificial Sequence: Synthetic oligonucleotide
uccagugguauagaaggau

SEQ ID NO: 3139398 - RNA, 19 nt, Artificial Sequence
  Description of Artificial Sequence: Synthetic oligonucleotide
cuaaagccagcgucagcag

SEQ ID NO: 3139399 - RNA, 19 nt, Artificial Sequence
  Description of Artificial Sequence: Synthetic oligonucleotide
aagccagcgucagcagggc

SEQ ID NO: 3139400 - RNA, 19 nt, Artificial Sequence
  Description of Artificial Sequence: Synthetic oligonucleotide
agcaauaaggcggcggcca

SEQ ID NO: 3139401 - RNA, 19 nt, Artificial Sequence
  Description of Artificial Sequence: Synthetic oligonucleotide
uggauggcagucagcaaua

SEQ ID NO: 3139402 - RNA, 19 nt, Artificial Sequence
  Description of Artificial Sequence: Synthetic oligonucleotide
ugggaucaaaggagcaguc

SEQ ID NO: 3139403 - RNA, 19 nt, Artificial Sequence
  Description of Artificial Sequence: Synthetic oligonucleotide
cacggcaaggaggaggccc

SEQ ID NO: 3139404 - RNA, 19 nt, Artificial Sequence
  Description of Artificial Sequence: Synthetic oligonucleotide
agcgacacggcaaggagga

SEQ ID NO: 3139405 - RNA, 19 nt, Artificial Sequence
  Description of Artificial Sequence: Synthetic oligonucleotide
gcagguucacuaaagccag

SEQ ID NO: 3139406 - RNA, 19 nt, Artificial Sequence
  Description of Artificial Sequence: Synthetic oligonucleotide
uagaaggauccagcagucc

SEQ ID NO: 3139407 - RNA, 19 nt, Artificial Sequence
  Description of Artificial Sequence: Synthetic oligonucleotide
ggcaauagugagcgacacg

SEQ ID NO: 3139408 - RNA, 19 nt, Artificial Sequence
  Description of Artificial Sequence: Synthetic oligonucleotide
aggaggcccauggagcagg

SEQ ID NO: 3139409 - RNA, 19 nt, Artificial Sequence
  Description of Artificial Sequence: Synthetic oligonucleotide
agccagcgucagcagggcc

SEQ ID NO: 3139410 - RNA, 19 nt, Artificial Sequence
  Description of Artificial Sequence: Synthetic oligonucleotide
uggcaauagugagcgacac

SEQ ID NO: 3139411 - RNA, 19 nt, Artificial Sequence
  Description of Artificial Sequence: Synthetic oligonucleotide
uguccaggccccuggucca

SEQ ID NO: 3139412 - RNA, 19 nt, Artificial Sequence
  Description of Artificial Sequence: Synthetic oligonucleotide
auagugagcgacacggcaa

SEQ ID NO: 3139413 - RNA, 19 nt, Artificial Sequence
  Description of Artificial Sequence: Synthetic oligonucleotide
uaaggcggcggccaccauu

SEQ ID NO: 3139414 - RNA, 19 nt, Artificial Sequence
  Description of Artificial Sequence: Synthetic oligonucleotide
agacaaaagcagguucacu

SEQ ID NO: 3139415 - RNA, 19 nt, Artificial Sequence
  Description of Artificial Sequence: Synthetic oligonucleotide
cagacaaaagcagguucac

SEQ ID NO: 3139416 - RNA, 19 nt, Artificial Sequence
  Description of Artificial Sequence: Synthetic oligonucleotide
caaaagcagguucacuaaa

SEQ ID NO: 3139417 - RNA, 19 nt, Artificial Sequence
  Description of Artificial Sequence: Synthetic oligonucleotide
uguguccaggccccugguc

SEQ ID NO: 3139418 - RNA, 19 nt, Artificial Sequence
  Description of Artificial Sequence: Synthetic oligonucleotide
gagcaguccguguguccag

SEQ ID NO: 3139419 - RNA, 19 nt, Artificial Sequence
  Description of Artificial Sequence: Synthetic oligonucleotide
gcagacaaaagcagguuca

SEQ ID NO: 3139420 - RNA, 19 nt, Artificial Sequence
  Description of Artificial Sequence: Synthetic oligonucleotide
ccagugguauagaaggauc

SEQ ID NO: 3139421 - RNA, 19 nt, Artificial Sequence
  Description of Artificial Sequence: Synthetic oligonucleotide
caguccguguguccaggcc

SEQ ID NO: 3139422 - RNA, 19 nt, Artificial Sequence
  Description of Artificial Sequence: Synthetic oligonucleotide
cacuaaagccagcgucagc

SEQ ID NO: 3139423 - RNA, 19 nt, Artificial Sequence
  Description of Artificial Sequence: Synthetic oligonucleotide
agcaguccguguguccagg

SEQ ID NO: 3139424 - RNA, 19 nt, Artificial Sequence
  Description of Artificial Sequence: Synthetic oligonucleotide
aggccccugguccaguggu

SEQ ID NO: 3139425 - RNA, 19 nt, Artificial Sequence
  Description of Artificial Sequence: Synthetic oligonucleotide
cuggauggcagucagcaau

SEQ ID NO: 3139426 - RNA, 19 nt, Artificial Sequence
  Description of Artificial Sequence: Synthetic oligonucleotide
ccaccauuggcaauaguga

SEQ ID NO: 3139427 - RNA, 19 nt, Artificial Sequence
  Description of Artificial Sequence: Synthetic oligonucleotide
agugagcgacacggcaagg

SEQ ID NO: 3139428 - RNA, 19 nt, Artificial Sequence
  Description of Artificial Sequence: Synthetic oligonucleotide
caauaaggcggcggccacc

SEQ ID NO: 3139429 - RNA, 19 nt, Artificial Sequence
  Description of Artificial Sequence: Synthetic oligonucleotide
gaucaaaggagcaguccgu

SEQ ID NO: 3139430 - RNA, 19 nt, Artificial Sequence
  Description of Artificial Sequence: Synthetic oligonucleotide
gggaucaaaggagcagucc

SEQ ID NO: 3139431 - RNA, 19 nt, Artificial Sequence
  Description of Artificial Sequence: Synthetic oligonucleotide
cagguucacuaaagccagc

SEQ ID NO: 3139432 - RNA, 19 nt, Artificial Sequence
  Description of Artificial Sequence: Synthetic oligonucleotide
agcaguccuggauggcagu

SEQ ID NO: 3139433 - RNA, 19 nt, Artificial Sequence
  Description of Artificial Sequence: Synthetic oligonucleotide
ggaggaggcccauggagca

SEQ ID NO: 3139434 - RNA, 19 nt, Artificial Sequence
  Description of Artificial Sequence: Synthetic oligonucleotide
cagcaauaaggcggcggcc

SEQ ID NO: 3139435 - RNA, 19 nt, Artificial Sequence
  Description of Artificial Sequence: Synthetic oligonucleotide
agucagcaauaaggcggcg

SEQ ID NO: 3139436 - RNA, 19 nt, Artificial Sequence
  Description of Artificial Sequence: Synthetic oligonucleotide
uccagcaguccuggauggc

SEQ ID NO: 3139437 - RNA, 19 nt, Artificial Sequence
  Description of Artificial Sequence: Synthetic oligonucleotide
gugggaucaaaggagcagu

SEQ ID NO: 3139438 - RNA, 19 nt, Artificial Sequence
  Description of Artificial Sequence: Synthetic oligonucleotide
gaggaggcccauggagcag

SEQ ID NO: 3139439 - RNA, 19 nt, Artificial Sequence
  Description of Artificial Sequence: Synthetic oligonucleotide
ggagcaguccgugugucca

SEQ ID NO: 3139440 - RNA, 19 nt, Artificial Sequence
  Description of Artificial Sequence: Synthetic oligonucleotide
guccguguguccaggcccc

SEQ ID NO: 3139441 - RNA, 19 nt, Artificial Sequence
  Description of Artificial Sequence: Synthetic oligonucleotide
cugguccagugguauagaa

SEQ ID NO: 3139442 - RNA, 19 nt, Artificial Sequence
  Description of Artificial Sequence: Synthetic oligonucleotide
acacggcaaggaggaggcc

SEQ ID NO: 3139443 - RNA, 19 nt, Artificial Sequence
  Description of Artificial Sequence: Synthetic oligonucleotide
caggccccugguccagugg

SEQ ID NO: 3139444 - RNA, 19 nt, Artificial Sequence
  Description of Artificial Sequence: Synthetic oligonucleotide
uaaauccuugugggaucaa

SEQ ID NO: 3139445 - RNA, 19 nt, Artificial Sequence
  Description of Artificial Sequence: Synthetic oligonucleotide
acggcaaggaggaggccca

SEQ ID NO: 3139446 - RNA, 19 nt, Artificial Sequence
  Description of Artificial Sequence: Synthetic oligonucleotide
ccauggagcaggcagcaga

SEQ ID NO: 3139447 - RNA, 19 nt, Artificial Sequence
  Description of Artificial Sequence: Synthetic oligonucleotide
caaggaggaggcccaugga

SEQ ID NO: 3139448 - RNA, 19 nt, Artificial Sequence
  Description of Artificial Sequence: Synthetic oligonucleotide
agcaggcagcagacaaaag

SEQ ID NO: 3139449 - RNA, 19 nt, Artificial Sequence
  Description of Artificial Sequence: Synthetic oligonucleotide
gcaauaaggcggcggccac

SEQ ID NO: 3139450 - RNA, 19 nt, Artificial Sequence
  Description of Artificial Sequence: Synthetic oligonucleotide
guccagugguauagaagga

SEQ ID NO: 3139451 - RNA, 19 nt, Artificial Sequence
  Description of Artificial Sequence: Synthetic oligonucleotide
aggauccagcaguccugga

SEQ ID NO: 3139452 - RNA, 19 nt, Artificial Sequence
  Description of Artificial Sequence: Synthetic oligonucleotide
gcagcagacaaaagcaggu

SEQ ID NO: 3139453 - RNA, 19 nt, Artificial Sequence
  Description of Artificial Sequence: Synthetic oligonucleotide
agcgucagcagggcccagu

SEQ ID NO: 3139454 - RNA, 19 nt, Artificial Sequence
  Description of Artificial Sequence: Synthetic oligonucleotide
ggcggcggccaccauuggc

SEQ ID NO: 3139455 - RNA, 19 nt, Artificial Sequence
  Description of Artificial Sequence: Synthetic oligonucleotide
gcgucagcagggcccagug

SEQ ID NO: 3139456 - RNA, 19 nt, Artificial Sequence
  Description of Artificial Sequence: Synthetic oligonucleotide
gguucacuaaagccagcgu

SEQ ID NO: 3139457 - RNA, 19 nt, Artificial Sequence
  Description of Artificial Sequence: Synthetic oligonucleotide
gcaguccguguguccaggc

SEQ ID NO: 3139458 - RNA, 19 nt, Artificial Sequence
  Description of Artificial Sequence: Synthetic oligonucleotide
gcggcggccaccauuggca

SEQ ID NO: 3139459 - RNA, 19 nt, Artificial Sequence
  Description of Artificial Sequence: Synthetic oligonucleotide
aggcggcggccaccauugg

SEQ ID NO: 3139460 - RNA, 19 nt, Artificial Sequence
  Description of Artificial Sequence: Synthetic oligonucleotide
ggagcaggcagcagacaaa

SEQ ID NO: 3139461 - RNA, 19 nt, Artificial Sequence
  Description of Artificial Sequence: Synthetic oligonucleotide
auaaggcggcggccaccau

SEQ ID NO: 3139462 - RNA, 19 nt, Artificial Sequence
  Description of Artificial Sequence: Synthetic oligonucleotide
guccaggccccugguccag

SEQ ID NO: 3139463 - RNA, 19 nt, Artificial Sequence
  Description of Artificial Sequence: Synthetic oligonucleotide
ccagcaguccuggauggca

SEQ ID NO: 3139464 - RNA, 19 nt, Artificial Sequence
  Description of Artificial Sequence: Synthetic oligonucleotide
uccguguguccaggccccu

SEQ ID NO: 3139465 - RNA, 19 nt, Artificial Sequence
  Description of Artificial Sequence: Synthetic oligonucleotide
gcaguccuggauggcaguc

SEQ ID NO: 3139466 - RNA, 19 nt, Artificial Sequence
  Description of Artificial Sequence: Synthetic oligonucleotide
ggcaaggaggaggcccaug

SEQ ID NO: 3139467 - RNA, 19 nt, Artificial Sequence
  Description of Artificial Sequence: Synthetic oligonucleotide
gcggccaccauuggcaaua

SEQ ID NO: 3139468 - RNA, 19 nt, Artificial Sequence
  Description of Artificial Sequence: Synthetic oligonucleotide
gaggcccauggagcaggca

SEQ ID NO: 3139469 - RNA, 19 nt, Artificial Sequence
  Description of Artificial Sequence: Synthetic oligonucleotide
ggauggcagucagcaauaa

SEQ ID NO: 3139470 - RNA, 19 nt, Artificial Sequence
  Description of Artificial Sequence: Synthetic oligonucleotide
ggaggcccauggagcaggc

SEQ ID NO: 3139471 - RNA, 19 nt, Artificial Sequence
  Description of Artificial Sequence: Synthetic oligonucleotide
gcccauggagcaggcagca

SEQ ID NO: 3139472 - RNA, 19 nt, Artificial Sequence
  Description of Artificial Sequence: Synthetic oligonucleotide
ccaggccccugguccagug

SEQ ID NO: 3139473 - RNA, 19 nt, Artificial Sequence
  Description of Artificial Sequence: Synthetic oligonucleotide
cgucagcagggcccagugc

SEQ ID NO: 3139474 - RNA, 19 nt, Artificial Sequence
  Description of Artificial Sequence: Synthetic oligonucleotide
cagcagacaaaagcagguu

SEQ ID NO: 3139475 - RNA, 19 nt, Artificial Sequence
  Description of Artificial Sequence: Synthetic oligonucleotide
cccauggagcaggcagcag

SEQ ID NO: 3139476 - RNA, 19 nt, Artificial Sequence
  Description of Artificial Sequence: Synthetic oligonucleotide
ccagcgucagcagggccca

SEQ ID NO: 3139477 - RNA, 19 nt, Artificial Sequence
  Description of Artificial Sequence: Synthetic oligonucleotide
gcgacacggcaaggaggag

SEQ ID NO: 3139478 - RNA, 19 nt, Artificial Sequence
  Description of Artificial Sequence: Synthetic oligonucleotide
ccugguccagugguauaga

SEQ ID NO: 3139479 - RNA, 19 nt, Artificial Sequence
  Description of Artificial Sequence: Synthetic oligonucleotide
cagcgucagcagggcccag

SEQ ID NO: 3139480 - RNA, 19 nt, Artificial Sequence
  Description of Artificial Sequence: Synthetic oligonucleotide
ccguguguccaggccccug

SEQ ID NO: 3139481 - RNA, 19 nt, Artificial Sequence
  Description of Artificial Sequence: Synthetic oligonucleotide
ggccaccauuggcaauagu

SEQ ID NO: 3139482 - RNA, 19 nt, Artificial Sequence
  Description of Artificial Sequence: Synthetic oligonucleotide
gccccugguccagugguau

SEQ ID NO: 3139483 - RNA, 19 nt, Artificial Sequence
  Description of Artificial Sequence: Synthetic oligonucleotide
cggccaccauuggcaauag

SEQ ID NO: 3139484 - RNA, 19 nt, Artificial Sequence
  Description of Artificial Sequence: Synthetic oligonucleotide
ggcggccaccauuggcaau

SEQ ID NO: 3139485 - RNA, 19 nt, Artificial Sequence
  Description of Artificial Sequence: Synthetic oligonucleotide
ccccugguccagugguaua

SEQ ID NO: 3139486 - RNA, 19 nt, Artificial Sequence
  Description of Artificial Sequence: Synthetic oligonucleotide
ggccccugguccaguggua

SEQ ID NO: 3139487 - RNA, 19 nt, Artificial Sequence
  Description of Artificial Sequence: Synthetic oligonucleotide
cggcaaggaggaggcccau

SEQ ID NO: 3139488 - RNA, 19 nt, Artificial Sequence
  Description of Artificial Sequence: Synthetic oligonucleotide
ucuccuaucacgaugaucu

SEQ ID NO: 3139489 - RNA, 19 nt, Artificial Sequence
  Description of Artificial Sequence: Synthetic oligonucleotide
aucacgaugaucuugaaga

SEQ ID NO: 3139490 - RNA, 19 nt, Artificial Sequence
  Description of Artificial Sequence: Synthetic oligonucleotide
acgaugaucuugaagaugc

SEQ ID NO: 3139491 - RNA, 19 nt, Artificial Sequence
  Description of Artificial Sequence: Synthetic oligonucleotide
aucuugaagaugcgggagc

SEQ ID NO: 3139492 - RNA, 19 nt, Artificial Sequence
  Description of Artificial Sequence: Synthetic oligonucleotide
uaucacgaugaucuugaag

SEQ ID NO: 3139493 - RNA, 19 nt, Artificial Sequence
  Description of Artificial Sequence: Synthetic oligonucleotide
guucgagucuccuaucacg

SEQ ID NO: 3139494 - RNA, 19 nt, Artificial Sequence
  Description of Artificial Sequence: Synthetic oligonucleotide
gaugaucuugaagaugcgg

SEQ ID NO: 3139495 - RNA, 19 nt, Artificial Sequence
  Description of Artificial Sequence: Synthetic oligonucleotide
augaucuugaagaugcggg

SEQ ID NO: 3139496 - RNA, 19 nt, Artificial Sequence
  Description of Artificial Sequence: Synthetic oligonucleotide
caugucuugcccacguucg

SEQ ID NO: 3139497 - RNA, 19 nt, Artificial Sequence
  Description of Artificial Sequence: Synthetic oligonucleotide
ucgccaucgaucuccacgg

SEQ ID NO: 3139498 - RNA, 19 nt, Artificial Sequence
  Description of Artificial Sequence: Synthetic oligonucleotide
uugaagaugcgggagcggg

SEQ ID NO: 3139499 - RNA, 19 nt, Artificial Sequence
  Description of Artificial Sequence: Synthetic oligonucleotide
ucuugaagaugcgggagcg

SEQ ID NO: 3139500 - RNA, 19 nt, Artificial Sequence
  Description of Artificial Sequence: Synthetic oligonucleotide
agucaggcaugucuugccc

SEQ ID NO: 3139501 - RNA, 19 nt, Artificial Sequence
  Description of Artificial Sequence: Synthetic oligonucleotide
uucgagucuccuaucacga

SEQ ID NO: 3139502 - RNA, 19 nt, Artificial Sequence
  Description of Artificial Sequence: Synthetic oligonucleotide
gaggcagacacccggacgc

SEQ ID NO: 3139503 - RNA, 19 nt, Artificial Sequence
  Description of Artificial Sequence: Synthetic oligonucleotide
cucgccaucgaucuccacg

SEQ ID NO: 3139504 - RNA, 19 nt, Artificial Sequence
  Description of Artificial Sequence: Synthetic oligonucleotide
ugaucuugaagaugcggga

SEQ ID NO: 3139505 - RNA, 19 nt, Artificial Sequence
  Description of Artificial Sequence: Synthetic oligonucleotide
gacaccgcacagcuggacg

SEQ ID NO: 3139506 - RNA, 19 nt, Artificial Sequence
  Description of Artificial Sequence: Synthetic oligonucleotide
gaagaugcgggagcgggcg

SEQ ID NO: 3139507 - RNA, 19 nt, Artificial Sequence
  Description of Artificial Sequence: Synthetic oligonucleotide
gaucuugaagaugcgggag

SEQ ID NO: 3139508 - RNA, 19 nt, Artificial Sequence
  Description of Artificial Sequence: Synthetic oligonucleotide
acccggacgccccugacac

SEQ ID NO: 3139509 - RNA, 19 nt, Artificial Sequence
  Description of Artificial Sequence: Synthetic oligonucleotide
ccugacaccgcacagcugg

SEQ ID NO: 3139510 - RNA, 19 nt, Artificial Sequence
  Description of Artificial Sequence: Synthetic oligonucleotide
uaagucaggcaugucuugc

SEQ ID NO: 3139511 - RNA, 19 nt, Artificial Sequence
  Description of Artificial Sequence: Synthetic oligonucleotide
gaagcgguaagucaggcau

SEQ ID NO: 3139512 - RNA, 19 nt, Artificial Sequence
  Description of Artificial Sequence: Synthetic oligonucleotide
cucucggaaguccaccccg

SEQ ID NO: 3139513 - RNA, 19 nt, Artificial Sequence
  Description of Artificial Sequence: Synthetic oligonucleotide
ugaagaugcgggagcgggc

SEQ ID NO: 3139514 - RNA, 19 nt, Artificial Sequence
  Description of Artificial Sequence: Synthetic oligonucleotide
uccuaucacgaugaucuug

SEQ ID NO: 3139515 - RNA, 19 nt, Artificial Sequence
  Description of Artificial Sequence: Synthetic oligonucleotide
ucaggcaugucuugcccac

SEQ ID NO: 3139516 - RNA, 19 nt, Artificial Sequence
  Description of Artificial Sequence: Synthetic oligonucleotide
guaagucaggcaugucuug

SEQ ID NO: 3139517 - RNA, 19 nt, Artificial Sequence
  Description of Artificial Sequence: Synthetic oligonucleotide
gagucuccuaucacgauga

SEQ ID NO: 3139518 - RNA, 19 nt, Artificial Sequence
  Description of Artificial Sequence: Synthetic oligonucleotide
ugucuugcccacguucgag

SEQ ID NO: 3139519 - RNA, 19 nt, Artificial Sequence
  Description of Artificial Sequence: Synthetic oligonucleotide
aguccaccccgacucgugg

SEQ ID NO: 3139520 - RNA, 19 nt, Artificial Sequence
  Description of Artificial Sequence: Synthetic oligonucleotide
gacucguggccucggugcg

SEQ ID NO: 3139521 - RNA, 19 nt, Artificial Sequence
  Description of Artificial Sequence: Synthetic oligonucleotide
ucacgaugaucuugaagau

SEQ ID NO: 3139522 - RNA, 19 nt, Artificial Sequence
  Description of Artificial Sequence: Synthetic oligonucleotide
agaagcgguaagucaggca

SEQ ID NO: 3139523 - RNA, 19 nt, Artificial Sequence
  Description of Artificial Sequence: Synthetic oligonucleotide
acguucgagucuccuauca

SEQ ID NO: 3139524 - RNA, 19 nt, Artificial Sequence
  Description of Artificial Sequence: Synthetic oligonucleotide
caucgaucuccacggcucg

SEQ ID NO: 3139525 - RNA, 19 nt, Artificial Sequence
  Description of Artificial Sequence: Synthetic oligonucleotide
ucggaaguccaccccgacu

SEQ ID NO: 3139526 - RNA, 19 nt, Artificial Sequence
  Description of Artificial Sequence: Synthetic oligonucleotide
uccaccccgacucguggcc

SEQ ID NO: 3139527 - RNA, 19 nt, Artificial Sequence
  Description of Artificial Sequence: Synthetic oligonucleotide
augcgcucgccaucgaucu

SEQ ID NO: 3139528 - RNA, 19 nt, Artificial Sequence
  Description of Artificial Sequence: Synthetic oligonucleotide
ucucggaaguccaccccga

SEQ ID NO: 3139529 - RNA, 19 nt, Artificial Sequence
  Description of Artificial Sequence: Synthetic oligonucleotide
acaccgcacagcuggacga

SEQ ID NO: 3139530 - RNA, 19 nt, Artificial Sequence
  Description of Artificial Sequence: Synthetic oligonucleotide
ucuugcccacguucgaguc

SEQ ID NO: 3139531 - RNA, 19 nt, Artificial Sequence
  Description of Artificial Sequence: Synthetic oligonucleotide
cacgaugaucuugaagaug

SEQ ID NO: 3139532 - RNA, 19 nt, Artificial Sequence
  Description of Artificial Sequence: Synthetic oligonucleotide
gaugcgcucgccaucgauc

SEQ ID NO: 3139533 - RNA, 19 nt, Artificial Sequence
  Description of Artificial Sequence: Synthetic oligonucleotide
ggaggcagacacccggacg

SEQ ID NO: 3139534 - RNA, 19 nt, Artificial Sequence
  Description of Artificial Sequence: Synthetic oligonucleotide
cuugaagaugcgggagcgg

SEQ ID NO: 3139535 - RNA, 19 nt, Artificial Sequence
  Description of Artificial Sequence: Synthetic oligonucleotide
ccuaucacgaugaucuuga

SEQ ID NO: 3139536 - RNA, 19 nt, Artificial Sequence
  Description of Artificial Sequence: Synthetic oligonucleotide
cgcagaagcgguaagucag

SEQ ID NO: 3139537 - RNA, 19 nt, Artificial Sequence
  Description of Artificial Sequence: Synthetic oligonucleotide
agcgguaagucaggcaugu

SEQ ID NO: 3139538 - RNA, 19 nt, Artificial Sequence
  Description of Artificial Sequence: Synthetic oligonucleotide
cacggcucgcucucggaag

SEQ ID NO: 3139539 - RNA, 19 nt, Artificial Sequence
  Description of Artificial Sequence: Synthetic oligonucleotide
aagcgguaagucaggcaug

SEQ ID NO: 3139540 - RNA, 19 nt, Artificial Sequence
  Description of Artificial Sequence: Synthetic oligonucleotide
agaugcgggagcgggcggg

SEQ ID NO: 3139541 - RNA, 19 nt, Artificial Sequence
  Description of Artificial Sequence: Synthetic oligonucleotide
uugcccacguucgagucuc

SEQ ID NO: 3139542 - RNA, 19 nt, Artificial Sequence
  Description of Artificial Sequence: Synthetic oligonucleotide
cagaagcgguaagucaggc

SEQ ID NO: 3139543 - RNA, 19 nt, Artificial Sequence
  Description of Artificial Sequence: Synthetic oligonucleotide
gucaggcaugucuugccca

SEQ ID NO: 3139544 - RNA, 19 nt, Artificial Sequence
  Description of Artificial Sequence: Synthetic oligonucleotide
ucgaucuccacggcucgcu

SEQ ID NO: 3139545 - RNA, 19 nt, Artificial Sequence
  Description of Artificial Sequence: Synthetic oligonucleotide
ggaaguccaccccgacucg

SEQ ID NO: 3139546 - RNA, 19 nt, Artificial Sequence
  Description of Artificial Sequence: Synthetic oligonucleotide
ggugcggucggggaagcgg

SEQ ID NO: 3139547 - RNA, 19 nt, Artificial Sequence
  Description of Artificial Sequence: Synthetic oligonucleotide
aaguccaccccgacucgug

SEQ ID NO: 3139548 - RNA, 19 nt, Artificial Sequence
  Description of Artificial Sequence: Synthetic oligonucleotide
ucggggaagcggccggcgc

SEQ ID NO: 3139549 - RNA, 19 nt, Artificial Sequence
  Description of Artificial Sequence: Synthetic oligonucleotide
augucuugcccacguucga

SEQ ID NO: 3139550 - RNA, 19 nt, Artificial Sequence
  Description of Artificial Sequence: Synthetic oligonucleotide
gcaugucuugcccacguuc

SEQ ID NO: 3139551 - RNA, 19 nt, Artificial Sequence
  Description of Artificial Sequence: Synthetic oligonucleotide
ucgcucucggaaguccacc

SEQ ID NO: 3139552 - RNA, 19 nt, Artificial Sequence
  Description of Artificial Sequence: Synthetic oligonucleotide
ccaucgaucuccacggcuc

SEQ ID NO: 3139553 - RNA, 19 nt, Artificial Sequence
  Description of Artificial Sequence: Synthetic oligonucleotide
guggccucggugcggucgg

SEQ ID NO: 3139554 - RNA, 19 nt, Artificial Sequence
  Description of Artificial Sequence: Synthetic oligonucleotide
acggcucgcucucggaagu

SEQ ID NO: 3139555 - RNA, 19 nt, Artificial Sequence
  Description of Artificial Sequence: Synthetic oligonucleotide
ucgagucuccuaucacgau

SEQ ID NO: 3139556 - RNA, 19 nt, Artificial Sequence
  Description of Artificial Sequence: Synthetic oligonucleotide
aggcagacacccggacgcc

SEQ ID NO: 3139557 - RNA, 19 nt, Artificial Sequence
  Description of Artificial Sequence: Synthetic oligonucleotide
cucgcucucggaaguccac

SEQ ID NO: 3139558 - RNA, 19 nt, Artificial Sequence
  Description of Artificial Sequence: Synthetic oligonucleotide
cucggugcggucggggaag

SEQ ID NO: 3139559 - RNA, 19 nt, Artificial Sequence
  Description of Artificial Sequence: Synthetic oligonucleotide
gcagaagcgguaagucagg

SEQ ID NO: 3139560 - RNA, 19 nt, Artificial Sequence
  Description of Artificial Sequence: Synthetic oligonucleotide
uccacggcucgcucucgga

SEQ ID NO: 3139561 - RNA, 19 nt, Artificial Sequence
  Description of Artificial Sequence: Synthetic oligonucleotide
ugcggucggggaagcggcc

SEQ ID NO: 3139562 - RNA, 19 nt, Artificial Sequence
  Description of Artificial Sequence: Synthetic oligonucleotide
gucuccuaucacgaugauc

SEQ ID NO: 3139563 - RNA, 19 nt, Artificial Sequence
  Description of Artificial Sequence: Synthetic oligonucleotide
cuccacggcucgcucucgg

SEQ ID NO: 3139564 - RNA, 19 nt, Artificial Sequence
  Description of Artificial Sequence: Synthetic oligonucleotide
guccaccccgacucguggc

SEQ ID NO: 3139565 - RNA, 19 nt, Artificial Sequence
  Description of Artificial Sequence: Synthetic oligonucleotide
ucuccacggcucgcucucg

SEQ ID NO: 3139566 - RNA, 19 nt, Artificial Sequence
  Description of Artificial Sequence: Synthetic oligonucleotide
cacguucgagucuccuauc

SEQ ID NO: 3139567 - RNA, 19 nt, Artificial Sequence
  Description of Artificial Sequence: Synthetic oligonucleotide
cggaaguccaccccgacuc

SEQ ID NO: 3139568 - RNA, 19 nt, Artificial Sequence
  Description of Artificial Sequence: Synthetic oligonucleotide
cucggaaguccaccccgac

SEQ ID NO: 3139569 - RNA, 19 nt, Artificial Sequence
  Description of Artificial Sequence: Synthetic oligonucleotide
acgccccugacaccgcaca

SEQ ID NO: 3139570 - RNA, 19 nt, Artificial Sequence
  Description of Artificial Sequence: Synthetic oligonucleotide
gaucuccacggcucgcucu

SEQ ID NO: 3139571 - RNA, 19 nt, Artificial Sequence
  Description of Artificial Sequence: Synthetic oligonucleotide
ugacaccgcacagcuggac

SEQ ID NO: 3139572 - RNA, 19 nt, Artificial Sequence
  Description of Artificial Sequence: Synthetic oligonucleotide
cgacucguggccucggugc

SEQ ID NO: 3139573 - RNA, 19 nt, Artificial Sequence
  Description of Artificial Sequence: Synthetic oligonucleotide
cgagucuccuaucacgaug

SEQ ID NO: 3139574 - RNA, 19 nt, Artificial Sequence
  Description of Artificial Sequence: Synthetic oligonucleotide
gugcggucggggaagcggc

SEQ ID NO: 3139575 - RNA, 19 nt, Artificial Sequence
  Description of Artificial Sequence: Synthetic oligonucleotide
gcgggcgggaggcagacac

SEQ ID NO: 3139576 - RNA, 19 nt, Artificial Sequence
  Description of Artificial Sequence: Synthetic oligonucleotide
acucguggccucggugcgg

SEQ ID NO: 3139577 - RNA, 19 nt, Artificial Sequence
  Description of Artificial Sequence: Synthetic oligonucleotide
gacacccggacgccccuga

SEQ ID NO: 3139578 - RNA, 19 nt, Artificial Sequence
  Description of Artificial Sequence: Synthetic oligonucleotide
ccggacgccccugacaccg

SEQ ID NO: 3139579 - RNA, 19 nt, Artificial Sequence
  Description of Artificial Sequence: Synthetic oligonucleotide
gcucucggaaguccacccc

SEQ ID NO: 3139580 - RNA, 19 nt, Artificial Sequence
  Description of Artificial Sequence: Synthetic oligonucleotide
agucuccuaucacgaugau

SEQ ID NO: 3139581 - RNA, 19 nt, Artificial Sequence
  Description of Artificial Sequence: Synthetic oligonucleotide
gucuugcccacguucgagu

SEQ ID NO: 3139582 - RNA, 19 nt, Artificial Sequence
  Description of Artificial Sequence: Synthetic oligonucleotide
ggcgcagaagcgguaaguc

SEQ ID NO: 3139583 - RNA, 19 nt, Artificial Sequence
  Description of Artificial Sequence: Synthetic oligonucleotide
gcgcagaagcgguaaguca

SEQ ID NO: 3139584 - RNA, 19 nt, Artificial Sequence
  Description of Artificial Sequence: Synthetic oligonucleotide
gucggggaagcggccggcg

SEQ ID NO: 3139585 - RNA, 19 nt, Artificial Sequence
  Description of Artificial Sequence: Synthetic oligonucleotide
cgaugaucuugaagaugcg

SEQ ID NO: 3139586 - RNA, 19 nt, Artificial Sequence
  Description of Artificial Sequence: Synthetic oligonucleotide
gcgcucgccaucgaucucc

SEQ ID NO: 3139587 - RNA, 19 nt, Artificial Sequence
  Description of Artificial Sequence: Synthetic oligonucleotide
gguaagucaggcaugucuu

SEQ ID NO: 3139588 - RNA, 19 nt, Artificial Sequence
  Description of Artificial Sequence: Synthetic oligonucleotide
gggcgggaggcagacaccc

SEQ ID NO: 3139589 - RNA, 19 nt, Artificial Sequence
  Description of Artificial Sequence: Synthetic oligonucleotide
cuaucacgaugaucuugaa

SEQ ID NO: 3139590 - RNA, 19 nt, Artificial Sequence
  Description of Artificial Sequence: Synthetic oligonucleotide
caccgcacagcuggacgag

SEQ ID NO: 3139591 - RNA, 19 nt, Artificial Sequence
  Description of Artificial Sequence: Synthetic oligonucleotide
ugcccacguucgagucucc

SEQ ID NO: 3139592 - RNA, 19 nt, Artificial Sequence
  Description of Artificial Sequence: Synthetic oligonucleotide
accccgacucguggccucg

SEQ ID NO: 3139593 - RNA, 19 nt, Artificial Sequence
  Description of Artificial Sequence: Synthetic oligonucleotide
gaaguccaccccgacucgu

SEQ ID NO: 3139594 - RNA, 19 nt, Artificial Sequence
  Description of Artificial Sequence: Synthetic oligonucleotide
gcagacacccggacgcccc

SEQ ID NO: 3139595 - RNA, 19 nt, Artificial Sequence
  Description of Artificial Sequence: Synthetic oligonucleotide
ggcucgcucucggaagucc

SEQ ID NO: 3139596 - RNA, 19 nt, Artificial Sequence
  Description of Artificial Sequence: Synthetic oligonucleotide
gcggccggcgcagaagcgg

SEQ ID NO: 3139597 - RNA, 19 nt, Artificial Sequence
  Description of Artificial Sequence: Synthetic oligonucleotide
gaugcgggagcgggcggga

SEQ ID NO: 3139598 - RNA, 19 nt, Artificial Sequence
  Description of Artificial Sequence: Synthetic oligonucleotide
ucggugcggucggggaagc

SEQ ID NO: 3139599 - RNA, 19 nt, Artificial Sequence
  Description of Artificial Sequence: Synthetic oligonucleotide
cugacaccgcacagcugga

SEQ ID NO: 3139600 - RNA, 19 nt, Artificial Sequence
  Description of Artificial Sequence: Synthetic oligonucleotide
cgcucucggaaguccaccc

SEQ ID NO: 3139601 - RNA, 19 nt, Artificial Sequence
  Description of Artificial Sequence: Synthetic oligonucleotide
cguucgagucuccuaucac

SEQ ID NO: 3139602 - RNA, 19 nt, Artificial Sequence
  Description of Artificial Sequence: Synthetic oligonucleotide
cuugcccacguucgagucu

SEQ ID NO: 3139603 - RNA, 19 nt, Artificial Sequence
  Description of Artificial Sequence: Synthetic oligonucleotide
gacgccccugacaccgcac

SEQ ID NO: 3139604 - RNA, 19 nt, Artificial Sequence
  Description of Artificial Sequence: Synthetic oligonucleotide
gagcgggcgggaggcagac

SEQ ID NO: 3139605 - RNA, 19 nt, Artificial Sequence
  Description of Artificial Sequence: Synthetic oligonucleotide
agcggccggcgcagaagcg

SEQ ID NO: 3139606 - RNA, 19 nt, Artificial Sequence
  Description of Artificial Sequence: Synthetic oligonucleotide
cacccggacgccccugaca

SEQ ID NO: 3139607 - RNA, 19 nt, Artificial Sequence
  Description of Artificial Sequence: Synthetic oligonucleotide
caccccgacucguggccuc

SEQ ID NO: 3139608 - RNA, 19 nt, Artificial Sequence
  Description of Artificial Sequence: Synthetic oligonucleotide
ggcagacacccggacgccc

SEQ ID NO: 3139609 - RNA, 19 nt, Artificial Sequence
  Description of Artificial Sequence: Synthetic oligonucleotide
ggggaagcggccggcgcag

SEQ ID NO: 3139610 - RNA, 19 nt, Artificial Sequence
  Description of Artificial Sequence: Synthetic oligonucleotide
gccccugacaccgcacagc

SEQ ID NO: 3139611 - RNA, 19 nt, Artificial Sequence
  Description of Artificial Sequence: Synthetic oligonucleotide
gggagcgggcgggaggcag

SEQ ID NO: 3139612 - RNA, 19 nt, Artificial Sequence
  Description of Artificial Sequence: Synthetic oligonucleotide
gccaucgaucuccacggcu

SEQ ID NO: 3139613 - RNA, 19 nt, Artificial Sequence
  Description of Artificial Sequence: Synthetic oligonucleotide
cgguaagucaggcaugucu

SEQ ID NO: 3139614 - RNA, 19 nt, Artificial Sequence
  Description of Artificial Sequence: Synthetic oligonucleotide
gcggucggggaagcggccg

SEQ ID NO: 3139615 - RNA, 19 nt, Artificial Sequence
  Description of Artificial Sequence: Synthetic oligonucleotide
uggccucggugcggucggg

SEQ ID NO: 3139616 - RNA, 19 nt, Artificial Sequence
  Description of Artificial Sequence: Synthetic oligonucleotide
gcgggagcgggcgggaggc

SEQ ID NO: 3139617 - RNA, 19 nt, Artificial Sequence
  Description of Artificial Sequence: Synthetic oligonucleotide
ccgacucguggccucggug

SEQ ID NO: 3139618 - RNA, 19 nt, Artificial Sequence
  Description of Artificial Sequence: Synthetic oligonucleotide
augcgggagcgggcgggag

SEQ ID NO: 3139619 - RNA, 19 nt, Artificial Sequence
  Description of Artificial Sequence: Synthetic oligonucleotide
cguggccucggugcggucg

SEQ ID NO: 3139620 - RNA, 19 nt, Artificial Sequence
  Description of Artificial Sequence: Synthetic oligonucleotide
ggcgggaggcagacacccg

SEQ ID NO: 3139621 - RNA, 19 nt, Artificial Sequence
  Description of Artificial Sequence: Synthetic oligonucleotide
ggccucggugcggucgggg

SEQ ID NO: 3139622 - RNA, 19 nt, Artificial Sequence
  Description of Artificial Sequence: Synthetic oligonucleotide
ccacguucgagucuccuau

SEQ ID NO: 3139623 - RNA, 19 nt, Artificial Sequence
  Description of Artificial Sequence: Synthetic oligonucleotide
gcucgcucucggaagucca

SEQ ID NO: 3139624 - RNA, 19 nt, Artificial Sequence
  Description of Artificial Sequence: Synthetic oligonucleotide
ggacgccccugacaccgca

SEQ ID NO: 3139625 - RNA, 19 nt, Artificial Sequence
  Description of Artificial Sequence: Synthetic oligonucleotide
gccucggugcggucgggga

SEQ ID NO: 3139626 - RNA, 19 nt, Artificial Sequence
  Description of Artificial Sequence: Synthetic oligonucleotide
ggucggggaagcggccggc

SEQ ID NO: 3139627 - RNA, 19 nt, Artificial Sequence
  Description of Artificial Sequence: Synthetic oligonucleotide
ccggcgcagaagcgguaag

SEQ ID NO: 3139628 - RNA, 19 nt, Artificial Sequence
  Description of Artificial Sequence: Synthetic oligonucleotide
cccugacaccgcacagcug

SEQ ID NO: 3139629 - RNA, 19 nt, Artificial Sequence
  Description of Artificial Sequence: Synthetic oligonucleotide
ucguggccucggugcgguc

SEQ ID NO: 3139630 - RNA, 19 nt, Artificial Sequence
  Description of Artificial Sequence: Synthetic oligonucleotide
cccacguucgagucuccua

SEQ ID NO: 3139631 - RNA, 19 nt, Artificial Sequence
  Description of Artificial Sequence: Synthetic oligonucleotide
cucguggccucggugcggu

SEQ ID NO: 3139632 - RNA, 19 nt, Artificial Sequence
  Description of Artificial Sequence: Synthetic oligonucleotide
cggucggggaagcggccgg

SEQ ID NO: 3139633 - RNA, 19 nt, Artificial Sequence
  Description of Artificial Sequence: Synthetic oligonucleotide
ccccugacaccgcacagcu

SEQ ID NO: 3139634 - RNA, 19 nt, Artificial Sequence
  Description of Artificial Sequence: Synthetic oligonucleotide
ggagcgggcgggaggcaga

SEQ ID NO: 3139635 - RNA, 19 nt, Artificial Sequence
  Description of Artificial Sequence: Synthetic oligonucleotide
ccacggcucgcucucggaa

SEQ ID NO: 3139636 - RNA, 19 nt, Artificial Sequence
  Description of Artificial Sequence: Synthetic oligonucleotide
cccggacgccccugacacc

SEQ ID NO: 3139637 - RNA, 19 nt, Artificial Sequence
  Description of Artificial Sequence: Synthetic oligonucleotide
cagacacccggacgccccu

SEQ ID NO: 3139638 - RNA, 19 nt, Artificial Sequence
  Description of Artificial Sequence: Synthetic oligonucleotide
agcgggcgggaggcagaca

SEQ ID NO: 3139639 - RNA, 19 nt, Artificial Sequence
  Description of Artificial Sequence: Synthetic oligonucleotide
cgggcgggaggcagacacc

SEQ ID NO: 3139640 - RNA, 19 nt, Artificial Sequence
  Description of Artificial Sequence: Synthetic oligonucleotide
gccggcgcagaagcgguaa

SEQ ID NO: 3139641 - RNA, 19 nt, Artificial Sequence
  Description of Artificial Sequence: Synthetic oligonucleotide
cgccccugacaccgcacag

SEQ ID NO: 3139642 - RNA, 19 nt, Artificial Sequence
  Description of Artificial Sequence: Synthetic oligonucleotide
gcucgccaucgaucuccac

SEQ ID NO: 3139643 - RNA, 19 nt, Artificial Sequence
  Description of Artificial Sequence: Synthetic oligonucleotide
cgccaucgaucuccacggc

SEQ ID NO: 3139644 - RNA, 19 nt, Artificial Sequence
  Description of Artificial Sequence: Synthetic oligonucleotide
ccucggugcggucggggaa

SEQ ID NO: 3139645 - RNA, 19 nt, Artificial Sequence
  Description of Artificial Sequence: Synthetic oligonucleotide
gcgguaagucaggcauguc

SEQ ID NO: 3139646 - RNA, 19 nt, Artificial Sequence
  Description of Artificial Sequence: Synthetic oligonucleotide
ggcaugucuugcccacguu

SEQ ID NO: 3139647 - RNA, 19 nt, Artificial Sequence
  Description of Artificial Sequence: Synthetic oligonucleotide
cggggaagcggccggcgca

SEQ ID NO: 3139648 - RNA, 19 nt, Artificial Sequence
  Description of Artificial Sequence: Synthetic oligonucleotide
ccccgacucguggccucgg

SEQ ID NO: 3139649 - RNA, 19 nt, Artificial Sequence
  Description of Artificial Sequence: Synthetic oligonucleotide
cggacgccccugacaccgc

SEQ ID NO: 3139650 - RNA, 19 nt, Artificial Sequence
  Description of Artificial Sequence: Synthetic oligonucleotide
gggaagcggccggcgcaga

SEQ ID NO: 3139651 - RNA, 19 nt, Artificial Sequence
  Description of Artificial Sequence: Synthetic oligonucleotide
cgcucgccaucgaucucca

SEQ ID NO: 3139652 - RNA, 19 nt, Artificial Sequence
  Description of Artificial Sequence: Synthetic oligonucleotide
gcccacguucgagucuccu

SEQ ID NO: 3139653 - RNA, 19 nt, Artificial Sequence
  Description of Artificial Sequence: Synthetic oligonucleotide
cggugcggucggggaagcg

SEQ ID NO: 3139654 - RNA, 19 nt, Artificial Sequence
  Description of Artificial Sequence: Synthetic oligonucleotide
cggcucgcucucggaaguc

SEQ ID NO: 3139655 - RNA, 19 nt, Artificial Sequence
  Description of Artificial Sequence: Synthetic oligonucleotide
ggccggcgcagaagcggua

SEQ ID NO: 3139656 - RNA, 19 nt, Artificial Sequence
  Description of Artificial Sequence: Synthetic oligonucleotide
cccgacucguggccucggu

SEQ ID NO: 3139657 - RNA, 19 nt, Artificial Sequence
  Description of Artificial Sequence: Synthetic oligonucleotide
cggccggcgcagaagcggu

SEQ ID NO: 3139658 - RNA, 19 nt, Artificial Sequence
  Description of Artificial Sequence: Synthetic oligonucleotide
ccaccccgacucguggccu

SEQ ID NO: 3139659 - RNA, 19 nt, Artificial Sequence
  Description of Artificial Sequence: Synthetic oligonucleotide
cgggagcgggcgggaggca

SEQ ID NO: 3139660 - RNA, 19 nt, Artificial Sequence
  Description of Artificial Sequence: Synthetic oligonucleotide
aauaaagugguauaaaagc

SEQ ID NO: 3139661 - RNA, 19 nt, Artificial Sequence
  Description of Artificial Sequence: Synthetic oligonucleotide
aauuauuuuagguauuucc

SEQ ID NO: 3139662 - RNA, 19 nt, Artificial Sequence
  Description of Artificial Sequence: Synthetic oligonucleotide
uuuaguuuuauauugaggu

SEQ ID NO: 3139663 - RNA, 19 nt, Artificial Sequence
  Description of Artificial Sequence: Synthetic oligonucleotide
uuaagugucaaucugcuag

SEQ ID NO: 3139664 - RNA, 19 nt, Artificial Sequence
  Description of Artificial Sequence: Synthetic oligonucleotide
auuuugaucaguauguugc

SEQ ID NO: 3139665 - RNA, 19 nt, Artificial Sequence
  Description of Artificial Sequence: Synthetic oligonucleotide
ucuaccaugugucagauga

SEQ ID NO: 3139666 - RNA, 19 nt, Artificial Sequence
  Description of Artificial Sequence: Synthetic oligonucleotide
gauuuaaucuguuuaagug

SEQ ID NO: 3139667 - RNA, 19 nt, Artificial Sequence
  Description of Artificial Sequence: Synthetic oligonucleotide
aauaacucaaaauuaguaa

SEQ ID NO: 3139668 - RNA, 19 nt, Artificial Sequence
  Description of Artificial Sequence: Synthetic oligonucleotide
uacaauaacucaaaauuag

SEQ ID NO: 3139669 - RNA, 19 nt, Artificial Sequence
  Description of Artificial Sequence: Synthetic oligonucleotide
auaacucaaaauuaguaag

SEQ ID NO: 3139670 - RNA, 19 nt, Artificial Sequence
  Description of Artificial Sequence: Synthetic oligonucleotide
aaauuaguaaggaaaacag

SEQ ID NO: 3139671 - RNA, 19 nt, Artificial Sequence
  Description of Artificial Sequence: Synthetic oligonucleotide
uaacucaaaauuaguaagg

SEQ ID NO: 3139672 - RNA, 19 nt, Artificial Sequence
  Description of Artificial Sequence: Synthetic oligonucleotide
aaaauuaguaaggaaaaca

SEQ ID NO: 3139673 - RNA, 19 nt, Artificial Sequence
  Description of Artificial Sequence: Synthetic oligonucleotide
uaugaaaucuaccaugugu

SEQ ID NO: 3139674 - RNA, 19 nt, Artificial Sequence
  Description of Artificial Sequence: Synthetic oligonucleotide
auuuccauuauaugaaauc

SEQ ID NO: 3139675 - RNA, 19 nt, Artificial Sequence
  Description of Artificial Sequence: Synthetic oligonucleotide
ugucagaugauuuaaucug

SEQ ID NO: 3139676 - RNA, 19 nt, Artificial Sequence
  Description of Artificial Sequence: Synthetic oligonucleotide
ucaaaauuaguaaggaaaa

SEQ ID NO: 3139677 - RNA, 19 nt, Artificial Sequence
  Description of Artificial Sequence: Synthetic oligonucleotide
uuagguauuuccauuauau

SEQ ID NO: 3139678 - RNA, 19 nt, Artificial Sequence
  Description of Artificial Sequence: Synthetic oligonucleotide
uguuuaagugucaaucugc

SEQ ID NO: 3139679 - RNA, 19 nt, Artificial Sequence
  Description of Artificial Sequence: Synthetic oligonucleotide
auuuaaucuguuuaagugu

SEQ ID NO: 3139680 - RNA, 19 nt, Artificial Sequence
  Description of Artificial Sequence: Synthetic oligonucleotide
aggaaaacaguucaccagg

SEQ ID NO: 3139681 - RNA, 19 nt, Artificial Sequence
  Description of Artificial Sequence: Synthetic oligonucleotide
uacauuuuacaauaacuca

SEQ ID NO: 3139682 - RNA, 19 nt, Artificial Sequence
  Description of Artificial Sequence: Synthetic oligonucleotide
agguauuuccauuauauga

SEQ ID NO: 3139683 - RNA, 19 nt, Artificial Sequence
  Description of Artificial Sequence: Synthetic oligonucleotide
gaauaaagugguauaaaag

SEQ ID NO: 3139684 - RNA, 19 nt, Artificial Sequence
  Description of Artificial Sequence: Synthetic oligonucleotide
cauuauaugaaaucuacca

SEQ ID NO: 3139685 - RNA, 19 nt, Artificial Sequence
  Description of Artificial Sequence: Synthetic oligonucleotide
uuuaaucuguuuaaguguc

SEQ ID NO: 3139686 - RNA, 19 nt, Artificial Sequence
  Description of Artificial Sequence: Synthetic oligonucleotide
uccauuauaugaaaucuac

SEQ ID NO: 3139687 - RNA, 19 nt, Artificial Sequence
  Description of Artificial Sequence: Synthetic oligonucleotide
uauauugaggugcucaggu

SEQ ID NO: 3139688 - RNA, 19 nt, Artificial Sequence
  Description of Artificial Sequence: Synthetic oligonucleotide
uaguuuuauauugaggugc

SEQ ID NO: 3139689 - RNA, 19 nt, Artificial Sequence
  Description of Artificial Sequence: Synthetic oligonucleotide
uauugaggugcucagguug

SEQ ID NO: 3139690 - RNA, 19 nt, Artificial Sequence
  Description of Artificial Sequence: Synthetic oligonucleotide
uuuauauugaggugcucag

SEQ ID NO: 3139691 - RNA, 19 nt, Artificial Sequence
  Description of Artificial Sequence: Synthetic oligonucleotide
ugcacuaauuauuuuaggu

SEQ ID NO: 3139692 - RNA, 19 nt, Artificial Sequence
  Description of Artificial Sequence: Synthetic oligonucleotide
aggguuuaguuuuauauug

SEQ ID NO: 3139693 - RNA, 19 nt, Artificial Sequence
  Description of Artificial Sequence: Synthetic oligonucleotide
uuuuauauugaggugcuca

SEQ ID NO: 3139694 - RNA, 19 nt, Artificial Sequence
  Description of Artificial Sequence: Synthetic oligonucleotide
uuacaauaacucaaaauua

SEQ ID NO: 3139695 - RNA, 19 nt, Artificial Sequence
  Description of Artificial Sequence: Synthetic oligonucleotide
cucaaaauuaguaaggaaa

SEQ ID NO: 3139696 - RNA, 19 nt, Artificial Sequence
  Description of Artificial Sequence: Synthetic oligonucleotide
aaaacaguucaccaggguu

SEQ ID NO: 3139697 - RNA, 19 nt, Artificial Sequence
  Description of Artificial Sequence: Synthetic oligonucleotide
uaaagugguauaaaagcaa

SEQ ID NO: 3139698 - RNA, 19 nt, Artificial Sequence
  Description of Artificial Sequence: Synthetic oligonucleotide
aaaucuaccaugugucaga

SEQ ID NO: 3139699 - RNA, 19 nt, Artificial Sequence
  Description of Artificial Sequence: Synthetic oligonucleotide
uuuccauuauaugaaaucu

SEQ ID NO: 3139700 - RNA, 19 nt, Artificial Sequence
  Description of Artificial Sequence: Synthetic oligonucleotide
uaaggaaaacaguucacca

SEQ ID NO: 3139701 - RNA, 19 nt, Artificial Sequence
  Description of Artificial Sequence: Synthetic oligonucleotide
agaacuuguacauuuuaca

SEQ ID NO: 3139702 - RNA, 19 nt, Artificial Sequence
  Description of Artificial Sequence: Synthetic oligonucleotide
ucaaucugcuagcagaacu

SEQ ID NO: 3139703 - RNA, 19 nt, Artificial Sequence
  Description of Artificial Sequence: Synthetic oligonucleotide
cucagguuggaauaaagug

SEQ ID NO: 3139704 - RNA, 19 nt, Artificial Sequence
  Description of Artificial Sequence: Synthetic oligonucleotide
ugauuuaaucuguuuaagu

SEQ ID NO: 3139705 - RNA, 19 nt, Artificial Sequence
  Description of Artificial Sequence: Synthetic oligonucleotide
uuaguuuuauauugaggug

SEQ ID NO: 3139706 - RNA, 19 nt, Artificial Sequence
  Description of Artificial Sequence: Synthetic oligonucleotide
auuauaugaaaucuaccau

SEQ ID NO: 3139707 - RNA, 19 nt, Artificial Sequence
  Description of Artificial Sequence: Synthetic oligonucleotide
ucuguuuaagugucaaucu

SEQ ID NO: 3139708 - RNA, 19 nt, Artificial Sequence
  Description of Artificial Sequence: Synthetic oligonucleotide
augaaaucuaccauguguc

SEQ ID NO: 3139709 - RNA, 19 nt, Artificial Sequence
  Description of Artificial Sequence: Synthetic oligonucleotide
gaugauuuaaucuguuuaa

SEQ ID NO: 3139710 - RNA, 19 nt, Artificial Sequence
  Description of Artificial Sequence: Synthetic oligonucleotide
uguugcacuaauuauuuua

SEQ ID NO: 3139711 - RNA, 19 nt, Artificial Sequence
  Description of Artificial Sequence: Synthetic oligonucleotide
auuauuuuagguauuucca

SEQ ID NO: 3139712 - RNA, 19 nt, Artificial Sequence
  Description of Artificial Sequence: Synthetic oligonucleotide
agaugauuuaaucuguuua

SEQ ID NO: 3139713 - RNA, 19 nt, Artificial Sequence
  Description of Artificial Sequence: Synthetic oligonucleotide
aacucaaaauuaguaagga

SEQ ID NO: 3139714 - RNA, 19 nt, Artificial Sequence
  Description of Artificial Sequence: Synthetic oligonucleotide
uuauuuuagguauuuccau

SEQ ID NO: 3139715 - RNA, 19 nt, Artificial Sequence
  Description of Artificial Sequence: Synthetic oligonucleotide
guuuaguuuuauauugagg

SEQ ID NO: 3139716 - RNA, 19 nt, Artificial Sequence
  Description of Artificial Sequence: Synthetic oligonucleotide
aauuaguaaggaaaacagu

SEQ ID NO: 3139717 - RNA, 19 nt, Artificial Sequence
  Description of Artificial Sequence: Synthetic oligonucleotide
aguauguugcacuaauuau

SEQ ID NO: 3139718 - RNA, 19 nt, Artificial Sequence
  Description of Artificial Sequence: Synthetic oligonucleotide
uugaucaguauguugcacu

SEQ ID NO: 3139719 - RNA, 19 nt, Artificial Sequence
  Description of Artificial Sequence: Synthetic oligonucleotide
auaaagugguauaaaagca

SEQ ID NO: 3139720 - RNA, 19 nt, Artificial Sequence
  Description of Artificial Sequence: Synthetic oligonucleotide
gaaaucuaccaugugucag

SEQ ID NO: 3139721 - RNA, 19 nt, Artificial Sequence
  Description of Artificial Sequence: Synthetic oligonucleotide
gaacuuguacauuuuacaa

SEQ ID NO: 3139722 - RNA, 19 nt, Artificial Sequence
  Description of Artificial Sequence: Synthetic oligonucleotide
ugugucagaugauuuaauc

SEQ ID NO: 3139723 - RNA, 19 nt, Artificial Sequence
  Description of Artificial Sequence: Synthetic oligonucleotide
guugcacuaauuauuuuag

SEQ ID NO: 3139724 - RNA, 19 nt, Artificial Sequence
  Description of Artificial Sequence: Synthetic oligonucleotide
uucaccaggguuuaguuuu

SEQ ID NO: 3139725 - RNA, 19 nt, Artificial Sequence
  Description of Artificial Sequence: Synthetic oligonucleotide
guaaggaaaacaguucacc

SEQ ID NO: 3139726 - RNA, 19 nt, Artificial Sequence
  Description of Artificial Sequence: Synthetic oligonucleotide
uugcacuaauuauuuuagg

SEQ ID NO: 3139727 - RNA, 19 nt, Artificial Sequence
  Description of Artificial Sequence: Synthetic oligonucleotide
auuuuagguauuuccauua

SEQ ID NO: 3139728 - RNA, 19 nt, Artificial Sequence
  Description of Artificial Sequence: Synthetic oligonucleotide
uuauauugaggugcucagg

SEQ ID NO: 3139729 - RNA, 19 nt, Artificial Sequence
  Description of Artificial Sequence: Synthetic oligonucleotide
uauuuccauuauaugaaau

SEQ ID NO: 3139730 - RNA, 19 nt, Artificial Sequence
  Description of Artificial Sequence: Synthetic oligonucleotide
uauuuuagguauuuccauu

SEQ ID NO: 3139731 - RNA, 19 nt, Artificial Sequence
  Description of Artificial Sequence: Synthetic oligonucleotide
uagguauuuccauuauaug

SEQ ID NO: 3139732 - RNA, 19 nt, Artificial Sequence
  Description of Artificial Sequence: Synthetic oligonucleotide
ugaaaucuaccauguguca

SEQ ID NO: 3139733 - RNA, 19 nt, Artificial Sequence
  Description of Artificial Sequence: Synthetic oligonucleotide
uuuugaucaguauguugca

SEQ ID NO: 3139734 - RNA, 19 nt, Artificial Sequence
  Description of Artificial Sequence: Synthetic oligonucleotide
cagaacuuguacauuuuac

SEQ ID NO: 3139735 - RNA, 19 nt, Artificial Sequence
  Description of Artificial Sequence: Synthetic oligonucleotide
acauuuuacaauaacucaa

SEQ ID NO: 3139736 - RNA, 19 nt, Artificial Sequence
  Description of Artificial Sequence: Synthetic oligonucleotide
uuaaucuguuuaaguguca

SEQ ID NO: 3139737 - RNA, 19 nt, Artificial Sequence
  Description of Artificial Sequence: Synthetic oligonucleotide
gguuuaguuuuauauugag

SEQ ID NO: 3139738 - RNA, 19 nt, Artificial Sequence
  Description of Artificial Sequence: Synthetic oligonucleotide
augauuuaaucuguuuaag

SEQ ID NO: 3139739 - RNA, 19 nt, Artificial Sequence
  Description of Artificial Sequence: Synthetic oligonucleotide
ugcucagguuggaauaaag

SEQ ID NO: 3139740 - RNA, 19 nt, Artificial Sequence
  Description of Artificial Sequence: Synthetic oligonucleotide
gugucaaucugcuagcaga

SEQ ID NO: 3139741 - RNA, 19 nt, Artificial Sequence
  Description of Artificial Sequence: Synthetic oligonucleotide
ugcuagcagaacuuguaca

SEQ ID NO: 3139742 - RNA, 19 nt, Artificial Sequence
  Description of Artificial Sequence: Synthetic oligonucleotide
caauaacucaaaauuagua

SEQ ID NO: 3139743 - RNA, 19 nt, Artificial Sequence
  Description of Artificial Sequence: Synthetic oligonucleotide
ugucaaucugcuagcagaa

SEQ ID NO: 3139744 - RNA, 19 nt, Artificial Sequence
  Description of Artificial Sequence: Synthetic oligonucleotide
cuguuuaagugucaaucug

SEQ ID NO: 3139745 - RNA, 19 nt, Artificial Sequence
  Description of Artificial Sequence: Synthetic oligonucleotide
uuggaauaaagugguauaa

SEQ ID NO: 3139746 - RNA, 19 nt, Artificial Sequence
  Description of Artificial Sequence: Synthetic oligonucleotide
uuccauuauaugaaaucua

SEQ ID NO: 3139747 - RNA, 19 nt, Artificial Sequence
  Description of Artificial Sequence: Synthetic oligonucleotide
uuuuagguauuuccauuau

SEQ ID NO: 3139748 - RNA, 19 nt, Artificial Sequence
  Description of Artificial Sequence: Synthetic oligonucleotide
ucugcuagcagaacuugua

SEQ ID NO: 3139749 - RNA, 19 nt, Artificial Sequence
  Description of Artificial Sequence: Synthetic oligonucleotide
aucaguauguugcacuaau

SEQ ID NO: 3139750 - RNA, 19 nt, Artificial Sequence
  Description of Artificial Sequence: Synthetic oligonucleotide
aaacaguucaccaggguuu

SEQ ID NO: 3139751 - RNA, 19 nt, Artificial Sequence
  Description of Artificial Sequence: Synthetic oligonucleotide
agugucaaucugcuagcag

SEQ ID NO: 3139752 - RNA, 19 nt, Artificial Sequence
  Description of Artificial Sequence: Synthetic oligonucleotide
aaucuguuuaagugucaau

SEQ ID NO: 3139753 - RNA, 19 nt, Artificial Sequence
  Description of Artificial Sequence: Synthetic oligonucleotide
aaucugcuagcagaacuug

SEQ ID NO: 3139754 - RNA, 19 nt, Artificial Sequence
  Description of Artificial Sequence: Synthetic oligonucleotide
ggaauaaagugguauaaaa

SEQ ID NO: 3139755 - RNA, 19 nt, Artificial Sequence
  Description of Artificial Sequence: Synthetic oligonucleotide
acucaaaauuaguaaggaa

SEQ ID NO: 3139756 - RNA, 19 nt, Artificial Sequence
  Description of Artificial Sequence: Synthetic oligonucleotide
acaauaacucaaaauuagu

SEQ ID NO: 3139757 - RNA, 19 nt, Artificial Sequence
  Description of Artificial Sequence: Synthetic oligonucleotide
auaugaaaucuaccaugug

SEQ ID NO: 3139758 - RNA, 19 nt, Artificial Sequence
  Description of Artificial Sequence: Synthetic oligonucleotide
uagcagaacuuguacauuu

SEQ ID NO: 3139759 - RNA, 19 nt, Artificial Sequence
  Description of Artificial Sequence: Synthetic oligonucleotide
uaaucuguuuaagugucaa

SEQ ID NO: 3139760 - RNA, 19 nt, Artificial Sequence
  Description of Artificial Sequence: Synthetic oligonucleotide
auugaggugcucagguugg

SEQ ID NO: 3139761 - RNA, 19 nt, Artificial Sequence
  Description of Artificial Sequence: Synthetic oligonucleotide
uggaauaaagugguauaaa

SEQ ID NO: 3139762 - RNA, 19 nt, Artificial Sequence
  Description of Artificial Sequence: Synthetic oligonucleotide
ucagaugauuuaaucuguu

SEQ ID NO: 3139763 - RNA, 19 nt, Artificial Sequence
  Description of Artificial Sequence: Synthetic oligonucleotide
guuggaauaaagugguaua

SEQ ID NO: 3139764 - RNA, 19 nt, Artificial Sequence
  Description of Artificial Sequence: Synthetic oligonucleotide
uaauuauuuuagguauuuc

SEQ ID NO: 3139765 - RNA, 19 nt, Artificial Sequence
  Description of Artificial Sequence: Synthetic oligonucleotide
uuugaucaguauguugcac

SEQ ID NO: 3139766 - RNA, 19 nt, Artificial Sequence
  Description of Artificial Sequence: Synthetic oligonucleotide
cacuaauuauuuuagguau

SEQ ID NO: 3139767 - RNA, 19 nt, Artificial Sequence
  Description of Artificial Sequence: Synthetic oligonucleotide
aguuuuauauugaggugcu

SEQ ID NO: 3139768 - RNA, 19 nt, Artificial Sequence
  Description of Artificial Sequence: Synthetic oligonucleotide
ccauuauaugaaaucuacc

SEQ ID NO: 3139769 - RNA, 19 nt, Artificial Sequence
  Description of Artificial Sequence: Synthetic oligonucleotide
gugucagaugauuuaaucu

SEQ ID NO: 3139770 - RNA, 19 nt, Artificial Sequence
  Description of Artificial Sequence: Synthetic oligonucleotide
uuuaagugucaaucugcua

SEQ ID NO: 3139771 - RNA, 19 nt, Artificial Sequence
  Description of Artificial Sequence: Synthetic oligonucleotide
caguauguugcacuaauua

SEQ ID NO: 3139772 - RNA, 19 nt, Artificial Sequence
  Description of Artificial Sequence: Synthetic oligonucleotide
ucaguauguugcacuaauu

SEQ ID NO: 3139773 - RNA, 19 nt, Artificial Sequence
  Description of Artificial Sequence: Synthetic oligonucleotide
aaucuaccaugugucagau

SEQ ID NO: 3139774 - RNA, 19 nt, Artificial Sequence
  Description of Artificial Sequence: Synthetic oligonucleotide
cugcuagcagaacuuguac

SEQ ID NO: 3139775 - RNA, 19 nt, Artificial Sequence
  Description of Artificial Sequence: Synthetic oligonucleotide
aguucaccaggguuuaguu

SEQ ID NO: 3139776 - RNA, 19 nt, Artificial Sequence
  Description of Artificial Sequence: Synthetic oligonucleotide
ggaaaacaguucaccaggg

SEQ ID NO: 3139777 - RNA, 19 nt, Artificial Sequence
  Description of Artificial Sequence: Synthetic oligonucleotide
gcacuaauuauuuuaggua

SEQ ID NO: 3139778 - RNA, 19 nt, Artificial Sequence
  Description of Artificial Sequence: Synthetic oligonucleotide
cagguuggaauaaaguggu

SEQ ID NO: 3139779 - RNA, 19 nt, Artificial Sequence
  Description of Artificial Sequence: Synthetic oligonucleotide
auauugaggugcucagguu

SEQ ID NO: 3139780 - RNA, 19 nt, Artificial Sequence
  Description of Artificial Sequence: Synthetic oligonucleotide
aacaguucaccaggguuua

SEQ ID NO: 3139781 - RNA, 19 nt, Artificial Sequence
  Description of Artificial Sequence: Synthetic oligonucleotide
acuaauuauuuuagguauu

SEQ ID NO: 3139782 - RNA, 19 nt, Artificial Sequence
  Description of Artificial Sequence: Synthetic oligonucleotide
gaaaacaguucaccagggu

SEQ ID NO: 3139783 - RNA, 19 nt, Artificial Sequence
  Description of Artificial Sequence: Synthetic oligonucleotide
cuuguacauuuuacaauaa

SEQ ID NO: 3139784 - RNA, 19 nt, Artificial Sequence
  Description of Artificial Sequence: Synthetic oligonucleotide
aggugcucagguuggaaua

SEQ ID NO: 3139785 - RNA, 19 nt, Artificial Sequence
  Description of Artificial Sequence: Synthetic oligonucleotide
guuuaagugucaaucugcu

SEQ ID NO: 3139786 - RNA, 19 nt, Artificial Sequence
  Description of Artificial Sequence: Synthetic oligonucleotide
uaccaugugucagaugauu

SEQ ID NO: 3139787 - RNA, 19 nt, Artificial Sequence
  Description of Artificial Sequence: Synthetic oligonucleotide
caugugucagaugauuuaa

SEQ ID NO: 3139788 - RNA, 19 nt, Artificial Sequence
  Description of Artificial Sequence: Synthetic oligonucleotide
cuaauuauuuuagguauuu

SEQ ID NO: 3139789 - RNA, 19 nt, Artificial Sequence
  Description of Artificial Sequence: Synthetic oligonucleotide
ucaccaggguuuaguuuua

SEQ ID NO: 3139790 - RNA, 19 nt, Artificial Sequence
  Description of Artificial Sequence: Synthetic oligonucleotide
gucagaugauuuaaucugu

SEQ ID NO: 3139791 - RNA, 19 nt, Artificial Sequence
  Description of Artificial Sequence: Synthetic oligonucleotide
accaugugucagaugauuu

SEQ ID NO: 3139792 - RNA, 19 nt, Artificial Sequence
  Description of Artificial Sequence: Synthetic oligonucleotide
gcuagcagaacuuguacau

SEQ ID NO: 3139793 - RNA, 19 nt, Artificial Sequence
  Description of Artificial Sequence: Synthetic oligonucleotide
gaggugcucagguuggaau

SEQ ID NO: 3139794 - RNA, 19 nt, Artificial Sequence
  Description of Artificial Sequence: Synthetic oligonucleotide
ugaggugcucagguuggaa

SEQ ID NO: 3139795 - RNA, 19 nt, Artificial Sequence
  Description of Artificial Sequence: Synthetic oligonucleotide
accaggguuuaguuuuaua

SEQ ID NO: 3139796 - RNA, 19 nt, Artificial Sequence
  Description of Artificial Sequence: Synthetic oligonucleotide
gaucaguauguugcacuaa

SEQ ID NO: 3139797 - RNA, 19 nt, Artificial Sequence
  Description of Artificial Sequence: Synthetic oligonucleotide
guuuuauauugaggugcuc

SEQ ID NO: 3139798 - RNA, 19 nt, Artificial Sequence
  Description of Artificial Sequence: Synthetic oligonucleotide
ggguuuaguuuuauauuga

SEQ ID NO: 3139799 - RNA, 19 nt, Artificial Sequence
  Description of Artificial Sequence: Synthetic oligonucleotide
caggguuuaguuuuauauu

SEQ ID NO: 3139800 - RNA, 19 nt, Artificial Sequence
  Description of Artificial Sequence: Synthetic oligonucleotide
gguuggaauaaagugguau

SEQ ID NO: 3139801 - RNA, 19 nt, Artificial Sequence
  Description of Artificial Sequence: Synthetic oligonucleotide
caaucugcuagcagaacuu

SEQ ID NO: 3139802 - RNA, 19 nt, Artificial Sequence
  Description of Artificial Sequence: Synthetic oligonucleotide
gucaaucugcuagcagaac

SEQ ID NO: 3139803 - RNA, 19 nt, Artificial Sequence
  Description of Artificial Sequence: Synthetic oligonucleotide
augugucagaugauuuaau

SEQ ID NO: 3139804 - RNA, 19 nt, Artificial Sequence
  Description of Artificial Sequence: Synthetic oligonucleotide
agcagaacuuguacauuuu

SEQ ID NO: 3139805 - RNA, 19 nt, Artificial Sequence
  Description of Artificial Sequence: Synthetic oligonucleotide
acaguucaccaggguuuag

SEQ ID NO: 3139806 - RNA, 19 nt, Artificial Sequence
  Description of Artificial Sequence: Synthetic oligonucleotide
cagaugauuuaaucuguuu

SEQ ID NO: 3139807 - RNA, 19 nt, Artificial Sequence
  Description of Artificial Sequence: Synthetic oligonucleotide
guucaccaggguuuaguuu

SEQ ID NO: 3139808 - RNA, 19 nt, Artificial Sequence
  Description of Artificial Sequence: Synthetic oligonucleotide
ccaugugucagaugauuua

SEQ ID NO: 3139809 - RNA, 19 nt, Artificial Sequence
  Description of Artificial Sequence: Synthetic oligonucleotide
ggugcucagguuggaauaa

SEQ ID NO: 3139810 - RNA, 19 nt, Artificial Sequence
  Description of Artificial Sequence: Synthetic oligonucleotide
gcucagguuggaauaaagu

SEQ ID NO: 3139811 - RNA, 19 nt, Artificial Sequence
  Description of Artificial Sequence: Synthetic oligonucleotide
caguucaccaggguuuagu

SEQ ID NO: 3139812 - RNA, 19 nt, Artificial Sequence
  Description of Artificial Sequence: Synthetic oligonucleotide
agguuggaauaaaguggua

SEQ ID NO: 3139813 - RNA, 19 nt, Artificial Sequence
  Description of Artificial Sequence: Synthetic oligonucleotide
cuaccaugugucagaugau

SEQ ID NO: 3139814 - RNA, 19 nt, Artificial Sequence
  Description of Artificial Sequence: Synthetic oligonucleotide
cuagcagaacuuguacauu

SEQ ID NO: 3139815 - RNA, 19 nt, Artificial Sequence
  Description of Artificial Sequence: Synthetic oligonucleotide
gugcucagguuggaauaaa

SEQ ID NO: 3139816 - RNA, 19 nt, Artificial Sequence
  Description of Artificial Sequence: Synthetic oligonucleotide
aauaguaaacuuuauuucc

SEQ ID NO: 3139817 - RNA, 19 nt, Artificial Sequence
  Description of Artificial Sequence: Synthetic oligonucleotide
aacauuuuaccccuugucc

SEQ ID NO: 3139818 - RNA, 19 nt, Artificial Sequence
  Description of Artificial Sequence: Synthetic oligonucleotide
uuaauaguaaacuuuauuu

SEQ ID NO: 3139819 - RNA, 19 nt, Artificial Sequence
  Description of Artificial Sequence: Synthetic oligonucleotide
ucuaguacagaaaggagag

SEQ ID NO: 3139820 - RNA, 19 nt, Artificial Sequence
  Description of Artificial Sequence: Synthetic oligonucleotide
aacauaauuucauagcaga

SEQ ID NO: 3139821 - RNA, 19 nt, Artificial Sequence
  Description of Artificial Sequence: Synthetic oligonucleotide
agaccuaugcaaaagaucc

SEQ ID NO: 3139822 - RNA, 19 nt, Artificial Sequence
  Description of Artificial Sequence: Synthetic oligonucleotide
guaaacuuuauuuccacgg

SEQ ID NO: 3139823 - RNA, 19 nt, Artificial Sequence
  Description of Artificial Sequence: Synthetic oligonucleotide
agagauuucacauacuucu

SEQ ID NO: 3139824 - RNA, 19 nt, Artificial Sequence
  Description of Artificial Sequence: Synthetic oligonucleotide
uguaacauaauuucauagc

SEQ ID NO: 3139825 - RNA, 19 nt, Artificial Sequence
  Description of Artificial Sequence: Synthetic oligonucleotide
uuucauagcagaccuaugc

SEQ ID NO: 3139826 - RNA, 19 nt, Artificial Sequence
  Description of Artificial Sequence: Synthetic oligonucleotide
uucauuguaacauaauuuc

SEQ ID NO: 3139827 - RNA, 19 nt, Artificial Sequence
  Description of Artificial Sequence: Synthetic oligonucleotide
ugcaaaagaucccacauca

SEQ ID NO: 3139828 - RNA, 19 nt, Artificial Sequence
  Description of Artificial Sequence: Synthetic oligonucleotide
auaauuucauagcagaccu

SEQ ID NO: 3139829 - RNA, 19 nt, Artificial Sequence
  Description of Artificial Sequence: Synthetic oligonucleotide
uaaacuuuauuuccacggg

SEQ ID NO: 3139830 - RNA, 19 nt, Artificial Sequence
  Description of Artificial Sequence: Synthetic oligonucleotide
accaagagauuucacauac

SEQ ID NO: 3139831 - RNA, 19 nt, Artificial Sequence
  Description of Artificial Sequence: Synthetic oligonucleotide
acacccaacauuuuacccc

SEQ ID NO: 3139832 - RNA, 19 nt, Artificial Sequence
  Description of Artificial Sequence: Synthetic oligonucleotide
uuguaacauaauuucauag

SEQ ID NO: 3139833 - RNA, 19 nt, Artificial Sequence
  Description of Artificial Sequence: Synthetic oligonucleotide
uguccucuaguacagaaag

SEQ ID NO: 3139834 - RNA, 19 nt, Artificial Sequence
  Description of Artificial Sequence: Synthetic oligonucleotide
gauuucacauacuucuggg

SEQ ID NO: 3139835 - RNA, 19 nt, Artificial Sequence
  Description of Artificial Sequence: Synthetic oligonucleotide
uaauaguaaacuuuauuuc

SEQ ID NO: 3139836 - RNA, 19 nt, Artificial Sequence
  Description of Artificial Sequence: Synthetic oligonucleotide
uuucacauacuucugggca

SEQ ID NO: 3139837 - RNA, 19 nt, Artificial Sequence
  Description of Artificial Sequence: Synthetic oligonucleotide
uaacauaauuucauagcag

SEQ ID NO: 3139838 - RNA, 19 nt, Artificial Sequence
  Description of Artificial Sequence: Synthetic oligonucleotide
uuucauuguaacauaauuu

SEQ ID NO: 3139839 - RNA, 19 nt, Artificial Sequence
  Description of Artificial Sequence: Synthetic oligonucleotide
auuucacauacuucugggc

SEQ ID NO: 3139840 - RNA, 19 nt, Artificial Sequence
  Description of Artificial Sequence: Synthetic oligonucleotide
guaacauaauuucauagca

SEQ ID NO: 3139841 - RNA, 19 nt, Artificial Sequence
  Description of Artificial Sequence: Synthetic oligonucleotide
aguaaacuuuauuuccacg

SEQ ID NO: 3139842 - RNA, 19 nt, Artificial Sequence
  Description of Artificial Sequence: Synthetic oligonucleotide
uucuuaauaguaaacuuua

SEQ ID NO: 3139843 - RNA, 19 nt, Artificial Sequence
  Description of Artificial Sequence: Synthetic oligonucleotide
cauaauuucauagcagacc

SEQ ID NO: 3139844 - RNA, 19 nt, Artificial Sequence
  Description of Artificial Sequence: Synthetic oligonucleotide
acggguauuucauuguaac

SEQ ID NO: 3139845 - RNA, 19 nt, Artificial Sequence
  Description of Artificial Sequence: Synthetic oligonucleotide
ucauuguaacauaauuuca

SEQ ID NO: 3139846 - RNA, 19 nt, Artificial Sequence
  Description of Artificial Sequence: Synthetic oligonucleotide
aaacuuuauuuccacgggu

SEQ ID NO: 3139847 - RNA, 19 nt, Artificial Sequence
  Description of Artificial Sequence: Synthetic oligonucleotide
uaugcaaaagaucccacau

SEQ ID NO: 3139848 - RNA, 19 nt, Artificial Sequence
  Description of Artificial Sequence: Synthetic oligonucleotide
aauuucauagcagaccuau

SEQ ID NO: 3139849 - RNA, 19 nt, Artificial Sequence
  Description of Artificial Sequence: Synthetic oligonucleotide
auuucauuguaacauaauu

SEQ ID NO: 3139850 - RNA, 19 nt, Artificial Sequence
  Description of Artificial Sequence: Synthetic oligonucleotide
uuguucuuaauaguaaacu

SEQ ID NO: 3139851 - RNA, 19 nt, Artificial Sequence
  Description of Artificial Sequence: Synthetic oligonucleotide
acauuuuaccccuuguccu

SEQ ID NO: 3139852 - RNA, 19 nt, Artificial Sequence
  Description of Artificial Sequence: Synthetic oligonucleotide
uccucuaguacagaaagga

SEQ ID NO: 3139853 - RNA, 19 nt, Artificial Sequence
  Description of Artificial Sequence: Synthetic oligonucleotide
uucauagcagaccuaugca

SEQ ID NO: 3139854 - RNA, 19 nt, Artificial Sequence
  Description of Artificial Sequence: Synthetic oligonucleotide
aagagauuucacauacuuc

SEQ ID NO: 3139855 - RNA, 19 nt, Artificial Sequence
  Description of Artificial Sequence: Synthetic oligonucleotide
uucugggcagaacaugggg

SEQ ID NO: 3139856 - RNA, 19 nt, Artificial Sequence
  Description of Artificial Sequence: Synthetic oligonucleotide
uguucuuaauaguaaacuu

SEQ ID NO: 3139857 - RNA, 19 nt, Artificial Sequence
  Description of Artificial Sequence: Synthetic oligonucleotide
uucacauacuucugggcag

SEQ ID NO: 3139858 - RNA, 19 nt, Artificial Sequence
  Description of Artificial Sequence: Synthetic oligonucleotide
aacauggggcucugaggcc

SEQ ID NO: 3139859 - RNA, 19 nt, Artificial Sequence
  Description of Artificial Sequence: Synthetic oligonucleotide
agaacauggggcucugagg

SEQ ID NO: 3139860 - RNA, 19 nt, Artificial Sequence
  Description of Artificial Sequence: Synthetic oligonucleotide
aaagucaccaagagauuuc

SEQ ID NO: 3139861 - RNA, 19 nt, Artificial Sequence
  Description of Artificial Sequence: Synthetic oligonucleotide
aaaagaucccacaucacaa

SEQ ID NO: 3139862 - RNA, 19 nt, Artificial Sequence
  Description of Artificial Sequence: Synthetic oligonucleotide
ucugggcagaacauggggc

SEQ ID NO: 3139863 - RNA, 19 nt, Artificial Sequence
  Description of Artificial Sequence: Synthetic oligonucleotide
cauacuucugggcagaaca

SEQ ID NO: 3139864 - RNA, 19 nt, Artificial Sequence
  Description of Artificial Sequence: Synthetic oligonucleotide
aaaagucaccaagagauuu

SEQ ID NO: 3139865 - RNA, 19 nt, Artificial Sequence
  Description of Artificial Sequence: Synthetic oligonucleotide
acauaauuucauagcagac

SEQ ID NO: 3139866 - RNA, 19 nt, Artificial Sequence
  Description of Artificial Sequence: Synthetic oligonucleotide
aaagaucccacaucacaaa

SEQ ID NO: 3139867 - RNA, 19 nt, Artificial Sequence
  Description of Artificial Sequence: Synthetic oligonucleotide
augcaaaagaucccacauc

SEQ ID NO: 3139868 - RNA, 19 nt, Artificial Sequence
  Description of Artificial Sequence: Synthetic oligonucleotide
gacacccaacauuuuaccc

SEQ ID NO: 3139869 - RNA, 19 nt, Artificial Sequence
  Description of Artificial Sequence: Synthetic oligonucleotide
cucuaguacagaaaggaga

SEQ ID NO: 3139870 - RNA, 19 nt, Artificial Sequence
  Description of Artificial Sequence: Synthetic oligonucleotide
ucauagcagaccuaugcaa

SEQ ID NO: 3139871 - RNA, 19 nt, Artificial Sequence
  Description of Artificial Sequence: Synthetic oligonucleotide
uuuauuuccacggguauuu

SEQ ID NO: 3139872 - RNA, 19 nt, Artificial Sequence
  Description of Artificial Sequence: Synthetic oligonucleotide
auuguaacauaauuucaua

SEQ ID NO: 3139873 - RNA, 19 nt, Artificial Sequence
  Description of Artificial Sequence: Synthetic oligonucleotide
uauuucauuguaacauaau

SEQ ID NO: 3139874 - RNA, 19 nt, Artificial Sequence
  Description of Artificial Sequence: Synthetic oligonucleotide
uaguaaacuuuauuuccac

SEQ ID NO: 3139875 - RNA, 19 nt, Artificial Sequence
  Description of Artificial Sequence: Synthetic oligonucleotide
caaaagaucccacaucaca

SEQ ID NO: 3139876 - RNA, 19 nt, Artificial Sequence
  Description of Artificial Sequence: Synthetic oligonucleotide
aagaucccacaucacaaaa

SEQ ID NO: 3139877 - RNA, 19 nt, Artificial Sequence
  Description of Artificial Sequence: Synthetic oligonucleotide
uuccacggguauuucauug

SEQ ID NO: 3139878 - RNA, 19 nt, Artificial Sequence
  Description of Artificial Sequence: Synthetic oligonucleotide
gucaccaagagauuucaca

SEQ ID NO: 3139879 - RNA, 19 nt, Artificial Sequence
  Description of Artificial Sequence: Synthetic oligonucleotide
auaguaaacuuuauuucca

SEQ ID NO: 3139880 - RNA, 19 nt, Artificial Sequence
  Description of Artificial Sequence: Synthetic oligonucleotide
uauuuccacggguauuuca

SEQ ID NO: 3139881 - RNA, 19 nt, Artificial Sequence
  Description of Artificial Sequence: Synthetic oligonucleotide
acauggggcucugaggccc

SEQ ID NO: 3139882 - RNA, 19 nt, Artificial Sequence
  Description of Artificial Sequence: Synthetic oligonucleotide
cagaccuaugcaaaagauc

SEQ ID NO: 3139883 - RNA, 19 nt, Artificial Sequence
  Description of Artificial Sequence: Synthetic oligonucleotide
cagaacauggggcucugag

SEQ ID NO: 3139884 - RNA, 19 nt, Artificial Sequence
  Description of Artificial Sequence: Synthetic oligonucleotide
caacauuuuaccccuuguc

SEQ ID NO: 3139885 - RNA, 19 nt, Artificial Sequence
  Description of Artificial Sequence: Synthetic oligonucleotide
agcagaccuaugcaaaaga

SEQ ID NO: 3139886 - RNA, 19 nt, Artificial Sequence
  Description of Artificial Sequence: Synthetic oligonucleotide
aagucaccaagagauuuca

SEQ ID NO: 3139887 - RNA, 19 nt, Artificial Sequence
  Description of Artificial Sequence: Synthetic oligonucleotide
accccuuguccucuaguac

SEQ ID NO: 3139888 - RNA, 19 nt, Artificial Sequence
  Description of Artificial Sequence: Synthetic oligonucleotide
aacuuuauuuccacgggua

SEQ ID NO: 3139889 - RNA, 19 nt, Artificial Sequence
  Description of Artificial Sequence: Synthetic oligonucleotide
cauuuuaccccuuguccuc

SEQ ID NO: 3139890 - RNA, 19 nt, Artificial Sequence
  Description of Artificial Sequence: Synthetic oligonucleotide
acuuuauuuccacggguau

SEQ ID NO: 3139891 - RNA, 19 nt, Artificial Sequence
  Description of Artificial Sequence: Synthetic oligonucleotide
aggguugacacccaacauu

SEQ ID NO: 3139892 - RNA, 19 nt, Artificial Sequence
  Description of Artificial Sequence: Synthetic oligonucleotide
cuucugggcagaacauggg

SEQ ID NO: 3139893 - RNA, 19 nt, Artificial Sequence
  Description of Artificial Sequence: Synthetic oligonucleotide
auagcagaccuaugcaaaa

SEQ ID NO: 3139894 - RNA, 19 nt, Artificial Sequence
  Description of Artificial Sequence: Synthetic oligonucleotide
accuaugcaaaagauccca

SEQ ID NO: 3139895 - RNA, 19 nt, Artificial Sequence
  Description of Artificial Sequence: Synthetic oligonucleotide
cuaugcaaaagaucccaca

SEQ ID NO: 3139896 - RNA, 19 nt, Artificial Sequence
  Description of Artificial Sequence: Synthetic oligonucleotide
uuuaccccuuguccucuag

SEQ ID NO: 3139897 - RNA, 19 nt, Artificial Sequence
  Description of Artificial Sequence: Synthetic oligonucleotide
cauuguaacauaauuucau

SEQ ID NO: 3139898 - RNA, 19 nt, Artificial Sequence
  Description of Artificial Sequence: Synthetic oligonucleotide
uuguccucuaguacagaaa

SEQ ID NO: 3139899 - RNA, 19 nt, Artificial Sequence
  Description of Artificial Sequence: Synthetic oligonucleotide
cauagcagaccuaugcaaa

SEQ ID NO: 3139900 - RNA, 19 nt, Artificial Sequence
  Description of Artificial Sequence: Synthetic oligonucleotide
uagcagaccuaugcaaaag

SEQ ID NO: 3139901 - RNA, 19 nt, Artificial Sequence
  Description of Artificial Sequence: Synthetic oligonucleotide
guugacacccaacauuuua

SEQ ID NO: 3139902 - RNA, 19 nt, Artificial Sequence
  Description of Artificial Sequence: Synthetic oligonucleotide
uccacggguauuucauugu

SEQ ID NO: 3139903 - RNA, 19 nt, Artificial Sequence
  Description of Artificial Sequence: Synthetic oligonucleotide
uacuucugggcagaacaug

SEQ ID NO: 3139904 - RNA, 19 nt, Artificial Sequence
  Description of Artificial Sequence: Synthetic oligonucleotide
guauuucauuguaacauaa

SEQ ID NO: 3139905 - RNA, 19 nt, Artificial Sequence
  Description of Artificial Sequence: Synthetic oligonucleotide
uaauuucauagcagaccua

SEQ ID NO: 3139906 - RNA, 19 nt, Artificial Sequence
  Description of Artificial Sequence: Synthetic oligonucleotide
auuuccacggguauuucau

SEQ ID NO: 3139907 - RNA, 19 nt, Artificial Sequence
  Description of Artificial Sequence: Synthetic oligonucleotide
acauacuucugggcagaac

SEQ ID NO: 3139908 - RNA, 19 nt, Artificial Sequence
  Description of Artificial Sequence: Synthetic oligonucleotide
uuaccccuuguccucuagu

SEQ ID NO: 3139909 - RNA, 19 nt, Artificial Sequence
  Description of Artificial Sequence: Synthetic oligonucleotide
cuuguccucuaguacagaa

SEQ ID NO: 3139910 - RNA, 19 nt, Artificial Sequence
  Description of Artificial Sequence: Synthetic oligonucleotide
gaccuaugcaaaagauccc

SEQ ID NO: 3139911 - RNA, 19 nt, Artificial Sequence
  Description of Artificial Sequence: Synthetic oligonucleotide
uaccccuuguccucuagua

SEQ ID NO: 3139912 - RNA, 19 nt, Artificial Sequence
  Description of Artificial Sequence: Synthetic oligonucleotide
guucuuaauaguaaacuuu

SEQ ID NO: 3139913 - RNA, 19 nt, Artificial Sequence
  Description of Artificial Sequence: Synthetic oligonucleotide
gguauuucauuguaacaua

SEQ ID NO: 3139914 - RNA, 19 nt, Artificial Sequence
  Description of Artificial Sequence: Synthetic oligonucleotide
guccucuaguacagaaagg

SEQ ID NO: 3139915 - RNA, 19 nt, Artificial Sequence
  Description of Artificial Sequence: Synthetic oligonucleotide
caagagauuucacauacuu

SEQ ID NO: 3139916 - RNA, 19 nt, Artificial Sequence
  Description of Artificial Sequence: Synthetic oligonucleotide
auuuuaccccuuguccucu

SEQ ID NO: 3139917 - RNA, 19 nt, Artificial Sequence
  Description of Artificial Sequence: Synthetic oligonucleotide
ccucuaguacagaaaggag

SEQ ID NO: 3139918 - RNA, 19 nt, Artificial Sequence
  Description of Artificial Sequence: Synthetic oligonucleotide
auuucauagcagaccuaug

SEQ ID NO: 3139919 - RNA, 19 nt, Artificial Sequence
  Description of Artificial Sequence: Synthetic oligonucleotide
uuuccacggguauuucauu

SEQ ID NO: 3139920 - RNA, 19 nt, Artificial Sequence
  Description of Artificial Sequence: Synthetic oligonucleotide
ggguauuucauuguaacau

SEQ ID NO: 3139921 - RNA, 19 nt, Artificial Sequence
  Description of Artificial Sequence: Synthetic oligonucleotide
uuauuuccacggguauuuc

SEQ ID NO: 3139922 - RNA, 19 nt, Artificial Sequence
  Description of Artificial Sequence: Synthetic oligonucleotide
ccuaugcaaaagaucccac

SEQ ID NO: 3139923 - RNA, 19 nt, Artificial Sequence
  Description of Artificial Sequence: Synthetic oligonucleotide
auacuucugggcagaacau

SEQ ID NO: 3139924 - RNA, 19 nt, Artificial Sequence
  Description of Artificial Sequence: Synthetic oligonucleotide
cacccaacauuuuaccccu

SEQ ID NO: 3139925 - RNA, 19 nt, Artificial Sequence
  Description of Artificial Sequence: Synthetic oligonucleotide
cacggguauuucauuguaa

SEQ ID NO: 3139926 - RNA, 19 nt, Artificial Sequence
  Description of Artificial Sequence: Synthetic oligonucleotide
ccaggguugacacccaaca

SEQ ID NO: 3139927 - RNA, 19 nt, Artificial Sequence
  Description of Artificial Sequence: Synthetic oligonucleotide
uuuuaccccuuguccucua

SEQ ID NO: 3139928 - RNA, 19 nt, Artificial Sequence
  Description of Artificial Sequence: Synthetic oligonucleotide
cugggcagaacauggggcu

SEQ ID NO: 3139929 - RNA, 19 nt, Artificial Sequence
  Description of Artificial Sequence: Synthetic oligonucleotide
caccaagagauuucacaua

SEQ ID NO: 3139930 - RNA, 19 nt, Artificial Sequence
  Description of Artificial Sequence: Synthetic oligonucleotide
cccaacauuuuaccccuug

SEQ ID NO: 3139931 - RNA, 19 nt, Artificial Sequence
  Description of Artificial Sequence: Synthetic oligonucleotide
ccccuuguccucuaguaca

SEQ ID NO: 3139932 - RNA, 19 nt, Artificial Sequence
  Description of Artificial Sequence: Synthetic oligonucleotide
gcaaaagaucccacaucac

SEQ ID NO: 3139933 - RNA, 19 nt, Artificial Sequence
  Description of Artificial Sequence: Synthetic oligonucleotide
cuuuauuuccacggguauu

SEQ ID NO: 3139934 - RNA, 19 nt, Artificial Sequence
  Description of Artificial Sequence: Synthetic oligonucleotide
ggguugacacccaacauuu

SEQ ID NO: 3139935 - RNA, 19 nt, Artificial Sequence
  Description of Artificial Sequence: Synthetic oligonucleotide
cccaggguugacacccaac

SEQ ID NO: 3139936 - RNA, 19 nt, Artificial Sequence
  Description of Artificial Sequence: Synthetic oligonucleotide
cggguauuucauuguaaca

SEQ ID NO: 3139937 - RNA, 19 nt, Artificial Sequence
  Description of Artificial Sequence: Synthetic oligonucleotide
gcagaccuaugcaaaagau

SEQ ID NO: 3139938 - RNA, 19 nt, Artificial Sequence
  Description of Artificial Sequence: Synthetic oligonucleotide
caggguugacacccaacau

SEQ ID NO: 3139939 - RNA, 19 nt, Artificial Sequence
  Description of Artificial Sequence: Synthetic oligonucleotide
ccaacauuuuaccccuugu

SEQ ID NO: 3139940 - RNA, 19 nt, Artificial Sequence
  Description of Artificial Sequence: Synthetic oligonucleotide
cacauacuucugggcagaa

SEQ ID NO: 3139941 - RNA, 19 nt, Artificial Sequence
  Description of Artificial Sequence: Synthetic oligonucleotide
ccacggguauuucauugua

SEQ ID NO: 3139942 - RNA, 19 nt, Artificial Sequence
  Description of Artificial Sequence: Synthetic oligonucleotide
ccaagagauuucacauacu

SEQ ID NO: 3139943 - RNA, 19 nt, Artificial Sequence
  Description of Artificial Sequence: Synthetic oligonucleotide
gggcagaacauggggcucu

SEQ ID NO: 3139944 - RNA, 19 nt, Artificial Sequence
  Description of Artificial Sequence: Synthetic oligonucleotide
acccaacauuuuaccccuu

SEQ ID NO: 3139945 - RNA, 19 nt, Artificial Sequence
  Description of Artificial Sequence: Synthetic oligonucleotide
gcagaacauggggcucuga

SEQ ID NO: 3139946 - RNA, 19 nt, Artificial Sequence
  Description of Artificial Sequence: Synthetic oligonucleotide
ccuuguccucuaguacaga

SEQ ID NO: 3139947 - RNA, 19 nt, Artificial Sequence
  Description of Artificial Sequence: Synthetic oligonucleotide
gguugacacccaacauuuu

SEQ ID NO: 3139948 - RNA, 19 nt, Artificial Sequence
  Description of Artificial Sequence: Synthetic oligonucleotide
ccccaggguugacacccaa

SEQ ID NO: 3139949 - RNA, 19 nt, Artificial Sequence
  Description of Artificial Sequence: Synthetic oligonucleotide
acacaaaauaaccagaauc

SEQ ID NO: 3139950 - RNA, 19 nt, Artificial Sequence
  Description of Artificial Sequence: Synthetic oligonucleotide
cacaaaauaaccagaaucg

SEQ ID NO: 3139951 - RNA, 19 nt, Artificial Sequence
  Description of Artificial Sequence: Synthetic oligonucleotide
uuuucuuucuagcugagac

SEQ ID NO: 3139952 - RNA, 19 nt, Artificial Sequence
  Description of Artificial Sequence: Synthetic oligonucleotide
ugagacacaaaauaaccag

SEQ ID NO: 3139953 - RNA, 19 nt, Artificial Sequence
  Description of Artificial Sequence: Synthetic oligonucleotide
caaaauaaccagaaucgcg

SEQ ID NO: 3139954 - RNA, 19 nt, Artificial Sequence
  Description of Artificial Sequence: Synthetic oligonucleotide
aaaauaaccagaaucgcga

SEQ ID NO: 3139955 - RNA, 19 nt, Artificial Sequence
  Description of Artificial Sequence: Synthetic oligonucleotide
aaauaaccagaaucgcgac

SEQ ID NO: 3139956 - RNA, 19 nt, Artificial Sequence
  Description of Artificial Sequence: Synthetic oligonucleotide
uucauuuucuuucuagcug

SEQ ID NO: 3139957 - RNA, 19 nt, Artificial Sequence
  Description of Artificial Sequence: Synthetic oligonucleotide
acaaaauaaccagaaucgc

SEQ ID NO: 3139958 - RNA, 19 nt, Artificial Sequence
  Description of Artificial Sequence: Synthetic oligonucleotide
ucuucauuuucuuucuagc

SEQ ID NO: 3139959 - RNA, 19 nt, Artificial Sequence
  Description of Artificial Sequence: Synthetic oligonucleotide
aauaaccagaaucgcgacu

SEQ ID NO: 3139960 - RNA, 19 nt, Artificial Sequence
  Description of Artificial Sequence: Synthetic oligonucleotide
uucuuucuagcugagacac

SEQ ID NO: 3139961 - RNA, 19 nt, Artificial Sequence
  Description of Artificial Sequence: Synthetic oligonucleotide
uuucuuucuagcugagaca

SEQ ID NO: 3139962 - RNA, 19 nt, Artificial Sequence
  Description of Artificial Sequence: Synthetic oligonucleotide
cuagcugagacacaaaaua

SEQ ID NO: 3139963 - RNA, 19 nt, Artificial Sequence
  Description of Artificial Sequence: Synthetic oligonucleotide
cugagacacaaaauaacca

SEQ ID NO: 3139964 - RNA, 19 nt, Artificial Sequence
  Description of Artificial Sequence: Synthetic oligonucleotide
auaaccagaaucgcgacuu

SEQ ID NO: 3139965 - RNA, 19 nt, Artificial Sequence
  Description of Artificial Sequence: Synthetic oligonucleotide
gcugagacacaaaauaacc

SEQ ID NO: 3139966 - RNA, 19 nt, Artificial Sequence
  Description of Artificial Sequence: Synthetic oligonucleotide
agacacaaaauaaccagaa

SEQ ID NO: 3139967 - RNA, 19 nt, Artificial Sequence
  Description of Artificial Sequence: Synthetic oligonucleotide
cauuuucuuucuagcugag

SEQ ID NO: 3139968 - RNA, 19 nt, Artificial Sequence
  Description of Artificial Sequence: Synthetic oligonucleotide
cuuucuagcugagacacaa

SEQ ID NO: 3139969 - RNA, 19 nt, Artificial Sequence
  Description of Artificial Sequence: Synthetic oligonucleotide
cuucauuuucuuucuagcu

SEQ ID NO: 3139970 - RNA, 19 nt, Artificial Sequence
  Description of Artificial Sequence: Synthetic oligonucleotide
ucuuucuagcugagacaca

SEQ ID NO: 3139971 - RNA, 19 nt, Artificial Sequence
  Description of Artificial Sequence: Synthetic oligonucleotide
uaaccagaaucgcgacuug

SEQ ID NO: 3139972 - RNA, 19 nt, Artificial Sequence
  Description of Artificial Sequence: Synthetic oligonucleotide
gacacaaaauaaccagaau

SEQ ID NO: 3139973 - RNA, 19 nt, Artificial Sequence
  Description of Artificial Sequence: Synthetic oligonucleotide
uccccggacugacuucuuc

SEQ ID NO: 3139974 - RNA, 19 nt, Artificial Sequence
  Description of Artificial Sequence: Synthetic oligonucleotide
ccccggacugacuucuuca

SEQ ID NO: 3139975 - RNA, 19 nt, Artificial Sequence
  Description of Artificial Sequence: Synthetic oligonucleotide
cggacugacuucuucauuu

SEQ ID NO: 3139976 - RNA, 19 nt, Artificial Sequence
  Description of Artificial Sequence: Synthetic oligonucleotide
cccggacugacuucuucau

SEQ ID NO: 3139977 - RNA, 19 nt, Artificial Sequence
  Description of Artificial Sequence: Synthetic oligonucleotide
ccggacugacuucuucauu

SEQ ID NO: 3139978 - RNA, 19 nt, Artificial Sequence
  Description of Artificial Sequence: Synthetic oligonucleotide
aaaacacacacacacacac

SEQ ID NO: 3139979 - RNA, 19 nt, Artificial Sequence
  Description of Artificial Sequence: Synthetic oligonucleotide
aacacacacacacacacac

SEQ ID NO: 3139980 - RNA, 19 nt, Artificial Sequence
  Description of Artificial Sequence: Synthetic oligonucleotide
agugauuuccaggauagcc

SEQ ID NO: 3139981 - RNA, 19 nt, Artificial Sequence
  Description of Artificial Sequence: Synthetic oligonucleotide
agcucagugagccacacac

SEQ ID NO: 3139982 - RNA, 19 nt, Artificial Sequence
  Description of Artificial Sequence: Synthetic oligonucleotide
ugauuuccaggauagccag

SEQ ID NO: 3139983 - RNA, 19 nt, Artificial Sequence
  Description of Artificial Sequence: Synthetic oligonucleotide
cacacacacacacacacag

SEQ ID NO: 3139984 - RNA, 19 nt, Artificial Sequence
  Description of Artificial Sequence: Synthetic oligonucleotide
cacacacacacacacacac

SEQ ID NO: 3139985 - RNA, 19 nt, Artificial Sequence
  Description of Artificial Sequence: Synthetic oligonucleotide
auuuccaggauagccagag

SEQ ID NO: 3139986 - RNA, 19 nt, Artificial Sequence
  Description of Artificial Sequence: Synthetic oligonucleotide
gacagguggaucucuauga

SEQ ID NO: 3139987 - RNA, 19 nt, Artificial Sequence
  Description of Artificial Sequence: Synthetic oligonucleotide
cucagugagccacacacuc

SEQ ID NO: 3139988 - RNA, 19 nt, Artificial Sequence
  Description of Artificial Sequence: Synthetic oligonucleotide
acacagcucagugagccac

SEQ ID NO: 3139989 - RNA, 19 nt, Artificial Sequence
  Description of Artificial Sequence: Synthetic oligonucleotide
ucagugagccacacacuca

SEQ ID NO: 3139990 - RNA, 19 nt, Artificial Sequence
  Description of Artificial Sequence: Synthetic oligonucleotide
cacacacacacacagcuca

SEQ ID NO: 3139991 - RNA, 19 nt, Artificial Sequence
  Description of Artificial Sequence: Synthetic oligonucleotide
cacuugggagcagagacag

SEQ ID NO: 3139992 - RNA, 19 nt, Artificial Sequence
  Description of Artificial Sequence: Synthetic oligonucleotide
cagugagccacacacucac

SEQ ID NO: 3139993 - RNA, 19 nt, Artificial Sequence
  Description of Artificial Sequence: Synthetic oligonucleotide
gugauuuccaggauagcca

SEQ ID NO: 3139994 - RNA, 19 nt, Artificial Sequence
  Description of Artificial Sequence: Synthetic oligonucleotide
aaacacacacacacacaca

SEQ ID NO: 3139995 - RNA, 19 nt, Artificial Sequence
  Description of Artificial Sequence: Synthetic oligonucleotide
acacacacacacacacagc

SEQ ID NO: 3139996 - RNA, 19 nt, Artificial Sequence
  Description of Artificial Sequence: Synthetic oligonucleotide
uugggagcagagacaggug

SEQ ID NO: 3139997 - RNA, 19 nt, Artificial Sequence
  Description of Artificial Sequence: Synthetic oligonucleotide
cacacacacacacacagcu

SEQ ID NO: 3139998 - RNA, 19 nt, Artificial Sequence
  Description of Artificial Sequence: Synthetic oligonucleotide
acacacacacacacagcuc

SEQ ID NO: 3139999 - RNA, 19 nt, Artificial Sequence
  Description of Artificial Sequence: Synthetic oligonucleotide
cacacacacagcucaguga

SEQ ID NO: 3140000 - RNA, 19 nt, Artificial Sequence
  Description of Artificial Sequence: Synthetic oligonucleotide
ggggugcacaccuuuaauc

SEQ ID NO: 3140001 - RNA, 19 nt, Artificial Sequence
  Description of Artificial Sequence: Synthetic oligonucleotide
gagugauuuccaggauagc

SEQ ID NO: 3140002 - RNA, 19 nt, Artificial Sequence
  Description of Artificial Sequence: Synthetic oligonucleotide
acacacacacacagcucag

SEQ ID NO: 3140003 - RNA, 19 nt, Artificial Sequence
  Description of Artificial Sequence: Synthetic oligonucleotide
acacacacacacacacaca

SEQ ID NO: 3140004 - RNA, 19 nt, Artificial Sequence
  Description of Artificial Sequence: Synthetic oligonucleotide
gagcagagacagguggauc

SEQ ID NO: 3140005 - RNA, 19 nt, Artificial Sequence
  Description of Artificial Sequence: Synthetic oligonucleotide
cacagcucagugagccaca

SEQ ID NO: 3140006 - RNA, 19 nt, Artificial Sequence
  Description of Artificial Sequence: Synthetic oligonucleotide
cacacagcucagugagcca

SEQ ID NO: 3140007 - RNA, 19 nt, Artificial Sequence
  Description of Artificial Sequence: Synthetic oligonucleotide
gcacuugggagcagagaca

SEQ ID NO: 3140008 - RNA, 19 nt, Artificial Sequence
  Description of Artificial Sequence: Synthetic oligonucleotide
ucccagcacuugggagcag

SEQ ID NO: 3140009 - RNA, 19 nt, Artificial Sequence
  Description of Artificial Sequence: Synthetic oligonucleotide
cacacacacacagcucagu

SEQ ID NO: 3140010 - RNA, 19 nt, Artificial Sequence
  Description of Artificial Sequence: Synthetic oligonucleotide
gcucagugagccacacacu

SEQ ID NO: 3140011 - RNA, 19 nt, Artificial Sequence
  Description of Artificial Sequence: Synthetic oligonucleotide
aacuuuauuagauggagac

SEQ ID NO: 3140012 - RNA, 19 nt, Artificial Sequence
  Description of Artificial Sequence: Synthetic oligonucleotide
auuagauggagacaccagc

SEQ ID NO: 3140013 - RNA, 19 nt, Artificial Sequence
  Description of Artificial Sequence: Synthetic oligonucleotide
ucguaggucaagaauaucc

SEQ ID NO: 3140014 - RNA, 19 nt, Artificial Sequence
  Description of Artificial Sequence: Synthetic oligonucleotide
guguaacuuuauuagaugg

SEQ ID NO: 3140015 - RNA, 19 nt, Artificial Sequence
  Description of Artificial Sequence: Synthetic oligonucleotide
cuuuauuagauggagacac

SEQ ID NO: 3140016 - RNA, 19 nt, Artificial Sequence
  Description of Artificial Sequence: Synthetic oligonucleotide
gucaagaauauccacuggg

SEQ ID NO: 3140017 - RNA, 19 nt, Artificial Sequence
  Description of Artificial Sequence: Synthetic oligonucleotide
aauaacucggucguagguc

SEQ ID NO: 3140018 - RNA, 19 nt, Artificial Sequence
  Description of Artificial Sequence: Synthetic oligonucleotide
aagaauauccacuggguuu

SEQ ID NO: 3140019 - RNA, 19 nt, Artificial Sequence
  Description of Artificial Sequence: Synthetic oligonucleotide
uguaacuuuauuagaugga

SEQ ID NO: 3140020 - RNA, 19 nt, Artificial Sequence
  Description of Artificial Sequence: Synthetic oligonucleotide
uauuagauggagacaccag

SEQ ID NO: 3140021 - RNA, 19 nt, Artificial Sequence
  Description of Artificial Sequence: Synthetic oligonucleotide
uuagauggagacaccagcu

SEQ ID NO: 3140022 - RNA, 19 nt, Artificial Sequence
  Description of Artificial Sequence: Synthetic oligonucleotide
guaacuuuauuagauggag

SEQ ID NO: 3140023 - RNA, 19 nt, Artificial Sequence
  Description of Artificial Sequence: Synthetic oligonucleotide
ucaagaauauccacugggu

SEQ ID NO: 3140024 - RNA, 19 nt, Artificial Sequence
  Description of Artificial Sequence: Synthetic oligonucleotide
uaggucaagaauauccacu

SEQ ID NO: 3140025 - RNA, 19 nt, Artificial Sequence
  Description of Artificial Sequence: Synthetic oligonucleotide
aguguaacuuuauuagaug

SEQ ID NO: 3140026 - RNA, 19 nt, Artificial Sequence
  Description of Artificial Sequence: Synthetic oligonucleotide
uuauuagauggagacacca

SEQ ID NO: 3140027 - RNA, 19 nt, Artificial Sequence
  Description of Artificial Sequence: Synthetic oligonucleotide
uuuauuagauggagacacc

SEQ ID NO: 3140028 - RNA, 19 nt, Artificial Sequence
  Description of Artificial Sequence: Synthetic oligonucleotide
aggucaagaauauccacug

SEQ ID NO: 3140029 - RNA, 19 nt, Artificial Sequence
  Description of Artificial Sequence: Synthetic oligonucleotide
uucacuccgacuccacacg

SEQ ID NO: 3140030 - RNA, 19 nt, Artificial Sequence
  Description of Artificial Sequence: Synthetic oligonucleotide
cuccccaauaacucggucg

SEQ ID NO: 3140031 - RNA, 19 nt, Artificial Sequence
  Description of Artificial Sequence: Synthetic oligonucleotide
agaauauccacuggguuug

SEQ ID NO: 3140032 - RNA, 19 nt, Artificial Sequence
  Description of Artificial Sequence: Synthetic oligonucleotide
auaacucggucguagguca

SEQ ID NO: 3140033 - RNA, 19 nt, Artificial Sequence
  Description of Artificial Sequence: Synthetic oligonucleotide
gcuacauucacuccgacuc

SEQ ID NO: 3140034 - RNA, 19 nt, Artificial Sequence
  Description of Artificial Sequence: Synthetic oligonucleotide
uccccaauaacucggucgu

SEQ ID NO: 3140035 - RNA, 19 nt, Artificial Sequence
  Description of Artificial Sequence: Synthetic oligonucleotide
uccauggacagccggaauc

SEQ ID NO: 3140036 - RNA, 19 nt, Artificial Sequence
  Description of Artificial Sequence: Synthetic oligonucleotide
acuccgacuccacacgagg

SEQ ID NO: 3140037 - RNA, 19 nt, Artificial Sequence
  Description of Artificial Sequence: Synthetic oligonucleotide
uuuuaugggugcaguguaa

SEQ ID NO: 3140038 - RNA, 19 nt, Artificial Sequence
  Description of Artificial Sequence: Synthetic oligonucleotide
uaggaccccauccauggac

SEQ ID NO: 3140039 - RNA, 19 nt, Artificial Sequence
  Description of Artificial Sequence: Synthetic oligonucleotide
uuuaugggugcaguguaac

SEQ ID NO: 3140040 - RNA, 19 nt, Artificial Sequence
  Description of Artificial Sequence: Synthetic oligonucleotide
cuccacacgaggcacacug

SEQ ID NO: 3140041 - RNA, 19 nt, Artificial Sequence
  Description of Artificial Sequence: Synthetic oligonucleotide
acacgaggcacacuggagu

SEQ ID NO: 3140042 - RNA, 19 nt, Artificial Sequence
  Description of Artificial Sequence: Synthetic oligonucleotide
guaggucaagaauauccac

SEQ ID NO: 3140043 - RNA, 19 nt, Artificial Sequence
  Description of Artificial Sequence: Synthetic oligonucleotide
uccgacuccacacgaggca

SEQ ID NO: 3140044 - RNA, 19 nt, Artificial Sequence
  Description of Artificial Sequence: Synthetic oligonucleotide
ucggucguaggucaagaau

SEQ ID NO: 3140045 - RNA, 19 nt, Artificial Sequence
  Description of Artificial Sequence: Synthetic oligonucleotide
uuaugggugcaguguaacu

SEQ ID NO: 3140046 - RNA, 19 nt, Artificial Sequence
  Description of Artificial Sequence: Synthetic oligonucleotide
uaugggugcaguguaacuu

SEQ ID NO: 3140047 - RNA, 19 nt, Artificial Sequence
  Description of Artificial Sequence: Synthetic oligonucleotide
auugcagccacuccccaau

SEQ ID NO: 3140048 - RNA, 19 nt, Artificial Sequence
  Description of Artificial Sequence: Synthetic oligonucleotide
aauugcagccacuccccaa

SEQ ID NO: 3140049 - RNA, 19 nt, Artificial Sequence
  Description of Artificial Sequence: Synthetic oligonucleotide
acuuuauuagauggagaca

SEQ ID NO: 3140050 - RNA, 19 nt, Artificial Sequence
  Description of Artificial Sequence: Synthetic oligonucleotide
cuacauucacuccgacucc

SEQ ID NO: 3140051 - RNA, 19 nt, Artificial Sequence
  Description of Artificial Sequence: Synthetic oligonucleotide
ccuaggaccccauccaugg

SEQ ID NO: 3140052 - RNA, 19 nt, Artificial Sequence
  Description of Artificial Sequence: Synthetic oligonucleotide
uccacacgaggcacacugg

SEQ ID NO: 3140053 - RNA, 19 nt, Artificial Sequence
  Description of Artificial Sequence: Synthetic oligonucleotide
uccccuaggaccccaucca

SEQ ID NO: 3140054 - RNA, 19 nt, Artificial Sequence
  Description of Artificial Sequence: Synthetic oligonucleotide
agcuacauucacuccgacu

SEQ ID NO: 3140055 - RNA, 19 nt, Artificial Sequence
  Description of Artificial Sequence: Synthetic oligonucleotide
gccggaaucgagcagaauc

SEQ ID NO: 3140056 - RNA, 19 nt, Artificial Sequence
  Description of Artificial Sequence: Synthetic oligonucleotide
cuccccuaggaccccaucc

SEQ ID NO: 3140057 - RNA, 19 nt, Artificial Sequence
  Description of Artificial Sequence: Synthetic oligonucleotide
gauggagacaccagcuaca

SEQ ID NO: 3140058 - RNA, 19 nt, Artificial Sequence
  Description of Artificial Sequence: Synthetic oligonucleotide
ucacuccgacuccacacga

SEQ ID NO: 3140059 - RNA, 19 nt, Artificial Sequence
  Description of Artificial Sequence: Synthetic oligonucleotide
ggucaagaauauccacugg

SEQ ID NO: 3140060 - RNA, 19 nt, Artificial Sequence
  Description of Artificial Sequence: Synthetic oligonucleotide
acagccggaaucgagcaga

SEQ ID NO: 3140061 - RNA, 19 nt, Artificial Sequence
  Description of Artificial Sequence: Synthetic oligonucleotide
agccacuccccaauaacuc

SEQ ID NO: 3140062 - RNA, 19 nt, Artificial Sequence
  Description of Artificial Sequence: Synthetic oligonucleotide
cacacgaggcacacuggag

SEQ ID NO: 3140063 - RNA, 19 nt, Artificial Sequence
  Description of Artificial Sequence: Synthetic oligonucleotide
aacucggucguaggucaag

SEQ ID NO: 3140064 - RNA, 19 nt, Artificial Sequence
  Description of Artificial Sequence: Synthetic oligonucleotide
cuccgacuccacacgaggc

SEQ ID NO: 3140065 - RNA, 19 nt, Artificial Sequence
  Description of Artificial Sequence: Synthetic oligonucleotide
acuccccaauaacucgguc

SEQ ID NO: 3140066 - RNA, 19 nt, Artificial Sequence
  Description of Artificial Sequence: Synthetic oligonucleotide
gccacuccccaauaacucg

SEQ ID NO: 3140067 - RNA, 19 nt, Artificial Sequence
  Description of Artificial Sequence: Synthetic oligonucleotide
caguguaacuuuauuagau

SEQ ID NO: 3140068 - RNA, 19 nt, Artificial Sequence
  Description of Artificial Sequence: Synthetic oligonucleotide
gacagccggaaucgagcag

SEQ ID NO: 3140069 - RNA, 19 nt, Artificial Sequence
  Description of Artificial Sequence: Synthetic oligonucleotide
ccaauaacucggucguagg

SEQ ID NO: 3140070 - RNA, 19 nt, Artificial Sequence
  Description of Artificial Sequence: Synthetic oligonucleotide
cacgaggcacacuggaguc

SEQ ID NO: 3140071 - RNA, 19 nt, Artificial Sequence
  Description of Artificial Sequence: Synthetic oligonucleotide
gcaguguaacuuuauuaga

SEQ ID NO: 3140072 - RNA, 19 nt, Artificial Sequence
  Description of Artificial Sequence: Synthetic oligonucleotide
ccacuccccaauaacucgg

SEQ ID NO: 3140073 - RNA, 19 nt, Artificial Sequence
  Description of Artificial Sequence: Synthetic oligonucleotide
cacuccgacuccacacgag

SEQ ID NO: 3140074 - RNA, 19 nt, Artificial Sequence
  Description of Artificial Sequence: Synthetic oligonucleotide
ccauggacagccggaaucg

SEQ ID NO: 3140075 - RNA, 19 nt, Artificial Sequence
  Description of Artificial Sequence: Synthetic oligonucleotide
cccaauaacucggucguag

SEQ ID NO: 3140076 - RNA, 19 nt, Artificial Sequence
  Description of Artificial Sequence: Synthetic oligonucleotide
cauucacuccgacuccaca

SEQ ID NO: 3140077 - RNA, 19 nt, Artificial Sequence
  Description of Artificial Sequence: Synthetic oligonucleotide
gacuccacacgaggcacac

SEQ ID NO: 3140078 - RNA, 19 nt, Artificial Sequence
  Description of Artificial Sequence: Synthetic oligonucleotide
auggagacaccagcuacau

SEQ ID NO: 3140079 - RNA, 19 nt, Artificial Sequence
  Description of Artificial Sequence: Synthetic oligonucleotide
gcagccacuccccaauaac

SEQ ID NO: 3140080 - RNA, 19 nt, Artificial Sequence
  Description of Artificial Sequence: Synthetic oligonucleotide
uaacucggucguaggucaa

SEQ ID NO: 3140081 - RNA, 19 nt, Artificial Sequence
  Description of Artificial Sequence: Synthetic oligonucleotide
caauaacucggucguaggu

SEQ ID NO: 3140082 - RNA, 19 nt, Artificial Sequence
  Description of Artificial Sequence: Synthetic oligonucleotide
caagaauauccacuggguu

SEQ ID NO: 3140083 - RNA, 19 nt, Artificial Sequence
  Description of Artificial Sequence: Synthetic oligonucleotide
gaccccauccauggacagc

SEQ ID NO: 3140084 - RNA, 19 nt, Artificial Sequence
  Description of Artificial Sequence: Synthetic oligonucleotide
acucggucguaggucaaga

SEQ ID NO: 3140085 - RNA, 19 nt, Artificial Sequence
  Description of Artificial Sequence: Synthetic oligonucleotide
aggaccccauccauggaca

SEQ ID NO: 3140086 - RNA, 19 nt, Artificial Sequence
  Description of Artificial Sequence: Synthetic oligonucleotide
auccauggacagccggaau

SEQ ID NO: 3140087 - RNA, 19 nt, Artificial Sequence
  Description of Artificial Sequence: Synthetic oligonucleotide
cguaggucaagaauaucca

SEQ ID NO: 3140088 - RNA, 19 nt, Artificial Sequence
  Description of Artificial Sequence: Synthetic oligonucleotide
ggacagccggaaucgagca

SEQ ID NO: 3140089 - RNA, 19 nt, Artificial Sequence
  Description of Artificial Sequence: Synthetic oligonucleotide
cccauccauggacagccgg

SEQ ID NO: 3140090 - RNA, 19 nt, Artificial Sequence
  Description of Artificial Sequence: Synthetic oligonucleotide
ggaccccauccauggacag

SEQ ID NO: 3140091 - RNA, 19 nt, Artificial Sequence
  Description of Artificial Sequence: Synthetic oligonucleotide
acgaggcacacuggagucu

SEQ ID NO: 3140092 - RNA, 19 nt, Artificial Sequence
  Description of Artificial Sequence: Synthetic oligonucleotide
gucguaggucaagaauauc

SEQ ID NO: 3140093 - RNA, 19 nt, Artificial Sequence
  Description of Artificial Sequence: Synthetic oligonucleotide
cagcuacauucacuccgac

SEQ ID NO: 3140094 - RNA, 19 nt, Artificial Sequence
  Description of Artificial Sequence: Synthetic oligonucleotide
cauccauggacagccggaa

SEQ ID NO: 3140095 - RNA, 19 nt, Artificial Sequence
  Description of Artificial Sequence: Synthetic oligonucleotide
cucggucguaggucaagaa

SEQ ID NO: 3140096 - RNA, 19 nt, Artificial Sequence
  Description of Artificial Sequence: Synthetic oligonucleotide
cccuaggaccccauccaug

SEQ ID NO: 3140097 - RNA, 19 nt, Artificial Sequence
  Description of Artificial Sequence: Synthetic oligonucleotide
cuaggaccccauccaugga

SEQ ID NO: 3140098 - RNA, 19 nt, Artificial Sequence
  Description of Artificial Sequence: Synthetic oligonucleotide
cggucguaggucaagaaua

SEQ ID NO: 3140099 - RNA, 19 nt, Artificial Sequence
  Description of Artificial Sequence: Synthetic oligonucleotide
ugcuccccuaggaccccau

SEQ ID NO: 3140100 - RNA, 19 nt, Artificial Sequence
  Description of Artificial Sequence: Synthetic oligonucleotide
cauggacagccggaaucga

SEQ ID NO: 3140101 - RNA, 19 nt, Artificial Sequence
  Description of Artificial Sequence: Synthetic oligonucleotide
ccacacgaggcacacugga

SEQ ID NO: 3140102 - RNA, 19 nt, Artificial Sequence
  Description of Artificial Sequence: Synthetic oligonucleotide
ccgacuccacacgaggcac

SEQ ID NO: 3140103 - RNA, 19 nt, Artificial Sequence
  Description of Artificial Sequence: Synthetic oligonucleotide
acuccacacgaggcacacu

SEQ ID NO: 3140104 - RNA, 19 nt, Artificial Sequence
  Description of Artificial Sequence: Synthetic oligonucleotide
ggucguaggucaagaauau

SEQ ID NO: 3140105 - RNA, 19 nt, Artificial Sequence
  Description of Artificial Sequence: Synthetic oligonucleotide
cagccggaaucgagcagaa

SEQ ID NO: 3140106 - RNA, 19 nt, Artificial Sequence
  Description of Artificial Sequence: Synthetic oligonucleotide
cacuccccaauaacucggu

SEQ ID NO: 3140107 - RNA, 19 nt, Artificial Sequence
  Description of Artificial Sequence: Synthetic oligonucleotide
ccccauccauggacagccg

SEQ ID NO: 3140108 - RNA, 19 nt, Artificial Sequence
  Description of Artificial Sequence: Synthetic oligonucleotide
agccggaaucgagcagaau

SEQ ID NO: 3140109 - RNA, 19 nt, Artificial Sequence
  Description of Artificial Sequence: Synthetic oligonucleotide
cgaggcacacuggagucuc

SEQ ID NO: 3140110 - RNA, 19 nt, Artificial Sequence
  Description of Artificial Sequence: Synthetic oligonucleotide
gcuccccuaggaccccauc

SEQ ID NO: 3140111 - RNA, 19 nt, Artificial Sequence
  Description of Artificial Sequence: Synthetic oligonucleotide
cgacuccacacgaggcaca

SEQ ID NO: 3140112 - RNA, 19 nt, Artificial Sequence
  Description of Artificial Sequence: Synthetic oligonucleotide
ccccuaggaccccauccau

SEQ ID NO: 3140113 - RNA, 19 nt, Artificial Sequence
  Description of Artificial Sequence: Synthetic oligonucleotide
ccccaauaacucggucgua

SEQ ID NO: 3140114 - RNA, 19 nt, Artificial Sequence
  Description of Artificial Sequence: Synthetic oligonucleotide
ugaaucagaagcaaggcug

SEQ ID NO: 3140115 - RNA, 19 nt, Artificial Sequence
  Description of Artificial Sequence: Synthetic oligonucleotide
uacugaaucagaagcaagg

SEQ ID NO: 3140116 - RNA, 19 nt, Artificial Sequence
  Description of Artificial Sequence: Synthetic oligonucleotide
agaaucuggacucucaaag

SEQ ID NO: 3140117 - RNA, 19 nt, Artificial Sequence
  Description of Artificial Sequence: Synthetic oligonucleotide
uuuucaaugaccucuggcu

SEQ ID NO: 3140118 - RNA, 19 nt, Artificial Sequence
  Description of Artificial Sequence: Synthetic oligonucleotide
cauaaaguuuucaaugacc

SEQ ID NO: 3140119 - RNA, 19 nt, Artificial Sequence
  Description of Artificial Sequence: Synthetic oligonucleotide
gucuuguucacacauaaag

SEQ ID NO: 3140120 - RNA, 19 nt, Artificial Sequence
  Description of Artificial Sequence: Synthetic oligonucleotide
uuaggucacaagaaucugg

SEQ ID NO: 3140121 - RNA, 19 nt, Artificial Sequence
  Description of Artificial Sequence: Synthetic oligonucleotide
acgaucagguccuuggccc

SEQ ID NO: 3140122 - RNA, 19 nt, Artificial Sequence
  Description of Artificial Sequence: Synthetic oligonucleotide
ucuuguucacacauaaagu

SEQ ID NO: 3140123 - RNA, 19 nt, Artificial Sequence
  Description of Artificial Sequence: Synthetic oligonucleotide
gugguacugaaucagaagc

SEQ ID NO: 3140124 - RNA, 19 nt, Artificial Sequence
  Description of Artificial Sequence: Synthetic oligonucleotide
gacacgaucagguccuugg

SEQ ID NO: 3140125 - RNA, 19 nt, Artificial Sequence
  Description of Artificial Sequence: Synthetic oligonucleotide
uuucaaugaccucuggcug

SEQ ID NO: 3140126 - RNA, 19 nt, Artificial Sequence
  Description of Artificial Sequence: Synthetic oligonucleotide
ugagcauccauucugccuc

SEQ ID NO: 3140127 - RNA, 19 nt, Artificial Sequence
  Description of Artificial Sequence: Synthetic oligonucleotide
auaaaguuuucaaugaccu

SEQ ID NO: 3140128 - RNA, 19 nt, Artificial Sequence
  Description of Artificial Sequence: Synthetic oligonucleotide
uuccaggaagcucugagca

SEQ ID NO: 3140129 - RNA, 19 nt, Artificial Sequence
  Description of Artificial Sequence: Synthetic oligonucleotide
aagcucugagcauccauuc

SEQ ID NO: 3140130 - RNA, 19 nt, Artificial Sequence
  Description of Artificial Sequence: Synthetic oligonucleotide
uggaggagggguuagguca

SEQ ID NO: 3140131 - RNA, 19 nt, Artificial Sequence
  Description of Artificial Sequence: Synthetic oligonucleotide
uguucacacauaaaguuuu

SEQ ID NO: 3140132 - RNA, 19 nt, Artificial Sequence
  Description of Artificial Sequence: Synthetic oligonucleotide
uaggucacaagaaucugga

SEQ ID NO: 3140133 - RNA, 19 nt, Artificial Sequence
  Description of Artificial Sequence: Synthetic oligonucleotide
gucacaagaaucuggacuc

SEQ ID NO: 3140134 - RNA, 19 nt, Artificial Sequence
  Description of Artificial Sequence: Synthetic oligonucleotide
ucacacauaaaguuuucaa

SEQ ID NO: 3140135 - RNA, 19 nt, Artificial Sequence
  Description of Artificial Sequence: Synthetic oligonucleotide
uucaaugaccucuggcugc

SEQ ID NO: 3140136 - RNA, 19 nt, Artificial Sequence
  Description of Artificial Sequence: Synthetic oligonucleotide
cauucugccucccugggcc

SEQ ID NO: 3140137 - RNA, 19 nt, Artificial Sequence
  Description of Artificial Sequence: Synthetic oligonucleotide
guuuucaaugaccucuggc

SEQ ID NO: 3140138 - RNA, 19 nt, Artificial Sequence
  Description of Artificial Sequence: Synthetic oligonucleotide
agaagcaaggcugacacga

SEQ ID NO: 3140139 - RNA, 19 nt, Artificial Sequence
  Description of Artificial Sequence: Synthetic oligonucleotide
aaggcugacacgaucaggu

SEQ ID NO: 3140140 - RNA, 19 nt, Artificial Sequence
  Description of Artificial Sequence: Synthetic oligonucleotide
ugguacugaaucagaagca

SEQ ID NO: 3140141 - RNA, 19 nt, Artificial Sequence
  Description of Artificial Sequence: Synthetic oligonucleotide
aguuggugcuggcagcagc

SEQ ID NO: 3140142 - RNA, 19 nt, Artificial Sequence
  Description of Artificial Sequence: Synthetic oligonucleotide
aagcaaggcugacacgauc

SEQ ID NO: 3140143 - RNA, 19 nt, Artificial Sequence
  Description of Artificial Sequence: Synthetic oligonucleotide
ucuggacucucaaaggaaa

SEQ ID NO: 3140144 - RNA, 19 nt, Artificial Sequence
  Description of Artificial Sequence: Synthetic oligonucleotide
uuguucacacauaaaguuu

SEQ ID NO: 3140145 - RNA, 19 nt, Artificial Sequence
  Description of Artificial Sequence: Synthetic oligonucleotide
gagggguuaggucacaaga

SEQ ID NO: 3140146 - RNA, 19 nt, Artificial Sequence
  Description of Artificial Sequence: Synthetic oligonucleotide
agguccuuggcccaggagu

SEQ ID NO: 3140147 - RNA, 19 nt, Artificial Sequence
  Description of Artificial Sequence: Synthetic oligonucleotide
auccauucugccucccugg

SEQ ID NO: 3140148 - RNA, 19 nt, Artificial Sequence
  Description of Artificial Sequence: Synthetic oligonucleotide
aagaaucuggacucucaaa

SEQ ID NO: 3140149 - RNA, 19 nt, Artificial Sequence
  Description of Artificial Sequence: Synthetic oligonucleotide
acacgaucagguccuuggc

SEQ ID NO: 3140150 - RNA, 19 nt, Artificial Sequence
  Description of Artificial Sequence: Synthetic oligonucleotide
uggacucucaaaggaaacc

SEQ ID NO: 3140151 - RNA, 19 nt, Artificial Sequence
  Description of Artificial Sequence: Synthetic oligonucleotide
gagucuuguucacacauaa

SEQ ID NO: 3140152 - RNA, 19 nt, Artificial Sequence
  Description of Artificial Sequence: Synthetic oligonucleotide
uccauucugccucccuggg

SEQ ID NO: 3140153 - RNA, 19 nt, Artificial Sequence
  Description of Artificial Sequence: Synthetic oligonucleotide
cuuccaggaagcucugagc

SEQ ID NO: 3140154 - RNA, 19 nt, Artificial Sequence
  Description of Artificial Sequence: Synthetic oligonucleotide
aguuuucaaugaccucugg

SEQ ID NO: 3140155 - RNA, 19 nt, Artificial Sequence
  Description of Artificial Sequence: Synthetic oligonucleotide
cucugagcauccauucugc

SEQ ID NO: 3140156 - RNA, 19 nt, Artificial Sequence
  Description of Artificial Sequence: Synthetic oligonucleotide
aggagucuuguucacacau

SEQ ID NO: 3140157 - RNA, 19 nt, Artificial Sequence
  Description of Artificial Sequence: Synthetic oligonucleotide
uucacacauaaaguuuuca

SEQ ID NO: 3140158 - RNA, 19 nt, Artificial Sequence
  Description of Artificial Sequence: Synthetic oligonucleotide
aggucacaagaaucuggac

SEQ ID NO: 3140159 - RNA, 19 nt, Artificial Sequence
  Description of Artificial Sequence: Synthetic oligonucleotide
ggugguacugaaucagaag

SEQ ID NO: 3140160 - RNA, 19 nt, Artificial Sequence
  Description of Artificial Sequence: Synthetic oligonucleotide
ucugagcauccauucugcc

SEQ ID NO: 3140161 - RNA, 19 nt, Artificial Sequence
  Description of Artificial Sequence: Synthetic oligonucleotide
cuuguucacacauaaaguu

SEQ ID NO: 3140162 - RNA, 19 nt, Artificial Sequence
  Description of Artificial Sequence: Synthetic oligonucleotide
uggcccaggagucuuguuc

SEQ ID NO: 3140163 - RNA, 19 nt, Artificial Sequence
  Description of Artificial Sequence: Synthetic oligonucleotide
gggaaguuggugcuggcag

SEQ ID NO: 3140164 - RNA, 19 nt, Artificial Sequence
  Description of Artificial Sequence: Synthetic oligonucleotide
cacgaucagguccuuggcc

SEQ ID NO: 3140165 - RNA, 19 nt, Artificial Sequence
  Description of Artificial Sequence: Synthetic oligonucleotide
gaaucagaagcaaggcuga

SEQ ID NO: 3140166 - RNA, 19 nt, Artificial Sequence
  Description of Artificial Sequence: Synthetic oligonucleotide
guacugaaucagaagcaag

SEQ ID NO: 3140167 - RNA, 19 nt, Artificial Sequence
  Description of Artificial Sequence: Synthetic oligonucleotide
ugaccucuggcugcugugg

SEQ ID NO: 3140168 - RNA, 19 nt, Artificial Sequence
  Description of Artificial Sequence: Synthetic oligonucleotide
ggcagcagcuuccaggaag

SEQ ID NO: 3140169 - RNA, 19 nt, Artificial Sequence
  Description of Artificial Sequence: Synthetic oligonucleotide
cuggacucucaaaggaaac

SEQ ID NO: 3140170 - RNA, 19 nt, Artificial Sequence
  Description of Artificial Sequence: Synthetic oligonucleotide
guuaggucacaagaaucug

SEQ ID NO: 3140171 - RNA, 19 nt, Artificial Sequence
  Description of Artificial Sequence: Synthetic oligonucleotide
cauccauucugccucccug

SEQ ID NO: 3140172 - RNA, 19 nt, Artificial Sequence
  Description of Artificial Sequence: Synthetic oligonucleotide
agcaaggcugacacgauca

SEQ ID NO: 3140173 - RNA, 19 nt, Artificial Sequence
  Description of Artificial Sequence: Synthetic oligonucleotide
ggucacaagaaucuggacu

SEQ ID NO: 3140174 - RNA, 19 nt, Artificial Sequence
  Description of Artificial Sequence: Synthetic oligonucleotide
ggcugacacgaucaggucc

SEQ ID NO: 3140175 - RNA, 19 nt, Artificial Sequence
  Description of Artificial Sequence: Synthetic oligonucleotide
uguggaggagggguuaggu

SEQ ID NO: 3140176 - RNA, 19 nt, Artificial Sequence
  Description of Artificial Sequence: Synthetic oligonucleotide
gcucugagcauccauucug

SEQ ID NO: 3140177 - RNA, 19 nt, Artificial Sequence
  Description of Artificial Sequence: Synthetic oligonucleotide
ucaaugaccucuggcugcu

SEQ ID NO: 3140178 - RNA, 19 nt, Artificial Sequence
  Description of Artificial Sequence: Synthetic oligonucleotide
caggaagcucugagcaucc

SEQ ID NO: 3140179 - RNA, 19 nt, Artificial Sequence
  Description of Artificial Sequence: Synthetic oligonucleotide
caaggcugacacgaucagg

SEQ ID NO: 3140180 - RNA, 19 nt, Artificial Sequence
  Description of Artificial Sequence: Synthetic oligonucleotide
gaaguuggugcuggcagca

SEQ ID NO: 3140181 - RNA, 19 nt, Artificial Sequence
  Description of Artificial Sequence: Synthetic oligonucleotide
cacacauaaaguuuucaau

SEQ ID NO: 3140182 - RNA, 19 nt, Artificial Sequence
  Description of Artificial Sequence: Synthetic oligonucleotide
aggcugacacgaucagguc

SEQ ID NO: 3140183 - RNA, 19 nt, Artificial Sequence
  Description of Artificial Sequence: Synthetic oligonucleotide
agcucugagcauccauucu

SEQ ID NO: 3140184 - RNA, 19 nt, Artificial Sequence
  Description of Artificial Sequence: Synthetic oligonucleotide
cuggcagcagcuuccagga

SEQ ID NO: 3140185 - RNA, 19 nt, Artificial Sequence
  Description of Artificial Sequence: Synthetic oligonucleotide
cagaagcaaggcugacacg

SEQ ID NO: 3140186 - RNA, 19 nt, Artificial Sequence
  Description of Artificial Sequence: Synthetic oligonucleotide
gacucucaaaggaaaccuc

SEQ ID NO: 3140187 - RNA, 19 nt, Artificial Sequence
  Description of Artificial Sequence: Synthetic oligonucleotide
ggaaguuggugcuggcagc

SEQ ID NO: 3140188 - RNA, 19 nt, Artificial Sequence
  Description of Artificial Sequence: Synthetic oligonucleotide
ccaggagucuuguucacac

SEQ ID NO: 3140189 - RNA, 19 nt, Artificial Sequence
  Description of Artificial Sequence: Synthetic oligonucleotide
uggugcuggcagcagcuuc

SEQ ID NO: 3140190 - RNA, 19 nt, Artificial Sequence
  Description of Artificial Sequence: Synthetic oligonucleotide
accucuggcugcuguggag

SEQ ID NO: 3140191 - RNA, 19 nt, Artificial Sequence
  Description of Artificial Sequence: Synthetic oligonucleotide
ggccaggugguacugaauc

SEQ ID NO: 3140192 - RNA, 19 nt, Artificial Sequence
  Description of Artificial Sequence: Synthetic oligonucleotide
uccaggaagcucugagcau

SEQ ID NO: 3140193 - RNA, 19 nt, Artificial Sequence
  Description of Artificial Sequence: Synthetic oligonucleotide
ucacaagaaucuggacucu

SEQ ID NO: 3140194 - RNA, 19 nt, Artificial Sequence
  Description of Artificial Sequence: Synthetic oligonucleotide
aaguuggugcuggcagcag

SEQ ID NO: 3140195 - RNA, 19 nt, Artificial Sequence
  Description of Artificial Sequence: Synthetic oligonucleotide
cugaaucagaagcaaggcu

SEQ ID NO: 3140196 - RNA, 19 nt, Artificial Sequence
  Description of Artificial Sequence: Synthetic oligonucleotide
gguuaggucacaagaaucu

SEQ ID NO: 3140197 - RNA, 19 nt, Artificial Sequence
  Description of Artificial Sequence: Synthetic oligonucleotide
ugggccaggugguacugaa

SEQ ID NO: 3140198 - RNA, 19 nt, Artificial Sequence
  Description of Artificial Sequence: Synthetic oligonucleotide
gaucagguccuuggcccag

SEQ ID NO: 3140199 - RNA, 19 nt, Artificial Sequence
  Description of Artificial Sequence: Synthetic oligonucleotide
agggguuaggucacaagaa

SEQ ID NO: 3140200 - RNA, 19 nt, Artificial Sequence
  Description of Artificial Sequence: Synthetic oligonucleotide
guggaggagggguuagguc

SEQ ID NO: 3140201 - RNA, 19 nt, Artificial Sequence
  Description of Artificial Sequence: Synthetic oligonucleotide
ggagggguuaggucacaag

SEQ ID NO: 3140202 - RNA, 19 nt, Artificial Sequence
  Description of Artificial Sequence: Synthetic oligonucleotide
guucacacauaaaguuuuc

SEQ ID NO: 3140203 - RNA, 19 nt, Artificial Sequence
  Description of Artificial Sequence: Synthetic oligonucleotide
cacaagaaucuggacucuc

SEQ ID NO: 3140204 - RNA, 19 nt, Artificial Sequence
  Description of Artificial Sequence: Synthetic oligonucleotide
ggugcuggcagcagcuucc

SEQ ID NO: 3140205 - RNA, 19 nt, Artificial Sequence
  Description of Artificial Sequence: Synthetic oligonucleotide
agcauccauucugccuccc

SEQ ID NO: 3140206 - RNA, 19 nt, Artificial Sequence
  Description of Artificial Sequence: Synthetic oligonucleotide
ggguuaggucacaagaauc

SEQ ID NO: 3140207 - RNA, 19 nt, Artificial Sequence
  Description of Artificial Sequence: Synthetic oligonucleotide
aggugguacugaaucagaa

SEQ ID NO: 3140208 - RNA, 19 nt, Artificial Sequence
  Description of Artificial Sequence: Synthetic oligonucleotide
ugacacgaucagguccuug

SEQ ID NO: 3140209 - RNA, 19 nt, Artificial Sequence
  Description of Artificial Sequence: Synthetic oligonucleotide
caggugguacugaaucaga

SEQ ID NO: 3140210 - RNA, 19 nt, Artificial Sequence
  Description of Artificial Sequence: Synthetic oligonucleotide
ccaggugguacugaaucag

SEQ ID NO: 3140211 - RNA, 19 nt, Artificial Sequence
  Description of Artificial Sequence: Synthetic oligonucleotide
cugagcauccauucugccu

SEQ ID NO: 3140212 - RNA, 19 nt, Artificial Sequence
  Description of Artificial Sequence: Synthetic oligonucleotide
ucugccucccugggccagg

SEQ ID NO: 3140213 - RNA, 19 nt, Artificial Sequence
  Description of Artificial Sequence: Synthetic oligonucleotide
ggcccaggagucuuguuca

SEQ ID NO: 3140214 - RNA, 19 nt, Artificial Sequence
  Description of Artificial Sequence: Synthetic oligonucleotide
gcaaggcugacacgaucag

SEQ ID NO: 3140215 - RNA, 19 nt, Artificial Sequence
  Description of Artificial Sequence: Synthetic oligonucleotide
gaagcucugagcauccauu

SEQ ID NO: 3140216 - RNA, 19 nt, Artificial Sequence
  Description of Artificial Sequence: Synthetic oligonucleotide
auucugccucccugggcca

SEQ ID NO: 3140217 - RNA, 19 nt, Artificial Sequence
  Description of Artificial Sequence: Synthetic oligonucleotide
gcagcagcuuccaggaagc

SEQ ID NO: 3140218 - RNA, 19 nt, Artificial Sequence
  Description of Artificial Sequence: Synthetic oligonucleotide
gcagcuuccaggaagcucu

SEQ ID NO: 3140219 - RNA, 19 nt, Artificial Sequence
  Description of Artificial Sequence: Synthetic oligonucleotide
cuguggaggagggguuagg

SEQ ID NO: 3140220 - RNA, 19 nt, Artificial Sequence
  Description of Artificial Sequence: Synthetic oligonucleotide
ccaggaagcucugagcauc

SEQ ID NO: 3140221 - RNA, 19 nt, Artificial Sequence
  Description of Artificial Sequence: Synthetic oligonucleotide
ggacucucaaaggaaaccu

SEQ ID NO: 3140222 - RNA, 19 nt, Artificial Sequence
  Description of Artificial Sequence: Synthetic oligonucleotide
cagguccuuggcccaggag

SEQ ID NO: 3140223 - RNA, 19 nt, Artificial Sequence
  Description of Artificial Sequence: Synthetic oligonucleotide
caggagucuuguucacaca

SEQ ID NO: 3140224 - RNA, 19 nt, Artificial Sequence
  Description of Artificial Sequence: Synthetic oligonucleotide
gguccuuggcccaggaguc

SEQ ID NO: 3140225 - RNA, 19 nt, Artificial Sequence
  Description of Artificial Sequence: Synthetic oligonucleotide
guuggugcuggcagcagcu

SEQ ID NO: 3140226 - RNA, 19 nt, Artificial Sequence
  Description of Artificial Sequence: Synthetic oligonucleotide
gccaggugguacugaauca

SEQ ID NO: 3140227 - RNA, 19 nt, Artificial Sequence
  Description of Artificial Sequence: Synthetic oligonucleotide
ucccugggccaggugguac

SEQ ID NO: 3140228 - RNA, 19 nt, Artificial Sequence
  Description of Artificial Sequence: Synthetic oligonucleotide
cucuggcugcuguggagga

SEQ ID NO: 3140229 - RNA, 19 nt, Artificial Sequence
  Description of Artificial Sequence: Synthetic oligonucleotide
uccuuggcccaggagucuu

SEQ ID NO: 3140230 - RNA, 19 nt, Artificial Sequence
  Description of Artificial Sequence: Synthetic oligonucleotide
gggguuaggucacaagaau

SEQ ID NO: 3140231 - RNA, 19 nt, Artificial Sequence
  Description of Artificial Sequence: Synthetic oligonucleotide
cagcuuccaggaagcucug

SEQ ID NO: 3140232 - RNA, 19 nt, Artificial Sequence
  Description of Artificial Sequence: Synthetic oligonucleotide
ggaggagggguuaggucac

SEQ ID NO: 3140233 - RNA, 19 nt, Artificial Sequence
  Description of Artificial Sequence: Synthetic oligonucleotide
ccauucugccucccugggc

SEQ ID NO: 3140234 - RNA, 19 nt, Artificial Sequence
  Description of Artificial Sequence: Synthetic oligonucleotide
gcugacacgaucagguccu

SEQ ID NO: 3140235 - RNA, 19 nt, Artificial Sequence
  Description of Artificial Sequence: Synthetic oligonucleotide
gcugcuguggaggaggggu

SEQ ID NO: 3140236 - RNA, 19 nt, Artificial Sequence
  Description of Artificial Sequence: Synthetic oligonucleotide
aggagggguuaggucacaa

SEQ ID NO: 3140237 - RNA, 19 nt, Artificial Sequence
  Description of Artificial Sequence: Synthetic oligonucleotide
uuggcccaggagucuuguu

SEQ ID NO: 3140238 - RNA, 19 nt, Artificial Sequence
  Description of Artificial Sequence: Synthetic oligonucleotide
uuggugcuggcagcagcuu

SEQ ID NO: 3140239 - RNA, 19 nt, Artificial Sequence
  Description of Artificial Sequence: Synthetic oligonucleotide
ggaagcucugagcauccau

SEQ ID NO: 3140240 - RNA, 19 nt, Artificial Sequence
  Description of Artificial Sequence: Synthetic oligonucleotide
ugccucccugggccaggug

SEQ ID NO: 3140241 - RNA, 19 nt, Artificial Sequence
  Description of Artificial Sequence: Synthetic oligonucleotide
ggggaaguuggugcuggca

SEQ ID NO: 3140242 - RNA, 19 nt, Artificial Sequence
  Description of Artificial Sequence: Synthetic oligonucleotide
gaggagggguuaggucaca

SEQ ID NO: 3140243 - RNA, 19 nt, Artificial Sequence
  Description of Artificial Sequence: Synthetic oligonucleotide
ggagucuuguucacacaua

SEQ ID NO: 3140244 - RNA, 19 nt, Artificial Sequence
  Description of Artificial Sequence: Synthetic oligonucleotide
caaugaccucuggcugcug

SEQ ID NO: 3140245 - RNA, 19 nt, Artificial Sequence
  Description of Artificial Sequence: Synthetic oligonucleotide
ccuuggcccaggagucuug

SEQ ID NO: 3140246 - RNA, 19 nt, Artificial Sequence
  Description of Artificial Sequence: Synthetic oligonucleotide
gcccaggagucuuguucac

SEQ ID NO: 3140247 - RNA, 19 nt, Artificial Sequence
  Description of Artificial Sequence: Synthetic oligonucleotide
gugcuggcagcagcuucca

SEQ ID NO: 3140248 - RNA, 19 nt, Artificial Sequence
  Description of Artificial Sequence: Synthetic oligonucleotide
cuuggcccaggagucuugu

SEQ ID NO: 3140249 - RNA, 19 nt, Artificial Sequence
  Description of Artificial Sequence: Synthetic oligonucleotide
gcauccauucugccucccu

SEQ ID NO: 3140250 - RNA, 19 nt, Artificial Sequence
  Description of Artificial Sequence: Synthetic oligonucleotide
cgaucagguccuuggccca

SEQ ID NO: 3140251 - RNA, 19 nt, Artificial Sequence
  Description of Artificial Sequence: Synthetic oligonucleotide
cugcuguggaggagggguu

SEQ ID NO: 3140252 - RNA, 19 nt, Artificial Sequence
  Description of Artificial Sequence: Synthetic oligonucleotide
cccaggagucuuguucaca

SEQ ID NO: 3140253 - RNA, 19 nt, Artificial Sequence
  Description of Artificial Sequence: Synthetic oligonucleotide
cucccugggccagguggua

SEQ ID NO: 3140254 - RNA, 19 nt, Artificial Sequence
  Description of Artificial Sequence: Synthetic oligonucleotide
cccugggccaggugguacu

SEQ ID NO: 3140255 - RNA, 19 nt, Artificial Sequence
  Description of Artificial Sequence: Synthetic oligonucleotide
cugccucccugggccaggu

SEQ ID NO: 3140256 - RNA, 19 nt, Artificial Sequence
  Description of Artificial Sequence: Synthetic oligonucleotide
cugacacgaucagguccuu

SEQ ID NO: 3140257 - RNA, 19 nt, Artificial Sequence
  Description of Artificial Sequence: Synthetic oligonucleotide
acgagcauggcgcagagcg

SEQ ID NO: 3140258 - RNA, 19 nt, Artificial Sequence
  Description of Artificial Sequence: Synthetic oligonucleotide
aaggacgcgaaguccuugc

SEQ ID NO: 3140259 - RNA, 19 nt, Artificial Sequence
  Description of Artificial Sequence: Synthetic oligonucleotide
uaggccaagcgcaccaugg

SEQ ID NO: 3140260 - RNA, 19 nt, Artificial Sequence
  Description of Artificial Sequence: Synthetic oligonucleotide
agcagcggcgcguaguagc

SEQ ID NO: 3140261 - RNA, 19 nt, Artificial Sequence
  Description of Artificial Sequence: Synthetic oligonucleotide
guagcgguggcucucgcgg

SEQ ID NO: 3140262 - RNA, 19 nt, Artificial Sequence
  Description of Artificial Sequence: Synthetic oligonucleotide
ugcaaggacgcgaaguccu

SEQ ID NO: 3140263 - RNA, 19 nt, Artificial Sequence
  Description of Artificial Sequence: Synthetic oligonucleotide
ucugcaaggacgcgaaguc

SEQ ID NO: 3140264 - RNA, 19 nt, Artificial Sequence
  Description of Artificial Sequence: Synthetic oligonucleotide
gagcauggcgcagagcgcg

SEQ ID NO: 3140265 - RNA, 19 nt, Artificial Sequence
  Description of Artificial Sequence: Synthetic oligonucleotide
gacgcgaaguccuugccca

SEQ ID NO: 3140266 - RNA, 19 nt, Artificial Sequence
  Description of Artificial Sequence: Synthetic oligonucleotide
gaaguccuugcccagcgca

SEQ ID NO: 3140267 - RNA, 19 nt, Artificial Sequence
  Description of Artificial Sequence: Synthetic oligonucleotide
aggccaagcgcaccauggc

SEQ ID NO: 3140268 - RNA, 19 nt, Artificial Sequence
  Description of Artificial Sequence: Synthetic oligonucleotide
aggacgcgaaguccuugcc

SEQ ID NO: 3140269 - RNA, 19 nt, Artificial Sequence
  Description of Artificial Sequence: Synthetic oligonucleotide
acggcgaaggccuccuccg

SEQ ID NO: 3140270 - RNA, 19 nt, Artificial Sequence
  Description of Artificial Sequence: Synthetic oligonucleotide
cauggcguccagcagcggc

SEQ ID NO: 3140271 - RNA, 19 nt, Artificial Sequence
  Description of Artificial Sequence: Synthetic oligonucleotide
cagcgcauaggccaagcgc

SEQ ID NO: 3140272 - RNA, 19 nt, Artificial Sequence
  Description of Artificial Sequence: Synthetic oligonucleotide
ucgcccacggcgaaggccu

SEQ ID NO: 3140273 - RNA, 19 nt, Artificial Sequence
  Description of Artificial Sequence: Synthetic oligonucleotide
cagagcgcgggcacggugg

SEQ ID NO: 3140274 - RNA, 19 nt, Artificial Sequence
  Description of Artificial Sequence: Synthetic oligonucleotide
agcgcauaggccaagcgca

SEQ ID NO: 3140275 - RNA, 19 nt, Artificial Sequence
  Description of Artificial Sequence: Synthetic oligonucleotide
ugcucugcaaggacgcgaa

SEQ ID NO: 3140276 - RNA, 19 nt, Artificial Sequence
  Description of Artificial Sequence: Synthetic oligonucleotide
cuugcccagcgcauaggcc

SEQ ID NO: 3140277 - RNA, 19 nt, Artificial Sequence
  Description of Artificial Sequence: Synthetic oligonucleotide
agcgguggcucucgcgggc

SEQ ID NO: 3140278 - RNA, 19 nt, Artificial Sequence
  Description of Artificial Sequence: Synthetic oligonucleotide
cuccaggucgcgcaggcac

SEQ ID NO: 3140279 - RNA, 19 nt, Artificial Sequence
  Description of Artificial Sequence: Synthetic oligonucleotide
ucgcgcaggcacacgagca

SEQ ID NO: 3140280 - RNA, 19 nt, Artificial Sequence
  Description of Artificial Sequence: Synthetic oligonucleotide
auaggccaagcgcaccaug

SEQ ID NO: 3140281 - RNA, 19 nt, Artificial Sequence
  Description of Artificial Sequence: Synthetic oligonucleotide
agagcgcgggcacgguggc

SEQ ID NO: 3140282 - RNA, 19 nt, Artificial Sequence
  Description of Artificial Sequence: Synthetic oligonucleotide
guaguagcgguggcucucg

SEQ ID NO: 3140283 - RNA, 19 nt, Artificial Sequence
  Description of Artificial Sequence: Synthetic oligonucleotide
agcgcgggcacgguggcac

SEQ ID NO: 3140284 - RNA, 19 nt, Artificial Sequence
  Description of Artificial Sequence: Synthetic oligonucleotide
accauggcguccagcagcg

SEQ ID NO: 3140285 - RNA, 19 nt, Artificial Sequence
  Description of Artificial Sequence: Synthetic oligonucleotide
cacggcgaaggccuccucc

SEQ ID NO: 3140286 - RNA, 19 nt, Artificial Sequence
  Description of Artificial Sequence: Synthetic oligonucleotide
auggcguccagcagcggcg

SEQ ID NO: 3140287 - RNA, 19 nt, Artificial Sequence
  Description of Artificial Sequence: Synthetic oligonucleotide
ggccaagcgcaccauggcg

SEQ ID NO: 3140288 - RNA, 19 nt, Artificial Sequence
  Description of Artificial Sequence: Synthetic oligonucleotide
uagcgguggcucucgcggg

SEQ ID NO: 3140289 - RNA, 19 nt, Artificial Sequence
  Description of Artificial Sequence: Synthetic oligonucleotide
agccugcucugcaaggacg

SEQ ID NO: 3140290 - RNA, 19 nt, Artificial Sequence
  Description of Artificial Sequence: Synthetic oligonucleotide
aagcgcaccauggcgucca

SEQ ID NO: 3140291 - RNA, 19 nt, Artificial Sequence
  Description of Artificial Sequence: Synthetic oligonucleotide
acacgagcauggcgcagag

SEQ ID NO: 3140292 - RNA, 19 nt, Artificial Sequence
  Description of Artificial Sequence: Synthetic oligonucleotide
cugcaaggacgcgaagucc

SEQ ID NO: 3140293 - RNA, 19 nt, Artificial Sequence
  Description of Artificial Sequence: Synthetic oligonucleotide
aggucgcgcaggcacacga

SEQ ID NO: 3140294 - RNA, 19 nt, Artificial Sequence
  Description of Artificial Sequence: Synthetic oligonucleotide
gucgcgcaggcacacgagc

SEQ ID NO: 3140295 - RNA, 19 nt, Artificial Sequence
  Description of Artificial Sequence: Synthetic oligonucleotide
guccuugcccagcgcauag

SEQ ID NO: 3140296 - RNA, 19 nt, Artificial Sequence
  Description of Artificial Sequence: Synthetic oligonucleotide
agcggcgcguaguagcggu

SEQ ID NO: 3140297 - RNA, 19 nt, Artificial Sequence
  Description of Artificial Sequence: Synthetic oligonucleotide
cuccggccgcuccaggucg

SEQ ID NO: 3140298 - RNA, 19 nt, Artificial Sequence
  Description of Artificial Sequence: Synthetic oligonucleotide
gcgaaguccuugcccagcg

SEQ ID NO: 3140299 - RNA, 19 nt, Artificial Sequence
  Description of Artificial Sequence: Synthetic oligonucleotide
gaaggccuccuccggccgc

SEQ ID NO: 3140300 - RNA, 19 nt, Artificial Sequence
  Description of Artificial Sequence: Synthetic oligonucleotide
ggacgcgaaguccuugccc

SEQ ID NO: 3140301 - RNA, 19 nt, Artificial Sequence
  Description of Artificial Sequence: Synthetic oligonucleotide
uccuugcccagcgcauagg

SEQ ID NO: 3140302 - RNA, 19 nt, Artificial Sequence
  Description of Artificial Sequence: Synthetic oligonucleotide
ugcagcgcgcgcucgccca

SEQ ID NO: 3140303 - RNA, 19 nt, Artificial Sequence
  Description of Artificial Sequence: Synthetic oligonucleotide
uccuccggccgcuccaggu

SEQ ID NO: 3140304 - RNA, 19 nt, Artificial Sequence
  Description of Artificial Sequence: Synthetic oligonucleotide
uugcagcgcgcgcucgccc

SEQ ID NO: 3140305 - RNA, 19 nt, Artificial Sequence
  Description of Artificial Sequence: Synthetic oligonucleotide
cauggcgcagagcgcgggc

SEQ ID NO: 3140306 - RNA, 19 nt, Artificial Sequence
  Description of Artificial Sequence: Synthetic oligonucleotide
uaguagcgguggcucucgc

SEQ ID NO: 3140307 - RNA, 19 nt, Artificial Sequence
  Description of Artificial Sequence: Synthetic oligonucleotide
acgcgaaguccuugcccag

SEQ ID NO: 3140308 - RNA, 19 nt, Artificial Sequence
  Description of Artificial Sequence: Synthetic oligonucleotide
ccuugcccagcgcauaggc

SEQ ID NO: 3140309 - RNA, 19 nt, Artificial Sequence
  Description of Artificial Sequence: Synthetic oligonucleotide
cucgcccacggcgaaggcc

SEQ ID NO: 3140310 - RNA, 19 nt, Artificial Sequence
  Description of Artificial Sequence: Synthetic oligonucleotide
caaggacgcgaaguccuug

SEQ ID NO: 3140311 - RNA, 19 nt, Artificial Sequence
  Description of Artificial Sequence: Synthetic oligonucleotide
ugcccagcgcauaggccaa

SEQ ID NO: 3140312 - RNA, 19 nt, Artificial Sequence
  Description of Artificial Sequence: Synthetic oligonucleotide
gcauaggccaagcgcacca

SEQ ID NO: 3140313 - RNA, 19 nt, Artificial Sequence
  Description of Artificial Sequence: Synthetic oligonucleotide
uggcgcagagcgcgggcac

SEQ ID NO: 3140314 - RNA, 19 nt, Artificial Sequence
  Description of Artificial Sequence: Synthetic oligonucleotide
ucucgcgggcccgcaggcg

SEQ ID NO: 3140315 - RNA, 19 nt, Artificial Sequence
  Description of Artificial Sequence: Synthetic oligonucleotide
cucucgcgggcccgcaggc

SEQ ID NO: 3140316 - RNA, 19 nt, Artificial Sequence
  Description of Artificial Sequence: Synthetic oligonucleotide
ggcgaaggccuccuccggc

SEQ ID NO: 3140317 - RNA, 19 nt, Artificial Sequence
  Description of Artificial Sequence: Synthetic oligonucleotide
agcgcgcgcucgcccacgg

SEQ ID NO: 3140318 - RNA, 19 nt, Artificial Sequence
  Description of Artificial Sequence: Synthetic oligonucleotide
gcagcggcgcguaguagcg

SEQ ID NO: 3140319 - RNA, 19 nt, Artificial Sequence
  Description of Artificial Sequence: Synthetic oligonucleotide
gcgaaggccuccuccggcc

SEQ ID NO: 3140320 - RNA, 19 nt, Artificial Sequence
  Description of Artificial Sequence: Synthetic oligonucleotide
cacacgagcauggcgcaga

SEQ ID NO: 3140321 - RNA, 19 nt, Artificial Sequence
  Description of Artificial Sequence: Synthetic oligonucleotide
aggcguugcagcgcgcgcu

SEQ ID NO: 3140322 - RNA, 19 nt, Artificial Sequence
  Description of Artificial Sequence: Synthetic oligonucleotide
caggcguugcagcgcgcgc

SEQ ID NO: 3140323 - RNA, 19 nt, Artificial Sequence
  Description of Artificial Sequence: Synthetic oligonucleotide
gcucucgcgggcccgcagg

SEQ ID NO: 3140324 - RNA, 19 nt, Artificial Sequence
  Description of Artificial Sequence: Synthetic oligonucleotide
caagcgcaccauggcgucc

SEQ ID NO: 3140325 - RNA, 19 nt, Artificial Sequence
  Description of Artificial Sequence: Synthetic oligonucleotide
agcauggcgcagagcgcgg

SEQ ID NO: 3140326 - RNA, 19 nt, Artificial Sequence
  Description of Artificial Sequence: Synthetic oligonucleotide
ccagcgcauaggccaagcg

SEQ ID NO: 3140327 - RNA, 19 nt, Artificial Sequence
  Description of Artificial Sequence: Synthetic oligonucleotide
gcaggcguugcagcgcgcg

SEQ ID NO: 3140328 - RNA, 19 nt, Artificial Sequence
  Description of Artificial Sequence: Synthetic oligonucleotide
cucugcaaggacgcgaagu

SEQ ID NO: 3140329 - RNA, 19 nt, Artificial Sequence
  Description of Artificial Sequence: Synthetic oligonucleotide
uccggccgcuccaggucgc

SEQ ID NO: 3140330 - RNA, 19 nt, Artificial Sequence
  Description of Artificial Sequence: Synthetic oligonucleotide
auggcgcagagcgcgggca

SEQ ID NO: 3140331 - RNA, 19 nt, Artificial Sequence
  Description of Artificial Sequence: Synthetic oligonucleotide
gcccgcaggcguugcagcg

SEQ ID NO: 3140332 - RNA, 19 nt, Artificial Sequence
  Description of Artificial Sequence: Synthetic oligonucleotide
uggcguccagcagcggcgc

SEQ ID NO: 3140333 - RNA, 19 nt, Artificial Sequence
  Description of Artificial Sequence: Synthetic oligonucleotide
cugcucugcaaggacgcga

SEQ ID NO: 3140334 - RNA, 19 nt, Artificial Sequence
  Description of Artificial Sequence: Synthetic oligonucleotide
aguccuugcccagcgcaua

SEQ ID NO: 3140335 - RNA, 19 nt, Artificial Sequence
  Description of Artificial Sequence: Synthetic oligonucleotide
ggcacacgagcauggcgca

SEQ ID NO: 3140336 - RNA, 19 nt, Artificial Sequence
  Description of Artificial Sequence: Synthetic oligonucleotide
agcgcaccauggcguccag

SEQ ID NO: 3140337 - RNA, 19 nt, Artificial Sequence
  Description of Artificial Sequence: Synthetic oligonucleotide
gcagagcgcgggcacggug

SEQ ID NO: 3140338 - RNA, 19 nt, Artificial Sequence
  Description of Artificial Sequence: Synthetic oligonucleotide
ccaagcgcaccauggcguc

SEQ ID NO: 3140339 - RNA, 19 nt, Artificial Sequence
  Description of Artificial Sequence: Synthetic oligonucleotide
ggcgcguaguagcgguggc

SEQ ID NO: 3140340 - RNA, 19 nt, Artificial Sequence
  Description of Artificial Sequence: Synthetic oligonucleotide
cacgagcauggcgcagagc

SEQ ID NO: 3140341 - RNA, 19 nt, Artificial Sequence
  Description of Artificial Sequence: Synthetic oligonucleotide
ccgcaggcguugcagcgcg

SEQ ID NO: 3140342 - RNA, 19 nt, Artificial Sequence
  Description of Artificial Sequence: Synthetic oligonucleotide
cuccuccggccgcuccagg

SEQ ID NO: 3140343 - RNA, 19 nt, Artificial Sequence
  Description of Artificial Sequence: Synthetic oligonucleotide
gguggcucucgcgggcccg

SEQ ID NO: 3140344 - RNA, 19 nt, Artificial Sequence
  Description of Artificial Sequence: Synthetic oligonucleotide
caggucgcgcaggcacacg

SEQ ID NO: 3140345 - RNA, 19 nt, Artificial Sequence
  Description of Artificial Sequence: Synthetic oligonucleotide
cagcggcgcguaguagcgg

SEQ ID NO: 3140346 - RNA, 19 nt, Artificial Sequence
  Description of Artificial Sequence: Synthetic oligonucleotide
cgcgcgcucgcccacggcg

SEQ ID NO: 3140347 - RNA, 19 nt, Artificial Sequence
  Description of Artificial Sequence: Synthetic oligonucleotide
ggucgcgcaggcacacgag

SEQ ID NO: 3140348 - RNA, 19 nt, Artificial Sequence
  Description of Artificial Sequence: Synthetic oligonucleotide
gcauggcgcagagcgcggg

SEQ ID NO: 3140349 - RNA, 19 nt, Artificial Sequence
  Description of Artificial Sequence: Synthetic oligonucleotide
gcucugcaaggacgcgaag

SEQ ID NO: 3140350 - RNA, 19 nt, Artificial Sequence
  Description of Artificial Sequence: Synthetic oligonucleotide
cgagcauggcgcagagcgc

SEQ ID NO: 3140351 - RNA, 19 nt, Artificial Sequence
  Description of Artificial Sequence: Synthetic oligonucleotide
cagcagcggcgcguaguag

SEQ ID NO: 3140352 - RNA, 19 nt, Artificial Sequence
  Description of Artificial Sequence: Synthetic oligonucleotide
ggcguugcagcgcgcgcuc

SEQ ID NO: 3140353 - RNA, 19 nt, Artificial Sequence
  Description of Artificial Sequence: Synthetic oligonucleotide
guccagcagcggcgcguag

SEQ ID NO: 3140354 - RNA, 19 nt, Artificial Sequence
  Description of Artificial Sequence: Synthetic oligonucleotide
ccugcucugcaaggacgcg

SEQ ID NO: 3140355 - RNA, 19 nt, Artificial Sequence
  Description of Artificial Sequence: Synthetic oligonucleotide
gcgcaggcacacgagcaug

SEQ ID NO: 3140356 - RNA, 19 nt, Artificial Sequence
  Description of Artificial Sequence: Synthetic oligonucleotide
gcgcagagcgcgggcacgg

SEQ ID NO: 3140357 - RNA, 19 nt, Artificial Sequence
  Description of Artificial Sequence: Synthetic oligonucleotide
gggcccgcaggcguugcag

SEQ ID NO: 3140358 - RNA, 19 nt, Artificial Sequence
  Description of Artificial Sequence: Synthetic oligonucleotide
ggcguccagcagcggcgcg

SEQ ID NO: 3140359 - RNA, 19 nt, Artificial Sequence
  Description of Artificial Sequence: Synthetic oligonucleotide
cgaaggccuccuccggccg

SEQ ID NO: 3140360 - RNA, 19 nt, Artificial Sequence
  Description of Artificial Sequence: Synthetic oligonucleotide
gccaagcgcaccauggcgu

SEQ ID NO: 3140361 - RNA, 19 nt, Artificial Sequence
  Description of Artificial Sequence: Synthetic oligonucleotide
cgcguaguagcgguggcuc

SEQ ID NO: 3140362 - RNA, 19 nt, Artificial Sequence
  Description of Artificial Sequence: Synthetic oligonucleotide
ggcucucgcgggcccgcag

SEQ ID NO: 3140363 - RNA, 19 nt, Artificial Sequence
  Description of Artificial Sequence: Synthetic oligonucleotide
gcacacgagcauggcgcag

SEQ ID NO: 3140364 - RNA, 19 nt, Artificial Sequence
  Description of Artificial Sequence: Synthetic oligonucleotide
ucgcgggcccgcaggcguu

SEQ ID NO: 3140365 - RNA, 19 nt, Artificial Sequence
  Description of Artificial Sequence: Synthetic oligonucleotide
cucgcgggcccgcaggcgu

SEQ ID NO: 3140366 - RNA, 19 nt, Artificial Sequence
  Description of Artificial Sequence: Synthetic oligonucleotide
cguaguagcgguggcucuc

SEQ ID NO: 3140367 - RNA, 19 nt, Artificial Sequence
  Description of Artificial Sequence: Synthetic oligonucleotide
ccuccggccgcuccagguc

SEQ ID NO: 3140368 - RNA, 19 nt, Artificial Sequence
  Description of Artificial Sequence: Synthetic oligonucleotide
cgaaguccuugcccagcgc

SEQ ID NO: 3140369 - RNA, 19 nt, Artificial Sequence
  Description of Artificial Sequence: Synthetic oligonucleotide
cagcgcgcgcucgcccacg

SEQ ID NO: 3140370 - RNA, 19 nt, Artificial Sequence
  Description of Artificial Sequence: Synthetic oligonucleotide
cccagcgcauaggccaagc

SEQ ID NO: 3140371 - RNA, 19 nt, Artificial Sequence
  Description of Artificial Sequence: Synthetic oligonucleotide
gcgcauaggccaagcgcac

SEQ ID NO: 3140372 - RNA, 19 nt, Artificial Sequence
  Description of Artificial Sequence: Synthetic oligonucleotide
cguugcagcgcgcgcucgc

SEQ ID NO: 3140373 - RNA, 19 nt, Artificial Sequence
  Description of Artificial Sequence: Synthetic oligonucleotide
uggcucucgcgggcccgca

SEQ ID NO: 3140374 - RNA, 19 nt, Artificial Sequence
  Description of Artificial Sequence: Synthetic oligonucleotide
cgcucgcccacggcgaagg

SEQ ID NO: 3140375 - RNA, 19 nt, Artificial Sequence
  Description of Artificial Sequence: Synthetic oligonucleotide
cgcauaggccaagcgcacc

SEQ ID NO: 3140376 - RNA, 19 nt, Artificial Sequence
  Description of Artificial Sequence: Synthetic oligonucleotide
gcguugcagcgcgcgcucg

SEQ ID NO: 3140377 - RNA, 19 nt, Artificial Sequence
  Description of Artificial Sequence: Synthetic oligonucleotide
ccaggucgcgcaggcacac

SEQ ID NO: 3140378 - RNA, 19 nt, Artificial Sequence
  Description of Artificial Sequence: Synthetic oligonucleotide
cgcgaaguccuugcccagc

SEQ ID NO: 3140379 - RNA, 19 nt, Artificial Sequence
  Description of Artificial Sequence: Synthetic oligonucleotide
cggcgcguaguagcggugg

SEQ ID NO: 3140380 - RNA, 19 nt, Artificial Sequence
  Description of Artificial Sequence: Synthetic oligonucleotide
ccagcagcggcgcguagua

SEQ ID NO: 3140381 - RNA, 19 nt, Artificial Sequence
  Description of Artificial Sequence: Synthetic oligonucleotide
gcgguggcucucgcgggcc

SEQ ID NO: 3140382 - RNA, 19 nt, Artificial Sequence
  Description of Artificial Sequence: Synthetic oligonucleotide
cggcgaaggccuccuccgg

SEQ ID NO: 3140383 - RNA, 19 nt, Artificial Sequence
  Description of Artificial Sequence: Synthetic oligonucleotide
gcucgcccacggcgaaggc

SEQ ID NO: 3140384 - RNA, 19 nt, Artificial Sequence
  Description of Artificial Sequence: Synthetic oligonucleotide
cauaggccaagcgcaccau

SEQ ID NO: 3140385 - RNA, 19 nt, Artificial Sequence
  Description of Artificial Sequence: Synthetic oligonucleotide
gcguaguagcgguggcucu

SEQ ID NO: 3140386 - RNA, 19 nt, Artificial Sequence
  Description of Artificial Sequence: Synthetic oligonucleotide
gagcgcgggcacgguggca

SEQ ID NO: 3140387 - RNA, 19 nt, Artificial Sequence
  Description of Artificial Sequence: Synthetic oligonucleotide
gcccacggcgaaggccucc

SEQ ID NO: 3140388 - RNA, 19 nt, Artificial Sequence
  Description of Artificial Sequence: Synthetic oligonucleotide
gcgcaccauggcguccagc

SEQ ID NO: 3140389 - RNA, 19 nt, Artificial Sequence
  Description of Artificial Sequence: Synthetic oligonucleotide
gcggcgcguaguagcggug

SEQ ID NO: 3140390 - RNA, 19 nt, Artificial Sequence
  Description of Artificial Sequence: Synthetic oligonucleotide
gcccagcgcauaggccaag

SEQ ID NO: 3140391 - RNA, 19 nt, Artificial Sequence
  Description of Artificial Sequence: Synthetic oligonucleotide
ccgcuccaggucgcgcagg

SEQ ID NO: 3140392 - RNA, 19 nt, Artificial Sequence
  Description of Artificial Sequence: Synthetic oligonucleotide
ccauggcguccagcagcgg

SEQ ID NO: 3140393 - RNA, 19 nt, Artificial Sequence
  Description of Artificial Sequence: Synthetic oligonucleotide
gcgcucgcccacggcgaag

SEQ ID NO: 3140394 - RNA, 19 nt, Artificial Sequence
  Description of Artificial Sequence: Synthetic oligonucleotide
gcgcgcucgcccacggcga

SEQ ID NO: 3140395 - RNA, 19 nt, Artificial Sequence
  Description of Artificial Sequence: Synthetic oligonucleotide
gcgcguaguagcgguggcu

SEQ ID NO: 3140396 - RNA, 19 nt, Artificial Sequence
  Description of Artificial Sequence: Synthetic oligonucleotide
ccggccgcuccaggucgcg

SEQ ID NO: 3140397 - RNA, 19 nt, Artificial Sequence
  Description of Artificial Sequence: Synthetic oligonucleotide
gcguccagcagcggcgcgu

SEQ ID NO: 3140398 - RNA, 19 nt, Artificial Sequence
  Description of Artificial Sequence: Synthetic oligonucleotide
gcgcgcgcucgcccacggc

SEQ ID NO: 3140399 - RNA, 19 nt, Artificial Sequence
  Description of Artificial Sequence: Synthetic oligonucleotide
gcaaggacgcgaaguccuu

SEQ ID NO: 3140400 - RNA, 19 nt, Artificial Sequence
  Description of Artificial Sequence: Synthetic oligonucleotide
cgcaggcguugcagcgcgc

SEQ ID NO: 3140401 - RNA, 19 nt, Artificial Sequence
  Description of Artificial Sequence: Synthetic oligonucleotide
ccacggcgaaggccuccuc

SEQ ID NO: 3140402 - RNA, 19 nt, Artificial Sequence
  Description of Artificial Sequence: Synthetic oligonucleotide
gcgggcccgcaggcguugc

SEQ ID NO: 3140403 - RNA, 19 nt, Artificial Sequence
  Description of Artificial Sequence: Synthetic oligonucleotide
cgcgcaggcacacgagcau

SEQ ID NO: 3140404 - RNA, 19 nt, Artificial Sequence
  Description of Artificial Sequence: Synthetic oligonucleotide
cgcgggcacgguggcacuc

SEQ ID NO: 3140405 - RNA, 19 nt, Artificial Sequence
  Description of Artificial Sequence: Synthetic oligonucleotide
cccacggcgaaggccuccu

SEQ ID NO: 3140406 - RNA, 19 nt, Artificial Sequence
  Description of Artificial Sequence: Synthetic oligonucleotide
cggccgcuccaggucgcgc

SEQ ID NO: 3140407 - RNA, 19 nt, Artificial Sequence
  Description of Artificial Sequence: Synthetic oligonucleotide
cguccagcagcggcgcgua

SEQ ID NO: 3140408 - RNA, 19 nt, Artificial Sequence
  Description of Artificial Sequence: Synthetic oligonucleotide
cgcccacggcgaaggccuc

SEQ ID NO: 3140409 - RNA, 19 nt, Artificial Sequence
  Description of Artificial Sequence: Synthetic oligonucleotide
gcgcgggcacgguggcacu

SEQ ID NO: 3140410 - RNA, 19 nt, Artificial Sequence
  Description of Artificial Sequence: Synthetic oligonucleotide
cgcgggcccgcaggcguug

SEQ ID NO: 3140411 - RNA, 19 nt, Artificial Sequence
  Description of Artificial Sequence: Synthetic oligonucleotide
cgggcccgcaggcguugca

SEQ ID NO: 3140412 - RNA, 19 nt, Artificial Sequence
  Description of Artificial Sequence: Synthetic oligonucleotide
cgcagagcgcgggcacggu

SEQ ID NO: 3140413 - RNA, 19 nt, Artificial Sequence
  Description of Artificial Sequence: Synthetic oligonucleotide
acacacacacgucagucgg

SEQ ID NO: 3140414 - RNA, 19 nt, Artificial Sequence
  Description of Artificial Sequence: Synthetic oligonucleotide
cucacacacacacacacac

SEQ ID NO: 3140415 - RNA, 19 nt, Artificial Sequence
  Description of Artificial Sequence: Synthetic oligonucleotide
ugcaucuuccgguaguagc

SEQ ID NO: 3140416 - RNA, 19 nt, Artificial Sequence
  Description of Artificial Sequence: Synthetic oligonucleotide
cacacacacacacacacac

SEQ ID NO: 3140417 - RNA, 19 nt, Artificial Sequence
  Description of Artificial Sequence: Synthetic oligonucleotide
cucucucacacacacacac

SEQ ID NO: 3140418 - RNA, 19 nt, Artificial Sequence
  Description of Artificial Sequence: Synthetic oligonucleotide
cucucacacacacacacac

SEQ ID NO: 3140419 - RNA, 19 nt, Artificial Sequence
  Description of Artificial Sequence: Synthetic oligonucleotide
ucagucggggcucccaugc

SEQ ID NO: 3140420 - RNA, 19 nt, Artificial Sequence
  Description of Artificial Sequence: Synthetic oligonucleotide
ucacacugcaucuuccggu

SEQ ID NO: 3140421 - RNA, 19 nt, Artificial Sequence
  Description of Artificial Sequence: Synthetic oligonucleotide
cucucucucucucacacac

SEQ ID NO: 3140422 - RNA, 19 nt, Artificial Sequence
  Description of Artificial Sequence: Synthetic oligonucleotide
ugguccacacaccagcagu

SEQ ID NO: 3140423 - RNA, 19 nt, Artificial Sequence
  Description of Artificial Sequence: Synthetic oligonucleotide
uccgguaguagccauccuc

SEQ ID NO: 3140424 - RNA, 19 nt, Artificial Sequence
  Description of Artificial Sequence: Synthetic oligonucleotide
acacacacacacgucaguc

SEQ ID NO: 3140425 - RNA, 19 nt, Artificial Sequence
  Description of Artificial Sequence: Synthetic oligonucleotide
cucucucucucucucacac

SEQ ID NO: 3140426 - RNA, 19 nt, Artificial Sequence
  Description of Artificial Sequence: Synthetic oligonucleotide
gucacacugcaucuuccgg

SEQ ID NO: 3140427 - RNA, 19 nt, Artificial Sequence
  Description of Artificial Sequence: Synthetic oligonucleotide
ucucacacacacacacaca

SEQ ID NO: 3140428 - RNA, 19 nt, Artificial Sequence
  Description of Artificial Sequence: Synthetic oligonucleotide
acacacgucagucggggcu

SEQ ID NO: 3140429 - RNA, 19 nt, Artificial Sequence
  Description of Artificial Sequence: Synthetic oligonucleotide
ucacacacacacacacaca

SEQ ID NO: 3140430 - RNA, 19 nt, Artificial Sequence
  Description of Artificial Sequence: Synthetic oligonucleotide
cacacaccagcagucaccg

SEQ ID NO: 3140431 - RNA, 19 nt, Artificial Sequence
  Description of Artificial Sequence: Synthetic oligonucleotide
ucucucacacacacacaca

SEQ ID NO: 3140432 - RNA, 19 nt, Artificial Sequence
  Description of Artificial Sequence: Synthetic oligonucleotide
guagccauccucgucgcag

SEQ ID NO: 3140433 - RNA, 19 nt, Artificial Sequence
  Description of Artificial Sequence: Synthetic oligonucleotide
cacacacacacacacguca

SEQ ID NO: 3140434 - RNA, 19 nt, Artificial Sequence
  Description of Artificial Sequence: Synthetic oligonucleotide
uggucacacugcaucuucc

SEQ ID NO: 3140435 - RNA, 19 nt, Artificial Sequence
  Description of Artificial Sequence: Synthetic oligonucleotide
ucgcagcucgggaugaaga

SEQ ID NO: 3140436 - RNA, 19 nt, Artificial Sequence
  Description of Artificial Sequence: Synthetic oligonucleotide
gucaccgcugcucugguca

SEQ ID NO: 3140437 - RNA, 19 nt, Artificial Sequence
  Description of Artificial Sequence: Synthetic oligonucleotide
uccacacaccagcagucac

SEQ ID NO: 3140438 - RNA, 19 nt, Artificial Sequence
  Description of Artificial Sequence: Synthetic oligonucleotide
ggucacacugcaucuuccg

SEQ ID NO: 3140439 - RNA, 19 nt, Artificial Sequence
  Description of Artificial Sequence: Synthetic oligonucleotide
ucucucucacacacacaca

SEQ ID NO: 3140440 - RNA, 19 nt, Artificial Sequence
  Description of Artificial Sequence: Synthetic oligonucleotide
ccgguaguagccauccucg

SEQ ID NO: 3140441 - RNA, 19 nt, Artificial Sequence
  Description of Artificial Sequence: Synthetic oligonucleotide
ucucucucucucucucuca

SEQ ID NO: 3140442 - RNA, 19 nt, Artificial Sequence
  Description of Artificial Sequence: Synthetic oligonucleotide
cucucucucucucucucac

SEQ ID NO: 3140443 - RNA, 19 nt, Artificial Sequence
  Description of Artificial Sequence: Synthetic oligonucleotide
acacacacacacacacacg

SEQ ID NO: 3140444 - RNA, 19 nt, Artificial Sequence
  Description of Artificial Sequence: Synthetic oligonucleotide
uaguagccauccucgucgc

SEQ ID NO: 3140445 - RNA, 19 nt, Artificial Sequence
  Description of Artificial Sequence: Synthetic oligonucleotide
ucucucucucucacacaca

SEQ ID NO: 3140446 - RNA, 19 nt, Artificial Sequence
  Description of Artificial Sequence: Synthetic oligonucleotide
uagccauccucgucgcagc

SEQ ID NO: 3140447 - RNA, 19 nt, Artificial Sequence
  Description of Artificial Sequence: Synthetic oligonucleotide
ucucucucucucucucucu

SEQ ID NO: 3140448 - RNA, 19 nt, Artificial Sequence
  Description of Artificial Sequence: Synthetic oligonucleotide
cacacacacacacacacgu

SEQ ID NO: 3140449 - RNA, 19 nt, Artificial Sequence
  Description of Artificial Sequence: Synthetic oligonucleotide
aggcccagcugguccacac

SEQ ID NO: 3140450 - RNA, 19 nt, Artificial Sequence
  Description of Artificial Sequence: Synthetic oligonucleotide
cuggucacacugcaucuuc

SEQ ID NO: 3140451 - RNA, 19 nt, Artificial Sequence
  Description of Artificial Sequence: Synthetic oligonucleotide
gcaucuuccgguaguagcc

SEQ ID NO: 3140452 - RNA, 19 nt, Artificial Sequence
  Description of Artificial Sequence: Synthetic oligonucleotide
ucucucucucucucucaca

SEQ ID NO: 3140453 - RNA, 19 nt, Artificial Sequence
  Description of Artificial Sequence: Synthetic oligonucleotide
ucucucucucucucacaca

SEQ ID NO: 3140454 - RNA, 19 nt, Artificial Sequence
  Description of Artificial Sequence: Synthetic oligonucleotide
acacacacacacacgucag

SEQ ID NO: 3140455 - RNA, 19 nt, Artificial Sequence
  Description of Artificial Sequence: Synthetic oligonucleotide
accgcugcucuggucacac

SEQ ID NO: 3140456 - RNA, 19 nt, Artificial Sequence
  Description of Artificial Sequence: Synthetic oligonucleotide
uccucgucgcagcucggga

SEQ ID NO: 3140457 - RNA, 19 nt, Artificial Sequence
  Description of Artificial Sequence: Synthetic oligonucleotide
gcgcgugccagucagcucc

SEQ ID NO: 3140458 - RNA, 19 nt, Artificial Sequence
  Description of Artificial Sequence: Synthetic oligonucleotide
ccauccucgucgcagcucg

SEQ ID NO: 3140459 - RNA, 19 nt, Artificial Sequence
  Description of Artificial Sequence: Synthetic oligonucleotide
cucucucucucucucucuc

SEQ ID NO: 3140460 - RNA, 19 nt, Artificial Sequence
  Description of Artificial Sequence: Synthetic oligonucleotide
gcucuggucacacugcauc

SEQ ID NO: 3140461 - RNA, 19 nt, Artificial Sequence
  Description of Artificial Sequence: Synthetic oligonucleotide
acacugcaucuuccgguag

SEQ ID NO: 3140462 - RNA, 19 nt, Artificial Sequence
  Description of Artificial Sequence: Synthetic oligonucleotide
acacacacacacacacguc

SEQ ID NO: 3140463 - RNA, 19 nt, Artificial Sequence
  Description of Artificial Sequence: Synthetic oligonucleotide
agucggggcucccaugcgu

SEQ ID NO: 3140464 - RNA, 19 nt, Artificial Sequence
  Description of Artificial Sequence: Synthetic oligonucleotide
cucgucgcagcucgggaug

SEQ ID NO: 3140465 - RNA, 19 nt, Artificial Sequence
  Description of Artificial Sequence: Synthetic oligonucleotide
acacaccagcagucaccgc

SEQ ID NO: 3140466 - RNA, 19 nt, Artificial Sequence
  Description of Artificial Sequence: Synthetic oligonucleotide
cugguccacacaccagcag

SEQ ID NO: 3140467 - RNA, 19 nt, Artificial Sequence
  Description of Artificial Sequence: Synthetic oligonucleotide
cacaccagcagucaccgcu

SEQ ID NO: 3140468 - RNA, 19 nt, Artificial Sequence
  Description of Artificial Sequence: Synthetic oligonucleotide
agucaccgcugcucugguc

SEQ ID NO: 3140469 - RNA, 19 nt, Artificial Sequence
  Description of Artificial Sequence: Synthetic oligonucleotide
gcagucaccgcugcucugg

SEQ ID NO: 3140470 - RNA, 19 nt, Artificial Sequence
  Description of Artificial Sequence: Synthetic oligonucleotide
ccacacaccagcagucacc

SEQ ID NO: 3140471 - RNA, 19 nt, Artificial Sequence
  Description of Artificial Sequence: Synthetic oligonucleotide
auccucgucgcagcucggg

SEQ ID NO: 3140472 - RNA, 19 nt, Artificial Sequence
  Description of Artificial Sequence: Synthetic oligonucleotide
gccagucagcuccaggccc

SEQ ID NO: 3140473 - RNA, 19 nt, Artificial Sequence
  Description of Artificial Sequence: Synthetic oligonucleotide
ugcucuggucacacugcau

SEQ ID NO: 3140474 - RNA, 19 nt, Artificial Sequence
  Description of Artificial Sequence: Synthetic oligonucleotide
aucuuccgguaguagccau

SEQ ID NO: 3140475 - RNA, 19 nt, Artificial Sequence
  Description of Artificial Sequence: Synthetic oligonucleotide
acacgucagucggggcucc

SEQ ID NO: 3140476 - RNA, 19 nt, Artificial Sequence
  Description of Artificial Sequence: Synthetic oligonucleotide
augcgugcgcgugccaguc

SEQ ID NO: 3140477 - RNA, 19 nt, Artificial Sequence
  Description of Artificial Sequence: Synthetic oligonucleotide
ucccaugcgugcgcgugcc

SEQ ID NO: 3140478 - RNA, 19 nt, Artificial Sequence
  Description of Artificial Sequence: Synthetic oligonucleotide
cacacugcaucuuccggua

SEQ ID NO: 3140479 - RNA, 19 nt, Artificial Sequence
  Description of Artificial Sequence: Synthetic oligonucleotide
cagcugguccacacaccag

SEQ ID NO: 3140480 - RNA, 19 nt, Artificial Sequence
  Description of Artificial Sequence: Synthetic oligonucleotide
agcagucaccgcugcucug

SEQ ID NO: 3140481 - RNA, 19 nt, Artificial Sequence
  Description of Artificial Sequence: Synthetic oligonucleotide
ucaccgcugcucuggucac

SEQ ID NO: 3140482 - RNA, 19 nt, Artificial Sequence
  Description of Artificial Sequence: Synthetic oligonucleotide
acacacacacacacacaca

SEQ ID NO: 3140483 - RNA, 19 nt, Artificial Sequence
  Description of Artificial Sequence: Synthetic oligonucleotide
acaccagcagucaccgcug

SEQ ID NO: 3140484 - RNA, 19 nt, Artificial Sequence
  Description of Artificial Sequence: Synthetic oligonucleotide
aguagccauccucgucgca

SEQ ID NO: 3140485 - RNA, 19 nt, Artificial Sequence
  Description of Artificial Sequence: Synthetic oligonucleotide
cucccaugcgugcgcgugc

SEQ ID NO: 3140486 - RNA, 19 nt, Artificial Sequence
  Description of Artificial Sequence: Synthetic oligonucleotide
acugcaucuuccgguagua

SEQ ID NO: 3140487 - RNA, 19 nt, Artificial Sequence
  Description of Artificial Sequence: Synthetic oligonucleotide
ucggggcucccaugcgugc

SEQ ID NO: 3140488 - RNA, 19 nt, Artificial Sequence
  Description of Artificial Sequence: Synthetic oligonucleotide
gucagucggggcucccaug

SEQ ID NO: 3140489 - RNA, 19 nt, Artificial Sequence
  Description of Artificial Sequence: Synthetic oligonucleotide
gucgcagcucgggaugaag

SEQ ID NO: 3140490 - RNA, 19 nt, Artificial Sequence
  Description of Artificial Sequence: Synthetic oligonucleotide
cugcaucuuccgguaguag

SEQ ID NO: 3140491 - RNA, 19 nt, Artificial Sequence
  Description of Artificial Sequence: Synthetic oligonucleotide
cacacgucagucggggcuc

SEQ ID NO: 3140492 - RNA, 19 nt, Artificial Sequence
  Description of Artificial Sequence: Synthetic oligonucleotide
accagcagucaccgcugcu

SEQ ID NO: 3140493 - RNA, 19 nt, Artificial Sequence
  Description of Artificial Sequence: Synthetic oligonucleotide
agucagcuccaggcccagc

SEQ ID NO: 3140494 - RNA, 19 nt, Artificial Sequence
  Description of Artificial Sequence: Synthetic oligonucleotide
cagucggggcucccaugcg

SEQ ID NO: 3140495 - RNA, 19 nt, Artificial Sequence
  Description of Artificial Sequence: Synthetic oligonucleotide
ugcgugcgcgugccaguca

SEQ ID NO: 3140496 - RNA, 19 nt, Artificial Sequence
  Description of Artificial Sequence: Synthetic oligonucleotide
ucgucgcagcucgggauga

SEQ ID NO: 3140497 - RNA, 19 nt, Artificial Sequence
  Description of Artificial Sequence: Synthetic oligonucleotide
gucggggcucccaugcgug

SEQ ID NO: 3140498 - RNA, 19 nt, Artificial Sequence
  Description of Artificial Sequence: Synthetic oligonucleotide
agccauccucgucgcagcu

SEQ ID NO: 3140499 - RNA, 19 nt, Artificial Sequence
  Description of Artificial Sequence: Synthetic oligonucleotide
caccagcagucaccgcugc

SEQ ID NO: 3140500 - RNA, 19 nt, Artificial Sequence
  Description of Artificial Sequence: Synthetic oligonucleotide
cauccucgucgcagcucgg

SEQ ID NO: 3140501 - RNA, 19 nt, Artificial Sequence
  Description of Artificial Sequence: Synthetic oligonucleotide
cugcucuggucacacugca

SEQ ID NO: 3140502 - RNA, 19 nt, Artificial Sequence
  Description of Artificial Sequence: Synthetic oligonucleotide
cucuggucacacugcaucu

SEQ ID NO: 3140503 - RNA, 19 nt, Artificial Sequence
  Description of Artificial Sequence: Synthetic oligonucleotide
gcccagcugguccacacac

SEQ ID NO: 3140504 - RNA, 19 nt, Artificial Sequence
  Description of Artificial Sequence: Synthetic oligonucleotide
caucuuccgguaguagcca

SEQ ID NO: 3140505 - RNA, 19 nt, Artificial Sequence
  Description of Artificial Sequence: Synthetic oligonucleotide
ccagcugguccacacacca

SEQ ID NO: 3140506 - RNA, 19 nt, Artificial Sequence
  Description of Artificial Sequence: Synthetic oligonucleotide
gcgugcgcgugccagucag

SEQ ID NO: 3140507 - RNA, 19 nt, Artificial Sequence
  Description of Artificial Sequence: Synthetic oligonucleotide
ugcgcgugccagucagcuc

SEQ ID NO: 3140508 - RNA, 19 nt, Artificial Sequence
  Description of Artificial Sequence: Synthetic oligonucleotide
ccagcagucaccgcugcuc

SEQ ID NO: 3140509 - RNA, 19 nt, Artificial Sequence
  Description of Artificial Sequence: Synthetic oligonucleotide
cccagcugguccacacacc

SEQ ID NO: 3140510 - RNA, 19 nt, Artificial Sequence
  Description of Artificial Sequence: Synthetic oligonucleotide
cacacacacacacgucagu

SEQ ID NO: 3140511 - RNA, 19 nt, Artificial Sequence
  Description of Artificial Sequence: Synthetic oligonucleotide
gcucccaugcgugcgcgug

SEQ ID NO: 3140512 - RNA, 19 nt, Artificial Sequence
  Description of Artificial Sequence: Synthetic oligonucleotide
ccaugcgugcgcgugccag

SEQ ID NO: 3140513 - RNA, 19 nt, Artificial Sequence
  Description of Artificial Sequence: Synthetic oligonucleotide
ggggcucccaugcgugcgc

SEQ ID NO: 3140514 - RNA, 19 nt, Artificial Sequence
  Description of Artificial Sequence: Synthetic oligonucleotide
cgugccagucagcuccagg

SEQ ID NO: 3140515 - RNA, 19 nt, Artificial Sequence
  Description of Artificial Sequence: Synthetic oligonucleotide
cagcagucaccgcugcucu

SEQ ID NO: 3140516 - RNA, 19 nt, Artificial Sequence
  Description of Artificial Sequence: Synthetic oligonucleotide
gcugguccacacaccagca

SEQ ID NO: 3140517 - RNA, 19 nt, Artificial Sequence
  Description of Artificial Sequence: Synthetic oligonucleotide
caugcgugcgcgugccagu

SEQ ID NO: 3140518 - RNA, 19 nt, Artificial Sequence
  Description of Artificial Sequence: Synthetic oligonucleotide
gugcgcgugccagucagcu

SEQ ID NO: 3140519 - RNA, 19 nt, Artificial Sequence
  Description of Artificial Sequence: Synthetic oligonucleotide
cacgucagucggggcuccc

SEQ ID NO: 3140520 - RNA, 19 nt, Artificial Sequence
  Description of Artificial Sequence: Synthetic oligonucleotide
gggcucccaugcgugcgcg

SEQ ID NO: 3140521 - RNA, 19 nt, Artificial Sequence
  Description of Artificial Sequence: Synthetic oligonucleotide
ggcccagcugguccacaca

SEQ ID NO: 3140522 - RNA, 19 nt, Artificial Sequence
  Description of Artificial Sequence: Synthetic oligonucleotide
gccauccucgucgcagcuc

SEQ ID NO: 3140523 - RNA, 19 nt, Artificial Sequence
  Description of Artificial Sequence: Synthetic oligonucleotide
cagucaccgcugcucuggu

SEQ ID NO: 3140524 - RNA, 19 nt, Artificial Sequence
  Description of Artificial Sequence: Synthetic oligonucleotide
cggggcucccaugcgugcg

SEQ ID NO: 3140525 - RNA, 19 nt, Artificial Sequence
  Description of Artificial Sequence: Synthetic oligonucleotide
caccgcugcucuggucaca

SEQ ID NO: 3140526 - RNA, 19 nt, Artificial Sequence
  Description of Artificial Sequence: Synthetic oligonucleotide
ccucgucgcagcucgggau

SEQ ID NO: 3140527 - RNA, 19 nt, Artificial Sequence
  Description of Artificial Sequence: Synthetic oligonucleotide
gcgugccagucagcuccag

SEQ ID NO: 3140528 - RNA, 19 nt, Artificial Sequence
  Description of Artificial Sequence: Synthetic oligonucleotide
ggcucccaugcgugcgcgu

SEQ ID NO: 3140529 - RNA, 19 nt, Artificial Sequence
  Description of Artificial Sequence: Synthetic oligonucleotide
cgcgugccagucagcucca

SEQ ID NO: 3140530 - RNA, 19 nt, Artificial Sequence
  Description of Artificial Sequence: Synthetic oligonucleotide
cccaugcgugcgcgugcca

SEQ ID NO: 3140531 - RNA, 19 nt, Artificial Sequence
  Description of Artificial Sequence: Synthetic oligonucleotide
cgucagucggggcucccau

SEQ ID NO: 3140532 - RNA, 19 nt, Artificial Sequence
  Description of Artificial Sequence: Synthetic oligonucleotide
cgucgcagcucgggaugaa

SEQ ID NO: 3140533 - RNA, 19 nt, Artificial Sequence
  Description of Artificial Sequence: Synthetic oligonucleotide
aaaacaaaacaaaacaaac

SEQ ID NO: 3140534 - RNA, 19 nt, Artificial Sequence
  Description of Artificial Sequence: Synthetic oligonucleotide
aaacaaaacaaaacaaaac

SEQ ID NO: 3140535 - RNA, 19 nt, Artificial Sequence
  Description of Artificial Sequence: Synthetic oligonucleotide
aaaacaaaacaaaacaaaa

SEQ ID NO: 3140536 - RNA, 19 nt, Artificial Sequence
  Description of Artificial Sequence: Synthetic oligonucleotide
caaaacaaaacaaaacaaa

SEQ ID NO: 3140537 - RNA, 19 nt, Artificial Sequence
  Description of Artificial Sequence: Synthetic oligonucleotide
aaacaagugagccgggcuu

SEQ ID NO: 3140538 - RNA, 19 nt, Artificial Sequence
  Description of Artificial Sequence: Synthetic oligonucleotide
gugagccgggcuuuggugg

SEQ ID NO: 3140539 - RNA, 19 nt, Artificial Sequence
  Description of Artificial Sequence: Synthetic oligonucleotide
aagugagccgggcuuuggu

SEQ ID NO: 3140540 - RNA, 19 nt, Artificial Sequence
  Description of Artificial Sequence: Synthetic oligonucleotide
agugagccgggcuuuggug

SEQ ID NO: 3140541 - RNA, 19 nt, Artificial Sequence
  Description of Artificial Sequence: Synthetic oligonucleotide
aacaagugagccgggcuuu

SEQ ID NO: 3140542 - RNA, 19 nt, Artificial Sequence
  Description of Artificial Sequence: Synthetic oligonucleotide
ugagccgggcuuugguggu

SEQ ID NO: 3140543 - RNA, 19 nt, Artificial Sequence
  Description of Artificial Sequence: Synthetic oligonucleotide
agccgggcuuugguggugc

SEQ ID NO: 3140544 - RNA, 19 nt, Artificial Sequence
  Description of Artificial Sequence: Synthetic oligonucleotide
caagugagccgggcuuugg

SEQ ID NO: 3140545 - RNA, 19 nt, Artificial Sequence
  Description of Artificial Sequence: Synthetic oligonucleotide
acaagugagccgggcuuug

SEQ ID NO: 3140546 - RNA, 19 nt, Artificial Sequence
  Description of Artificial Sequence: Synthetic oligonucleotide
cgggcuuugguggugcacg

SEQ ID NO: 3140547 - RNA, 19 nt, Artificial Sequence
  Description of Artificial Sequence: Synthetic oligonucleotide
ccgggcuuugguggugcac

SEQ ID NO: 3140548 - RNA, 19 nt, Artificial Sequence
  Description of Artificial Sequence: Synthetic oligonucleotide
gccgggcuuugguggugca

SEQ ID NO: 3140549 - RNA, 19 nt, Artificial Sequence
  Description of Artificial Sequence: Synthetic oligonucleotide
uuuucuugugcuuagagcu

SEQ ID NO: 3140550 - RNA, 19 nt, Artificial Sequence
  Description of Artificial Sequence: Synthetic oligonucleotide
aagaagacgauuuucuugu

SEQ ID NO: 3140551 - RNA, 19 nt, Artificial Sequence
  Description of Artificial Sequence: Synthetic oligonucleotide
auuuucuugugcuuagagc

SEQ ID NO: 3140552 - RNA, 19 nt, Artificial Sequence
  Description of Artificial Sequence: Synthetic oligonucleotide
agagcuggggauuugcccc

SEQ ID NO: 3140553 - RNA, 19 nt, Artificial Sequence
  Description of Artificial Sequence: Synthetic oligonucleotide
aagacgauuuucuugugcu

SEQ ID NO: 3140554 - RNA, 19 nt, Artificial Sequence
  Description of Artificial Sequence: Synthetic oligonucleotide
gaagaagacgauuuucuug

SEQ ID NO: 3140555 - RNA, 19 nt, Artificial Sequence
  Description of Artificial Sequence: Synthetic oligonucleotide
aacugugagaggucugggc

SEQ ID NO: 3140556 - RNA, 19 nt, Artificial Sequence
  Description of Artificial Sequence: Synthetic oligonucleotide
uagaagaagacgauuuucu

SEQ ID NO: 3140557 - RNA, 19 nt, Artificial Sequence
  Description of Artificial Sequence: Synthetic oligonucleotide
ucagaucuagaagaagacg

SEQ ID NO: 3140558 - RNA, 19 nt, Artificial Sequence
  Description of Artificial Sequence: Synthetic oligonucleotide
uuggacuucaaccuccgca

SEQ ID NO: 3140559 - RNA, 19 nt, Artificial Sequence
  Description of Artificial Sequence: Synthetic oligonucleotide
cagaucuagaagaagacga

SEQ ID NO: 3140560 - RNA, 19 nt, Artificial Sequence
  Description of Artificial Sequence: Synthetic oligonucleotide
gaagacgauuuucuugugc

SEQ ID NO: 3140561 - RNA, 19 nt, Artificial Sequence
  Description of Artificial Sequence: Synthetic oligonucleotide
ugccccuuggacuucaacc

SEQ ID NO: 3140562 - RNA, 19 nt, Artificial Sequence
  Description of Artificial Sequence: Synthetic oligonucleotide
agaagcccaacugugagag

SEQ ID NO: 3140563 - RNA, 19 nt, Artificial Sequence
  Description of Artificial Sequence: Synthetic oligonucleotide
ugugcuuagagcuggggau

SEQ ID NO: 3140564 - RNA, 19 nt, Artificial Sequence
  Description of Artificial Sequence: Synthetic oligonucleotide
uguguuugggcugcagugg

SEQ ID NO: 3140565 - RNA, 19 nt, Artificial Sequence
  Description of Artificial Sequence: Synthetic oligonucleotide
gacuucaaccuccgcaccg

SEQ ID NO: 3140566 - RNA, 19 nt, Artificial Sequence
  Description of Artificial Sequence: Synthetic oligonucleotide
agaggucugggccauuccg

SEQ ID NO: 3140567 - RNA, 19 nt, Artificial Sequence
  Description of Artificial Sequence: Synthetic oligonucleotide
uggacuucaaccuccgcac

SEQ ID NO: 3140568 - RNA, 19 nt, Artificial Sequence
  Description of Artificial Sequence: Synthetic oligonucleotide
agugguggcgucucucccc

SEQ ID NO: 3140569 - RNA, 19 nt, Artificial Sequence
  Description of Artificial Sequence: Synthetic oligonucleotide
uugugcuuagagcugggga

SEQ ID NO: 3140570 - RNA, 19 nt, Artificial Sequence
  Description of Artificial Sequence: Synthetic oligonucleotide
uuucuugugcuuagagcug

SEQ ID NO: 3140571 - RNA, 19 nt, Artificial Sequence
  Description of Artificial Sequence: Synthetic oligonucleotide
aagcccaacugugagaggu

SEQ ID NO: 3140572 - RNA, 19 nt, Artificial Sequence
  Description of Artificial Sequence: Synthetic oligonucleotide
uccgggucagaucuagaag

SEQ ID NO: 3140573 - RNA, 19 nt, Artificial Sequence
  Description of Artificial Sequence: Synthetic oligonucleotide
ucuagaagaagacgauuuu

SEQ ID NO: 3140574 - RNA, 19 nt, Artificial Sequence
  Description of Artificial Sequence: Synthetic oligonucleotide
uuagagcuggggauuugcc

SEQ ID NO: 3140575 - RNA, 19 nt, Artificial Sequence
  Description of Artificial Sequence: Synthetic oligonucleotide
uagagcuggggauuugccc

SEQ ID NO: 3140576 - RNA, 19 nt, Artificial Sequence
  Description of Artificial Sequence: Synthetic oligonucleotide
ucucacacacauccagggc

SEQ ID NO: 3140577 - RNA, 19 nt, Artificial Sequence
  Description of Artificial Sequence: Synthetic oligonucleotide
acgauuuucuugugcuuag

SEQ ID NO: 3140578 - RNA, 19 nt, Artificial Sequence
  Description of Artificial Sequence: Synthetic oligonucleotide
cuagaagaagacgauuuuc

SEQ ID NO: 3140579 - RNA, 19 nt, Artificial Sequence
  Description of Artificial Sequence: Synthetic oligonucleotide
ugcagaagcccaacuguga

SEQ ID NO: 3140580 - RNA, 19 nt, Artificial Sequence
  Description of Artificial Sequence: Synthetic oligonucleotide
acuucaaccuccgcaccgc

SEQ ID NO: 3140581 - RNA, 19 nt, Artificial Sequence
  Description of Artificial Sequence: Synthetic oligonucleotide
guuugggcugcaguggugg

SEQ ID NO: 3140582 - RNA, 19 nt, Artificial Sequence
  Description of Artificial Sequence: Synthetic oligonucleotide
ucccgcauguguuugggcu

SEQ ID NO: 3140583 - RNA, 19 nt, Artificial Sequence
  Description of Artificial Sequence: Synthetic oligonucleotide
ucaaccuccgcaccgccuc

SEQ ID NO: 3140584 - RNA, 19 nt, Artificial Sequence
  Description of Artificial Sequence: Synthetic oligonucleotide
agaagaagacgauuuucuu

SEQ ID NO: 3140585 - RNA, 19 nt, Artificial Sequence
  Description of Artificial Sequence: Synthetic oligonucleotide
aggucugggccauuccggg

SEQ ID NO: 3140586 - RNA, 19 nt, Artificial Sequence
  Description of Artificial Sequence: Synthetic oligonucleotide
ggcuucuucuacuaccucc

SEQ ID NO: 3140587 - RNA, 19 nt, Artificial Sequence
  Description of Artificial Sequence: Synthetic oligonucleotide
uuccgggucagaucuagaa

SEQ ID NO: 3140588 - RNA, 19 nt, Artificial Sequence
  Description of Artificial Sequence: Synthetic oligonucleotide
aucuagaagaagacgauuu

SEQ ID NO: 3140589 - RNA, 19 nt, Artificial Sequence
  Description of Artificial Sequence: Synthetic oligonucleotide
gaggucugggccauuccgg

SEQ ID NO: 3140590 - RNA, 19 nt, Artificial Sequence
  Description of Artificial Sequence: Synthetic oligonucleotide
gucagaucuagaagaagac

SEQ ID NO: 3140591 - RNA, 19 nt, Artificial Sequence
  Description of Artificial Sequence: Synthetic oligonucleotide
acacauccagggcuucuuc

SEQ ID NO: 3140592 - RNA, 19 nt, Artificial Sequence
  Description of Artificial Sequence: Synthetic oligonucleotide
ggucagaucuagaagaaga

SEQ ID NO: 3140593 - RNA, 19 nt, Artificial Sequence
  Description of Artificial Sequence: Synthetic oligonucleotide
uggggauuugccccuugga

SEQ ID NO: 3140594 - RNA, 19 nt, Artificial Sequence
  Description of Artificial Sequence: Synthetic oligonucleotide
caaagcaccggugcagaag

SEQ ID NO: 3140595 - RNA, 19 nt, Artificial Sequence
  Description of Artificial Sequence: Synthetic oligonucleotide
uguuugggcugcaguggug

SEQ ID NO: 3140596 - RNA, 19 nt, Artificial Sequence
  Description of Artificial Sequence: Synthetic oligonucleotide
agaagacgauuuucuugug

SEQ ID NO: 3140597 - RNA, 19 nt, Artificial Sequence
  Description of Artificial Sequence: Synthetic oligonucleotide
gcagaagcccaacugugag

SEQ ID NO: 3140598 - RNA, 19 nt, Artificial Sequence
  Description of Artificial Sequence: Synthetic oligonucleotide
gacgauuuucuugugcuua

SEQ ID NO: 3140599 - RNA, 19 nt, Artificial Sequence
  Description of Artificial Sequence: Synthetic oligonucleotide
gaagcccaacugugagagg

SEQ ID NO: 3140600 - RNA, 19 nt, Artificial Sequence
  Description of Artificial Sequence: Synthetic oligonucleotide
cuugugcuuagagcugggg

SEQ ID NO: 3140601 - RNA, 19 nt, Artificial Sequence
  Description of Artificial Sequence: Synthetic oligonucleotide
cauuccgggucagaucuag

SEQ ID NO: 3140602 - RNA, 19 nt, Artificial Sequence
  Description of Artificial Sequence: Synthetic oligonucleotide
cuggggauuugccccuugg

SEQ ID NO: 3140603 - RNA, 19 nt, Artificial Sequence
  Description of Artificial Sequence: Synthetic oligonucleotide
cucacacacauccagggcu

SEQ ID NO: 3140604 - RNA, 19 nt, Artificial Sequence
  Description of Artificial Sequence: Synthetic oligonucleotide
uucaaccuccgcaccgccu

SEQ ID NO: 3140605 - RNA, 19 nt, Artificial Sequence
  Description of Artificial Sequence: Synthetic oligonucleotide
ggggauuugccccuuggac

SEQ ID NO: 3140606 - RNA, 19 nt, Artificial Sequence
  Description of Artificial Sequence: Synthetic oligonucleotide
agaucuagaagaagacgau

SEQ ID NO: 3140607 - RNA, 19 nt, Artificial Sequence
  Description of Artificial Sequence: Synthetic oligonucleotide
aaccuccgcaccgccuccc

SEQ ID NO: 3140608 - RNA, 19 nt, Artificial Sequence
  Description of Artificial Sequence: Synthetic oligonucleotide
gagaggucugggccauucc

SEQ ID NO: 3140609 - RNA, 19 nt, Artificial Sequence
  Description of Artificial Sequence: Synthetic oligonucleotide
gugcagaagcccaacugug

SEQ ID NO: 3140610 - RNA, 19 nt, Artificial Sequence
  Description of Artificial Sequence: Synthetic oligonucleotide
gucugggccauuccggguc

SEQ ID NO: 3140611 - RNA, 19 nt, Artificial Sequence
  Description of Artificial Sequence: Synthetic oligonucleotide
cuucaaccuccgcaccgcc

SEQ ID NO: 3140612 - RNA, 19 nt, Artificial Sequence
  Description of Artificial Sequence: Synthetic oligonucleotide
ccaacugugagaggucugg

SEQ ID NO: 3140613 - RNA, 19 nt, Artificial Sequence
  Description of Artificial Sequence: Synthetic oligonucleotide
caacugugagaggucuggg

SEQ ID NO: 3140614 - RNA, 19 nt, Artificial Sequence
  Description of Artificial Sequence: Synthetic oligonucleotide
ugggcugcagugguggcgu

SEQ ID NO: 3140615 - RNA, 19 nt, Artificial Sequence
  Description of Artificial Sequence: Synthetic oligonucleotide
agggcuucuucuacuaccu

SEQ ID NO: 3140616 - RNA, 19 nt, Artificial Sequence
  Description of Artificial Sequence: Synthetic oligonucleotide
agacgauuuucuugugcuu

SEQ ID NO: 3140617 - RNA, 19 nt, Artificial Sequence
  Description of Artificial Sequence: Synthetic oligonucleotide
ccgggucagaucuagaaga

SEQ ID NO: 3140618 - RNA, 19 nt, Artificial Sequence
  Description of Artificial Sequence: Synthetic oligonucleotide
gucucuccccacuucucac

SEQ ID NO: 3140619 - RNA, 19 nt, Artificial Sequence
  Description of Artificial Sequence: Synthetic oligonucleotide
ugugagaggucugggccau

SEQ ID NO: 3140620 - RNA, 19 nt, Artificial Sequence
  Description of Artificial Sequence: Synthetic oligonucleotide
cccuuggacuucaaccucc

SEQ ID NO: 3140621 - RNA, 19 nt, Artificial Sequence
  Description of Artificial Sequence: Synthetic oligonucleotide
uugccccuuggacuucaac

SEQ ID NO: 3140622 - RNA, 19 nt, Artificial Sequence
  Description of Artificial Sequence: Synthetic oligonucleotide
accggugcagaagcccaac

SEQ ID NO: 3140623 - RNA, 19 nt, Artificial Sequence
  Description of Artificial Sequence: Synthetic oligonucleotide
gggauuugccccuuggacu

SEQ ID NO: 3140624 - RNA, 19 nt, Artificial Sequence
  Description of Artificial Sequence: Synthetic oligonucleotide
gccauuccgggucagaucu

SEQ ID NO: 3140625 - RNA, 19 nt, Artificial Sequence
  Description of Artificial Sequence: Synthetic oligonucleotide
cagugguggcgucucuccc

SEQ ID NO: 3140626 - RNA, 19 nt, Artificial Sequence
  Description of Artificial Sequence: Synthetic oligonucleotide
cagaagcccaacugugaga

SEQ ID NO: 3140627 - RNA, 19 nt, Artificial Sequence
  Description of Artificial Sequence: Synthetic oligonucleotide
gcagugguggcgucucucc

SEQ ID NO: 3140628 - RNA, 19 nt, Artificial Sequence
  Description of Artificial Sequence: Synthetic oligonucleotide
gaucuagaagaagacgauu

SEQ ID NO: 3140629 - RNA, 19 nt, Artificial Sequence
  Description of Artificial Sequence: Synthetic oligonucleotide
cucccgcauguguuugggc

SEQ ID NO: 3140630 - RNA, 19 nt, Artificial Sequence
  Description of Artificial Sequence: Synthetic oligonucleotide
cauguguuugggcugcagu

SEQ ID NO: 3140631 - RNA, 19 nt, Artificial Sequence
  Description of Artificial Sequence: Synthetic oligonucleotide
ugcagugguggcgucucuc

SEQ ID NO: 3140632 - RNA, 19 nt, Artificial Sequence
  Description of Artificial Sequence: Synthetic oligonucleotide
auuugccccuuggacuuca

SEQ ID NO: 3140633 - RNA, 19 nt, Artificial Sequence
  Description of Artificial Sequence: Synthetic oligonucleotide
gggucagaucuagaagaag

SEQ ID NO: 3140634 - RNA, 19 nt, Artificial Sequence
  Description of Artificial Sequence: Synthetic oligonucleotide
accuccgcaccgccucccg

SEQ ID NO: 3140635 - RNA, 19 nt, Artificial Sequence
  Description of Artificial Sequence: Synthetic oligonucleotide
agcccaacugugagagguc

SEQ ID NO: 3140636 - RNA, 19 nt, Artificial Sequence
  Description of Artificial Sequence: Synthetic oligonucleotide
uccccacuucucacacaca

SEQ ID NO: 3140637 - RNA, 19 nt, Artificial Sequence
  Description of Artificial Sequence: Synthetic oligonucleotide
gugguggcgucucucccca

SEQ ID NO: 3140638 - RNA, 19 nt, Artificial Sequence
  Description of Artificial Sequence: Synthetic oligonucleotide
acacacauccagggcuucu

SEQ ID NO: 3140639 - RNA, 19 nt, Artificial Sequence
  Description of Artificial Sequence: Synthetic oligonucleotide
caaccuccgcaccgccucc

SEQ ID NO: 3140640 - RNA, 19 nt, Artificial Sequence
  Description of Artificial Sequence: Synthetic oligonucleotide
uggcgucucuccccacuuc

SEQ ID NO: 3140641 - RNA, 19 nt, Artificial Sequence
  Description of Artificial Sequence: Synthetic oligonucleotide
guguuugggcugcaguggu

SEQ ID NO: 3140642 - RNA, 19 nt, Artificial Sequence
  Description of Artificial Sequence: Synthetic oligonucleotide
uuugccccuuggacuucaa

SEQ ID NO: 3140643 - RNA, 19 nt, Artificial Sequence
  Description of Artificial Sequence: Synthetic oligonucleotide
cacauccagggcuucuucu

SEQ ID NO: 3140644 - RNA, 19 nt, Artificial Sequence
  Description of Artificial Sequence: Synthetic oligonucleotide
cuccgcaccgccucccgca

SEQ ID NO: 3140645 - RNA, 19 nt, Artificial Sequence
  Description of Artificial Sequence: Synthetic oligonucleotide
gauuugccccuuggacuuc

SEQ ID NO: 3140646 - RNA, 19 nt, Artificial Sequence
  Description of Artificial Sequence: Synthetic oligonucleotide
cccgcauguguuugggcug

SEQ ID NO: 3140647 - RNA, 19 nt, Artificial Sequence
  Description of Artificial Sequence: Synthetic oligonucleotide
ugggccauuccgggucaga

SEQ ID NO: 3140648 - RNA, 19 nt, Artificial Sequence
  Description of Artificial Sequence: Synthetic oligonucleotide
ggccauuccgggucagauc

SEQ ID NO: 3140649 - RNA, 19 nt, Artificial Sequence
  Description of Artificial Sequence: Synthetic oligonucleotide
gagcuggggauuugccccu

SEQ ID NO: 3140650 - RNA, 19 nt, Artificial Sequence
  Description of Artificial Sequence: Synthetic oligonucleotide
auuccgggucagaucuaga

SEQ ID NO: 3140651 - RNA, 19 nt, Artificial Sequence
  Description of Artificial Sequence: Synthetic oligonucleotide
cccacuucucacacacauc

SEQ ID NO: 3140652 - RNA, 19 nt, Artificial Sequence
  Description of Artificial Sequence: Synthetic oligonucleotide
accgccucccgcauguguu

SEQ ID NO: 3140653 - RNA, 19 nt, Artificial Sequence
  Description of Artificial Sequence: Synthetic oligonucleotide
cacacacauccagggcuuc

SEQ ID NO: 3140654 - RNA, 19 nt, Artificial Sequence
  Description of Artificial Sequence: Synthetic oligonucleotide
cccaacugugagaggucug

SEQ ID NO: 3140655 - RNA, 19 nt, Artificial Sequence
  Description of Artificial Sequence: Synthetic oligonucleotide
gcauguguuugggcugcag

SEQ ID NO: 3140656 - RNA, 19 nt, Artificial Sequence
  Description of Artificial Sequence: Synthetic oligonucleotide
ccucccgcauguguuuggg

SEQ ID NO: 3140657 - RNA, 19 nt, Artificial Sequence
  Description of Artificial Sequence: Synthetic oligonucleotide
ggcgucucuccccacuucu

SEQ ID NO: 3140658 - RNA, 19 nt, Artificial Sequence
  Description of Artificial Sequence: Synthetic oligonucleotide
ccgcauguguuugggcugc

SEQ ID NO: 3140659 - RNA, 19 nt, Artificial Sequence
  Description of Artificial Sequence: Synthetic oligonucleotide
gcaccggugcagaagccca

SEQ ID NO: 3140660 - RNA, 19 nt, Artificial Sequence
  Description of Artificial Sequence: Synthetic oligonucleotide
ccccuuggacuucaaccuc

SEQ ID NO: 3140661 - RNA, 19 nt, Artificial Sequence
  Description of Artificial Sequence: Synthetic oligonucleotide
gggcuucuucuacuaccuc

SEQ ID NO: 3140662 - RNA, 19 nt, Artificial Sequence
  Description of Artificial Sequence: Synthetic oligonucleotide
gcuggggauuugccccuug

SEQ ID NO: 3140663 - RNA, 19 nt, Artificial Sequence
  Description of Artificial Sequence: Synthetic oligonucleotide
ugguggcgucucuccccac

SEQ ID NO: 3140664 - RNA, 19 nt, Artificial Sequence
  Description of Artificial Sequence: Synthetic oligonucleotide
gguggcgucucuccccacu

SEQ ID NO: 3140665 - RNA, 19 nt, Artificial Sequence
  Description of Artificial Sequence: Synthetic oligonucleotide
caccggugcagaagcccaa

SEQ ID NO: 3140666 - RNA, 19 nt, Artificial Sequence
  Description of Artificial Sequence: Synthetic oligonucleotide
gugcuuagagcuggggauu

SEQ ID NO: 3140667 - RNA, 19 nt, Artificial Sequence
  Description of Artificial Sequence: Synthetic oligonucleotide
cugggccauuccgggucag

SEQ ID NO: 3140668 - RNA, 19 nt, Artificial Sequence
  Description of Artificial Sequence: Synthetic oligonucleotide
ccccacuucucacacacau

SEQ ID NO: 3140669 - RNA, 19 nt, Artificial Sequence
  Description of Artificial Sequence: Synthetic oligonucleotide
guggcgucucuccccacuu

SEQ ID NO: 3140670 - RNA, 19 nt, Artificial Sequence
  Description of Artificial Sequence: Synthetic oligonucleotide
ggucugggccauuccgggu

SEQ ID NO: 3140671 - RNA, 19 nt, Artificial Sequence
  Description of Artificial Sequence: Synthetic oligonucleotide
ccuccgcaccgccucccgc

SEQ ID NO: 3140672 - RNA, 19 nt, Artificial Sequence
  Description of Artificial Sequence: Synthetic oligonucleotide
gcccaacugugagaggucu

SEQ ID NO: 3140673 - RNA, 19 nt, Artificial Sequence
  Description of Artificial Sequence: Synthetic oligonucleotide
cacacauccagggcuucuu

SEQ ID NO: 3140674 - RNA, 19 nt, Artificial Sequence
  Description of Artificial Sequence: Synthetic oligonucleotide
caccgccucccgcaugugu

SEQ ID NO: 3140675 - RNA, 19 nt, Artificial Sequence
  Description of Artificial Sequence: Synthetic oligonucleotide
gcgucucuccccacuucuc

SEQ ID NO: 3140676 - RNA, 19 nt, Artificial Sequence
  Description of Artificial Sequence: Synthetic oligonucleotide
cgauuuucuugugcuuaga

SEQ ID NO: 3140677 - RNA, 19 nt, Artificial Sequence
  Description of Artificial Sequence: Synthetic oligonucleotide
gggccauuccgggucagau

SEQ ID NO: 3140678 - RNA, 19 nt, Artificial Sequence
  Description of Artificial Sequence: Synthetic oligonucleotide
cugcagugguggcgucucu

SEQ ID NO: 3140679 - RNA, 19 nt, Artificial Sequence
  Description of Artificial Sequence: Synthetic oligonucleotide
ggcugcagugguggcgucu

SEQ ID NO: 3140680 - RNA, 19 nt, Artificial Sequence
  Description of Artificial Sequence: Synthetic oligonucleotide
ccggugcagaagcccaacu

SEQ ID NO: 3140681 - RNA, 19 nt, Artificial Sequence
  Description of Artificial Sequence: Synthetic oligonucleotide
ccauuccgggucagaucua

SEQ ID NO: 3140682 - RNA, 19 nt, Artificial Sequence
  Description of Artificial Sequence: Synthetic oligonucleotide
cgcaccgccucccgcaugu

SEQ ID NO: 3140683 - RNA, 19 nt, Artificial Sequence
  Description of Artificial Sequence: Synthetic oligonucleotide
gcaccgccucccgcaugug

SEQ ID NO: 3140684 - RNA, 19 nt, Artificial Sequence
  Description of Artificial Sequence: Synthetic oligonucleotide
gugagaggucugggccauu

SEQ ID NO: 3140685 - RNA, 19 nt, Artificial Sequence
  Description of Artificial Sequence: Synthetic oligonucleotide
ccgccucccgcauguguuu

SEQ ID NO: 3140686 - RNA, 19 nt, Artificial Sequence
  Description of Artificial Sequence: Synthetic oligonucleotide
cgcauguguuugggcugca

SEQ ID NO: 3140687 - RNA, 19 nt, Artificial Sequence
  Description of Artificial Sequence: Synthetic oligonucleotide
acaaauacaaaauuuaccc

SEQ ID NO: 3140688 - RNA, 19 nt, Artificial Sequence
  Description of Artificial Sequence: Synthetic oligonucleotide
aaauacaaaauuuacccug

SEQ ID NO: 3140689 - RNA, 19 nt, Artificial Sequence
  Description of Artificial Sequence: Synthetic oligonucleotide
aacaaauacaaaauuuacc

SEQ ID NO: 3140690 - RNA, 19 nt, Artificial Sequence
  Description of Artificial Sequence: Synthetic oligonucleotide
aaccauggaauccugauuc

SEQ ID NO: 3140691 - RNA, 19 nt, Artificial Sequence
  Description of Artificial Sequence: Synthetic oligonucleotide
aaagcacagacaucgagac

SEQ ID NO: 3140692 - RNA, 19 nt, Artificial Sequence
  Description of Artificial Sequence: Synthetic oligonucleotide
aaaauuuacccuguggauc

SEQ ID NO: 3140693 - RNA, 19 nt, Artificial Sequence
  Description of Artificial Sequence: Synthetic oligonucleotide
uuuggauguucuaagaaug

SEQ ID NO: 3140694 - RNA, 19 nt, Artificial Sequence
  Description of Artificial Sequence: Synthetic oligonucleotide
aagaauggcacuucaaaca

SEQ ID NO: 3140695 - RNA, 19 nt, Artificial Sequence
  Description of Artificial Sequence: Synthetic oligonucleotide
aaauuuacccuguggauca

SEQ ID NO: 3140696 - RNA, 19 nt, Artificial Sequence
  Description of Artificial Sequence: Synthetic oligonucleotide
acaaaauuuacccugugga

SEQ ID NO: 3140697 - RNA, 19 nt, Artificial Sequence
  Description of Artificial Sequence: Synthetic oligonucleotide
uacaaaauuuacccugugg

SEQ ID NO: 3140698 - RNA, 19 nt, Artificial Sequence
  Description of Artificial Sequence: Synthetic oligonucleotide
uugaacucuaaccagccag

SEQ ID NO: 3140699 - RNA, 19 nt, Artificial Sequence
  Description of Artificial Sequence: Synthetic oligonucleotide
uggaucauggggaagcuag

SEQ ID NO: 3140700 - RNA, 19 nt, Artificial Sequence
  Description of Artificial Sequence: Synthetic oligonucleotide
uggcacuucaaacaaauac

SEQ ID NO: 3140701 - RNA, 19 nt, Artificial Sequence
  Description of Artificial Sequence: Synthetic oligonucleotide
uuuacccuguggaucaugg

SEQ ID NO: 3140702 - RNA, 19 nt, Artificial Sequence
  Description of Artificial Sequence: Synthetic oligonucleotide
acucugaccaaccuugaac

SEQ ID NO: 3140703 - RNA, 19 nt, Artificial Sequence
  Description of Artificial Sequence: Synthetic oligonucleotide
gagacugcuacccagacuc

SEQ ID NO: 3140704 - RNA, 19 nt, Artificial Sequence
  Description of Artificial Sequence: Synthetic oligonucleotide
uacccuguggaucaugggg

SEQ ID NO: 3140705 - RNA, 19 nt, Artificial Sequence
  Description of Artificial Sequence: Synthetic oligonucleotide
uuggauguucuaagaaugg

SEQ ID NO: 3140706 - RNA, 19 nt, Artificial Sequence
  Description of Artificial Sequence: Synthetic oligonucleotide
aaccuugaaccauggaauc

SEQ ID NO: 3140707 - RNA, 19 nt, Artificial Sequence
  Description of Artificial Sequence: Synthetic oligonucleotide
aacucuaaccagccaguac

SEQ ID NO: 3140708 - RNA, 19 nt, Artificial Sequence
  Description of Artificial Sequence: Synthetic oligonucleotide
uaagaauggcacuucaaac

SEQ ID NO: 3140709 - RNA, 19 nt, Artificial Sequence
  Description of Artificial Sequence: Synthetic oligonucleotide
acucuaaccagccaguacu

SEQ ID NO: 3140710 - RNA, 19 nt, Artificial Sequence
  Description of Artificial Sequence: Synthetic oligonucleotide
cucugaccaaccuugaacc

SEQ ID NO: 3140711 - RNA, 19 nt, Artificial Sequence
  Description of Artificial Sequence: Synthetic oligonucleotide
ucaguugaacucuaaccag

SEQ ID NO: 3140712 - RNA, 19 nt, Artificial Sequence
  Description of Artificial Sequence: Synthetic oligonucleotide
cagcaaagcacagacaucg

SEQ ID NO: 3140713 - RNA, 19 nt, Artificial Sequence
  Description of Artificial Sequence: Synthetic oligonucleotide
agcacagacaucgagacug

SEQ ID NO: 3140714 - RNA, 19 nt, Artificial Sequence
  Description of Artificial Sequence: Synthetic oligonucleotide
aaaguggagccagcaaagc

SEQ ID NO: 3140715 - RNA, 19 nt, Artificial Sequence
  Description of Artificial Sequence: Synthetic oligonucleotide
aauacaaaauuuacccugu

SEQ ID NO: 3140716 - RNA, 19 nt, Artificial Sequence
  Description of Artificial Sequence: Synthetic oligonucleotide
gauguucuaagaauggcac

SEQ ID NO: 3140717 - RNA, 19 nt, Artificial Sequence
  Description of Artificial Sequence: Synthetic oligonucleotide
caaacaaauacaaaauuua

SEQ ID NO: 3140718 - RNA, 19 nt, Artificial Sequence
  Description of Artificial Sequence: Synthetic oligonucleotide
aguugaacucuaaccagcc

SEQ ID NO: 3140719 - RNA, 19 nt, Artificial Sequence
  Description of Artificial Sequence: Synthetic oligonucleotide
aguggagccagcaaagcac

SEQ ID NO: 3140720 - RNA, 19 nt, Artificial Sequence
  Description of Artificial Sequence: Synthetic oligonucleotide
cucaguugaacucuaacca

SEQ ID NO: 3140721 - RNA, 19 nt, Artificial Sequence
  Description of Artificial Sequence: Synthetic oligonucleotide
aauccugauuccuuuggau

SEQ ID NO: 3140722 - RNA, 19 nt, Artificial Sequence
  Description of Artificial Sequence: Synthetic oligonucleotide
cagacucugaccaaccuug

SEQ ID NO: 3140723 - RNA, 19 nt, Artificial Sequence
  Description of Artificial Sequence: Synthetic oligonucleotide
uuccuuuggauguucuaag

SEQ ID NO: 3140724 - RNA, 19 nt, Artificial Sequence
  Description of Artificial Sequence: Synthetic oligonucleotide
uccugauuccuuuggaugu

SEQ ID NO: 3140725 - RNA, 19 nt, Artificial Sequence
  Description of Artificial Sequence: Synthetic oligonucleotide
aaguggagccagcaaagca

SEQ ID NO: 3140726 - RNA, 19 nt, Artificial Sequence
  Description of Artificial Sequence: Synthetic oligonucleotide
cagacaucgagacugcuac

SEQ ID NO: 3140727 - RNA, 19 nt, Artificial Sequence
  Description of Artificial Sequence: Synthetic oligonucleotide
aauggcacuucaaacaaau

SEQ ID NO: 3140728 - RNA, 19 nt, Artificial Sequence
  Description of Artificial Sequence: Synthetic oligonucleotide
caaaguggagccagcaaag

SEQ ID NO: 3140729 - RNA, 19 nt, Artificial Sequence
  Description of Artificial Sequence: Synthetic oligonucleotide
agaauggcacuucaaacaa

SEQ ID NO: 3140730 - RNA, 19 nt, Artificial Sequence
  Description of Artificial Sequence: Synthetic oligonucleotide
auccugauuccuuuggaug

SEQ ID NO: 3140731 - RNA, 19 nt, Artificial Sequence
  Description of Artificial Sequence: Synthetic oligonucleotide
caguugaacucuaaccagc

SEQ ID NO: 3140732 - RNA, 19 nt, Artificial Sequence
  Description of Artificial Sequence: Synthetic oligonucleotide
uaaccagccaguacuccag

SEQ ID NO: 3140733 - RNA, 19 nt, Artificial Sequence
  Description of Artificial Sequence: Synthetic oligonucleotide
uucuaagaauggcacuuca

SEQ ID NO: 3140734 - RNA, 19 nt, Artificial Sequence
  Description of Artificial Sequence: Synthetic oligonucleotide
ugaacucuaaccagccagu

SEQ ID NO: 3140735 - RNA, 19 nt, Artificial Sequence
  Description of Artificial Sequence: Synthetic oligonucleotide
accauggaauccugauucc

SEQ ID NO: 3140736 - RNA, 19 nt, Artificial Sequence
  Description of Artificial Sequence: Synthetic oligonucleotide
ugaccaaccuugaaccaug

SEQ ID NO: 3140737 - RNA, 19 nt, Artificial Sequence
  Description of Artificial Sequence: Synthetic oligonucleotide
gacaucgagacugcuaccc

SEQ ID NO: 3140738 - RNA, 19 nt, Artificial Sequence
  Description of Artificial Sequence: Synthetic oligonucleotide
agcacugcugggcaaagug

SEQ ID NO: 3140739 - RNA, 19 nt, Artificial Sequence
  Description of Artificial Sequence: Synthetic oligonucleotide
ucuaagaauggcacuucaa

SEQ ID NO: 3140740 - RNA, 19 nt, Artificial Sequence
  Description of Artificial Sequence: Synthetic oligonucleotide
ugaaccauggaauccugau

SEQ ID NO: 3140741 - RNA, 19 nt, Artificial Sequence
  Description of Artificial Sequence: Synthetic oligonucleotide
gagccagcaaagcacagac

SEQ ID NO: 3140742 - RNA, 19 nt, Artificial Sequence
  Description of Artificial Sequence: Synthetic oligonucleotide
uguucuaagaauggcacuu

SEQ ID NO: 3140743 - RNA, 19 nt, Artificial Sequence
  Description of Artificial Sequence: Synthetic oligonucleotide
accuugaaccauggaaucc

SEQ ID NO: 3140744 - RNA, 19 nt, Artificial Sequence
  Description of Artificial Sequence: Synthetic oligonucleotide
cuaagaauggcacuucaaa

SEQ ID NO: 3140745 - RNA, 19 nt, Artificial Sequence
  Description of Artificial Sequence: Synthetic oligonucleotide
ugcugggcaaaguggagcc

SEQ ID NO: 3140746 - RNA, 19 nt, Artificial Sequence
  Description of Artificial Sequence: Synthetic oligonucleotide
caaagcacagacaucgaga

SEQ ID NO: 3140747 - RNA, 19 nt, Artificial Sequence
  Description of Artificial Sequence: Synthetic oligonucleotide
uggauguucuaagaauggc

SEQ ID NO: 3140748 - RNA, 19 nt, Artificial Sequence
  Description of Artificial Sequence: Synthetic oligonucleotide
ccucaguugaacucuaacc

SEQ ID NO: 3140749 - RNA, 19 nt, Artificial Sequence
  Description of Artificial Sequence: Synthetic oligonucleotide
agacaucgagacugcuacc

SEQ ID NO: 3140750 - RNA, 19 nt, Artificial Sequence
  Description of Artificial Sequence: Synthetic oligonucleotide
uccuuuggauguucuaaga

SEQ ID NO: 3140751 - RNA, 19 nt, Artificial Sequence
  Description of Artificial Sequence: Synthetic oligonucleotide
auacaaaauuuacccugug

SEQ ID NO: 3140752 - RNA, 19 nt, Artificial Sequence
  Description of Artificial Sequence: Synthetic oligonucleotide
ggaauccugauuccuuugg

SEQ ID NO: 3140753 - RNA, 19 nt, Artificial Sequence
  Description of Artificial Sequence: Synthetic oligonucleotide
aucauggggaagcuagacu

SEQ ID NO: 3140754 - RNA, 19 nt, Artificial Sequence
  Description of Artificial Sequence: Synthetic oligonucleotide
uugaaccauggaauccuga

SEQ ID NO: 3140755 - RNA, 19 nt, Artificial Sequence
  Description of Artificial Sequence: Synthetic oligonucleotide
uuacccuguggaucauggg

SEQ ID NO: 3140756 - RNA, 19 nt, Artificial Sequence
  Description of Artificial Sequence: Synthetic oligonucleotide
caucgagacugcuacccag

SEQ ID NO: 3140757 - RNA, 19 nt, Artificial Sequence
  Description of Artificial Sequence: Synthetic oligonucleotide
ucugaccaaccuugaacca

SEQ ID NO: 3140758 - RNA, 19 nt, Artificial Sequence
  Description of Artificial Sequence: Synthetic oligonucleotide
ugauuccuuuggauguucu

SEQ ID NO: 3140759 - RNA, 19 nt, Artificial Sequence
  Description of Artificial Sequence: Synthetic oligonucleotide
auuccuuuggauguucuaa

SEQ ID NO: 3140760 - RNA, 19 nt, Artificial Sequence
  Description of Artificial Sequence: Synthetic oligonucleotide
auguucuaagaauggcacu

SEQ ID NO: 3140761 - RNA, 19 nt, Artificial Sequence
  Description of Artificial Sequence: Synthetic oligonucleotide
uggaauccugauuccuuug

SEQ ID NO: 3140762 - RNA, 19 nt, Artificial Sequence
  Description of Artificial Sequence: Synthetic oligonucleotide
gaauccugauuccuuugga

SEQ ID NO: 3140763 - RNA, 19 nt, Artificial Sequence
  Description of Artificial Sequence: Synthetic oligonucleotide
ggggaagcuagacucaccc

SEQ ID NO: 3140764 - RNA, 19 nt, Artificial Sequence
  Description of Artificial Sequence: Synthetic oligonucleotide
caaauacaaaauuuacccu

SEQ ID NO: 3140765 - RNA, 19 nt, Artificial Sequence
  Description of Artificial Sequence: Synthetic oligonucleotide
gcuacccagacucugacca

SEQ ID NO: 3140766 - RNA, 19 nt, Artificial Sequence
  Description of Artificial Sequence: Synthetic oligonucleotide
ucuaaccagccaguacucc

SEQ ID NO: 3140767 - RNA, 19 nt, Artificial Sequence
  Description of Artificial Sequence: Synthetic oligonucleotide
cuaaccagccaguacucca

SEQ ID NO: 3140768 - RNA, 19 nt, Artificial Sequence
  Description of Artificial Sequence: Synthetic oligonucleotide
ggcacuucaaacaaauaca

SEQ ID NO: 3140769 - RNA, 19 nt, Artificial Sequence
  Description of Artificial Sequence: Synthetic oligonucleotide
gaucauggggaagcuagac

SEQ ID NO: 3140770 - RNA, 19 nt, Artificial Sequence
  Description of Artificial Sequence: Synthetic oligonucleotide
gcaaagcacagacaucgag

SEQ ID NO: 3140771 - RNA, 19 nt, Artificial Sequence
  Description of Artificial Sequence: Synthetic oligonucleotide
aagcacagacaucgagacu

SEQ ID NO: 3140772 - RNA, 19 nt, Artificial Sequence
  Description of Artificial Sequence: Synthetic oligonucleotide
auggggaagcuagacucac

SEQ ID NO: 3140773 - RNA, 19 nt, Artificial Sequence
  Description of Artificial Sequence: Synthetic oligonucleotide
cuugaaccauggaauccug

SEQ ID NO: 3140774 - RNA, 19 nt, Artificial Sequence
  Description of Artificial Sequence: Synthetic oligonucleotide
ucgagacugcuacccagac

SEQ ID NO: 3140775 - RNA, 19 nt, Artificial Sequence
  Description of Artificial Sequence: Synthetic oligonucleotide
cuuuggauguucuaagaau

SEQ ID NO: 3140776 - RNA, 19 nt, Artificial Sequence
  Description of Artificial Sequence: Synthetic oligonucleotide
ugcuacccagacucugacc

SEQ ID NO: 3140777 - RNA, 19 nt, Artificial Sequence
  Description of Artificial Sequence: Synthetic oligonucleotide
caaccuugaaccauggaau

SEQ ID NO: 3140778 - RNA, 19 nt, Artificial Sequence
  Description of Artificial Sequence: Synthetic oligonucleotide
cucuaaccagccaguacuc

SEQ ID NO: 3140779 - RNA, 19 nt, Artificial Sequence
  Description of Artificial Sequence: Synthetic oligonucleotide
ggauguucuaagaauggca

SEQ ID NO: 3140780 - RNA, 19 nt, Artificial Sequence
  Description of Artificial Sequence: Synthetic oligonucleotide
uggggaagcuagacucacc

SEQ ID NO: 3140781 - RNA, 19 nt, Artificial Sequence
  Description of Artificial Sequence: Synthetic oligonucleotide
acaucgagacugcuaccca

SEQ ID NO: 3140782 - RNA, 19 nt, Artificial Sequence
  Description of Artificial Sequence: Synthetic oligonucleotide
cugggcaaaguggagccag

SEQ ID NO: 3140783 - RNA, 19 nt, Artificial Sequence
  Description of Artificial Sequence: Synthetic oligonucleotide
gcaaaguggagccagcaaa

SEQ ID NO: 3140784 - RNA, 19 nt, Artificial Sequence
  Description of Artificial Sequence: Synthetic oligonucleotide
uggagccagcaaagcacag

SEQ ID NO: 3140785 - RNA, 19 nt, Artificial Sequence
  Description of Artificial Sequence: Synthetic oligonucleotide
gaccaaccuugaaccaugg

SEQ ID NO: 3140786 - RNA, 19 nt, Artificial Sequence
  Description of Artificial Sequence: Synthetic oligonucleotide
caaaauuuacccuguggau

SEQ ID NO: 3140787 - RNA, 19 nt, Artificial Sequence
  Description of Artificial Sequence: Synthetic oligonucleotide
cacugcugggcaaagugga

SEQ ID NO: 3140788 - RNA, 19 nt, Artificial Sequence
  Description of Artificial Sequence: Synthetic oligonucleotide
ugggcaaaguggagccagc

SEQ ID NO: 3140789 - RNA, 19 nt, Artificial Sequence
  Description of Artificial Sequence: Synthetic oligonucleotide
guugaacucuaaccagcca

SEQ ID NO: 3140790 - RNA, 19 nt, Artificial Sequence
  Description of Artificial Sequence: Synthetic oligonucleotide
gauuccuuuggauguucua

SEQ ID NO: 3140791 - RNA, 19 nt, Artificial Sequence
  Description of Artificial Sequence: Synthetic oligonucleotide
gacugcuacccagacucug

SEQ ID NO: 3140792 - RNA, 19 nt, Artificial Sequence
  Description of Artificial Sequence: Synthetic oligonucleotide
acccagacucugaccaacc

SEQ ID NO: 3140793 - RNA, 19 nt, Artificial Sequence
  Description of Artificial Sequence: Synthetic oligonucleotide
ccaaccuugaaccauggaa

SEQ ID NO: 3140794 - RNA, 19 nt, Artificial Sequence
  Description of Artificial Sequence: Synthetic oligonucleotide
uguggaucauggggaagcu

SEQ ID NO: 3140795 - RNA, 19 nt, Artificial Sequence
  Description of Artificial Sequence: Synthetic oligonucleotide
uacccagacucugaccaac

SEQ ID NO: 3140796 - RNA, 19 nt, Artificial Sequence
  Description of Artificial Sequence: Synthetic oligonucleotide
cacuucaaacaaauacaaa

SEQ ID NO: 3140797 - RNA, 19 nt, Artificial Sequence
  Description of Artificial Sequence: Synthetic oligonucleotide
cauggggaagcuagacuca

SEQ ID NO: 3140798 - RNA, 19 nt, Artificial Sequence
  Description of Artificial Sequence: Synthetic oligonucleotide
guucuaagaauggcacuuc

SEQ ID NO: 3140799 - RNA, 19 nt, Artificial Sequence
  Description of Artificial Sequence: Synthetic oligonucleotide
auuuacccuguggaucaug

SEQ ID NO: 3140800 - RNA, 19 nt, Artificial Sequence
  Description of Artificial Sequence: Synthetic oligonucleotide
cugcuacccagacucugac

SEQ ID NO: 3140801 - RNA, 19 nt, Artificial Sequence
  Description of Artificial Sequence: Synthetic oligonucleotide
acugcuacccagacucuga

SEQ ID NO: 3140802 - RNA, 19 nt, Artificial Sequence
  Description of Artificial Sequence: Synthetic oligonucleotide
accaaccuugaaccaugga

SEQ ID NO: 3140803 - RNA, 19 nt, Artificial Sequence
  Description of Artificial Sequence: Synthetic oligonucleotide
gcacuucaaacaaauacaa

SEQ ID NO: 3140804 - RNA, 19 nt, Artificial Sequence
  Description of Artificial Sequence: Synthetic oligonucleotide
gccagcaaagcacagacau

SEQ ID NO: 3140805 - RNA, 19 nt, Artificial Sequence
  Description of Artificial Sequence: Synthetic oligonucleotide
acugcugggcaaaguggag

SEQ ID NO: 3140806 - RNA, 19 nt, Artificial Sequence
  Description of Artificial Sequence: Synthetic oligonucleotide
gacucugaccaaccuugaa

SEQ ID NO: 3140807 - RNA, 19 nt, Artificial Sequence
  Description of Artificial Sequence: Synthetic oligonucleotide
aucgagacugcuacccaga

SEQ ID NO: 3140808 - RNA, 19 nt, Artificial Sequence
  Description of Artificial Sequence: Synthetic oligonucleotide
gcacugcugggcaaagugg

SEQ ID NO: 3140809 - RNA, 19 nt, Artificial Sequence
  Description of Artificial Sequence: Synthetic oligonucleotide
gaaccauggaauccugauu

SEQ ID NO: 3140810 - RNA, 19 nt, Artificial Sequence
  Description of Artificial Sequence: Synthetic oligonucleotide
aauuuacccuguggaucau

SEQ ID NO: 3140811 - RNA, 19 nt, Artificial Sequence
  Description of Artificial Sequence: Synthetic oligonucleotide
acagacaucgagacugcua

SEQ ID NO: 3140812 - RNA, 19 nt, Artificial Sequence
  Description of Artificial Sequence: Synthetic oligonucleotide
gaauggcacuucaaacaaa

SEQ ID NO: 3140813 - RNA, 19 nt, Artificial Sequence
  Description of Artificial Sequence: Synthetic oligonucleotide
gggaagcuagacucacccc

SEQ ID NO: 3140814 - RNA, 19 nt, Artificial Sequence
  Description of Artificial Sequence: Synthetic oligonucleotide
guggagccagcaaagcaca

SEQ ID NO: 3140815 - RNA, 19 nt, Artificial Sequence
  Description of Artificial Sequence: Synthetic oligonucleotide
cugauuccuuuggauguuc

SEQ ID NO: 3140816 - RNA, 19 nt, Artificial Sequence
  Description of Artificial Sequence: Synthetic oligonucleotide
gaacucuaaccagccagua

SEQ ID NO: 3140817 - RNA, 19 nt, Artificial Sequence
  Description of Artificial Sequence: Synthetic oligonucleotide
cauggaauccugauuccuu

SEQ ID NO: 3140818 - RNA, 19 nt, Artificial Sequence
  Description of Artificial Sequence: Synthetic oligonucleotide
ccuuuggauguucuaagaa

SEQ ID NO: 3140819 - RNA, 19 nt, Artificial Sequence
  Description of Artificial Sequence: Synthetic oligonucleotide
cccucaguugaacucuaac

SEQ ID NO: 3140820 - RNA, 19 nt, Artificial Sequence
  Description of Artificial Sequence: Synthetic oligonucleotide
agcaaagcacagacaucga

SEQ ID NO: 3140821 - RNA, 19 nt, Artificial Sequence
  Description of Artificial Sequence: Synthetic oligonucleotide
agacucugaccaaccuuga

SEQ ID NO: 3140822 - RNA, 19 nt, Artificial Sequence
  Description of Artificial Sequence: Synthetic oligonucleotide
ggcaaaguggagccagcaa

SEQ ID NO: 3140823 - RNA, 19 nt, Artificial Sequence
  Description of Artificial Sequence: Synthetic oligonucleotide
cuacccagacucugaccaa

SEQ ID NO: 3140824 - RNA, 19 nt, Artificial Sequence
  Description of Artificial Sequence: Synthetic oligonucleotide
auggcacuucaaacaaaua

SEQ ID NO: 3140825 - RNA, 19 nt, Artificial Sequence
  Description of Artificial Sequence: Synthetic oligonucleotide
cugaccaaccuugaaccau

SEQ ID NO: 3140826 - RNA, 19 nt, Artificial Sequence
  Description of Artificial Sequence: Synthetic oligonucleotide
agacugcuacccagacucu

SEQ ID NO: 3140827 - RNA, 19 nt, Artificial Sequence
  Description of Artificial Sequence: Synthetic oligonucleotide
gcacagacaucgagacugc

SEQ ID NO: 3140828 - RNA, 19 nt, Artificial Sequence
  Description of Artificial Sequence: Synthetic oligonucleotide
ggaucauggggaagcuaga

SEQ ID NO: 3140829 - RNA, 19 nt, Artificial Sequence
  Description of Artificial Sequence: Synthetic oligonucleotide
ccuugaaccauggaauccu

SEQ ID NO: 3140830 - RNA, 19 nt, Artificial Sequence
  Description of Artificial Sequence: Synthetic oligonucleotide
gggcaaaguggagccagca

SEQ ID NO: 3140831 - RNA, 19 nt, Artificial Sequence
  Description of Artificial Sequence: Synthetic oligonucleotide
guggaucauggggaagcua

SEQ ID NO: 3140832 - RNA, 19 nt, Artificial Sequence
  Description of Artificial Sequence: Synthetic oligonucleotide
cacagacaucgagacugcu

SEQ ID NO: 3140833 - RNA, 19 nt, Artificial Sequence
  Description of Artificial Sequence: Synthetic oligonucleotide
cccuguggaucauggggaa

SEQ ID NO: 3140834 - RNA, 19 nt, Artificial Sequence
  Description of Artificial Sequence: Synthetic oligonucleotide
gcugggcaaaguggagcca

SEQ ID NO: 3140835 - RNA, 19 nt, Artificial Sequence
  Description of Artificial Sequence: Synthetic oligonucleotide
ccauggaauccugauuccu

SEQ ID NO: 3140836 - RNA, 19 nt, Artificial Sequence
  Description of Artificial Sequence: Synthetic oligonucleotide
ccagacucugaccaaccuu

SEQ ID NO: 3140837 - RNA, 19 nt, Artificial Sequence
  Description of Artificial Sequence: Synthetic oligonucleotide
ccccucaguugaacucuaa

SEQ ID NO: 3140838 - RNA, 19 nt, Artificial Sequence
  Description of Artificial Sequence: Synthetic oligonucleotide
cgagacugcuacccagacu

SEQ ID NO: 3140839 - RNA, 19 nt, Artificial Sequence
  Description of Artificial Sequence: Synthetic oligonucleotide
ccugauuccuuuggauguu

SEQ ID NO: 3140840 - RNA, 19 nt, Artificial Sequence
  Description of Artificial Sequence: Synthetic oligonucleotide
aaugacugcagcuuguuca

SEQ ID NO: 3140841 - RNA, 19 nt, Artificial Sequence
  Description of Artificial Sequence: Synthetic oligonucleotide
ucaagaaugcuucuaacug

SEQ ID NO: 3140842 - RNA, 19 nt, Artificial Sequence
  Description of Artificial Sequence: Synthetic oligonucleotide
caaaacuuggaaaugacug

SEQ ID NO: 3140843 - RNA, 19 nt, Artificial Sequence
  Description of Artificial Sequence: Synthetic oligonucleotide
aaugcuucuaacugguuga

SEQ ID NO: 3140844 - RNA, 19 nt, Artificial Sequence
  Description of Artificial Sequence: Synthetic oligonucleotide
aguccauugucccagcggc

SEQ ID NO: 3140845 - RNA, 19 nt, Artificial Sequence
  Description of Artificial Sequence: Synthetic oligonucleotide
ucggauucuugucuuaugg

SEQ ID NO: 3140846 - RNA, 19 nt, Artificial Sequence
  Description of Artificial Sequence: Synthetic oligonucleotide
ucuuccaaaacuuggaaau

SEQ ID NO: 3140847 - RNA, 19 nt, Artificial Sequence
  Description of Artificial Sequence: Synthetic oligonucleotide
acuuggaaaugacugcagc

SEQ ID NO: 3140848 - RNA, 19 nt, Artificial Sequence
  Description of Artificial Sequence: Synthetic oligonucleotide
caagaaugcuucuaacugg

SEQ ID NO: 3140849 - RNA, 19 nt, Artificial Sequence
  Description of Artificial Sequence: Synthetic oligonucleotide
gaaugcuucuaacugguug

SEQ ID NO: 3140850 - RNA, 19 nt, Artificial Sequence
  Description of Artificial Sequence: Synthetic oligonucleotide
uucuaacugguugaaaucc

SEQ ID NO: 3140851 - RNA, 19 nt, Artificial Sequence
  Description of Artificial Sequence: Synthetic oligonucleotide
ugucuuauggcucuuccaa

SEQ ID NO: 3140852 - RNA, 19 nt, Artificial Sequence
  Description of Artificial Sequence: Synthetic oligonucleotide
ucaacucuccagcucaggc

SEQ ID NO: 3140853 - RNA, 19 nt, Artificial Sequence
  Description of Artificial Sequence: Synthetic oligonucleotide
agucaagaaugcuucuaac

SEQ ID NO: 3140854 - RNA, 19 nt, Artificial Sequence
  Description of Artificial Sequence: Synthetic oligonucleotide
guucacaaggcucucucgg

SEQ ID NO: 3140855 - RNA, 19 nt, Artificial Sequence
  Description of Artificial Sequence: Synthetic oligonucleotide
uuauggcucuuccaaaacu

SEQ ID NO: 3140856 - RNA, 19 nt, Artificial Sequence
  Description of Artificial Sequence: Synthetic oligonucleotide
uggcucuuccaaaacuugg

SEQ ID NO: 3140857 - RNA, 19 nt, Artificial Sequence
  Description of Artificial Sequence: Synthetic oligonucleotide
ugagcagucaagaaugcuu

SEQ ID NO: 3140858 - RNA, 19 nt, Artificial Sequence
  Description of Artificial Sequence: Synthetic oligonucleotide
ucuaacugguugaaaucca

SEQ ID NO: 3140859 - RNA, 19 nt, Artificial Sequence
  Description of Artificial Sequence: Synthetic oligonucleotide
augacugcagcuuguucac

SEQ ID NO: 3140860 - RNA, 19 nt, Artificial Sequence
  Description of Artificial Sequence: Synthetic oligonucleotide
uuuggucugagcagucaag

SEQ ID NO: 3140861 - RNA, 19 nt, Artificial Sequence
  Description of Artificial Sequence: Synthetic oligonucleotide
uccaaaacuuggaaaugac

SEQ ID NO: 3140862 - RNA, 19 nt, Artificial Sequence
  Description of Artificial Sequence: Synthetic oligonucleotide
acaaggcucucucggauuc

SEQ ID NO: 3140863 - RNA, 19 nt, Artificial Sequence
  Description of Artificial Sequence: Synthetic oligonucleotide
ucuuauggcucuuccaaaa

SEQ ID NO: 3140864 - RNA, 19 nt, Artificial Sequence
  Description of Artificial Sequence: Synthetic oligonucleotide
uuccaaaacuuggaaauga

SEQ ID NO: 3140865 - RNA, 19 nt, Artificial Sequence
  Description of Artificial Sequence: Synthetic oligonucleotide
uauggcucuuccaaaacuu

SEQ ID NO: 3140866 - RNA, 19 nt, Artificial Sequence
  Description of Artificial Sequence: Synthetic oligonucleotide
cuugccgucaacucuccag

SEQ ID NO: 3140867 - RNA, 19 nt, Artificial Sequence
  Description of Artificial Sequence: Synthetic oligonucleotide
aagaaugcuucuaacuggu

SEQ ID NO: 3140868 - RNA, 19 nt, Artificial Sequence
  Description of Artificial Sequence: Synthetic oligonucleotide
gucugagcagucaagaaug

SEQ ID NO: 3140869 - RNA, 19 nt, Artificial Sequence
  Description of Artificial Sequence: Synthetic oligonucleotide
uugccgucaacucuccagc

SEQ ID NO: 3140870 - RNA, 19 nt, Artificial Sequence
  Description of Artificial Sequence: Synthetic oligonucleotide
uuuuggucugagcagucaa

SEQ ID NO: 3140871 - RNA, 19 nt, Artificial Sequence
  Description of Artificial Sequence: Synthetic oligonucleotide
auucuugucuuauggcucu

SEQ ID NO: 3140872 - RNA, 19 nt, Artificial Sequence
  Description of Artificial Sequence: Synthetic oligonucleotide
cuugucuuauggcucuucc

SEQ ID NO: 3140873 - RNA, 19 nt, Artificial Sequence
  Description of Artificial Sequence: Synthetic oligonucleotide
cuucuaacugguugaaauc

SEQ ID NO: 3140874 - RNA, 19 nt, Artificial Sequence
  Description of Artificial Sequence: Synthetic oligonucleotide
ucugagcagucaagaaugc

SEQ ID NO: 3140875 - RNA, 19 nt, Artificial Sequence
  Description of Artificial Sequence: Synthetic oligonucleotide
uugacugagacuugccguc

SEQ ID NO: 3140876 - RNA, 19 nt, Artificial Sequence
  Description of Artificial Sequence: Synthetic oligonucleotide
uuguucacaggugaugcca

SEQ ID NO: 3140877 - RNA, 19 nt, Artificial Sequence
  Description of Artificial Sequence: Synthetic oligonucleotide
uguucacaggugaugccac

SEQ ID NO: 3140878 - RNA, 19 nt, Artificial Sequence
  Description of Artificial Sequence: Synthetic oligonucleotide
cuuauggcucuuccaaaac

SEQ ID NO: 3140879 - RNA, 19 nt, Artificial Sequence
  Description of Artificial Sequence: Synthetic oligonucleotide
ugagacuugccgucaacuc

SEQ ID NO: 3140880 - RNA, 19 nt, Artificial Sequence
  Description of Artificial Sequence: Synthetic oligonucleotide
uucacaaggcucucucgga

SEQ ID NO: 3140881 - RNA, 19 nt, Artificial Sequence
  Description of Artificial Sequence: Synthetic oligonucleotide
uugucuuauggcucuucca

SEQ ID NO: 3140882 - RNA, 19 nt, Artificial Sequence
  Description of Artificial Sequence: Synthetic oligonucleotide
aacuuggaaaugacugcag

SEQ ID NO: 3140883 - RNA, 19 nt, Artificial Sequence
  Description of Artificial Sequence: Synthetic oligonucleotide
cuuguucacaggugaugcc

SEQ ID NO: 3140884 - RNA, 19 nt, Artificial Sequence
  Description of Artificial Sequence: Synthetic oligonucleotide
acugagacuugccgucaac

SEQ ID NO: 3140885 - RNA, 19 nt, Artificial Sequence
  Description of Artificial Sequence: Synthetic oligonucleotide
uuggaaaugacugcagcuu

SEQ ID NO: 3140886 - RNA, 19 nt, Artificial Sequence
  Description of Artificial Sequence: Synthetic oligonucleotide
uuggucugagcagucaaga

SEQ ID NO: 3140887 - RNA, 19 nt, Artificial Sequence
  Description of Artificial Sequence: Synthetic oligonucleotide
ugguucacaaggcucucuc

SEQ ID NO: 3140888 - RNA, 19 nt, Artificial Sequence
  Description of Artificial Sequence: Synthetic oligonucleotide
gucaagaaugcuucuaacu

SEQ ID NO: 3140889 - RNA, 19 nt, Artificial Sequence
  Description of Artificial Sequence: Synthetic oligonucleotide
caguccauugucccagcgg

SEQ ID NO: 3140890 - RNA, 19 nt, Artificial Sequence
  Description of Artificial Sequence: Synthetic oligonucleotide
gagcagucaagaaugcuuc

SEQ ID NO: 3140891 - RNA, 19 nt, Artificial Sequence
  Description of Artificial Sequence: Synthetic oligonucleotide
gcggcucugguucacaagg

SEQ ID NO: 3140892 - RNA, 19 nt, Artificial Sequence
  Description of Artificial Sequence: Synthetic oligonucleotide
ucacaaggcucucucggau

SEQ ID NO: 3140893 - RNA, 19 nt, Artificial Sequence
  Description of Artificial Sequence: Synthetic oligonucleotide
cuuccaaaacuuggaaaug

SEQ ID NO: 3140894 - RNA, 19 nt, Artificial Sequence
  Description of Artificial Sequence: Synthetic oligonucleotide
uucacaggugaugccaccu

SEQ ID NO: 3140895 - RNA, 19 nt, Artificial Sequence
  Description of Artificial Sequence: Synthetic oligonucleotide
cuuggaaaugacugcagcu

SEQ ID NO: 3140896 - RNA, 19 nt, Artificial Sequence
  Description of Artificial Sequence: Synthetic oligonucleotide
gguucacaaggcucucucg

SEQ ID NO: 3140897 - RNA, 19 nt, Artificial Sequence
  Description of Artificial Sequence: Synthetic oligonucleotide
cucuuccaaaacuuggaaa

SEQ ID NO: 3140898 - RNA, 19 nt, Artificial Sequence
  Description of Artificial Sequence: Synthetic oligonucleotide
ugccuugacugagacuugc

SEQ ID NO: 3140899 - RNA, 19 nt, Artificial Sequence
  Description of Artificial Sequence: Synthetic oligonucleotide
ccuugacugagacuugccg

SEQ ID NO: 3140900 - RNA, 19 nt, Artificial Sequence
  Description of Artificial Sequence: Synthetic oligonucleotide
uggucugagcagucaagaa

SEQ ID NO: 3140901 - RNA, 19 nt, Artificial Sequence
  Description of Artificial Sequence: Synthetic oligonucleotide
agcuuguucacaggugaug

SEQ ID NO: 3140902 - RNA, 19 nt, Artificial Sequence
  Description of Artificial Sequence: Synthetic oligonucleotide
ggauucuugucuuauggcu

SEQ ID NO: 3140903 - RNA, 19 nt, Artificial Sequence
  Description of Artificial Sequence: Synthetic oligonucleotide
gucccagcggcucugguuc

SEQ ID NO: 3140904 - RNA, 19 nt, Artificial Sequence
  Description of Artificial Sequence: Synthetic oligonucleotide
cuugacugagacuugccgu

SEQ ID NO: 3140905 - RNA, 19 nt, Artificial Sequence
  Description of Artificial Sequence: Synthetic oligonucleotide
agcagucaagaaugcuucu

SEQ ID NO: 3140906 - RNA, 19 nt, Artificial Sequence
  Description of Artificial Sequence: Synthetic oligonucleotide
cacaggugaugccaccuug

SEQ ID NO: 3140907 - RNA, 19 nt, Artificial Sequence
  Description of Artificial Sequence: Synthetic oligonucleotide
cucggauucuugucuuaug

SEQ ID NO: 3140908 - RNA, 19 nt, Artificial Sequence
  Description of Artificial Sequence: Synthetic oligonucleotide
uccauugucccagcggcuc

SEQ ID NO: 3140909 - RNA, 19 nt, Artificial Sequence
  Description of Artificial Sequence: Synthetic oligonucleotide
guucacaggugaugccacc

SEQ ID NO: 3140910 - RNA, 19 nt, Artificial Sequence
  Description of Artificial Sequence: Synthetic oligonucleotide
gcagcuuguucacagguga

SEQ ID NO: 3140911 - RNA, 19 nt, Artificial Sequence
  Description of Artificial Sequence: Synthetic oligonucleotide
ucucucggauucuugucuu

SEQ ID NO: 3140912 - RNA, 19 nt, Artificial Sequence
  Description of Artificial Sequence: Synthetic oligonucleotide
cagucaagaaugcuucuaa

SEQ ID NO: 3140913 - RNA, 19 nt, Artificial Sequence
  Description of Artificial Sequence: Synthetic oligonucleotide
agcucaggccccgcagucc

SEQ ID NO: 3140914 - RNA, 19 nt, Artificial Sequence
  Description of Artificial Sequence: Synthetic oligonucleotide
ucucggauucuugucuuau

SEQ ID NO: 3140915 - RNA, 19 nt, Artificial Sequence
  Description of Artificial Sequence: Synthetic oligonucleotide
agcggcucugguucacaag

SEQ ID NO: 3140916 - RNA, 19 nt, Artificial Sequence
  Description of Artificial Sequence: Synthetic oligonucleotide
auggcucuuccaaaacuug

SEQ ID NO: 3140917 - RNA, 19 nt, Artificial Sequence
  Description of Artificial Sequence: Synthetic oligonucleotide
gcuucuaacugguugaaau

SEQ ID NO: 3140918 - RNA, 19 nt, Artificial Sequence
  Description of Artificial Sequence: Synthetic oligonucleotide
ugacugagacuugccguca

SEQ ID NO: 3140919 - RNA, 19 nt, Artificial Sequence
  Description of Artificial Sequence: Synthetic oligonucleotide
ucacaggugaugccaccuu

SEQ ID NO: 3140920 - RNA, 19 nt, Artificial Sequence
  Description of Artificial Sequence: Synthetic oligonucleotide
aggugaugccaccuuguuu

SEQ ID NO: 3140921 - RNA, 19 nt, Artificial Sequence
  Description of Artificial Sequence: Synthetic oligonucleotide
gucuuauggcucuuccaaa

SEQ ID NO: 3140922 - RNA, 19 nt, Artificial Sequence
  Description of Artificial Sequence: Synthetic oligonucleotide
cucugguucacaaggcucu

SEQ ID NO: 3140923 - RNA, 19 nt, Artificial Sequence
  Description of Artificial Sequence: Synthetic oligonucleotide
gucaacucuccagcucagg

SEQ ID NO: 3140924 - RNA, 19 nt, Artificial Sequence
  Description of Artificial Sequence: Synthetic oligonucleotide
ucuugucuuauggcucuuc

SEQ ID NO: 3140925 - RNA, 19 nt, Artificial Sequence
  Description of Artificial Sequence: Synthetic oligonucleotide
ugccgucaacucuccagcu

SEQ ID NO: 3140926 - RNA, 19 nt, Artificial Sequence
  Description of Artificial Sequence: Synthetic oligonucleotide
ugucccagcggcucugguu

SEQ ID NO: 3140927 - RNA, 19 nt, Artificial Sequence
  Description of Artificial Sequence: Synthetic oligonucleotide
auugucccagcggcucugg

SEQ ID NO: 3140928 - RNA, 19 nt, Artificial Sequence
  Description of Artificial Sequence: Synthetic oligonucleotide
acaggugaugccaccuugu

SEQ ID NO: 3140929 - RNA, 19 nt, Artificial Sequence
  Description of Artificial Sequence: Synthetic oligonucleotide
ugcuucuaacugguugaaa

SEQ ID NO: 3140930 - RNA, 19 nt, Artificial Sequence
  Description of Artificial Sequence: Synthetic oligonucleotide
cuaacugguugaaauccau

SEQ ID NO: 3140931 - RNA, 19 nt, Artificial Sequence
  Description of Artificial Sequence: Synthetic oligonucleotide
aaggcucucucggauucuu

SEQ ID NO: 3140932 - RNA, 19 nt, Artificial Sequence
  Description of Artificial Sequence: Synthetic oligonucleotide
ucugguucacaaggcucuc

SEQ ID NO: 3140933 - RNA, 19 nt, Artificial Sequence
  Description of Artificial Sequence: Synthetic oligonucleotide
cucucucggauucuugucu

SEQ ID NO: 3140934 - RNA, 19 nt, Artificial Sequence
  Description of Artificial Sequence: Synthetic oligonucleotide
gcaguccauugucccagcg

SEQ ID NO: 3140935 - RNA, 19 nt, Artificial Sequence
  Description of Artificial Sequence: Synthetic oligonucleotide
ggucugagcagucaagaau

SEQ ID NO: 3140936 - RNA, 19 nt, Artificial Sequence
  Description of Artificial Sequence: Synthetic oligonucleotide
acucuccagcucaggcccc

SEQ ID NO: 3140937 - RNA, 19 nt, Artificial Sequence
  Description of Artificial Sequence: Synthetic oligonucleotide
gacuugccgucaacucucc

SEQ ID NO: 3140938 - RNA, 19 nt, Artificial Sequence
  Description of Artificial Sequence: Synthetic oligonucleotide
ugacugcagcuuguucaca

SEQ ID NO: 3140939 - RNA, 19 nt, Artificial Sequence
  Description of Artificial Sequence: Synthetic oligonucleotide
gacugagacuugccgucaa

SEQ ID NO: 3140940 - RNA, 19 nt, Artificial Sequence
  Description of Artificial Sequence: Synthetic oligonucleotide
acuugccgucaacucucca

SEQ ID NO: 3140941 - RNA, 19 nt, Artificial Sequence
  Description of Artificial Sequence: Synthetic oligonucleotide
cucuccagcucaggccccg

SEQ ID NO: 3140942 - RNA, 19 nt, Artificial Sequence
  Description of Artificial Sequence: Synthetic oligonucleotide
cauugucccagcggcucug

SEQ ID NO: 3140943 - RNA, 19 nt, Artificial Sequence
  Description of Artificial Sequence: Synthetic oligonucleotide
uugucccagcggcucuggu

SEQ ID NO: 3140944 - RNA, 19 nt, Artificial Sequence
  Description of Artificial Sequence: Synthetic oligonucleotide
augcuucuaacugguugaa

SEQ ID NO: 3140945 - RNA, 19 nt, Artificial Sequence
  Description of Artificial Sequence: Synthetic oligonucleotide
gaaaugacugcagcuuguu

SEQ ID NO: 3140946 - RNA, 19 nt, Artificial Sequence
  Description of Artificial Sequence: Synthetic oligonucleotide
ccaaaacuuggaaaugacu

SEQ ID NO: 3140947 - RNA, 19 nt, Artificial Sequence
  Description of Artificial Sequence: Synthetic oligonucleotide
ccgucaacucuccagcuca

SEQ ID NO: 3140948 - RNA, 19 nt, Artificial Sequence
  Description of Artificial Sequence: Synthetic oligonucleotide
gcucugguucacaaggcuc

SEQ ID NO: 3140949 - RNA, 19 nt, Artificial Sequence
  Description of Artificial Sequence: Synthetic oligonucleotide
cagcucaggccccgcaguc

SEQ ID NO: 3140950 - RNA, 19 nt, Artificial Sequence
  Description of Artificial Sequence: Synthetic oligonucleotide
caggccccgcaguccauug

SEQ ID NO: 3140951 - RNA, 19 nt, Artificial Sequence
  Description of Artificial Sequence: Synthetic oligonucleotide
gcucucucggauucuuguc

SEQ ID NO: 3140952 - RNA, 19 nt, Artificial Sequence
  Description of Artificial Sequence: Synthetic oligonucleotide
cugagacuugccgucaacu

SEQ ID NO: 3140953 - RNA, 19 nt, Artificial Sequence
  Description of Artificial Sequence: Synthetic oligonucleotide
ucccagcggcucugguuca

SEQ ID NO: 3140954 - RNA, 19 nt, Artificial Sequence
  Description of Artificial Sequence: Synthetic oligonucleotide
ccccgcaguccauuguccc

SEQ ID NO: 3140955 - RNA, 19 nt, Artificial Sequence
  Description of Artificial Sequence: Synthetic oligonucleotide
ggcucucucggauucuugu

SEQ ID NO: 3140956 - RNA, 19 nt, Artificial Sequence
  Description of Artificial Sequence: Synthetic oligonucleotide
aggccccgcaguccauugu

SEQ ID NO: 3140957 - RNA, 19 nt, Artificial Sequence
  Description of Artificial Sequence: Synthetic oligonucleotide
agaaugcuucuaacugguu

SEQ ID NO: 3140958 - RNA, 19 nt, Artificial Sequence
  Description of Artificial Sequence: Synthetic oligonucleotide
gccgucaacucuccagcuc

SEQ ID NO: 3140959 - RNA, 19 nt, Artificial Sequence
  Description of Artificial Sequence: Synthetic oligonucleotide
gcucaggccccgcagucca

SEQ ID NO: 3140960 - RNA, 19 nt, Artificial Sequence
  Description of Artificial Sequence: Synthetic oligonucleotide
uucuugucuuauggcucuu

SEQ ID NO: 3140961 - RNA, 19 nt, Artificial Sequence
  Description of Artificial Sequence: Synthetic oligonucleotide
ggccccgcaguccauuguc

SEQ ID NO: 3140962 - RNA, 19 nt, Artificial Sequence
  Description of Artificial Sequence: Synthetic oligonucleotide
aggcucucucggauucuug

SEQ ID NO: 3140963 - RNA, 19 nt, Artificial Sequence
  Description of Artificial Sequence: Synthetic oligonucleotide
ucaggccccgcaguccauu

SEQ ID NO: 3140964 - RNA, 19 nt, Artificial Sequence
  Description of Artificial Sequence: Synthetic oligonucleotide
gugccuugacugagacuug

SEQ ID NO: 3140965 - RNA, 19 nt, Artificial Sequence
  Description of Artificial Sequence: Synthetic oligonucleotide
cucucggauucuugucuua

SEQ ID NO: 3140966 - RNA, 19 nt, Artificial Sequence
  Description of Artificial Sequence: Synthetic oligonucleotide
ccgcaguccauugucccag

SEQ ID NO: 3140967 - RNA, 19 nt, Artificial Sequence
  Description of Artificial Sequence: Synthetic oligonucleotide
gcagucaagaaugcuucua

SEQ ID NO: 3140968 - RNA, 19 nt, Artificial Sequence
  Description of Artificial Sequence: Synthetic oligonucleotide
gccuugacugagacuugcc

SEQ ID NO: 3140969 - RNA, 19 nt, Artificial Sequence
  Description of Artificial Sequence: Synthetic oligonucleotide
cugagcagucaagaaugcu

SEQ ID NO: 3140970 - RNA, 19 nt, Artificial Sequence
  Description of Artificial Sequence: Synthetic oligonucleotide
cagcggcucugguucacaa

SEQ ID NO: 3140971 - RNA, 19 nt, Artificial Sequence
  Description of Artificial Sequence: Synthetic oligonucleotide
cacaaggcucucucggauu

SEQ ID NO: 3140972 - RNA, 19 nt, Artificial Sequence
  Description of Artificial Sequence: Synthetic oligonucleotide
cggcucugguucacaaggc

SEQ ID NO: 3140973 - RNA, 19 nt, Artificial Sequence
  Description of Artificial Sequence: Synthetic oligonucleotide
cagcuuguucacaggugau

SEQ ID NO: 3140974 - RNA, 19 nt, Artificial Sequence
  Description of Artificial Sequence: Synthetic oligonucleotide
gccccgcaguccauugucc

SEQ ID NO: 3140975 - RNA, 19 nt, Artificial Sequence
  Description of Artificial Sequence: Synthetic oligonucleotide
caggugaugccaccuuguu

SEQ ID NO: 3140976 - RNA, 19 nt, Artificial Sequence
  Description of Artificial Sequence: Synthetic oligonucleotide
cccgcaguccauuguccca

SEQ ID NO: 3140977 - RNA, 19 nt, Artificial Sequence
  Description of Artificial Sequence: Synthetic oligonucleotide
cugguucacaaggcucucu

SEQ ID NO: 3140978 - RNA, 19 nt, Artificial Sequence
  Description of Artificial Sequence: Synthetic oligonucleotide
guccauugucccagcggcu

SEQ ID NO: 3140979 - RNA, 19 nt, Artificial Sequence
  Description of Artificial Sequence: Synthetic oligonucleotide
caaggcucucucggauucu

SEQ ID NO: 3140980 - RNA, 19 nt, Artificial Sequence
  Description of Artificial Sequence: Synthetic oligonucleotide
ccagcucaggccccgcagu

SEQ ID NO: 3140981 - RNA, 19 nt, Artificial Sequence
  Description of Artificial Sequence: Synthetic oligonucleotide
ccauugucccagcggcucu

SEQ ID NO: 3140982 - RNA, 19 nt, Artificial Sequence
  Description of Artificial Sequence: Synthetic oligonucleotide
ccagcggcucugguucaca

SEQ ID NO: 3140983 - RNA, 19 nt, Artificial Sequence
  Description of Artificial Sequence: Synthetic oligonucleotide
cucaggccccgcaguccau

SEQ ID NO: 3140984 - RNA, 19 nt, Artificial Sequence
  Description of Artificial Sequence: Synthetic oligonucleotide
uacacacacacacacacac

SEQ ID NO: 3140985 - RNA, 19 nt, Artificial Sequence
  Description of Artificial Sequence: Synthetic oligonucleotide
cacacacacacacagacac

SEQ ID NO: 3140986 - RNA, 19 nt, Artificial Sequence
  Description of Artificial Sequence: Synthetic oligonucleotide
cuggccuuggaacucaugg

SEQ ID NO: 3140987 - RNA, 19 nt, Artificial Sequence
  Description of Artificial Sequence: Synthetic oligonucleotide
acugccuggcuacacacac

SEQ ID NO: 3140988 - RNA, 19 nt, Artificial Sequence
  Description of Artificial Sequence: Synthetic oligonucleotide
cacacacacacacacacag

SEQ ID NO: 3140989 - RNA, 19 nt, Artificial Sequence
  Description of Artificial Sequence: Synthetic oligonucleotide
aacucauggagaucuggcu

SEQ ID NO: 3140990 - RNA, 19 nt, Artificial Sequence
  Description of Artificial Sequence: Synthetic oligonucleotide
auggagaucuggcugcuuc

SEQ ID NO: 3140991 - RNA, 19 nt, Artificial Sequence
  Description of Artificial Sequence: Synthetic oligonucleotide
cacacacacacacacagac

SEQ ID NO: 3140992 - RNA, 19 nt, Artificial Sequence
  Description of Artificial Sequence: Synthetic oligonucleotide
cacacacacacacacacac

SEQ ID NO: 3140993 - RNA, 19 nt, Artificial Sequence
  Description of Artificial Sequence: Synthetic oligonucleotide
acucauggagaucuggcug

SEQ ID NO: 3140994 - RNA, 19 nt, Artificial Sequence
  Description of Artificial Sequence: Synthetic oligonucleotide
cucauggagaucuggcugc

SEQ ID NO: 3140995 - RNA, 19 nt, Artificial Sequence
  Description of Artificial Sequence: Synthetic oligonucleotide
auugaaggugugugccacc

SEQ ID NO: 3140996 - RNA, 19 nt, Artificial Sequence
  Description of Artificial Sequence: Synthetic oligonucleotide
agaucuggcugcuucuguc

SEQ ID NO: 3140997 - RNA, 19 nt, Artificial Sequence
  Description of Artificial Sequence: Synthetic oligonucleotide
cacacacacagacacacac

SEQ ID NO: 3140998 - RNA, 19 nt, Artificial Sequence
  Description of Artificial Sequence: Synthetic oligonucleotide
uggcuacacacacacacac

SEQ ID NO: 3140999 - RNA, 19 nt, Artificial Sequence
  Description of Artificial Sequence: Synthetic oligonucleotide
ugccuggcuacacacacac

SEQ ID NO: 3141000 - RNA, 19 nt, Artificial Sequence
  Description of Artificial Sequence: Synthetic oligonucleotide
gaacucauggagaucuggc

SEQ ID NO: 3141001 - RNA, 19 nt, Artificial Sequence
  Description of Artificial Sequence: Synthetic oligonucleotide
gcuacacacacacacacac

SEQ ID NO: 3141002 - RNA, 19 nt, Artificial Sequence
  Description of Artificial Sequence: Synthetic oligonucleotide
cacacacacacagacacac

SEQ ID NO: 3141003 - RNA, 19 nt, Artificial Sequence
  Description of Artificial Sequence: Synthetic oligonucleotide
gauugaaggugugugccac

SEQ ID NO: 3141004 - RNA, 19 nt, Artificial Sequence
  Description of Artificial Sequence: Synthetic oligonucleotide
ccuggcuacacacacacac

SEQ ID NO: 3141005 - RNA, 19 nt, Artificial Sequence
  Description of Artificial Sequence: Synthetic oligonucleotide
ggccuuggaacucauggag

SEQ ID NO: 3141006 - RNA, 19 nt, Artificial Sequence
  Description of Artificial Sequence: Synthetic oligonucleotide
uugaaggugugugccacca

SEQ ID NO: 3141007 - RNA, 19 nt, Artificial Sequence
  Description of Artificial Sequence: Synthetic oligonucleotide
uggccuuggaacucaugga

SEQ ID NO: 3141008 - RNA, 19 nt, Artificial Sequence
  Description of Artificial Sequence: Synthetic oligonucleotide
cuggcugcuucugucuucc

SEQ ID NO: 3141009 - RNA, 19 nt, Artificial Sequence
  Description of Artificial Sequence: Synthetic oligonucleotide
ugucuuccaagugcuggga

SEQ ID NO: 3141010 - RNA, 19 nt, Artificial Sequence
  Description of Artificial Sequence: Synthetic oligonucleotide
accacugccuggcuacaca

SEQ ID NO: 3141011 - RNA, 19 nt, Artificial Sequence
  Description of Artificial Sequence: Synthetic oligonucleotide
ugaaggugugugccaccac

SEQ ID NO: 3141012 - RNA, 19 nt, Artificial Sequence
  Description of Artificial Sequence: Synthetic oligonucleotide
cuacacacacacacacaca

SEQ ID NO: 3141013 - RNA, 19 nt, Artificial Sequence
  Description of Artificial Sequence: Synthetic oligonucleotide
cuggcuacacacacacaca

SEQ ID NO: 3141014 - RNA, 19 nt, Artificial Sequence
  Description of Artificial Sequence: Synthetic oligonucleotide
gaucuggcugcuucugucu

SEQ ID NO: 3141015 - RNA, 19 nt, Artificial Sequence
  Description of Artificial Sequence: Synthetic oligonucleotide
cuuggaacucauggagauc

SEQ ID NO: 3141016 - RNA, 19 nt, Artificial Sequence
  Description of Artificial Sequence: Synthetic oligonucleotide
ucauggagaucuggcugcu

SEQ ID NO: 3141017 - RNA, 19 nt, Artificial Sequence
  Description of Artificial Sequence: Synthetic oligonucleotide
acacacacacacacagaca

SEQ ID NO: 3141018 - RNA, 19 nt, Artificial Sequence
  Description of Artificial Sequence: Synthetic oligonucleotide
acacacacacacacacaca

SEQ ID NO: 3141019 - RNA, 19 nt, Artificial Sequence
  Description of Artificial Sequence: Synthetic oligonucleotide
acacacacacacacacaga

SEQ ID NO: 3141020 - RNA, 19 nt, Artificial Sequence
  Description of Artificial Sequence: Synthetic oligonucleotide
acacacacacacagacaca

SEQ ID NO: 3141021 - RNA, 19 nt, Artificial Sequence
  Description of Artificial Sequence: Synthetic oligonucleotide
acacacacacagacacaca

SEQ ID NO: 3141022 - RNA, 19 nt, Artificial Sequence
  Description of Artificial Sequence: Synthetic oligonucleotide
ccacugccuggcuacacac

SEQ ID NO: 3141023 - RNA, 19 nt, Artificial Sequence
  Description of Artificial Sequence: Synthetic oligonucleotide
cacugccuggcuacacaca

SEQ ID NO: 3141024 - RNA, 19 nt, Artificial Sequence
  Description of Artificial Sequence: Synthetic oligonucleotide
ggcugcuucugucuuccaa

SEQ ID NO: 3141025 - RNA, 19 nt, Artificial Sequence
  Description of Artificial Sequence: Synthetic oligonucleotide
gccuuggaacucauggaga

SEQ ID NO: 3141026 - RNA, 19 nt, Artificial Sequence
  Description of Artificial Sequence: Synthetic oligonucleotide
uggcugcuucugucuucca

SEQ ID NO: 3141027 - RNA, 19 nt, Artificial Sequence
  Description of Artificial Sequence: Synthetic oligonucleotide
ggcuacacacacacacaca

SEQ ID NO: 3141028 - RNA, 19 nt, Artificial Sequence
  Description of Artificial Sequence: Synthetic oligonucleotide
gucuuccaagugcugggau

SEQ ID NO: 3141029 - RNA, 19 nt, Artificial Sequence
  Description of Artificial Sequence: Synthetic oligonucleotide
ccuuggaacucauggagau

SEQ ID NO: 3141030 - RNA, 19 nt, Artificial Sequence
  Description of Artificial Sequence: Synthetic oligonucleotide
gccuggcuacacacacaca

SEQ ID NO: 3141031 - RNA, 19 nt, Artificial Sequence
  Description of Artificial Sequence: Synthetic oligonucleotide
cauggagaucuggcugcuu

SEQ ID NO: 3141032 - RNA, 19 nt, Artificial Sequence
  Description of Artificial Sequence: Synthetic oligonucleotide
uuaaaaguaguuaaugagg

SEQ ID NO: 3141033 - RNA, 19 nt, Artificial Sequence
  Description of Artificial Sequence: Synthetic oligonucleotide
uuuaaaaguaguuaaugag

SEQ ID NO: 3141034 - RNA, 19 nt, Artificial Sequence
  Description of Artificial Sequence: Synthetic oligonucleotide
uaaaaguaguuaaugaggc

SEQ ID NO: 3141035 - RNA, 19 nt, Artificial Sequence
  Description of Artificial Sequence: Synthetic oligonucleotide
aauuuaaaaguaguuaaug

SEQ ID NO: 3141036 - RNA, 19 nt, Artificial Sequence
  Description of Artificial Sequence: Synthetic oligonucleotide
gaaauuuaaaaguaguuaa

SEQ ID NO: 3141037 - RNA, 19 nt, Artificial Sequence
  Description of Artificial Sequence: Synthetic oligonucleotide
auuuaaaaguaguuaauga

SEQ ID NO: 3141038 - RNA, 19 nt, Artificial Sequence
  Description of Artificial Sequence: Synthetic oligonucleotide
aguuaaugaggcugggugg

SEQ ID NO: 3141039 - RNA, 19 nt, Artificial Sequence
  Description of Artificial Sequence: Synthetic oligonucleotide
aaaaguaguuaaugaggcu

SEQ ID NO: 3141040 - RNA, 19 nt, Artificial Sequence
  Description of Artificial Sequence: Synthetic oligonucleotide
aaguaguuaaugaggcugg

SEQ ID NO: 3141041 - RNA, 19 nt, Artificial Sequence
  Description of Artificial Sequence: Synthetic oligonucleotide
uggaaauuuaaaaguaguu

SEQ ID NO: 3141042 - RNA, 19 nt, Artificial Sequence
  Description of Artificial Sequence: Synthetic oligonucleotide
aaauuuaaaaguaguuaau

SEQ ID NO: 3141043 - RNA, 19 nt, Artificial Sequence
  Description of Artificial Sequence: Synthetic oligonucleotide
augccuuugaucccagcac

SEQ ID NO: 3141044 - RNA, 19 nt, Artificial Sequence
  Description of Artificial Sequence: Synthetic oligonucleotide
cuguagaucucugaguuug

SEQ ID NO: 3141045 - RNA, 19 nt, Artificial Sequence
  Description of Artificial Sequence: Synthetic oligonucleotide
uaaugaggcuggguggugg

SEQ ID NO: 3141046 - RNA, 19 nt, Artificial Sequence
  Description of Artificial Sequence: Synthetic oligonucleotide
aggccuguagaucucugag

SEQ ID NO: 3141047 - RNA, 19 nt, Artificial Sequence
  Description of Artificial Sequence: Synthetic oligonucleotide
ggaaauuuaaaaguaguua

SEQ ID NO: 3141048 - RNA, 19 nt, Artificial Sequence
  Description of Artificial Sequence: Synthetic oligonucleotide
uguagaucucugaguuuga

SEQ ID NO: 3141049 - RNA, 19 nt, Artificial Sequence
  Description of Artificial Sequence: Synthetic oligonucleotide
aguaguuaaugaggcuggg

SEQ ID NO: 3141050 - RNA, 19 nt, Artificial Sequence
  Description of Artificial Sequence: Synthetic oligonucleotide
cuggaaauuuaaaaguagu

SEQ ID NO: 3141051 - RNA, 19 nt, Artificial Sequence
  Description of Artificial Sequence: Synthetic oligonucleotide
uacacagcgaagcccuguc

SEQ ID NO: 3141052 - RNA, 19 nt, Artificial Sequence
  Description of Artificial Sequence: Synthetic oligonucleotide
ggcuguuacacagcgaagc

SEQ ID NO: 3141053 - RNA, 19 nt, Artificial Sequence
  Description of Artificial Sequence: Synthetic oligonucleotide
guagaucucugaguuugag

SEQ ID NO: 3141054 - RNA, 19 nt, Artificial Sequence
  Description of Artificial Sequence: Synthetic oligonucleotide
uuaaugaggcuggguggug

SEQ ID NO: 3141055 - RNA, 19 nt, Artificial Sequence
  Description of Artificial Sequence: Synthetic oligonucleotide
uuacacagcgaagcccugu

SEQ ID NO: 3141056 - RNA, 19 nt, Artificial Sequence
  Description of Artificial Sequence: Synthetic oligonucleotide
gaggccuguagaucucuga

SEQ ID NO: 3141057 - RNA, 19 nt, Artificial Sequence
  Description of Artificial Sequence: Synthetic oligonucleotide
guuaaugaggcuggguggu

SEQ ID NO: 3141058 - RNA, 19 nt, Artificial Sequence
  Description of Artificial Sequence: Synthetic oligonucleotide
acacagcgaagcccugucu

SEQ ID NO: 3141059 - RNA, 19 nt, Artificial Sequence
  Description of Artificial Sequence: Synthetic oligonucleotide
agcgaagcccugucucaaa

SEQ ID NO: 3141060 - RNA, 19 nt, Artificial Sequence
  Description of Artificial Sequence: Synthetic oligonucleotide
guaguuaaugaggcugggu

SEQ ID NO: 3141061 - RNA, 19 nt, Artificial Sequence
  Description of Artificial Sequence: Synthetic oligonucleotide
cucgggaggcagaggccug

SEQ ID NO: 3141062 - RNA, 19 nt, Artificial Sequence
  Description of Artificial Sequence: Synthetic oligonucleotide
agaggccuguagaucucug

SEQ ID NO: 3141063 - RNA, 19 nt, Artificial Sequence
  Description of Artificial Sequence: Synthetic oligonucleotide
gccuguagaucucugaguu

SEQ ID NO: 3141064 - RNA, 19 nt, Artificial Sequence
  Description of Artificial Sequence: Synthetic oligonucleotide
ucgggaggcagaggccugu

SEQ ID NO: 3141065 - RNA, 19 nt, Artificial Sequence
  Description of Artificial Sequence: Synthetic oligonucleotide
gggaggcagaggccuguag

SEQ ID NO: 3141066 - RNA, 19 nt, Artificial Sequence
  Description of Artificial Sequence: Synthetic oligonucleotide
gcgaagcccugucucaaaa

SEQ ID NO: 3141067 - RNA, 19 nt, Artificial Sequence
  Description of Artificial Sequence: Synthetic oligonucleotide
ggccuguagaucucugagu

SEQ ID NO: 3141068 - RNA, 19 nt, Artificial Sequence
  Description of Artificial Sequence: Synthetic oligonucleotide
gaggcuggguggugguggu

SEQ ID NO: 3141069 - RNA, 19 nt, Artificial Sequence
  Description of Artificial Sequence: Synthetic oligonucleotide
cagcgaagcccugucucaa

SEQ ID NO: 3141070 - RNA, 19 nt, Artificial Sequence
  Description of Artificial Sequence: Synthetic oligonucleotide
cagaggccuguagaucucu

SEQ ID NO: 3141071 - RNA, 19 nt, Artificial Sequence
  Description of Artificial Sequence: Synthetic oligonucleotide
ccuguagaucucugaguuu

SEQ ID NO: 3141072 - RNA, 19 nt, Artificial Sequence
  Description of Artificial Sequence: Synthetic oligonucleotide
aaggaguuacacuaggucc

SEQ ID NO: 3141073 - RNA, 19 nt, Artificial Sequence
  Description of Artificial Sequence: Synthetic oligonucleotide
gaaauucuaacucaauugc

SEQ ID NO: 3141074 - RNA, 19 nt, Artificial Sequence
  Description of Artificial Sequence: Synthetic oligonucleotide
uaacucaauugcaaggacg

SEQ ID NO: 3141075 - RNA, 19 nt, Artificial Sequence
  Description of Artificial Sequence: Synthetic oligonucleotide
acuagguccaaguuaaaag

SEQ ID NO: 3141076 - RNA, 19 nt, Artificial Sequence
  Description of Artificial Sequence: Synthetic oligonucleotide
uucuaacucaauugcaagg

SEQ ID NO: 3141077 - RNA, 19 nt, Artificial Sequence
  Description of Artificial Sequence: Synthetic oligonucleotide
aacucaauugcaaggacgg

SEQ ID NO: 3141078 - RNA, 19 nt, Artificial Sequence
  Description of Artificial Sequence: Synthetic oligonucleotide
cuagguccaaguuaaaagc

SEQ ID NO: 3141079 - RNA, 19 nt, Artificial Sequence
  Description of Artificial Sequence: Synthetic oligonucleotide
uuauacaagcuguugaggu

SEQ ID NO: 3141080 - RNA, 19 nt, Artificial Sequence
  Description of Artificial Sequence: Synthetic oligonucleotide
uagguccaaguuaaaagcg

SEQ ID NO: 3141081 - RNA, 19 nt, Artificial Sequence
  Description of Artificial Sequence: Synthetic oligonucleotide
uacacuagguccaaguuaa

SEQ ID NO: 3141082 - RNA, 19 nt, Artificial Sequence
  Description of Artificial Sequence: Synthetic oligonucleotide
ucaauugcaaggacggagc

SEQ ID NO: 3141083 - RNA, 19 nt, Artificial Sequence
  Description of Artificial Sequence: Synthetic oligonucleotide
cauuauacaagcuguugag

SEQ ID NO: 3141084 - RNA, 19 nt, Artificial Sequence
  Description of Artificial Sequence: Synthetic oligonucleotide
acauuauacaagcuguuga

SEQ ID NO: 3141085 - RNA, 19 nt, Artificial Sequence
  Description of Artificial Sequence: Synthetic oligonucleotide
auucuaacucaauugcaag

SEQ ID NO: 3141086 - RNA, 19 nt, Artificial Sequence
  Description of Artificial Sequence: Synthetic oligonucleotide
ucuaacucaauugcaagga

SEQ ID NO: 3141087 - RNA, 19 nt, Artificial Sequence
  Description of Artificial Sequence: Synthetic oligonucleotide
auugcaaggacggagcguc

SEQ ID NO: 3141088 - RNA, 19 nt, Artificial Sequence
  Description of Artificial Sequence: Synthetic oligonucleotide
aauucuaacucaauugcaa

SEQ ID NO: 3141089 - RNA, 19 nt, Artificial Sequence
  Description of Artificial Sequence: Synthetic oligonucleotide
auuauacaagcuguugagg

SEQ ID NO: 3141090 - RNA, 19 nt, Artificial Sequence
  Description of Artificial Sequence: Synthetic oligonucleotide
gaaggaguuacacuagguc

SEQ ID NO: 3141091 - RNA, 19 nt, Artificial Sequence
  Description of Artificial Sequence: Synthetic oligonucleotide
aguuacacuagguccaagu

SEQ ID NO: 3141092 - RNA, 19 nt, Artificial Sequence
  Description of Artificial Sequence: Synthetic oligonucleotide
aaauucuaacucaauugca

SEQ ID NO: 3141093 - RNA, 19 nt, Artificial Sequence
  Description of Artificial Sequence: Synthetic oligonucleotide
uuacacuagguccaaguua

SEQ ID NO: 3141094 - RNA, 19 nt, Artificial Sequence
  Description of Artificial Sequence: Synthetic oligonucleotide
cucaauugcaaggacggag

SEQ ID NO: 3141095 - RNA, 19 nt, Artificial Sequence
  Description of Artificial Sequence: Synthetic oligonucleotide
gaggggaaauucuaacuca

SEQ ID NO: 3141096 - RNA, 19 nt, Artificial Sequence
  Description of Artificial Sequence: Synthetic oligonucleotide
aggaggggaaauucuaacu

SEQ ID NO: 3141097 - RNA, 19 nt, Artificial Sequence
  Description of Artificial Sequence: Synthetic oligonucleotide
caauugcaaggacggagcg

SEQ ID NO: 3141098 - RNA, 19 nt, Artificial Sequence
  Description of Artificial Sequence: Synthetic oligonucleotide
uauacaagcuguugagguu

SEQ ID NO: 3141099 - RNA, 19 nt, Artificial Sequence
  Description of Artificial Sequence: Synthetic oligonucleotide
cuaacucaauugcaaggac

SEQ ID NO: 3141100 - RNA, 19 nt, Artificial Sequence
  Description of Artificial Sequence: Synthetic oligonucleotide
agguccaaguuaaaagcgg

SEQ ID NO: 3141101 - RNA, 19 nt, Artificial Sequence
  Description of Artificial Sequence: Synthetic oligonucleotide
aauugcaaggacggagcgu

SEQ ID NO: 3141102 - RNA, 19 nt, Artificial Sequence
  Description of Artificial Sequence: Synthetic oligonucleotide
ggaggggaaauucuaacuc

SEQ ID NO: 3141103 - RNA, 19 nt, Artificial Sequence
  Description of Artificial Sequence: Synthetic oligonucleotide
ugcaaggacggagcgucgg

SEQ ID NO: 3141104 - RNA, 19 nt, Artificial Sequence
  Description of Artificial Sequence: Synthetic oligonucleotide
auacaagcuguugagguuu

SEQ ID NO: 3141105 - RNA, 19 nt, Artificial Sequence
  Description of Artificial Sequence: Synthetic oligonucleotide
aaggacggagcgucgggaa

SEQ ID NO: 3141106 - RNA, 19 nt, Artificial Sequence
  Description of Artificial Sequence: Synthetic oligonucleotide
uugcaaggacggagcgucg

SEQ ID NO: 3141107 - RNA, 19 nt, Artificial Sequence
  Description of Artificial Sequence: Synthetic oligonucleotide
aggggaaauucuaacucaa

SEQ ID NO: 3141108 - RNA, 19 nt, Artificial Sequence
  Description of Artificial Sequence: Synthetic oligonucleotide
gacaggaggggaaauucua

SEQ ID NO: 3141109 - RNA, 19 nt, Artificial Sequence
  Description of Artificial Sequence: Synthetic oligonucleotide
uacaagcuguugagguuuu

SEQ ID NO: 3141110 - RNA, 19 nt, Artificial Sequence
  Description of Artificial Sequence: Synthetic oligonucleotide
guuacacuagguccaaguu

SEQ ID NO: 3141111 - RNA, 19 nt, Artificial Sequence
  Description of Artificial Sequence: Synthetic oligonucleotide
acaggaggggaaauucuaa

SEQ ID NO: 3141112 - RNA, 19 nt, Artificial Sequence
  Description of Artificial Sequence: Synthetic oligonucleotide
gaguuacacuagguccaag

SEQ ID NO: 3141113 - RNA, 19 nt, Artificial Sequence
  Description of Artificial Sequence: Synthetic oligonucleotide
gggaaauucuaacucaauu

SEQ ID NO: 3141114 - RNA, 19 nt, Artificial Sequence
  Description of Artificial Sequence: Synthetic oligonucleotide
gcaaggacggagcgucggg

SEQ ID NO: 3141115 - RNA, 19 nt, Artificial Sequence
  Description of Artificial Sequence: Synthetic oligonucleotide
acucaauugcaaggacgga

SEQ ID NO: 3141116 - RNA, 19 nt, Artificial Sequence
  Description of Artificial Sequence: Synthetic oligonucleotide
cacuagguccaaguuaaaa

SEQ ID NO: 3141117 - RNA, 19 nt, Artificial Sequence
  Description of Artificial Sequence: Synthetic oligonucleotide
gggacaggaggggaaauuc

SEQ ID NO: 3141118 - RNA, 19 nt, Artificial Sequence
  Description of Artificial Sequence: Synthetic oligonucleotide
gagcgucgggaagcggagg

SEQ ID NO: 3141119 - RNA, 19 nt, Artificial Sequence
  Description of Artificial Sequence: Synthetic oligonucleotide
agggacaggaggggaaauu

SEQ ID NO: 3141120 - RNA, 19 nt, Artificial Sequence
  Description of Artificial Sequence: Synthetic oligonucleotide
ggagcgucgggaagcggag

SEQ ID NO: 3141121 - RNA, 19 nt, Artificial Sequence
  Description of Artificial Sequence: Synthetic oligonucleotide
caaggacggagcgucggga

SEQ ID NO: 3141122 - RNA, 19 nt, Artificial Sequence
  Description of Artificial Sequence: Synthetic oligonucleotide
ggaguuacacuagguccaa

SEQ ID NO: 3141123 - RNA, 19 nt, Artificial Sequence
  Description of Artificial Sequence: Synthetic oligonucleotide
ggacaggaggggaaauucu

SEQ ID NO: 3141124 - RNA, 19 nt, Artificial Sequence
  Description of Artificial Sequence: Synthetic oligonucleotide
acacuagguccaaguuaaa

SEQ ID NO: 3141125 - RNA, 19 nt, Artificial Sequence
  Description of Artificial Sequence: Synthetic oligonucleotide
ggggaaauucuaacucaau

SEQ ID NO: 3141126 - RNA, 19 nt, Artificial Sequence
  Description of Artificial Sequence: Synthetic oligonucleotide
auuuacuggagaauuagcc

SEQ ID NO: 3141127 - RNA, 19 nt, Artificial Sequence
  Description of Artificial Sequence: Synthetic oligonucleotide
ugugauauauuuacuggag

SEQ ID NO: 3141128 - RNA, 19 nt, Artificial Sequence
  Description of Artificial Sequence: Synthetic oligonucleotide
ugauauauuuacuggagaa

SEQ ID NO: 3141129 - RNA, 19 nt, Artificial Sequence
  Description of Artificial Sequence: Synthetic oligonucleotide
uuuacuggagaauuagcca

SEQ ID NO: 3141130 - RNA, 19 nt, Artificial Sequence
  Description of Artificial Sequence: Synthetic oligonucleotide
uuucuuacuguuuugcuuc

SEQ ID NO: 3141131 - RNA, 19 nt, Artificial Sequence
  Description of Artificial Sequence: Synthetic oligonucleotide
ucucugaaugucaacacac

SEQ ID NO: 3141132 - RNA, 19 nt, Artificial Sequence
  Description of Artificial Sequence: Synthetic oligonucleotide
uauuuacuggagaauuagc

SEQ ID NO: 3141133 - RNA, 19 nt, Artificial Sequence
  Description of Artificial Sequence: Synthetic oligonucleotide
uguuuugcuucuuugaguu

SEQ ID NO: 3141134 - RNA, 19 nt, Artificial Sequence
  Description of Artificial Sequence: Synthetic oligonucleotide
auauuuacuggagaauuag

SEQ ID NO: 3141135 - RNA, 19 nt, Artificial Sequence
  Description of Artificial Sequence: Synthetic oligonucleotide
uuacuggagaauuagccau

SEQ ID NO: 3141136 - RNA, 19 nt, Artificial Sequence
  Description of Artificial Sequence: Synthetic oligonucleotide
uauauuuacuggagaauua

SEQ ID NO: 3141137 - RNA, 19 nt, Artificial Sequence
  Description of Artificial Sequence: Synthetic oligonucleotide
cacccugugauauauuuac

SEQ ID NO: 3141138 - RNA, 19 nt, Artificial Sequence
  Description of Artificial Sequence: Synthetic oligonucleotide
uuuugcuucuuugaguuuc

SEQ ID NO: 3141139 - RNA, 19 nt, Artificial Sequence
  Description of Artificial Sequence: Synthetic oligonucleotide
auauauuuacuggagaauu

SEQ ID NO: 3141140 - RNA, 19 nt, Artificial Sequence
  Description of Artificial Sequence: Synthetic oligonucleotide
aaugcacaaagcccucuga

SEQ ID NO: 3141141 - RNA, 19 nt, Artificial Sequence
  Description of Artificial Sequence: Synthetic oligonucleotide
uuacuguuuugcuucuuug

SEQ ID NO: 3141142 - RNA, 19 nt, Artificial Sequence
  Description of Artificial Sequence: Synthetic oligonucleotide
acaucucugaaugucaaca

SEQ ID NO: 3141143 - RNA, 19 nt, Artificial Sequence
  Description of Artificial Sequence: Synthetic oligonucleotide
ugucaacacacccugugau

SEQ ID NO: 3141144 - RNA, 19 nt, Artificial Sequence
  Description of Artificial Sequence: Synthetic oligonucleotide
ccugugauauauuuacugg

SEQ ID NO: 3141145 - RNA, 19 nt, Artificial Sequence
  Description of Artificial Sequence: Synthetic oligonucleotide
ugcacugcuacaucucuga

SEQ ID NO: 3141146 - RNA, 19 nt, Artificial Sequence
  Description of Artificial Sequence: Synthetic oligonucleotide
augcacaaagcccucugag

SEQ ID NO: 3141147 - RNA, 19 nt, Artificial Sequence
  Description of Artificial Sequence: Synthetic oligonucleotide
cucugaaugucaacacacc

SEQ ID NO: 3141148 - RNA, 19 nt, Artificial Sequence
  Description of Artificial Sequence: Synthetic oligonucleotide
uccuucugggagaagugca

SEQ ID NO: 3141149 - RNA, 19 nt, Artificial Sequence
  Description of Artificial Sequence: Synthetic oligonucleotide
cugugauauauuuacugga

SEQ ID NO: 3141150 - RNA, 19 nt, Artificial Sequence
  Description of Artificial Sequence: Synthetic oligonucleotide
ucaacacacccugugauau

SEQ ID NO: 3141151 - RNA, 19 nt, Artificial Sequence
  Description of Artificial Sequence: Synthetic oligonucleotide
aacacacccugugauauau

SEQ ID NO: 3141152 - RNA, 19 nt, Artificial Sequence
  Description of Artificial Sequence: Synthetic oligonucleotide
gugauauauuuacuggaga

SEQ ID NO: 3141153 - RNA, 19 nt, Artificial Sequence
  Description of Artificial Sequence: Synthetic oligonucleotide
uuugcuucuuugaguuucu

SEQ ID NO: 3141154 - RNA, 19 nt, Artificial Sequence
  Description of Artificial Sequence: Synthetic oligonucleotide
agugcacugcuacaucucu

SEQ ID NO: 3141155 - RNA, 19 nt, Artificial Sequence
  Description of Artificial Sequence: Synthetic oligonucleotide
ucugagcagaguccaggca

SEQ ID NO: 3141156 - RNA, 19 nt, Artificial Sequence
  Description of Artificial Sequence: Synthetic oligonucleotide
caucaaugcacaaagcccu

SEQ ID NO: 3141157 - RNA, 19 nt, Artificial Sequence
  Description of Artificial Sequence: Synthetic oligonucleotide
aguccaggcauugccacuc

SEQ ID NO: 3141158 - RNA, 19 nt, Artificial Sequence
  Description of Artificial Sequence: Synthetic oligonucleotide
aagugcacugcuacaucuc

SEQ ID NO: 3141159 - RNA, 19 nt, Artificial Sequence
  Description of Artificial Sequence: Synthetic oligonucleotide
gaagugcacugcuacaucu

SEQ ID NO: 3141160 - RNA, 19 nt, Artificial Sequence
  Description of Artificial Sequence: Synthetic oligonucleotide
uacaucucugaaugucaac

SEQ ID NO: 3141161 - RNA, 19 nt, Artificial Sequence
  Description of Artificial Sequence: Synthetic oligonucleotide
gauauauuuacuggagaau

SEQ ID NO: 3141162 - RNA, 19 nt, Artificial Sequence
  Description of Artificial Sequence: Synthetic oligonucleotide
uucuuacuguuuugcuucu

SEQ ID NO: 3141163 - RNA, 19 nt, Artificial Sequence
  Description of Artificial Sequence: Synthetic oligonucleotide
cacaagaccagguugcugu

SEQ ID NO: 3141164 - RNA, 19 nt, Artificial Sequence
  Description of Artificial Sequence: Synthetic oligonucleotide
caaugcacaaagcccucug

SEQ ID NO: 3141165 - RNA, 19 nt, Artificial Sequence
  Description of Artificial Sequence: Synthetic oligonucleotide
gcagaguccaggcauugcc

SEQ ID NO: 3141166 - RNA, 19 nt, Artificial Sequence
  Description of Artificial Sequence: Synthetic oligonucleotide
agcagaguccaggcauugc

SEQ ID NO: 3141167 - RNA, 19 nt, Artificial Sequence
  Description of Artificial Sequence: Synthetic oligonucleotide
ucaaugcacaaagcccucu

SEQ ID NO: 3141168 - RNA, 19 nt, Artificial Sequence
  Description of Artificial Sequence: Synthetic oligonucleotide
aucaaugcacaaagcccuc

SEQ ID NO: 3141169 - RNA, 19 nt, Artificial Sequence
  Description of Artificial Sequence: Synthetic oligonucleotide
ugagcagaguccaggcauu

SEQ ID NO: 3141170 - RNA, 19 nt, Artificial Sequence
  Description of Artificial Sequence: Synthetic oligonucleotide
ccauuucuuacuguuuugc

SEQ ID NO: 3141171 - RNA, 19 nt, Artificial Sequence
  Description of Artificial Sequence: Synthetic oligonucleotide
cuacaucucugaaugucaa

SEQ ID NO: 3141172 - RNA, 19 nt, Artificial Sequence
  Description of Artificial Sequence: Synthetic oligonucleotide
cauuucuuacuguuuugcu

SEQ ID NO: 3141173 - RNA, 19 nt, Artificial Sequence
  Description of Artificial Sequence: Synthetic oligonucleotide
uccaggcauugccacuccu

SEQ ID NO: 3141174 - RNA, 19 nt, Artificial Sequence
  Description of Artificial Sequence: Synthetic oligonucleotide
gagaagugcacugcuacau

SEQ ID NO: 3141175 - RNA, 19 nt, Artificial Sequence
  Description of Artificial Sequence: Synthetic oligonucleotide
ccaacaucacaucaaugca

SEQ ID NO: 3141176 - RNA, 19 nt, Artificial Sequence
  Description of Artificial Sequence: Synthetic oligonucleotide
gucaacacacccugugaua

SEQ ID NO: 3141177 - RNA, 19 nt, Artificial Sequence
  Description of Artificial Sequence: Synthetic oligonucleotide
ggagaagugcacugcuaca

SEQ ID NO: 3141178 - RNA, 19 nt, Artificial Sequence
  Description of Artificial Sequence: Synthetic oligonucleotide
cugagcagaguccaggcau

SEQ ID NO: 3141179 - RNA, 19 nt, Artificial Sequence
  Description of Artificial Sequence: Synthetic oligonucleotide
acaagaccagguugcugua

SEQ ID NO: 3141180 - RNA, 19 nt, Artificial Sequence
  Description of Artificial Sequence: Synthetic oligonucleotide
agaccagguugcuguaauu

SEQ ID NO: 3141181 - RNA, 19 nt, Artificial Sequence
  Description of Artificial Sequence: Synthetic oligonucleotide
cuuacuguuuugcuucuuu

SEQ ID NO: 3141182 - RNA, 19 nt, Artificial Sequence
  Description of Artificial Sequence: Synthetic oligonucleotide
gugcacugcuacaucucug

SEQ ID NO: 3141183 - RNA, 19 nt, Artificial Sequence
  Description of Artificial Sequence: Synthetic oligonucleotide
cacacccugugauauauuu

SEQ ID NO: 3141184 - RNA, 19 nt, Artificial Sequence
  Description of Artificial Sequence: Synthetic oligonucleotide
ucuuacuguuuugcuucuu

SEQ ID NO: 3141185 - RNA, 19 nt, Artificial Sequence
  Description of Artificial Sequence: Synthetic oligonucleotide
acacccugugauauauuua

SEQ ID NO: 3141186 - RNA, 19 nt, Artificial Sequence
  Description of Artificial Sequence: Synthetic oligonucleotide
guccaggcauugccacucc

SEQ ID NO: 3141187 - RNA, 19 nt, Artificial Sequence
  Description of Artificial Sequence: Synthetic oligonucleotide
cacugcuacaucucugaau

SEQ ID NO: 3141188 - RNA, 19 nt, Artificial Sequence
  Description of Artificial Sequence: Synthetic oligonucleotide
gaguccaggcauugccacu

SEQ ID NO: 3141189 - RNA, 19 nt, Artificial Sequence
  Description of Artificial Sequence: Synthetic oligonucleotide
cugggagaagugcacugcu

SEQ ID NO: 3141190 - RNA, 19 nt, Artificial Sequence
  Description of Artificial Sequence: Synthetic oligonucleotide
caacacacccugugauaua

SEQ ID NO: 3141191 - RNA, 19 nt, Artificial Sequence
  Description of Artificial Sequence: Synthetic oligonucleotide
caagaccagguugcuguaa

SEQ ID NO: 3141192 - RNA, 19 nt, Artificial Sequence
  Description of Artificial Sequence: Synthetic oligonucleotide
cugcuacaucucugaaugu

SEQ ID NO: 3141193 - RNA, 19 nt, Artificial Sequence
  Description of Artificial Sequence: Synthetic oligonucleotide
gcacugcuacaucucugaa

SEQ ID NO: 3141194 - RNA, 19 nt, Artificial Sequence
  Description of Artificial Sequence: Synthetic oligonucleotide
acacacccugugauauauu

SEQ ID NO: 3141195 - RNA, 19 nt, Artificial Sequence
  Description of Artificial Sequence: Synthetic oligonucleotide
ucucgaaacaaacaaacaa

SEQ ID NO: 3141196 - RNA, 19 nt, Artificial Sequence
  Description of Artificial Sequence: Synthetic oligonucleotide
aaccgcuacacagagaaac

SEQ ID NO: 3141197 - RNA, 19 nt, Artificial Sequence
  Description of Artificial Sequence: Synthetic oligonucleotide
ucaaccgcuacacagagaa

SEQ ID NO: 3141198 - RNA, 19 nt, Artificial Sequence
  Description of Artificial Sequence: Synthetic oligonucleotide
ucgaaacaaacaaacaaac

SEQ ID NO: 3141199 - RNA, 19 nt, Artificial Sequence
  Description of Artificial Sequence: Synthetic oligonucleotide
agagcaaauuccaaggggc

SEQ ID NO: 3141200 - RNA, 19 nt, Artificial Sequence
  Description of Artificial Sequence: Synthetic oligonucleotide
aagccaaagcuguuauccc

SEQ ID NO: 3141201 - RNA, 19 nt, Artificial Sequence
  Description of Artificial Sequence: Synthetic oligonucleotide
aauuccaaggggcaagcca

SEQ ID NO: 3141202 - RNA, 19 nt, Artificial Sequence
  Description of Artificial Sequence: Synthetic oligonucleotide
gugaguuccaggucaaccg

SEQ ID NO: 3141203 - RNA, 19 nt, Artificial Sequence
  Description of Artificial Sequence: Synthetic oligonucleotide
acagagcaaauuccaaggg

SEQ ID NO: 3141204 - RNA, 19 nt, Artificial Sequence
  Description of Artificial Sequence: Synthetic oligonucleotide
augccucuggucuacagag

SEQ ID NO: 3141205 - RNA, 19 nt, Artificial Sequence
  Description of Artificial Sequence: Synthetic oligonucleotide
cagagcaaauuccaagggg

SEQ ID NO: 3141206 - RNA, 19 nt, Artificial Sequence
  Description of Artificial Sequence: Synthetic oligonucleotide
uggugcaugccucuggucu

SEQ ID NO: 3141207 - RNA, 19 nt, Artificial Sequence
  Description of Artificial Sequence: Synthetic oligonucleotide
caggucaaccgcuacacag

SEQ ID NO: 3141208 - RNA, 19 nt, Artificial Sequence
  Description of Artificial Sequence: Synthetic oligonucleotide
aaauuccaaggggcaagcc

SEQ ID NO: 3141209 - RNA, 19 nt, Artificial Sequence
  Description of Artificial Sequence: Synthetic oligonucleotide
ugaguuccaggucaaccgc

SEQ ID NO: 3141210 - RNA, 19 nt, Artificial Sequence
  Description of Artificial Sequence: Synthetic oligonucleotide
cucgaaacaaacaaacaaa

SEQ ID NO: 3141211 - RNA, 19 nt, Artificial Sequence
  Description of Artificial Sequence: Synthetic oligonucleotide
agccaaagcuguuauccca

SEQ ID NO: 3141212 - RNA, 19 nt, Artificial Sequence
  Description of Artificial Sequence: Synthetic oligonucleotide
accgcuacacagagaaacc

SEQ ID NO: 3141213 - RNA, 19 nt, Artificial Sequence
  Description of Artificial Sequence: Synthetic oligonucleotide
cucuggucuacagagugag

SEQ ID NO: 3141214 - RNA, 19 nt, Artificial Sequence
  Description of Artificial Sequence: Synthetic oligonucleotide
auuccaaggggcaagccaa

SEQ ID NO: 3141215 - RNA, 19 nt, Artificial Sequence
  Description of Artificial Sequence: Synthetic oligonucleotide
ggucaaccgcuacacagag

SEQ ID NO: 3141216 - RNA, 19 nt, Artificial Sequence
  Description of Artificial Sequence: Synthetic oligonucleotide
aaggggcaagccaaagcug

SEQ ID NO: 3141217 - RNA, 19 nt, Artificial Sequence
  Description of Artificial Sequence: Synthetic oligonucleotide
gcaaauuccaaggggcaag

SEQ ID NO: 3141218 - RNA, 19 nt, Artificial Sequence
  Description of Artificial Sequence: Synthetic oligonucleotide
uccaaggggcaagccaaag

SEQ ID NO: 3141219 - RNA, 19 nt, Artificial Sequence
  Description of Artificial Sequence: Synthetic oligonucleotide
aggggcaagccaaagcugu

SEQ ID NO: 3141220 - RNA, 19 nt, Artificial Sequence
  Description of Artificial Sequence: Synthetic oligonucleotide
gccucuggucuacagagug

SEQ ID NO: 3141221 - RNA, 19 nt, Artificial Sequence
  Description of Artificial Sequence: Synthetic oligonucleotide
gucucgaaacaaacaaaca

SEQ ID NO: 3141222 - RNA, 19 nt, Artificial Sequence
  Description of Artificial Sequence: Synthetic oligonucleotide
agcaaauuccaaggggcaa

SEQ ID NO: 3141223 - RNA, 19 nt, Artificial Sequence
  Description of Artificial Sequence: Synthetic oligonucleotide
aggucaaccgcuacacaga

SEQ ID NO: 3141224 - RNA, 19 nt, Artificial Sequence
  Description of Artificial Sequence: Synthetic oligonucleotide
ugccucuggucuacagagu

SEQ ID NO: 3141225 - RNA, 19 nt, Artificial Sequence
  Description of Artificial Sequence: Synthetic oligonucleotide
uuccaaggggcaagccaaa

SEQ ID NO: 3141226 - RNA, 19 nt, Artificial Sequence
  Description of Artificial Sequence: Synthetic oligonucleotide
caaagcuguuaucccaaaa

SEQ ID NO: 3141227 - RNA, 19 nt, Artificial Sequence
  Description of Artificial Sequence: Synthetic oligonucleotide
guuccaggucaaccgcuac

SEQ ID NO: 3141228 - RNA, 19 nt, Artificial Sequence
  Description of Artificial Sequence: Synthetic oligonucleotide
ccgcuacacagagaaaccc

SEQ ID NO: 3141229 - RNA, 19 nt, Artificial Sequence
  Description of Artificial Sequence: Synthetic oligonucleotide
gcaugccucuggucuacag

SEQ ID NO: 3141230 - RNA, 19 nt, Artificial Sequence
  Description of Artificial Sequence: Synthetic oligonucleotide
gagugaguuccaggucaac

SEQ ID NO: 3141231 - RNA, 19 nt, Artificial Sequence
  Description of Artificial Sequence: Synthetic oligonucleotide
aguuccaggucaaccgcua

SEQ ID NO: 3141232 - RNA, 19 nt, Artificial Sequence
  Description of Artificial Sequence: Synthetic oligonucleotide
gcaagccaaagcuguuauc

SEQ ID NO: 3141233 - RNA, 19 nt, Artificial Sequence
  Description of Artificial Sequence: Synthetic oligonucleotide
gugcaugccucuggucuac

SEQ ID NO: 3141234 - RNA, 19 nt, Artificial Sequence
  Description of Artificial Sequence: Synthetic oligonucleotide
ugcaugccucuggucuaca

SEQ ID NO: 3141235 - RNA, 19 nt, Artificial Sequence
  Description of Artificial Sequence: Synthetic oligonucleotide
ggugcaugccucuggucua

SEQ ID NO: 3141236 - RNA, 19 nt, Artificial Sequence
  Description of Artificial Sequence: Synthetic oligonucleotide
gguggugcaugccucuggu

SEQ ID NO: 3141237 - RNA, 19 nt, Artificial Sequence
  Description of Artificial Sequence: Synthetic oligonucleotide
ggcaagccaaagcuguuau

SEQ ID NO: 3141238 - RNA, 19 nt, Artificial Sequence
  Description of Artificial Sequence: Synthetic oligonucleotide
gucaaccgcuacacagaga

SEQ ID NO: 3141239 - RNA, 19 nt, Artificial Sequence
  Description of Artificial Sequence: Synthetic oligonucleotide
caaccgcuacacagagaaa

SEQ ID NO: 3141240 - RNA, 19 nt, Artificial Sequence
  Description of Artificial Sequence: Synthetic oligonucleotide
ccucuggucuacagaguga

SEQ ID NO: 3141241 - RNA, 19 nt, Artificial Sequence
  Description of Artificial Sequence: Synthetic oligonucleotide
ccaaagcuguuaucccaaa

SEQ ID NO: 3141242 - RNA, 19 nt, Artificial Sequence
  Description of Artificial Sequence: Synthetic oligonucleotide
gggcaagccaaagcuguua

SEQ ID NO: 3141243 - RNA, 19 nt, Artificial Sequence
  Description of Artificial Sequence: Synthetic oligonucleotide
ccaggucaaccgcuacaca

SEQ ID NO: 3141244 - RNA, 19 nt, Artificial Sequence
  Description of Artificial Sequence: Synthetic oligonucleotide
ggggcaagccaaagcuguu

SEQ ID NO: 3141245 - RNA, 19 nt, Artificial Sequence
  Description of Artificial Sequence: Synthetic oligonucleotide
gcugggcaugguggugcau

SEQ ID NO: 3141246 - RNA, 19 nt, Artificial Sequence
  Description of Artificial Sequence: Synthetic oligonucleotide
aaauuaauuagaaaagggc

SEQ ID NO: 3141247 - RNA, 19 nt, Artificial Sequence
  Description of Artificial Sequence: Synthetic oligonucleotide
aaaauuaauuagaaaaggg

SEQ ID NO: 3141248 - RNA, 19 nt, Artificial Sequence
  Description of Artificial Sequence: Synthetic oligonucleotide
agcaugaaggcguacaugc

SEQ ID NO: 3141249 - RNA, 19 nt, Artificial Sequence
  Description of Artificial Sequence: Synthetic oligonucleotide
aauuaauuagaaaagggcu
